United States Patent Application Publication US 2021/0199660 A1 - sequence listing, part 13

SEQ ID NO: 174067 - DNA, 120 bp, Artificial Sequence
  ENSG00000109762_24 (sequence is synthesized)
tgttaatatgtgagaacctaggaagtattttaaatatttatgaaaatattttgttttaaaatgaactatgaatattgtacagttaatttcctcactgaggactgtgaacattcttatatt

SEQ ID NO: 174068 - DNA, 120 bp, Artificial Sequence
  ENSG00000109762_25 (sequence is synthesized)
atttcatgtatattgaagaacattgttatgcaatgctttgtgtaaagttattgtgaagattttattgtctttatttttaccaaagatttcccatagtttgagcattcaaagcaataaaat

SEQ ID NO: 174069 - DNA, 120 bp, Artificial Sequence
  ENSG00000109762_26 (sequence is synthesized)
ctgctcccggctgcctagggcggcgcgggtaggccccgttgttctcgtgcgttaatagggaaagctgccttgattatcttgtaattctctaccaaaccaagaataaaaaagaacggcggc

SEQ ID NO: 174070 - DNA, 120 bp, Artificial Sequence
  ENSG00000109762_27 (sequence is synthesized)
gaaaaaatgccatgtagcagattgggagaaattacctgattgttaactctctgaaaccttaaggggttaaccgctgtctcgctccattcctgctgctatgacaaaataccacaaactggg

SEQ ID NO: 174071 - DNA, 120 bp, Artificial Sequence
  ENSG00000109762_28 (sequence is synthesized)
gcgtcaggctggccaggcttcagtcacaacacggtggggctccctggctgcgcccggcccggcagctacgggcccagcgcctggtggcggcgctgaggggtcgccgagaggggcccggcg

SEQ ID NO: 174072 - DNA, 120 bp, Artificial Sequence
  ENSG00000109762_29 (sequence is synthesized)
gccgctccctcggtgggccgcgggcgaggcatgagcgcgggctccccctgcctccggagcgccggcgggggaccggggggcaggagatgtgcctgtccttagcggcccaggaagcagcat

SEQ ID NO: 174073 - DNA, 120 bp, Artificial Sequence
  ENSG00000109762_30 (sequence is synthesized)
ctgtccttagcggcccaggaagcagcatgcaccccgatgcgaccgacagtggcggcgccggccccagccccgcgcgggccgcaggcgccggcggccgtcctgtctcgggcttcaggggcg

SEQ ID NO: 174074 - DNA, 80 bp, Artificial Sequence
  ENSG00000109762_31 (sequence is synthesized)
gccccgggcggccggagctggtggaagcccgtggcggtggccgcactcgccgccgtggccctctccttcctggggcccgg

SEQ ID NO: 174075 - DNA, 120 bp, Artificial Sequence
  ENSG00000109762_32 (sequence is synthesized)
agcttaagtcacagctttaaaaataactaaattactttaaaatgcatgtttgaaaaaaagcagtgaatttaaaattatttacttcctgctgttttaagggagtgaaaaataaaaaataag

SEQ ID NO: 174076 - DNA, 120 bp, Artificial Sequence
  ENSG00000109762_33 (sequence is synthesized)
ttaaaagccttagttttgaaattcaaaatggttagaaaactattttattgtctattaattcactgattataatacagcgacagatttttttttaaattagcttattttaagccttgaata

SEQ ID NO: 174077 - DNA, 120 bp, Artificial Sequence
  ENSG00000109762_34 (sequence is synthesized)
aggctcgagaatcaagcttttctgaatctgtcctctgtgttgaaaatggtagtttctgcatgaaaactaaagaattaaggctaaaatacgagcagatagtttggaatttacacttgaaga

SEQ ID NO: 174078 - DNA, 120 bp, Artificial Sequence
  ENSG00000109762_35 (sequence is synthesized)
tttgtaaaagatcctcgggtgattttaacatgcagagaagcttgggaaccactgctgtaatatcagagtcagccaagggactcagaagactcccccactcaggctgaacaatctgtgttc

SEQ ID NO: 174079 - DNA, 120 bp, Artificial Sequence
  ENSG00000109762_36 (sequence is synthesized)
cacaaacactgctctaccaagtctgctatgatgtaattctgactcgtggatgtgatggacctaagatgtgcacagctttttggtttttctttttttaaaaaaaatctaaacttaagagtt

SEQ ID NO: 174080 - DNA, 120 bp, Artificial Sequence
  ENSG00000109762_37 (sequence is synthesized)
agtactcataatgatctcccttacaccccctccactaccacaccccttgctttttagtatttactttgagatgtgaaacgcatttgggatctaaataaattgatcacatggattaaaata

SEQ ID NO: 174081 - DNA, 120 bp, Artificial Sequence
  ENSG00000109771_0 (sequence is synthesized)
gcatcatggaatgatataaaaatgcagctttccaatcacactaagggtctctctatttcttctcttgaccaccaatcaggaacctttgctggaagcttgtttctgattggtgaaagtaag

SEQ ID NO: 174082 - DNA, 120 bp, Artificial Sequence
  ENSG00000109771_1 (sequence is synthesized)
ccataacagtggaatgccaaggagtaaatacaaaagtgtagcaacaactgagtttgctgtctcactaccctcagcctaggccaacctggactccttcaccccaaatgaggtgaccgctac

SEQ ID NO: 174083 - DNA, 120 bp, Artificial Sequence
  ENSG00000109771_2 (sequence is synthesized)
attttatatgaagacactgatttaccattcaactgtgatccatcttataacatggcaatccaatacagacaggaagataaaactcaacaacagctaaaataaagtgtattcccaggtaaa

SEQ ID NO: 174084 - DNA, 120 bp, Artificial Sequence
  ENSG00000109771_3 (sequence is synthesized)
atagacaagtgctttaatttgaaatggattcgtccgatgagtgtcagttacaagggcagagaaggtaccagtgcagaagagctctgactgtgggcagtgtcaccaggtcccactaagtgg

SEQ ID NO: 174085 - DNA, 120 bp, Artificial Sequence
  ENSG00000109771_4 (sequence is synthesized)
caacacttgtgctgggtgacttgacccatcttgatgtataaacccatagccagacaggacgtgcaaacaggtctcatggtgaatgcgatgctgtggaaaatgacatggagaatggctgtc

SEQ ID NO: 174086 - DNA, 120 bp, Artificial Sequence
  ENSG00000109771_5 (sequence is synthesized)
tctcagctagggaggagggtcttggtgtcctagtaaagaatgttcacgtcctggagttggtggttggtgttctatctaggcgatgagagaaggatgcttttcctaatgagcacctggtgg

SEQ ID NO: 174087 - DNA, 120 bp, Artificial Sequence
  ENSG00000109771_6 (sequence is synthesized)
gaatagagtctctctttgcacttcgctggaggaagaaatttctaccacttattttttcttcttgcttatagaatacacattgcagaaaaaggatgaagttgaccagtgaaaagttgccca

SEQ ID NO: 174088 - DNA, 120 bp, Artificial Sequence
  ENSG00000109771_7 (sequence is synthesized)
agaaccccttttatgcctctgtatctcagtatgctgctaaaaaccaaaaatttttccagtggaaaaaggaaaagactgattacacccatgctaatttggtggataaggcattgcagctct

SEQ ID NO: 174089 - DNA, 120 bp, Artificial Sequence
  ENSG00000109771_8 (sequence is synthesized)
tgaaggaaagaatactgaaaggagacactctggcatatttcctacgaggtcaactatattttgaagagggatggtatgaagaagcattagaacagtttgaagaaatcaaggagaaagacc

SEQ ID NO: 174090 - DNA, 120 bp, Artificial Sequence
  ENSG00000109771_9 (sequence is synthesized)
atcaagcaacttaccagctaggagtgatgtactatgatgggctggggaccactctagacgctgagaaaggggtggactatatgaagaaaattcttgattctccatgtcccaaagcaagac

SEQ ID NO: 174091 - DNA, 120 bp, Artificial Sequence
  ENSG00000109771_10 (sequence is synthesized)
acttaaaatttgcagctgcttacaacctcggaagagcttattatgaaggaaaaggtgttaaacgatcaaatgaggaagctgaaagactgtggcttatcgcagcagacaatggaaatccca

SEQ ID NO: 174092 - DNA, 120 bp, Artificial Sequence
  ENSG00000109771_11 (sequence is synthesized)
aagctagtgtgaaggctcaaagtatgctcgggctgtattactcaaccaaggagcccaaggagttagaaaaggcattttactggcattccgaagcatgtggcaatgggaatctggagtccc

SEQ ID NO: 174093 - DNA, 120 bp, Artificial Sequence
  ENSG00000109771_12 (sequence is synthesized)
agggtgcacttgggctcatgtacttgtatggacaaggcatccggcaggatacggaagctgccctgcagtgcttaagagaagcagcagaacgcggaaacgtctatgctcaagggaatctcg

SEQ ID NO: 174094 - DNA, 120 bp, Artificial Sequence
  ENSG00000109771_13 (sequence is synthesized)
tggagtattactataagatgaaattttttacaaagtgtgttgcattttccaaaaggatcgctgactatgatgaggttcacgacatccccatgatcgcccaggtcacagactgtctcccgg

SEQ ID NO: 174095 - DNA, 120 bp, Artificial Sequence
  ENSG00000109771_14 (sequence is synthesized)
agttcatcggcagaggcatggcaatggcatccttctaccacgcaaggtgtcttcagcttggcttgggcatcaccagggatgaaacaaccgctaaacactattattctaaagcttgtcgtc

SEQ ID NO: 174096 - DNA, 120 bp, Artificial Sequence
  ENSG00000109771_15 (sequence is synthesized)
tgaatcccgcattggcagatgaacttcactccttacttattcgtcaaagaatttagaccacaatgtatttcaacaaagatcatcaatgctaacacctcacaatgtgtgtatttttacagt

SEQ ID NO: 174097 - DNA, 120 bp, Artificial Sequence
  ENSG00000109771_16 (sequence is synthesized)
agctatgtttggttattttgcacatcacaaattacactatcctgggtattttacaggtgacatgttacttcgttcttgaattcgtacgctgttaagttttgcaacttgaaacctagacac

SEQ ID NO: 174098 - DNA, 120 bp, Artificial Sequence
  ENSG00000109771_17 (sequence is synthesized)
aaggtcaaattgctggaagagtcctcagaggtccacctcttaccctacagactggccgagaccatatcaagtattaaaaccattctatacagcaagtatcgtttatcctttcttaaacac

SEQ ID NO: 174099 - DNA, 120 bp, Artificial Sequence
  ENSG00000109771_18 (sequence is synthesized)
cgagtctccaaaaatacttagtttagctttagtttagtaagttcagaagtagaaacaaacttatttaaaaccatcatttgaaagtttaattctttaaatttgtctcttagttttgtgaat

SEQ ID NO: 174100 - DNA, 120 bp, Artificial Sequence
  ENSG00000109771_19 (sequence is synthesized)
ttttgtttcagtcatttaaaatttaaattttcagtcatttaaaattttaaaaatttaaaatttcacaaaactaagggtaaaagacatttaaagaattaaacttaaataagtgtgtgcagc

SEQ ID NO: 174101 - DNA, 120 bp, Artificial Sequence
  ENSG00000109771_20 (sequence is synthesized)
cttaaataagtgtgtgcagcatttctacttctgaagttattaaagctaaaactgcactaagccttttgagacatcctttattcttaaaaagctcataaataattggcttattacatataa

SEQ ID NO: 174102 - DNA, 120 bp, Artificial Sequence
  ENSG00000109771_21 (sequence is synthesized)
caaaaagcaattgctatatgaaaatattcgtaagaaaagtaaagcaaattgtttctttgtgcttcagctcattttccatatttttaaaaccctgtggtaaaagcctcaatgaaatcattt

SEQ ID NO: 174103 - DNA, 120 bp, Artificial Sequence
  ENSG00000109771_22 (sequence is synthesized)
acaagaactacaattaaatattgttaaaattagcaaaaggctttccgtatatagatgacatctatgaaggcaaaaggtgacagtaaaaacagtaagatccatatgcataagattgtacaa

SEQ ID NO: 174104 - DNA, 120 bp, Artificial Sequence
  ENSG00000109771_23 (sequence is synthesized)
ggctattcatttgtgaaacaaatatacatatcgaagacaggtctcagagataccttaactattcctttttttataaacatattaaaggatgtggctttattttataaatcacaaccatcc

SEQ ID NO: 174105 - DNA, 120 bp, Artificial Sequence
  ENSG00000109771_24 (sequence is synthesized)
caacagtggatttaaacaagatttctttttagtaatgggaaaatgcaattaatatggaggtgatagtcactaagaactgttgaatggcagaaaagtatttgctctcgttttatgttctgg

SEQ ID NO: 174106 - DNA, 120 bp, Artificial Sequence
  ENSG00000109771_25 (sequence is synthesized)
cttgtctgtattgcctgaacttcattttgtctttgtgtaagggaagaaatttcaacagactcgggtttgagatatcctcaaatggtcatgtatttctgtctcaaatctcttaataccacc

SEQ ID NO: 174107 - DNA, 120 bp, Artificial Sequence
  ENSG00000109771_26 (sequence is synthesized)
cttaataccacccatgtaacattccttcaaccacttgaagatccaaattcccaactagtattctcttctccacacttaatccagttcctaaagattattattattattattattattatt

SEQ ID NO: 174108 - DNA, 86 bp, Artificial Sequence
  ENSG00000109771_27 (sequence is synthesized)
tctaaaaagaatcttaaaataggaacataataaaagatcggccctaagtaaagagcactttttaaactgccattaaagatgggttt

SEQ ID NO: 174109 - DNA, 120 bp, Artificial Sequence
  ENSG00000109771_28 (sequence is synthesized)
agtaaagagcactttttaaactgccattaaagatgggtttcagaaatcataaactttgacgtgtgccatacatggtaacatgctatgcttatatgtcttctataaatccaatgcagaatt

SEQ ID NO: 174110 - DNA, 120 bp, Artificial Sequence
  ENSG00000109771_29 (sequence is synthesized)
taaaatttcagtttactctagttaccataaagctaatgctctggcacaagcgagtccctgcaaactaccactgctgaggacagtagtaaaccccttgacctgagactgcggtgagtctgt

SEQ ID NO: 174111 - DNA, 85 bp, Artificial Sequence
  ENSG00000109771_30 (sequence is synthesized)
tccttctctaagattccttgtagctgatatctcatggaaaaatgacattttatcataaataaatatagagacaaaataatagtga

SEQ ID NO: 174112 - DNA, 120 bp, Artificial Sequence
  ENSG00000109771_31 (sequence is synthesized)
cattttatcataaataaatatagagacaaaataatagtgatctttctcattcgcaatgtaaacttaacagctacagtttaaatgatagcatagaattatgcctaaaatagacatttccca

SEQ ID NO: 174113 - DNA, 120 bp, Artificial Sequence
  ENSG00000109771_32 (sequence is synthesized)
taattgtattgtgataagttcttcaggcttgacaacttcacattgcctctcttccttgaatgtattttatctggtcttttctatatagtcttttgaaggataatttttatcaatagccaa

SEQ ID NO: 174114 - DNA, 120 bp, Artificial Sequence
  ENSG00000109771_33 (sequence is synthesized)
ctttgggtatttttttaagtgtcaaatatcatcatggtttgaaaaaaggataaaaaagctataactaaaaaaatcttaaggataacatttggtttactaatttttaatcatttatctttc

SEQ ID NO: 174115 - DNA, 120 bp, Artificial Sequence
  ENSG00000109771_34 (sequence is synthesized)
agaacttgtttcttatcaagaagttagcaggtatgatatgtatatcatacgtatataaactggcataggttacatcctagggcatgaggggagtatctttcagggattcaaatggaattt

SEQ ID NO: 174116 - DNA, 120 bp, Artificial Sequence
  ENSG00000109771_35 (sequence is synthesized)
ttacctgttacttgtttaattgttttgttttcaatattcttggggattagacaggggaaggtattttattactgcataatagatggtgaaacccaggaaaattaagtacttgtgcatggc

SEQ ID NO: 174117 - DNA, 120 bp, Artificial Sequence
  ENSG00000109771_36 (sequence is synthesized)
cccactatcaataacacaaagtctgtactctggatctcccctaatgtccctgtggtctaaacggcttgataatacaaccgagcccctgaagtagctgccctcctctttccgctcccccat

SEQ ID NO: 174118 - DNA, 120 bp, Artificial Sequence
  ENSG00000109771_37 (sequence is synthesized)
ctcggccctgcccatactccaagggtcagctcccatctctcctccctaatgcctcacttcaagcactaatttggctctttctgctcactaaaaatcatatattttacagatttattttgt

SEQ ID NO: 174119 - DNA, 120 bp, Artificial Sequence
  ENSG00000109771_38 (sequence is synthesized)
ttctggagaaggcagcaaacttttacttccctgcagaagtagttaagtacatagtgttttctctaaaaaggcatttgataaatatttgaacagcctgtagagtttcaacctctttgagat

SEQ ID NO: 174120 - DNA, 120 bp, Artificial Sequence
  ENSG00000109771_39 (sequence is synthesized)
ataagtatcttaaatatcatagagcactgtgattcatttttatattttattgctttgaatgctcaaactatgggaaatctttggtaaaaataaagacaataaaatcttcacaataacttt

SEQ ID NO: 174121 - DNA, 120 bp, Artificial Sequence
  ENSG00000109771_40 (sequence is synthesized)
aaggatctgcttagaaaccaaagctccagccgagtgtttcttttcccctacatttttagtgattcccttctgttgatgcctttgaaagctcggagaaataaatacgtttattgttatgct

SEQ ID NO: 174122 - DNA, 120 bp, Artificial Sequence
  ENSG00000109771_41 (sequence is synthesized)
gttagaaaacaagttcatgcttgtcctctaaagataagtggtcttttcattctactttttgttttgtagtaagagccataaaatttgcaatcgcaagtttatgttgttatacttagttac

SEQ ID NO: 174123 - DNA, 120 bp, Artificial Sequence
  ENSG00000109771_42 (sequence is synthesized)
ccaaggggtagttttaagcatttttattcatatgaatatttgaatataaatgtgtgttcaaatatatagaatcgttcttatattccacatttttaatatttaaactattcacaatatctt

SEQ ID NO: 174124 - DNA, 120 bp, Artificial Sequence
  ENSG00000109771_43 (sequence is synthesized)
ttaatgatgtttaaagaacggcagtgtagagatactgttgtcagatttgtgaggtgagcacacgttgatattgccagtttcgcttttgtttatcaattcaataagcactgctttttaaaa

SEQ ID NO: 174125 - DNA, 120 bp, Artificial Sequence
  ENSG00000109771_44 (sequence is synthesized)
cacgtgttgaagcttcaggtttgcacagaagttcattttcaggaattcctaactaataaagggtatcagacacgttcttacagttttgaacataaatactgcagttagcatatgtagtgg

SEQ ID NO: 174126 - DNA, 120 bp, Artificial Sequence
  ENSG00000109771_45 (sequence is synthesized)
gatatttgtgtggtgaaagtgcctccatatttcatatcttttctttgaaacaagattctgttcagtatgcattaagtggtagttattttttaacttcctgttacatacgtaaatttcata

SEQ ID NO: 174127 - DNA, 120 bp, Artificial Sequence
  ENSG00000109771_46 (sequence is synthesized)
aggaaaggaaatttggggagtcgttacagcttttctccctttaatcacagcgtacctgtccattgctcacattgttttcagaaaaaaaagttgtatctcagctggatatctgacttgact

SEQ ID NO: 174128 - DNA, 120 bp, Artificial Sequence
  ENSG00000109771_47 (sequence is synthesized)
ttagtaatgggcctagaaactataaactgaacaaagcttataatgcacaaaaacaggataagtacatttgggggacaatatcttactggcaagtaactggagtttcaccaggcgtgtagc

SEQ ID NO: 174129 - DNA, 120 bp, Artificial Sequence
  ENSG00000109771_48 (sequence is synthesized)
aggtgggatcaattttctaaaacggaagatgatctaagatgcatattttataggcgttctcctaagcagtgctaattctacatgttttaattgctggtagatgcgtttccagaacgagga

SEQ ID NO: 174130 - DNA, 120 bp, Artificial Sequence
  ENSG00000109771_49 (sequence is synthesized)
ttcccttggaaaacactttaacagttcattttgcatgctagagcaaacgagacaagaaataatgtgttttattgatttcaaggaagtggttaatcattagtccttttgagttttcccgca

SEQ ID NO: 174131 - DNA, 120 bp, Artificial Sequence
  ENSG00000109771_50 (sequence is synthesized)
agaatctgtgaaattgctcatttatctggtagcaaatcgtcagtgaggtctcacagatagttaggtcttgattttactctcaggacttaaggacatgcttctagaaaacagaaagcagat

SEQ ID NO: 174132 - DNA, 120 bp, Artificial Sequence
  ENSG00000109771_51 (sequence is synthesized)
gtcacgtttgttaaagagaacaatgccaggcttgacttgcaattattatttaaataccttatcttccctaaagtcttaaaaatgttatattagggatgggttgctcatttggttagagga

SEQ ID NO: 174133 - DNA, 120 bp, Artificial Sequence
  ENSG00000109771_52 (sequence is synthesized)
actctcattaaggctcaaattaagaatttaactcacctctccagagagctttgcccattgaagacaaaccaatgcatagacttatacccagccctgcactgttagggctctacttggcca

SEQ ID NO: 174134 - DNA, 120 bp, Artificial Sequence
  ENSG00000109771_53 (sequence is synthesized)
tcgctcttgttgcccaggcttgagtgcagtgatgcaatcttggctcaccgcagcctccgcctcctggggtcaagctattctcctgcctgagtctcccgagtagctgggattataggcatg

SEQ ID NO: 174135 - DNA, 120 bp, Artificial Sequence
  ENSG00000109771_54 (sequence is synthesized)
aggcgtgagccaccgcgcccggccagtattgctttattacacaaggcacagtgttagggcctgtgaccatgacgttttttcaggtaatatttcttccttgagctaaggaggccagttgta

SEQ ID NO: 174136 - DNA, 120 bp, Artificial Sequence
  ENSG00000109771_55 (sequence is synthesized)
cttgagctaaggaggccagttgtaggaatgagcactagaaagcaagaatgtcaacagtgttagatggattttatatgattcattacttcaagagagaaaattcatattgtgtggttgatg

SEQ ID NO: 174137 - DNA, 120 bp, Artificial Sequence
  ENSG00000109775_0 (sequence is synthesized)
gccccgcccctgggccgtgcggtgacaccacttcagggccggcccccggaacttttgggcaggcgtcagcgcccgtgtcaccgccacgtcgcggacatggtgatttcagaaagtatggat

SEQ ID NO: 174138 - DNA, 120 bp, Artificial Sequence
  ENSG00000109775_1 (sequence is synthesized)
atactcttcagaataagaggaggccttgatttggcttttcagctagctactcctaatgaaatttttctcaagaaggcactgaaacatgtgttgagtgacctgtcaactaagctgtcttca

SEQ ID NO: 174139 - DNA, 120 bp, Artificial Sequence
  ENSG00000109775_2 (sequence is synthesized)
aacgcccttgtgttcagaatttgccacagttcagtgtatatatggcctagcagtgacataaacaccattcctggagaactgactgatgcttctgcttgtaagaacatactgcgctttatt

SEQ ID NO: 174140 - DNA, 120 bp, Artificial Sequence
  ENSG00000109775_3 (sequence is synthesized)
caatttgagccagaagaagatataaaaagaaaattcatgagaaagaaggacaaaaagttatcagacatgcatcaaatagtaaatatagatcttatgctggaaatgtcaacctccctggca

SEQ ID NO: 174141 - DNA, 120 bp, Artificial Sequence
  ENSG00000109775_4 (sequence is synthesized)
gctgtaacgcccatcattgaaagggaaagcggaggacaccattatgttaatatgactttacctgtcgatgcagttatatctgttgctccagaagaaacatggggaaaagttcgtaaactc

SEQ ID NO: 174142 - DNA, 120 bp, Artificial Sequence
  ENSG00000109775_5 (sequence is synthesized)
ctggttgatgcaattcataatcaactaactgacatggaaaaatgtattttgaaatatatgaaaggaacatctattgtggtccctgaaccactgcactttttattaccagggaaaaaaaat

SEQ ID NO: 174143 - DNA, 120 bp, Artificial Sequence
  ENSG00000109775_6 (sequence is synthesized)
cttgtaacaatttcatatccttcaggaataccagatggccagctgcaggcctataggaaggagttacatgatcttttcaatctgcctcacgacagaccctatttcaaaaggtctaatgct

SEQ ID NO: 174144 - DNA, 120 bp, Artificial Sequence
  ENSG00000109775_7 (sequence is synthesized)
tatcactttccagatgagccatacaaagatggttacattagaaatccacatacttaccttaatccacctaacatggagactggtatgatttatgtggtccagggcatatatggctatcat

SEQ ID NO: 174145 - DNA, 120 bp, Artificial Sequence
  ENSG00000109775_8 (sequence is synthesized)
cattatatgcaggatcgcatagatgacaatggctggggctgtgcttatcgatctctgcagactatctgctcttggttcaaacatcagggatacacagagaggtccattccaacacacaga

SEQ ID NO: 174146 - DNA, 120 bp, Artificial Sequence
  ENSG00000109775_9 (sequence is synthesized)
gtgcagctggtactaaaccaattgatcggtataacgtcaaaaatcctgtttgtcagccaaggttcagaaattgcctctcaaggacgggaactggctaatcatttccaaagtgaaggaact

SEQ ID NO: 174147 - DNA, 120 bp, Artificial Sequence
  ENSG00000109775_10 (sequence is synthesized)
ccagttatgatcgggggaggagttttggcccacacaatactaggagttgcatggaatgagattacagggcagataaagtttctgattctagatccacattataccggtgctgaagacctg

SEQ ID NO: 174148 - DNA, 120 bp, Artificial Sequence
  ENSG00000109775_11 (sequence is synthesized)
caagttattttggaaaagggctggtgcggatggaagggcccagatttttggaacaaggatgcatactataacttatgtcttcctcagcgaccaaatatgatttaaaatatcttggagtca

SEQ ID NO: 174149 - DNA, 120 bp, Artificial Sequence
  ENSG00000109775_12 (sequence is synthesized)
aagactgcagtagagtggtattataaatttgtgaataaagaatcagtttaatttttcacattaaatcctggttctagtttgacgatttaaattatgacctttttcaaaggttgtaaatac

SEQ ID NO: 174150 - DNA, 120 bp, Artificial Sequence
  ENSG00000109775_13 (sequence is synthesized)
tgcacggagaatgtattttttagacgttcctttaataacttaaaagacaaagcatacacaaccagcatattataggcatgtaaatacatgtgttcttaaatggatcttcacttggaagaa

SEQ ID NO: 174151 - DNA, 120 bp, Artificial Sequence
  ENSG00000109775_14 (sequence is synthesized)
agtttttcgtccttctcagaaggagattagacacaacatatggtaaagccaaaagcaggagcttatagatttgcatgaaatgaaggcgttcttcagacttcttcataacccacgtgacat

SEQ ID NO: 174152 - DNA, 120 bp, Artificial Sequence
  ENSG00000109775_15 (sequence is synthesized)
ctgtttttaaaaacacgttaacattaaaaacttttttttaaaaagagttttatccccaaacttccaccatgcagtcccatttttggtctctagactctggtaagtataaccagtactaaa

SEQ ID NO: 174153 - DNA, 120 bp, Artificial Sequence
  ENSG00000109775_16 (sequence is synthesized)
atgttaatgagaatgaaacaatactactagaaatacgagtgtcagtattaaatggaataataaatgctatgcaaacaagagatcactgcgggaggaaaaaagcagcagctctgagttact

SEQ ID NO: 174154 - DNA, 120 bp, Artificial Sequence
  ENSG00000109775_17 (sequence is synthesized)
taccagcacttccttttcccactggtattttctacacttccgagactccgtttctgtctgagcacggcaacacaatcattcctgtcagggtgttcacttgcttttattgtctgcatacat

SEQ ID NO: 174155 - DNA, 120 bp, Artificial Sequence
  ENSG00000109775_18 (sequence is synthesized)
ttaattgttgtaagaaacttggcacagtctggaaatccacatgaccaagcgagatcttcagctgtttgcccgttcttattacataaactgaaaacaggataaaaacggagtgaaatgaaa

SEQ ID NO: 174156 - DNA, 120 bp, Artificial Sequence
  ENSG00000109775_19 (sequence is synthesized)
gttggtccgcccgggccccgcccctgggccgtgcggtgacaccacttcagggccggcccccggaacttttgggcaggcgtcagcgcccgtgtcaccgccacgtcgcggacatgaaagtat

SEQ ID NO: 174157 - DNA, 120 bp, Artificial Sequence
  ENSG00000109775_20 (sequence is synthesized)
ctgagcaccaaggtgatgttttaacttcatgttaaaaacccaggcctcctttatacagttcaagaagcagaaaatcaaggtcttttagcgtcttatctagcacacttggtggccttaagt

SEQ ID NO: 174158 - DNA, 120 bp, Artificial Sequence
  ENSG00000109775_21 (sequence is synthesized)
attttgagtttatgttgctttaaattgcacagtttaattgctctcagttccctaacacttaatttttttacatttatatattttttcagtaacacccgaaaaaacaagaaagtaggaaac

SEQ ID NO: 174159 - DNA, 120 bp, Artificial Sequence
  ENSG00000109787_0 (sequence is synthesized)
agagcgagcggcgccggcgtcatgtgactgcccggagttggtgccaggagccagaggggagccaggagcggagccgcgcggagccggggcccgagccggagcgcagcgagagcgcccgcc

SEQ ID NO: 174160 - DNA, 120 bp, Artificial Sequence
  ENSG00000109787_1 (sequence is synthesized)
gcacgcgcgcccgtccccgtcccctgcggccgccaacgccgcccggactggagccctgacattgctgcgctcggggggctccaggcagcccgtatcggggcctttatttctcgtcggcgg

SEQ ID NO: 174161 - DNA, 120 bp, Artificial Sequence
  ENSG00000109787_2 (sequence is synthesized)
cgccctgcaccgcgcctcgcaaagccaaacaccagagcaccctagaaggtttaactaaaagaatgctcatgtttgacccagttcctgtcaagcaagaggccatggaccctgtctcagtgt

SEQ ID NO: 174162 - DNA, 120 bp, Artificial Sequence
  ENSG00000109787_3 (sequence is synthesized)
catacccatctaattacatggaatccatgaagcctaacaagtatggggtcatctactccacaccattgcctgagaagttctttcagaccccagaaggtctgtcgcacggaatacagatgg

SEQ ID NO: 174163 - DNA, 120 bp, Artificial Sequence
  ENSG00000109787_4 (sequence is synthesized)
agccagtggacctcacggtgaacaagcggagttcacccccttcggctgggaattcgccctcctctctgaagttcccgtcctcacaccggagagcctcgcctgggttgagcatgccttctt

SEQ ID NO: 174164 - DNA, 120 bp, Artificial Sequence
  ENSG00000109787_5 (sequence is synthesized)
ccagcccaccgataaaaaaatactcacccccttctccaggcgtgcagcccttcggcgtgccgctgtccatgccaccagtgatggcagctgccctctcgcggcatggaatacggagcccgg

SEQ ID NO: 174165 - DNA, 120 bp, Artificial Sequence
  ENSG00000109787_6 (sequence is synthesized)
ggatcctgcccgtcatccagccggtggtggtgcagcccgtcccctttatgtacacaagtcacctccagcagcctctcatggtctccttatcggaggagatggaaaattccagtagtagca

SEQ ID NO: 174166 - DNA, 120 bp, Artificial Sequence
  ENSG00000109787_7 (sequence is synthesized)
tgcaagtacctgtaattgaatcatatgagaagcctatatcacagaaaaaaattaaaatagaacctgggatcgaaccacagaggacagattattatcctgaagaaatgtcaccccccttaa

SEQ ID NO: 174167 - DNA, 120 bp, Artificial Sequence
  ENSG00000109787_8 (sequence is synthesized)
tgaactcagtgtcccccccgcaagcattgttgcaagagaatcacccttcggtcatcgtgcagcctgggaagagacctttacctgtggaatccccggatactcaaaggaagcggaggatac

SEQ ID NO: 174168 - DNA, 120 bp, Artificial Sequence
  ENSG00000109787_9 (sequence is synthesized)
acagatgtgattatgatggatgcaacaaagtgtacactaaaagctcccacttgaaagcacacagaagaacacacacaggagaaaaaccctacaaatgtacatgggaagggtgcacatgga

SEQ ID NO: 174169 - DNA, 120 bp, Artificial Sequence
  ENSG00000109787_10 (sequence is synthesized)
agtttgctcggtctgatgaactaacaagacatttccgaaaacatactggaatcaaacctttccagtgcccggactgtgaccgcagcttctcccgttctgaccatcttgccctccatagga

SEQ ID NO: 174170 - DNA, 120 bp, Artificial Sequence
  ENSG00000109787_11 (sequence is synthesized)
aacgccacatgctagtctgattgcctctgtgtcctgcctcagcgtgactccccactcacctggctctctctctgtcctgcctcccattatctaacacattttttacatgtacattttaat

SEQ ID NO: 174171 - DNA, 120 bp, Artificial Sequence
  ENSG00000109787_12 (sequence is synthesized)
ttgattcagctggtctgaatctctgaatttatatcatccaaaacttccatatggtcagtagtagatgttctctaatcctccctctccttaccacgggtcagacctaaagaatgtgaacac

SEQ ID NO: 174172 - DNA, 120 bp, Artificial Sequence
  ENSG00000109787_13 (sequence is synthesized)
ttttttttttttttctggggatgctaagcaaacccttcttacagatacgtttaatgtaataagaacaagggaacatgtaaactaacataaccaattgtcagttctccatgtattcctcaa

SEQ ID NO: 174173 - DNA, 120 bp, Artificial Sequence
  ENSG00000109787_14 (sequence is synthesized)
aagaatgtcagagtaaatgtattagaaatacagtatccagactgctagtccttgccagagacattcttacctctgccctgtgataatattttatgcttgacagtgaaaacaagtgtggcc

SEQ ID NO: 174174 - DNA, 120 bp, Artificial Sequence
  ENSG00000109787_15 (sequence is synthesized)
ccttgcaccggttagctagaagtacagccagatttcaagctagtgcagtcacctcttccgtcattcttcacaaatcttgtcaacctggatcttagacttcatctgaatcgagttctttgc

SEQ ID NO: 174175 - DNA, 120 bp, Artificial Sequence
  ENSG00000109787_16 (sequence is synthesized)
cctcctttgtgcctgcagctcatatggaggtctttgccaccaatgggagatgagcccaaactttcgatctaggtgggtgatgtgtagcagttcaagggaagggtgctgtgttttcatagc

SEQ ID NO: 174176 - DNA, 120 bp, Artificial Sequence
  ENSG00000109787_17 (sequence is synthesized)
atggagtcggaggagagggccatttagcagggggagcagaagaggcaattcctcctgggctaggggttgtcagtgaggtttcaacattttgttagctgtgtgcagcattcccagagcttc

SEQ ID NO: 174177 - DNA, 120 bp, Artificial Sequence
  ENSG00000109787_18 (sequence is synthesized)
agtctctgtgcatactcagctttgtagaaccatgctgcaaagccatataccgatggggttatccatgcaactatctccattcctacaatgtccttaatatgagatcatcaaacattgata

SEQ ID NO: 174178 - DNA, 120 bp, Artificial Sequence
  ENSG00000109787_19 (sequence is synthesized)
gtagggactccatggaatatttgcccagtaatggtaagaaatctttcgggtaagagtatggatggttcttcttttacccaatctgcttatagctttttttgtaaacagggaaatgttgag

SEQ ID NO: 174179 - DNA, 120 bp, Artificial Sequence
  ENSG00000109787_20 (sequence is synthesized)
tggtacttgtattcccttatcaaattaatcacatagcttttatacagaaactcttcctgtgtgagctgttaaggtgccaaattggctgtcatttgtattcatgacacataccataaagca

SEQ ID NO: 174180 - DNA, 120 bp, Artificial Sequence
  ENSG00000109787_21 (sequence is synthesized)
tctgctaatgctttaatggattgattcaattaagacctgagtgacactatttgtaaatataactagttgtgaagcacacatacctttattttgggaatttatgagaaaatatagaaaacc

SEQ ID NO: 174181 - DNA, 120 bp, Artificial Sequence
  ENSG00000109787_22 (sequence is synthesized)
acagatcagggattcatatatgtagctcaaaaattcccaaaagtttactgttagagttggcaatttcctatcactatttcagtgtcagaacaaactgaaaataatggctcgtgtttatgt

SEQ ID NO: 174182 - DNA, 120 bp, Artificial Sequence
  ENSG00000109787_23 (sequence is synthesized)
taaaaataattcatacatagaaatgtcattggtcctgaatttgaagaaagtgagcaacagtagttaaatgtgggtgcatataaccaaattccccttcatcaagaatggaggagaagagag

SEQ ID NO: 174183 - DNA, 120 bp, Artificial Sequence
  ENSG00000109787_24 (sequence is synthesized)
aagaatgaaatcctgaagattcatcccagccgcaactcaggatccaacacaactttaactgggaggaatacattgtttgatcatttttaaaacatctgtgaatgagtgattccggaggcc

SEQ ID NO: 174184 - DNA, 120 bp, Artificial Sequence
  ENSG00000109787_25 (sequence is synthesized)
tgtgaattgtgtggggagcttgctttgatggcactgtgttaataaaagttgtagggactgtgcacctaagaggctaagaggtcccactcatccgccctgtgaaccagctgtaaagaaatg

SEQ ID NO: 174185 - DNA, 120 bp, Artificial Sequence
  ENSG00000109787_26 (sequence is synthesized)
tagttaagaaatgcaaagaaatgtgttatcttggcacttgggtttgattttcctttttttaaagcactgcaaaacttctttaggatactaaaacatcctaattgggctgtttttttgttt

SEQ ID NO: 174186 - DNA, 120 bp, Artificial Sequence
  ENSG00000109787_27 (sequence is synthesized)
tgttttgtttttcagctaaaggcaaagataatttttttttcagctgaagtttttcttttttgcaactatgacatgaattgagtgataaaatggctctttgaaaagtagatattgtctgta

SEQ ID NO: 174187 - DNA, 120 bp, Artificial Sequence
  ENSG00000109787_28 (sequence is synthesized)
ttgtaaatgcttagtcatattcatggcaaagtgttcatttcttgagatggttctttcacaacacacaagaatcaagatggaacgcaaggaaaatctttttgttttgaccgaggtaaccag

SEQ ID NO: 174188 - DNA, 120 bp, Artificial Sequence
  ENSG00000109787_29 (sequence is synthesized)
tttatgtgtgttccaatccatagagaagtgggggaaagggcgagaaaggatcagattgatctgggatcagctttgagcctgagttcagtgaatagcctcatgggcatctcatggaattga

SEQ ID NO: 174189 - DNA, 120 bp, Artificial Sequence
  ENSG00000109787_30 (sequence is synthesized)
tgcatttgctgtggcatatttaaattttgttcaaaagatttgaagcaagaccttgcaaagactcttaacattactgttcagcttgcttagattgtgttaacagttcatttaacaaagatc

SEQ ID NO: 174190 - DNA, 120 bp, Artificial Sequence
  ENSG00000109787_31 (sequence is synthesized)
cgttttaactctgaacaaaagcaacccagagcggccattctctattcccatgctggtcaatacgctttcattaccaattggcccttaccaaacttttcttatatatatatttgtatttta

SEQ ID NO: 174191 - DNA, 120 bp, Artificial Sequence
  ENSG00000109787_32 (sequence is synthesized)
ctatgatagttgagaaatttagcctcttagtcatttttagctgttattgtggaagacctcaaatacaagattagatgcccttgaacatgttttaatgatgtgtgtcatgttactatcaat

SEQ ID NO: 174192 - DNA, 120 bp, Artificial Sequence
  ENSG00000109787_33 (sequence is synthesized)
ggtgatttcaatcgcaatattttaaattgatgagaatgatttgtaaacatgaagttactattacgtaaattctgtttgttatagagtttcttcagttgttacccaagtgtcatcctagag

SEQ ID NO: 174193 - DNA, 120 bp, Artificial Sequence
  ENSG00000109787_34 (sequence is synthesized)
aagtcagaagaatcagaatccatcgtattttagagttatgtgaatctacatcataaatgggcattaacattctaaattgcttggtttggagaatgtgttagcagcatagctatattcaac

SEQ ID NO: 174194 - DNA, 120 bp, Artificial Sequence
  ENSG00000109787_35 (sequence is synthesized)
tagggagatgctaaatacacagaagtttcaagagccttggaacagaattacaggggaactatatatgtatatgtatattttattaaacacccatctgcactatcagtattgcactaatgt

SEQ ID NO: 174195 - DNA, 120 bp, Artificial Sequence
  ENSG00000109787_36 (sequence is synthesized)
ggaatttgaaagactattttgctgatactgtatatatgcgcatcattcctgattagattgttgtaaagacaatctgaaagatctaaggttttaaaataatttggtttgaaaatatacagt

SEQ ID NO: 174196 - DNA, 120 bp, Artificial Sequence
  ENSG00000109787_37 (sequence is synthesized)
tgtcttgaaggaattgctgtcatacatgaagttgctccgagctgtctttattctcttcttggtcaaggttaacaattgctaaatgatcgcaaattcacctaaacaatacatttacaaagc

SEQ ID NO: 174197 - DNA, 120 bp, Artificial Sequence
  ENSG00000109787_38 (sequence is synthesized)
catctttacatgcattaaacgagggctacaacaatattgttttacaaatactagcacttttttttctgttatgtacttagtgttagagggtcaaaataatctttctgcttagcatctctt

SEQ ID NO: 174198 - DNA, 120 bp, Artificial Sequence
  ENSG00000109787_39 (sequence is synthesized)
aaaccatacctgcaaatatagcaggattattacatttacagtactttaatacttgtataaactatgcagaaatttttaataaagtgtaatatattttataagctaataagactgaatggg

SEQ ID NO: 174199 - DNA, 120 bp, Artificial Sequence
  ENSG00000109787_40 (sequence is synthesized)
taaaggtttttagcatgcattagtatacttgcagatactgaaacattttggtaatctttcttactaaagatgtgaatgtttaatgtaccttctctgtttctactctgtagtccaatggga

SEQ ID NO: 174200 - DNA, 120 bp, Artificial Sequence
  ENSG00000109787_41 (sequence is synthesized)
attcagtaatgacattttgtcatgtcaaactgtgaacataaatttgtactgtacagtcctcatatactatatacagtatgcaatatatattatatacttgttaataaaaccatcagaata

SEQ ID NO: 174201 - DNA, 120 bp, Artificial Sequence
  ENSG00000109787_42 (sequence is synthesized)
ttaaatgtgatcatgtgattacttcatatgcagtgatcactagagcaaaacttacagagcaatgtaagaacccttgcttagaacattacttactctgatgggcagttattgttgatggag

SEQ ID NO: 174202 - DNA, 120 bp, Artificial Sequence
  ENSG00000109787_43 (sequence is synthesized)
ggacagaaaaatagatctaactggaagatgaactaccggaattaactcagccctcaagctatgtccctggttttctgaaaacagccaacaggaagtctcctaggctgaaatcataaaact

SEQ ID NO: 174203 - DNA, 120 bp, Artificial Sequence
  ENSG00000109787_44 (sequence is synthesized)
gcagacaatccagcaaaaatctacaaactcacctagttcattcttgaaatacttcttgtatttgttatttatgaacccctgcctgcttccaaaaagaacttgcagcattttgtattaaaa

SEQ ID NO: 174204 - DNA, 120 bp, Artificial Sequence
  ENSG00000109787_45 (sequence is synthesized)
gacgcatgtgtataatactttaaacttttagagtaaaatatcaagactctcatgttggggagtggggaacgaggaacagaacaataacgcattaaagtaaataactctggataaaagtaa

SEQ ID NO: 174205 - DNA, 120 bp, Artificial Sequence
  ENSG00000109787_46 (sequence is synthesized)
tagtagtgtgcatcttggaacctggagcagaagcacaagatttcacacgtgtgatgtggtgtggatgaccaggaacggcttgtgatctgtggccgccactggtccagtaccactggtcaa

SEQ ID NO: 174206 - DNA, 120 bp, Artificial Sequence
  ENSG00000109787_47 (sequence is synthesized)
gatgggagaatctctccaaaaacaatatgctgttacactgacaacgttatgacaaaagttacatcaagttttcatggaatcagtcatccatgattttgcaccttaccacatgaattattt

SEQ ID NO: 174207 - DNA, 120 bp, Artificial Sequence
  ENSG00000109787_48 (sequence is synthesized)
ttgttttttttccattcttccaggctatgtatacttagtttttccattatgagaatccttgtatagattaaacttggtgttctgtggatcatgtaaagttttcatgtggacacacatagt

SEQ ID NO: 174208 - DNA, 120 bp, Artificial Sequence
  ENSG00000109787_49 (sequence is synthesized)
ccttacagagtgtatagtatcctgtagaattgctatccagtaggaaggctgtgcagtgttggtcagcatccaagcacctgaatggtggtttcttgtaggtctaacatggtataatgtggt

SEQ ID NO: 174209 - DNA, 120 bp, Artificial Sequence
  ENSG00000109787_50 (sequence is synthesized)
agttgccacacacagcttcagtaacctcatttgtgggatcctgctgtagataaccttgacctccaccagtgattacactgaaggctgggtttgtagttgctaagaagatggttttcgggt

SEQ ID NO: 174210 - DNA, 120 bp, Artificial Sequence
  ENSG00000109787_51 (sequence is synthesized)
ccaacaaggatcccacctctgctctctgccatatgtatgatcttggactagtcacttaatcttgctgccccatttctgttttcattattgattgtagttgtgattgtcttgtgttatggt

SEQ ID NO: 174211 - DNA, 120 bp, Artificial Sequence
  ENSG00000109787_52 (sequence is synthesized)
gcttcagcattggattcagcagccagcttcctagtacgaaggcaacgattacctccacagggtcccttccattgtcctcctgcatcattttcctccaacttgaataaatgttctacccac

SEQ ID NO: 174212 - DNA, 120 bp, Artificial Sequence
  ENSG00000109790_0 (sequence is synthesized)
ctcccgcctggccgccccggcccgccgtgacccacggccgcctccggagcccgacgcgcagggcatatacttctcttgtcttggttggatgcacaaatctgtgtgcagtgctttttgccc

SEQ ID NO: 174213 - DNA, 120 bp, Artificial Sequence
  ENSG00000109790_1 (sequence is synthesized)
gttgcctagacgatcacttggtttctctgaggatgtctggttctcgtaaagagtttgatgtgaaacagattttgaaaatcagatggaggtggtttggtcatcaagcatcatctcctaatt

SEQ ID NO: 174214 - DNA, 120 bp, Artificial Sequence
  ENSG00000109790_2 (sequence is synthesized)
ctacagttgacagccagcagggagaattttggaaccgaggacagactggagcaaacggtgggagaaagtttttagatccatgtagcctacaattgcctttggcttcaattggttaccgaa

SEQ ID NO: 174215 - DNA, 120 bp, Artificial Sequence
  ENSG00000109790_3 (sequence is synthesized)
ggtccagccaactggattttcagaattcaccttcttggccaatggcatccacctctgaagtccctgcatttgagtttacagcagaagattgtggcggtgcacattggctggatagaccag

SEQ ID NO: 174216 - DNA, 120 bp, Artificial Sequence
  ENSG00000109790_4 (sequence is synthesized)
aagtggatgatggcactagtgaagaagaaaatgaatctgattccagttcatgcaggacttccaatagtagtcagacattatcatcctgtcatactatggagccatgtacatcagatgaat

SEQ ID NO: 174217 - DNA, 120 bp, Artificial Sequence
  ENSG00000109790_5 (sequence is synthesized)
ttttccaagcccttaatcatgccgagcaaacatttaaaaaaatggaaaactatttgagacataaacagttgtgtgatgtaattttagtcgctggtgatcgcagaattccagctcacagat

SEQ ID NO: 174218 - DNA, 120 bp, Artificial Sequence
  ENSG00000109790_6 (sequence is synthesized)
tggtgctctcctctgtctcagactattttgctgccatgtttactaatgatgtcagagaggcaagacaagaagaaataaaaatggaaggtgtagaaccaaattcgttgtggtccttgatcc

SEQ ID NO: 174219 - DNA, 120 bp, Artificial Sequence
  ENSG00000109790_7 (sequence is synthesized)
agtatgcttatacaggccgccttgaattaaaagaagataatattgagtgcctgttatctacagcttgccttcttcagctttcacaggttgtagaagcatgctgtaagtttttaatgaaac

SEQ ID NO: 174220 - DNA, 120 bp, Artificial Sequence
  ENSG00000109790_8 (sequence is synthesized)
agcttcatccatccaactgtcttggaattcgttcttttgctgatgcccaaggttgtacagatttgcataaagtggctcacaattatactatggagcatttcatggaagtaatcagaaacc

SEQ ID NO: 174221 - DNA, 120 bp, Artificial Sequence
  ENSG00000109790_9 (sequence is synthesized)
aggaatttgtattattaccagccagcgaaattgcaaagctcttggctagtgatgacatgaacattcctaatgaggagacaatattgaatgcacttcttacttgggtccgtcatgatttgg

SEQ ID NO: 174222 - DNA, 120 bp, Artificial Sequence
  ENSG00000109790_10 (sequence is synthesized)
aacagagacggaaagatctaagtaaacttttggcttatattaggctacctcttcttgcaccacagttcctggcagacatggaaaataatgtactttttcgggatgatatagaatgtcaga

SEQ ID NO: 174223 - DNA, 120 bp, Artificial Sequence
  ENSG00000109790_11 (sequence is synthesized)
aactcattatggaagcaatgaagtaccatttattaccagagagacgacccatgttacaaagtcctcggacaaaacctaggaagtcaactgttggtacattatttgcagttgggggaatgg

SEQ ID NO: 174224 - DNA, 120 bp, Artificial Sequence
  ENSG00000109790_12 (sequence is synthesized)
attcaacaaaaggagcaacaagcattgaaaagtatgatctccgtacaaatatgtggactccagtagcaaatatgaatgggaggaggctacagttcggtgttgcagtgctagatgacaaac

SEQ ID NO: 174225 - DNA, 120 bp, Artificial Sequence
  ENSG00000109790_13 (sequence is synthesized)
tgtatgtggttggaggaagagatggactgaagactttgaatactgtagagtgctacaaccccaaaacaaaaacttggagtgtgatgccacctatgtccacacatagacatggccttggtg

SEQ ID NO: 174226 - DNA, 120 bp, Artificial Sequence
  ENSG00000109790_14 (sequence is synthesized)
gtggaaagatgggaccctcaggctcgccagtggaattttgttgccactatgtctacccctaggagtacagtaggtgtggcagtactaagtggaaaactttatgcagttggtggtcgtgat

SEQ ID NO: 174227 - DNA, 120 bp, Artificial Sequence
  ENSG00000109790_15 (sequence is synthesized)
ggaagttcttgtctcaaatcagtagaatgttttgatcctcatactaataagtggacactgtgtgcacagatgtcaaaaaggagaggtggcgtaggagtgacgacctggaatggactgctg

SEQ ID NO: 174228 - DNA, 120 bp, Artificial Sequence
  ENSG00000109790_16 (sequence is synthesized)
tatgctataggggggcacgatgctcccgcatccaacttgacttccagactctcagactgtgtggaaagatatgatcccaaaacagacatgtggactgcagtagcatccatgagcatcagc

SEQ ID NO: 174229 - DNA, 120 bp, Artificial Sequence
  ENSG00000109790_17 (sequence is synthesized)
agagatgcagtgggggtctgtttacttggtgataagttatatgctgttggggggtatgatggacaggcataccttaatactgtggaggcttatgatccccagacaaatgagtggacccag

SEQ ID NO: 174230 - DNA, 120 bp, Artificial Sequence
  ENSG00000109790_18 (sequence is synthesized)
gttgctccactgtgcctaggaagagctggagcttgtgttgtgactgtaaaattataatttagtgccccgttttctacatgaagacaccgtcttcctttattaatttagtataattattct

SEQ ID NO: 174231 - DNA, 120 bp, Artificial Sequence
  ENSG00000109790_19 (sequence is synthesized)
atcaatggatacatttttagtaaatgtgcattgtcacaatcctgggcacaaagtgcctgatgtcaaaatgaagatagtaaaacaagggaggaagcagtggatggaccaggattaattcct

SEQ ID NO: 174232 - DNA, 120 bp, Artificial Sequence
  ENSG00000109790_20 (sequence is synthesized)
ttcatttcttagtaaattaaaacctgcagctggtggattgtgatcacacattcccgaagtaataagtgaggacgaatgcactgctctggaacataacccagtgctaactgggggtttcat

SEQ ID NO: 174233 - DNA, 120 bp, Artificial Sequence
  ENSG00000109790_21 (sequence is synthesized)
ttattcagtcaagcacatcttactcacatccagatttattttcctacagtgcaaacacaccagatgaaactttaaaatgttactttttgtaagcttatcataaatgagttgcagtaattt

SEQ ID NO: 174234 - DNA, 120 bp, Artificial Sequence
  ENSG00000109790_22 (sequence is synthesized)
gtttgcttgtttgtttaaccacaaccactattttaatgatatactaaagataacactatttagttttttcagaaacatctgcattatatgtgtgttggttgtggattttgtttctaaaat

SEQ ID NO: 174235 - DNA, 120 bp, Artificial Sequence
  ENSG00000109790_23 (sequence is synthesized)
tggcttagtccaataaataaagaaaagcattaaggacttaaagcaacaataaccaaataaaaacttgataggatctttgaagtctatttaaatattcattccattacatctagactcacc

SEQ ID NO: 174236 - DNA, 120 bp, Artificial Sequence
  ENSG00000109790_24 (sequence is synthesized)
aagaactacatgttatgatgttaagttgaagttgaaacatgatgttttgcattaaatttaagatatgcaaatttatgtagagaaaataaatgttatataccctataatctttcacctaat

SEQ ID NO: 174237 - DNA, 120 bp, Artificial Sequence
  ENSG00000109790_25 (sequence is synthesized)
tagtatttaattatatggatttgttttatattataaaagatgttttgattttgtcttttgatattgacaaaattgtttggatatccttatgttctcaagtctgtatctgcctcccctgcc

SEQ ID NO: 174238 - DNA, 120 bp, Artificial Sequence
  ENSG00000109790_26 (sequence is synthesized)
ttatttcttatgttttgccacagttaacccattgtgcttctttgtaatcaaacagtttgtgggagaatgggcttattgaatgtctaaaaaataagtttaaagtgtttgttaccctaagtt

SEQ ID NO: 174239 - DNA, 120 bp, Artificial Sequence
  ENSG00000109790_27 (sequence is synthesized)
ttttacatttttaaactctaattacatatgtgaatgttattactctcagtgaattgttattgtttgcaaaaatgcactgggcagtaacattttgtgataaatcctataagatataagtca

SEQ ID NO: 174240 - DNA, 120 bp, Artificial Sequence
  ENSG00000109790_28 (sequence is synthesized)
actgcaacggggatagtgttttctgtctctgtcatttgtggtttaagaaaaagggggtggtgttctgcatttgaaaggactttaatgaatgctgtcagtgtttgtgagacctaatggtca

SEQ ID NO: 174241 - DNA, 120 bp, Artificial Sequence
  ENSG00000109790_29 (sequence is synthesized)
gtatgggaaaggagagccgggaaagtggtctagctgcttcaggataggtggatgagagtttgctctgattgaacggaatgttccaccgtgtttcatctttattcattatcctttgttctt

SEQ ID NO: 174242 - DNA, 120 bp, Artificial Sequence
  ENSG00000109790_30 (sequence is synthesized)
taaaatctgatatattggcataaaagtaattgtagatatatatatgaatgtgatttattttcctttacatatttttgttgtgtacagcagggcatatacttctcttgtcttggttggatg

SEQ ID NO: 174243 - DNA, 120 bp, Artificial Sequence
  ENSG00000109790_31 (sequence is synthesized)
agcagaagattgtggcggtgcacattggctggatagaccagaagtggatgatggcactagtgaagaagaaaatgaatctgattccagttcatgcagctctccagactaatatagagaata

SEQ ID NO: 174244 - DNA, 120 bp, Artificial Sequence
  ENSG00000109790_32 (sequence is synthesized)
ctaagtaacatgtctctaagatgacagctactaattcctgttaccttcactttcactgaaatgtgtgctatttagggaaatgaaggacattcctccaggagagtttaagggaatgtagag

SEQ ID NO: 174245 - DNA, 120 bp, Artificial Sequence
  ENSG00000109790_33 (sequence is synthesized)
ttaaaacaattcttatggtaaaacagatcccctcaatcttgtccaatactgaaatatatggcataaatatgacaatcacgttttgattagcgatgagaaaaagaggcaatgtttaatttt

SEQ ID NO: 174246 - DNA, 120 bp, Artificial Sequence
  ENSG00000109790_34 (sequence is synthesized)
ataacataattaaaatccagaattacctttgagatgtaagttaatactcagagaaattattaattatctgctaccacttgcatgatgaagtgttctagcctgattaaagctgataggact

SEQ ID NO: 174247 - DNA, 120 bp, Artificial Sequence
  ENSG00000109790_35 (sequence is synthesized)
actggagggctgcaacaatgggaggggagactggaaaataaaaacaaggatagtagtcagaaaactttgaacaacttgcccatgtgtgagcagtcggatttttaaatactcaacccattg

SEQ ID NO: 174248 - DNA, 120 bp, Artificial Sequence
  ENSG00000109790_36 (sequence is synthesized)
atatctgggagcagattaaagtcctgataacctaatgaagatggcaaccctaaattacactgagtaagaaacctgatctggcagtcttactaacagaaagaatttcacccttgtgtattt

SEQ ID NO: 174249 - DNA, 120 bp, Artificial Sequence
  ENSG00000109790_37 (sequence is synthesized)
ctgggagggtctagcacttctaaaaatgatcttttgagatctttgcttccatcatcaccaagaacagaatcaggaatttgtgcttgtgtcacccagttcagtacttggtacataaaagac

SEQ ID NO: 174250 - DNA, 120 bp, Artificial Sequence
  ENSG00000109790_38 (sequence is synthesized)
ttggtacataaaagacaataaatgtttaactgagccaagattttcttgtatacaaggagccatgataagtatggtcaagaaaacaaagcttctaggccaggcatggtggcttatgcctat

SEQ ID NO: 174251 - DNA, 120 bp, Artificial Sequence
  ENSG00000109790_39 (sequence is synthesized)
catcaagcagaccatctggaggcaaaactccttatctgaggaattcagaagtcattagactgccctattatctaaagccggcatcttgtactaggcttctttaccaaaaatgtatttaat

SEQ ID NO: 174252 - DNA, 80 bp, Artificial Sequence
  ENSG00000109794_0 (sequence is synthesized)
gcggaggatctggagagggaaggggcgtgcgagccccgcggaccccgggcgcgcccgggccgcctgagctgggccagccg

SEQ ID NO: 174253 - DNA, 120 bp, Artificial Sequence
  ENSG00000109794_1 (sequence is synthesized)
gggggcgcgtgaccggctgtctgcgtggggcccgcgcgcggtgcctctgcctgacggtgcccgagcctagcgcggagcctggcgcgggggctgcgagcacaggcccggggctgatcgtaa

SEQ ID NO: 174254 - DNA, 120 bp, Artificial Sequence
  ENSG00000109794_2 (sequence is synthesized)
gcgagcacaggcccggggctgatcgtaatcggaagaggactgtcagaaggacgtagaaggcacggttttactgtgaggagcaaagattctttacctacgcattttacaagaaatgtgcag

SEQ ID NO: 174255 - DNA, 120 bp, Artificial Sequence
  ENSG00000109794_3 (sequence is synthesized)
aaagccattgataaatatacctgcaaatccttgtcatccttttcctccagcggaagccatacacccacgggagcccacacctcttggtctgggtcggccacacagagctctaccaccggc

SEQ ID NO: 174256 - DNA, 120 bp, Artificial Sequence
  ENSG00000109794_4 (sequence is synthesized)
tcatccacggagaggggctccgtttattcctggagagatgacgaatttgacgaagccagttcacagtcagtgcagcggttactctgggaggtggaggaaatgttatttgaagggaaagtg

SEQ ID NO: 174257 - DNA, 120 bp, Artificial Sequence
  ENSG00000109794_5 (sequence is synthesized)
aaccctcagacccagagtctgctggccgaatgcggggagtggacaagaagatccctccatttgagagtattaggaagacagctgatcctgcccactgacaaaggcgtccagcatttccag

SEQ ID NO: 174258 - DNA, 120 bp, Artificial Sequence
  ENSG00000109794_6 (sequence is synthesized)
ggcagcactcctgcctccgcagtccacagacccccgctcagtgcctgcggacacagcagcaacatcagagagttgtgcatttctggctctcaaatagtcccagcagcactctcagcctct

SEQ ID NO: 174259 - DNA, 120 bp, Artificial Sequence
  ENSG00000109794_7 (sequence is synthesized)
gccctgccaggccctgatgacacaggggttgctgacctaacggcacgttcatccctggaagaagaggtttaccatgtggatggaaagattgaggagtatttcgcttttgacagaaaagag

SEQ ID NO: 174260 - DNA, 120 bp, Artificial Sequence
  ENSG00000109794_8 (sequence is synthesized)
gatgatgatgaatgtcttgaacaaaaaccagctcagcccggtaggaaatggcgcaaactcggacttcctcctgtttccccgcgtgactgtgtcaaagatgccgtggcagcagaagtgttt

SEQ ID NO: 174261 - DNA, 120 bp, Artificial Sequence
  ENSG00000109794_9 (sequence is synthesized)
gatcacgtctggacaaatatggtagaacttttggaagagctgattagaaaacactgggaaactacactcacagaagggaaaaaacagagagaaacattgaaagtggctggaaacagattt

SEQ ID NO: 174262 - DNA, 120 bp, Artificial Sequence
  ENSG00000109794_10 (sequence is synthesized)
ccgcacgtcctcgttccacacgctcacgccgatggagccagtggccccccgtccggacacgccgaggctcacggcatctccctggcttctcgtctgaacccgccccagattcatcacttc

SEQ ID NO: 174263 - DNA, 120 bp, Artificial Sequence
  ENSG00000109794_11 (sequence is synthesized)
tgcctattttgctgacagaacgcagaatgagaaggaggacaaagcatcgggtggaggggcaggtgctctctcctccgcaccgcacagactgggacgggcctcagacactcatggattatc

SEQ ID NO: 174264 - DNA, 120 bp, Artificial Sequence
  ENSG00000109794_12 (sequence is synthesized)
accttctgcaaagaaaacaccagtgccctggaggctgccttctcttgcttcagattcacagagactaaaaactcccaacatctatagtgacgaagttcttcggggaacaaaactgccgac

SEQ ID NO: 174265 - DNA, 120 bp, Artificial Sequence
  ENSG00000109794_13 (sequence is synthesized)
tggcgtggaccacatggcttccccactggttcaaacgtcacggagcaggttccccccgctagtcacggagaccagggggcagaatacagcagttcctggatgccgccttgtttcttacag

SEQ ID NO: 174266 - DNA, 120 bp, Artificial Sequence
  ENSG00000109794_14 (sequence is synthesized)
aggaaggcatctacaaaaccgtgtgttgagtgccatgcctgacggtacagaacgatcgcgtcttcgagaaagaacagccaccctggaacggttgtcaaggcccagcacaacccacacgtt

SEQ ID NO: 174267 - DNA, 120 bp, Artificial Sequence
  ENSG00000109794_15 (sequence is synthesized)
ccggcagtcggatacgcctcgaaaaagttcattgacacaaatggaatttgctgctcacacatggacaggtcaaagtattttgacaggttcacaatatgtgcctaaatcttttcagaggac

SEQ ID NO: 174268 - DNA, 120 bp, Artificial Sequence
  ENSG00000109794_16 (sequence is synthesized)
aactttgactttcaagaggagattccaagtgacatcttgaaaccacctcaccagaaccattggagcacctgtggcctcggcacactgcttatcacttgaaaaatggaggaacaagtgtta

SEQ ID NO: 174269 - DNA, 120 bp, Artificial Sequence
  ENSG00000109794_17 (sequence is synthesized)
tatttatctgtgtgtctgacagtgtgagatgttagaccgagagaaaagcaaacaaataaatcacttaatcttgaacactttgcactgtaaagagagtgaaagtcaaacccaccaagctgc

SEQ ID NO: 174270 - DNA, 120 bp, Artificial Sequence
  ENSG00000109794_18 (sequence is synthesized)
cttgctgaaagcatctccaaggttctgtaggctttgttcagaagcccctgatgtgtgtttgcagtccgtcattttatcaatgatacgcaaacataattagcatgtgtatgtactcacaca

SEQ ID NO: 174271 - DNA, 120 bp, Artificial Sequence
  ENSG00000109794_19 (sequence is synthesized)
ctaattacatgtaagaatatattatctaggaatatgtcatttgtaactttgtactctgacgtattttctagtctcaccctattagtaattctgtcaaaatcctagacgctagtagatatt

SEQ ID NO: 174272 - DNA, 120 bp, Artificial Sequence
  ENSG00000109794_20 (sequence is synthesized)
agtatttgagacaatatgtcagagtctgaataagactcagcttgttctagtcatgctgagtttctcatatattttttaaaagtgcttccgccatgaacctctttgagaaatgtcagtggc

SEQ ID NO: 174273 - DNA, 120 bp, Artificial Sequence
  ENSG00000109794_21 (sequence is synthesized)
aaaatctcccaagctaattttctttttctatgttccatcttcaaattcagacagttcacgtgaagtaccccacatttattgatcttagggttgaatataaacgcaattaaaagctatggc

SEQ ID NO: 174274 - DNA, 120 bp, Artificial Sequence
  ENSG00000109794_22 (sequence is synthesized)
gctgctgtttcaagctcgttcgcccaaatacatctttctacccaccttccctatcgtcagagaggtggcctgaccccagcacgtgcaagcttgtcaggctggaagaggactgtcagaagg

SEQ ID NO: 174275 - DNA, 120 bp, Artificial Sequence
  ENSG00000109794_23 (sequence is synthesized)
atgaaggctgctgtgctggaccttgggtctctcttggccaaactcttcgagacctcgacggcgccccccgcaggcccctcctccagaccctcgggaggtgctgccgctgcagggtcgggg

SEQ ID NO: 174276 - DNA, 120 bp, Artificial Sequence
  ENSG00000109794_24 (sequence is synthesized)
ctccagaccctcgggaggtgctgccgctgcagggtcggggggctccagggcgggcaccccgttgggtaccgccccgaccctcctccgcgccctggctccggactccccctccgcctcgcg

SEQ ID NO: 174277 - DNA, 120 bp, Artificial Sequence
  ENSG00000109794_25 (sequence is synthesized)
ggctccgccgccagccgcgccgcgggagcagtggggaccctgctctcttggcccagtagccctagagcgggtaaagccccgccccagccccccactccctccggcgggggctgctcccct

SEQ ID NO: 174278 - DNA, 120 bp, Artificial Sequence
  ENSG00000109794_26 (sequence is synthesized)
cccggcggggtctgggccgcgctccccaggaacccgctccagcctggccccggagagcgagagctcggcgcctgcgtggcccccggggctggccccagaaccctgttccttacgctgcct

SEQ ID NO: 174279 - DNA, 120 bp, Artificial Sequence
  ENSG00000109794_27 (sequence is synthesized)
tctccatatgtaaataaagtgatgtagtaagtgagatttcaagtttcagacagtgaaatggaagatgatctaccttgataagcctattttgctgtaggagggaatagcaaatgtttgggg

SEQ ID NO: 174280 - DNA, 120 bp, Artificial Sequence
  ENSG00000109794_28 (sequence is synthesized)
cctgtggcctgacctcagaaacctcgatcacagagcacacctgcagagacttacttacctgctgtgaggtcaagaagaggggaatgtccaaaagctctcaatgaactgggggcctcactc

SEQ ID NO: 174281 - DNA, 120 bp, Artificial Sequence
  ENSG00000109794_29 (sequence is synthesized)
tgtcttaggagcagtgagtacctctgtctgctatagcgttttcatgctctatttctaagtgaaactctactctcagattctctttgaaaatctgatgataaaaatgcttgagaaaattaa

SEQ ID NO: 174282 - DNA, 120 bp, Artificial Sequence
  ENSG00000109794_30 (sequence is synthesized)
gaattaaaatccgatttggaagagagaagggcagccagcaccagtatgcacagcccccggccccagagacccgggaaggagtagggaggccgggccgtgcgcggaggagtggccgctggg

SEQ ID NO: 174283 - DNA, 120 bp, Artificial Sequence
  ENSG00000109794_31 (sequence is synthesized)
cgaggatgtgctcaagttccttgcggtaggagcccacgcaggcggcaccacccttggcttccagatggagcagtatatccacaaaaggacggaccagcgatggcatctctgtcataaatc

SEQ ID NO: 174284 - DNA, 120 bp, Artificial Sequence
  ENSG00000109794_32 (sequence is synthesized)
tgaagggacctgggagaagctgctgctggcagctcgtgccattgttgctgttgaaccctgctgaggtccctgtcttgctccaggaacactggccggcaggctgtgctgaagctcactgct

SEQ ID NO: 174285 - DNA, 120 bp, Artificial Sequence
  ENSG00000109794_33 (sequence is synthesized)
gccaccagagccactccagctgctggccgcttctctcctggaaccttcactcgccagacccaggcagccttccgggagccatgtctgctggtcccaggcgaccaccagcctctcagagag

SEQ ID NO: 174286 - DNA, 120 bp, Artificial Sequence
  ENSG00000109794_34 (sequence is synthesized)
gcgtcttggctagcccacctcccattgctctgtggaacacagattctcctctgtgctgtgtggaagtcgccatcccgtgcaacaagggagctcactcagtgggcctgaaggggtggctgc

SEQ ID NO: 174287 - DNA, 120 bp, Artificial Sequence
  ENSG00000109794_35 (sequence is synthesized)
aggcatgctcggggtgtgcaggagatgcaccggcttgtgtgagccggtagggcaggacgggcgtggaagggtccacgtctttagtatgcatgcttagatctagcgttcctgttgatggag

SEQ ID NO: 174288 - DNA, 120 bp, Artificial Sequence
  ENSG00000109794_36 (sequence is synthesized)
taatggttctcgcattgaccagatccggggcttcattttttaaacctcattcgtccactccccaccccagcctggtgtgcgcaccctttgatggggcggggataggcgagatggtcctgt

SEQ ID NO: 174289 - DNA, 120 bp, Artificial Sequence
  ENSG00000109794_37 (sequence is synthesized)
tactaaaatccctgtcgtgggaaaggcatgcctcgtgcagtgcccaccctctgagactcaaaaatgtagttcacctccgcgacctcaccccttcttcccttagcatgtgaaaatgacggc

SEQ ID NO: 174290 - DNA, 120 bp, Artificial Sequence
  ENSG00000109794_38 (sequence is synthesized)
ttccttacgctgcctgacatcggcgaggagggggcctcggacggcgactccggggatggcgaagcgttggagtgcagtggtatgatcactgttcattgcagcctcaacctcccaggctca

SEQ ID NO: 174291 - DNA, 120 bp, Artificial Sequence
  ENSG00000109794_39 (sequence is synthesized)
gaattttagaagaggactgtcagaaggacgtagaaggcacggttttactgtgaggagcaaagattctttacctacgcattttacaagaaatgtgcagaaagccattgataaatatacctg

SEQ ID NO: 174292 - DNA, 120 bp, Artificial Sequence
  ENSG00000109805_0 (sequence is synthesized)
gtcatagaagactactcggagagcgctgcctctgggttggcgggctggcaggctgtagccgagcgcgggcaggactcgtcccggcagggttccagagccatgggagcggaaaggaggctg

SEQ ID NO: 174293 - DNA, 120 bp, Artificial Sequence
  ENSG00000109805_1 (sequence is synthesized)
ctgtcgattaaggaggcctttcggctggcgcagcagccgcaccagaaccaggcgaagctggtggtggcgctgagccgcacctaccgcacgatggatgataagacagtttttcatgaggag

SEQ ID NO: 174294 - DNA, 120 bp, Artificial Sequence
  ENSG00000109805_2 (sequence is synthesized)
ttcattcattaccttaaatatgttatggtggtctataaacgtgaaccagctgtggagagggtaatagaatttgcagcaaagtttgttacctcatttcaccaatcagatatggaagatgat

SEQ ID NO: 174295 - DNA, 120 bp, Artificial Sequence
  ENSG00000109805_3 (sequence is synthesized)
gaggaagaggaagatggtggccttttaaattatttgtttacttttctcttaaagtctcatgaagcaaacagcaatgcagtgagatttagagtgtgcctgctcataaacaagcttttggga

SEQ ID NO: 174296 - DNA, 120 bp, Artificial Sequence
  ENSG00000109805_4 (sequence is synthesized)
agtatgccagaaaatgctcagattgatgatgatgtgtttgataaaattaataaagccatgcttattagattgaaagataagattccaaatgtgagaatacaggcagttctggcgctttca

SEQ ID NO: 174297 - DNA, 120 bp, Artificial Sequence
  ENSG00000109805_5 (sequence is synthesized)
cgacttcaggatcccaaggatgatgaatgcccagtggttaatgcatatgctactttgattgaaaatgattcaaatccagaagttagacgggcagtgttatcatgtattgcaccatcagca

SEQ ID NO: 174298 - DNA, 120 bp, Artificial Sequence
  ENSG00000109805_6 (sequence is synthesized)
aagactttgccaaaaattgtagggcgcaccaaggatgtgaaagaggctgtcagaaagctggcttatcaggttttagctgaaaaggttcatatgagagctatgtccattgctcagagagta

SEQ ID NO: 174299 - DNA, 120 bp, Artificial Sequence
  ENSG00000109805_7 (sequence is synthesized)
atgctccttcaacaaggtcttaatgacagatcagatgctgtgaaacaagctatgcagaagcatcttcttcaaggctggttacggttctctgaaggaaatatcttagagttgctccatcgg

SEQ ID NO: 174300 - DNA, 120 bp, Artificial Sequence
  ENSG00000109805_8 (sequence is synthesized)
ttggatgtagaaaattcttctgaagtggcagtctctgttctcaatgccttgttttcaataactcctctcagtgaactggtgggactctgtaaaaacaatgatggcaggaaattgattcca

SEQ ID NO: 174301 - DNA, 120 bp, Artificial Sequence
  ENSG00000109805_9 (sequence is synthesized)
gtggaaacattaactcctgaaattgctttgtattggtgtgccctttgtgaatatttgaaatcaaaaggagatgaaggtgaagaatttttagagcagattttgccagagcctgtagtatat

SEQ ID NO: 174302 - DNA, 120 bp, Artificial Sequence
  ENSG00000109805_10 (sequence is synthesized)
gcagactatttattgagttacatccagagcattccagttgttaatgaagaacacagaggtgatttttcctatattggaaatttgatgacaaaagaattcataggtcaacaattgattcta

SEQ ID NO: 174303 - DNA, 120 bp, Artificial Sequence
  ENSG00000109805_11 (sequence is synthesized)
attattaagtctttggataccagtgaagaaggaggaagaaaaaaactgctggctgttttacaggagattcttattttacccacaatcccaatatccctggtttcttttcttgttgaaaga

SEQ ID NO: 174304 - DNA, 120 bp, Artificial Sequence
  ENSG00000109805_12 (sequence is synthesized)
ctactccacatcattatagatgataataagagaacacaaattgttacagaaattatctcagagattcgggcgcccattgttactgttggtgttaataacgatccagctgatgtaagaaag

SEQ ID NO: 174305 - DNA, 120 bp, Artificial Sequence
  ENSG00000109805_13 (sequence is synthesized)
aaagaactcaagatggctgaaataaaagttaagcttatcgaagccaaagaagctttggaaaattgcattaccttacaggattttaatcgggcatcagaattaaaagaagaaataaaagca

SEQ ID NO: 174306 - DNA, 120 bp, Artificial Sequence
  ENSG00000109805_14 (sequence is synthesized)
ttagaagatgccagaataaaccttttgaaagagacagagcaacttgaaattaaagaagtccacatagagaagaatgatgctgaaacattgcagaaatgtcttattttatgctatgaactg

SEQ ID NO: 174307 - DNA, 120 bp, Artificial Sequence
  ENSG00000109805_15 (sequence is synthesized)
ttgaagcagatgtccatttcaacaggcttaagtgcaaccatgaatggaatcatcgaatctttgattcttcctggaataataagtattcatcctgttgtaagaaacctggctgttttatgc

SEQ ID NO: 174308 - DNA, 120 bp, Artificial Sequence
  ENSG00000109805_16 (sequence is synthesized)
ttgggatgctgtggactacagaatcaggattttgcaaggaaacacttcgtattactattgcaggttttgcaaattgatgatgtcacaataaaaataagtgctttaaaggcaatctttgac

SEQ ID NO: 174309 - DNA, 120 bp, Artificial Sequence
  ENSG00000109805_17 (sequence is synthesized)
caactgatgacgttcgggattgaaccatttaaaactaaaaaaatcaaaacacttcattgtgaaggtacagaaataaacagtgatgatgagcaagaatcaaaagaagttgaagagactgct

SEQ ID NO: 174310 - DNA, 120 bp, Artificial Sequence
  ENSG00000109805_18 (sequence is synthesized)
acagctaagaatgttctgaaactcctttctgatttcttagatagtgaggtatctgaacttaggactggagctgcagaaggactagccaagctgatgttctctgggcttttggtcagcagc

SEQ ID NO: 174311 - DNA, 120 bp, Artificial Sequence
  ENSG00000109805_19 (sequence is synthesized)
tggtacaatcctgtgactgaagaggatgttcaacttcgacattgcctaggcgtgttcttccccgtgtttgcttatgcaagcaggactaatcaggaatgctttgaagaagcttttcttcca

SEQ ID NO: 174312 - DNA, 120 bp, Artificial Sequence
  ENSG00000109805_20 (sequence is synthesized)
accctgcaaacactggccaatgcccctgcatcttctcctttagctgaaattgatatcacaaatgttgctgagttacttgtagatttgacaagaccaagtggattaaatcctcaggccaag

SEQ ID NO: 174313 - DNA, 120 bp, Artificial Sequence
  ENSG00000109805_21 (sequence is synthesized)
acttcccaagattatcaggccttaacagtacatgacaatttggctatgaaaatttgcaatgagatcttaacaagtccgtgctcgccagaaattcgagtctatacaaaagccttgagttct

SEQ ID NO: 174314 - DNA, 120 bp, Artificial Sequence
  ENSG00000109805_22 (sequence is synthesized)
ttagaactcagtagccatcttgcaaaagatcttctggttctattgaatgagattctggagcaagtaaaagataggacatgtctgagagctttggagaaaatcaagattcagttagaaaaa

SEQ ID NO: 174315 - DNA, 120 bp, Artificial Sequence
  ENSG00000109805_23 (sequence is synthesized)
ggaaataaagaatttggtgaccaagctgaagcagcacaggatgccaccttgactacaactactttccaaaatgaagatgaaaagaataaagaagtatatatgactccactcaggggtgta

SEQ ID NO: 174316 - DNA, 120 bp, Artificial Sequence
  ENSG00000109805_24 (sequence is synthesized)
aaagcaacccaagcatcaaagtctactcagctaaagactaacagaggacagagaaaagtgacagtttcagctaggacgaacaggaggtgtcagactgctgaagccgactctgaaagtgat

SEQ ID NO: 174317 - DNA, 120 bp, Artificial Sequence
  ENSG00000109805_25 (sequence is synthesized)
catgaagttccagaaccagaatcagaaatgaagatgagactaccaagacgagccaaaaccgcagcactagaaaaaagtaaacttaaccttgcccaatttctcaatgaagatctaagttag

SEQ ID NO: 174318 - DNA, 120 bp, Artificial Sequence
  ENSG00000109805_26 (sequence is synthesized)
gaaagacgatggaggtggaatcctttaagattatgtccagttatttgctttaataaagaagaagttacccttgtcaaaatcagaacaaacctgatgtctttctgaagattttctgctgtg

SEQ ID NO: 174319 - DNA, 120 bp, Artificial Sequence
  ENSG00000109805_27 (sequence is synthesized)
cgcttccacgttactttggcctgtattaaagcagtagagcagcatcagttattatagtccagaaaaagtgtgcatcagtcagtcacacagatttatcacaatctgaggtgggcctaggaa

SEQ ID NO: 174320 - DNA, 120 bp, Artificial Sequence
  ENSG00000109805_28 (sequence is synthesized)
tctcatttttaaatagtctctccaagtgattcttatgaactctttatgtttaaaatcatgtcattatggaaaacttacaagtgtaactagctagtagcttgcatttgagaagcttatgac

SEQ ID NO: 174321 - DNA, 120 bp, Artificial Sequence
  ENSG00000109805_29 (sequence is synthesized)
ttagatgggcagaatcaacaaagatgaaaccgcctgaggacacatttaacaagtaacatttctagggaaaatgaaggaagtaccacaaactggctagaaaggagcttatcaatcaccagt

SEQ ID NO: 174322 - DNA, 120 bp, Artificial Sequence
  ENSG00000109805_30 (sequence is synthesized)
gaggaagaccagtataacgttcaacaacagttattttgacaaaaacttattttgtgattcctacagtgaaaacatttttggtgatatctgcctgggaaatctctcttcctaaagtatttg

SEQ ID NO: 174323 - DNA, 120 bp, Artificial Sequence
  ENSG00000109805_31 (sequence is synthesized)
tatatgggagtccttgtttgtgaatgtttcctggattagggaggtgtcaacataaatgtattattaaccatgaagctgctcgctatatttttggcataacaaaataatatttatttactg

SEQ ID NO: 174324 - DNA, 120 bp, Artificial Sequence
  ENSG00000109805_32 (sequence is synthesized)
tggataataattctagtgggaatataatgtgacaggaacttctctttatatacgctaccaatttatgagcactattcactgtcaatttcatttcttgtcttttgaaattgacacttggcc

SEQ ID NO: 174325 - DNA, 120 bp, Artificial Sequence
  ENSG00000109805_33 (sequence is synthesized)
tgacttacgaaacttgtactatatgaaattggtcctcttttctgcaatacccaacgaaacaccttttctctttattattcagaaatgtcctaacatggatctgtttgttttaataattgt

SEQ ID NO: 174326 - DNA, 120 bp, Artificial Sequence
  ENSG00000109805_34 (sequence is synthesized)
gctttttttaggcttatcatctactagaggccatttacttaaggtgaaattttaagatggagctaaagtaagatcactggtttttagaaccaaattgctatacatatgtgcctcatagaa

SEQ ID NO: 174327 - DNA, 120 bp, Artificial Sequence
  ENSG00000109805_35 (sequence is synthesized)
cttataaaaggagtcaaagtttcaaagcaagatagttattaagcaaaaggaaaaatggtaatgatagaaagtcagttaaaaatagatgattgttcttcattctgtttgttggctctgtgt

SEQ ID NO: 174328 - DNA, 120 bp, Artificial Sequence
  ENSG00000109805_36 (sequence is synthesized)
tctcctgtgcttcagattccttatgtgttgttgttttaaagacaatttgcagggggttgggagaaggactgaaaaggtacattaagtgtgctgtaaggaaaagtcttagaaacataataa

SEQ ID NO: 174329 - DNA, 120 bp, Artificial Sequence
  ENSG00000109805_37 (sequence is synthesized)
gctaaaatcccattcacacatggccaggctatccaaaaagaaaggagccatgttctcatgtggtttaccataccaaagcttgctttctctggcatgggaaaaataaatttaagcaccaaa

SEQ ID NO: 174330 - DNA, 120 bp, Artificial Sequence
  ENSG00000109805_38 (sequence is synthesized)
ttcaggatcccaaggatgatgaatgcccagtggttaatggtgtgtgtagtttcctaaatcttttttcagatttgttgattttgttaaattctcagtatttgaaattttttattatggtct

SEQ ID NO: 174331 - DNA, 120 bp, Artificial Sequence
  ENSG00000109805_39 (sequence is synthesized)
atacatttgaagagtataggtaattaatatatgattccgattaaacaaaaaaaacctaagtagcaaccacccagcttaaaaaaaaaagtcagtacttgcatcctatcccagttgcatccc

SEQ ID NO: 174332 - DNA, 120 bp, Artificial Sequence
  ENSG00000109814_0 (sequence is synthesized)
gtgtaacgcgtggcagcctgagggaggggcgtgcgccgagagggagctcagatcgagcggggcgcgggtggagaagctgcggcggcgcggcccgtaggaaggtgctgtccgaacgatcgg

SEQ ID NO: 174333 - DNA, 120 bp, Artificial Sequence
  ENSG00000109814_1 (sequence is synthesized)
gataggagcggtccctgcgcttgctgctgggaagtggtacaatcatgtttgaaattaagaagatctgttgcatcggtgcaggctatgttggaggacccacatgtagtgtcattgctcata

SEQ ID NO: 174334 - DNA, 120 bp, Artificial Sequence
  ENSG00000109814_2 (sequence is synthesized)
tgtgtcctgaaatcagggtaacggttgttgatgtcaatgaatcaagaatcaatgcgtggaattctcctacacttcctatttatgagccaggactaaaagaagtggtagaatcctgtcgag

SEQ ID NO: 174335 - DNA, 120 bp, Artificial Sequence
  ENSG00000109814_3 (sequence is synthesized)
gaaaaaatctttttttttctaccaatattgatgatgccatcaaagaagctgatcttgtatttatttctgtgaatactccaacaaaaacctatggaatggggaaaggccgggcagcagatc

SEQ ID NO: 174336 - DNA, 120 bp, Artificial Sequence
  ENSG00000109814_4 (sequence is synthesized)
tgaagtatattgaagcttgtgctagacgcattgtgcaaaactcaaatgggtacaaaattgtgactgagaaaagcacagttccagtgcgggcagcagaaagtatccgtcgcatatttgatg

SEQ ID NO: 174337 - DNA, 120 bp, Artificial Sequence
  ENSG00000109814_5 (sequence is synthesized)
caaacacaaaacccaacttgaatttacaggtgctgtccaaccctgagtttctggcagagggaacagccatcaaggacctaaagaacccagacagagtactgattggaggggatgaaactc

SEQ ID NO: 174338 - DNA, 120 bp, Artificial Sequence
  ENSG00000109814_6 (sequence is synthesized)
cagagggccagagagctgtgcaggccctgtgtgctgtatatgagcactgggttcccagagaaaagatcctcaccactaatacttggtcttcagagctttccaaactggcagcaaatgctt

SEQ ID NO: 174339 - DNA, 120 bp, Artificial Sequence
  ENSG00000109814_7 (sequence is synthesized)
ttcttgcccagagaataagcagcattaactccataagtgctctgtgtgaagcaacaggagctgatgtagaagaggtagcaacagcgattggaatggaccagagaattggaaacaagtttc

SEQ ID NO: 174340 - DNA, 120 bp, Artificial Sequence
  ENSG00000109814_8 (sequence is synthesized)
taaaagccagtgttgggtttggtgggagctgtttccaaaaggatgttctgaatttggtttatctctgtgaggctctgaatttgccagaagtagctcgttattggcagcaggtcatagaca

SEQ ID NO: 174341 - DNA, 120 bp, Artificial Sequence
  ENSG00000109814_9 (sequence is synthesized)
tgaatgactaccagaggaggaggtttgcttcccggatcatagatagtctgtttaatacagtaactgataagaagatagctattttgggatttgcattcaaaaaggacactggtgatacaa

SEQ ID NO: 174342 - DNA, 120 bp, Artificial Sequence
  ENSG00000109814_10 (sequence is synthesized)
gagaatcttctagtatatatattagcaaatatttgatggatgaaggtgcacatctacatatatatgatccaaaagtacctagggaacaaatagttgtggatctttctcatccaggtgttt

SEQ ID NO: 174343 - DNA, 120 bp, Artificial Sequence
  ENSG00000109814_11 (sequence is synthesized)
cagaggatgaccaagtgtcccggctcgtgaccatttccaaggatccatatgaagcatgtgatggtgcccatgctgttgttatttgcactgagtgggacatgtttaaggaattggattatg

SEQ ID NO: 174344 - DNA, 120 bp, Artificial Sequence
  ENSG00000109814_12 (sequence is synthesized)
cttcgatggacggcgtgtcctggatgggctccacaatgaactacaaaccattggcttccagattgaaacaattggcaaaaaggtgtcttcaaagagaattccatatgctccttctggtga

SEQ ID NO: 174345 - DNA, 120 bp, Artificial Sequence
  ENSG00000109814_13 (sequence is synthesized)
tcaaagagaattccatatgctccttctggtgaaattccgaagtttagtcttcaagatccacctaacaagaaacctaaagtgtagagattgccatttttatttgtgatttttttttttttt

SEQ ID NO: 174346 - DNA, 76 bp, Artificial Sequence
  ENSG00000109814_14 (sequence is synthesized)
ttttttttttttggtacttcaggatagcaaatatctatctgctattaaatggtaaatgaaccaagtgttttttttt

SEQ ID NO: 174347 - DNA, 120 bp, Artificial Sequence
  ENSG00000109814_15 (sequence is synthesized)
ttttttaatcatcagatttatactagctatatggatattagcatatctggtaattatgaatctagaatttttttacatatttttataatactgttagctcagttattggatgagtgaaag

SEQ ID NO: 174348 - DNA, 120 bp, Artificial Sequence
  ENSG00000109814_16 (sequence is synthesized)
ataatcatgttggttttaatagtgtcaatttttgtaaaataaaaattaaacttcaaactctttactttataaattgtccataggccacactttaatatcacattataaagggaaggacag

SEQ ID NO: 174349 - DNA, 120 bp, Artificial Sequence
  ENSG00000109814_17 (sequence is synthesized)
tcttcattcctcctggttattggtttgtttgtcattaaagatatattttgaatccatgaaattgctatgctaaacagcctttacatgtatggtctggttaaagttcctttgttccttttg

SEQ ID NO: 174350 - DNA, 120 bp, Artificial Sequence
  ENSG00000109814_18 (sequence is synthesized)
ttttaataaaatgtgtcactgattttttagctcaaaatcatcactgttaatttccagtcaccccaaatatggttaaaagattttttttttaatcatgaagagaaaattagtagcatttct

SEQ ID NO: 174351 - DNA, 120 bp, Artificial Sequence
  ENSG00000109814_19 (sequence is synthesized)
ttctctccccattatttattggttttcctcactaatctttttttttttagtccaaaagccaaaaatatttatcttggttttacattttaatttccattcttaattgtaatttttttcttt

SEQ ID NO: 174352 - DNA, 120 bp, Artificial Sequence
  ENSG00000109814_20 (sequence is synthesized)
aaataaggaaaccaatataatctcatgtataaaaacttaaatattttacaagttacatatagcatcattctaaaataagaattttttttgttttctgtctgcttttttcttatgtctctt

SEQ ID NO: 174353 - DNA, 120 bp, Artificial Sequence
  ENSG00000109814_21 (sequence is synthesized)
gttgagttttatattttcagtggttatttttgcttgtgttagatcattattaaaatatatccaatgtccctttgatacttgtgctctgctgagaatgtacagtttgcattaaacatccca

SEQ ID NO: 174354 - DNA, 120 bp, Artificial Sequence
  ENSG00000109814_22 (sequence is synthesized)
ggtctcatccttcaggaattttgcagttcaatgagaagagggagacaaatataaagatgaggacagaagcatctctacagatgaaaattacataaataaaacattctccatcaacaacta

SEQ ID NO: 174355 - DNA, 120 bp, Artificial Sequence
  ENSG00000109814_23 (sequence is synthesized)
atacagagcagtagctgtctatcgacagacctcaaagacacagtgagcctttgagtttcttcaaatcccttaagaaatggagaacagtagtctttcttcaggggggttctggaaatgaaa

SEQ ID NO: 174356 - DNA, 120 bp, Artificial Sequence
  ENSG00000109814_24 (sequence is synthesized)
agacgcggagcgcacgcggcctttgcctcggccaggacagggcagcggggagagggctgctagacaacaattcttgacccctcctcgacccacgaccgccagtacaatcatgtttgaaat

SEQ ID NO: 174357 - DNA, 120 bp, Artificial Sequence
  ENSG00000109814_25 (sequence is synthesized)
ctctctcgccagggaccagggagtggacactcactggtccagtcatgaggaactcagcatcctcctgacgggaggcgcctctttcccagaagcggtgggtcaggaggaatctgactaaac

SEQ ID NO: 174358 - DNA, 120 bp, Artificial Sequence
  ENSG00000109814_26 (sequence is synthesized)
cctgggttgccggcccggagggcgcggttgaccccggggcctcgaggttgtgggcgaggagtaatccgcccgccgagaccgacccgcagatccaggagaccgaaacccgagggcggcgct

SEQ ID NO: 174359 - DNA, 120 bp, Artificial Sequence
  ENSG00000109814_27 (sequence is synthesized)
gcacgcggcctttgcctcggccaggacagggcagcggggagagggctgctagacaacaattcttgacccctcctcgacccacgaccgccagccaggactaaaagaagtggtagaatcctg

SEQ ID NO: 174360 - DNA, 120 bp, Artificial Sequence
  ENSG00000109814_28 (sequence is synthesized)
gtgaaggaaatagggacctggccctgggccttgtgtagcgggagggggagctaggaagcagctgagggcagaatccaggagggcctggctgcgggggaatgaagcctccgccttcgcagg

SEQ ID NO: 174361 - DNA, 120 bp, Artificial Sequence
  ENSG00000109814_29 (sequence is synthesized)
cgcacagacatcccaaatcccggattgggcctgaggaacatctctgcaaagagcgccaggagggcgtgggggtcccgcctctctcgccagggaccagggagtggacactcactggtccag

SEQ ID NO: 174362 - DNA, 120 bp, Artificial Sequence
  ENSG00000109819_0 (sequence is synthesized)
agtaaggggctggttgcctgcatgagtgtgtgctctgtgtcactgtggattggagttgaaaaagcttgactggcgtcattcaggagctggatggcgtgggacatgtgcaaccaggactct

SEQ ID NO: 174363 - DNA, 120 bp, Artificial Sequence
  ENSG00000109819_1 (sequence is synthesized)
gagtctgtatggagtgacatcgagtgtgctgctctggttggtgaagaccagcctctttgcccagatcttcctgaacttgatctttctgaactagatgtgaacgacttggatacagacagc

SEQ ID NO: 174364 - DNA, 120 bp, Artificial Sequence
  ENSG00000109819_2 (sequence is synthesized)
tttctgggtggactcaagtggtgcagtgaccaatcagaaataatatccaatcagtacaacaatgagccttcaaacatatttgagaagatagatgaagagaatgaggcaaacttgctagca

SEQ ID NO: 174365 - DNA, 120 bp, Artificial Sequence
  ENSG00000109819_3 (sequence is synthesized)
gtcctcacagagacactagacagtctccctgtggatgaagacggattgccctcatttgatgcgctgacagatggagacgtgaccactgacaatgaggctagtccttcctccatgcctgac

SEQ ID NO: 174366 - DNA, 120 bp, Artificial Sequence
  ENSG00000109819_4 (sequence is synthesized)
ggcacccctccaccccaggaggcagaagagccgtctctacttaagaagctcttactggcaccagccaacactcagctaagttataatgaatgcagtggtctcagtacccagaaccatgca

SEQ ID NO: 174367 - DNA, 120 bp, Artificial Sequence
  ENSG00000109819_5 (sequence is synthesized)
aatcacaatcacaggatcagaacaaaccctgcaattgttaagactgagaattcatggagcaataaagcgaagagtatttgtcaacagcaaaagccacaaagacgtccctgctcggagctt

SEQ ID NO: 174368 - DNA, 120 bp, Artificial Sequence
  ENSG00000109819_6 (sequence is synthesized)
ctcaaatatctgaccacaaacgatgaccctcctcacaccaaacccacagagaacagaaacagcagcagagacaaatgcacctccaaaaagaagtcccacacacagtcgcagtcacaacac

SEQ ID NO: 174369 - DNA, 120 bp, Artificial Sequence
  ENSG00000109819_7 (sequence is synthesized)
ttacaagccaaaccaacaactttatctcttcctctgaccccagagtcaccaaatgaccccaagggttccccatttgagaacaagactattgaacgcaccttaagtgtggaactctctgga

SEQ ID NO: 174370 - DNA, 120 bp, Artificial Sequence
  ENSG00000109819_8 (sequence is synthesized)
actgcaggcctaactccacccaccactcctcctcataaagccaaccaagataacccttttagggcttctccaaagctgaagtcctcttgcaagactgtggtgccaccaccatcaaagaag

SEQ ID NO: 174371 - DNA, 120 bp, Artificial Sequence
  ENSG00000109819_9 (sequence is synthesized)
cccaggtacagtgagtcttctggtacacaaggcaataactccaccaagaaagggccggagcaatccgagttgtatgcacaactcagcaagtcctcagtcctcactggtggacacgaggaa

SEQ ID NO: 174372 - DNA, 120 bp, Artificial Sequence
  ENSG00000109819_10 (sequence is synthesized)
aggaagaccaagcggcccagtctgcggctgtttggtgaccatgactattgccagtcaattaattccaaaacagaaatactcattaatatatcacaggagctccaagactctagacaacta

SEQ ID NO: 174373 - DNA, 120 bp, Artificial Sequence
  ENSG00000109819_11 (sequence is synthesized)
gaaaataaagatgtctcctctgattggcaggggcagatttgttcttccacagattcagaccagtgctacctgagagagactttggaggcaagcaagcaggtctctccttgcagcacaaga

SEQ ID NO: 174374 - DNA, 120 bp, Artificial Sequence
  ENSG00000109819_12 (sequence is synthesized)
aaacagctccaagaccaggaaatccgagccgagctgaacaagcacttcggtcatcccagtcaagctgtttttgacgacgaagcagacaagaccggtgaactgagggacagtgatttcagt

SEQ ID NO: 174375 - DNA, 120 bp, Artificial Sequence
  ENSG00000109819_13 (sequence is synthesized)
aatgaacaattctccaaactacctatgtttataaattcaggactagccatggatggcctgtttgatgacagcgaagatgaaagtgataaactgagctacccttgggatggcacgcaatcc

SEQ ID NO: 174376 - DNA, 120 bp, Artificial Sequence
  ENSG00000109819_14 (sequence is synthesized)
tattcattgttcaatgtgtctccttcttgttcttcttttaactctccatgtagagattctgtgtcaccacccaaatccttattttctcaaagaccccaaaggatgcgctctcgttcaagg

SEQ ID NO: 174377 - DNA, 120 bp, Artificial Sequence
  ENSG00000109819_15 (sequence is synthesized)
tccttttctcgacacaggtcgtgttcccgatcaccatattccaggtcaagatcaaggtctccaggcagtagatcctcttcaagatcctgctattactatgagtcaagccactacagacac

SEQ ID NO: 174378 - DNA, 120 bp, Artificial Sequence
  ENSG00000109819_16 (sequence is synthesized)
cgcacgcaccgaaattctcccttgtatgtgagatcacgttcaagatcgccctacagccgtcggcccaggtatgacagctacgaggaatatcagcacgagaggctgaagagggaagaatat

SEQ ID NO: 174379 - DNA, 120 bp, Artificial Sequence
  ENSG00000109819_17 (sequence is synthesized)
cgcagagagtatgagaagcgagagtctgagagggccaagcaaagggagaggcagaggcagaaggcaattgaagagcgccgtgtgatttatgtcggtaaaatcagacctgacacaacacgg

SEQ ID NO: 174380 - DNA, 120 bp, Artificial Sequence
  ENSG00000109819_18 (sequence is synthesized)
acagaactgagggaccgttttgaagtttttggtgaaattgaggagtgcacagtaaatctgcgggatgatggagacagctatggtttcattacctaccgttatacctgtgatgcttttgct

SEQ ID NO: 174381 - DNA, 120 bp, Artificial Sequence
  ENSG00000109819_19 (sequence is synthesized)
gctcttgaaaatggatacactttgcgcaggtcaaacgaaactgactttgagctgtacttttgtggacgcaagcaatttttcaagtctaactatgcagacctagattcaaactcagatgac

SEQ ID NO: 174382 - DNA, 120 bp, Artificial Sequence
  ENSG00000109819_20 (sequence is synthesized)
tttgaccctgcttccaccaagagcaagtatgactctctggattttgatagtttactgaaagaagctcagagaagcttgcgcaggtaacatgttccctagctgaggatgacagagggatgg

SEQ ID NO: 174383 - DNA, 120 bp, Artificial Sequence
  ENSG00000109819_21 (sequence is synthesized)
cgaatacctcatgggacagcgcgtccttccctaaagactattgcaagtcatacttaggaatttctcctactttacactctctgtacaaaaacaaaacaaaacaacaacaatacaacaaga

SEQ ID NO: 174384 - DNA, 120 bp, Artificial Sequence
  ENSG00000109819_22 (sequence is synthesized)
acaacaacaacaataacaacaatggtttacatgaacacagctgctgaagaggcaagagacagaatgatatccagtaagcacatgtttattcatgggtgtcagctttgcttttcctggagt

SEQ ID NO: 174385 - DNA, 120 bp, Artificial Sequence
  ENSG00000109819_23 (sequence is synthesized)
ctcttggtgatggagtgtgcgtgtgtgcatgtatgtgtgtgtgtatgtatgtgtgtggtgtgtgtgcttggtttaggggaagtatgtgtgggtacatgtgaggactgggggcacctgacc

SEQ ID NO: 174386 - DNA, 120 bp, Artificial Sequence
  ENSG00000109819_24 (sequence is synthesized)
agaatgcgcaagggcaaaccatttcaaatggcagcagttccatgaagacacgcttaaaacctagaacttcaaaatgttcgtattctattcaaaaggaaatatatatatatatatatatat

SEQ ID NO: 174387 - DNA, 120 bp, Artificial Sequence
  ENSG00000109819_25 (sequence is synthesized)
atatatatatatatataaattaaaaaggaaagaaaactaacaaccaaccaaccaaccaaccaaccacaaaccaccctaaaatgacagccgctgatgtctgggcatcagcctttgtactct

SEQ ID NO: 174388 - DNA, 120 bp, Artificial Sequence
  ENSG00000109819_26 (sequence is synthesized)
aagtgcagaatcaacttgaagcaagctttctctcataacgtaatgattatatgacaatcctgaagaaaccacaggttccatagaactaatatcctgtctctctctctctctctctctctc

SEQ ID NO: 174389 - DNA, 120 bp, Artificial Sequence
  ENSG00000109819_27 (sequence is synthesized)
gggtgggagaggatactgcgggcaccagaatgctaaagtttcctaacattttgaagtttctgtagttcatccttaatcctgacacccatgtaaatgtccaaaatgttgatcttccactgc

SEQ ID NO: 174390 - DNA, 120 bp, Artificial Sequence
  ENSG00000109819_28 (sequence is synthesized)
aaatttcaaaagccttgtcaatggtcaagcgtgcagcttgttcagcggttctttctgaggagcggacaccgggttacattactaatgagagttgggtagaactctctgagatgtgttcag

SEQ ID NO: 174391 - DNA, 120 bp, Artificial Sequence
  ENSG00000109819_29 (sequence is synthesized)
atagtgtaattgctacattctctgatgtagttaagtatttacagatgttaaatggagtatttttattttatgtatatactatacaacaatgttcttttttgttacagctatgcactgtaa

SEQ ID NO: 174392 - DNA, 120 bp, Artificial Sequence
  ENSG00000109819_30 (sequence is synthesized)
atgcagccttcttttcaaaactgctaaatttttcttaatcaagaatattcaaatgtaattatgaggtgaaacaattattgtacactaacatatttagaagctgaacttactgcttatata

SEQ ID NO: 174393 - DNA, 120 bp, Artificial Sequence
  ENSG00000109819_31 (sequence is synthesized)
tatttgattgtaaaaacaaaaagacagtgtgtgtgtctgttgagtgcaacaagagcaaaatgatgctttccgcacatccatcccttaggtgagcttcaatctaagcatcttgtcaagaaa

SEQ ID NO: 174394 - DNA, 120 bp, Artificial Sequence
  ENSG00000109819_32 (sequence is synthesized)
tatcctagtcccctaaaggtattaaccacttctgcgatatttttccacattttcttgtcgcttgtttttctttgaagttttatacactggatttgttaggggaatgaaattttctcatct

SEQ ID NO: 174395 - DNA, 120 bp, Artificial Sequence
  ENSG00000109819_33 (sequence is synthesized)
aaaatttttctagaagatatcatgattttatgtaaagtctctcaatgggtaaccattaagaaatgtttttattttctctatcaacagtagttttgaaactagaagtcaaaaatcttttta

SEQ ID NO: 174396 - DNA, 120 bp, Artificial Sequence
  ENSG00000109819_34 (sequence is synthesized)
aaatgctgttttgttttaatttttgtgattttaatttgatacaaaatgctgaggtaataattatagtatgatttttacaataattaatgtgtgtctgaagactatctttgaagccagtat

SEQ ID NO: 174397 - DNA, 120 bp, Artificial Sequence
  ENSG00000109819_35 (sequence is synthesized)
ttctttcccttggcagagtatgacgatggtatttatctgtattttttacagttatgcatcctgtataaatactgatatttcattcctttgtttactaaagagacatatttatcagttgca

SEQ ID NO: 174398 - DNA, 120 bp, Artificial Sequence
  ENSG00000109819_36 (sequence is synthesized)
gatagcctatttattataaattatgagatgatgaaaataataaagccagtggaaattttctacctaggatgcatgacaattgtcaggttggagtgtaagtgcttcatttgggaaattcag

SEQ ID NO: 174399 - DNA, 120 bp, Artificial Sequence
  ENSG00000109819_37 (sequence is synthesized)
cttttgcagaagcagtgtttctacttgcactagcatggcctctgacgtgaccatggtgttgttcttgatgacattgcttctgctaaatttaataaaaacttcagaaaaacctccattttg

SEQ ID NO: 174400 - DNA, 120 bp, Artificial Sequence
  ENSG00000109819_38 (sequence is synthesized)
atcatcaggatttcatctgagtgtggagtccctggaatggaattcagtaacatttggagtgtgtattcaagtttctaaattgagattcgattactgtttggctgacatgacttttctgga

SEQ ID NO: 174401 - DNA, 120 bp, Artificial Sequence
  ENSG00000109819_39 (sequence is synthesized)
agacatgatacacctactactcaattgttcttttcctttctctcgcccaacacgatcttgtaagatggatttcacccccaggccaatgcagctaattttgatagctgcattcatttatca

SEQ ID NO: 174402 - DNA, 120 bp, Artificial Sequence
  ENSG00000109819_40 (sequence is synthesized)
ccagcatattgtgttctgagtgaatccactgtttgtcctgtcggatgcttgcttgattttttggcttcttatttctaagtagatagaaagcaataaaaatactatgaaatgaaagaactt

SEQ ID NO: 174403 - DNA, 120 bp, Artificial Sequence
  ENSG00000109819_41 (sequence is synthesized)
gttcacaggttctgcgttacaacagtaacacatctttaatccgcctaattcttgttgttctgtaggttaaatgcaggtattttaactgtgtgaacgccaaactaaagtttacagtctttc

SEQ ID NO: 174404 - DNA, 120 bp, Artificial Sequence
  ENSG00000109819_42 (sequence is synthesized)
tttctgaattttgagtatcttctgttgtagaataataataaaaagactattaagagcaataaattatttttaagaaatcgagatttagtaaatcctattatgtgttcaaggaccacatgt

SEQ ID NO: 174405 - DNA, 120 bp, Artificial Sequence
  ENSG00000109819_43 (sequence is synthesized)
gttctctattttgcctttaaatttttgtgaaccaattttaaatacattctcctttttgccctggattgttgacatgagtggaatacttggtttcttttcttacttatcaaaagacagcac

SEQ ID NO: 174406 - DNA, 120 bp, Artificial Sequence
  ENSG00000109819_44 (sequence is synthesized)
tacagatatcatattgaggattaatttatcccccctacccccagcctgacaaatattgttaccatgaagatagttttcctcaatggacttcaaattgcatctagaattagtggagctttt

SEQ ID NO: 174407 - DNA, 120 bp, Artificial Sequence
  ENSG00000109819_45 (sequence is synthesized)
gtatcttctgcagacactgtgggtagcccatcaaaatgtaagctgtgctcctctcatttttatttttatttttttgggagagaatatttcaaatgaacacgtgcaccccatcatcactgg

SEQ ID NO: 174408 - DNA, 120 bp, Artificial Sequence
  ENSG00000109819_46 (sequence is synthesized)
aggcaaatttcagcatagatctgtaggatttttagaagaccgtgggccattgccttcatgccgtggtaagtaccacatctacaattttggtaaccgaactggtgctttagtaatgtggat

SEQ ID NO: 174409 - DNA, 120 bp, Artificial Sequence
  ENSG00000109819_47 (sequence is synthesized)
ttttttcttttttaaaagagatgtagcagaataattcttccagtgcaacaaaatcaattttttgctaaacgactccgagaacaacagttgggctgtcaacattcaaagcagcagagaggg

SEQ ID NO: 174410 - DNA, 120 bp, Artificial Sequence
  ENSG00000109819_48 (sequence is synthesized)
aactttgcactattggggtatgatgtttgggtcagttgataaaaggaaaccttttcatgcctttagatgtgagcttccagtaggtaatgattatgtgtcctttcttgatggctgtaatga

SEQ ID NO: 174411 - DNA, 120 bp, Artificial Sequence
  ENSG00000109819_49 (sequence is synthesized)
gaacttcaatcactgtagtctaagacctgatctatagatgacctagaatagccatgtactataatgtgatgattctaaatttgtacctatgtgacagacattttcaataatgtgaactgc

SEQ ID NO: 174412 - DNA, 120 bp, Artificial Sequence
  ENSG00000109819_50 (sequence is synthesized)
tgatttgatggagctactttaagatttgtaggtgaaagtgtaatactgttggttgaactatgctgaagagggaaagtgagcgattagttgagcccttgccgggccttttttccacctgcc

SEQ ID NO: 174413 - DNA, 120 bp, Artificial Sequence
  ENSG00000109819_51 (sequence is synthesized)
aattctacatgtattgttgtggttttattcattgtatgaaaattcctgtgattttttttaaatgtgcagtacacatcagcctcactgagctaataaagggaaacgaatgtttcaaatcta

SEQ ID NO: 174414 - DNA, 120 bp, Artificial Sequence
  ENSG00000109819_52 (sequence is synthesized)
cagcttcaggagtatttgcatggcatgaggacacctccactctttgccctctagtgttaaactcaggcatcttttctgtaatgtgaaaggaaagcgtgttttcagcacaggtgacattct

SEQ ID NO: 174415 - DNA, 120 bp, Artificial Sequence
  ENSG00000109819_53 (sequence is synthesized)
aaaattgggtcttccctgtgaagaaggttcgtatgaaaccagataactctttcatggccacaggtttgtgttgcttctaccaaagcagcatttcagggaagtgccttcccagggccggcc

SEQ ID NO: 174416 - DNA, 120 bp, Artificial Sequence
  ENSG00000109819_54 (sequence is synthesized)
agaaggccttgtacttgagtgaccaggtacgattcagaagccactttaaaaaacaaagcaaaaggctcagaggtaacagcctccagtgaatctgatccatgtgtaaggaaaacaggatgc

SEQ ID NO: 174417 - DNA, 120 bp, Artificial Sequence
  ENSG00000109819_55 (sequence is synthesized)
gtccctggaccggctggtagcaagatttatgtttcagaatattgcaacataacttccttccctctgttgcctttgtgcattgtttgaaggaggagaataaaggactacttttgcagcaca

SEQ ID NO: 174418 - DNA, 120 bp, Artificial Sequence
  ENSG00000109819_56 (sequence is synthesized)
agagaagacaaagagagcacacaagctgaacatacccacaggagagccccagcgttacttcactgaagcagagggctgcctttgagtgacgtcacgagttagagcagcaagctgcacagg

SEQ ID NO: 174419 - DNA, 120 bp, Artificial Sequence
  ENSG00000109819_57 (sequence is synthesized)
gataaatatgctaattatgcagatggccacacctgaagtaagcttggagaagatgctcttctgaggaaccaagaaggtatcaagattatcttctgaaagtgaaggggacagaggtgataa

SEQ ID NO: 174420 - DNA, 120 bp, Artificial Sequence
  ENSG00000109819_58 (sequence is synthesized)
agagaacttgtaaatggtgactgttgactggcttctctgggaattaaacatggaagtaagcggagtgataaacaaaattattgtgtagctgtgcagaccttactaaaatgaatgaaaatg

SEQ ID NO: 174421 - DNA, 120 bp, Artificial Sequence
  ENSG00000109819_59 (sequence is synthesized)
tacatttaaaatttcaataacttattccaatgcttaaaagatgcataactttacttgcttttccctttccctgataatgtttctagcttaagaagctcttactggcaccagccaacactc

SEQ ID NO: 174422 - DNA, 120 bp, Artificial Sequence
  ENSG00000109819_60 (sequence is synthesized)
aggctgatgaacgtgaactaaatagcttcaagctacaatgtacagtgggcagcatagcaataaatctaagcaaagcacacaaaacatcttctattaataaatagttcattgaaatgataa

SEQ ID NO: 174423 - DNA, 120 bp, Artificial Sequence
  ENSG00000109819_61 (sequence is synthesized)
gcccgactaacatggtaatagacctgaatgcataatgagttcttactttgctatcatcaaaagacttttcatcacagttacatactttctaatttatggaaaaacagcatttggaaaaca

SEQ ID NO: 174424 - DNA, 120 bp, Artificial Sequence
  ENSG00000109819_62 (sequence is synthesized)
aatgttttgtttttatttttttaaagatttaaaaaataaatcaactagggactaggaatcaacaactgtgagtgagttaaactgtgttgaaatactaaagggttgtgaaagattagtgac

SEQ ID NO: 174425 - DNA, 120 bp, Artificial Sequence
  ENSG00000109819_63 (sequence is synthesized)
aaagaagaacaaaagtctaaacctgtttattcctgtctatttcccacagaaagaatgagcaataaatggtacctcatataaattaataaataagaaggcctttctttttaaccaaggggg

SEQ ID NO: 174426 - DNA, 120 bp, Artificial Sequence
  ENSG00000109819_64 (sequence is synthesized)
tagatgtctacctttgtttgctttactaattaggtgagctcttttgattattattattaattatatttttggttcatatctctaatttctttatataatgggaattgctaaacttgacta

SEQ ID NO: 174427 - DNA, 120 bp, Artificial Sequence
  ENSG00000109819_65 (sequence is synthesized)
atctactgtatacttataaatcagtcaaaattcatttacttttcagtagcaagaattacctccgtgactccggactcttattataagcctaccctataataaagaatgttaatctattcc

SEQ ID NO: 174428 - DNA, 120 bp, Artificial Sequence
  ENSG00000109819_66 (sequence is synthesized)
tattaaagtgttactttgagaaaaggaattctttcccacaagatcagtactcatttacttgaaatacattattttttataggaacaaacatttagtgagtactctggcaagtgaattaaa

SEQ ID NO: 174429 - DNA, 120 bp, Artificial Sequence
  ENSG00000109819_67 (sequence is synthesized)
tcatcagcaaagacatttcttatacttccatgttatttggttgaaatctgagtcttaagaaagccaagtttaaaatattaactgagttttgctggaacccagcatataatacatgctgaa

SEQ ID NO: 174430 - DNA, 120 bp, Artificial Sequence
  ENSG00000109819_68 (sequence is synthesized)
taaatgtttgttaaatcatgagagaatgatgaatatattaatgttgataacaataatagtaatgacaataatggccaacattttggtatactcatgcttaatatatgtcatctcacttat

SEQ ID NO: 174431 - DNA, 120 bp, Artificial Sequence
  ENSG00000109819_69 (sequence is synthesized)
ccttgaaaacaacctattgttaggtcctattgttatcattcctgttttacatatgcagacactgaaactcagagaggttatttgttttccccaaatcacacagttgacaataaagacctg

SEQ ID NO: 174432 - DNA, 120 bp, Artificial Sequence
  ENSG00000109819_70 (sequence is synthesized)
ggatttgaaccccaaatttatcggacttcaaagtttatatccttgataaaaatagagaacccatgaatttgggtgacagccatcctttacaaagacatatcaagctgcttctttgctcaa

SEQ ID NO: 174433 - DNA, 120 bp, Artificial Sequence
  ENSG00000109819_71 (sequence is synthesized)
tatatttaaaaatagaacagaatctttcctttcagtgttggttggcacggaggtagagttagctggtgagccgagacggctgtaggttctgcctatggctgagattttgtaatacctctg

SEQ ID NO: 174434 - DNA, 120 bp, Artificial Sequence
  ENSG00000109819_72 (sequence is synthesized)
gagattaagtgggttttagaagaatgcttaaggtagtagagtttggactggggagacagaacaaggtggagggaacactgaaggttgtggttagttctactttcccaggcttctcagccg

SEQ ID NO: 174435 - DNA, 120 bp, Artificial Sequence
  ENSG00000109819_73 (sequence is synthesized)
ggtcttagaaagttcatgtgaggacttggccagttagaactggtaaattgaacattcctcactcagtacacttgtcaagttacaggcccattctaagtcatgctgcattaaataaacaat

SEQ ID NO: 174436 - DNA, 120 bp, Artificial Sequence
  ENSG00000109819_74 (sequence is synthesized)
gctttaaaaaatgtccatctccatagacctcttatctaaaaatcacctatttcatatcaggtgaatgccatgcattttgtagaggctagagaataacttagcggtaggggagatggcata

SEQ ID NO: 174437 - DNA, 120 bp, Artificial Sequence
  ENSG00000109819_75 (sequence is synthesized)
ggagtcaatgcctctctggtgggctactttaaaaaaaatacaactttctccataacttttatgtccctatattttgtgttgtggtatttgtgagaggtactttgcatttataccttcagg

SEQ ID NO: 174438 - DNA, 120 bp, Artificial Sequence
  ENSG00000109819_76 (sequence is synthesized)
agacttggttcagcatctagttaattatctacatgtaggtgcttaatatatgccatgccaccctttttgtctccctgtatcatattctatgctaataaaattattttcagcactctaaaa

SEQ ID NO: 174439 - DNA, 120 bp, Artificial Sequence
  ENSG00000109819_77 (sequence is synthesized)
aaggcgagctgtaccatagcaaatgaaagttttcttaaagctttctcctcagtgactttgcagtgtgtaatttaaaagcagaaagcaaagaaaatgcagttttaaaacactaggctggct

SEQ ID NO: 174440 - DNA, 120 bp, Artificial Sequence
  ENSG00000109819_78 (sequence is synthesized)
caggtgtaaaaactaatttgatttcaaaatagctgttagtaaagcaagatgagagaaaagagaatgctcttttggcagaaggcatttaaatctattgcatatggagattttcagagtgct

SEQ ID NO: 174441 - DNA, 120 bp, Artificial Sequence
  ENSG00000109819_79 (sequence is synthesized)
gtgagtgttccctcatctcatgataccagtatttgcactgcagtaaaatgaatgacacacatgttggggttatcatctatggattcaattttgaaatgtgctgctctggttggtgaagac

SEQ ID NO: 174442 - DNA, 120 bp, Artificial Sequence
  ENSG00000109819_80 (sequence is synthesized)
aaacagcaagaataaattcacaaagccttgtaagagaagagcagagcgttttcatagacgggatgtggaggtcctggaagcacagcccagcagatgactcacctctggatggaatcaaca

SEQ ID NO: 174443 - DNA, 120 bp, Artificial Sequence
  ENSG00000109819_81 (sequence is synthesized)
cacaaagcagataaaaagctgaacattaaagaccacattgttaaagcagagagccaaattgttcctccaccattccctatcccagacttcacatctaacaaggttaatttgtccctataa

SEQ ID NO: 174444 - DNA, 120 bp, Artificial Sequence
  ENSG00000109819_82 (sequence is synthesized)
aaatagcatattggcctttctgggtcactgtgggcaaccttgtccctggtttattttaacacctgctttaatgcctccatgatacaactgaatgggcatctttcattcattcgtctgtta

SEQ ID NO: 174445 - DNA, 120 bp, Artificial Sequence
  ENSG00000109819_83 (sequence is synthesized)
cttctgaatgaagctacttggggttcgttagaatgatggcaagtgagaatgcagtcgtctctaggtcattacttgtaatacgttctgaggactgcctttgctgatggggggagaaggact

SEQ ID NO: 174446 - DNA, 120 bp, Artificial Sequence
  ENSG00000109819_84 (sequence is synthesized)
ctcacagctgtagccagcgttcatgtttggtcattgctggaactctcaggaagcctgaaactgtgaactttgtagcagaaaaggaagatagatgaagagaatgaggcaaacttgctagca

SEQ ID NO: 174447 - DNA, 120 bp, Artificial Sequence
  ENSG00000109819_85 (sequence is synthesized)
acaactttatctcttcctctgaccccagagtcaccaaatttgtttttataaatgtgccatatcttccagtgaccccaagggttccccatttgagaacaagactattgaacgcaccttaag

SEQ ID NO: 174448 - DNA, 120 bp, Artificial Sequence
  ENSG00000109832_0 (sequence is synthesized)
aatcgcagccatggcgtcgttactgtggggaggcgacgcaggggcggcggagagcgagcggctgaacagccacttttcaaacctcagccaaccccggaagaacctttggggtattaagag

SEQ ID NO: 174449 - DNA, 120 bp, Artificial Sequence
  ENSG00000109832_1 (sequence is synthesized)
tactgcagtccgaaacatagatggttctattaataacatcaatgaagatgatgaagaagatgtagtggatttggcagctaattcactcttaaacaagttaatccatcaatccttagtaga

SEQ ID NO: 174450 - DNA, 120 bp, Artificial Sequence
  ENSG00000109832_2 (sequence is synthesized)
atccagtcaccgtgtggaagttttacagaaggatcccagctctccactttactcagtaaagacatttgaagagctgcggctaaaggaagagttactaaaaggaatctatgcaatgggatt

SEQ ID NO: 174451 - DNA, 120 bp, Artificial Sequence
  ENSG00000109832_3 (sequence is synthesized)
taataggccatctaaaatccaagagatggctctccctatgatgctggcacatccaccccagaacctcatagcacagagccagtctggaacaggaaagacagcggcatttgtgttggcaat

SEQ ID NO: 174452 - DNA, 120 bp, Artificial Sequence
  ENSG00000109832_4 (sequence is synthesized)
gttaagcagagttaatgccttggaattgttcccacagtgcctctgcctagctcctacttatgaattggctctgcaaactggccgtgtggttgagcagatgggaaaattctgtgtggatgt

SEQ ID NO: 174453 - DNA, 120 bp, Artificial Sequence
  ENSG00000109832_5 (sequence is synthesized)
tcaagtgatgtatgccattcgagggaatcgaattcccagaggcaccgacatcactaaacagattataattggcactcctgggactgtcctagattggtgttttaaactaaaattgattga

SEQ ID NO: 174454 - DNA, 120 bp, Artificial Sequence
  ENSG00000109832_6 (sequence is synthesized)
tttgactaagattcgtgtgtttgtcctggatgaagcagatgtgatgattgacactcaaggattctcagatcatagtattcgtattcaaagagctctaccctccgaatgccaaatgctcct

SEQ ID NO: 174455 - DNA, 120 bp, Artificial Sequence
  ENSG00000109832_7 (sequence is synthesized)
cttttcagcaacctttgaggactctgtgtggcactttgctgagcgaatcatccctgaccctaatgttatcaagttacgcaaagaggagctcacactgaacaacatccggcaatattacgt

SEQ ID NO: 174456 - DNA, 120 bp, Artificial Sequence
  ENSG00000109832_8 (sequence is synthesized)
gctgtgtgagcacaggaaagacaaataccaagctctgtgcaacatttatggcagcatcaccattggtcaggccatcatcttctgccagactcgtcgaaacgctaagtggttgaccgtgga

SEQ ID NO: 174457 - DNA, 120 bp, Artificial Sequence
  ENSG00000109832_9 (sequence is synthesized)
gatgatacaggatggccaccaggtgtctttgttaagcggggagctgaccgtggagcagcgagcttccatcattcagaggtttcgggatgggaaagagaaggttctcataacaactaatgt

SEQ ID NO: 174458 - DNA, 120 bp, Artificial Sequence
  ENSG00000109832_10 (sequence is synthesized)
ttgtgcccgagggattgatgtgaagcaggtcacaattgttgtgaactttgatctccctgtaaaacaaggagaggagccggactatgagacctacctccaccgcatagggcggacggggcg

SEQ ID NO: 174459 - DNA, 120 bp, Artificial Sequence
  ENSG00000109832_11 (sequence is synthesized)
ctttgggaaaaaaggccttgccttcaacatgattgaagtagatgagctgccctcgctcatgaaaatccaggaccactttaacagcagtattaagcaactcaacgctgaagacatggatga

SEQ ID NO: 174460 - DNA, 120 bp, Artificial Sequence
  ENSG00000109832_12 (sequence is synthesized)
aattgaaaagattgactattgaagaaagaactttattgtttgtgcagtatcctagtttatgtgagaatgtctcagtgggttttgaaggtaatttttttatgttgaggctttttcgacgtg

SEQ ID NO: 174461 - DNA, 120 bp, Artificial Sequence
  ENSG00000109832_13 (sequence is synthesized)
aaactgtcacagatggcaaaataaatgtcacggtacttagttttaagacatgaggtctttttgaagccaaattgatgtgaagcttgtgatccttttgaataaaaaaaaggcaagattatt

SEQ ID NO: 174462 - DNA, 120 bp, Artificial Sequence
  ENSG00000109832_14 (sequence is synthesized)
tcttattctaatctttgtacaggtaatgtctcaatgtgggctatgggggtgtttttggatttggttgatacaatctgagcagatcgtgcctcttgggagcatcttactgtgtcacaagag

SEQ ID NO: 174463 - DNA, 120 bp, Artificial Sequence
  ENSG00000109832_15 (sequence is synthesized)
ggcggtagagcttcgctgattttggaagcggagcgagtaggaaaaagcccatgtcttcagacctcactcacaggtgccctttccagccatttatgcctttccccgctccccgccttaaac

SEQ ID NO: 174464 - DNA, 120 bp, Artificial Sequence
  ENSG00000109832_16 (sequence is synthesized)
tcccccatgcatgcacatgcatgttcttaagtgaaagtacagattaaaacttttaaaaagtgaaaccatttgaaagaaagagtattttacttctttaatgtttcaagggacatacagaat

SEQ ID NO: 174465 - DNA, 120 bp, Artificial Sequence
  ENSG00000109832_17 (sequence is synthesized)
ttcagagtatttttctattttgcttctcttcaaattaaagatttactccctcatcagttatttcatagtctctaaaagtgtggctgtattatgggcatttcttaaaagcagtcgggaggg

SEQ ID NO: 174466 - DNA, 120 bp, Artificial Sequence
  ENSG00000109832_18 (sequence is synthesized)
taaaaaaaaaacccacataccctattaaagaagtaacattttagagagcaaaagttttttgcttttaagaatttaaaggtatgtcagaatcctggacattttcccacaagacccattgag

SEQ ID NO: 174467 - DNA, 120 bp, Artificial Sequence
  ENSG00000109832_19 (sequence is synthesized)
atactttttaatttttcatatttcctactcaaaagtaaagtgtagtgagcttgagaagatggggtaaatggagagtcccccagaaagccggagcggatcttgtaaccagagcgccggtac

SEQ ID NO: 174468 - DNA, 120 bp, Artificial Sequence
  ENSG00000109832_20 (sequence is synthesized)
cagctctgtcacggcaccaaactgcaccagtggctgcagtgagtggccctgtcatcggtggcatggtggttcctggcatatctattttgatatccctcttccatgtcaccctgcccatgt

SEQ ID NO: 174469 - DNA, 84 bp, Artificial Sequence
  ENSG00000109832_21 (sequence is synthesized)
tctattttgatatccctcttccatgtcaccctgcccatgttttctcccggagagcagggctcagaaatacataaaaatcatcac

SEQ ID NO: 174470 - DNA, 65 bp, Artificial Sequence
  ENSG00000109832_22 (sequence is synthesized)
cgcgctcccctccctcatttagcaacagatatttattgtataccctttatgccaaacaccaggga

SEQ ID NO: 174471 - DNA, 120 bp, Artificial Sequence
  ENSG00000109832_23 (sequence is synthesized)
cagatatttattgtataccctttatgccaaacaccagggaaaaggaggtgagtgagatacaacagccatgttggaattcagagcctaatggcagagacctagaataagccagcatgataa

SEQ ID NO: 174472 - DNA, 120 bp, Artificial Sequence
  ENSG00000109832_24 (sequence is synthesized)
cagactgtgctaaagcaagcgggcccagatcactagtgtagcacagaggagggaccctaacaccatctaggctggctcccagaggagaggacactcaggatctcctacaggagagcagga

SEQ ID NO: 174473 - DNA, 120 bp, Artificial Sequence
  ENSG00000109832_25 (sequence is synthesized)
tgtattcaactgtgccttctcagcatggactttgtaccacccagcaactttctaacctgagtctacgagaggaagtgttccagacccagcttaccataattacctggagagcccggggaa

SEQ ID NO: 174474 - DNA, 120 bp, Artificial Sequence
  ENSG00000109832_26 (sequence is synthesized)
aaaaatacagatttccttccccatgcagatgaaagcagactctccgagggcagagcccagaaatacccacttccataagggagccgcaagtgcaggtagagcagtggtaacgaagatggc

SEQ ID NO: 174475 - DNA, 120 bp, Artificial Sequence
  ENSG00000109832_27 (sequence is synthesized)
cgtcccagcgggagaccctcaggcagagaggcccttggggacagaacttgtaacacatggaactcctgctgctcggtgtccatcctggttctccttatcctacatctgcccttctctctg

SEQ ID NO: 174476 - DNA, 120 bp, Artificial Sequence
  ENSG00000109832_28 (sequence is synthesized)
gactggaagctggtgatcactcttgtccactcaatacccctaacacagtgcccagtgcattctaagtgcccaaggaacctttgtctttgttgagtaaatttttttttcttttgccacttc

SEQ ID NO: 174477 - DNA, 120 bp, Artificial Sequence
  ENSG00000109832_29 (sequence is synthesized)
ctcttactattcgagaatcgagttggaccttccaccgtgctcagctccgccttggggtgtcctaaataaaactttaccactttcctttacagttcaaatctctggtaagatctccgccag

SEQ ID NO: 174478 - DNA, 120 bp, Artificial Sequence
  ENSG00000109832_30 (sequence is synthesized)
ttaccctcacaaatgtcctcagtaatttttgtttggcagctgttcccacaggtctgcatgaaccaggtatttttctgcgttcccttttgccccctcctcacgtccctttgtctcaccacc

SEQ ID NO: 174479 - DNA, 120 bp, Artificial Sequence
  ENSG00000109832_31 (sequence is synthesized)
taggaggcagcaaagccatcctgtgtcacagctgcattaacacgaactggctagtttggtgagtcaacaatccaaaggctgttttttgcagggtgcagctcctgtcagagctgtaagcaa

SEQ ID NO: 174480 - DNA, 120 bp, Artificial Sequence
  ENSG00000109832_32 (sequence is synthesized)
ttttcccgtcttcctgcatggcctggccaaggtcatctctctcagtgcctgcctgaggacagagtagatagagaggcaaggaaacaccaggtgatttcagtgcaactgtgagctgggttc

SEQ ID NO: 174481 - DNA, 120 bp, Artificial Sequence
  ENSG00000109832_33 (sequence is synthesized)
atcagctgtatgtttcttggcaccaaatactaaaccaaatccgttaagtttatcttggccagcttaatactgttagcatattgaaattcatgattacgtagagcaggactgtgatttcca

SEQ ID NO: 174482 - DNA, 120 bp, Artificial Sequence
  ENSG00000109832_34 (sequence is synthesized)
gtgggtaagtgaacacctcgcatggaacacggctgctatgatgttaggtgctggatctaaggcaaccattaataataggaaaggcaaataagttggtcatagtctggtaggatgtgtgac

SEQ ID NO: 174483 - DNA, 120 bp, Artificial Sequence
  ENSG00000109832_35 (sequence is synthesized)
agccgcttttcaagagacattattgcttttggtcatgagaaagtgttgatcctcctcagcaaagctcggtcaccatgaaagctgctggcagtctctgcacatatgaccaacagtggaaaa

SEQ ID NO: 174484 - DNA, 120 bp, Artificial Sequence
  ENSG00000109832_36 (sequence is synthesized)
tcttagaggagtgatgggggtggtgggtggtgggcagtacctttccagacagcagagagagagaggctggttttgtcaagccttggcttggttcctggtcctctgagaggctcagtctcc

SEQ ID NO: 174485 - DNA, 120 bp, Artificial Sequence
  ENSG00000109832_37 (sequence is synthesized)
ttccttttgattcaaggcaggacctagattagaaagagaacccctgcagagacagtccagctgttgggatgggcctgcactttgctctctgaaccggggggcattactatgttctcaccc

SEQ ID NO: 174486 - DNA, 120 bp, Artificial Sequence
  ENSG00000109832_38 (sequence is synthesized)
acattgtacagacagcccatcatgctcagccttgcaggagggtcttcaggagcccagccatctggcacatactgcttttcccaagggagtaacagaaaggtcagatcctcttcaatccta

SEQ ID NO: 174487 - DNA, 120 bp, Artificial Sequence
  ENSG00000109832_39 (sequence is synthesized)
accctctcacttcaactctccactacttctggggaataatgatgtattatccaagaccctcatatcatattaacccacagactatgaaatcatcacagtcttgttctatgctacagggaa

SEQ ID NO: 174488 - DNA, 120 bp, Artificial Sequence
  ENSG00000109832_40 (sequence is synthesized)
tacgaactttttgccctagaaagcatccaagaggcactcaaccccaacattttctatacttttgctaatccgtggctgagagaatttgacattttcccttctcttttttttttttttgag

SEQ ID NO: 174489 - DNA, 86 bp, Artificial Sequence
  ENSG00000109832_41 (sequence is synthesized)
atgccaccacgcctggcttatttttgtatgttattttagtagcgatggggtttcaccgtattggtcaggctggtctcgaactcgtg

SEQ ID NO: 174490 - DNA, 120 bp, Artificial Sequence
  ENSG00000109832_42 (sequence is synthesized)
aagtgctgggattacaggcatcagccacggcgcccagcctccccttctcatttctgtctgctgactcctcttcccgttctgctgctcacatccgcaggttgatgttttcaccctcggggt

SEQ ID NO: 174491 - DNA, 120 bp, Artificial Sequence
  ENSG00000109832_43 (sequence is synthesized)
gggttctgccttatcccctgccaccctcctgtgctgcctgggtccctcagaaggatgggtctggacttcccacaccctccttcgctgcccctcactgtgttgcctggtgtctgcctgaag

SEQ ID NO: 174492 - DNA, 120 bp, Artificial Sequence
  ENSG00000109832_44 (sequence is synthesized)
agatgcagtttgagccattggctggtttctcttactgctttgcaaactatcagttttaaatgtgggtggggctgaagcaccattctccatttttaatgtggattttccatccccctttaa

SEQ ID NO: 174493 - DNA, 120 bp, Artificial Sequence
  ENSG00000109832_45 (sequence is synthesized)
acattaaacttttagattcttctagtgaaatacagaaaacacacgtgaactgggatgattcttggctgagagatgtcccatggtgtttggcaaacccacggaggggcccacaggcccatg

SEQ ID NO: 174494 - DNA, 120 bp, Artificial Sequence
  ENSG00000109832_46 (sequence is synthesized)
tctggaactgcctggccctcctttaccagtttatcagccttccatctctgctgaggtagaaacagccagaggctctgatataataaagatgagctctgaagaggggctctctctccctct

SEQ ID NO: 174495 - DNA, 120 bp, Artificial Sequence
  ENSG00000109832_47 (sequence is synthesized)
tgtattcagaagaactgaaagttttcataagtctctagagaagcgtggcaactatctgtagcatttttctttgggaattaacctttgcccataattatttctgttcagtagaataaccat

SEQ ID NO: 174496 - DNA, 120 bp, Artificial Sequence
  ENSG00000109832_48 (sequence is synthesized)
gggtttctctattccagtttctagaatataattttcataaatgaggatggtctcctattttgagcttaacatttttctattgctagaaagaatggtactgcctcactccagctccttagt

SEQ ID NO: 174497 - DNA, 120 bp, Artificial Sequence
  ENSG00000109832_49 (sequence is synthesized)
gtgtgatcatggcttgaaatctctgctttctgttatattcggaggtaacatgtataggtcatgtataatggcctcaggcatgatttagaaggcacagactgagcaggctgctttgtgagg

SEQ ID NO: 174498 - DNA, 120 bp, Artificial Sequence
  ENSG00000109832_50 (sequence is synthesized)
tggtgaactccccattcatgagagcattcaatcaatcagaagatgaatagttaatcagatgctgtagttctggttcttgaataaccaggagttcagaataaaatgatctcggagactctg

SEQ ID NO: 174499 - DNA, 120 bp, Artificial Sequence
  ENSG00000109832_51 (sequence is synthesized)
tccattctaagataccatgtttccatgaccctacacacaatagctacacaggtggagcaacatgagtctgagaagctttgcacaaaagaagattgttttccacaaatgaaaatggggtgg

SEQ ID NO: 174500 - DNA, 120 bp, Artificial Sequence
  ENSG00000109832_52 (sequence is synthesized)
ttaacttctaattgtaccctgtcttagcgttcagatgcattggttccttccccatgtgaccatctcttcattcaaagcttaggctgaatgtggattatttttaatttaatgttcatatta

SEQ ID NO: 174501 - DNA, 120 bp, Artificial Sequence
  ENSG00000109832_53 (sequence is synthesized)
taaaagcaatgaaacagcaaagtagagcaaaatatcaacaatccaatgactttatcataaaaattatcagcttgatatagtcctgttcttaatataaacatctgtggttaattatagtat

SEQ ID NO: 174502 - DNA, 120 bp, Artificial Sequence
  ENSG00000109832_54 (sequence is synthesized)
tatatctttttatttgaaacattcaagttttttttcatgttaccacacagtgtttgggattatattttcaaaataataattgaccagattgtcctatctagtgaatatgcatatagctga

SEQ ID NO: 174503 - DNA, 120 bp, Artificial Sequence
  ENSG00000109832_55 (sequence is synthesized)
ctttgttgaacatttataggatgtccatttttccaaagctttaattataaatcatgctgcagtaaatatcttctcgcccaatattccgaattatttcttaagattagagacattaagtgc

SEQ ID NO: 174504 - DNA, 120 bp, Artificial Sequence
  ENSG00000109832_56 (sequence is synthesized)
gagtaccaggtcgaaaactagaagcactttaacagcatttaacagattttgttagagctacattgcattcagtagactggctataccaatatatagttgcacagcaaattcacctcacct

SEQ ID NO: 174505 - DNA, 120 bp, Artificial Sequence
  ENSG00000109832_57 (sequence is synthesized)
taccagcaagggatattttcattttaaaattgcttggtaacttttctggtttatgtttctcttagtacaagcaagattatattttttaaagtggttcatcatttgaaaagcatctgtagt

SEQ ID NO: 174506 - DNA, 120 bp, Artificial Sequence
  ENSG00000109832_58 (sequence is synthesized)
gttctttgcccatttatcttgtgggatgttaatggtttccttgtcaagttgtgtgaaatatatgtgtgaatttatttttccaaataaaataaagacattaaccttctattttactgacaa

SEQ ID NO: 174507 - DNA, 120 bp, Artificial Sequence
  ENSG00000109832_59 (sequence is synthesized)
tttcctccagccccccatctaaacaaggcaggctctgatgatggcctgctggaactctggactggcagatttctctgatggaaactcaaaaggtcccatggttcaaattgtcctgtgccc

SEQ ID NO: 174508 - DNA, 120 bp, Artificial Sequence
  ENSG00000109832_60 (sequence is synthesized)
caaagcccatggatgtggctggggagcaggggagaaggaacaccttccaggacagtgacagcagtattaagcaactcaacgctgaagacatggatgaaattgaaaagattgactattgaa

SEQ ID NO: 174509 - DNA, 120 bp, Artificial Sequence
  ENSG00000109832_61 (sequence is synthesized)
aactccccactccttcctgctcctcagccagggaacttggagaatctagccaggttgggtggagggcactgggaggggatagagaggaggtgacaagcctgaagatggagagagcagcta

SEQ ID NO: 174510 - DNA, 120 bp, Artificial Sequence
  ENSG00000109832_62 (sequence is synthesized)
gaagtttccctgggccctggcttccccaacagacctcaaaagtctggcccacccttgaaggctagggctggcctggtgggcatcccctgtgctgggtccagacagactcctaccagggac

SEQ ID NO: 174511 - DNA, 120 bp, Artificial Sequence
  ENSG00000109832_63 (sequence is synthesized)
ctccaaccagaccctcaactacagagaactgtccctatattgtcattcccggcctggtagcagcactgttgccagatggggcagaacccaggaagaacctgggaactgaagggctaggag

SEQ ID NO: 174512 - DNA, 120 bp, Artificial Sequence
  ENSG00000109832_64 (sequence is synthesized)
tgcactgaggcctagtgtcacagcccgggaaacagcaacaacagcaacgctaataataataatcgtagtggtgcagtaggtgtgactcttactctataaacttaggtgcacaaaaatatc

SEQ ID NO: 174513 - DNA, 120 bp, Artificial Sequence
  ENSG00000109832_65 (sequence is synthesized)
catttctctatttcactaaaatcaagtagagttgagttcattcctggggctcctgcctttttccagcgtcccaccagaacccgggggcttattgctatggtttaaatgtgtccccaaaat

SEQ ID NO: 174514 - DNA, 120 bp, Artificial Sequence
  ENSG00000109832_66 (sequence is synthesized)
tcaggtgttgccagtgtggtagtattaagagatggggtctccaagaggtggttgggccacgagggctcctcccctgtgaatgggagtagctgcccttataaaagggcttgacaaagggag

SEQ ID NO: 174515 - DNA, 120 bp, Artificial Sequence
  ENSG00000109832_67 (sequence is synthesized)
tttatccctttttgcccttctgccttccactatgtggggacatggccttcgtctcctctggaagatgcagtgacaaggcgccatcttggaagacaacagctctcaccagacaccggacct

SEQ ID NO: 174516 - DNA, 120 bp, Artificial Sequence
  ENSG00000109832_68 (sequence is synthesized)
gctggagccccggtcttggacttcccagtctccagaactatgaggccacaagatggagacggagcgggttgctcacccaagttcatgcagcgcccatctgacgttcccccgggaggagct

SEQ ID NO: 174517 - DNA, 120 bp, Artificial Sequence
  ENSG00000109832_69 (sequence is synthesized)
gcagggccttctttcgaggaggtggcagaggggcttcctgcgtgcaaaggagggtcccaccagcccttttggaacctcagcctggtcctccagaatttcacctcaaactactggagtcta

SEQ ID NO: 174518 - DNA, 120 bp, Artificial Sequence
  ENSG00000109832_70 (sequence is synthesized)
ggtcctgagtccctccttataagcccctcatttctgagttcagctacgaggccactccagggactccaggttgccccttagtccacacagttgcctgtccttccctccaggctgatgtga

SEQ ID NO: 174519 - DNA, 120 bp, Artificial Sequence
  ENSG00000109832_71 (sequence is synthesized)
gccctgggggcccaggcaggctggggatggaggccacgcagtgagggtggagagcacaggccctgagcaggaggggacgatgagaagcaggcaccagaacctgggaatccacagctttac

SEQ ID NO: 174520 - DNA, 120 bp, Artificial Sequence
  ENSG00000109832_72 (sequence is synthesized)
ctgccccagggcccggctgctgagcttgcacagtgcagagcacagctccaggtgacctcagcttggatgaagctccttgggaaggggggaaggagggaaagagaggatctcttgtcaggc

SEQ ID NO: 174521 - DNA, 120 bp, Artificial Sequence
  ENSG00000109832_73 (sequence is synthesized)
ctccaaccctgccaccagaggatggaaaaatctgaccccatccctgtgccttaaacttagacgctcaagaaacatttgttcaattcattgtttacgttctttggttaagaggtataagta

SEQ ID NO: 174522 - DNA, 120 bp, Artificial Sequence
  ENSG00000109832_74 (sequence is synthesized)
agtttaagaggcaggagctatacatgcataatctcatgtgttcctcacaggaaaaccattaaaggaagaaattgaagcttagagaagttctgtaagatgctgaggtcacacagtaataaa

SEQ ID NO: 174523 - DNA, 120 bp, Artificial Sequence
  ENSG00000109832_75 (sequence is synthesized)
tgtgtatatttacatttctgtagcattctctatggacacgctcatctagcatcatagacatcacagcatgcaagcaaacttcctaaccaaagtacctgtctcaattacataagccctggt

SEQ ID NO: 174524 - DNA, 120 bp, Artificial Sequence
  ENSG00000109832_76 (sequence is synthesized)
tggatttctaaattttctctataaataggaattcccttggcagacgtggtacttgaatggcccgtgtactgaggaaagcattgcaggaccctacagtgtttttcctcttctagggattga

SEQ ID NO: 174525 - DNA, 120 bp, Artificial Sequence
  ENSG00000109832_77 (sequence is synthesized)
aactccccactccttcctgctcctcagccagggaacttggagaatctagccagatgcagtgacaaggcgccatcttggaagacaacagctctcaccagacaccggacctgctggagcccc

SEQ ID NO: 174526 - DNA, 120 bp, Artificial Sequence
  ENSG00000109832_78 (sequence is synthesized)
ggtcttggacttcccagtctccagaactgtggagaagagaagagcagcacacgcagtttcaaatagtgaatgactttcatctggaaatgaggccacaagatggagacggagcgggttgct

SEQ ID NO: 174527 - DNA, 120 bp, Artificial Sequence
  ENSG00000109832_79 (sequence is synthesized)
gcgagcgttcgaagtggggcgtcagatgctggaggggagatgcgggaagggtttggaagagggccacagagggagaccccgtccccacccccacgagagttttcaaacctcagccaaccc

SEQ ID NO: 174528 - DNA, 120 bp, Artificial Sequence
  ENSG00000109832_80 (sequence is synthesized)
ggtacttaaccttgtagaaagcaataagcgctgtccccagggaagtgcacacaggcacacacatgccatttggaatataattttcacaggttggcagactgagtgtagcacatccaccga

SEQ ID NO: 174529 - DNA, 120 bp, Artificial Sequence
  ENSG00000109832_81 (sequence is synthesized)
cctttcagggaagtaggttaagtgcccctgtgttaggctaactggggaggacagggtgaggaagatgtgttaaggccactgtcgctatggtgagcttctaaggccctggtctcaggaagt

SEQ ID NO: 174530 - DNA, 120 bp, Artificial Sequence
  ENSG00000109832_82 (sequence is synthesized)
gactgcagtagaagagcctcagtccctcccaggctctcctcacttccactctggccttctctgccccagcgtatctagatacatacattccatggtctggtgcatttgatgctgtttgag

SEQ ID NO: 174531 - DNA, 120 bp, Artificial Sequence
  ENSG00000109832_83 (sequence is synthesized)
tgccggtctgacagtgatgatgtgtgctggagagctggagtccaggggctcatgagagtagtagaagcagaatgcatgagctggaaggcttctaattcacaggaccagggttctaatatg

SEQ ID NO: 174532 - DNA, 120 bp, Artificial Sequence
  ENSG00000109832_84 (sequence is synthesized)
aggaccagggttctaatatgagacagatgattaaataatgcttatatggtaattaaaaattattttgatcaagcagaattaatatgagctcaggccgggtgtggcagctcacacctgtaa

SEQ ID NO: 174533 - DNA, 120 bp, Artificial Sequence
  ENSG00000109832_85 (sequence is synthesized)
aggcggaggttgcagtgagctgaggtcgcacaactgcactccagcctggcgaaagagtgagactgcgtctcaaaaaaataaaatttgagctcagatttacatgttataactcattctgga

SEQ ID NO: 174534 - DNA, 120 bp, Artificial Sequence
  ENSG00000109832_86 (sequence is synthesized)
aaatttgagctcagatttacatgttataactcattctggagtcagaatttcacatcttgtgaaggcagagcagattacagaagcagattttcgtatcttataaagaaattccctaagcaa

SEQ ID NO: 174535 - DNA, 120 bp, Artificial Sequence
  ENSG00000109846_0 (sequence is synthesized)
gccattgggtgtggacagaaagctagtgaaacaagaccatgacaagtcactggccggctcagacgtgtttgtgtctctcttttcttagctcaaagcttcacaagactgcatatataaggg

SEQ ID NO: 174536 - DNA, 120 bp, Artificial Sequence
  ENSG00000109846_1 (sequence is synthesized)
gctggctgtagctgcagctgaaggagctgaccagccagctgacccctcacactcacctagccaccatggacatcgccatccaccacccctggatccgccgccccttctttcctttccact

SEQ ID NO: 174537 - DNA, 120 bp, Artificial Sequence
  ENSG00000109846_2 (sequence is synthesized)
cccccagccgcctctttgaccagttcttcggagagcacctgttggagtctgatcttttcccgacgtctacttccctgagtcccttctaccttcggccaccctccttcctgcgggcaccca

SEQ ID NO: 174538 - DNA, 120 bp, Artificial Sequence
  ENSG00000109846_3 (sequence is synthesized)
gacactggactctcagagatgcgcctggagaaggacaggttctctgtcaacctggatgtgaagcacttctccccagaggaactcaaagttaaggtgttgggagatgtgattgaggtgcat

SEQ ID NO: 174539 - DNA, 120 bp, Artificial Sequence
  ENSG00000109846_4 (sequence is synthesized)
ggaaaacatgaagagcgccaggatgaacatggtttcatctccagggagttccacaggaaataccggatcccagctgatgtagaccctctcaccattacttcatccctgtcatctgatggg

SEQ ID NO: 174540 - DNA, 120 bp, Artificial Sequence
  ENSG00000109846_5 (sequence is synthesized)
gtcctcactgtgaatggaccaaggaaacaggtctctggccctgagcgcaccattcccatcacccgtgaagagaagcctgctgtcaccgcagcccccaagaaatagatgccctttcttgaa

SEQ ID NO: 174541 - DNA, 120 bp, Artificial Sequence
  ENSG00000109846_6 (sequence is synthesized)
ttgcattttttaaaacaagaaagtttccccaccagtgaatgaaagtcttgtgactagtgctgaagcttattaatgctaagggcaggcccaaattatcaagctaataaaatatcattcagc

SEQ ID NO: 174542 - DNA, 120 bp, Artificial Sequence
  ENSG00000109846_7 (sequence is synthesized)
gggtggatagaagggggacaaggaggcacacccaggccggcaaagagcaggtatcagcactgcaagcaccaagtgtgtcttgagacgtgtttgtgtctctcttttcttagctcagtgagt

SEQ ID NO: 174543 - DNA, 120 bp, Artificial Sequence
  ENSG00000109846_8 (sequence is synthesized)
actgggtatgtgtcacattgccaaatcccggatcacaagtctccatgaactgctggtgagctaggataataaaacccctgacatcaccattccagaagcttcacaagactgcatatataa

SEQ ID NO: 174544 - DNA, 120 bp, Artificial Sequence
  ENSG00000109846_9 (sequence is synthesized)
agcaagaggggagtcaggaggagtagggaacgggagggaggccacactgtagctaggaggagaaggcagctcggaagaggggaaagagaacggaaaggaaagggaggaggaggaggagaa

SEQ ID NO: 174545 - DNA, 120 bp, Artificial Sequence
  ENSG00000109846_10 (sequence is synthesized)
ggaggaggagggggaggaggaggaggcaccaaacggcctgggtggatagaagggggacaaggaggcacacccaggccggcaaagagcaggtatcagcactgcaagcaccaagtgtgtctt

SEQ ID NO: 174546 - DNA, 120 bp, Artificial Sequence
  ENSG00000109846_11 (sequence is synthesized)
aaacggcctgggtggatagaagggggacaaggaggcacacccaggccggcaaagagcaggtatcagcactgcaagcaccaagtgtgtcttgagggggtggggtctttctgcccagatgtg

SEQ ID NO: 174547 - DNA, 120 bp, Artificial Sequence
  ENSG00000109846_12 (sequence is synthesized)
ggcgcagggagcagggagatgtagacctcattgacctctgtgtccaaatgtcggccaccccgaggtgcttccaggtttaagatgccatcatgggagagagcagctcggactcgccagggg

SEQ ID NO: 174548 - DNA, 120 bp, Artificial Sequence
  ENSG00000109846_13 (sequence is synthesized)
tcgacatcagcaggcaggacataggtgcggcagaactctcgggacacgaagccgtggcggtccaggcgctgggggtgccgggcagacacctccagcaggttatccacagtcctcacagtc

SEQ ID NO: 174549 - DNA, 120 bp, Artificial Sequence
  ENSG00000109846_14 (sequence is synthesized)
aggcccagccaacattgatctaaacctttgggaaatacccctaaacatatctatgcctcagggtttgaaaaacaatgaagtgttggactgtttcagacttctcagattctcactggatga

SEQ ID NO: 174550 - DNA, 120 bp, Artificial Sequence
  ENSG00000109846_15 (sequence is synthesized)
gaagaggcctttgtctcacagacaaaccacaaagccaggcattggagtcagagaggcagcagatgccaggcttgcacccatccttgcgactggtcccctgggtgatctgtcttcttctct

SEQ ID NO: 174551 - DNA, 120 bp, Artificial Sequence
  ENSG00000109846_16 (sequence is synthesized)
actggaacctcctggaaacttctccatccattttcctttcctaccctgcctaaaccattttaggcacatgtgtgtccaaatgtgaagaaaaatgaggaggttgctagtgccttcctcccc

SEQ ID NO: 174552 - DNA, 120 bp, Artificial Sequence
  ENSG00000109846_17 (sequence is synthesized)
catcacctgtttctatttgatagtcctctgtatcccatttattacattttttcatgcactgtcaagtttatcctccgtcccctaacttctctacaggatacccctttctggtttggttca

SEQ ID NO: 174553 - DNA, 120 bp, Artificial Sequence
  ENSG00000109846_18 (sequence is synthesized)
tgacaatctgcagggaaagagctgccttcaaactcctttgcttatctcttccaacaccttggactcttgaccgattttaccatctcaggtttcagagccaggagagagccctgcctcatc

SEQ ID NO: 174554 - DNA, 120 bp, Artificial Sequence
  ENSG00000109846_19 (sequence is synthesized)
ctgagctgttcatccccatgggtattttctgcctttctattccctcttctatgattttctgggtttctcagggctacgacagggcgctggcctgggtccaatcaagccctacgaggaaac

SEQ ID NO: 174555 - DNA, 120 bp, Artificial Sequence
  ENSG00000109846_20 (sequence is synthesized)
agggtgaacaaataaggttgacagagctgtcacagataacactctggtttaaaaatattcaagtgtgagtaaacaggagctgagtgggcaagggctttggaaggacaagcaggaccagca

SEQ ID NO: 174556 - DNA, 120 bp, Artificial Sequence
  ENSG00000109846_21 (sequence is synthesized)
cagacagctatgtttatttaaaaaggagattttttaagcagagaagagaaggatgaattacccggacagaaagcagctctgcagaataagacagcacctgtgtaatcagtatttttgccc

SEQ ID NO: 174557 - DNA, 120 bp, Artificial Sequence
  ENSG00000109846_22 (sequence is synthesized)
aggtatgtagcttgtttttttgttttctgctcattcattcagtgcatactgtaatagtccaggtagtgctatcagctttggaggctggctacattccagtcccaagccataacagtcggg

SEQ ID NO: 174558 - DNA, 120 bp, Artificial Sequence
  ENSG00000109846_23 (sequence is synthesized)
atcaggggttacaaatcaatgtctagaagactaagttaggatagacatattgctgttgttactattatggccagagatgtggcctttgatttgatcgccttagatgggatgatgggatgc

SEQ ID NO: 174559 - DNA, 120 bp, Artificial Sequence
  ENSG00000109846_24 (sequence is synthesized)
tgatgccccatttaagccagtggttctgaatctgggccacattagaatcaccaggggaactttcaaaaaacctaatgctcgggcatactccagaccaattagcatatgtgctgccgaagc

SEQ ID NO: 174560 - DNA, 120 bp, Artificial Sequence
  ENSG00000109846_25 (sequence is synthesized)
gagcactactccagaccaattaaatcagcatttttaagggtgggacccaggcatcagcaatttttaaggtaattctaatctacagtcaaggttgagaaccactgattaggtatagggctg

SEQ ID NO: 174561 - DNA, 120 bp, Artificial Sequence
  ENSG00000109846_26 (sequence is synthesized)
tcttaatgctgaactacttggtttgtctaaatttcagagctgtgctcagtctttaatcccctacagcccatgtggtaatcagttaacgagagcctgtttggctacatgcttgagagtcag

SEQ ID NO: 174562 - DNA, 120 bp, Artificial Sequence
  ENSG00000109846_27 (sequence is synthesized)
caggcatacgggttaaggtcatctactctttgggggagttctgacaaatggaacagcttgttatgactttataagagggctttaaaattgcttctcaccatttaacgatagctcagaacc

SEQ ID NO: 174563 - DNA, 120 bp, Artificial Sequence
  ENSG00000109846_28 (sequence is synthesized)
tgtgcgtcaaccagtacagtttgtcctcagtaatgtcctcaggctgtttcaattttgcttatatgatttaggtttgggtcatagtctccttggatggagtcatttttttttttttttaat

SEQ ID NO: 174564 - DNA, 120 bp, Artificial Sequence
  ENSG00000109846_29 (sequence is synthesized)
ttcagcagcagtcctattgttctggaaccttctgggacattcctgaagagtcaggacaatttcagggcttcctcagggactcagattctaaatgagattccaaattctgtaggcccagcc

SEQ ID NO: 174565 - DNA, 120 bp, Artificial Sequence
  ENSG00000109846_30 (sequence is synthesized)
aacattgatctaaacctttgggaaatacccctaaacatatctatgcctcagggtttgaaaaacaatgaagtgttggactgtttcagacttctcagattctcactggtaggagtgactacc

SEQ ID NO: 174566 - DNA, 120 bp, Artificial Sequence
  ENSG00000109846_31 (sequence is synthesized)
taggcaatttcatcttagctgcaaccctgaaacgaagctctatttatttttcctatgttgtcatggcatttggtctcacctaaggggaaatcaggatgcctgagttctgggcaggtgata

SEQ ID NO: 174567 - DNA, 120 bp, Artificial Sequence
  ENSG00000109846_32 (sequence is synthesized)
ataccttctccgaagcgctgctcacccaggcggctcgggttggcaaattcgtactcggcggtggccgggtgggcatgtggcactgagcggcccgacatggctgcagatgcagcagaagcc

SEQ ID NO: 174568 - DNA, 120 bp, Artificial Sequence
  ENSG00000109851_0 (sequence is synthesized)
ggaggactcgcagacgcccaagtgggattgttacttggagacgtttgctaagcccaagagagaggacactgtgggggcgggaggggcgggaagcgaggcgtttaccctccggccactgaa

SEQ ID NO: 174569 - DNA, 120 bp, Artificial Sequence
  ENSG00000109851_1 (sequence is synthesized)
agaagggttatttcgcccgcccgcgcctaccatgatgttccccggcctcctcgcgccccccgccgggtaccctagcctcctgcggcccacgcccaccttgacgctgccccagtccttgca

SEQ ID NO: 174570 - DNA, 120 bp, Artificial Sequence
  ENSG00000109851_2 (sequence is synthesized)
gtcggcattttccggccactccagcttcctggtggaggatctgatccgcatcagccgaccccccgcctacctgccccgcagcgtgcccaccgccagcatgtcgccgcccaggcagggggc

SEQ ID NO: 174571 - DNA, 120 bp, Artificial Sequence
  ENSG00000109851_3 (sequence is synthesized)
ccccacggccctcaccgacacgggggcctcggacctgggctccccgggtcccggcagccgacggggcggctctccgccgactgccttctcccctgccagcgagacgacgtttctgaagtt

SEQ ID NO: 174572 - DNA, 120 bp, Artificial Sequence
  ENSG00000109851_4 (sequence is synthesized)
tggagtgaacgccatcctctcctcggggcccagaacagaaacatccccagccttgctccagagcgtccctcccaagaccttcgcctttccctacttcgaagggtcttttcagcctttcat

SEQ ID NO: 174573 - DNA, 120 bp, Artificial Sequence
  ENSG00000109851_5 (sequence is synthesized)
ccccgggaccttctcctggccgctggccgcgcgcgggaagcctcggcggggcatgctgcgtcgagcagtcttctccgacgtgcagcggaaggcgctggagaagatgttccagaagcagaa

SEQ ID NO: 174574 - DNA, 120 bp, Artificial Sequence
  ENSG00000109851_6 (sequence is synthesized)
gtacatcagcaagcccgaccgcaagaagctggcggccaagctgggcctgaaagactcgcaggtgaaaatctggttccagaaccgacgcatgaaatggcggaactccaaggagcgcgaact

SEQ ID NO: 174575 - DNA, 120 bp, Artificial Sequence
  ENSG00000109851_7 (sequence is synthesized)
cctgtctagcgggggctgtcgcgagcagaccctgcccaccaagctcaatccgcacccggacctcagcgacgtgggccagaagggccctgggaacgaagaggaggaggagggcccgggcag

SEQ ID NO: 174576 - DNA, 120 bp, Artificial Sequence
  ENSG00000109851_8 (sequence is synthesized)
ccccagccaccgcctggcctaccacgcgtcctccgacccccagcacctgcgggacccgcggctgccagggccgctgcccccctcgcccgcgcactcgagcagtcccgggaaaccttcgga

SEQ ID NO: 174577 - DNA, 120 bp, Artificial Sequence
  ENSG00000109851_9 (sequence is synthesized)
cttctcagattccgaggaggaagaggagggcgaggaacaggaggaaatcaccgtgtcctagaagccgctcgcacgccagagtactatttttaagtgctttgaaatcgaagaggtggggtc

SEQ ID NO: 174578 - DNA, 120 bp, Artificial Sequence
  ENSG00000109854_0 (sequence is synthesized)
gcgaggccacccggaagaccaagccggcatggccgaaacagaagccctgtcgaagcttcgggaagacttcaggatgcagaataaatccgtctttattttgggcgccagcggagaaaccgg

SEQ ID NO: 174579 - DNA, 120 bp, Artificial Sequence
  ENSG00000109854_1 (sequence is synthesized)
cagagtgctcttaaaggaaatcctggagcagggcctgttttccaaagtcacgctcattggccggaggaagctcaccttcgacgaggaagcttataaaaatgtgaatcaagaagtggtgga

SEQ ID NO: 174580 - DNA, 120 bp, Artificial Sequence
  ENSG00000109854_2 (sequence is synthesized)
ctttgaaaagttggatgactacgcctctgcctttcaaggtcatgatgttggattctgttgcctgggtaccaccagagggaaagctggggcggagggatttgttcgtgttgaccgagatta

SEQ ID NO: 174581 - DNA, 120 bp, Artificial Sequence
  ENSG00000109854_3 (sequence is synthesized)
ttcaacttgctatcctctaaaggagctgataaatcaagcaattttttatatctacaagttaagggagaagtagaagccaaggttgaagaattaaaatttgatcgttactctgtatttagg

SEQ ID NO: 174582 - DNA, 120 bp, Artificial Sequence
  ENSG00000109854_4 (sequence is synthesized)
cctggagttctgttatgtgataggcaagaatctcgcccaggtgaatggctggttagaaagttctttggctccttaccagactcttgggccagtgggcattctgtgcctgtggtgaccgtg

SEQ ID NO: 174583 - DNA, 120 bp, Artificial Sequence
  ENSG00000109854_5 (sequence is synthesized)
gttagagcaatgctgaacaatgtggtgagaccaagagacaagcagatggaactgctggagaacaaggccatccatgacctggggaaagcgcatggctctctcaagccatgaccacattgg

SEQ ID NO: 174584 - DNA, 120 bp, Artificial Sequence
  ENSG00000109854_6 (sequence is synthesized)
agaaatggtttttattgtcaaccttaacacccatcaccaaatcggtaatttcagggtctaaaaaaagtcagcatgttttaactttgttgttttactatcctcaggcatccattccaatca

SEQ ID NO: 174585 - DNA, 120 bp, Artificial Sequence
  ENSG00000109854_7 (sequence is synthesized)
cggcggcggcggctgctctggcggccgccctgctcctgctgcgtcgtgaggacccggggccgggggctggccccaggtaacccctccgcgtatgggaccgagctgggccaggtctcctgg

SEQ ID NO: 174586 - DNA, 120 bp, Artificial Sequence
  ENSG00000109854_8 (sequence is synthesized)
cccctccgcgtatgggaccgagctgggccaggtctcctggccgggccggggataccgtggggtatgcccagtgatgccagcagcttgtggcacctgggcgcaccctccagctcgggcccc

SEQ ID NO: 174587 - DNA, 120 bp, Artificial Sequence
  ENSG00000109854_9 (sequence is synthesized)
ttccgatgggtctgctggctcaggtgcgggcgatggccggggagccgcgccccgcacgtgactcagcactttccccagagcccggactgcggagaacaatatcctcctccctaacagata

SEQ ID NO: 174588 - DNA, 120 bp, Artificial Sequence
  ENSG00000109854_10 (sequence is synthesized)
ccctatctcaaacttgaatcaaaatttctggggtgtgggcacaataatctgtaattttctttgtttatacttcccctgatgccactggttccgatgccactggctggggggcctgctttg

SEQ ID NO: 174589 - DNA, 120 bp, Artificial Sequence
  ENSG00000109854_11 (sequence is synthesized)
aaatgcttgtctgcagagtcacagcagccatgaaaaccttatgaccgtgcaaatgagctctgctctaaaattgttgacattcatgtctctgagttacaaaagtgctaattcactacatgt

SEQ ID NO: 174590 - DNA, 120 bp, Artificial Sequence
  ENSG00000109854_12 (sequence is synthesized)
aattgtgtaagtaaacattgtgcctttactacttctttatgtaatagaagttatatacctaagcttatataatacatggggaggattaaataaaggaataaagatgaatggacaactcct

SEQ ID NO: 174591 - DNA, 120 bp, Artificial Sequence
  ENSG00000109854_13 (sequence is synthesized)
ctggggcggtaaggaaggcatatgctcttttccctttttgctggccagtaatatcaaggattcttttcttgctcactctttttctttgtgcctgttgcaatgcttaaatgtgaataagcc

SEQ ID NO: 174592 - DNA, 120 bp, Artificial Sequence
  ENSG00000109854_14 (sequence is synthesized)
tttattgtttaagattctatatgctgcactaacctttggtatccttttaatagtactgataagttcgtctttcaaagtaatccttgagttcaggccccagtgctggagacgtcgtaaata

SEQ ID NO: 174593 - DNA, 120 bp, Artificial Sequence
  ENSG00000109854_15 (sequence is synthesized)
aagccgggtaggcgctgtctccgtcgcctccaacccccccggtccgaccagggaaggtgggatgctctgatggccgggcctgcggcgctgagcgcggcggcggcggctgctctggcggcc

SEQ ID NO: 174594 - DNA, 120 bp, Artificial Sequence
  ENSG00000109854_16 (sequence is synthesized)
gattatcgctatcactacatcccctgactaagggaaaccatgatgtctgagtaaaactaattggtttatgctgttaacaatcagctgtttttccccttaataaatgtttgaaatttgaaa

SEQ ID NO: 174595 - DNA, 120 bp, Artificial Sequence
  ENSG00000109854_17 (sequence is synthesized)
ctagattgggtgtctccaaacacttttgactagagacccattaataaaaacgtttgaggatgcattctttactaatgtgtgaggtacattgtagagcatacacaaaaattgggaattaaa

SEQ ID NO: 174596 - DNA, 120 bp, Artificial Sequence
  ENSG00000109854_18 (sequence is synthesized)
tagactttgttctcttagtgcctggggagtgtcctcacccatactcggagaccctaccacattagaattgacacagaaaacaggagtgtaaagttgtgaagttattaagacaaaaaaaaa

SEQ ID NO: 174597 - DNA, 120 bp, Artificial Sequence
  ENSG00000109854_19 (sequence is synthesized)
agtctggcttaaaagtagtttctcagcctgatcttactgttccctttgttctttgcagatttgtttggtgtctgtgtttcaatgtcattgtccttgtttccttattgcagtccagtcttg

SEQ ID NO: 174598 - DNA, 120 bp, Artificial Sequence
  ENSG00000109854_20 (sequence is synthesized)
ctgctaaagctggtgtgcctatccagaggaccagacctggagcctttcccagggtctaagcctgactttcatgtattgcttggacacattttatttagatctccatccttctaggcctcc

SEQ ID NO: 174599 - DNA, 120 bp, Artificial Sequence
  ENSG00000109854_21 (sequence is synthesized)
cagcctgctacccaagccaagtagtaatctttaagatgaacttgctgctttttggaaataactcatgtccttttcccccttaggagggatttgttcgtgttgaccgagattatgtgctga

SEQ ID NO: 174600 - DNA, 120 bp, Artificial Sequence
  ENSG00000109861_0 (sequence is synthesized)
accgctagcccgcagcgctcggcttcctggtaattcttcacctcttttctcagctccctgcagcatgggtgctgggccctccttgctgctcgccgccctcctgctgcttctctccggcga

SEQ ID NO: 174601 - DNA, 120 bp, Artificial Sequence
  ENSG00000109861_1 (sequence is synthesized)
cggcgccgtgcgctgcgacacacctgccaactgcacctatcttgacctgctgggcacctgggtcttccaggtgggctccagcggttcccagcgcgatgtcaactgctcggttatgggacc

SEQ ID NO: 174602 - DNA, 120 bp, Artificial Sequence
  ENSG00000109861_2 (sequence is synthesized)
acaagaaaaaaaagtagtggtgtaccttcagaagctggatacagcatatgatgaccttggcaattctggccatttcaccatcatttacaaccaaggctttgagattgtgttgaatgacta

SEQ ID NO: 174603 - DNA, 120 bp, Artificial Sequence
  ENSG00000109861_3 (sequence is synthesized)
caagtggtttgccttttttaagtataaagaagagggcagcaaggtgaccacttactgcaacgagacaatgactgggtgggtgcatgatgtgttgggccggaactgggcttgtttcaccgg

SEQ ID NO: 174604 - DNA, 120 bp, Artificial Sequence
  ENSG00000109861_4 (sequence is synthesized)
aaagaaggtgggaactgcctctgagaatgtgtatgtcaacatagcacaccttaagaattctcaggaaaagtattctaataggctctacaagtatgatcacaactttgtgaaagctatcaa

SEQ ID NO: 174605 - DNA, 120 bp, Artificial Sequence
  ENSG00000109861_5 (sequence is synthesized)
tgccattcagaagtcttggactgcaactacatacatggaatatgagactcttaccctgggagatatgattaggagaagtggtggccacagtcgaaaaatcccaaggcccaaacctgcacc

SEQ ID NO: 174606 - DNA, 120 bp, Artificial Sequence
  ENSG00000109861_6 (sequence is synthesized)
actgactgctgaaatacagcaaaagattttgcatttgccaacatcttgggactggagaaatgttcatggtatcaattttgtcagtcctgttcgaaaccaagcatcctgtggcagctgcta

SEQ ID NO: 174607 - DNA, 120 bp, Artificial Sequence
  ENSG00000109861_7 (sequence is synthesized)
ctaagccctcaggaggttgtgtcttgtagccagtatgctcaaggctgtgaaggcggcttcccataccttattgcaggaaagtacgcccaagattttgggctggtggaagaagcttgcttc

SEQ ID NO: 174608 - DNA, 120 bp, Artificial Sequence
  ENSG00000109861_8 (sequence is synthesized)
ccctacacaggcactgattctccatgcaaaatgaaggaagactgctttcgttattactcctctgagtaccactatgtaggaggtttctatggaggctgcaatgaagccctgatgaagctt

SEQ ID NO: 174609 - DNA, 120 bp, Artificial Sequence
  ENSG00000109861_9 (sequence is synthesized)
gagttggtccatcatgggcccatggcagttgcttttgaagtatatgatgacttcctccactacaaaaaggggatctaccaccacactggtctaagagaccctttcaacccctttgagctg

SEQ ID NO: 174610 - DNA, 120 bp, Artificial Sequence
  ENSG00000109861_10 (sequence is synthesized)
actaatcatgctgttctgcttgtgggctatggcactgactcagcctctgggatggattactggattgttaaaaacagctggggcaccggctggggtgagaatggctacttccggatccgc

SEQ ID NO: 174611 - DNA, 120 bp, Artificial Sequence
  ENSG00000109861_11 (sequence is synthesized)
agaggaactgatgagtgtgcaattgagagcatagcagtggcagccacaccaattcctaaattgtagggtatgccttccagtatttcataatgatctgcatcagttgtaaaggggaattgg

SEQ ID NO: 174612 - DNA, 120 bp, Artificial Sequence
  ENSG00000109861_12 (sequence is synthesized)
tatattcacagactgtagactttcagcagcaatctcagaagcttacaaatagatttccatgaagatatttgtcttcagaattaaaactgcccttaattttaatatacctttcaatcggcc

SEQ ID NO: 174613 - DNA, 120 bp, Artificial Sequence
  ENSG00000109861_13 (sequence is synthesized)
actggccatttttttctaagtattcaattaagtgggaattttctggaagatggtcagctatgaagtaatagagtttgcttaatcatttgtaattcaaacatgctatattttttaaaatca

SEQ ID NO: 174614 - DNA, 120 bp, Artificial Sequence
  ENSG00000109861_14 (sequence is synthesized)
atgtgaaaacatagacttatttttaaattgtaccaatcacaagaaaataatggcaataattatcaaaacttttaaaatagatgctcatatttttaaaataaagttttaaaaataactgca

SEQ ID NO: 174615 - DNA, 120 bp, Artificial Sequence
  ENSG00000109861_15 (sequence is synthesized)
ggaacaaactggttattaaatagagcatctgttgagggactcttttaaaaccacagccatgaacagacgttggggctaagagacagagcagcctgcgacagtgtggacctacctgtagca

SEQ ID NO: 174616 - DNA, 120 bp, Artificial Sequence
  ENSG00000109861_16 (sequence is synthesized)
gctagcaaaggcctctagcagctacagtcccttctggagtctttatttgcatgcaaaatgcaaaggagtcctggtgacctacctccaaggcagctgccctcctgaacactcccttggaaa

SEQ ID NO: 174617 - DNA, 120 bp, Artificial Sequence
  ENSG00000109861_17 (sequence is synthesized)
acagtaaacatcattttggaatgtgaacaaccagagactacacaggagaaaggaaaaaaaaattctgaagatgcaaaatcttgggtggcttcaccgttcagttttttaataaaaggaaca

SEQ ID NO: 174618 - DNA, 120 bp, Artificial Sequence
  ENSG00000109861_18 (sequence is synthesized)
atatacaacacgttgttctttttctcttttgaaatcccttctattacagtgatttttttctaagattgtcaggatttgaagtgtatgttttgttttattcacagcgtaaattttattcac

SEQ ID NO: 174619 - DNA, 120 bp, Artificial Sequence
  ENSG00000109861_19 (sequence is synthesized)
agtttaactgtctgcctgagtgtctttcctttctctaattaccttgaggaacccaagagcctgttgtaaggagaaaataaggcccttggatctcttgagattcacagatataagttattg

SEQ ID NO: 174620 - DNA, 120 bp, Artificial Sequence
  ENSG00000109861_20 (sequence is synthesized)
aagggaagatggtcctatggaggacatatttaaagaagggaaaaaagaggctttctcagatatgtcagactgctatagtatacttctacagattatagacctccagtacctctggccaga

SEQ ID NO: 174621 - DNA, 120 bp, Artificial Sequence
  ENSG00000109861_21 (sequence is synthesized)
aagatggtatcgtaaacaccctattttttttcttttcttttttcattaggtacaagctttgtgctaagaagttgacatactataagctacaaaagttctgtaaagtagatataactagtt

SEQ ID NO: 174622 - DNA, 120 bp, Artificial Sequence
  ENSG00000109861_22 (sequence is synthesized)
tcattttatagatagagaaaattaatctcttacagtgctaagctcacagagtttctaactgtaaaatgctagaacttgtctttcaagcctaaagacttccttggggctaaatagtgaaaa

SEQ ID NO: 174623 - DNA, 120 bp, Artificial Sequence
  ENSG00000109861_23 (sequence is synthesized)
aagccatttcacaaataagtaaatggtatttagaggcatatttggatttcctggtaaattccagtctgtgagcatcatgaatattagtttaatgttgcatgggctcatgttgaagtttta

SEQ ID NO: 174624 - DNA, 120 bp, Artificial Sequence
  ENSG00000109861_24 (sequence is synthesized)
agagaagaactgccttgaagcttaggtttccttagctattaggctactgactttcttgcctaaaccagggttttttcattgaagaccaaaacttaccttctccttcagtttgtagtttgg

SEQ ID NO: 174625 - DNA, 120 bp, Artificial Sequence
  ENSG00000109861_25 (sequence is synthesized)
aaattggtagaagagctttgtaaacttcaaattaagtacaaactaagtgtcatagtcaaatttactaatcttaattacagtattgttcaactgattgctatcttctagctctttcctgcc

SEQ ID NO: 174626 - DNA, 120 bp, Artificial Sequence
  ENSG00000109861_26 (sequence is synthesized)
gaataatggtcttgtttcctgctctgttggtttagagctgacttctttcagctttggtaagcctgaaattatggggttatgtttaattcatattgtctgggtggactttcctctcttgca

SEQ ID NO: 174627 - DNA, 120 bp, Artificial Sequence
  ENSG00000109861_27 (sequence is synthesized)
tttctgcttgaatagaagaatttttctctagagagtagtttgtcatccttactctgttgattcagatgactctttgtatgatctgagaggtatactgttctgctattctgagaagaagta

SEQ ID NO: 174628 - DNA, 120 bp, Artificial Sequence
  ENSG00000109861_28 (sequence is synthesized)
tttcagaaagatgaattaagagtacagtggactgctcccacctggaaacttttatctatctcacctctggacctgataaattctttatcactcaggaccttgatgacgctgctctctgaa

SEQ ID NO: 174629 - DNA, 120 bp, Artificial Sequence
  ENSG00000109861_29 (sequence is synthesized)
accctccccagctctctctattaccgtgagaaacatcagaactttggttcccattgcatatcgcaggtacctctgctttcatgccatgctgtaatggagtgattgggtagcatgttttca

SEQ ID NO: 174630 - DNA, 120 bp, Artificial Sequence
  ENSG00000109861_30 (sequence is synthesized)
tctctttccagattgaaaatctgtatttctccctgtatatcttcaacacctaatgcacatagaactttgtaggtacctggaaaatgcaccacagttttcttttctttttgcagacttttc

SEQ ID NO: 174631 - DNA, 120 bp, Artificial Sequence
  ENSG00000109861_31 (sequence is synthesized)
acaagtattaccaacttacaaagaattaattttgtaggattctagaaagacaaatcaggaatggtgccatatacatcttttttgattccctgctctaaagaatattatcaggttaccttc

SEQ ID NO: 174632 - DNA, 120 bp, Artificial Sequence
  ENSG00000109861_32 (sequence is synthesized)
ctgcagagttttaaaagaattgcatatttcaagctgactttcaggatgtaaatataaccaaagcaactgatatgtaaaaaatatattcaatggcattcctagattttcttctagggtgtt

SEQ ID NO: 174633 - DNA, 64 bp, Artificial Sequence
  ENSG00000109861_33 (sequence is synthesized)
ttattataagaaaggggtccagttttaattttctgcgtatggctagccagttctcccagcacca

SEQ ID NO: 174634 - DNA, 83 bp, Artificial Sequence
  ENSG00000109861_34 (sequence is synthesized)
tttgtacggtttgtcaaagatttcattctcttccactggtctatgtgtctgtttttgtaccatgcttttttggttactgtagc

SEQ ID NO: 174635 - DNA, 78 bp, Artificial Sequence
  ENSG00000109861_35 (sequence is synthesized)
ttatttctgagatcttcattctcttccactggtctatgtgtctgtttttgaaagatagcatgatgcctccaggtttgt

SEQ ID NO: 174636 - DNA, 120 bp, Artificial Sequence
  ENSG00000109861_36 (sequence is synthesized)
cttttttttggttctatatgaattttaaaatagtttcttctaattgtgtgaagaatgttaatggtagtttaatgggaatagcattgaatctgtgaattgctttgggcagtatggccattt

SEQ ID NO: 174637 - DNA, 73 bp, Artificial Sequence
  ENSG00000109861_37 (sequence is synthesized)
tgtgtcctctctcttcttctgtattcctagatattttattctctctgtagctattgggaatgggagttcattc

SEQ ID NO: 174638 - DNA, 120 bp, Artificial Sequence
  ENSG00000109861_38 (sequence is synthesized)
ttttattctctctgtagctattgggaatgggagttcattcatgattttgctctctgcttgccttttgttggtgtatagggatcctggtgacttctgcacattgattttgtatcctgagac

SEQ ID NO: 174639 - DNA, 79 bp, Artificial Sequence
  ENSG00000109861_39 (sequence is synthesized)
tgccagttttcatctgtgggtttctcataaaaagctcttattatttgagatacgttccttcaatacctagtttattgag

SEQ ID NO: 174640 - DNA, 86 bp, Artificial Sequence
  ENSG00000109861_40 (sequence is synthesized)
gacgtttattgatttgcatatgttgaaccggccttgcatcctggggatgaagccaacttgactgtggtagataagcttttggatgt

SEQ ID NO: 174641 - DNA, 120 bp, Artificial Sequence
  ENSG00000109861_41 (sequence is synthesized)
atgaagccaacttgactgtggtagataagcttttggatgtgctgctggatttggtttatcagtatttcattgagattttttgcgtcgaagttcatcagggatattggactgaagttttct

SEQ ID NO: 174642 - DNA, 120 bp, Artificial Sequence
  ENSG00000109861_42 (sequence is synthesized)
ctcctctttgtacctctggtagaattcaactgtaaatccatctggtcctggactttttttcattagtaggctatttattactgcctcactttcataacttgttattgatctattcaggga

SEQ ID NO: 174643 - DNA, 70 bp, Artificial Sequence
  ENSG00000109861_43 (sequence is synthesized)
ctgcctcactttcataacttgttattgatctattcagggatccaacttcttcctgattcagtcttgggag

SEQ ID NO: 174644 - DNA, 120 bp, Artificial Sequence
  ENSG00000109861_44 (sequence is synthesized)
tttattgtgtctgtttgattcttctcttatttttgacaaagctgacaaaaagaagcaatagggaaaggactctctattcaattaatcctactgtatatctggctagccatatgcagaaaa

SEQ ID NO: 174645 - DNA, 89 bp, Artificial Sequence
  ENSG00000109861_45 (sequence is synthesized)
tctattcaattaatcctactgtatatttcctgtttcttaatccatatacgaaaatcaacttacgatggattaaagacttaaatgtaaaa

SEQ ID NO: 174646 - DNA, 120 bp, Artificial Sequence
  ENSG00000109861_46 (sequence is synthesized)
tataaaaccctggaatagaatataggcaatatcattctggacataggaatgggcaaagattttatgagaaagacaccaaaagcaattacaacaaaagcaaaaattggcaaatgagatcta

SEQ ID NO: 174647 - DNA, 120 bp, Artificial Sequence
  ENSG00000109861_47 (sequence is synthesized)
acaaggaacttaacaaatttacaagaaaaaaggagccccattaaaaagttggcaaagaacatgaacagacacttcccagaagatattcatgtggccaataaacatgaagaaaagctcaac

SEQ ID NO: 174648 - DNA, 120 bp, Artificial Sequence
  ENSG00000109861_48 (sequence is synthesized)
atcactgaccattagagacgtgcatatcaaaatcacaatgagataccatctcatgtcacaatggtgattattaaaaagtcaaacaacatgctagtgaggttgtagagaaataagaacgct

SEQ ID NO: 174649 - DNA, 75 bp, Artificial Sequence
  ENSG00000109861_49 (sequence is synthesized)
tcattactgcatatagacccaaaggaatagaaatcattctattacaaagatacatgcacatgtatgtttattaca

SEQ ID NO: 174650 - DNA, 72 bp, Artificial Sequence
  ENSG00000109861_50 (sequence is synthesized)
gtgatagactggaaaaagagaatgtggaacataaacaccatggaatactatgcagcaataaaaaggaatgag

SEQ ID NO: 174651 - DNA, 120 bp, Artificial Sequence
  ENSG00000109861_51 (sequence is synthesized)
aaaaagagaatgtggaacataaacaccatggaatactatgcagcaataaaaaggaatgagatcctgtccttttcagggacatggatggagttggaagctgttatcctcagcaaactaatg

SEQ ID NO: 174652 - DNA, 120 bp, Artificial Sequence
  ENSG00000109861_52 (sequence is synthesized)
tctcacttataagtgggagctgaacaatagaacacatgggcacagggaggggaataacacacactggggccagtcagggggtggggggtcaagctgagggagagcattagaaaaaatagc

SEQ ID NO: 174653 - DNA, 120 bp, Artificial Sequence
  ENSG00000109861_53 (sequence is synthesized)
cattagaaaaaatagctaatgcattctgggcttaacccatttatgcctagtgttccatttctggaatgctaagcatgtggaagttctttatatcctgctcaaggtcattgccaaggtctg

SEQ ID NO: 174654 - DNA, 120 bp, Artificial Sequence
  ENSG00000109861_54 (sequence is synthesized)
cattcaacaaattgcaacctctggcataaatgggttaatacctaggtgatgagttgataggtgcaggaaaccaccatggcacatgtttatctatgtaagaaacctgcacatcctacacat

SEQ ID NO: 174655 - DNA, 120 bp, Artificial Sequence
  ENSG00000109861_55 (sequence is synthesized)
catcctacacatgtaccctggaacttaaaaaatttaaaatatatatgtatatatatttaatatggaattttaaaaattactaatgagttcttttatctgagtaattttgcatcaacatgc

SEQ ID NO: 174656 - DNA, 120 bp, Artificial Sequence
  ENSG00000109861_56 (sequence is synthesized)
agagaagattcagtgagtacaaaattgcagatacatgtgtcagaagatccctgaatataataaggcttagtattctgtgtcataattgcctgtttgtattcctctctggtctttaaactt

SEQ ID NO: 174657 - DNA, 120 bp, Artificial Sequence
  ENSG00000109861_57 (sequence is synthesized)
cattagggcaaggatcaactccatcttactaaccatttgattccctatgtattacacgatatatgaccaataataagccttcaataaatacttgtaaaataaagaatgttatgtaatata

SEQ ID NO: 174658 - DNA, 120 bp, Artificial Sequence
  ENSG00000109861_58 (sequence is synthesized)
tggctgatttgttactataaaataggtttagtatttgctgtctggaaacattctgattagtgtctcctgggaggattataaatttatagtacccaaagataaactgttgtttccctttcc

SEQ ID NO: 174659 - DNA, 120 bp, Artificial Sequence
  ENSG00000109861_59 (sequence is synthesized)
taaacttttagtgataatcagtctctgccgtgtctcattttcatcacttgccctccaagctcccatctcactgaattcttgcagtgttctgaatgttgagagccccaagtgggtcttata

SEQ ID NO: 174660 - DNA, 120 bp, Artificial Sequence
  ENSG00000109861_60 (sequence is synthesized)
acagccagtcagcaacatttctgtttttcatctgacaccaagggtctcgtctctttgcttttctaccagttattctgggctcttcagctctaaagaaagtataggtcctgaaatctttcc

SEQ ID NO: 174661 - DNA, 120 bp, Artificial Sequence
  ENSG00000109861_61 (sequence is synthesized)
ctaccttctcaatttcctggggagggcttctttggaaagtgggattggaaataagataaatttgaagataattgagaaatgaatggaaagtgaaattgaagggtccatgttaagagattg

SEQ ID NO: 174662 - DNA, 120 bp, Artificial Sequence
  ENSG00000109861_62 (sequence is synthesized)
caagttatgctatcaccaaatagattttttgtgcctgagaggattaattcatagtgcatattatgtgttgactttatcattgaggtcctggcacatgatagcattggcatgatataattt

SEQ ID NO: 174663 - DNA, 120 bp, Artificial Sequence
  ENSG00000109861_63 (sequence is synthesized)
gagctactgatactatagtgttgcttctggtgttgttaccagaacatctaaaatatattaggatttttttaatggcagaggaaatgaagactaatatgacatagtccttgtcctagtgat

SEQ ID NO: 174664 - DNA, 120 bp, Artificial Sequence
  ENSG00000109861_64 (sequence is synthesized)
ttacagtttagcaagacatacaagcaaaacattaaagtaaagcatgataactactttaataaagcattttttaaattcattggtaacataagagaaggtagaagagtttagcaaaccctt

SEQ ID NO: 174665 - DNA, 120 bp, Artificial Sequence
  ENSG00000109861_65 (sequence is synthesized)
cccaaaagaaatgattgacaagttatatgagataataattcagggaaaggaaattcgactttctaaagccaaattatttgacattggttttcatatagcttggtaaaagctgttattttc

SEQ ID NO: 174666 - DNA, 120 bp, Artificial Sequence
  ENSG00000109861_66 (sequence is synthesized)
tcccatgttctttattctttgactgttataagtatgatttgtacagagaaatggcaatttcaaaacagagggctttgatggattaattgctttgaattgatccctcatctacagtatctt

SEQ ID NO: 174667 - DNA, 120 bp, Artificial Sequence
  ENSG00000109861_67 (sequence is synthesized)
gtcaggtacttgagaaaataatgtacttaaagtttcctcttttgactttcttttggtattctatactgtaagttggggaaaaaagtattttctcttcctgctaattgggctacttgaaaa

SEQ ID NO: 174668 - DNA, 120 bp, Artificial Sequence
  ENSG00000109861_68 (sequence is synthesized)
ttcccaccaactttgccaataccagtgttctgtataacccagaattcagaattagctgcaattaagggaattcacagcttttctgtagtcagagagcaaattgaaattaaagaaaaaaga

SEQ ID NO: 174669 - DNA, 120 bp, Artificial Sequence
  ENSG00000109861_69 (sequence is synthesized)
aatagtgggaggacaaatgaggttttacctttacacttgaaaacagatttaagaacaagccttatacctagatttattaatactttgaggtatgagagggaagagaagcttagaaatacg

SEQ ID NO: 174670 - DNA, 120 bp, Artificial Sequence
  ENSG00000109861_70 (sequence is synthesized)
gcagaatgggctttctttgttcttctcccagctatgctgtttttatttattattgtatttttaagagagaagggaagtgtctctcctgggtcacattaattaggaaatacagagtgtttt

SEQ ID NO: 174671 - DNA, 120 bp, Artificial Sequence
  ENSG00000109861_71 (sequence is synthesized)
cataatgcgtaaagtctagtccatttaagtcttgtttcaaaatgctatttatattatttgagcaggaaggcagagaccttaaactgctccacccaattcattttacacaaaagattaaaa

SEQ ID NO: 174672 - DNA, 120 bp, Artificial Sequence
  ENSG00000109861_72 (sequence is synthesized)
agaaaaaaacagtgtcaaaaggtcaagtgcccagtgttgcacaactaatgataggcaaaacaagagaggaggggaaaaaaaagaatcctgactcccgactcctagttcagtgtgttcttc

SEQ ID NO: 174673 - DNA, 120 bp, Artificial Sequence
  ENSG00000109861_73 (sequence is synthesized)
actgttagaaggtgctgctgaacatagttataccatatgaagatcacactatctatttgagattgtagaaatttgattactgcagagctctggctgggctagattcacttcttattcttt

SEQ ID NO: 174674 - DNA, 120 bp, Artificial Sequence
  ENSG00000109861_74 (sequence is synthesized)
attgcattgcagtattcttaagagataaatggctcttttagaatcagattggccttggctgttgaaatgaggcattaattaccttggtagctgacacattcttacaggtcaggggcttga

SEQ ID NO: 174675 - DNA, 120 bp, Artificial Sequence
  ENSG00000109861_75 (sequence is synthesized)
tgaagtttatcttcttcccttgttcctgtgattgctctgtaaatagaacacattcagagcccttgaatgcacttgcagcctgtgcctcccacagtgatcgatggtcagataatgggagtt

SEQ ID NO: 174676 - DNA, 120 bp, Artificial Sequence
  ENSG00000109861_76 (sequence is synthesized)
atttccatggctgctatgggccaagaaagctgggtggtcagaaagggaccttttccagactctcctgggttgtgttatttctttgacattggtttcctttcatgaggcgccaaggtgtat

SEQ ID NO: 174677 - DNA, 120 bp, Artificial Sequence
  ENSG00000109861_77 (sequence is synthesized)
ttgtaagttgtccagtgttgcacagctaatgaggggcaaaacaagaaaggaggaaaaaaaaagtatcctcactcctagttcagtgtgttcttcactgttggaaggtactgctgaacacag

SEQ ID NO: 174678 - DNA, 120 bp, Artificial Sequence
  ENSG00000109861_78 (sequence is synthesized)
ttatatgttcagtgtacaatgtacaatgttctttgacattccgtcatttgaaggatgggtcctatggatagtatcatctgcatggttttgaaaacaaaagatataagctaattttgccct

SEQ ID NO: 174679 - DNA, 120 bp, Artificial Sequence
  ENSG00000109861_79 (sequence is synthesized)
gtctagtgactacgagacagggagagaaaatctgaatatttgttaaagtagacacagacccataaattgaaaaggacactaatcctgccttaggagacagtaaggcacttgtccctgcta

SEQ ID NO: 174680 - DNA, 120 bp, Artificial Sequence
  ENSG00000109861_80 (sequence is synthesized)
tctattagctgtgtgtccttggacagctcattgcttctttctgagccaccgttacacgttatctatcaagtgagcaggttgtacactagatgaattcacaggtccttcttccaagtgctt

SEQ ID NO: 174681 - DNA, 120 bp, Artificial Sequence
  ENSG00000109861_81 (sequence is synthesized)
ttctaatcttcataatttagataatctctcagtagcaaaacagtgtacaatatggtcaatctgagatttttagggggagaattttagggaacatcagaaatggcagtagttaaaaggaaa

SEQ ID NO: 174682 - DNA, 120 bp, Artificial Sequence
  ENSG00000109861_82 (sequence is synthesized)
taggactcacaggctgacttctctctataacttcacatggtagaagggatgagagttctctctggagccttttgtattaggtcactaatcccaaaggccccacctcctaagaccatcact

SEQ ID NO: 174683 - DNA, 120 bp, Artificial Sequence
  ENSG00000109861_83 (sequence is synthesized)
tttgggattggggttttaacatgattttagagggacataaaccttcatctcattgcattagagatatttgaaagctcagctcacgtgtattcctccacagctcacatgtattcctccatc

SEQ ID NO: 174684 - DNA, 120 bp, Artificial Sequence
  ENSG00000109861_84 (sequence is synthesized)
acccaacctgatggctttgaacgttgtagacataaatcctttcatcattatcaagaatattgccaaaagcttctcagaaattatgaggggtttttttagtttctaaaatattctcaaaga

SEQ ID NO: 174685 - DNA, 120 bp, Artificial Sequence
  ENSG00000109861_85 (sequence is synthesized)
aagtcccatgtactaatgtttgccttttgatgaaaaaggatgaaatcttaatgattgccttaataagctcaacaatgcttgttagttgagtcttcttattgtgctgattcttataaacaa

SEQ ID NO: 174686 - DNA, 120 bp, Artificial Sequence
  ENSG00000109861_86 (sequence is synthesized)
caacattcagtataaacattaatgtatgtgattcactaaggtttttgcatgattctctgtgaggcttcagatgtctcttggattatgtgtctttttttcatcgccagcatcctgtggcag

SEQ ID NO: 174687 - DNA, 120 bp, Artificial Sequence
  ENSG00000109861_87 (sequence is synthesized)
tttatcagtcatttgttcatgcagctgggaactgtggggatatatgatttgccacatctgaggaacaaactggagggtgactggagagattatggttttcttatgaatttcttgcttgag

SEQ ID NO: 174688 - DNA, 120 bp, Artificial Sequence
  ENSG00000109861_88 (sequence is synthesized)
cctgcttgtctgctgtttctaagttgtctgcactattttatttattaaatagagcatctgttgagggactcttttaaaaccacagccatgaacagacgttggggctaagagacagagcag

SEQ ID NO: 174689 - DNA, 120 bp, Artificial Sequence
  ENSG00000109861_89 (sequence is synthesized)
ttaattttagattaagaagatgaccggaattgacaccactcttcccaagagtagtagtagttggtataattttgccactttatttaaaattatgattttagtaggtttacaaaataccag

SEQ ID NO: 174690 - DNA, 120 bp, Artificial Sequence
  ENSG00000109881_0 (sequence is synthesized)
agtttgaacttggcgggccagatgtgggcggcggggcgctgggggcctacttttccctcttcctacgccggtttctctgctgactgcagacccaggtctcggccctcctcggactcctgc

SEQ ID NO: 174691 - DNA, 120 bp, Artificial Sequence
  ENSG00000109881_1 (sequence is synthesized)
tcagtccctatgacgggcgcacgtgggcaggggctggaggtggtgcgctcgccgtcgccgccgctgccgctgagctgcagcaattccaccaggtcgctgttgtctccccttggccaccag

SEQ ID NO: 174692 - DNA, 120 bp, Artificial Sequence
  ENSG00000109881_2 (sequence is synthesized)
agcttccagtttgacgaggacgacggtgacggggaggatgaggaagacgtggatgatgaggaagacgtggatgaagatgcccatgattcagaggccaaagtggcgagcctgagaggaatg

SEQ ID NO: 174693 - DNA, 120 bp, Artificial Sequence
  ENSG00000109881_3 (sequence is synthesized)
gagttacaggggtgcgccagcactcaggttgaatcagaaaataaccaagaagaacagaaacaggtgcgcttaccagaaagccgcctgacaccatgggaggtgtggtttattggcaaagaa

SEQ ID NO: 174694 - DNA, 120 bp, Artificial Sequence
  ENSG00000109881_4 (sequence is synthesized)
aaagaagaacgtgaccggctgcaactgaaagctctagaggaattaaatcaacaactagaaaaaagaaaagaaatggaagaacgtgaaaaaagaaagataattgctgaagaaaagcacaag

SEQ ID NO: 174695 - DNA, 120 bp, Artificial Sequence
  ENSG00000109881_5 (sequence is synthesized)
gaatgggttcagaaaaagaatgagcaaaaaagaaaagaaagagaacaaaaaattaataaagaaatggaggaaaaagcagcaaaggaactggagaaagaatacttgcaagaaaaagcaaaa

SEQ ID NO: 174696 - DNA, 120 bp, Artificial Sequence
  ENSG00000109881_6 (sequence is synthesized)
gaatggttaaagaaaaaaaatgctgaagaatgtgagaggaagaagaaagaaaaggaaaaagaaaaacaacagcaagctgaaatacaggagaaaaaggaaatagcagaaaaaaagtttcaa

SEQ ID NO: 174697 - DNA, 120 bp, Artificial Sequence
  ENSG00000109881_7 (sequence is synthesized)
gaatggttggaaaatgcgaaacataaacctcgtccagctgcaaagagctatggttatgccaatggaaaacttacaggtttttacagtggaaattcctatccagaaccagccttttataat

SEQ ID NO: 174698 - DNA, 120 bp, Artificial Sequence
  ENSG00000109881_8 (sequence is synthesized)
ccaattccgtggaaaccaattcatatgccacctcccaaagaagctaaggatctatcaggaaggaagagtaaaagacctgtgataagtcagccacacaagtcatcatctctggtaattcat

SEQ ID NO: 174699 - DNA, 120 bp, Artificial Sequence
  ENSG00000109881_9 (sequence is synthesized)
aaagccaggagcaatctttgccttggaactctgtgcagaatacaaagatagcgtatgtggaaaataacatgcttttatctggagctatttaatttaaaaatcagaaattgttttttactg

SEQ ID NO: 174700 - DNA, 120 bp, Artificial Sequence
  ENSG00000109881_10 (sequence is synthesized)
ctcagtcaataactcaacacttaatgtgattattgacaaatagcaatttttgcatttgtatatggagtccttagagttgaggaagatattttctggattttggtttttataaacttttta

SEQ ID NO: 174701 - DNA, 120 bp, Artificial Sequence
  ENSG00000109881_11 (sequence is synthesized)
aggttgatcttggcatgttgttttgcagaataagtggctgaatatgtaagaattgtgtttgtatttagcttgtattaaaagtacactgtaataccaataaaactaacaatttttcttgta

SEQ ID NO: 174702 - DNA, 120 bp, Artificial Sequence
  ENSG00000109881_12 (sequence is synthesized)
catagcttactgtaaccttgaactcgtgggctcaaatgatcctcttacctcagcctcctgagtagctggaatcacaggagcatgccaccagattccaaggataggtgatatgacagcttt

SEQ ID NO: 174703 - DNA, 120 bp, Artificial Sequence
  ENSG00000109881_13 (sequence is synthesized)
taggttttaaaaaatacttctcttagagtctttcttctttggcttgttttgtttttctatcctggtggacatttatcaagtctctatcttctgccctttgccctctacttttctcctttt

SEQ ID NO: 174704 - DNA, 120 bp, Artificial Sequence
  ENSG00000109881_14 (sequence is synthesized)
tccctcctgtggcttgcactaatatttgcctgcaggcagtcaccaagtctgtatttctaggcctgaccttttggatccttatggcaagtgcctccaagtctgcaaatctaaaacaaccca

SEQ ID NO: 174705 - DNA, 120 bp, Artificial Sequence
  ENSG00000109881_15 (sequence is synthesized)
tcaaggcttaattagaattcttctgttgttcctaatcatctcctccttttctttacaattactactcccctgtttgtgatctctttccattatatctttcaacttgttgtttacttctta

SEQ ID NO: 174706 - DNA, 120 bp, Artificial Sequence
  ENSG00000109881_16 (sequence is synthesized)
tactggattgtaagctacataagggcagggatttttgcctcttttgttcagttttccaggagctagatgaatacctgcgcatgatatatgtccaaaaatagtttaattgagtgaagatgt

SEQ ID NO: 174707 - DNA, 120 bp, Artificial Sequence
  ENSG00000109881_17 (sequence is synthesized)
tcattgaatggctgcattttttccttttaattttaatatattcttctatggatcacacacattcgaaattttaaaaatacttattctgtggtcaatttgtcttctgttgtgatttttaca

SEQ ID NO: 174708 - DNA, 120 bp, Artificial Sequence
  ENSG00000109881_18 (sequence is synthesized)
tatttagagtggtactgcttttattattataatccagttttacaaatgtggaaaaatgtttaaattgtaggacaatattttaaattttaattctaactttttatctttattgttgaatct

SEQ ID NO: 174709 - DNA, 120 bp, Artificial Sequence
  ENSG00000109881_19 (sequence is synthesized)
aatgcctaatggtattaataagagtactaagtaaataatttcagtaaattgaagatgatataaccttcttcatccaagtattataagaaggaaattggttagatgtatgtgtgttataac

SEQ ID NO: 174710 - DNA, 120 bp, Artificial Sequence
  ENSG00000109881_20 (sequence is synthesized)
catatttgtttagaagtcaattactttgtttttttaaaaaagtttacttcatcccatgatataacatgaaagagatctttgtgaataaattcaaaaatcaaaataaatctctgtgactgt

SEQ ID NO: 174711 - DNA, 120 bp, Artificial Sequence
  ENSG00000109881_21 (sequence is synthesized)
tataaaactttgggtaatatctttttgaaatttgtaactataaaacaaaattattttacacatgcagaatagtttgctctttcctctaaaagtccttcttatcttctaactccattaagc

SEQ ID NO: 174712 - DNA, 120 bp, Artificial Sequence
  ENSG00000109881_22 (sequence is synthesized)
taattttaccatgccaatcaaacctagttgttgtttgtctaggaatgtaagatacttctgggagacaatatattcactgttttaattagtggcagtagacctaatccaattatttgaaga

SEQ ID NO: 174713 - DNA, 120 bp, Artificial Sequence
  ENSG00000109881_23 (sequence is synthesized)
aaaaaaaaattatttcttttggagggaagtggcttgccctgacataaatcactagttattgaaggcaaaattccgtaatgttgagaattatttaaaaataaaactgagacgttatattta

SEQ ID NO: 174714 - DNA, 120 bp, Artificial Sequence
  ENSG00000109906_0 (sequence is synthesized)
agcagagaggagttgagggcgatgagagcgggtactgcgaactgccgggcgatgctgtcgctgccgccgtgatacggagagcaacagttccccagcaacacccctccccgacacaggcac

SEQ ID NO: 174715 - DNA, 120 bp, Artificial Sequence
  ENSG00000109906_1 (sequence is synthesized)
acaccccccgacaggcacgcacacccaccccacagtgcccggctcggctgcgcctcctctattggcccaggaagcccacccagccccgccacgcagagcccagaaggaaagaaagcctca

SEQ ID NO: 174716 - DNA, 120 bp, Artificial Sequence
  ENSG00000109906_2 (sequence is synthesized)
tgcctgagccgaggggagcaccatggatctgacaaaaatgggcatgatccagctgcagaaccctagccaccccacggggctactgtgcaaggccaaccagatgcggctggccgggacttt

SEQ ID NO: 174717 - DNA, 120 bp, Artificial Sequence
  ENSG00000109906_3 (sequence is synthesized)
gtgcgatgtggtcatcatggtggacagccaggagttccacgcccaccggacggtgctggcctgcaccagcaagatgtttgagatcctcttccaccgcaatagtcaacactatactttgga

SEQ ID NO: 174718 - DNA, 120 bp, Artificial Sequence
  ENSG00000109906_4 (sequence is synthesized)
cttcctctcgccaaagaccttccagcagattctggagtatgcatatacagccacgctgcaagccaaggcggaggacctggatgacctgctgtatgcggccgagatcctggagatcgagta

SEQ ID NO: 174719 - DNA, 120 bp, Artificial Sequence
  ENSG00000109906_5 (sequence is synthesized)
cctggaggaacagtgcctgaagatgctggagaccatccaggcctcagacgacaatgacacggaggccaccatggccgatggcggggccgaggaagaagaggaccgcaaggctcggtacct

SEQ ID NO: 174720 - DNA, 120 bp, Artificial Sequence
  ENSG00000109906_6 (sequence is synthesized)
caagaacatcttcatctcgaagcattccagcgaggagagtgggtatgccagtgtggctggacagagcctccctgggcccatggtggaccagagcccttcagtctccacttcatttggtct

SEQ ID NO: 174721 - DNA, 120 bp, Artificial Sequence
  ENSG00000109906_7 (sequence is synthesized)
ttcagccatgagtcccaccaaggctgcagtggacagtttgatgaccataggacagtctctcctgcagggaactcttcagccacctgcagggcccgaggagccaactctggctgggggtgg

SEQ ID NO: 174722 - DNA, 120 bp, Artificial Sequence
  ENSG00000109906_8 (sequence is synthesized)
gcggcaccctggggtggctgaggtgaagacggagatgatgcaggtggatgaggtgcccagccaggacagccctggggcagccgagtccagcatctcaggagggatgggggacaaggttga

SEQ ID NO: 174723 - DNA, 120 bp, Artificial Sequence
  ENSG00000109906_9 (sequence is synthesized)
ggaaagaggcaaagaggggcctgggaccccgactcgaagcagcgtcatcaccagtgctagggagctacactatgggcgagaggagagtgccgagcaggtgccacccccagctgaggctgg

SEQ ID NO: 174724 - DNA, 120 bp, Artificial Sequence
  ENSG00000109906_10 (sequence is synthesized)
ccaggcccccactggccgacctgagcacccagcacccccgcctgagaagcatctgggcatctactccgtgttgcccaaccacaaggctgacgctgtattgagcatgccgtcttccgtgac

SEQ ID NO: 174725 - DNA, 120 bp, Artificial Sequence
  ENSG00000109906_11 (sequence is synthesized)
ctctggcctccacgtgcagcctgccctggctgtctccatggacttcagcacctatggggggctgctgccccagggcttcatccagagggagctgttcagcaagctgggggagctggctgt

SEQ ID NO: 174726 - DNA, 120 bp, Artificial Sequence
  ENSG00000109906_12 (sequence is synthesized)
gggcatgaagtcagagagccggaccatcggagagcagtgcagcgtgtgtggggtcgagcttcctgataacgaggctgtggagcagcacaggaagctgcacagtgggatgaagacgtacgg

SEQ ID NO: 174727 - DNA, 120 bp, Artificial Sequence
  ENSG00000109906_13 (sequence is synthesized)
gtgcgagctctgcgggaagcggttcctggatagtttgcggctgagaatgcacttactggctcattcagcgggtgccaaagcctttgtctgtgatcagtgcggtgcacagttttcgaagga

SEQ ID NO: 174728 - DNA, 120 bp, Artificial Sequence
  ENSG00000109906_14 (sequence is synthesized)
ggatgccctggagacacacaggcagacccatactggcactgacatggccgtcttctgtctgctgtgtgggaagcgcttccaggcgcagagcgcactgcagcagcacatggaggtccacgc

SEQ ID NO: 174729 - DNA, 120 bp, Artificial Sequence
  ENSG00000109906_15 (sequence is synthesized)
gggcgtgcgcagctacatctgcagtgagtgcaaccgcaccttccccagccacacggctctcaaacgccacctgcgctcacatacaggcgaccacccctacgagtgtgagttctgtggcag

SEQ ID NO: 174730 - DNA, 120 bp, Artificial Sequence
  ENSG00000109906_16 (sequence is synthesized)
ctgcttccgggatgagagcacactcaagagccacaaacgcatccacacgggtgagaaaccctacgagtgcaatggctgtggcaagaagttcagcctcaagcatcagctggagacgcacta

SEQ ID NO: 174731 - DNA, 120 bp, Artificial Sequence
  ENSG00000109906_17 (sequence is synthesized)
tagggtgcacacaggtgagaagccctttgagtgtaagctctgccaccagcgctcccgggactactcggccatgatcaagcacctgagaacgcacaacggcgcctcgccctaccagtgcac

SEQ ID NO: 174732 - DNA, 120 bp, Artificial Sequence
  ENSG00000109906_18 (sequence is synthesized)
catctgcacagagtactgccccagcctctcctccatgcagaagcacatgaagggccacaagcccgaggagatcccgcccgactggaggatagagaagacgtacctctacctgtgctatgt

SEQ ID NO: 174733 - DNA, 120 bp, Artificial Sequence
  ENSG00000109906_19 (sequence is synthesized)
cctgtgctatgtgtgaagggaggcccgcggcggtggagccgagcggggagccaggaaagaagagttggagtgagatgaaggaaggactatgacaaataaaaaaggaaaagaaaaaaaaaa

SEQ ID NO: 174734 - DNA, 120 bp, Artificial Sequence
  ENSG00000109906_20 (sequence is synthesized)
ggaaacctggtagctttttggccttggattctctctgggctccagatgacctggatgccaagccactgcccctcctctgggggcctccaccctcctctcccggctggaggtttgcctgat

SEQ ID NO: 174735 - DNA, 120 bp, Artificial Sequence
  ENSG00000109906_21 (sequence is synthesized)
tttctgggatggggttgggtattttgttcactcaaatggtggcacatttttctccttccttcacccagaccttcttttatgtgtccagaaatggaggctagaaagcaggtgagaggtcct

SEQ ID NO: 174736 - DNA, 120 bp, Artificial Sequence
  ENSG00000109906_22 (sequence is synthesized)
ctggtcagagccacacggtctgtgccggccttcctccaccaagacccccaggagatgaagggagggaggaggtgagccagaagggcgctcccctgctgatgggtctgggctgggtcacta

SEQ ID NO: 174737 - DNA, 120 bp, Artificial Sequence
  ENSG00000109906_23 (sequence is synthesized)
gctgctcaaaatggcagctctagtttgctggcggctgactggggaggagaagggctctgtttctcttcccaccactcagcccacctgctgctttcctctgctttgccacatctgggtgtc

SEQ ID NO: 174738 - DNA, 120 bp, Artificial Sequence
  ENSG00000109906_24 (sequence is synthesized)
ccccggtggtctctgagagcctcaggacccctgcccctcctccagctctttgttcccagcctccccttgactcctgtcctccaagtcccaggggagtcccagcccctcagggacctggcg

SEQ ID NO: 174739 - DNA, 120 bp, Artificial Sequence
  ENSG00000109906_25 (sequence is synthesized)
gtgtctccatccttctccggttccctagtgggatagctgcctctgacttcagggtccctcctaccctcagccttctgagaacacaaaacaaatccaataccccaccctagtccagcacca

SEQ ID NO: 174740 - DNA, 120 bp, Artificial Sequence
  ENSG00000109906_26 (sequence is synthesized)
tcgtgagcaagattcctgctgcgctgcttccaaaatggaaaagcatcacaactaaatacctaatatcctaccaaacaaaccacagtccctacgtagccctacttcagtcccaggagaagg

SEQ ID NO: 174741 - DNA, 120 bp, Artificial Sequence
  ENSG00000109906_27 (sequence is synthesized)
aatccatgaatgggctgaggttccgagggtaggttgtggatgtctttctctagaggggtcccacacctggaaaagaggacacccagcccgtgggatgagggaagctgggcaagggagaaa

SEQ ID NO: 174742 - DNA, 120 bp, Artificial Sequence
  ENSG00000109906_28 (sequence is synthesized)
gttgttgagtcacactggggaccccagatgtagtgagctcagcaagaaaagccaggtccagagagagtcgcacagaattcctgactcacagcgcccctcggtccacagtggagaggagga

SEQ ID NO: 174743 - DNA, 120 bp, Artificial Sequence
  ENSG00000109906_29 (sequence is synthesized)
ggaggaggagcagaaggagggggaggagctgcaggaggaggaggatttgaaagcgctttggccttgtgttatgttttgcttcttttctgtgtcccctgttagcacattgtacttgaatta

SEQ ID NO: 174744 - DNA, 120 bp, Artificial Sequence
  ENSG00000109906_30 (sequence is synthesized)
cctcagttttttgtgacctcatgagctttcttaacctctgtatctctttttcggttggggcttggaggaatggggagggtgttcttttctgtttcttgtgtaaattaatagttgttttta

SEQ ID NO: 174745 - DNA, 120 bp, Artificial Sequence
  ENSG00000109906_31 (sequence is synthesized)
tagacttcagctggtcaagaccctccccgtgcccctggagaccagcctcccagctggcaggaactgtgcaggaggagttgatactcaggatctgaatgtgagggccgaggagggcgaaga

SEQ ID NO: 174746 - DNA, 120 bp, Artificial Sequence
  ENSG00000109906_32 (sequence is synthesized)
gcgtgggtggggaggggatgttgctttggggtctcatggtccccagagggcactagggagtcacttttggctccgctggtgcatgaagtcacctgtggccaccatccgttccgcctaaaa

SEQ ID NO: 174747 - DNA, 120 bp, Artificial Sequence
  ENSG00000109906_33 (sequence is synthesized)
cactctggagagaatcccacctttcttacaatttgctgggccattgaggtttgagggcctgtgtttggatccttgcaactgtgtggtctcacctctgtgcgtgcattctcattgccagaa

SEQ ID NO: 174748 - DNA, 120 bp, Artificial Sequence
  ENSG00000109906_34 (sequence is synthesized)
ttggtctattttcacggctggtctttggggaggggggcgggatccagcctttgttttgttgtgttggggtgggggtgttgtttttctaaaagctacctcttatgtttgtccagttgttct

SEQ ID NO: 174749 - DNA, 120 bp, Artificial Sequence
  ENSG00000109906_35 (sequence is synthesized)
tattcgtgtttgctttgggacggaccctccgtttcatctcatgctttatgtgtaagagttttttattattattttttctttcctttctctctctgagaaagttgtggctgcgttttgatc

SEQ ID NO: 174750 - DNA, 120 bp, Artificial Sequence
  ENSG00000109906_36 (sequence is synthesized)
ttaggttttacaaagtggtttagggaagcggttttggggagaaggatcacgaggaatgtagggaagccggagggatgggtgctgctgcgacgacccccccgtccctcggccccagccctc

SEQ ID NO: 174751 - DNA, 120 bp, Artificial Sequence
  ENSG00000109906_37 (sequence is synthesized)
ctgccctccccttcaatctcatccaccaaatctgaaggccttaaaattgtgtgttgggaggatgtgaattgggaggacggtgtcactagactgtggattagggatggtaaagtagggagg

SEQ ID NO: 174752 - DNA, 120 bp, Artificial Sequence
  ENSG00000109906_38 (sequence is synthesized)
atgctattttgcaactatagtaacgacttagtgttttggaaaggaaaagaagttaaacttgaaatacgtgactagaacagttgtcatgtttataatgtgaaaagggtgaaatcatttggg

SEQ ID NO: 174753 - DNA, 120 bp, Artificial Sequence
  ENSG00000109906_39 (sequence is synthesized)
ggaggggccgtctgtaagaaatcattatgcactatggcttcctcctctggtctgggaagaagcggggactggctggccctcaggggatctgtaaatcccagaaaacagtatttttaacag

SEQ ID NO: 174754 - DNA, 120 bp, Artificial Sequence
  ENSG00000109906_40 (sequence is synthesized)
caagatgtcattcaacattggtggggaaggaagagaaaaaaatcaaactattccatagaactagctggccccctcactcccatgcccttcccactcagcctgggcccctccccgctccat

SEQ ID NO: 174755 - DNA, 120 bp, Artificial Sequence
  ENSG00000109906_41 (sequence is synthesized)
tcataaaagctgagagggttgagctaatcttcacaaattgtaatatttttgtagtatctgttagttccttcgtcagttctgcagaaccttgccctttccttttgtaatgtgaataggaag

SEQ ID NO: 174756 - DNA, 120 bp, Artificial Sequence
  ENSG00000109906_42 (sequence is synthesized)
acaaaagacaaaaaaaaatccaccaccaccaaaatatccctttgtacatgtatgtgcgtgtgcgcgtgtgctttgtgtgtgtggttgtgtgttaaatcatgcagtattgtcgtaatctgg

SEQ ID NO: 174757 - DNA, 120 bp, Artificial Sequence
  ENSG00000109906_43 (sequence is synthesized)
tgttgcagcaatggatggtactaaatcagcacctggatgccccacccaaccccgtgggccctgcagaccccagtagggaggtatggggagagctcaggggagtgtggtttctgagggcta

SEQ ID NO: 174758 - DNA, 120 bp, Artificial Sequence
  ENSG00000109906_44 (sequence is synthesized)
ctgtctggggacacctctgaacttactgtaccttcctctccccatgaagacacctgaatagagtctaacatgcctcttctccaacttcctacctacaacaacagaacagttctaatgttg

SEQ ID NO: 174759 - DNA, 120 bp, Artificial Sequence
  ENSG00000109906_45 (sequence is synthesized)
cacggcctagtggccagggggcaagctaagaggctgtctggaggctttatatgtgtctggagttaaggggagaggaggagggtagacaggggtctctccccaggtgggatctgaatatct

SEQ ID NO: 174760 - DNA, 120 bp, Artificial Sequence
  ENSG00000109906_46 (sequence is synthesized)
gtcctcccctcttcttcatgccacctgactccttcggccccctggctgcctttagctgtggtactgctgacaaccctgcttgctactgccttatccagcacagtgaaaaacttctccagc

SEQ ID NO: 174761 - DNA, 120 bp, Artificial Sequence
  ENSG00000109906_47 (sequence is synthesized)
ctggcaaggccacgttggttaatagtccctttcccatgtccagctcctacaaatatgtcccttaatgcatttggtgacatttacacctcatgtgctctttccctattcactccttcactc

SEQ ID NO: 174762 - DNA, 120 bp, Artificial Sequence
  ENSG00000109906_48 (sequence is synthesized)
cattaaaatcctatgtatatataggatagacaaatatatagatatatagatatatatatatatagcaagagattgatataaaatagtaaatatcattgctgctttgggctgctttggagg

SEQ ID NO: 174763 - DNA, 120 bp, Artificial Sequence
  ENSG00000109906_49 (sequence is synthesized)
tttggaggaggaggccatgaatatggggaaggcagatctggggtgcaggggtaggtagggaggctgggggacccagtgattcagtacaatccaagggatgcaacgcgggcttgtttaatc

SEQ ID NO: 174764 - DNA, 120 bp, Artificial Sequence
  ENSG00000109906_50 (sequence is synthesized)
tttgtgcctgaacagtttttccatgttgagaaaaaaaagaaaaaaaaactgctgcaatttttcacaagtgtatggtacctttctggatgctattggtacaattgctgtggatggaagagg

SEQ ID NO: 174765 - DNA, 120 bp, Artificial Sequence
  ENSG00000109906_51 (sequence is synthesized)
gccattgagcttacctccctataggggagagagcagaggtggggcagcctttcgactctgtccatgacggctggcagggtcagggtagtttctgggcctgcttcccggcaagccgagcta

SEQ ID NO: 174766 - DNA, 120 bp, Artificial Sequence
  ENSG00000109906_52 (sequence is synthesized)
gggtgaaaactgggggcgcaccaggatgtgagacagaaaagcagaagatgagactctgttcattcacttttcctaggcccatcctgtggtcatctttccccctcccatcatacctcctcc

SEQ ID NO: 174767 - DNA, 120 bp, Artificial Sequence
  ENSG00000109906_53 (sequence is synthesized)
ttcctggagcctctgccggcttggctgtaatggtggcacttacctggatatttcagtgggaggatgaaaggcgagactcaccctacgcggtgggacagatggggagaggaaaaaggcaga

SEQ ID NO: 174768 - DNA, 120 bp, Artificial Sequence
  ENSG00000109906_54 (sequence is synthesized)
gatggccaggagaggggtgcaggacaaaccagagaggttgggtcaggggaaaagggtggggagaaagaggggtgcaggccctgcaggccggttagccagcagctgcggcctccccgggcc

SEQ ID NO: 174769 - DNA, 120 bp, Artificial Sequence
  ENSG00000109906_55 (sequence is synthesized)
cttggcatccaacttcgcagacagggtaccagcctcctggtgtgtatcataggatttgttcacatagtgttatgcatgatcttcgtaaggttaagaagccgtggtggtgcaccatgacat

SEQ ID NO: 174770 - DNA, 120 bp, Artificial Sequence
  ENSG00000109906_56 (sequence is synthesized)
ccaacccgtatatataaagataaatatatatatatatgtatgtaaattatagcactgagggccctgctgccctgctggaccaagcaaaactaagccttttggtttgggtattatgtttcg

SEQ ID NO: 174771 - DNA, 120 bp, Artificial Sequence
  ENSG00000109906_57 (sequence is synthesized)
ttttgttatttgtttgtttttgtggcttgtcttatgtcgtgatagcacaagtgccagtcggattgctctgtattacagaatagtgtttttaattcatcaatgttctagttaatgtctacc

SEQ ID NO: 174772 - DNA, 120 bp, Artificial Sequence
  ENSG00000109906_58 (sequence is synthesized)
tcagcacctcctcttagcctaattttaggaggttgcccaattttgtttcttcaattttactggttacttttttgtacaaatcaatctctttctctctttctctcctccccacctctcacc

SEQ ID NO: 174773 - DNA, 120 bp, Artificial Sequence
  ENSG00000109906_59 (sequence is synthesized)
cttgccctctccatctccctctcccgccctcccctcctccctctggctccccgtctcatttctgtccactccattctctctccctctctcctgcctcctgctgccccctccccagcccac

SEQ ID NO: 174774 - DNA, 120 bp, Artificial Sequence
  ENSG00000109906_60 (sequence is synthesized)
ttccccgagttgtgcttgccgctccttatctgttctagttccgaagcagtttcactcgaagttgtgcagtcctggttgcagctttccgcatctgccttcgtttcgtgtagattgacgcgt

SEQ ID NO: 174775 - DNA, 90 bp, Artificial Sequence
  ENSG00000109906_61 (sequence is synthesized)
tttactgctgcaggtttttttctctctccatgtgtcactaagtgaagtttgtgccttctatagcaaagagaatattttttacatcctact

SEQ ID NO: 174776 - DNA, 120 bp, Artificial Sequence
  ENSG00000109906_62 (sequence is synthesized)
gtgccttctatagcaaagagaatattttttacatcctactaacagtagatttttttgtagtgaacattttttgtatttttatttataagtctcataagaaaaatagcaatgttcagttgt

SEQ ID NO: 174777 - DNA, 120 bp, Artificial Sequence
  ENSG00000109906_63 (sequence is synthesized)
tcagttgtataccttgaatctgcagttagaagagaataaagttaattcagttgtctctcgcttgaagcgtcccacctttttattgaagtacttggttttgttttgttttttttttttgtt

SEQ ID NO: 174778 - DNA, 120 bp, Artificial Sequence
  ENSG00000109906_64 (sequence is synthesized)
cttttcttgtgtggggaacatggtagaggaattaagatttttgtgtggggactgggaaaaagaaagctctgtattacacatatttagacttatctatgtgtcacttttatgccacattta

SEQ ID NO: 174779 - DNA, 120 bp, Artificial Sequence
  ENSG00000109906_65 (sequence is synthesized)
caaggcacagatgcactgaataacatttttctaatactttttagttaaaaaatgttaaatacgttaatatcgtatgatccttggtacaatgtgctaggtaggcacttgttcacttattca

SEQ ID NO: 174780 - DNA, 120 bp, Artificial Sequence
  ENSG00000109906_66 (sequence is synthesized)
gcaagaccaccatgtaccagttactgttgtcggcgctgggaattacagcaaaggacaaacagacaaaccctggccgccctggggctaccatgctagcgggccgctgagtcggaatccgtg

SEQ ID NO: 174781 - DNA, 120 bp, Artificial Sequence
  ENSG00000109906_67 (sequence is synthesized)
gctgtgttaggataacttgctcaggattgcacggctggtgagcagcagtcagaactccatccacctctcctgataccaggccaggttcctttactccagagttctcaaagcaggggtctc

SEQ ID NO: 174782 - DNA, 120 bp, Artificial Sequence
  ENSG00000109906_68 (sequence is synthesized)
acgtcttctttagtctttagagagacattttcaactgactccttagtggctaagcaagcttcagaaatttctcaacaagaagcttccacacaatcaaaggtccctgcctgcgtctgtagc

SEQ ID NO: 174783 - DNA, 120 bp, Artificial Sequence
  ENSG00000109906_69 (sequence is synthesized)
agccaagagctgttaagaaaggagattggagcaggtggccttgtgcaggggaggggatgggtgggaggtggccgtgcaagctctgcattgtcatggacggaataaaggatttccacaaca

SEQ ID NO: 174784 - DNA, 120 bp, Artificial Sequence
  ENSG00000109906_70 (sequence is synthesized)
agcgctgcgggccctcctcggctctcggcgggaccggcggtgacaccggagctcgccgtgcgctcccggccgctctcgcctcctctattggcccaggaagcccacccagccccgccacgc

SEQ ID NO: 174785 - DNA, 120 bp, Artificial Sequence
  ENSG00000109906_71 (sequence is synthesized)
ggagagatttctttgaaggttggggagtcaggctggagtgactttcacccttaacctaaaggaaggggagaagaggtcatctgagaagcaagatggtgaggtctcatgtatccacaaggg

SEQ ID NO: 174786 - DNA, 120 bp, Artificial Sequence
  ENSG00000109906_72 (sequence is synthesized)
ggcttgctttctggggactgctgtccatccctgaaccaaatgggctctctttcccaggactggcccttgccccacagatgatcatggggccacagtaaagtatggtcatgtgtgaagaca

SEQ ID NO: 174787 - DNA, 120 bp, Artificial Sequence
  ENSG00000109906_73 (sequence is synthesized)
ggtattgcttgtttattcaatggaggtgtggccgtggatccttaagttgtctttggaggtggtgaatacaggccgtcgcatccttctcatgcacagaatgtgccctactgtcccctgaag

SEQ ID NO: 174788 - DNA, 120 bp, Artificial Sequence
  ENSG00000109906_74 (sequence is synthesized)
cacacaggcagacccatactggtgagttgacttggattcctgttctccaggttttccacagtgttggtagcacatggacatgaactgtctgggtggcaacctctttttagcaaatgtgac

SEQ ID NO: 174789 - DNA, 120 bp, Artificial Sequence
  ENSG00000109906_75 (sequence is synthesized)
atccagtaatttcctgggcgagctgtgagtaggatgggcttctgccacgttcagctactcttgtctgtgtggctggcccagcagaagtttacaagtatgacatggccccatgagaatggc

SEQ ID NO: 174790 - DNA, 120 bp, Artificial Sequence
  ENSG00000109906_76 (sequence is synthesized)
tgtcctagattaggccaagatctgtctctaaccagccactgagagctcatgttcttggaggtatctagtatgctcttgttgaggccttagtctgtgttgttatcaaaacatcttcttccc

SEQ ID NO: 174791 - DNA, 120 bp, Artificial Sequence
  ENSG00000109906_77 (sequence is synthesized)
ttggtcaggaaatctctcacacccatctgatgaaactgaaaccctcgtgtggccacagttggctggtcctccctctgcgagagctgagacattgtctaaaatcagcgtgtacgcaggatg

SEQ ID NO: 174792 - DNA, 120 bp, Artificial Sequence
  ENSG00000109906_78 (sequence is synthesized)
acatcatcacagcagctcacacttaacactcacagtgaggcaggcactgttctcagtgctttatgtcaggggtccccaaccctgggatcatggactggtgtctgtggtggtctgttagga

SEQ ID NO: 174793 - DNA, 120 bp, Artificial Sequence
  ENSG00000109906_79 (sequence is synthesized)
accaggctgcatggcaagaggcaagcggtgggcaggcaagtgaaacttcatctgtatttactgctgttcctcattgctcgtattaccacctgagctcctcctcatgtcagagcagcagca

SEQ ID NO: 174794 - DNA, 86 bp, Artificial Sequence
  ENSG00000109906_80 (sequence is synthesized)
agctcctcctcatgtcagagcagcagcagtcctattgtgaactgtgcatgcaagggatcaaggttgcatgctccttatgagaatct

SEQ ID NO: 174795 - DNA, 79 bp, Artificial Sequence
  ENSG00000109906_81 (sequence is synthesized)
caggaaaacaagctcagggctcccactaattctacattatgtgagttgtataattagttcattatatattataatgaat

SEQ ID NO: 174796 - DNA, 120 bp, Artificial Sequence
  ENSG00000109906_82 (sequence is synthesized)
gtacacaataaatgtaatgtgcttaaatcatcccaggaccaccctcctgtactccgctgtatgtgaaaaggttgtcttccataaaactggtccctggtgcctaaaaggttggggaccact

SEQ ID NO: 174797 - DNA, 120 bp, Artificial Sequence
  ENSG00000109906_83 (sequence is synthesized)
gctttacgtgatcccatctggccaatctctcagtaaccctgtaaggtaaggttggaagctactcttatgtcatagatgaggaaactgaggctgaaaggagggaaagtgacttgctggagt

SEQ ID NO: 174798 - DNA, 120 bp, Artificial Sequence
  ENSG00000109906_84 (sequence is synthesized)
tggtagtggggacaggcgtggtagagtcttatagttcagagctgagactgcatgggtttaatcctgactctgccacttcctatttgtggggccatggataaattatttaaactctcttaa

SEQ ID NO: 174799 - DNA, 120 bp, Artificial Sequence
  ENSG00000109906_85 (sequence is synthesized)
tttagatttctcatctgttagaaaagtggagtaatattagtgtctacctcatagcattagggttgttgtggggatgaaataaggtattttatttgaagtatttcatggagtgtttggctc

SEQ ID NO: 174800 - DNA, 120 bp, Artificial Sequence
  ENSG00000109906_86 (sequence is synthesized)
atagtaagcactcaataaatagtagtaggtatatttaatgtaatagatatttattgagtttctacaaggtgctggcactgtttaggcatttaagatgtagtaatgcatgagacagacgac

SEQ ID NO: 174801 - DNA, 120 bp, Artificial Sequence
  ENSG00000109906_87 (sequence is synthesized)
attgctgcctctcatggaactgagcttctagctgggagacagaatcagcaaataaatatacgatatcatgtctgcttatacatattaagtgctactggaaaaggataaggagtagagaat

SEQ ID NO: 174802 - DNA, 120 bp, Artificial Sequence
  ENSG00000109906_88 (sequence is synthesized)
aatagggagaaaagaaatattgtggatatttagggagaaatgttgtggataaaatggttagggaaggcctctccaagaaggtggtatctgggcagagtcttaaaaagtgaaggagtgagc

SEQ ID NO: 174803 - DNA, 120 bp, Artificial Sequence
  ENSG00000109906_89 (sequence is synthesized)
cactcaaaaatttctgggaagaatgtctaagcaaagggagtgagcatttgcagaagccctgaggctggatcaagcctgacaagtttaaggacccacacgcagagcagtggtggccagaga

SEQ ID NO: 174804 - DNA, 120 bp, Artificial Sequence
  ENSG00000109906_90 (sequence is synthesized)
gctgggagtgacgtgtagagagtggtgagggatgaggacaggatctgtcaagtctctcagccctggtaaaagatttgggttttactctgcatgtgctgagtcctttggagggtgacaaaa

SEQ ID NO: 174805 - DNA, 120 bp, Artificial Sequence
  ENSG00000109906_91 (sequence is synthesized)
tatttgcaaatcatatatttgatgaggaacttatagctagaaatagaaagaggtcttataattcaaaaaacataaacaaataatcaaattaaataatgggcaaaggttctgaacagacat

SEQ ID NO: 174806 - DNA, 120 bp, Artificial Sequence
  ENSG00000109906_92 (sequence is synthesized)
gtctccaaagatagacaaatagccaatgagcacatgaaaaagatgctcaactgcattcaccatcagagagatgcaaatcaaaaccacagtgagatactgcttcacacccactacaatgtg

SEQ ID NO: 174807 - DNA, 120 bp, Artificial Sequence
  ENSG00000109906_93 (sequence is synthesized)
gctacaataaaaaatacagatagttacaagtgttatcaaagatgtggaaaaaccagaactctcatgggagtgtaaaatggtgtagccactttggaaaacattctggcaattcctcaagag

SEQ ID NO: 174808 - DNA, 120 bp, Artificial Sequence
  ENSG00000109906_94 (sequence is synthesized)
accccacagtgcccggctcggctgcgttctcagaaaccccgatgtctgcgggaaagcacgcggtggctcggctcggctgaatgctcatcccaaccttgacggcctccgtccccaccccgg

SEQ ID NO: 174809 - DNA, 120 bp, Artificial Sequence
  ENSG00000109906_95 (sequence is synthesized)
ggcgggcagcaaaaatgtcttgaccagccgtcctgtgaatcctttctgcgtgagcttggtggctcctgaactgatagagctccttctgggggtggagcctcctctattggcccaggaagc

SEQ ID NO: 174810 - DNA, 120 bp, Artificial Sequence
  ENSG00000109906_96 (sequence is synthesized)
gggcacagactgtatgccaggcatggcgcagggtatcagggatatggtaaagcccaagacaggtgggaacctgctctcacagagcttacagtccactgggaagatggaagagagctccaa

SEQ ID NO: 174811 - DNA, 120 bp, Artificial Sequence
  ENSG00000109906_97 (sequence is synthesized)
ggccatcattggctctgtgaccacattataaagttttttcgtgtggatatctcattcgatgttcttgataaccacagtggcagataaggagcaaatggatctggtgaaaagaatgacttg

SEQ ID NO: 174812 - DNA, 120 bp, Artificial Sequence
  ENSG00000109911_0 (sequence is synthesized)
aacactggaggctctaagatggcggcagtggcaacctgcggtagtgttgccgcgagtactgggtctgcagtggcgacagccagcaagagcaacgtcaccagtttccagaggaggggtcct

SEQ ID NO: 174813 - DNA, 120 bp, Artificial Sequence
  ENSG00000109911_1 (sequence is synthesized)
agagccagcgtgaccaacgacagcggccctcgactggtgtccattgcgggcacgcgaccgtcggtgcggaatggacagctgctggtatcaaccgggctcccagccctagaccagctctta

SEQ ID NO: 174814 - DNA, 120 bp, Artificial Sequence
  ENSG00000109911_2 (sequence is synthesized)
ggtggaggtttagccgttggaacagttcttctaattgaggaggataaatataatatttactcacctttgctcttcaagtatttcctggcagaaggaattgtcaatgggcatactttgttg

SEQ ID NO: 174815 - DNA, 120 bp, Artificial Sequence
  ENSG00000109911_3 (sequence is synthesized)
gttgcatctgctaaagaggatcctgccaacattttacaggaacttccagcaccattacttgatgataaatgtaaaaaggaatttgatgaagatgtatacaatcataaaacaccagaatct

SEQ ID NO: 174816 - DNA, 120 bp, Artificial Sequence
  ENSG00000109911_4 (sequence is synthesized)
aatattaagatgaaaatagcttggcgttaccagttattacccaagatggagattggaccagtatcatcttcaagatttggtcactattatgatgcatcaaaaagaatgccacaagaacta

SEQ ID NO: 174817 - DNA, 120 bp, Artificial Sequence
  ENSG00000109911_5 (sequence is synthesized)
attgaggcttcaaattggcatggattttttcttccagagaaaatatcttcaactctcaaagtagaaccctgttctttgacccctggctacacaaagctgcttcagtttatccagaacatc

SEQ ID NO: 174818 - DNA, 120 bp, Artificial Sequence
  ENSG00000109911_6 (sequence is synthesized)
atttatgaggaaggatttgatggatccaatcctcagaaaaaacagagaaacattttaagaataggaattcagaatcttggctcacctttatggggagacgatatttgctgtgcagaaaat

SEQ ID NO: 174819 - DNA, 120 bp, Artificial Sequence
  ENSG00000109911_7 (sequence is synthesized)
ggtggcaacagtcacagccttaccaagttcctctatgttctccgtggtcttctgagaacctctctttcagcctgcatcatcacaatgccaacacatctgatccagaataaagccattatt

SEQ ID NO: 174820 - DNA, 120 bp, Artificial Sequence
  ENSG00000109911_8 (sequence is synthesized)
gcccgtgtcacaaccttgtcagatgtagtagttggtctggaatcatttattggttctgagagagaaactaacccattgtataaggattatcatggattgattcatatacggcagattcct

SEQ ID NO: 174821 - DNA, 120 bp, Artificial Sequence
  ENSG00000109911_9 (sequence is synthesized)
cggcttaataacttgatctgtgatgaatcagatgtcaaagacttagcttttaaattaaaaaggaagctattcaccattgagcgactgcatttgcctccagacttgtcagacacagtgagc

SEQ ID NO: 174822 - DNA, 120 bp, Artificial Sequence
  ENSG00000109911_10 (sequence is synthesized)
cgctcaagcaaaatggatctggcagaatccgccaagcggctgggcccaggctgtggcatgatggccggaggcaagaagcacctggacttctagggattcctccttagtcgctgcatgcag

SEQ ID NO: 174823 - DNA, 120 bp, Artificial Sequence
  ENSG00000109911_11 (sequence is synthesized)
aattctatgacactctaattatgattgctaatagcttatgtaaatatttttcttaacaatttgaccctccactccttgaaaaacacaggattataaaatggtgccgccatttctcatttt

SEQ ID NO: 174824 - DNA, 120 bp, Artificial Sequence
  ENSG00000109911_12 (sequence is synthesized)
ttaactttttacagaactagcacagcagaaatacttttaaatttttccttcatgctctagagaaaataattttatttttaaataaacgccaaaaaatgtcaaaatctcaagattcctgac

SEQ ID NO: 174825 - DNA, 120 bp, Artificial Sequence
  ENSG00000109911_13 (sequence is synthesized)
agtggtcattcgtgtgtgtactaaggcatttagtgtcatggtaaagtgcatgtcacagcaggtagcatacaaaacatgatgaaattcaagattgtatgtgaaaacatactttctctttat

SEQ ID NO: 174826 - DNA, 120 bp, Artificial Sequence
  ENSG00000109911_14 (sequence is synthesized)
tacagaaacagtcacttgccaccaaaaatgctgttttttaaatgaaaatgtgtttactaatatataaaataaatttgcatttatgtatccagttattaaattgataaagacaaagtaata

SEQ ID NO: 174827 - DNA, 120 bp, Artificial Sequence
  ENSG00000109911_15 (sequence is synthesized)
ttttgggatttagattccactagagataattagtctaccatagtagttattaaatataaagaacttcagtgataggaaacatagaaaaaagaagtggatggtctttagtttagtaatcct

SEQ ID NO: 174828 - DNA, 120 bp, Artificial Sequence
  ENSG00000109911_16 (sequence is synthesized)
aaacaattgaagtcagtactatgaaattatgtcaacaggcatcattcaggattgaaattcaaactgacagctacattaatgctaggataccaggagaaaaacatatactgaagcttgttg

SEQ ID NO: 174829 - DNA, 120 bp, Artificial Sequence
  ENSG00000109911_17 (sequence is synthesized)
agagattttacagaacataggtctgagacaaagtgaaaaaatgaaactaactcagatttccattgcatcacataaatattttgttaataatgaacattggttgagtgtgtaaatttctaa

SEQ ID NO: 174830 - DNA, 120 bp, Artificial Sequence
  ENSG00000109911_18 (sequence is synthesized)
ccatgtaaacatgtctttggggggtatagcatatcgaaccagttttcatatgaaacattaggtgttttaattacaattctatattctcaaagcttttgacagataatggataaaaaatga

SEQ ID NO: 174831 - DNA, 120 bp, Artificial Sequence
  ENSG00000109911_19 (sequence is synthesized)
aagttgaaaagtaacttgcatatttaagagtcttgattttttaaaaggtgtttaacatccattgggagaaactgaatttccaaaatacattttcaaatgtatttaatattttgaagcagt

SEQ ID NO: 174832 - DNA, 120 bp, Artificial Sequence
  ENSG00000109911_20 (sequence is synthesized)
tataactagcatttttaagcagcttgcttttaatataccacaaattatactttatttgttcttgacaacattgtagaaaacaaagactaggtttttaaaactgtctaaccaatatgatga

SEQ ID NO: 174833 - DNA, 120 bp, Artificial Sequence
  ENSG00000109911_21 (sequence is synthesized)
atgtcagtcacttaaaaaaacccactgtagcataaacacatactgtatacagcttttattcagaattagaataattgaatcaatgacagtgatttgccaggatgtcaaatctctccatca

SEQ ID NO: 174834 - DNA, 120 bp, Artificial Sequence
  ENSG00000109911_22 (sequence is synthesized)
tatcctgtcactaccagtttattttttgtgatcaaaatcaaaaagacaactattttgtcacccgctatttcattagtactaaaaatcaggtttcttattctatttttttagaatgtcggg

SEQ ID NO: 174835 - DNA, 120 bp, Artificial Sequence
  ENSG00000109911_23 (sequence is synthesized)
tttatttttttcatttcttttaattctaaagacacagattcttccccattttcttttcaaaataaagtttcagaattgatctgtcagttaaaattaaagggctttatattaagcaaaggt

SEQ ID NO: 174836 - DNA, 120 bp, Artificial Sequence
  ENSG00000109911_24 (sequence is synthesized)
gcttttaaattttaaagcaacttcaaaaaattgatttagtccatagataataaataatgttgtgcggatactccacaaaagctctgctatgtcctttgaaagcattatgaacattctgaa

SEQ ID NO: 174837 - DNA, 120 bp, Artificial Sequence
  ENSG00000109911_25 (sequence is synthesized)
taaattcaaatgagtattttagtcagtttattattttaataactctaacctttttcttaccgtgttgattcattttatacaacacacaatggaacaattacatagcatttgacttgctga

SEQ ID NO: 174838 - DNA, 120 bp, Artificial Sequence
  ENSG00000109911_26 (sequence is synthesized)
aaaagagatacgaggtcatcagatatgtaaattgcttgtcaaaatacttaataggtcattgatatacttccctggctaccatgtctataaaattaacagccaattactagttaatatatg

SEQ ID NO: 174839 - DNA, 120 bp, Artificial Sequence
  ENSG00000109911_27 (sequence is synthesized)
ctttgcaaatagataactactataaaaattgaatatgcatatttgaacccttattttaaatataaaagaaacttttcaaactcagtaaaagtgcattttgaataataagtgtacctgggc

SEQ ID NO: 174840 - DNA, 120 bp, Artificial Sequence
  ENSG00000109911_28 (sequence is synthesized)
tttccaaaaatcatatccaagtgctttgtttttctaattcactgggccggctttgtaaaaataagctactggagaggggtgtgtatttttgtcttcctctgataaaaacgcactctgaaa

SEQ ID NO: 174841 - DNA, 120 bp, Artificial Sequence
  ENSG00000109911_29 (sequence is synthesized)
atgtgttttcctttcttctggaaacattatttgttactcattatgttaataacttactacataaacatatctctcttcaataatgctaccttaggtatagacaccattttgatacattat

SEQ ID NO: 174842 - DNA, 120 bp, Artificial Sequence
  ENSG00000109911_30 (sequence is synthesized)
gaaatatacactccattaacagattttttttaattatcagcttgactcaaagatataaatacttaagaacaatgccaaacgtaatatctgaaatgatatcttttaagtgtttctagtata

SEQ ID NO: 174843 - DNA, 120 bp, Artificial Sequence
  ENSG00000109911_31 (sequence is synthesized)
tgaacttcaaaaccctatatggtactcatttcttacactagatttgcctttctttaacatgagataaatattttgactactgcagtttgctcaggtgctcgggttctaagactttttgaa

SEQ ID NO: 174844 - DNA, 120 bp, Artificial Sequence
  ENSG00000109911_32 (sequence is synthesized)
tttccttttagtagccaccatacaatatctacttttctcttccatttattccttatgtccacctccaggatctttaaatactaacagtagacaaaataaaactactttagaaggaagcga

SEQ ID NO: 174845 - DNA, 120 bp, Artificial Sequence
  ENSG00000109911_33 (sequence is synthesized)
atacaaaaggagagtggggggacccccctattcatttgtttaagcccattattaatgtcatttctaagacagcatgttactgctttccaaagatagtcaccgtcaacattattgaaataa

SEQ ID NO: 174846 - DNA, 120 bp, Artificial Sequence
  ENSG00000109911_34 (sequence is synthesized)
gcagtactaaccctaagtacttacactttgaactttaaaaccgagcagttgagtcattcagtaccaagccaaaacacagaaaaacaaaaaagcagatgaggtttattcttgagaaatgaa

SEQ ID NO: 174847 - DNA, 120 bp, Artificial Sequence
  ENSG00000109911_35 (sequence is synthesized)
aaagagaagaatatatatttcgccttggtgagccaaacatacagagaagaaaaggctttttaaaatcttactagtatgagaggcccagagtaaaaagaaataagcaaaagaatatagaca

SEQ ID NO: 174848 - DNA, 120 bp, Artificial Sequence
  ENSG00000109911_36 (sequence is synthesized)
caatcctaagatgacattcacagaacaaagctgaatcttcaaataatactgtatgagtgaatcttaggaaacctagtgatgatagtaagaagaaatggcagtgagctgtagcaagaaacc

SEQ ID NO: 174849 - DNA, 120 bp, Artificial Sequence
  ENSG00000109911_37 (sequence is synthesized)
agttgttcaccatttaagggttaggaggcatagctttgggggaaaaatattctagaaattcattgcagtaaaatgcatttttttacttagagcagtttgaacgtttattacttaaaacat

SEQ ID NO: 174850 - DNA, 120 bp, Artificial Sequence
  ENSG00000109911_38 (sequence is synthesized)
tcagctcttattctattcacctggttttcccaagtcagtcaagtttggagaaaaaatttagacgtttagtcctgggattctactgaagtcttcacaaataatctccatcctggaagatgg

SEQ ID NO: 174851 - DNA, 120 bp, Artificial Sequence
  ENSG00000109911_39 (sequence is synthesized)
tgtcaaaacatccctgcagataccccattgataaatatataaatatatgtatcgttaaataaataataaacaaaaattatttcaacaatgagtaaaaggccaactcccaggcactgctac

SEQ ID NO: 174852 - DNA, 120 bp, Artificial Sequence
  ENSG00000109911_40 (sequence is synthesized)
cacacagagcctgccatgctgtccccaagagagtgcctggagctctgtttggaaggacagctcatgtccctagggtgtgggcagaaggcaaggcagccgttcccatcctgccggaccaga

SEQ ID NO: 174853 - DNA, 120 bp, Artificial Sequence
  ENSG00000109911_41 (sequence is synthesized)
gggcttctgcagctgagcagccgcttcttcagactataccagactgtgctactttgccctggcaatcctgaccttcagagcacacatatacgtgcccaagtgcacacatacagaccctcc

SEQ ID NO: 174854 - DNA, 120 bp, Artificial Sequence
  ENSG00000109911_42 (sequence is synthesized)
gctcccacgtcactccttttctcccattcccacctcttgcacctggcgtgcgacatccgggtctccaaagtctctgctgtctacacaacagaaccgtgggccggaactggctgcctgacc

SEQ ID NO: 174855 - DNA, 120 bp, Artificial Sequence
  ENSG00000109911_43 (sequence is synthesized)
gtggtggaaattacagccagcgagaaggaagaagtaagccagccagcagctgtggcatgcactcccacatagcccttctctgacagttccctcagcacacagccctcagggaatgtaggc

SEQ ID NO: 174856 - DNA, 120 bp, Artificial Sequence
  ENSG00000109911_44 (sequence is synthesized)
tgcaaaatgtcaggaggtagaaatgtctgcaccggcaattgtaccaacagtgcgtatgtgtgctcactcccctgcagaaatgtgctgctgtgcagtgcaggctgacactgaacaaaacta

SEQ ID NO: 174857 - DNA, 120 bp, Artificial Sequence
  ENSG00000109911_45 (sequence is synthesized)
catgcacacatacaaaaactgcaacttaggaaggtgtctccaaatgtgcagcaactctggtggaataaaattattagtatatttcatgccggagcaatgaatctcaattatctgttcaca

SEQ ID NO: 174858 - DNA, 120 bp, Artificial Sequence
  ENSG00000109911_46 (sequence is synthesized)
agtaattccttaactaaaaaacagtagatattgaacgagaaggtcatgtttaaatccttccattaatttctacatttctgatcatttgcttttggggatttttttaaagcagagtataat

SEQ ID NO: 174859 - DNA, 120 bp, Artificial Sequence
  ENSG00000109911_47 (sequence is synthesized)
tcagtggaagtgtgtctttgtccccagaggtttctgcatgtgcaagcattttaatctagactgccagaacccccaggctttttagtgaagtttgcagaggaagacttatctgtattgact

SEQ ID NO: 174860 - DNA, 120 bp, Artificial Sequence
  ENSG00000109911_48 (sequence is synthesized)
tatatgttgcacagaacaaatgaaagtctcagacagtccttttttacccaacaaaggcttatttttttccatcctttgcttgggctcaagcactcctgccctgcgtgcctccactttaaa

SEQ ID NO: 174861 - DNA, 120 bp, Artificial Sequence
  ENSG00000109911_49 (sequence is synthesized)
catgatcagaactgtgcttcattgcaaataacaactgaccaacaatgggccctgcttcatagatttgggaatgtttggcttaagctgccaatgactgaaggcctttaattcccaccggcc

SEQ ID NO: 174862 - DNA, 120 bp, Artificial Sequence
  ENSG00000109911_50 (sequence is synthesized)
agtcacagtctgctttgttgttgtctgttgatgtgtctgtgctcattattccttgacatgcaacatcccccctccaccctccaaccatccacaaccgcacagaaagcaagattcaaatgg

SEQ ID NO: 174863 - DNA, 120 bp, Artificial Sequence
  ENSG00000109911_51 (sequence is synthesized)
gaacagctgtagtggttcaatgggaaatgatgcctcttgtgcaaaggggagggagacagaaaagggagagggcctatttgaaaaaggcaacagctttcagaaagtctcctttaagaaatc

SEQ ID NO: 174864 - DNA, 120 bp, Artificial Sequence
  ENSG00000109911_52 (sequence is synthesized)
tacttttgaatatacttcagtgaaatcattgttgaaataggctgacaatggaaatctgcccagattgaaaatgccagtcctaattcaaaaaacaattcctagctaatcgcttgttgcatt

SEQ ID NO: 174865 - DNA, 120 bp, Artificial Sequence
  ENSG00000109911_53 (sequence is synthesized)
tttaaattatttctagactttgagctttagaattaaatggctaactgggaaatgttaccattttgtatatatgttgtgggtataaatgggcacagatctacaccctgctgtaagtggaat

SEQ ID NO: 174866 - DNA, 120 bp, Artificial Sequence
  ENSG00000109911_54 (sequence is synthesized)
ttttttctaacacgtttttgatttatggtatctataaggattattttttaaggatcatcaggatgtaaaacagagtgtgtgtgaaagtaaccattggtttagaatgttgatctaacatgg

SEQ ID NO: 174867 - DNA, 120 bp, Artificial Sequence
  ENSG00000109911_55 (sequence is synthesized)
aaataaaatttgtaacaccacactataaggttaaaaagaaaactgtataataaaggaaatacaaaggctttggcatggttttttacaatcaacaatggttaattttgatatgtagttgtg

SEQ ID NO: 174868 - DNA, 120 bp, Artificial Sequence
  ENSG00000109911_56 (sequence is synthesized)
aacaacttcaaaacacttaagtttaaaactcttgcaagcacttttaattgattaggaatgaactctagatgcacaaaatgattggaccgtgaacagtaatacaactatatctaagaacaa

SEQ ID NO: 174869 - DNA, 120 bp, Artificial Sequence
  ENSG00000109911_57 (sequence is synthesized)
ttaacttttgctggccaaaaaagaaacgtatgattgcatgaaaatgtgtataaaacatctatattcttgtcaaatataaatgaaattaactttattatagaaatcattctgaggatttct

SEQ ID NO: 174870 - DNA, 120 bp, Artificial Sequence
  ENSG00000109911_58 (sequence is synthesized)
agggaagacaaatacttacattttgacataaaacaaattggattatatcgaagacacactctaccttttagctatcaactttttttcttccttgaatttatatcttacccttttttgcac

SEQ ID NO: 174871 - DNA, 120 bp, Artificial Sequence
  ENSG00000109911_59 (sequence is synthesized)
ataaacttcatctgttaacaacctttggaaaaccaacagatatttctgacataaatctagtgcatgttgttccaggtttaattatatgcaaaggaatgatacaaacttggaacatcagtc

SEQ ID NO: 174872 - DNA, 120 bp, Artificial Sequence
  ENSG00000109911_60 (sequence is synthesized)
cataaactatgaacagatgggtagaagtattcgatatatcttgataaaactcttaaattcgtggcaaagcttgttgatcatggttttctttttaaaaaaaaaaaaaacaacttcatgacc

SEQ ID NO: 174873 - DNA, 120 bp, Artificial Sequence
  ENSG00000109911_61 (sequence is synthesized)
aacacagatcaaacatccatccagtctacattgttctttttttcattataacatacaaatgcccatttacaaataatacaccaaaatgaataaaagtttggataccaaaatgaagatttg

SEQ ID NO: 174874 - DNA, 120 bp, Artificial Sequence
  ENSG00000109911_62 (sequence is synthesized)
ttccaactgatatcgtgccttctgtatacaaaggtccttgtttcaagtccattccttccccagtggtacaatacaggacacaattgtagaactgaagcggctctaacagccatttttctt

SEQ ID NO: 174875 - DNA, 120 bp, Artificial Sequence
  ENSG00000109911_63 (sequence is synthesized)
tgtagaactgaagcggctctaacagccatttttctttctttcctgaaagctcaactgttgtgtccccatagtcactgactgaattaacacaatatttcctttcctttttttttttttttt

SEQ ID NO: 174876 - DNA, 120 bp, Artificial Sequence
  ENSG00000109911_64 (sequence is synthesized)
tcaggttcacttccgggaacttgaactggaactgacacaccaggggaaatgagtcctagaagtggatgaaagaaatagccatgtagatattccctttgagaaacagacatggaatacaaa

SEQ ID NO: 174877 - DNA, 120 bp, Artificial Sequence
  ENSG00000109911_65 (sequence is synthesized)
aaaaaaaaaaaactaatactttctaacattttttactgtattaaaatcacttcaattgttacaaataaaagtagcaccttcagaaactagacaatatatgtatatatacctattggatcc

SEQ ID NO: 174878 - DNA, 120 bp, Artificial Sequence
  ENSG00000109911_66 (sequence is synthesized)
tatgtatatatacctattggatcccaagtaccccccaccccaatccaaaggaaaagaaaaaaaaaatcctctgtttgtttgcatgtttggaacttttacaataaagctgtctctggaaaa

SEQ ID NO: 174879 - DNA, 120 bp, Artificial Sequence
  ENSG00000109911_67 (sequence is synthesized)
ggcttctcatacttactcaagcagaaagactctgcatggggagaaggttctttacagcattccacatttttaatgagcttccttgcaaaggcgactgcatttgcctccagacttgtcaga

SEQ ID NO: 174880 - DNA, 76 bp, Artificial Sequence
  ENSG00000109911_68 (sequence is synthesized)
ttgatctgtgatgaatcagatgtcaaagacttagcttttaaattaaaaaggaagctattcaccatgcctcctgggt

SEQ ID NO: 174881 - DNA, 120 bp, Artificial Sequence
  ENSG00000109911_69 (sequence is synthesized)
tacaggcatgagctaccgcgcccggcctagggctttgtatttcaaagagaacaagtctaaagtgggtgcaagacaactacttgagacaagagaggaacatttatcctccaggcttctcat

SEQ ID NO: 174882 - DNA, 120 bp, Artificial Sequence
  ENSG00000109911_70 (sequence is synthesized)
gaggaagagtctgtggtcttttccaaacttgaagatttgattttttccaaaacttgtagctttgtgtttatcagcagatctgaaagccacaagtattatctgatacatacaataatgaca

SEQ ID NO: 174883 - DNA, 120 bp, Artificial Sequence
  ENSG00000109911_71 (sequence is synthesized)
gaagaaaaaaatgttctatgttttcttcactaaaagtttttatgtaaaaaagaaatatagggcgaattatacagcataagaattatatctcattaaacctattttttaaaaacaaccata

SEQ ID NO: 174884 - DNA, 120 bp, Artificial Sequence
  ENSG00000109911_72 (sequence is synthesized)
aacaaatactgacttttcgctaatgatatgcatgctggagtggttaggggtaaaatatactgatgtctgcaactttctttgaaattcaccacaaattagagagactggtgaatgtggata

SEQ ID NO: 174885 - DNA, 120 bp, Artificial Sequence
  ENSG00000109911_73 (sequence is synthesized)
gatctttagagaggtgaaaaagcaagtgtagagaacggttacttgtacaacctaagtgatgtgtaaatgcatattctcttatatctgaaatttttcacaataaaatattgggaacaatca

SEQ ID NO: 174886 - DNA, 120 bp, Artificial Sequence
  ENSG00000109911_74 (sequence is synthesized)
agatattttctgtctcgtcatttacaaagaaaattttctataaagaagaacccctactttaaaaagccgcatactttaaagaaaatttactgagagaattgtcaatttggtgataatgat

SEQ ID NO: 174887 - DNA, 120 bp, Artificial Sequence
  ENSG00000109911_75 (sequence is synthesized)
ttatactcttaaaattaagctttatttgaaaaataacacatacagtcatttgctgtgtaatttgcacttgtagaatttatgcaatgtctttgacaaaatacctagatttttcaaatagtc

SEQ ID NO: 174888 - DNA, 120 bp, Artificial Sequence
  ENSG00000109911_76 (sequence is synthesized)
tctcattgtgtgcacatattttctcatccagcctctctgtaatcatgtggaactcactttcttaggggcacctcatttcagtctctaccagattctttcaaatgctaaagcaacctctta

SEQ ID NO: 174889 - DNA, 120 bp, Artificial Sequence
  ENSG00000109911_77 (sequence is synthesized)
accattagtactaattcagctttctgaagccacagataaattgctattttctatacaatgttaccagatcgataataaatacctaatatatgagaaacaattgtaatgtataaatatata

SEQ ID NO: 174890 - DNA, 120 bp, Artificial Sequence
  ENSG00000109911_78 (sequence is synthesized)
atttcttttataaaacattataaatttaaccatttatggtgtttattgtacatttaacttagaaccttaagcacaacatcttttaaagaaaccttttttaaaataaagcattaactagaa

SEQ ID NO: 174891 - DNA, 120 bp, Artificial Sequence
  ENSG00000109911_79 (sequence is synthesized)
aaataaagcattaactagaaatgttaaaagttttgaattctgaaattaaaatcctttatgaattgtagcttcatacaatttaaatattaaaattcagtgttttcatttgtagcatgtttg

SEQ ID NO: 174892 - DNA, 120 bp, Artificial Sequence
  ENSG00000109911_80 (sequence is synthesized)
ttcagtgttttcatttgtagcatgtttgaatacacagatgacttcagattattaaaagttataaaatcaactttaaatgtgatattgagttttttattataatctacttaagattttttt

SEQ ID NO: 174893 - DNA, 120 bp, Artificial Sequence
  ENSG00000109911_81 (sequence is synthesized)
aaacttttgataactgaatattgagaggcataaggatacatttctatattgggcgtaaggatatattgattttattagcagaagtatactcaaaaactttaactgttcattagccacact

SEQ ID NO: 174894 - DNA, 120 bp, Artificial Sequence
  ENSG00000109911_82 (sequence is synthesized)
atccagtgtctataattgatagtcaaattaaaacagtaagtttaagcgggtgctatgaagtcttgcttgcttatatgcatttttttaatgtaggaatttcttagacaagtaaacaagatc

SEQ ID NO: 174895 - DNA, 120 bp, Artificial Sequence
  ENSG00000109911_83 (sequence is synthesized)
ttactgaagtttaaagggtgaatatattattaaaagtaatgttggtcctggtaagattatttttaagctataggatgctgtagttggaatattttggcattttggttaggaaatttaaac

SEQ ID NO: 174896 - DNA, 120 bp, Artificial Sequence
  ENSG00000109911_84 (sequence is synthesized)
ggaaatttaaacatgagcacatttttacttaataactgcttttatttaagctaatgtaagttattgtattttaaaataattatataaacaccagtgtccttaccatttgaaaattatttt

SEQ ID NO: 174897 - DNA, 120 bp, Artificial Sequence
  ENSG00000109911_85 (sequence is synthesized)
aacaaaacttcttttcaaaggtgtttacgatgtagaatagaagattgcatgaaatcacacaaaaagaactcaatgtagtgttttcagcctaataaaaatgttgtaaaaatacttgtaagc

SEQ ID NO: 174898 - DNA, 120 bp, Artificial Sequence
  ENSG00000109911_86 (sequence is synthesized)
ttggaaatcacactagctattcttgtttcaaattctgtttaatatattgttctgtatgattttataataaacagattactccttgaacaggaattaagaataaagctgccaggaaggggt

SEQ ID NO: 174899 - DNA, 120 bp, Artificial Sequence
  ENSG00000109911_87 (sequence is synthesized)
tttgttgtcagagtagttcccgcctcatgttttgtaagagatttcatggtcccattgtaaagagtagatgatttaaaacgtgttcccaagataaactttcccattgtcattaatgaggat

SEQ ID NO: 174900 - DNA, 120 bp, Artificial Sequence
  ENSG00000109911_88 (sequence is synthesized)
ggataatactgagtgacaagtgcattaggaatgacacagaaagagctgttagatttgtcagagcgtatcacttcaggcattgacacttgaggacattctttttgtggatatttggttggg

SEQ ID NO: 174901 - DNA, 120 bp, Artificial Sequence
  ENSG00000109911_89 (sequence is synthesized)
ttttagactattgttttatttttacaatatatcaagtatggcaaagatgattttcttttgaatatctattaaaagtaagctccaaacttacatgataaatatgatatgcatatttccatg

SEQ ID NO: 174902 - DNA, 120 bp, Artificial Sequence
  ENSG00000109911_90 (sequence is synthesized)
catggctttgaaaagcatatttaattaagtgttaatgagctgcgcttacttgggtgtggaatgtgaatgctacccactattgtctgtggctaagaggattcttatctacattttaaaagc

SEQ ID NO: 174903 - DNA, 120 bp, Artificial Sequence
  ENSG00000109911_91 (sequence is synthesized)
atttttctttactgttagtgaaattacctttcctcgtgtggaactaaacaaattataatttacactagtgtctttaagtacattttctaagacactacaactttttttgtgacccttacg

SEQ ID NO: 174904 - DNA, 120 bp, Artificial Sequence
  ENSG00000109911_92 (sequence is synthesized)
taagcaatggtgacagaaagtagtaggacaaaatatttatttcaacttaatcttcctaaagagcaaatgaacagagaactattaaggaattagaattgatgtatttattaatgaagtaaa

SEQ ID NO: 174905 - DNA, 120 bp, Artificial Sequence
  ENSG00000109911_93 (sequence is synthesized)
tgctcagagagagatggcttttgggtgatgtgatagttatcagtatagtcggtgcaatttttttttaacaaagacataaaacagccaagcagccttgacaaaccattttgtttaatctct

SEQ ID NO: 174906 - DNA, 120 bp, Artificial Sequence
  ENSG00000109911_94 (sequence is synthesized)
tttcaaatgaaaagctcctaagcaggccacttgtcttaactgcttgaaaccataaaaagagagaattgccaccaataaattagcatatttttaacttcatcaccaaatgatggtcaatgt

SEQ ID NO: 174907 - DNA, 120 bp, Artificial Sequence
  ENSG00000109911_95 (sequence is synthesized)
ggcttggcactgctttggtgtttgggacttcacccttaagtgaccactttggcccttttttgaccctctgccctctttaagctggccacttgataaggtaacttaatggttctctctctt

SEQ ID NO: 174908 - DNA, 120 bp, Artificial Sequence
  ENSG00000109911_96 (sequence is synthesized)
tttctctttcccttcacatttgcaagtagcactaacctataaatcattgtaagggccctatccagtgacaaattaatgtgccctcctcctaattaatggtcatcaatgtccttaattatc

SEQ ID NO: 174909 - DNA, 120 bp, Artificial Sequence
  ENSG00000109911_97 (sequence is synthesized)
taatcctattgagagcagttaatagttaatcaggcagccagttcttcaagcaggtcatctctgcaggagtgttagaagtttctcatctggggacactcccttcaaaagccacttaaagcc

SEQ ID NO: 174910 - DNA, 120 bp, Artificial Sequence
  ENSG00000109911_98 (sequence is synthesized)
aaaagagtgagagtgtggaaatagtgattcttgagctaatttgctttagttctcaaaagaaaccattgaagtggaacccaacactgtaattgttcaaacattgtttcagcttttctgaca

SEQ ID NO: 174911 - DNA, 120 bp, Artificial Sequence
  ENSG00000109911_99 (sequence is synthesized)
gaatactgagtaatgtaccataatattgcttaaaacattgagaaggatacagttatagtttagtgtcacaaggaaagcatgattatcgttttcttttgagtttacatttttaatggaaga

SEQ ID NO: 174912 - DNA, 120 bp, Artificial Sequence
  ENSG00000109911_100 (sequence is synthesized)
cgtaagttttttctctccatgtggcaccttttccccaaaatcagtattctaacaaccacatctgagacacaatttctattaccatacaaactaagcaagatgattcccctgtgaaagtaa

SEQ ID NO: 174913 - DNA, 120 bp, Artificial Sequence
  ENSG00000109911_101 (sequence is synthesized)
atattgtacccagagaagaaagtagtacagtaatgtgaatcatgtttatgatttctctttctctgtctcattgagtcttactgggagttgagggaaagagagaaataaagaacttacgtg

SEQ ID NO: 174914 - DNA, 120 bp, Artificial Sequence
  ENSG00000109911_102 (sequence is synthesized)
gttctaatagtaactacacttcaccatcagagctgatgaaagatcttttattaaccacacagatttctgttccattttctctcttgttcccactatggtaaactaagaatcattataatt

SEQ ID NO: 174915 - DNA, 120 bp, Artificial Sequence
  ENSG00000109911_103 (sequence is synthesized)
ggtcaacctgtggtttagaagcaatgtttgaaaacaaaacacaaatagactgttgtttcttaaaattctatatactcaaactctgcacctttttgtctaataacctaatcacttaagttt

SEQ ID NO: 174916 - DNA, 120 bp, Artificial Sequence
  ENSG00000109911_104 (sequence is synthesized)
ctctgcacctttttgtctaataacctaatcacttaagttttttgagtttttttgttattttaatataaatatacacattctaaataacttatttacttaagccataatactcaatttagt

SEQ ID NO: 174917 - DNA, 120 bp, Artificial Sequence
  ENSG00000109911_105 (sequence is synthesized)
tggaagtacatatataggtataattagaatagaataaaatcatgtggttcacctaaaagtaaatgttttaaatgtagcattgtacattctaaaatgcatatccaaacagatagcaagtct

SEQ ID NO: 174918 - DNA, 120 bp, Artificial Sequence
  ENSG00000109911_106 (sequence is synthesized)
ttgtaatatattaaagaaactagaaacaggggtagaaatgccctgaaagtaactagttcaaggattcctttattgggggtaaaatcatcgagcaaatgctactgttttaatactcacaac

SEQ ID NO: 174919 - DNA, 120 bp, Artificial Sequence
  ENSG00000109911_107 (sequence is synthesized)
aaataaatgttctttttaaatgtcctcatatttttttaaaaataaaatgtaaccttactagcctgtaaagtctgagactaaaataggtagtctactgaatctgagtcttactttcagaag

SEQ ID NO: 174920 - DNA, 120 bp, Artificial Sequence
  ENSG00000109911_108 (sequence is synthesized)
taaaagagttgaatctgacattgaatcaggcagtgaatcagagtctcactttcagaagtgaaaggtagtttagcagggaaagcagaaataacatttccaattccacaggcagatttgtta

SEQ ID NO: 174921 - DNA, 120 bp, Artificial Sequence
  ENSG00000109911_109 (sequence is synthesized)
catgttggaatttactgtcagtcacatggtctcaaaagggggcaaggttggaaacaaggggcaaaagaagcagacaagcactctcatctctatttttagggcaacttttttttaatttgt

SEQ ID NO: 174922 - DNA, 120 bp, Artificial Sequence
  ENSG00000109911_110 (sequence is synthesized)
taagtcattgccctttatgtgtatgaaaactgattatctttttactagcagctaccaagggcctctaacaggtagagcaactttaactcatagtctctaatttctttgagtgatttggag

SEQ ID NO: 174923 - DNA, 120 bp, Artificial Sequence
  ENSG00000109911_111 (sequence is synthesized)
aaagcaaaggaatatttcttccttctcagagtatatgttggtattgtccagattcaagtgaaaatatttatctaatcagagtaaaaatttttgccgatacctgtaactacaaagctctat

SEQ ID NO: 174924 - DNA, 120 bp, Artificial Sequence
  ENSG00000109911_112 (sequence is synthesized)
aaattagcccctttacaaaaaccatagcagaatcatatccatactaattgcactaaaatcctgacatgcattctggataagtaaaagtcaaagtttgaactatgatttcaggttaaaaga

SEQ ID NO: 174925 - DNA, 120 bp, Artificial Sequence
  ENSG00000109911_113 (sequence is synthesized)
aatagctttccaattctttgaaaactggtgactcttataagctatatatagtaacagtctggagtatttgattaaccattatatactacttattccttgatcttaaccagatcgaattta

SEQ ID NO: 174926 - DNA, 120 bp, Artificial Sequence
  ENSG00000109911_114 (sequence is synthesized)
cctaaccttgcctaacctccatttaatcatagcaaacatttgttgagcctttgttaagtagcaagtactatacgagcttagttatatttttatatagtgattaaatattttaaacaaaag

SEQ ID NO: 174927 - DNA, 120 bp, Artificial Sequence
  ENSG00000109911_115 (sequence is synthesized)
ctttactaagatataataatagattcaatacacataaatggtgtctttttcatctttatatctatctaagaatcaaggacagggttatttacttaataggtataaagtctttgctgaaat

SEQ ID NO: 174928 - DNA, 120 bp, Artificial Sequence
  ENSG00000109911_116 (sequence is synthesized)
gtatgtaatatagataaattatgaatgggcttttaaaaatagtgcaaataatacagctataaatatgacataagcttcaccagtcaagtgacccgtacacactgtgttcttagttacgtg

SEQ ID NO: 174929 - DNA, 120 bp, Artificial Sequence
  ENSG00000109911_117 (sequence is synthesized)
taagataacttgagtacatggcgtcacttccaagctaaaataactggttaaacttgcatttcttagcttctgtaatttttgcttctttaatatcaagcgatcattaaccagttttttctt

SEQ ID NO: 174930 - DNA, 120 bp, Artificial Sequence
  ENSG00000109911_118 (sequence is synthesized)
tagtaattatgatgtaattatagtacataaacaagtaagattaggcagaatttgaaatatggctgcatgtttgatgacataagtgcaacattttcacttgcacttaataatattttgcta

SEQ ID NO: 174931 - DNA, 120 bp, Artificial Sequence
  ENSG00000109911_119 (sequence is synthesized)
ttttgattttgcactttcagctcgatcatactgtagcacattctagtcataaaattatctaatataaatgataataatgtattattatattagttgcaccatccattaaggttttcacaa

SEQ ID NO: 174932 - DNA, 120 bp, Artificial Sequence
  ENSG00000109911_120 (sequence is synthesized)
agagagtttccactttggtaatggaacagttttccagctcaaagattcggtgtttctaagttcaagtcagagagtacagtaactgggttaacactgaaatatacaaaagacttacactgt

SEQ ID NO: 174933 - DNA, 120 bp, Artificial Sequence
  ENSG00000109911_121 (sequence is synthesized)
aaagaaatatactgtaaagacttacaatatttactacgaattttcaatataaagattaacactacttgtgtaggctgtaattggtcaaaaaaatagtgtcaaagtaaatcatgtttactc

SEQ ID NO: 174934 - DNA, 120 bp, Artificial Sequence
  ENSG00000109911_122 (sequence is synthesized)
aaggttgtcttatcatactttgtccctaattcagaataggacctcagtacctctccagtcaccaagaactttttctcacaaaataattgaccaaccagtttttattaagtagctattatt

SEQ ID NO: 174935 - DNA, 120 bp, Artificial Sequence
  ENSG00000109911_123 (sequence is synthesized)
aagattattatttacatattggaaaagcataaactcttaccaattacaggacaggggtgctagtagctatgataatgtgtaataatttggagtatttcatgatatgtttggtcctaggtt

SEQ ID NO: 174936 - DNA, 120 bp, Artificial Sequence
  ENSG00000109911_124 (sequence is synthesized)
tactttatttcttatgcttattttcagcagcctttctagtttttaaatgagaagtagaatgttgaatatgtttactgtatctagagatgggagcaggatggttaacttgcttgtcaactc

SEQ ID NO: 174937 - DNA, 88 bp, Artificial Sequence
  ENSG00000109911_125 (sequence is synthesized)
tatcttagctatcgtgaatagtgctgcagtagacgtggatgtccggatgtctctttaatgtaatgatttcctttcctttggagaaatt

SEQ ID NO: 174938 - DNA, 120 bp, Artificial Sequence
  ENSG00000109911_126 (sequence is synthesized)
catagttgctgcacgagtttatattcccaccaacagtgtaatacgtaatatttaataccagatatatataatttcatgtaagtatatatatgaaataaaaccttacagttcatgttacta

SEQ ID NO: 174939 - DNA, 120 bp, Artificial Sequence
  ENSG00000109911_127 (sequence is synthesized)
gcaatatccttgatgttcaactgaaaatataaagtagtcaaagacctcattttaccacgtgtaatctattgacaatatacttttataacgtatacaaaaaatactgaatcatcttggtat

SEQ ID NO: 174940 - DNA, 120 bp, Artificial Sequence
  ENSG00000109911_128 (sequence is synthesized)
aagctattcaccattgaggcagaggtccaaaaaggggtcagcacagctacgttcctcctggatggtccaaggaagaagctatttccttgccttttccagcttctagaggttgcctgcatt

SEQ ID NO: 174941 - DNA, 120 bp, Artificial Sequence
  ENSG00000109911_129 (sequence is synthesized)
ccttggctcatggcttcttcctccgttttcaaagcgagcaacattgggtttgagtccttatgttaccaactctctggttttttttctgcctctctccttcacttttaaggatccttgtaa

SEQ ID NO: 174942 - DNA, 120 bp, Artificial Sequence
  ENSG00000109911_130 (sequence is synthesized)
ttacattggacccacttaaataaaccaagatcttcctattttaaggtcgaccaatcagcaaccttaattcaatctttcaccttaattcctctttgccatgtaaggtaacacattacaggt

SEQ ID NO: 174943 - DNA, 120 bp, Artificial Sequence
  ENSG00000109911_131 (sequence is synthesized)
tccaaagactgtggtatggacattttttgaggactgttattctgcctaccacacatttctttcatttttactcatcagtaaccactatgatagttcatagagacggaagaaccacttcgt

SEQ ID NO: 174944 - DNA, 120 bp, Artificial Sequence
  ENSG00000109911_132 (sequence is synthesized)
ggcagctcacggtttagaccagcctgcaaaagtttttataattgtgagagacagacttcattagaagatgctggaaaaaaatgatttcccctctttgaccgtcagactgcctgttctctg

SEQ ID NO: 174945 - DNA, 120 bp, Artificial Sequence
  ENSG00000109911_133 (sequence is synthesized)
gttctaaatcttaaaacattttggctttaagagagcgaatgttaaaggcttatgttgacacataatccttataaagtattttgagcctgtcgttgatatttagatagtgtctgcgttaaa

SEQ ID NO: 174946 - DNA, 120 bp, Artificial Sequence
  ENSG00000109911_134 (sequence is synthesized)
tctgtgtatatattttttattttttctatatacattttgcttcccagtattgattgctgctacattccatacgacatctttaaatttaactcacattttaacgagaaaagtctagttctt

SEQ ID NO: 174947 - DNA, 120 bp, Artificial Sequence
  ENSG00000109911_135 (sequence is synthesized)
aggctttcctttaaaatctctggaattttttatgagaagcctgctgaagaatatgcttgtttcataactgttatattcaaaggaatgaccagattaagttggtaggacagatttgctgtg

SEQ ID NO: 174948 - DNA, 120 bp, Artificial Sequence
  ENSG00000109911_136 (sequence is synthesized)
ttaataaagcttctagattaatttctgaatgctgtttcattaaaaccccgtctgtgtttacataacttttttcatagtgtgtgatatgtgtctgttaaatcttgtacactttcataaaat

SEQ ID NO: 174949 - DNA, 120 bp, Artificial Sequence
  ENSG00000109911_137 (sequence is synthesized)
ataactcattgcttgttcttgtacttcgtttgacatttctttcggttattttcccctcaaagtaggcttttcataggtttagtgcagagaaagtaagaagaccagcaacctatgagaaag

SEQ ID NO: 174950 - DNA, 120 bp, Artificial Sequence
  ENSG00000109911_138 (sequence is synthesized)
agtatggcttcttgattctctcatttcattttccggttatttctagataagtttaagtatttttcacttaattgtttcaaatatattttcctcctgagttgcatggtactgtaaatagaa

SEQ ID NO: 174951 - DNA, 120 bp, Artificial Sequence
  ENSG00000109911_139 (sequence is synthesized)
gtgattcaaaatatctagttagcaaatatatagtccaccgtttttcccttgtgagcctcagttgatatcctcttacatttgaactttaagtttggtagctatttctaggccttatatatt

SEQ ID NO: 174952 - DNA, 120 bp, Artificial Sequence
  ENSG00000109911_140 (sequence is synthesized)
aaaaggttatgtttctattataatgtcttcagttcctcattagaataacaaaatgttcctagtgtacctcctggcacttagtagattctcagtaagttgttgaatacaagaaaaataatg

SEQ ID NO: 174953 - DNA, 120 bp, Artificial Sequence
  ENSG00000109911_141 (sequence is synthesized)
tgtagaaaaaaactgagacaagaaattatgaaacatgtagaatggagtttcatgtttgagctctaaaaacaaattaagtgatatgaacagtctcacaaaaccagtgaccatgtgtactga

SEQ ID NO: 174954 - DNA, 120 bp, Artificial Sequence
  ENSG00000109911_142 (sequence is synthesized)
ttgttaggcttcaaatttagtgctctttgcactaggctaccgctgtctgaaatttttacgtattctttccaggggttttgaccatttattgaacctcggattaatgatttaactatcgtc

SEQ ID NO: 174955 - DNA, 120 bp, Artificial Sequence
  ENSG00000109911_143 (sequence is synthesized)
tcttaaagtacccaccaaaaagagaacccaaagcaccttctatacgtgtttcttcagagatacaaacttgaacagtaatttttaaagtttccgtatttgcttggaatgggagactcgagt

SEQ ID NO: 174956 - DNA, 120 bp, Artificial Sequence
  ENSG00000109911_144 (sequence is synthesized)
agggtatttaagtgtaacaagcttatgctaaaaattactgttcattaagatggtagaaacagtattggttgttgaatactttgaaatatattttgcatgtatgcagtgaattctcaaagt

SEQ ID NO: 174957 - DNA, 120 bp, Artificial Sequence
  ENSG00000109911_145 (sequence is synthesized)
gcacaaaagttgaagaggttataatagaattgactacatcttgaaaaataaatatgtccagaagtattttagttttaacctcttaatgacatttttgtatctgattttctgtataagcag

SEQ ID NO: 174958 - DNA, 120 bp, Artificial Sequence
  ENSG00000109911_146 (sequence is synthesized)
tttagactatgttattacttgaaaatgttatttgactcaagttgcgacaagcctaatatgactatattgtgacaaaaggtaatgataataggatgttatggtgttagaacggtaaaacta

SEQ ID NO: 174959 - DNA, 120 bp, Artificial Sequence
  ENSG00000109911_147 (sequence is synthesized)
tactgtaatattgtgattattgcctgaatatattatgtggttactgtgtaacaagtaaatattatagcttccgtgtagtacggtgacattttactactgccaccgtgacgtcattgtaat

SEQ ID NO: 174960 - DNA, 120 bp, Artificial Sequence
  ENSG00000109911_148 (sequence is synthesized)
tttaaacatggatgcaaaatatatttgaaaggcatcatacatgctaattgttagtcatttgatgatacactgataattccattacttattccaaagcatttcatgaatttgaaaattttc

SEQ ID NO: 174961 - DNA, 120 bp, Artificial Sequence
  ENSG00000109911_149 (sequence is synthesized)
aatatctgcatttttcaaatgacctaatatataatgtttttgttctgacaacctaattgtattatgagatattgatatacatttcccaagttagctacattaaaattgtttaaattccca

SEQ ID NO: 174962 - DNA, 120 bp, Artificial Sequence
  ENSG00000109911_150 (sequence is synthesized)
aagcaaaacaatggcattgctgtcaagcacagaaatgaagtttaagatttaagtaataagtggcgactcagaaagggtcagaaaccttagagtgtaatccagacagatataagttggctt

SEQ ID NO: 174963 - DNA, 120 bp, Artificial Sequence
  ENSG00000109911_151 (sequence is synthesized)
gattgtgaaatggaccatcctgacagttaatggaggatacttgaaaagctaggcagaaatgatctacagtgaccatgtgggtgcaagacaactacttgagacaagagaggaacatttatc

SEQ ID NO: 174964 - DNA, 120 bp, Artificial Sequence
  ENSG00000109911_152 (sequence is synthesized)
aaaatagcttggcgttaccagttattacccaagatggaggtctctactaaaagattactttaccagaagtgactgcctttgtcgctgtaaatgagataaaaccactctgtatcatcttct

SEQ ID NO: 174965 - DNA, 120 bp, Artificial Sequence
  ENSG00000109911_153 (sequence is synthesized)
ttcacagctttacttttcttaaaggcacttatcattaaatgataatatatatctaatttattattatcatctatctcctactagaatgtgagctcaatgagagaaagggactttgactgt

SEQ ID NO: 174966 - DNA, 120 bp, Artificial Sequence
  ENSG00000109911_154 (sequence is synthesized)
tttgttttactgacatttagtaggtgctcagtaattatttgttggatgcatgaaggaatgaatagtatgtagattaaatattaaactgagctaagacacattaatcaatacagacaaaat

SEQ ID NO: 174967 - DNA, 120 bp, Artificial Sequence
  ENSG00000109911_155 (sequence is synthesized)
gatagcttattttgaatatgcagtcaatgatcatgcttatgtttacttgtatttacagtgagttgtatccaatttagaaaatagaaccaccttctgacttctttgcttttctttgaaatg

SEQ ID NO: 174968 - DNA, 120 bp, Artificial Sequence
  ENSG00000109911_156 (sequence is synthesized)
tcactagcatgtatatttgcctgttaaggtaattttatatgtaatgatttgccaagactgataggctttgatgatcactcgtcattatctgctttataaatctaggctttactttgcctt

SEQ ID NO: 174969 - DNA, 120 bp, Artificial Sequence
  ENSG00000109911_157 (sequence is synthesized)
cacacacacacacacacaaaaaaaaaaaacctggctgtattagttcattctcactgagactgggtcatttacaaacaaaagaggtttaattgtctcacagtttcacatacctgtggaggc

SEQ ID NO: 174970 - DNA, 75 bp, Artificial Sequence
  ENSG00000109911_158 (sequence is synthesized)
tctcactgagactgggtcatttacaaacaaaagaggtttaattgtctcacagtttcacatacctgtggaggcctc

SEQ ID NO: 174971 - DNA, 84 bp, Artificial Sequence
  ENSG00000109911_159 (sequence is synthesized)
atcttacatggcagcaggagagaaagcacaggggaaactgccacttttaaaccatcagatctcctgagaactccctcactatca

SEQ ID NO: 174972 - DNA, 120 bp, Artificial Sequence
  ENSG00000109911_160 (sequence is synthesized)
ggtggggacacagaaccaaaccatatcactgggttttctgagatcagatgagattgggcacattcagggtggtttggccgtagacttcactgtgttttctttattttacttgggacaaaa

SEQ ID NO: 174973 - DNA, 120 bp, Artificial Sequence
  ENSG00000109911_161 (sequence is synthesized)
ttattttacttgggacaaaatgcagttaacataattgtggcttaagattaaataaatagttcaaaagtaggtgtattgattatcatagatgccttttaaaataagttgtcaccaggtcct

SEQ ID NO: 174974 - DNA, 120 bp, Artificial Sequence
  ENSG00000109911_162 (sequence is synthesized)
aagggtgtagccatattaccacttactaatgcaaaagtggacaagaatatatatacctagatcaataacaatagttcagtaaagcataaaacagtgcttcatttgaattgaagagtgtat

SEQ ID NO: 174975 - DNA, 120 bp, Artificial Sequence
  ENSG00000109911_163 (sequence is synthesized)
agttttaaaaaagccctcttttcttcaccatgtgattttaattctctctaaggtggacataccttcttctcccctatcttataatcatcaaccactattcctgactcactccatgaattg

SEQ ID NO: 174976 - DNA, 120 bp, Artificial Sequence
  ENSG00000109911_164 (sequence is synthesized)
ctagccgacagtatattctgagacttaattttctcagtattgtagagctctaataccatgacctacaatgactccagcaattcatggcagtgtgttaagtctttattatgttaaattctc

SEQ ID NO: 174977 - DNA, 120 bp, Artificial Sequence
  ENSG00000109911_165 (sequence is synthesized)
atcaaacattgactttctatcttagtggtttagctgcagcagccctgtggtagatgtgtataggtgtagatgaccaacaaataccattttttcaataaggcaatgtaattacaaaacaca

SEQ ID NO: 174978 - DNA, 120 bp, Artificial Sequence
  ENSG00000109911_166 (sequence is synthesized)
tcatggattgattcatatacggcagattcctcggcttaataacttgatctgtgatgaatcagatgtcaaagacttagcttttaaattaaaaaggaagctattcaccattgagggctttcg

SEQ ID NO: 174979 - DNA, 120 bp, Artificial Sequence
  ENSG00000109911_167 (sequence is synthesized)
cgttgatccagtgggattacagcaaatcaccctggcctgtgcaggaaccgtggaagttgtcacacctttcccagatccgtttgcctacacagaaatcattgttttagacaaggcattaat

SEQ ID NO: 174980 - DNA, 120 bp, Artificial Sequence
  ENSG00000109911_168 (sequence is synthesized)
ggaaaaagtaggcagccagccagccagccagctatccatctcctgcatcacacagtctcttcctcccagaatctgagaaaagaaaatcaagtggaaaaatttcagctcaagaacgactgc

SEQ ID NO: 174981 - DNA, 120 bp, Artificial Sequence
  ENSG00000109911_169 (sequence is synthesized)
gcatctgctaaagaggatcctgccaacattttacagtgctacacttgctaggagcagtggagtaaaggccaaaaccattgttgaacttccagcaccattacttgatgataaatgtaaaaa

SEQ ID NO: 174982 - DNA, 120 bp, Artificial Sequence
  ENSG00000109911_170 (sequence is synthesized)
aactactttttcataattcatagtaatatagtatgacattgtggttttagtttgcatttccatgataactaatgatgttgaccatcttttcaggtgctttctggccatttgcatgtcttc

SEQ ID NO: 174983 - DNA, 120 bp, Artificial Sequence
  ENSG00000109911_171 (sequence is synthesized)
ttttgtctgtcttttgtccatttttttattgatagtctcattatcaatttgtaaagttccttgatattttagctacaacttggtaataattttcctcctatctatgacttgctttttcta

SEQ ID NO: 174984 - DNA, 120 bp, Artificial Sequence
  ENSG00000109911_172 (sequence is synthesized)
ttttcttaacagtgtcttttgaagagctaaagttttcaatattgatgaagtttaatttataaattttttaatggttagtggtttatctccctcacacctccaatcttgacagtctttttc

SEQ ID NO: 174985 - DNA, 120 bp, Artificial Sequence
  ENSG00000109911_173 (sequence is synthesized)
tcttgtgttttcttccaaacattttatagttttttcttttactaatgaatcaatgtatttccatttgaattttttctacagttttagttcatgttctgaaacagcttttagtttctttaa

SEQ ID NO: 174986 - DNA, 120 bp, Artificial Sequence
  ENSG00000109911_174 (sequence is synthesized)
atcttatatatctaatacattgtagtctccatagagggagggcctgatatttatacttttctttataggctttatggtaataacataatattaaacgtggttttaaaattcttaacacag

SEQ ID NO: 174987 - DNA, 120 bp, Artificial Sequence
  ENSG00000109911_175 (sequence is synthesized)
tacctaggcttttcctagatattcagtaaatgttaaatgaatattgaatctttataaagttatgtaatcttagtatctctgttccaacatacccagaccctacctgcaaatagcaaattt

SEQ ID NO: 174988 - DNA, 120 bp, Artificial Sequence
  ENSG00000109911_176 (sequence is synthesized)
attaaaatgacatttagttacattcattatatacagcatatatagcaaatatgactgaaaagtgtgacaaatgaaaagtgaatttagctagatgcagtgccttacacctgtaatcccagc

SEQ ID NO: 174989 - DNA, 120 bp, Artificial Sequence
  ENSG00000109911_177 (sequence is synthesized)
actttgggaggctgaggcagaaggatcacctgaggcaagaagttcagccagggtaacatagcaagtccccatctctacaaaaaattaaattaaattttaaaagaagtgaatttggtctcc

SEQ ID NO: 174990 - DNA, 120 bp, Artificial Sequence
  ENSG00000109911_178 (sequence is synthesized)
ttggccagtagaatttatttatttataatgggcagcagaggatgattcggttttccttgaagggctttttatacattgtatctggacctaaattattattattagtttacagttgcagac

SEQ ID NO: 174991 - DNA, 120 bp, Artificial Sequence
  ENSG00000109911_179 (sequence is synthesized)
atatcataaggaaactcttttctctaatcatgctagacattgtatacatacttgtattgctttcattgttaataagttatcataaatttagtactcgaataatagtttgggtagacctgg

SEQ ID NO: 174992 - DNA, 120 bp, Artificial Sequence
  ENSG00000109911_180 (sequence is synthesized)
tgagctttttatgataaataaacatgaaacagacttatcagatactggtgaaaatactactacttatactactactactactgtgctgttactacaactatttattagccatgtactaca

SEQ ID NO: 174993 - DNA, 120 bp, Artificial Sequence
  ENSG00000109911_181 (sequence is synthesized)
tcccaagcactttacaagtattatgtccttgaatcttcagtgctaccctgtgaaacagatagtttttacctctgtttccatagggtcacccagttaataagtagcaggccagtgttcttc

SEQ ID NO: 174994 - DNA, 120 bp, Artificial Sequence
  ENSG00000109911_182 (sequence is synthesized)
cctgacttcaaaccttatcaccctcaccattaggttatatggcttcactaatcatcacaaaaaccctgcaagatagctgtgatttcaccctttgcaaagacaactatactgaagttaaat

SEQ ID NO: 174995 - DNA, 120 bp, Artificial Sequence
  ENSG00000109911_183 (sequence is synthesized)
gattatccaatatcccatatctgttgtacattttaagctgctattcaagctcggatctggctaactctaaaatttaaactctttaccctctgtcacactatatcctatgtgtcctgaatt

SEQ ID NO: 174996 - DNA, 120 bp, Artificial Sequence
  ENSG00000109911_184 (sequence is synthesized)
cctgaattattaactacctttgatgacactaagtttctattaggaaaaaaaagttactggctaacattgtaattattccatatttattaagagaaaattattattgtaaaatatttgata

SEQ ID NO: 174997 - DNA, 120 bp, Artificial Sequence
  ENSG00000109911_185 (sequence is synthesized)
tcagcacaatgaatcattttcaagttgactcattgtgaactgtatcccagctgttggaatgtctggcagacatttttgtttgggtgaagaataactggctgaaacccaacctggatgagt

SEQ ID NO: 174998 - DNA, 120 bp, Artificial Sequence
  ENSG00000109911_186 (sequence is synthesized)
ttgatataatggtctttggctaaagaaatattgagaggaacatgtttatggcctctgaagcccctgttattcctggagtaggaccatcccctgtggcacagaactgaaagtaaggaatca

SEQ ID NO: 174999 - DNA, 120 bp, Artificial Sequence
  ENSG00000109911_187 (sequence is synthesized)
atctggattattttctcaccattgaatgaaaaattgccttagaaaaaataggcatttccaaactatgtttttctatacttagtgtgcccacgtgattgaacatattaaagacaattaaga

SEQ ID NO: 175000 - DNA, 120 bp, Artificial Sequence
  ENSG00000109911_188 (sequence is synthesized)
ataattatttttactgattctttttaacaacactgatccaaaggctgaaacattccttgtataatgctgaaacattctttatataacacacattccaacttatgaaggagtttcaaatac

SEQ ID NO: 175001 - DNA, 120 bp, Artificial Sequence
  ENSG00000109911_189 (sequence is synthesized)
tgctctaggtgtgagttaaccagtcatttcaacagaatgtttggtgacacaggctactatgtgtttcataataccaagtcaggtaacattgaccagccctctttaatttttcattcttag

SEQ ID NO: 175002 - DNA, 120 bp, Artificial Sequence
  ENSG00000109911_190 (sequence is synthesized)
gccatctttataaagggacttaagaaacaagaatattagtaagctcagttgtaatcatgttcccagaaaatgaaaatcttttattatatttgacctctttctaacaggggatatagcagg

SEQ ID NO: 175003 - DNA, 120 bp, Artificial Sequence
  ENSG00000109911_191 (sequence is synthesized)
ctgataaattttcttgactgttttatatttcccattctcttcttcaaagattagttttaaactggtgggcattaccattgtataaaatgagagtttcaaaattgcaaaattttacaaaaa

SEQ ID NO: 175004 - DNA, 120 bp, Artificial Sequence
  ENSG00000109911_192 (sequence is synthesized)
acattttcagcttatctagatctgccaagcaaaaaattgtctaagacatcatagcatataatcacagttttctaatctaccaccctgtcaggggctaaaaggaatactagatttccagta

SEQ ID NO: 175005 - DNA, 120 bp, Artificial Sequence
  ENSG00000109911_193 (sequence is synthesized)
attaaagaattaaaaaaaaaaaccctaccagatatttgatgattatattcttatagccaggagattcttagtattttagaacttttgctacttaataactggacatactatgtttataaa

SEQ ID NO: 175006 - DNA, 120 bp, Artificial Sequence
  ENSG00000109911_194 (sequence is synthesized)
catattaacctattgttttgatctggcaaaatgtgacatttattaaaatgtatttagcagtatttcagttcatctcagattgtgtcgagaaataaaggataggctactggtctaaatgtt

SEQ ID NO: 175007 - DNA, 120 bp, Artificial Sequence
  ENSG00000109911_195 (sequence is synthesized)
agtcatctaccatcttttctttccctttattattatcccagagccaaatggcagcatctggaaagagaaaacagaagacttcatagctagccatgttgcagtctcttagctggtcctttc

SEQ ID NO: 175008 - DNA, 120 bp, Artificial Sequence
  ENSG00000109911_196 (sequence is synthesized)
catgtttctaatatgtcacagaggacctcagctgttatagggctgggaccttgtcccagctgacagacgacagtgggactcttgccctatactttatgctgtaccatctactgcttctga

SEQ ID NO: 175009 - DNA, 120 bp, Artificial Sequence
  ENSG00000109911_197 (sequence is synthesized)
atcctgctgtctgacaggttttccaatgggcattggatgaagtaatttgaaaaataatcatgtatgagaataaaggtagtcttgttccttaatacaagtgaaaaataatcaatttatgtt

SEQ ID NO: 175010 - DNA, 120 bp, Artificial Sequence
  ENSG00000109911_198 (sequence is synthesized)
ctctatcagaactaataaatttatgtcttctaccaatttatgttttcccttcagttcttcaaattagaatagcatgactacatgggccagcattttcaattaagggcatatttccatcca

SEQ ID NO: 175011 - DNA, 120 bp, Artificial Sequence
  ENSG00000109911_199 (sequence is synthesized)
gttttcagcctatagtagctttaacttttaagttatttcactgttgatagtctatctccactacagtttttcatgagatggcatagggatattttatagatattatactattaacataat

SEQ ID NO: 175012 - DNA, 120 bp, Artificial Sequence
  ENSG00000109911_200 (sequence is synthesized)
atttaacgttactgttttgtttccatgttttgcagaataaagccattattgcccgtgtcacaaccttgtcagatgtagtagttggtctggaatcatttattggttctgagagagaaacta

SEQ ID NO: 175013 - DNA, 120 bp, Artificial Sequence
  ENSG00000109911_201 (sequence is synthesized)
acccattgtataaggattatcatggtaagtacaaccttcataatgagaagagcaggagcaggctgcttctaggttacctggaagcatcctattcaatccaaatatctactgtcaaggagt

SEQ ID NO: 175014 - DNA, 120 bp, Artificial Sequence
  ENSG00000109911_202 (sequence is synthesized)
atgaattttataatacacctgttaaatattttccattcctgtccagtcttccatggcagcttattacccaactacattaagactatagactataataactgaaaggagtcaaacccaagt

SEQ ID NO: 175015 - DNA, 120 bp, Artificial Sequence
  ENSG00000109911_203 (sequence is synthesized)
actgaggcatggctgagtcaggtgtatattttgtcatcctagtggcttaaggtagccatgtaatcagtcatacttactagccatgtttgaaataaatatcgtattaattctaataatgac

SEQ ID NO: 175016 - DNA, 120 bp, Artificial Sequence
  ENSG00000109911_204 (sequence is synthesized)
cattttcagaaagagaagatctttgattatgtttgaacttttctctgtttactcattttcttgttagtatgagttatgaacaaattataaaatattgccaccttgatataaacacagcag

SEQ ID NO: 175017 - DNA, 120 bp, Artificial Sequence
  ENSG00000109911_205 (sequence is synthesized)
aattcatcagacttttgcttattttttttttttacttttagtaatattgtagtcatttggttaatttggggattctttttaataaagagtcttatgtagaactatatgaatagtaaaagt

SEQ ID NO: 175018 - DNA, 120 bp, Artificial Sequence
  ENSG00000109911_206 (sequence is synthesized)
gtagtatttaggtcttagtaatataggtctaaaacaaatatagaatgtagtgaataacagatttttacctattattcttagtataaataaattattgctaccattgttatggaactacca

SEQ ID NO: 175019 - DNA, 120 bp, Artificial Sequence
  ENSG00000109911_207 (sequence is synthesized)
tacttctgtggaaacctctaaagactgagtagcttatttgaagcctgctaccagattttataagacaagtattatgagcttatgcattttgtaaaatattttatattctaaaaaatatta

SEQ ID NO: 175020 - DNA, 120 bp, Artificial Sequence
  ENSG00000109911_208 (sequence is synthesized)
ttttgattaaaatattgcaaaggttgaaaggctatgattctttgtgctaaaatctctgaattgataaattattttccaccgagtaaagagtggttctaatgactagtatgctttctgtta

SEQ ID NO: 175021 - DNA, 120 bp, Artificial Sequence
  ENSG00000109911_209 (sequence is synthesized)
ataaggaggacctgatgatgaaattattaatttattctataaggcctcttgatagctaagcaagcacattcaaggttaaaataagaaacgtacaaataaaagtatggtgtgcttatttct

SEQ ID NO: 175022 - DNA, 120 bp, Artificial Sequence
  ENSG00000109911_210 (sequence is synthesized)
aataaatatattttactaaatagtatgtatgagatagtcttaatttgtagccaaaagctgtcttcttgaaacaccttttaaatttttttaagtttgaaaaattttcaggtattttagtta

SEQ ID NO: 175023 - DNA, 120 bp, Artificial Sequence
  ENSG00000109911_211 (sequence is synthesized)
attatttttgaagaggccatttctaaagctaagtacctttaaaggtttaagctaagactaatagatgcattattaagcatttaaacacacatacaaaaccttgtactagagaagcagttc

SEQ ID NO: 175024 - DNA, 120 bp, Artificial Sequence
  ENSG00000109911_212 (sequence is synthesized)
tgtaagtaagatttgtctctttgttcaaatctgtaatttgcctttcctccccatgttttggatcagtgtcctcgggatggcgatttttaaatataagctgagtcaggcagaaagatgtag

SEQ ID NO: 175025 - DNA, 120 bp, Artificial Sequence
  ENSG00000109911_213 (sequence is synthesized)
tgaagaaccttccatgtcttcatctgtgggaaatgacccctagtttagtcagaaactacattaggctgcacaaaagctatccagtgcccttgtcagaaaaaattagcaagtgtttctact

SEQ ID NO: 175026 - DNA, 120 bp, Artificial Sequence
  ENSG00000109911_214 (sequence is synthesized)
gacaagaggccaaagctcatggtttacctagcactgttgcaaagcttatagcagctacataaaggtctaacatgccatagaaatgagtgtcttgggatggcataggggttaatgtttggt

SEQ ID NO: 175027 - DNA, 120 bp, Artificial Sequence
  ENSG00000109911_215 (sequence is synthesized)
cctagagtgtactttgaaatgtagttttcttcaatggtttgttcaagtcattaataaggtacaaaatgaaatatttttcatgagtgcttcactggttatcagtaacccataagccttgtt

SEQ ID NO: 175028 - DNA, 120 bp, Artificial Sequence
  ENSG00000109911_216 (sequence is synthesized)
ttgccggctgcttagtggtgcatttaataaaataaagatcactcagtggtgccgtgggcagcatgcaaggtgatagccatatttgcttactgtaaatacaagagaaaatcacacacaaac

SEQ ID NO: 175029 - DNA, 120 bp, Artificial Sequence
  ENSG00000109911_217 (sequence is synthesized)
cggctgtagttttgacaagtattaagatccctctttacatctgtacttctgtaccaaagtgcaattagttttcctcgcacaaggatttctgtttatcttattctgcttgattacttgagt

SEQ ID NO: 175030 - DNA, 120 bp, Artificial Sequence
  ENSG00000109911_218 (sequence is synthesized)
ataatcacaccatttgcttcattgctcctggtagtaagctccagttttaaaaggggaggatgcttgtgtgtaaatttacaggattctgctataagactgtttaatttatgcatctgatga

SEQ ID NO: 175031 - DNA, 120 bp, Artificial Sequence
  ENSG00000109911_219 (sequence is synthesized)
gaggaaggatttgatggatccaatcctcagtgcttgtctggagaggtaaattggtccctgacagacacctatccccacttgctgtggtaactatggaaacaggcatgtcataacagttcc

SEQ ID NO: 175032 - DNA, 120 bp, Artificial Sequence
  ENSG00000109911_220 (sequence is synthesized)
aatggtacagtgtgcagagctgctcttcttgcaggatgatgatgacacatcttctgagagtaagaaattttatagaatcccaaaagcaaagaaaaaacagagaaacattttaagaatagg

SEQ ID NO: 175033 - DNA, 77 bp, Artificial Sequence
  ENSG00000109911_221 (sequence is synthesized)
tggttgcatctgctaaagaggatcctgccaacattttacagataaagaaagagctctttctggtgtctcttcttata

SEQ ID NO: 175034 - DNA, 120 bp, Artificial Sequence
  ENSG00000109911_222 (sequence is synthesized)
acttagcttttaaattaaaaaggaagctattcaccattgagattcttgagaatgaaagaaaggagaaggaaagaataatagagcgactgcatttgcctccagacttgtcagacacagtga

SEQ ID NO: 175035 - DNA, 80 bp, Artificial Sequence
  ENSG00000109917_0 (sequence is synthesized)
aggaagccgaggtctgaattgcgcgtggtggccatggcggccagcggggctgtggaaccagggcccccgggggctgccgt

SEQ ID NO: 175036 - DNA, 120 bp, Artificial Sequence
  ENSG00000109917_1 (sequence is synthesized)
cacctgttccggcccatcagcgccgaggacgaggagcagcagcccaccgagatcgagtcgctatgcatgaactgttactgcaatggcatgacgcgcctcctgctcaccaagattcccttc

SEQ ID NO: 175037 - DNA, 120 bp, Artificial Sequence
  ENSG00000109917_2 (sequence is synthesized)
ttcagagaaataatagtgagctccttttcctgcgagcactgtggctggaacaacacggagatccagtcggcaggcaggatccaggaccagggagtgcgctacactttgtctgtcagggct

SEQ ID NO: 175038 - DNA, 120 bp, Artificial Sequence
  ENSG00000109917_3 (sequence is synthesized)
ctggaggacatgaacagagaagtggtgaagactgactctgctgccacaaggattcctgagctagattttgaaattcctgcctttagccagaaaggagctctgaccactgttgaaggattg

SEQ ID NO: 175039 - DNA, 120 bp, Artificial Sequence
  ENSG00000109917_4 (sequence is synthesized)
atcacccgtgctatctctggcctggagcaggaccagcctgcacgaagggcaaacaaagatgctacagctgaaagaattgatgagttcattgtcaaactgaaggagctaaagcaagtagcc

SEQ ID NO: 175040 - DNA, 120 bp, Artificial Sequence
  ENSG00000109917_5 (sequence is synthesized)
tcccctttcactctgatcattgatgatccctcagggaacagttttgtggaaaacccacatgctcctcagaaagatgatgccctggtgatcacacactacaaccggacccgacagcaggaa

SEQ ID NO: 175041 - DNA, 120 bp, Artificial Sequence
  ENSG00000109917_6 (sequence is synthesized)
gagatgctggggcttcaagaagaagcaccagcagagaagccagaagaggaagatctcagaaatgaagtgctccagttcagcacaaactgcccagaatgcaatgcccccgctcagaccaac

SEQ ID NO: 175042 - DNA, 120 bp, Artificial Sequence
  ENSG00000109917_7 (sequence is synthesized)
atgaagctagtacaaatccctcactttaaggaggttatcatcatggctaccaactgcgagaactgtgggcatcggaccaatgaggtgaaatctggaggagcagtagaacccttgggcacc

SEQ ID NO: 175043 - DNA, 120 bp, Artificial Sequence
  ENSG00000109917_8 (sequence is synthesized)
aggatcaccctccacatcacagatgcctcagatatgaccagagacctcctcaagtctgagacttgcagtgtggaaatcccagagctagaatttgaactgggaatggcagtcctcgggggc

SEQ ID NO: 175044 - DNA, 120 bp, Artificial Sequence
  ENSG00000109917_9 (sequence is synthesized)
aagttcaccacactggaagggctgctgaaagacatccgggaactggtgaccaaaaatcctttcacactgggcgacagttccaatcctggacagacggagagactacaggagtttagccag

SEQ ID NO: 175045 - DNA, 120 bp, Artificial Sequence
  ENSG00000109917_10 (sequence is synthesized)
aagatggaccagatcatcgaaggtaacatgaaggcccactttattatggatgatccagcaggaaacagttacttgcagaatgtgtatgcgcctgaagatgatcctgagatgaaggtggag

SEQ ID NO: 175046 - DNA, 120 bp, Artificial Sequence
  ENSG00000109917_11 (sequence is synthesized)
cgttacaagcgcacctttgaccaaaatgaggagctagggctcaatgacatgaagacagagggctatgaggcaggcctggctccgcaacggtagcagtgggtggctcaagggccagcctcc

SEQ ID NO: 175047 - DNA, 120 bp, Artificial Sequence
  ENSG00000109917_12 (sequence is synthesized)
agcgctgctctttctgtaggttatttattagtattggatgaaggcgaaggctgggagtgtctttcccaccagcccttgcccatggtggggaggacatctggtctgagtcagagatctgtg

SEQ ID NO: 175048 - DNA, 120 bp, Artificial Sequence
  ENSG00000109917_13 (sequence is synthesized)
cacactttctaaacagcttgtgatgcaagtgtgagcctattgtgttacttgaccttattttggaagttttgaattggcctaggaggaaacccagaaatgaaccaggggtatgtcatcact

SEQ ID NO: 175049 - DNA, 120 bp, Artificial Sequence
  ENSG00000109917_14 (sequence is synthesized)
tttttcatatcaagtcctcaccctccttccacataatgctctatcctctaaggttggaactctgaagttggagaaggtggaataaagttacacctggagtttgttgttggttttgagtat

SEQ ID NO: 175050 - DNA, 120 bp, Artificial Sequence
  ENSG00000109917_15 (sequence is synthesized)
ataaaatactgactttgaacaggaaaggagtctcctgaggggagaccgagtccagcacaagtgaaggagttaccattgaaatgatgactttcaaacagcactggcctctgtattgaccct

SEQ ID NO: 175051 - DNA, 120 bp, Artificial Sequence
  ENSG00000109917_16 (sequence is synthesized)
atccttgtttgatatcatgctgttagaattcagcctcctaaagaaaattttcccgtgtatctactgtaatttggggattgcagctggcatttaattcattccttcagcagatgcttgctt

SEQ ID NO: 175052 - DNA, 120 bp, Artificial Sequence
  ENSG00000109917_17 (sequence is synthesized)
atctactttatgccaagcacaccacagaacagaggacaaaataaatctctttcatggaacttgaagtctagtggggaaaaatgacaataaacagatcaggaaaacagtacatcagatggt

SEQ ID NO: 175053 - DNA, 120 bp, Artificial Sequence
  ENSG00000109917_18 (sequence is synthesized)
gattagtgtcatggaggaatgtaaagcagggaatggggctgggttgtgcaaggaaatggggagtagggaagatcttctgaacaagaaggtgataatttgacatttgggcaaagctgagga

SEQ ID NO: 175054 - DNA, 120 bp, Artificial Sequence
  ENSG00000109917_19 (sequence is synthesized)
ggaggtcagggagtgagctgtgtgggtatctgggggaagagatttcctggcagagggaactgcaaatgctagagctgtgaggttagagccagtgggggtacctgatcagttagccctact

SEQ ID NO: 175055 - DNA, 120 bp, Artificial Sequence
  ENSG00000109917_20 (sequence is synthesized)
ctcagttagaaatgttgaaacacattcatccagagagaaaggaggctctctgcagttcttctgaaagttaaggaccagtgaacactctgctgcttgggccctggacttcccagccagtgt

SEQ ID NO: 175056 - DNA, 120 bp, Artificial Sequence
  ENSG00000109917_21 (sequence is synthesized)
tctttgcactgtagtctcctgcctctcataaacaaaaggtgactcctgtggtgcagactgcagggtatttgttcaataaagaccagttcattgattaagatgttatcacaaaccttattg

SEQ ID NO: 175057 - DNA, 120 bp, Artificial Sequence
  ENSG00000109917_22 (sequence is synthesized)
gaccagttcattgattaagatgttatcacaaaccttattgctttgtgttgcaaactttttttttttttttttttggtagagacagagtctcgcgctgttgcccaggctggagtgcagtgg

SEQ ID NO: 175058 - DNA, 90 bp, Artificial Sequence
  ENSG00000109917_23 (sequence is synthesized)
atcttggcttattgcaacctttgcctcccgggtttggggactacaggcgcacgccgccacacccagctaatttcttttgtattttagtag

SEQ ID NO: 175059 - DNA, 88 bp, Artificial Sequence
  ENSG00000109917_24 (sequence is synthesized)
tccggctgtgttgcaaacttaactctgaagaatgagttagagatgatttagcaatcagacatctactctcgttgctctgttaaactac

SEQ ID NO: 175060 - DNA, 120 bp, Artificial Sequence
  ENSG00000109917_25 (sequence is synthesized)
tagcaatcagacatctactctcgttgctctgttaaactactctcaaaggtcacaagtgattttccacttggaaagtgttatctatttctgtcacatttgatagtggaccatctcttctta

SEQ ID NO: 175061 - DNA, 120 bp, Artificial Sequence
  ENSG00000109917_26 (sequence is synthesized)
acccttcttttggctctcgagatactgtacccttggttttcccttcactttgaatatttcttatttggacactttgcctcctcccctcttactaaatttgtttctgagagttctgctttc

SEQ ID NO: 175062 - DNA, 120 bp, Artificial Sequence
  ENSG00000109917_27 (sequence is synthesized)
acctgtatctctaatttctgtaagtgagggcgagagtaaggtgtttggagactcaggttagcaaatgactcattcaaactataaagcttcagtactttgggcaaacttctcacaggcaac

SEQ ID NO: 175063 - DNA, 120 bp, Artificial Sequence
  ENSG00000109917_28 (sequence is synthesized)
tattctaccctaagagattatctctaggtatgtttccagctgacttgggaatctaagtttaccagacaaccctctgatctatcatttggtctcttaagtagacttccccatagtgtaggt

SEQ ID NO: 175064 - DNA, 120 bp, Artificial Sequence
  ENSG00000109917_29 (sequence is synthesized)
gtgctctgttaagataaactgcagtatcaggttcattttccattgtgaaggaaaaaaaatggcactctggcttattactgaatctcttgtgagtttggttggtgtgaggcaatctcccag

SEQ ID NO: 175065 - DNA, 120 bp, Artificial Sequence
  ENSG00000109917_30 (sequence is synthesized)
aatccacccagttcctaggaaatgatgacctgagtttctgaacttgaagactgaggaccaggtgccagactgggataacccagctaaggtacttcctgccctttgatgacaaggcattct

SEQ ID NO: 175066 - DNA, 120 bp, Artificial Sequence
  ENSG00000109917_31 (sequence is synthesized)
tcagtttcatacccttctcttgaattatctttcagctcctttctcatttcataaagtgtgtcaggatgggagcttacatatagttaactgagtcttgctccacagcacccagcatatgac

SEQ ID NO: 175067 - DNA, 120 bp, Artificial Sequence
  ENSG00000109917_32 (sequence is synthesized)
acatggttaataaaatctgttaaaatcctccatcatagattaaaccctattaggacactagggataacatctataggtaaaaagatagggaaagggtctcgctttaaggccagggtaggt

SEQ ID NO: 175068 - DNA, 120 bp, Artificial Sequence
  ENSG00000109917_33 (sequence is synthesized)
gagtcaaagtgccaggaacatgtggattcagtttcacagccatgagtaacatttaagtggaaaaggtttgtgattgtgttaaaaaaggaaagtggttcatgcatgagggcacgcctccta

SEQ ID NO: 175069 - DNA, 120 bp, Artificial Sequence
  ENSG00000109917_34 (sequence is synthesized)
ctttcatgggtcaagtatgtgaaatgcagccatgttcggtcattagacgtgtggacgaacatacaggtaggtactgaatgtacatctgtgtcatgatgagtggaggaggggaggtgagtg

SEQ ID NO: 175070 - DNA, 120 bp, Artificial Sequence
  ENSG00000109917_35 (sequence is synthesized)
ttgggagcaagtatgaagggcagttgacttggccaactgaaaactttaatgatggcaacactttcattctaacatcagtatatttccttctttgtacacctgtggtatgtgcctgatgca

SEQ ID NO: 175071 - DNA, 120 bp, Artificial Sequence
  ENSG00000109917_36 (sequence is synthesized)
cactgcagaaaatggtgtctctgcttacatttagggcagtggtggctaagactacttggctttattcctattaaaaaatgttttttacacacttctttttaaggcaaatggcagtgtttc

SEQ ID NO: 175072 - DNA, 120 bp, Artificial Sequence
  ENSG00000109917_37 (sequence is synthesized)
caactgtggagagaaaaagctgcttattttgtgcgttcacctcagtttagtattggcacttccaatgcttgttttcctagtctgtaaaatggggataattaggataaacaaaattatccc

SEQ ID NO: 175073 - DNA, 120 bp, Artificial Sequence
  ENSG00000109917_38 (sequence is synthesized)
tctgtaaaatggggataattaggataaacaaaattatccccattttacaggtgacaaaacagcctcagagaggttacttccagaaggaagcagagctttttttttttttttttttttttt

SEQ ID NO: 175074 - DNA, 120 bp, Artificial Sequence
  ENSG00000109917_39 (sequence is synthesized)
aggcgtgagccaccgtgcctggccagaagtagagcttctaagaggcaggtgtcaaacccatgccagtcagactctgaaacctgaggtctgaatattttaagctcagctccacaattactg

SEQ ID NO: 175075 - DNA, 120 bp, Artificial Sequence
  ENSG00000109917_40 (sequence is synthesized)
ggtctgaatattttaagctcagctccacaattactgtatttgttctattagatacaactgcagagagaggccaaagctcagagcaggccattggcacggcatctgatcctgcttaactgc

SEQ ID NO: 175076 - DNA, 120 bp, Artificial Sequence
  ENSG00000109917_41 (sequence is synthesized)
cctgcagcacagggtggagacacttgggccttgtcaggctaagggactggggtaggatgggtagcagtggaattgaagacaaagaaaacaaatgggcagaagatgggtgggtggaagttc

SEQ ID NO: 175077 - DNA, 120 bp, Artificial Sequence
  ENSG00000109917_42 (sequence is synthesized)
agagggctatcctggcagtgttcactggagcagaagtgtgaggctttctgaatgcctgctgacaccagggtggggcagggctgtgtagtgtgagatgcaccaaattggacgagaagccaa

SEQ ID NO: 175078 - DNA, 120 bp, Artificial Sequence
  ENSG00000109917_43 (sequence is synthesized)
ggcaggcttgtgtatggggtaccctggggccctccgcctagtgaagccctatcttctcagcccagcgtcctcgtctcacaagccctcagagccccagcctgctttcctttctgggcctgt

SEQ ID NO: 175079 - DNA, 120 bp, Artificial Sequence
  ENSG00000109917_44 (sequence is synthesized)
gctgcaaccccctcaacatggcccactgggtaaaaattcatgcttcaagactgatccccaagcctgttttgtattatatgagtaaagaattttttaaacacttatccccagataatgtgt

SEQ ID NO: 175080 - DNA, 120 bp, Artificial Sequence
  ENSG00000109917_45 (sequence is synthesized)
atttatttataaagtatagccctgtctgcttgactaatatattaaaaaagtgacctttttgactcttggtccaagaaactattgtttgcacttttgtgtagttgtgtatagcatcctgca

SEQ ID NO: 175081 - DNA, 120 bp, Artificial Sequence
  ENSG00000109917_46 (sequence is synthesized)
aattctgtcagaagtctgtgatttcagtaacactaaaacttctctctcaaatggtacaagttttcagttttaagacaagttctgggaatctaatgtacaacatgttgactatagctaata

SEQ ID NO: 175082 - DNA, 120 bp, Artificial Sequence
  ENSG00000109917_47 (sequence is synthesized)
attctgtattgtttacttgaagtttgctaagacaaatttgcttaagtgcccccccaccgaactactacataaattagtgaaggatgttttacttaatttgattttggtaatcattacaca

SEQ ID NO: 175083 - DNA, 120 bp, Artificial Sequence
  ENSG00000109917_48 (sequence is synthesized)
atgtataattatatccagtcatcacattgtacaccttgaatatatataattttttgtcaaataataaagctgggaagaaaacgataaaactgacaatctaacatatatgatgaggtaaaa

SEQ ID NO: 175084 - DNA, 120 bp, Artificial Sequence
  ENSG00000109917_49 (sequence is synthesized)
agatctggtatttcaagaaatttggatgacctcttgcaccccacttcgctagcctctactccctagagtcatgttctgactatgtgaagttgagcaacttccttaatcttgccacgcttc

SEQ ID NO: 175085 - DNA, 120 bp, Artificial Sequence
  ENSG00000109917_50 (sequence is synthesized)
agttcttatctgtaaaatatgataatgaaacgatttgagaattgtgagggttaaatgagataattcaggtaaagctctaaaccccctgcaaagaataaagtcttttctttccccccaaaa

SEQ ID NO: 175086 - DNA, 120 bp, Artificial Sequence
  ENSG00000109917_51 (sequence is synthesized)
gtcatcagctcaagtgagataagatttgtgaaaatgctttgtaaatgttgtctgagggtatgaaatgagcagtagttgttatgaatagtattctcaccatttggacagcctggctcacac

SEQ ID NO: 175087 - DNA, 120 bp, Artificial Sequence
  ENSG00000109919_0 (sequence is synthesized)
agtgaaaccggcggccctggcacgtgacctaggaccggctcaccgggtcgcttggtggctccgtctgtctgtccgtccgcccgcgggtgccatcatggcggacgcggccagtcaggtgct

SEQ ID NO: 175088 - DNA, 120 bp, Artificial Sequence
  ENSG00000109919_1 (sequence is synthesized)
cctgggctccggtctcaccatcctgtcccagccgctcatgtacgtgaaagtgctcatccaggtgggatatgagcctcttcctccaacaataggacgaaatatttttgggcggcaagtgtg

SEQ ID NO: 175089 - DNA, 120 bp, Artificial Sequence
  ENSG00000109919_2 (sequence is synthesized)
tcagcttcctggtctctttagttatgctcagcacattgccagtatcgatgggaggcgcgggttgttcacaggcttaactccaagactgtgttcgggagtccttggaactgtggtccatgg

SEQ ID NO: 175090 - DNA, 120 bp, Artificial Sequence
  ENSG00000109919_3 (sequence is synthesized)
taaagttttacagcattaccaggagagtgacaagggtgaggagttaggacctggaaatgtacagaaagaagtctcatcttcctttgaccacgttatcaaggagacaactcgagagatgat

SEQ ID NO: 175091 - DNA, 120 bp, Artificial Sequence
  ENSG00000109919_4 (sequence is synthesized)
cgctcgttctgctgctaccctcatcacacatcccttccatgtgatcactctgagatctatggtacagttcattggcagagaatccaagtactgtggactttgtgattccataataaccat

SEQ ID NO: 175092 - DNA, 120 bp, Artificial Sequence
  ENSG00000109919_5 (sequence is synthesized)
ctatcgggaagagggcattctaggatttttcgcgggtcttgttcctcgccttctaggtgacatcctttctttgtggctgtgtaactcactggcctacctcgtcaatacctatgcactgga

SEQ ID NO: 175093 - DNA, 120 bp, Artificial Sequence
  ENSG00000109919_6 (sequence is synthesized)
cagtggggtttctaccatgaatgaaatgaagagttattctcaagctgtcacaggattttttgcgagtatgttgacctatccctttgtgcttgtctccaatcttatggctgtcaacaactg

SEQ ID NO: 175094 - DNA, 120 bp, Artificial Sequence
  ENSG00000109919_7 (sequence is synthesized)
tggtcttgctggtggatgccctccttactccccaatatatacgtcttggatagactgttggtgcatgctacaaaaagaggggaatatgagccgaggaaatagcttatttttccggaaggt

SEQ ID NO: 175095 - DNA, 120 bp, Artificial Sequence
  ENSG00000109919_8 (sequence is synthesized)
cccctttgggaagacttattgttgtgacctgaaaatgttaatttgaagatgtggggcagggacagtgacatttctgtagtcccagatgcacagaattatgggagagaatgttgatttcta

SEQ ID NO: 175096 - DNA, 120 bp, Artificial Sequence
  ENSG00000109919_9 (sequence is synthesized)
tacagtgtggcgcgcttttttaataatcatttaatcttgggaaaattcaggtgtttggtgtctgccttttttgttcttttttccagcacaacataacttaccactgatactcccccttta

SEQ ID NO: 175097 - DNA, 120 bp, Artificial Sequence
  ENSG00000109919_10 (sequence is synthesized)
tattctgaattaggatatttttgctccaaattcttattttacttaaccagaagggaaaaaaagttgtattttcctgaagctacaggcactttgtcatgtgatttttgagtctcaatttaa

SEQ ID NO: 175098 - DNA, 120 bp, Artificial Sequence
  ENSG00000109919_11 (sequence is synthesized)
ggctttgtaaaatgaagagtagaattccaagaaaaatgagaaataattttgtaaaacttaacaaaatcactaaattaaactatatgggaggttatgaattactttttcttgggtagaccc

SEQ ID NO: 175099 - DNA, 120 bp, Artificial Sequence
  ENSG00000109919_12 (sequence is synthesized)
taaaatgtcagtagcatgcaccagaatctgactcccattatgcttctaagcacatttcattgaccttgtctctcatacttcaagaaaaggacagtacattgctacattaccctagaaagt

SEQ ID NO: 175100 - DNA, 120 bp, Artificial Sequence
  ENSG00000109919_13 (sequence is synthesized)
ctgtgtgaggatctgccccttcagtctgttattgcaaagtaataaaatgtcacctacagggagcctctgagcctactctagttcaagaggctacctgaaaaaaaataaataagataaagg

SEQ ID NO: 175101 - DNA, 120 bp, Artificial Sequence
  ENSG00000109919_14 (sequence is synthesized)
gtcagcaacaacaaagaaaaagacaattacagaaaataagcaagatttggaaaggaagtataatggcacttttttcctcaaaggaagttcttgttttcacataaaatatgaaaagcagat

SEQ ID NO: 175102 - DNA, 120 bp, Artificial Sequence
  ENSG00000109919_15 (sequence is synthesized)
cctgcaggagtaacccccttctttaagagccaagtatttgccagtgcttaaattacaccatacagttctaattatatataatcttttgttcttcagttttttgttttgtttcctttttgt

SEQ ID NO: 175103 - DNA, 120 bp, Artificial Sequence
  ENSG00000109919_16 (sequence is synthesized)
tattgttgccgaaggtgagtagttttgcatttctgatgacagccttggaaagtatatttgtaactccatgtctggtaatgccaacccaagtcgacatgggtcttaggacactgaccacct

SEQ ID NO: 175104 - DNA, 120 bp, Artificial Sequence
  ENSG00000109919_17 (sequence is synthesized)
cacatgccataccctcagttaagcatgttaacatttataggaggaaaaaaatcactttgggagaaaataaaattcaactcaagcataaagcttctgtttactcaggccttctaaaaagca

SEQ ID NO: 175105 - DNA, 120 bp, Artificial Sequence
  ENSG00000109919_18 (sequence is synthesized)
ggttaaaatgctctaaaatgagaaagcctgtggtttcacttatttatataactcactgggacattgccaaatgagtaagcacttaattcgctgcttctgagacttctctgtcaaaacagc

SEQ ID NO: 175106 - DNA, 120 bp, Artificial Sequence
  ENSG00000109919_19 (sequence is synthesized)
cccactgataatattagacagaacgagaatgcaggggtctcttccctcccctggggtttaggaagctcatgaggagctcggcttaaaatgtctttgatgtctcttcctttgtctcaaaaa

SEQ ID NO: 175107 - DNA, 120 bp, Artificial Sequence
  ENSG00000109919_20 (sequence is synthesized)
gtaatgtcaattttatatactatttcaatattactatctgcatttgttttaatataaaaatgtttgctgcctacctttttctcccaaaaaatctttaagtaaagatgatctgggaaaatg

SEQ ID NO: 175108 - DNA, 120 bp, Artificial Sequence
  ENSG00000109919_21 (sequence is synthesized)
cttctgcaaagcacctcgcaaatcttttgcctccctgcttacagttatgaatagtaaggtgagccactgagggtatagccgacctgcattttaaacataggaacaaaagtcactggagat

SEQ ID NO: 175109 - DNA, 120 bp, Artificial Sequence
  ENSG00000109919_22 (sequence is synthesized)
cagcttcaagtacagctgtgttaacgagaatgaactaggtatgcgggctggattctggtgtttgattccttttttacttccctagaatgttttgtgacctctaattatttgacaaacatt

SEQ ID NO: 175110 - DNA, 120 bp, Artificial Sequence
  ENSG00000109920_0 (sequence is synthesized)
agtgcccgcccctctcggccgcccgacgctctctgctcgcgcttgggctcgcgatggggaagaagtcccgggcggtacccggccgtaggcccatcctgcaactctctccgccgggtcctc

SEQ ID NO: 175111 - DNA, 120 bp, Artificial Sequence
  ENSG00000109920_1 (sequence is synthesized)
ggggcagcacgccgggccgggacccggagccggaacccgacactgagccggactcaaccgcggcggtccccagccagcccgccccgtcggcggcgacgaccaccaccaccgcggtgactg

SEQ ID NO: 175112 - DNA, 120 bp, Artificial Sequence
  ENSG00000109920_2 (sequence is synthesized)
ccgccgcggcctcggacgactcgccttcagaagatgaacaggaagcggtgcaggaggttcctagagttgttcagaatcctccaaaaccagtcatgaccactagacccacagctgttaaag

SEQ ID NO: 175113 - DNA, 120 bp, Artificial Sequence
  ENSG00000109920_3 (sequence is synthesized)
caacaggcggtctatgcttgcttggtgcttatgctgacagtgatgacgatgacaatgatgtttccgaaaaactagcacaatccaaagagacaaatggaaaccagtcaactgatattgata

SEQ ID NO: 175114 - DNA, 120 bp, Artificial Sequence
  ENSG00000109920_4 (sequence is synthesized)
gtacattggccaacttcctagcggagatcgatgccataacagctcctcagcctgcagctcctgtaggagcttctgctccacctccaactccacctcgaccagagccaaaggaagcagcaa

SEQ ID NO: 175115 - DNA, 120 bp, Artificial Sequence
  ENSG00000109920_5 (sequence is synthesized)
catctaccctttcttcttctacttcaaatggaacagactccacccaaacatctggttggcaatatgatactcagtgttcactggcaggagtcggaattgagatgggcgattggcaggaag

SEQ ID NO: 175116 - DNA, 120 bp, Artificial Sequence
  ENSG00000109920_6 (sequence is synthesized)
tctgggatgagaacacgggatgttattattattggaatacacaaacaaatgaagtgacttgggagttaccccaatatcttgccacacaggtacagggattacagcattaccagcccagtt

SEQ ID NO: 175117 - DNA, 120 bp, Artificial Sequence
  ENSG00000109920_7 (sequence is synthesized)
ctgtgccaggtgctgaaactagttttgtggtaaatacagacatatattctaaggagaaaacgatttctgtttccagtagtaaaagtggaccagtcatagccaagcgagaagttaaaaagg

SEQ ID NO: 175118 - DNA, 120 bp, Artificial Sequence
  ENSG00000109920_8 (sequence is synthesized)
aagtaaatgaaggaattcaggctctctcaaatagtgaggaggagaagaaaggggtggcagcatcgctgcttgctcctttattgcctgagggaataaaagaagaagaagagagatggagaa

SEQ ID NO: 175119 - DNA, 120 bp, Artificial Sequence
  ENSG00000109920_9 (sequence is synthesized)
gaaaagtaatttgtaaagaggagccagtttcagaagtaaaagaaacaagtacaacagtagaagaagcaacaacaatagtaaagccacaggaaattatgttggacaatatagaagaccctt

SEQ ID NO: 175120 - DNA, 120 bp, Artificial Sequence
  ENSG00000109920_10 (sequence is synthesized)
ctcaggaggatctttgcagtgttgtccaatctggagaaagtgaggaggaagaggaacaagatacccttgaactggagctagttttggaaaggaaaaaagcagagttgcgagccttggagg

SEQ ID NO: 175121 - DNA, 120 bp, Artificial Sequence
  ENSG00000109920_11 (sequence is synthesized)
aaggagatggtagtgtgtcagggtctagtccacgttctgatatcagccagccagcatctcaagatggaatgcgtaggcttatgtctaaaagaggaaaatggaagatgtttgttcgagcta

SEQ ID NO: 175122 - DNA, 120 bp, Artificial Sequence
  ENSG00000109920_12 (sequence is synthesized)
ccagtccagaatctaccagtaggagttctagtaaaactggacgagatactccagaaaatggagaaactgcaattggtgctgaaaattcagaaaaaatagatgagaattcagataaagaga

SEQ ID NO: 175123 - DNA, 120 bp, Artificial Sequence
  ENSG00000109920_13 (sequence is synthesized)
tggaagtagaagaatctccagagaaaataaaagtacagacaacaccaaaagtagaagaagaacaggatttgaaatttcagattggagaactggcaaataccctgacaagtaaattcgagt

SEQ ID NO: 175124 - DNA, 120 bp, Artificial Sequence
  ENSG00000109920_14 (sequence is synthesized)
ttctaggcattaatagacaatccatctccaactttcatgtgctgctcttacagactgagactcgaattgcagactggcgggaaggggctcttaatggaaactaccttaaacgaaaacttc

SEQ ID NO: 175125 - DNA, 120 bp, Artificial Sequence
  ENSG00000109920_15 (sequence is synthesized)
aggatgcagcagaacaactaaaacagtatgaaataaacgccactcctaaaggctggtcctgccactgggacagggatcatagacggtatttctatgtaaacgaacagtcgggcgagtctc

SEQ ID NO: 175126 - DNA, 120 bp, Artificial Sequence
  ENSG00000109920_16 (sequence is synthesized)
aacagaccttgaaagacaaaactggcactgattcaaattcaacagaatcctctgaaacttccacaggttctctttgtaaagaatccttttctggtcaagtttcttcttcatcactcatgc

SEQ ID NO: 175127 - DNA, 120 bp, Artificial Sequence
  ENSG00000109920_17 (sequence is synthesized)
cacttactccattctggaccctccttcagtcaaatgttcctgtgcttcaacctccattacccttggaaatgccaccacccccacctccacctccagaatcacctccaccccctcctccac

SEQ ID NO: 175128 - DNA, 120 bp, Artificial Sequence
  ENSG00000109920_18 (sequence is synthesized)
cacctcctcctgcggaagatggtgagatccaggaggtagagatggaggatgagggaagtgaggagccccctgccccaggaacagaggaagatacccctttgaaaccttcagcacaaacca

SEQ ID NO: 175129 - DNA, 120 bp, Artificial Sequence
  ENSG00000109920_19 (sequence is synthesized)
cagttgtaactagccagagttcagttgattccaccatctctagttcttcttccactaaaggaataaagaggaaagctacagaaattagcactgcagtggttcagaggtcagctaccattg

SEQ ID NO: 175130 - DNA, 120 bp, Artificial Sequence
  ENSG00000109920_20 (sequence is synthesized)
gcagttctccagttctctatagccagtcagctatagctacaggtcaccaggcagcagggattggaaaccaggcaacaggaattggacatcagacaataccagttagccttccagcagcag

SEQ ID NO: 175131 - DNA, 120 bp, Artificial Sequence
  ENSG00000109920_21 (sequence is synthesized)
gaatgggtcatcaggccagaggaatgagcctgcagtcaaattaccttggactagcggcagcacctgcaattatgagttatgcagaatgttctgtcccaattggagtgactgctccctcat

SEQ ID NO: 175132 - DNA, 120 bp, Artificial Sequence
  ENSG00000109920_22 (sequence is synthesized)
tgcagccagttcaggcccgaggtgctgtgcctaccgctaccattatagaaccaccaccaccacctcctcctcctcctcctccaccaccaccagctcccaaaatgccaccacctgaaaaga

SEQ ID NO: 175133 - DNA, 120 bp, Artificial Sequence
  ENSG00000109920_23 (sequence is synthesized)
caaaaaaaggaaggaaagacaaggcaaagaagagtaagaccaaaatgccatctttggtaaaaaagtggcagagtatccagcgtgagttagatgaagaggacaattctagttccagtgaag

SEQ ID NO: 175134 - DNA, 120 bp, Artificial Sequence
  ENSG00000109920_24 (sequence is synthesized)
aggatcgggaatcaactgcacagaagcgaattgaagagtggaaacagcagcagctggttagtggcatggcagagagaaatgctaattttgaagcccttcctgaggattggagagcaaggc

SEQ ID NO: 175135 - DNA, 120 bp, Artificial Sequence
  ENSG00000109920_25 (sequence is synthesized)
tgaagagaaggaaaatggctccaaacacatagtttttaagtttttaaaacttttttgtattattgtttgttttgtgttcagttcaaagtcttaaccagttttattgtcaaataaactata

SEQ ID NO: 175136 - DNA, 120 bp, Artificial Sequence
  ENSG00000109920_26 (sequence is synthesized)
aatgttatgggggagatcttataaatttcctgggcaagagtgtatgcatacaaagttttcacttttgtgaaatgtaatttttctgtttttgcaaagggatgaggtgattggaattgcttt

SEQ ID NO: 175137 - DNA, 120 bp, Artificial Sequence
  ENSG00000109920_27 (sequence is synthesized)
gaccatgctgcctttattctcaaactggcaaacttagcatgttaggtgtattaacctcatcagtcttgaagaacatgtggctcatgagtataacacttctgtagaggactccctgacaaa

SEQ ID NO: 175138 - DNA, 120 bp, Artificial Sequence
  ENSG00000109920_28 (sequence is synthesized)
agtgaagaattaacttctcctccagaacaagtgcaattcagaaggcagctctgcattctaccttgcttgactggaattgtctgaagctttttctggcctcttttctctagtcggccaccc

SEQ ID NO: 175139 - DNA, 120 bp, Artificial Sequence
  ENSG00000109920_29 (sequence is synthesized)
ctgaagtgctgaggtctaagtggtttacctcgtgctgatagatggccacactctttagagtagttctcataagttctagaactggtagctcggtcgtttcgcacactaggtggcatacag

SEQ ID NO: 175140 - DNA, 120 bp, Artificial Sequence
  ENSG00000109920_30 (sequence is synthesized)
gcagcagcaggtgttcatatccttgattttgagaatttcccctcaagtatgtggcagtaaatacaacaagacactctatgtattaatgtctccattgtcttaaccctgttccaaaacaaa

SEQ ID NO: 175141 - DNA, 120 bp, Artificial Sequence
  ENSG00000109920_31 (sequence is synthesized)
attcacctcctttctttatgtgaatgtattctccataaaattccagtatttaaaaagcagtttactgttctgtactttctgttgtatcacaatcaggtaaaagtcactttaaactgagga

SEQ ID NO: 175142 - DNA, 120 bp, Artificial Sequence
  ENSG00000109920_32 (sequence is synthesized)
aacggcaaattgtgttttaaagctctttgtatttctccagtttctgaccttgtaaatttgtatatatgcactaataaagctttttttataatcctgatgggttatccttttgctcgtcaa

SEQ ID NO: 175143 - DNA, 120 bp, Artificial Sequence
  ENSG00000109920_33 (sequence is synthesized)
gggggttaagcgcatgcgagagctctgtgcgctttacaggacctctggaagcaactactcctgattaacctcggtgaagttaaggaaaacttcgtggctgaagatgtgaatgaagaacaa

SEQ ID NO: 175144 - DNA, 120 bp, Artificial Sequence
  ENSG00000109920_34 (sequence is synthesized)
gcaagcacaaagtttggccagccacacattggagaaacaaaagcaatgtttaaagtgttccatgtaacggattttttcccaagatatggacaaagctggtttttactctccagagtgttg

SEQ ID NO: 175145 - DNA, 120 bp, Artificial Sequence
  ENSG00000109920_35 (sequence is synthesized)
gggaagagtcacctttcacaaacttcgttgttctcttctttggaagggaaattagtgttctaggcgattgagtcccttcattaatgaaacttgaaaccctgttatgcattggcaaatcac

SEQ ID NO: 175146 - DNA, 120 bp, Artificial Sequence
  ENSG00000109920_36 (sequence is synthesized)
actagccttttaaaaaaaagaaagaaaatagagaaaatcttaacttatatttacttactgtatgttgtgattagtttaatagaagggagtttaatccttaataattaagttagtcctcaa

SEQ ID NO: 175147 - DNA, 120 bp, Artificial Sequence
  ENSG00000109920_37 (sequence is synthesized)
cgtttattgacttagttctgatgtagtccttgtgtactattgtataatgtagactacttggccatacttgattttgtctaaaagttaatgcataaattaatattaaatatggccaaatat

SEQ ID NO: 175148 - DNA, 120 bp, Artificial Sequence
  ENSG00000109920_38 (sequence is synthesized)
aaaagtttaatgagtcatttgaggtcatttagccagaaaactgcatttatgttcctggtgaatttttttcaatgtccttttccaaaagtggcagtaagcagctgtcttaaaataaggaga

SEQ ID NO: 175149 - DNA, 120 bp, Artificial Sequence
  ENSG00000109920_39 (sequence is synthesized)
cagtgggaatgatgttgttaaagtcttttatacaatgtattgtctgtctgttccataaaaagtaaaactactctattcgtgaccagcttgggcaacatagtgagactgtctctttaaaaa

SEQ ID NO: 175150 - DNA, 120 bp, Artificial Sequence
  ENSG00000109920_40 (sequence is synthesized)
aaaaaaaaaaaaaaaaattaaaaattagcaggtgtggtgatgcacacctgtagtcctagcaattcgggaagctgaggtaggaagatcgcttgagccaagtgtttgaggttagaatgagct

SEQ ID NO: 175151 - DNA, 120 bp, Artificial Sequence
  ENSG00000109920_41 (sequence is synthesized)
ccagcctgggcaacagagcaagacccaaatggctcatggttgctttgtttgttttaccttgttgagtgccagtgtgtattttgagcaaagcagtgtaaatggccttcttgccctagagtc

SEQ ID NO: 175152 - DNA, 120 bp, Artificial Sequence
  ENSG00000109920_42 (sequence is synthesized)
ggccttcttgccctagagtctttcataattgagccttatttaatctaccacttttgaccatgaaatttaacaggtgacttcttctgggtatctactccaggtgaagtgatattttttttg

SEQ ID NO: 175153 - DNA, 120 bp, Artificial Sequence
  ENSG00000109920_43 (sequence is synthesized)
actgagatgtctaaagctcttggattcctggtatctcaccaggacatcttagtaaaacagcaagtatcagatgaggaatcagacttgagttctagctctggtctggccactaacattgat

SEQ ID NO: 175154 - DNA, 120 bp, Artificial Sequence
  ENSG00000109920_44 (sequence is synthesized)
atgatcttgggcaagttagttcctgcctgggtttcattacctttaactgaggaggttgaaatagatgatttctcatgtctcttctactcctaaattctatgattttagggagaaaatccc

SEQ ID NO: 175155 - DNA, 120 bp, Artificial Sequence
  ENSG00000109920_45 (sequence is synthesized)
cttcaacattcctgggatatatatctaatagtcccatatattgtgaaacttccctattgacgataaagagggctggggaaggctacaagtaagtatatcctattttctctaatctttaaa

SEQ ID NO: 175156 - DNA, 120 bp, Artificial Sequence
  ENSG00000109920_46 (sequence is synthesized)
ggttttcccagcagagaaaagacagtaatcaatgatggcttttacaaagtttgaggaaagctgatcctgcaacttttcagctgcaatttcgtaatgtagacttcagcaacagcaatttca

SEQ ID NO: 175157 - DNA, 120 bp, Artificial Sequence
  ENSG00000109920_47 (sequence is synthesized)
aaaccactgcagttttaaaaaatctgagttatatactttgaagatttatcttcctaaatttctcttttatcgcaaaagtaaaaattgccatccctaacttgtgtctctgtgatatcacaa

SEQ ID NO: 175158 - DNA, 120 bp, Artificial Sequence
  ENSG00000109920_48 (sequence is synthesized)
tagttgacagtagcaccttgcaaatggattttttaaatttagtaacccaaattaaacacaatgggtagaactttcccgagtattttgaatgaatattctgggttgtctttactcactttg

SEQ ID NO: 175159 - DNA, 120 bp, Artificial Sequence
  ENSG00000109920_49 (sequence is synthesized)
tctagctcactaaaaaataaagtatgtgtaataattactgcaggtgcacattattcactcactccttcacttttgaaatagactccagactattaccttttatttgtgtatgttgaagct

SEQ ID NO: 175160 - DNA, 120 bp, Artificial Sequence
  ENSG00000109920_50 (sequence is synthesized)
tgtgagtgtttgaaatcaaaaacttcaaactacagattcagatgactgcatttctcgttgagttgatgtaatattcttctactcatccataaatatggacccgaaggacaagtataatac

SEQ ID NO: 175161 - DNA, 120 bp, Artificial Sequence
  ENSG00000109920_51 (sequence is synthesized)
agatggggaaggtgctatgaagttcataaatttatctttccgtggaagtcatttctgaactgagttgttcaatattttagcgatatcagtatagaatagatgcctgtgggccaaattttt

SEQ ID NO: 175162 - DNA, 120 bp, Artificial Sequence
  ENSG00000109920_52 (sequence is synthesized)
ttcaaggaaggagccattccctgctgtttgacaccacattctgtattgttttgtacactgtgctaggttcctataaatgattatcttactgaccagttgaacatttctatgaatataagc

SEQ ID NO: 175163 - DNA, 120 bp, Artificial Sequence
  ENSG00000109920_53 (sequence is synthesized)
ctctgaaacttccacagcagttaatgaactgaagaggcttgatcgtagttctggataggtggctccactcctgaccactgtcaacatcccttatatgttccaaagttgaaaattccactg

SEQ ID NO: 175164 - DNA, 120 bp, Artificial Sequence
  ENSG00000109920_54 (sequence is synthesized)
ttaccaattctgaatgttctgtgaacactttagatgagtattaagctgttttctccctttatgacacacatagttgatactgtctggtaaaaggaggctcttgagccattcctatttaat

SEQ ID NO: 175165 - DNA, 120 bp, Artificial Sequence
  ENSG00000109920_55 (sequence is synthesized)
ggctggtcctgccactgggacaggtacgcactcttctccccttttcacctttcacctttgacatctcagacatgatttgtgatcaccaccatctgacgacatgacagcctgtctggagac

SEQ ID NO: 175166 - DNA, 120 bp, Artificial Sequence
  ENSG00000109920_56 (sequence is synthesized)
ttgatttttttttcgttatttgaaatctttgctcttttatttttcagctcccagatcctctccctctctttagctttcactgtgtttgatatcaagaatatgaaatgtgaattccacggt

SEQ ID NO: 175167 - DNA, 120 bp, Artificial Sequence
  ENSG00000109920_57 (sequence is synthesized)
attcaacagaatcctctgaaacttccacaggtgagacaatttaccttgtactaattcagccaaaatgactttagaggaaaaatcttattaatttacattattaaaagattttatgtcata

SEQ ID NO: 175168 - DNA, 120 bp, Artificial Sequence
  ENSG00000109920_58 (sequence is synthesized)
acaggagatcgatgccataacagctcctcagcctgcagctcctgtaggagcttctgctccacctccaactccacctcgaccagagccaaaggaagcagcaacatctaccctttcttcttc

SEQ ID NO: 175169 - DNA, 120 bp, Artificial Sequence
  ENSG00000109920_59 (sequence is synthesized)
attaaacttcagagttgaaagatatagaggggaaggaaactcttgtctttttttgtttcctcttcaacaaaacaggagattgtacttttactctttgggagaagtgctgggaaggaagct

SEQ ID NO: 175170 - DNA, 120 bp, Artificial Sequence
  ENSG00000109927_0 (sequence is synthesized)
atgaattattcatcattccttagaatttgggtctctttcatcttcgcacttgtacagcaccaagctcagcccagggagctcatgtatccattttggcagaatgacaccaaaacccctaaa

SEQ ID NO: 175171 - DNA, 120 bp, Artificial Sequence
  ENSG00000109927_1 (sequence is synthesized)
gtagatgatggaagctcatctgagattaagttggccatcccagttttcttctttggcgttccttaccgcactgtctatgtcaataacaacggagttgtttccttcaatgtgctagtgagc

SEQ ID NO: 175172 - DNA, 120 bp, Artificial Sequence
  ENSG00000109927_2 (sequence is synthesized)
cagttcacgccagaatcctttcccctgacagatgggagagccttcgtcgccccattttgggcagatgtgcacaatggaattcgaggcgagatctattacagagagaccatggagcctgcc

SEQ ID NO: 175173 - DNA, 120 bp, Artificial Sequence
  ENSG00000109927_3 (sequence is synthesized)
atcttgaaaagagccaccaaggacatcaggaagtacttcaaagacatggcaaccttctctgccacttgggttttcattgtgacatgggaggaagtcacgttttatggaggcagcagcacc

SEQ ID NO: 175174 - DNA, 120 bp, Artificial Sequence
  ENSG00000109927_4 (sequence is synthesized)
acacctgtgaacaccttccaggccgtcctagtgtccgatggctcctatacattcaccctcttcaattattacgaaatcaactggaccacggggacggcgagtggcggcgaccccctgaca

SEQ ID NO: 175175 - DNA, 120 bp, Artificial Sequence
  ENSG00000109927_5 (sequence is synthesized)
ggtcttggtggagtgatggcacaggcaggatttaatggtggaaacctcaccaatttcttcagcctcccggggtcaagaacccccgagatcgtgaatatccaggagaccacaaacgtcaat

SEQ ID NO: 175176 - DNA, 120 bp, Artificial Sequence
  ENSG00000109927_6 (sequence is synthesized)
gttccaggccgctgggcatttaaagttgatggaaaggaaattgacccagccaatggctgcacctcaaggggacaattccttcggcgaggggaggtgttttgggatgacttgaactgcacc

SEQ ID NO: 175177 - DNA, 120 bp, Artificial Sequence
  ENSG00000109927_7 (sequence is synthesized)
gtcaagtgccgctgtctggatttcaacaatgagatctactgccaggaggcttcctgtagcccctacgaggtgtgcgaacccaaaggcaaattcttctactgcagcgctgtggagaccagc

SEQ ID NO: 175178 - DNA, 120 bp, Artificial Sequence
  ENSG00000109927_8 (sequence is synthesized)
acatgcgtggtgtttggggagccacactaccacacttttgacggcttcctcttccacttccaaggctcctgtgcctacttgctggcccgacagtgtttgcagacttccagcctccctttc

SEQ ID NO: 175179 - DNA, 120 bp, Artificial Sequence
  ENSG00000109927_9 (sequence is synthesized)
ttcagtgtggaggccaagaatgaacaccgcagaggttcagccgtctcctgggtgaaggagctctcagtggaggtgaatggctacaagattctcatccccaaaggaagctatggaagagtc

SEQ ID NO: 175180 - DNA, 120 bp, Artificial Sequence
  ENSG00000109927_10 (sequence is synthesized)
aaggttaatgacctagtgacttctttgcctgtcaccttagacttggggacagtgaaaatctaccagagtggcatatctactgccgtggaaacagattttgggctcttagtgacttttgat

SEQ ID NO: 175181 - DNA, 120 bp, Artificial Sequence
  ENSG00000109927_11 (sequence is synthesized)
ggccagcactacgcctccatttccgtcccaggctcctatataaactccacctgtggactctgtggaaactataataaaaacccactggatgacttcctccgcccggatggcaggccggcc

SEQ ID NO: 175182 - DNA, 120 bp, Artificial Sequence
  ENSG00000109927_12 (sequence is synthesized)
atgtctgtcctggatctgggagagagctggcgtgtgtaccacgcagactggaagtgcgactccggctgcgtcgacaactgcacccagtgcgacgctgccactgaagccctctactttggc

SEQ ID NO: 175183 - DNA, 120 bp, Artificial Sequence
  ENSG00000109927_13 (sequence is synthesized)
tctgactactgcggcttcctcaacaagacagacggccctctgtgggagtgtggcactgtcgtggaccccactgcttttgtgcacagctgcgtgtatgacctgtgcagtgtgagggacaat

SEQ ID NO: 175184 - DNA, 120 bp, Artificial Sequence
  ENSG00000109927_14 (sequence is synthesized)
ggcacgctcctctgccaagccatccaggcctatgctcttgtgtgccaagcccttggcattccaattggagactggcgaacccagactgggtgtgtgtccacagtgcagtgcccgagcttc

SEQ ID NO: 175185 - DNA, 120 bp, Artificial Sequence
  ENSG00000109927_15 (sequence is synthesized)
agccactactccgtgtgcacaagcagctgccccgacacatgctccgacctgacggcctcgcggaactgcgccacgccgtgcacagagggctgcgagtgcaaccagggcttcgtcctcagc

SEQ ID NO: 175186 - DNA, 120 bp, Artificial Sequence
  ENSG00000109927_16 (sequence is synthesized)
accagccagtgcgtccctctgcacaagtgcggctgcgacttcgacggccactactacaccatgggggagttcttctgggccacggccaactgcactgtgcaatgcctgtgcgaggagggc

SEQ ID NO: 175187 - DNA, 120 bp, Artificial Sequence
  ENSG00000109927_17 (sequence is synthesized)
ggggacgtctactgcttcaacaagacctgcggcagcggggaggtgtgcgccgtggaggacggctaccagggctgcttccccaagcgggagaccgtgtgcctgctcagccagaaccaggtg

SEQ ID NO: 175188 - DNA, 120 bp, Artificial Sequence
  ENSG00000109927_18 (sequence is synthesized)
ctgcacacctttgacggcgcctcctacgccttcccctccgagttctcctacaccctcctgaagacctgccctgagcgcccagagtacttggaaatcgacatcaacaagaagaagcccgat

SEQ ID NO: 175189 - DNA, 120 bp, Artificial Sequence
  ENSG00000109927_19 (sequence is synthesized)
gcaggacctgcttggctgcggggacttcggatcctggtggccgaccaggaggtcaagataggaggcatcggggcttcggaagtcaagttgaatggtcaggaagtggaattgccttttttc

SEQ ID NO: 175190 - DNA, 120 bp, Artificial Sequence
  ENSG00000109927_20 (sequence is synthesized)
catccttcggggaagctggaaatttatcgaaacaaaaacagtacgacagtggagtccaagggcgtggtgactgtccagtactcagacataggtctattgtacatccggctgtccaccaca

SEQ ID NO: 175191 - DNA, 120 bp, Artificial Sequence
  ENSG00000109927_21 (sequence is synthesized)
tacttcaattgcacagggggcttgtgcggcttctacaatgccaacgccagtgacgagttctgtctccccaacggcaagtgcacggacaacctggcagtgttcctggaaagctggacaact

SEQ ID NO: 175192 - DNA, 120 bp, Artificial Sequence
  ENSG00000109927_22 (sequence is synthesized)
ttcgaggagatctgcaatggagagtgtggggacctgctgaaggcctgcaacaatgactcggagctgctcaagttttatcgaagccgctccaggtgcggcatcatcaacgacccctccaac

SEQ ID NO: 175193 - DNA, 120 bp, Artificial Sequence
  ENSG00000109927_23 (sequence is synthesized)
agctccttcctggagtgccatggggtggtgaacgtcactgcctattaccgcacctgccttttccgcctgtgccagagtgggggcaatgagtcagagctctgtgactctgtggcccggtat

SEQ ID NO: 175194 - DNA, 120 bp, Artificial Sequence
  ENSG00000109927_24 (sequence is synthesized)
gcaagcgcctgcaagaatgcggacgtggaggtggggccctggcggacctatgacttctgcccactggagtgcccagagaacagccactttgaggagtgcatcacatgtacagagacctgt

SEQ ID NO: 175195 - DNA, 120 bp, Artificial Sequence
  ENSG00000109927_25 (sequence is synthesized)
gagacccttaccctgggccccatctgcgtggatagctgctctgagggatgtcagtgtgatgagggctatgctctactgggcagccagtgtgtcacgcggagtgagtgtggctgcaacttt

SEQ ID NO: 175196 - DNA, 120 bp, Artificial Sequence
  ENSG00000109927_26 (sequence is synthesized)
tgcaaggatgatgagtactgcatggaggaaggtggcctgtactactgccaagcccgcaccgacgcctcctgcatcgtctcaggctacggccactacctcacctttgatggcttccccttt

SEQ ID NO: 175197 - DNA, 120 bp, Artificial Sequence
  ENSG00000109927_27 (sequence is synthesized)
gacttccagaccagctgcccactcatcctgtgcaccacaggaagcaggccaagctcagactctttccccaagtttgttgtcacagccaagaatgaggaccgggacccgtcactggccttg

SEQ ID NO: 175198 - DNA, 120 bp, Artificial Sequence
  ENSG00000109927_28 (sequence is synthesized)
tgggttaagcaggtggacgtgaccgtgtttggctacagcatcgtgatccaccgagcttacaagcacactgtgctggtcaacagtgaacggctctatctgcccctgaagctggggcaaggg

SEQ ID NO: 175199 - DNA, 120 bp, Artificial Sequence
  ENSG00000109927_29 (sequence is synthesized)
aagataaatatcttttcctttggcttccacgtggtggtggaaactgattttggcctgaaggttgtatatgactggaagaccttcctgtccatcacagtccctcggagcatgcagaacagc

SEQ ID NO: 175200 - DNA, 120 bp, Artificial Sequence
  ENSG00000109927_30 (sequence is synthesized)
acctatggtctgtgtggccgctacaacggcaaccctgatgatgacctggagatgcccatgggtctgcttgcatcgagtgtcaatgagtttgggcagagctgggtgaagagggacaccttc

SEQ ID NO: 175201 - DNA, 120 bp, Artificial Sequence
  ENSG00000109927_31 (sequence is synthesized)
tgccaggtgggctgtggggaccgctgtccgtcctgtgccaaggtggaaggtttctccaaagtgcagcagctgtgcagcctgatccccaaccagaacgctgccttctccaagtgtcacagc

SEQ ID NO: 175202 - DNA, 120 bp, Artificial Sequence
  ENSG00000109927_32 (sequence is synthesized)
aaagttaaccccaccttcttctataagaactgcctgtttgactcttgcatcgatgggggcgcggtgcagaccgcctgcagctggctgcagaactacgccagcacctgccagactcagggg

SEQ ID NO: 175203 - DNA, 120 bp, Artificial Sequence
  ENSG00000109927_33 (sequence is synthesized)
attacggtgactggctggaggaattacacgtcctgcactgtcacctgccctccaaacagccattacgagagctgcgtgagtgtctgccagccccgctgcgccgccatccgcctgaagagt

SEQ ID NO: 175204 - DNA, 120 bp, Artificial Sequence
  ENSG00000109927_34 (sequence is synthesized)
gactgcagccactactgcgtggagggctgtcactgcgacgctggctacgtcctcaacggcaagagctgcatcctgccccacagctgcggctgctactccgatggcaaatattacgagccc

SEQ ID NO: 175205 - DNA, 120 bp, Artificial Sequence
  ENSG00000109927_35 (sequence is synthesized)
aagcagctattttggaacagcgactgcacgcggcgctgccgctgtttccgtcgcaacgtgattcagtgcgacccgcgccaatgcaagtcagacgaggagtgtgcgctgcgcaacggggtg

SEQ ID NO: 175206 - DNA, 120 bp, Artificial Sequence
  ENSG00000109927_36 (sequence is synthesized)
cgcggctgcttcagcaccaagacctcctactgcctggcggccggcggcggcgtcttccgcaccttcgacggcgccttcctgcgcttcccagccaactgcgccttcgtgctgtccaccatc

SEQ ID NO: 175207 - DNA, 120 bp, Artificial Sequence
  ENSG00000109927_37 (sequence is synthesized)
tgccagaaactgcccgacatctccttccagcttatcatcaacttcgacaagtggtcggcccccaacctcaccatcatttcgcccgtctacttctacattaacgaagagcagattctcatc

SEQ ID NO: 175208 - DNA, 120 bp, Artificial Sequence
  ENSG00000109927_38 (sequence is synthesized)
aacgaccggaacacggtcaaggtgaatggcacacaagtgaatgttccatttataactggtttggcaaccaaaatctacagcagtgaggggtttctggtgattgacaccagcccagacatc

SEQ ID NO: 175209 - DNA, 120 bp, Artificial Sequence
  ENSG00000109927_39 (sequence is synthesized)
cagatatactacaatggtttcaacgtcattaaaatcagcatcagcgagaggctgcagaacaaagtgtgcggtctctgtggcaacttcaacggggacctaacagatgattatgtgaccttg

SEQ ID NO: 175210 - DNA, 120 bp, Artificial Sequence
  ENSG00000109927_40 (sequence is synthesized)
cgagggaagccggtggtaagcagcgtggtgctggcccagagctggaaaaccaatggcatgcagaagagacctcttgcccccagctgcaacgagctgcagttctcacagtatgcagccatg

SEQ ID NO: 175211 - DNA, 120 bp, Artificial Sequence
  ENSG00000109927_41 (sequence is synthesized)
tgtgacaatgtgcacatccagaagatgcagggtgatggctactgcctgaagctcaccgacatgaagggcttcttccagccctgctatgggcttctcgatcccctcccattctacgagtcc

SEQ ID NO: 175212 - DNA, 120 bp, Artificial Sequence
  ENSG00000109927_42 (sequence is synthesized)
tgctacctggacggctgctacagccacaagaagttccagctgtgcggctccctggccgcctacggggaggcctgccgctccttcgggatccttagcaccgagtggattgagaaggagaat

SEQ ID NO: 175213 - DNA, 120 bp, Artificial Sequence
  ENSG00000109927_43 (sequence is synthesized)
tgctcaggagtggttgaagatccctgtgtgggggcggactgtcccaaccgaacttgcgagctgggcaatggcagggagctgtgtggctgcatcgagccacccccctatggaaataactca

SEQ ID NO: 175214 - DNA, 120 bp, Artificial Sequence
  ENSG00000109927_44 (sequence is synthesized)
catgacattatcgatgcagaggtgacctgcaaagcagcccaaatggaagtgtccatatctaagtgcaagctcttccagctcggttttgagagggagggcgtgaggatcaatgacagacag

SEQ ID NO: 175215 - DNA, 120 bp, Artificial Sequence
  ENSG00000109927_45 (sequence is synthesized)
tgcaccggcatcgagggggaagattttatctcctttcagatcaacaacaccaaagggaattgtggaaacattgtgcagtccaatggcacgcatatcatgtataaaaacacactctggatc

SEQ ID NO: 175216 - DNA, 120 bp, Artificial Sequence
  ENSG00000109927_46 (sequence is synthesized)
gaaagcgccaacaacactggcaacatcatcaccagggaccgcacgatcaatgtggaattttcatgtgcttatgagctggatatcaagatctccttggattctgttgtgaagcctatgcta

SEQ ID NO: 175217 - DNA, 120 bp, Artificial Sequence
  ENSG00000109927_47 (sequence is synthesized)
agtgtaattaacctgacagttccaacccaagaaggcagcttcatcaccaagatggctctctacaaaaacgcctcctacaaacatccttaccgccagggtgaagtagtgttgacgactcga

SEQ ID NO: 175218 - DNA, 120 bp, Artificial Sequence
  ENSG00000109927_48 (sequence is synthesized)
gatgtgctgtatgtaggggtttttgtggttggagctgacgccacacatttaatcctaacactcaacaaatgctatgccacacccacccgagatagcaatgataagctccgatatttcatc

SEQ ID NO: 175219 - DNA, 120 bp, Artificial Sequence
  ENSG00000109927_49 (sequence is synthesized)
attgaaggagggtgtcagaacctcaaagataacaccattggcatcgaggagaatgcagtctccctgacctgtcgctttcacgtcaccgtctttaaattcataggggattacgacgaagtt

SEQ ID NO: 175220 - DNA, 120 bp, Artificial Sequence
  ENSG00000109927_50 (sequence is synthesized)
caccttcactgtgcagtgtcactctgcgactcagaaaagtactcctgtaaaatcacttgcccacacaattccaggattgccacagattacacaaaagagcccaaagaacagatcatttca

SEQ ID NO: 175221 - DNA, 120 bp, Artificial Sequence
  ENSG00000109927_51 (sequence is synthesized)
gtgggacctattaggagaaaaaggctggactggtgtgaggacaatggagggtgtgagcagatttgcacgagccgggtggatgggcctctctgcagctgtgtaacaggaaccctgcaggag

SEQ ID NO: 175222 - DNA, 120 bp, Artificial Sequence
  ENSG00000109927_52 (sequence is synthesized)
gacggcaagagctgcagagcctctaattcttcaatggaacttcaagtctggacgcttcttctcatcatgatccagatttcattatggcattttgtctataaatcaggcacgacctcataa

SEQ ID NO: 175223 - DNA, 120 bp, Artificial Sequence
  ENSG00000109927_53 (sequence is synthesized)
cgcaatcctgaaactgatctttagatttacttttccttaatcaatagaaaaaaacttgattgcagctcaacacttacctgtctctagtgcaggactaacttaatttttggttttaagagt

SEQ ID NO: 175224 - DNA, 120 bp, Artificial Sequence
  ENSG00000109927_54 (sequence is synthesized)
acgagattcagacattatttcaggaatcagaaattattggcaacaagttgaggagaactgacatgaattcttgttttacctaattttttctggcttaccaagatttggcttaatatttct

SEQ ID NO: 175225 - DNA, 120 bp, Artificial Sequence
  ENSG00000109927_55 (sequence is synthesized)
tatttgaaagtgtccagcatctcaaaatgatgccacctgcctccaatggtccaaggtccagaaaccagcgaccatccaagctcctctttcagagtatgaaacggggcttctacaagccag

SEQ ID NO: 175226 - DNA, 120 bp, Artificial Sequence
  ENSG00000109927_56 (sequence is synthesized)
ttatggaaagtatctctcttgtgtaaaattcccaaacagttgtcactagagactttggttcacatgaaaaaccagtaaaggaaaaaaattctggttagagaaatctgactggaaatctga

SEQ ID NO: 175227 - DNA, 120 bp, Artificial Sequence
  ENSG00000109927_57 (sequence is synthesized)
ccagagaaatctgtcaagccagtgctatttctggatcacagttttttacagagagagggcctgttggaacgattttgaagtgatgactggaaggtttgactccctctaaggaatcttgct

SEQ ID NO: 175228 - DNA, 120 bp, Artificial Sequence
  ENSG00000109927_58 (sequence is synthesized)
ggtgtttggaagtgtccgatctacgttatgcacgtgttctgtctatgaggcgcttctccacccactgtgtccttcaaccttgccatggcagctttggccactggggatattgttgacctg

SEQ ID NO: 175229 - DNA, 120 bp, Artificial Sequence
  ENSG00000109927_59 (sequence is synthesized)
gggaaccccacccactctcctaccccctcgaacccaatcccttctctttttacaaatcaaccaaatactttttaatgtgttttatccttaaataaactttgtgttcaagtattctcatta

SEQ ID NO: 175230 - DNA, 120 bp, Artificial Sequence
  ENSG00000109927_60 (sequence is synthesized)
ggcagctgggagacacgggaggttctttaccaccagaaggagaaattcagatttgaaggccactcggtcagcaactctccctcgaaaactccagaaattaagaaggaaagatggggaaca

SEQ ID NO: 175231 - DNA, 120 bp, Artificial Sequence
  ENSG00000109927_61 (sequence is synthesized)
tttttctattccttgacagttaaggttagcataatcaaaattgctagcgtttgtctttgatgccctaggaaaaacataattcacgtttcttgagcctaaatgctttcaaccaacattgtt

SEQ ID NO: 175232 - DNA, 120 bp, Artificial Sequence
  ENSG00000109927_62 (sequence is synthesized)
caatagaactctctgtgacgatggaaatattccatctgtactgtttaatgtggtggctacatgtggctgctcagcacttgaaatgtggctcagggggctgcggaattgaatttttaattt

SEQ ID NO: 175233 - DNA, 120 bp, Artificial Sequence
  ENSG00000109927_63 (sequence is synthesized)
tatttaatttcatttcatttaaatgtaaattgccccatgtggctagcaggtactgtattggacagcacagccttagactttgctactacgtgctttgctttccctctgcattctcagcct

SEQ ID NO: 175234 - DNA, 120 bp, Artificial Sequence
  ENSG00000109927_64 (sequence is synthesized)
caggtactgggggttaaggcctcaacatttcttttggggggacacagtgtaacccacaatagggggtcattggagacaatgagcatcaaggagaaatggattaaagaggtcaacagtgaa

SEQ ID NO: 175235 - DNA, 120 bp, Artificial Sequence
  ENSG00000109927_65 (sequence is synthesized)
cttgattgctctgggaaggccagtcttccaactccctagaagtcagagcaaattgagtagcaatttaaggatatgcactttggaactgagtttgttatctgaatgaagcatgacatgtaa

SEQ ID NO: 175236 - DNA, 120 bp, Artificial Sequence
  ENSG00000109929_0 (sequence is synthesized)
agtttgcagagcagtggcgtgcggagcggcggcggaccacctccaggggctaagtgatggatcttgtactccgtgttgcagattactatttttttacaccatacgtgtatccagccacat

SEQ ID NO: 175237 - DNA, 120 bp, Artificial Sequence
  ENSG00000109929_1 (sequence is synthesized)
ggccagaagatgacatcttccgacaagctattagtcttctgattgtaacaaatgttggtgcttacatcctttatttcttctgtgcaacactgagctattattttgtcttcgatcatgcat

SEQ ID NO: 175238 - DNA, 120 bp, Artificial Sequence
  ENSG00000109929_2 (sequence is synthesized)
taatgaaacatccacaatttttaaagaatcaagtccgtcgagagattaagtttactgtccaggcattgccatggataagtattcttactgttgcactgttcttgctggagataagaggtt

SEQ ID NO: 175239 - DNA, 120 bp, Artificial Sequence
  ENSG00000109929_3 (sequence is synthesized)
acagcaaattacatgatgacctaggagagtttccatatggattgtttgaacttgtcgttagtataatatctttcctctttttcactgacatgttcatctactggattcacagaggccttc

SEQ ID NO: 175240 - DNA, 120 bp, Artificial Sequence
  ENSG00000109929_4 (sequence is synthesized)
atcatagactggtatataagcgcctacataaacctcaccatatttggaagattcctactccatttgcaagtcatgcttttcaccctattgatggctttcttcagagtctaccttaccata

SEQ ID NO: 175241 - DNA, 120 bp, Artificial Sequence
  ENSG00000109929_5 (sequence is synthesized)
tatacccttttatctttccattacacaaggtggtttatttaagtctgtacatcttggttaatatctggacaatttccattcatgacggtgattttcgtgtcccccaaatcttacagccat

SEQ ID NO: 175242 - DNA, 120 bp, Artificial Sequence
  ENSG00000109929_6 (sequence is synthesized)
ttattaatggctcagctcatcatacagaccaccatatgttctttgactataattatggacaatatttcactttgtgggataggattggcggctcattcaaaaatccttcatcctttgagg

SEQ ID NO: 175243 - DNA, 120 bp, Artificial Sequence
  ENSG00000109929_7 (sequence is synthesized)
ggaagggaccgctcagttatgtgaaggagatgacagagggaaagcgcagcagccattcaggaaatggctgtaagaatgaaaaattattcaatggagagtttacaaagactgaatagatta

SEQ ID NO: 175244 - DNA, 120 bp, Artificial Sequence
  ENSG00000109929_8 (sequence is synthesized)
ttgcccagttattcttaagtaaggacaaagaaggaaatatcatcgtatttcttttttttaataaggaaaaaataatatccatacagtcaagatacatagtaaatggtatcatttggaaat

SEQ ID NO: 175245 - DNA, 120 bp, Artificial Sequence
  ENSG00000109929_9 (sequence is synthesized)
cagcatcgtgggcactgctgaggaatgatcctagtggtaggtcagaagaagatgctgtgaacaccaggactttaatcttatgcttaaaatgccagatgttgttcgggggacaacttgtat

SEQ ID NO: 175246 - DNA, 120 bp, Artificial Sequence
  ENSG00000109929_10 (sequence is synthesized)
ctttctagcagcagatctgtagtttgtatagcctcaacaacaattttaaataagatggagaataaattattgaggggactaggctatatgcatttgccttcatccacccatgtttattaa

SEQ ID NO: 175247 - DNA, 120 bp, Artificial Sequence
  ENSG00000109929_11 (sequence is synthesized)
gaatcattgtgcttaataataccaagactaagcaccataaccaagaaatactaatgtaaagattgtttcttgtttcaggaatggttaattcttcaacgttggtatgataatgataacttg

SEQ ID NO: 175248 - DNA, 120 bp, Artificial Sequence
  ENSG00000109929_12 (sequence is synthesized)
ttttgacttgaataaagtactacatcagtgtggaaaaaaattctgatacattagcagctatgtaaatgacctaattgatagcaggtgtaataagactatcgtcttcctacacataggagg

SEQ ID NO: 175249 - DNA, 120 bp, Artificial Sequence
  ENSG00000109929_13 (sequence is synthesized)
ctcattctctggacacactatcacctattacattttactgattaacaaataaattggaatttaaaaatatcgatatcaccatgatttaatccagatctgggattatgtagctaaacattg

SEQ ID NO: 175250 - DNA, 120 bp, Artificial Sequence
  ENSG00000109929_14 (sequence is synthesized)
aaacattgtgatgattattatttaaaaccattatttaataagagtaaaaatatgtgaatctggatatatttaaaaaaagaaatttgatgcccagataatatattaggcactactgatttt

SEQ ID NO: 175251 - DNA, 120 bp, Artificial Sequence
  ENSG00000109929_15 (sequence is synthesized)
attgatgcactacacttttgatgtttgaagttacaaacctgtaatttttttgtaaaggaaataattgccaaatacctaggcccattgctgacgattagttctaaaatcttattcctcctc

SEQ ID NO: 175252 - DNA, 120 bp, Artificial Sequence
  ENSG00000109929_16 (sequence is synthesized)
ttctcccctcacttttccctacttcctctgcaaaaagatttaacaaatacattcataaggaaatgtgtgttgtaacaaatatattgcaaaaacatagtttgtaaaggcattctataagct

SEQ ID NO: 175253 - DNA, 120 bp, Artificial Sequence
  ENSG00000109929_17 (sequence is synthesized)
atttatgtaaaatcaataaaagttgatcataattaaactgtatcagttgagtattatagcagcacaaagtattctttgtacagattttgtgccaatttgaagccacagaaatgatgtgga

SEQ ID NO: 175254 - DNA, 120 bp, Artificial Sequence
  ENSG00000109929_18 (sequence is synthesized)
ttgttaattgtgttttagaacatccccggacactcagtgtcacagggggaaagaagtgggtaccacattctgtttatatttcacattttaactagatttgagtgtttttagcaagaaatc

SEQ ID NO: 175255 - DNA, 120 bp, Artificial Sequence
  ENSG00000109929_19 (sequence is synthesized)
agtcttaaaatctaatgtctgggatccagaagaaaatgtctttaatctgtgagttattgtcacaatgtcatcttatttaaatgtaccaattagcattttgtaataggcaaatgtcattta

SEQ ID NO: 175256 - DNA, 120 bp, Artificial Sequence
  ENSG00000109929_20 (sequence is synthesized)
gtgcttttcaccaatcccactcacccccggtgctccgccttgcctaagaaaaagaaattaaggagaagtaaactttatttcctaatataatgtcagctgatatttattgagcttttcctc

SEQ ID NO: 175257 - DNA, 120 bp, Artificial Sequence
  ENSG00000109929_21 (sequence is synthesized)
tttgcccagagactaggacccaaagaagttaagtaactattcccaggtttatttctctctcatatgatgtcccatgtggatgtttgtggtcagtggacagctttccacctagtctttctg

SEQ ID NO: 175258 - DNA, 120 bp, Artificial Sequence
  ENSG00000109929_22 (sequence is synthesized)
cgacccaggctccttcctcttggggctctgcctttctctcagtccatagagccctctttgttgaaagagcacataggaaaagaaggaaaagtctgtgtggaaaatgtttctgggtcaggc

SEQ ID NO: 175259 - DNA, 120 bp, Artificial Sequence
  ENSG00000109929_23 (sequence is synthesized)
ctggaagtggtgcatatctcttccgcccatgttcctttggacagaactccgtcacatggcccacctagagagattttgggaaatgtgtccagctgtgtgcctgggaggaagggggcacca

SEQ ID NO: 175260 - DNA, 120 bp, Artificial Sequence
  ENSG00000109929_24 (sequence is synthesized)
ttttcttgagcagctagacagtttgccgtatttgtggtgttctcctcttgttgatgttgaaatggtgaatgagccataaagtatttcaggttatccacacactaatcatctcagtgtctt

SEQ ID NO: 175261 - DNA, 120 bp, Artificial Sequence
  ENSG00000109929_25 (sequence is synthesized)
taattcttaactccaatatgaatgtttaaagcttcctctagattcttattcctatataactaatagagaagaaaggacagcttcctatggggaagacagaggcttcctcatagatgttag

SEQ ID NO: 175262 - DNA, 120 bp, Artificial Sequence
  ENSG00000109929_26 (sequence is synthesized)
gaataatcaaacttgcccctgccctttcacccgtctcaaattctggtcttttaaagcagcgttatgttaagtagtcctaacattgtaatatacagtactgccacattctcctactttcta

SEQ ID NO: 175263 - DNA, 120 bp, Artificial Sequence
  ENSG00000109929_27 (sequence is synthesized)
ttagaggaagtcagagaatatttatggaagtgaggacccaaattaccttctacagatgacttttatagttacaggacagaaagtgaaaatcaaggttacgttttctacttttgtggtaga

SEQ ID NO: 175264 - DNA, 120 bp, Artificial Sequence
  ENSG00000109929_28 (sequence is synthesized)
tggatatggttcgagaagacctttcagaaacacagagactgagtctttgtcttccatgctgtctctgcagtactgagtgaatttccttatacccttgtatcatgttttcctcccatcttc

SEQ ID NO: 175265 - DNA, 120 bp, Artificial Sequence
  ENSG00000109929_29 (sequence is synthesized)
tagaagctggggacagatttggaagagaattacacaagttcagttttttgatacatggattttacagtgcatgcaggttatttatgtagagaggaggtctgggagaaagatggaaactag

SEQ ID NO: 175266 - DNA, 120 bp, Artificial Sequence
  ENSG00000109929_30 (sequence is synthesized)
ggagatgactgagaacaaagatatttgggattaacacagatagaagaaaagtttgaaaccatgagattgtcacagcatgaaaaaagatattcaaagacactaaccaacttgaggggtgca

SEQ ID NO: 175267 - DNA, 120 bp, Artificial Sequence
  ENSG00000109929_31 (sequence is synthesized)
gtggtctgaatgtgtcctccaaaattcaaatgtggaaatgtatttgccagtgagatagtatgtagaggtggggccttgaggaagtgattaagtcatgagggctctgggattaatgactta

SEQ ID NO: 175268 - DNA, 82 bp, Artificial Sequence
  ENSG00000109929_32 (sequence is synthesized)
gaagtgattaagtcatgagggctctgggattaatgacttaaaaagaggtgtgaggcagctgttcagcccttctgtctcctgt

SEQ ID NO: 175269 - DNA, 120 bp, Artificial Sequence
  ENSG00000109929_33 (sequence is synthesized)
ttctaacgtgaggacccagcaacaaggtaccatcttgaaagcagcaactggggactcagcagacaccaaaccaactggtgcttaaccgtgacttcccagcctccagagctgtaagaaaat

SEQ ID NO: 175270 - DNA, 120 bp, Artificial Sequence
  ENSG00000109929_34 (sequence is synthesized)
aaatttctattatttatagattacccagttgaagatactttgttaaggcagtacaaatggactaagacaagggggaagaaatttgcattcctgatcttcccaacttcttcaaattcacaa

SEQ ID NO: 175271 - DNA, 120 bp, Artificial Sequence
  ENSG00000109929_35 (sequence is synthesized)
cacttgaatgacagtcttatttcagcacttactgctatcacctattacttttatgtgtgtcttacctatttgagatgccagattccttggaagtagagaccgtgtctgaatcatcattgt

SEQ ID NO: 175272 - DNA, 120 bp, Artificial Sequence
  ENSG00000109929_36 (sequence is synthesized)
attaaaccactcatccttaacaaatgcccaagccatggttaaagttcaataaatactttgttgaatttattaataaaatggcagaaatgtcattctcttccatatatgtttaataaatcc

SEQ ID NO: 175273 - DNA, 120 bp, Artificial Sequence
  ENSG00000109929_37 (sequence is synthesized)
ctgataggtgctaagcactgcactaggtaaaaattctcttctgatgctgtctttttggccaaccatttttttatcatttattcattagctgacatttgctaagtgctttggaggggtcaa

SEQ ID NO: 175274 - DNA, 120 bp, Artificial Sequence
  ENSG00000109929_38 (sequence is synthesized)
aaggggaagtaatgagaaatcaaagatggtccctacatcaaggataaactatctttttttagtcactcaaagtcataaccctttggaaacaaaacccaccagtaccccagattttgacca

SEQ ID NO: 175275 - DNA, 120 bp, Artificial Sequence
  ENSG00000109929_39 (sequence is synthesized)
cagatgaatcagtactacaaggactggttagagggttgaatgaatctgtatactcagcacttaacacagcactctgggtaaaagaaaaaagatcctcaaagatattagttggttacatca

SEQ ID NO: 175276 - DNA, 120 bp, Artificial Sequence
  ENSG00000109929_40 (sequence is synthesized)
agaaaggacaaacttaggttaatctataacttcatctcagaggaacaggaactttggagataaacagggctctgccacttgcaagttgcaccatccctggtttctccatctgtaaattga

SEQ ID NO: 175277 - DNA, 120 bp, Artificial Sequence
  ENSG00000109929_41 (sequence is synthesized)
ttaaaacactgcctatctaataagattaaataagttagaagcattcagttaaatgtcaactgaaactattgttcatgtaaattgtgcttgatgctttttctttctagattcaatgattat

SEQ ID NO: 175278 - DNA, 120 bp, Artificial Sequence
  ENSG00000109929_42 (sequence is synthesized)
tgtcattttacctccataggccctcaatagaaatcagttgcagagggcagaagcctagatattttcaccttaaaattggagggtgaaagacattgaggtgaagtagagatagagggtaca

SEQ ID NO: 175279 - DNA, 120 bp, Artificial Sequence
  ENSG00000109929_43 (sequence is synthesized)
cagaaaaatcgtataagtaaaactaacatcgttaacattatttactgtaagttatctttgtaagagtggtaaaatacattgtgttgttaaataatttcatttaaaaaatgcatcactttg

SEQ ID NO: 175280 - DNA, 120 bp, Artificial Sequence
  ENSG00000109929_44 (sequence is synthesized)
tgtgtttttatattgctaaaaccataaggccagtctacaaggtttgtagataaaatagaaacataccttccttgaaaagcagaataaattttttaaaggcaggaaggaagtgtttgaacc

SEQ ID NO: 175281 - DNA, 120 bp, Artificial Sequence
  ENSG00000109929_45 (sequence is synthesized)
atgtgtcaacaagctttactgtcaaagcaggcttttggtatgggaagaaaaatacttataaatacttgttttaatatttgctttattaaaatacatttaaaatacagcatttttaaatct

SEQ ID NO: 175282 - DNA, 120 bp, Artificial Sequence
  ENSG00000109929_46 (sequence is synthesized)
ctaagctcaacttgaagatataagaacagtaaatttgataaaaatgagaaattacattcccatttctttaacaatttgtaaattccaattatcctgaacatttaataccatttacatatt

SEQ ID NO: 175283 - DNA, 120 bp, Artificial Sequence
  ENSG00000109929_47 (sequence is synthesized)
ttattaatcacattttcttaaacatttgataagagatttaatattttgatccaactaccaaaaaagcagacttgtgtacttgacagatttttctaaacacttcacaactcacgattcaaa

SEQ ID NO: 175284 - DNA, 120 bp, Artificial Sequence
  ENSG00000109929_48 (sequence is synthesized)
caaagacaaaatagcatatcaaaagttaatcactcagttggaaagcactcataccataggcttttattcatttcttgaataattttgttatatcttcctcttttaggctgcaatgagcta

SEQ ID NO: 175285 - DNA, 120 bp, Artificial Sequence
  ENSG00000109929_49 (sequence is synthesized)
taattgcactactgcactccacgctgggtgacagagcaagaccctatctctaaaaataaaaaagtatatatatataaaaatatcttcctctattataatttaactcattaagccatttat

SEQ ID NO: 175286 - DNA, 120 bp, Artificial Sequence
  ENSG00000109929_50 (sequence is synthesized)
ttagatgtaaacttgcccccctgacatgtggtatgaaacaaatagaaacctagaaatttagtgcatattcaaatattaagacagacactggtgtggtgacttttgtctgtcgcttcattg

SEQ ID NO: 175287 - DNA, 120 bp, Artificial Sequence
  ENSG00000109929_51 (sequence is synthesized)
ggacgttttttctttctgatcaacttaatgaaattataatttactataattaagtgtagccatttttactgtagagttcaatgatctttgatgaacgtgtacacccatgtaaccaccacc

SEQ ID NO: 175288 - DNA, 120 bp, Artificial Sequence
  ENSG00000109929_52 (sequence is synthesized)
cccaatcaaagtaaagaacattttcttaccagaataaatttcctctccgtttgcagtcattctccccagccctaggtcaccactgatccaccttctgttactggaaggttagttttcttc

SEQ ID NO: 175289 - DNA, 120 bp, Artificial Sequence
  ENSG00000109929_53 (sequence is synthesized)
cctgatttagaatttcatataaattaaatcagatagtatatactcttgtgtttagtttctttagcttaacatgtttagagatatttgctgttgcctgtgtctgtagctttttgttttcat

SEQ ID NO: 175290 - DNA, 120 bp, Artificial Sequence
  ENSG00000109929_54 (sequence is synthesized)
tgctgaatagtatttcattgtaatataccacagttggtttatgtatttgctgatgaatatttgtgttatttccagcgtgggattattatgaataaagttgctacaaacatttgtatacaa

SEQ ID NO: 175291 - DNA, 120 bp, Artificial Sequence
  ENSG00000109929_55 (sequence is synthesized)
tacacctgagcgggctgggccggggggcgatggaataaaagaagatggagagacttcagcgcctgggactcgggtgggcgaggcggaaggtgtcctcgcagcacggcttttctccgcgcc

SEQ ID NO: 175292 - DNA, 120 bp, Artificial Sequence
  ENSG00000109929_56 (sequence is synthesized)
gcggttggttagcgagtgccctctgggtgctaggcgttgggcggatggtaggatcgcggtagcatacggatccgagtcctgcgccgagtgagaggagaggctggcaggggctaagtgatg

SEQ ID NO: 175293 - DNA, 120 bp, Artificial Sequence
  ENSG00000109929_57 (sequence is synthesized)
gcccttttttttttcatcttttaaaataattacaaattattcagttgttttttaatgttctattttcatgtgttcatgtcttgccacatgtgcatttctttagtttttctatcaatctga

SEQ ID NO: 175294 - DNA, 120 bp, Artificial Sequence
  ENSG00000109929_58 (sequence is synthesized)
aagtctgctgtagatgagattgtgtctggcggaagattggagtgatcagagatgggtccttgcatttgttttctattaattattgaattcaaccttctaaaaaaaacttgagtagcttat

SEQ ID NO: 175295 - DNA, 120 bp, Artificial Sequence
  ENSG00000109929_59 (sequence is synthesized)
gtcattgctgaaagttaaaaacagatttttaaaatgcattattctgcttcttagaaactgtaactcttctggcatacaaccacccacttttctgtgcctgtatacttcattgtttacatt

SEQ ID NO: 175296 - DNA, 120 bp, Artificial Sequence
  ENSG00000109929_60 (sequence is synthesized)
aggaacaaaaaattatatactagagtaatgaattggctgggctttgaaaaatggatatgattatgagttaaaataaagggagagaggacattttaggttcttgaacccctatgatgaaag

SEQ ID NO: 175297 - DNA, 120 bp, Artificial Sequence
  ENSG00000109929_61 (sequence is synthesized)
atacagaggtaaaacttccaagacagtgggaggacattgagtaaacctgcctggttagagtagaaatacaggagtgatgaggttggaaagatccgaaaggggtggagtatggaataaatg

SEQ ID NO: 175298 - DNA, 120 bp, Artificial Sequence
  ENSG00000109929_62 (sequence is synthesized)
ctaaatttaaagtatttagtggaaagtatattttaagcagggagataatgtgtaaagatgggttttaggaagattaatatgaaggaagtgatgattcccagagatttaaataataaagat

SEQ ID NO: 175299 - DNA, 120 bp, Artificial Sequence
  ENSG00000109929_63 (sequence is synthesized)
gtcttaggagtatcctgtctcacaaatatctttatagtttaattaagaagtactttaggtagaacatttcaagtacttatgcgagggaaatgaggaaatgaccagattccaagaagccaa

SEQ ID NO: 175300 - DNA, 120 bp, Artificial Sequence
  ENSG00000109929_64 (sequence is synthesized)
gagagattagtttataatatactgaattagccagaacagatcatttataatgtttgagtctaggatcccattttgcactcagatggacatgtgaaaagtgaactctaatcccaggagctg

SEQ ID NO: 175301 - DNA, 120 bp, Artificial Sequence
  ENSG00000109929_65 (sequence is synthesized)
gtgaaaagagaaaaaaggttacacatttcagcaatgtatgattataaattctgttctctatttccaagaatttcctctacccatattaaatgtctaagtagccataatcataacaggtac

SEQ ID NO: 175302 - DNA, 120 bp, Artificial Sequence
  ENSG00000109929_66 (sequence is synthesized)
agggtgcattttgttcatattcttctttatgggtctaaggggctgtcttaaaattcgtctgttccggtaacaggtacacatggacttacagagggaacaatagacattagagactccaga

SEQ ID NO: 175303 - DNA, 120 bp, Artificial Sequence
  ENSG00000109929_67 (sequence is synthesized)
gaaacatccacaatttttaaaggtaagaaatgtttttacctattttctaacgattaaagtaaaaataacaatatgatatatttctgagatttttagattaagctgattatatgtaaccat

SEQ ID NO: 175304 - DNA, 120 bp, Artificial Sequence
  ENSG00000109929_68 (sequence is synthesized)
ccattaaataaaattttggagaccaaccacaaatgggttagatattttcatgagggttaatccctgctctccttcccttagtttaagcaaatctaactttttaataaaactataagtcta

SEQ ID NO: 175305 - DNA, 120 bp, Artificial Sequence
  ENSG00000109929_69 (sequence is synthesized)
gtatcgtatcttgctagatgcatattggagcatttttatgctgatattgatgagtaaataaatgcatacatttatgtaattattttaatatatgattttcacaaactgaaatgtgttttt

SEQ ID NO: 175306 - DNA, 120 bp, Artificial Sequence
  ENSG00000109929_70 (sequence is synthesized)
ttaccatgttttgttttttggctagataggggattcaaactcagtagttttaaagttgtttacaatcatttttaaatttcggttgtttgtacttgtcagtgactccaaggactgaacagc

SEQ ID NO: 175307 - DNA, 120 bp, Artificial Sequence
  ENSG00000109929_71 (sequence is synthesized)
aaaaagaaaaaatagagaggattggggatggaagttaattaggaaagaaatggttattccataaatagaagtttagaatgcagattttggaggaaggaaaaaaggtttcagaatttgaaa

SEQ ID NO: 175308 - DNA, 120 bp, Artificial Sequence
  ENSG00000109929_72 (sequence is synthesized)
tacttattgcattttctcagtacaaaaggaatgattttcttacatacctatttttatgtatttaaaattttaatagaaacagtttggaggtaagccccttcatgtaaaagagattttaaa

SEQ ID NO: 175309 - DNA, 120 bp, Artificial Sequence
  ENSG00000109929_73 (sequence is synthesized)
catggttgtattttcatgtcaaaaaaatcttgagattatgtaatatattagtcatagtactgtgcggatattcataagttatgtaaatgatacctaattgttagaccttcagattgttac

SEQ ID NO: 175310 - DNA, 120 bp, Artificial Sequence
  ENSG00000109929_74 (sequence is synthesized)
tcttttttgtattataaacagccctgtagtgagtaaacttttgtgaaattctgaaactttttcaagatacatttctaggatctagtatgtaaaaagcaagaatcatagtatttattgaag

SEQ ID NO: 175311 - DNA, 120 bp, Artificial Sequence
  ENSG00000109929_75 (sequence is synthesized)
gctgatatgtgtcagtgacagttctcagctcttcacaagaatcagtccattgttttcctacaattctatgagataggtactatcactgtgctccttttataggtgagtcaatgaggtgta

SEQ ID NO: 175312 - DNA, 120 bp, Artificial Sequence
  ENSG00000109929_76 (sequence is synthesized)
cagagagtttcagtaacgagttggtggtagatctgagacttggactcaggcttgcaggcaccagcacccccacactttaagtaagaagttagttattgccgggcgcggtggctcaatcct

SEQ ID NO: 175313 - DNA, 87 bp, Artificial Sequence
  ENSG00000109929_77 (sequence is synthesized)
gtaagaagttagttattgccgggcgcggtggctcaaaggaggatcacgaggtcaggagtatgagaccatcctggccaacatggtgaa

SEQ ID NO: 175314 - DNA, 120 bp, Artificial Sequence
  ENSG00000109943_0 (sequence is synthesized)
agaatctagaggaagttgacaaaggtgccacagcagcacagcacagtatgtggtggagagttctcagcttgctggcatggttccccttgcaagaggcctctctgactaaccacacagaaa

SEQ ID NO: 175315 - DNA, 120 bp, Artificial Sequence
  ENSG00000109943_1 (sequence is synthesized)
ccatcaccgtggaggaaggccagacgctcactctaaagtgtgtcacttctctgaggaagaactcctccctccagtggctgaccccctcagggttcaccatttttttaaatgagtatcctg

SEQ ID NO: 175316 - DNA, 120 bp, Artificial Sequence
  ENSG00000109943_2 (sequence is synthesized)
ctttaaaaaattccaaataccagcttcttcatcactcggccaatcagctctccatcactgtgcctaacgtaaccctgcaagatgaaggcgtgtacaagtgcttacattacagcgactctg

SEQ ID NO: 175317 - DNA, 120 bp, Artificial Sequence
  ENSG00000109943_3 (sequence is synthesized)
taagcacaaaggaagtgaaagtgattgtgctggcaactcctttcaagccaatcctggaagcttcagttatcagaaagcaaaatggagaagaacatgttgtactcatgtgctccaccatga

SEQ ID NO: 175318 - DNA, 120 bp, Artificial Sequence
  ENSG00000109943_4 (sequence is synthesized)
gaagcaagccccctccgcagataacctggctacttgggaatagcatggaagtgtccggtggaacgctccatgaatttgaaactgatgggaagaaatgtaatactaccagcactctcataa

SEQ ID NO: 175319 - DNA, 120 bp, Artificial Sequence
  ENSG00000109943_5 (sequence is synthesized)
tccacacttatggcaaaaattcaacggtggactgcattatccgacacagaggcctgcaagggagaaaactagtagcacccttccggtttgaagatttggttactgatgaagagacagctt

SEQ ID NO: 175320 - DNA, 120 bp, Artificial Sequence
  ENSG00000109943_6 (sequence is synthesized)
cagatgctctggagagaaactctctatcctctcaagacccacagcagcccaccagtactgtctcagtaacggaagattctagtacatcggagattgacaaggaagagaaagaacaaacca

SEQ ID NO: 175321 - DNA, 120 bp, Artificial Sequence
  ENSG00000109943_7 (sequence is synthesized)
ctcaagatcctgacttgaccaccgaagcaaatcctcagtatttaggactggcaagaaagaaaagtggcatcctgctgctcacgctggtgtccttcctcattttcatactcttcatcatag

SEQ ID NO: 175322 - DNA, 120 bp, Artificial Sequence
  ENSG00000109943_8 (sequence is synthesized)
tccagctcttcatcatgaagctgaggaaagcacatgtgatatggaagaaagaaaacgaagtttcagaacacacactagaaagttacagatcaaggtcaaataatgaagaaacatcatctg

SEQ ID NO: 175323 - DNA, 120 bp, Artificial Sequence
  ENSG00000109943_9 (sequence is synthesized)
aagagaaaaatggccaatcttcccaccctatgcgttgcatgaactacatcacaaagttgtactcagaagcaaaaacaaagaggaaggaaaatgtacaacattcaaaattagaagaaaagc

SEQ ID NO: 175324 - DNA, 120 bp, Artificial Sequence
  ENSG00000109943_10 (sequence is synthesized)
cacctcagtggaccagcctgggggaaggagcttaattgctgagacattaataatgacctcttagtgcaatgcaagatggtgtcctcggataatgatctgccccggagctagggcagcaac

SEQ ID NO: 175325 - DNA, 120 bp, Artificial Sequence
  ENSG00000109943_11 (sequence is synthesized)
atgaggaccaaaccatgcacataaagcttgtagtttaaaaaagaaaagcaaaaaaataattatgcctgacactacttcagagcaggaggattctacgaagccttggggatcagggtcagt

SEQ ID NO: 175326 - DNA, 120 bp, Artificial Sequence
  ENSG00000109943_12 (sequence is synthesized)
gtgagcagctaacatcctacctcaaatggaacaggattttttgatgctttgctctaatggaactgtttaaaaaatttttttttctttttaatattttcttctggtcacaaaataaagaaa

SEQ ID NO: 175327 - DNA, 87 bp, Artificial Sequence
  ENSG00000109943_13 (sequence is synthesized)
tttctttttaatattttcttctggtcacaaaataaagaaatttgggatgcaaagtacctaaagatctctgatcctaagaagttactt

SEQ ID NO: 175328 - DNA, 70 bp, Artificial Sequence
  ENSG00000109943_14 (sequence is synthesized)
agtggtgcgcacctgtagtctcagatacttgggaggctgagggtggagaatcgcttgaacctgggaggtg

SEQ ID NO: 175329 - DNA, 60 bp, Artificial Sequence
  ENSG00000109943_15 (sequence is synthesized)
gaagttacttccaagacagacttttaagatgtaaccagcacaaagcaatgtcagggagga

SEQ ID NO: 175330 - DNA, 120 bp, Artificial Sequence
  ENSG00000109943_16 (sequence is synthesized)
cttttaagatgtaaccagcacaaagcaatgtcagggaggagtgatacatgacaataaatgagtcagatgagcaagaaggccccagaacccatgccccaaggcacaaagaggagctcaggg

SEQ ID NO: 175331 - DNA, 120 bp, Artificial Sequence
  ENSG00000109943_17 (sequence is synthesized)
taggcccaaagattcgaattccttagattactaaatcacatgagcggaccttgtctgtcagataagatttttacctggaaattccatgaccaatacatgtgcaaaagaaaatgatgggtt

SEQ ID NO: 175332 - DNA, 120 bp, Artificial Sequence
  ENSG00000109943_18 (sequence is synthesized)
gaatttactgattattgacctaatggatggctttttaaaatgttttaataaaaagcagaatagatgtttgtttttctagtggttataccaagttatacttcctgttttcacgtgtgaaag

SEQ ID NO: 175333 - DNA, 120 bp, Artificial Sequence
  ENSG00000109943_19 (sequence is synthesized)
taacatgggacatgcctttcttttccgatcagtttatttaagctatacagcaaactttggcatttatgtggagcatttctcattgttggaatctgaataaaccaattacaaaataacata

SEQ ID NO: 175334 - DNA, 120 bp, Artificial Sequence
  ENSG00000109943_20 (sequence is synthesized)
aaaaaccagagcaggagccacagaacacacagttctggggtttctgcacaacctctacaagcaggtagccgctaaatatattctccaatctcttttactgagcacaatgtgggtaaaact

SEQ ID NO: 175335 - DNA, 120 bp, Artificial Sequence
  ENSG00000109944_0 (sequence is synthesized)
catttagatttctcgtgtgtttgtgaaatacctttccatttacccattatttaattgggttccttttcttcttgatttgtagcagttcctcgcgtattttagtagttttatttgtggcaa

SEQ ID NO: 175336 - DNA, 120 bp, Artificial Sequence
  ENSG00000109944_1 (sequence is synthesized)
agatctcctcccccgggtggcctctgccctccggcgctgggaagtccgggcggcgaggcagcctctcccggggcgttcgggctcctccggctctgccccgatgtcgttattacggccgtt

SEQ ID NO: 175337 - DNA, 120 bp, Artificial Sequence
  ENSG00000109944_2 (sequence is synthesized)
tgcagcctccgtgccagggccgggggtgcggttcgggacgcgggatcctaggtcgggtcctgccccgcccatgtggcgccggcgtctgtgttgtctgcggtctccagggcagcgccgggg

SEQ ID NO: 175338 - DNA, 120 bp, Artificial Sequence
  ENSG00000109944_3 (sequence is synthesized)
cgggcgggggcccgggcggcggcggcggcggcgcgggaggatgcggggcccgtccgggtcgcggccgcggaggagcgccgggcaggtaacgcttttgtgaaccacaactttaaatatcag

SEQ ID NO: 175339 - DNA, 120 bp, Artificial Sequence
  ENSG00000109944_4 (sequence is synthesized)
ccagctgctcctatcaacacgagtatcccctgttaattttttgcatttttcaagatgagtaaacgtaaactaattcccaagctctctattcaatctcctgtccttcataccaacttaaat

SEQ ID NO: 175340 - DNA, 120 bp, Artificial Sequence
  ENSG00000109944_5 (sequence is synthesized)
gtccagtccacacacccacctttgaagaaagaagacttacatcggatttcaaaagactccttggaatctgattcagaaagcctcacgcaagagattatgtgccattctgagtttgatgat

SEQ ID NO: 175341 - DNA, 120 bp, Artificial Sequence
  ENSG00000109944_6 (sequence is synthesized)
cgaatccggggcaacggtatggagcccgacagcttagacgaggaggaaagccctcgatggggaagcctgcacgagatggaagaggaagcaagtggaaaagcagctcagatggctcgcgag

SEQ ID NO: 175342 - DNA, 120 bp, Artificial Sequence
  ENSG00000109944_7 (sequence is synthesized)
caaaaccaccatacctgggaccagggcgccaataacaggcaacaaccaatagaagacaaatattcagacctccgctatgacccgaactggaagagtaagaaggaggaagggcagctgctg

SEQ ID NO: 175343 - DNA, 120 bp, Artificial Sequence
  ENSG00000109944_8 (sequence is synthesized)
tctgtggaagcgttgccggagtccacggacagctctttagaaaatctgcctttggctcccctctacccttcccaggagacgtcaatggaactctccgggggaaaaggcgagcagaaagag

SEQ ID NO: 175344 - DNA, 120 bp, Artificial Sequence
  ENSG00000109944_9 (sequence is synthesized)
agtccacagagtgcagcttctttacttggtagtgaatttttaagcccaaactatgagcatggtgcccgtcgcagcaagccgttttcagagctgagcgacagtgacctggaggagaagtcg

SEQ ID NO: 175345 - DNA, 120 bp, Artificial Sequence
  ENSG00000109944_10 (sequence is synthesized)
agcagcctttctccgtacgtgaagagctcaagttcacataacgaggttttcctgccgggatcacgtggccctcggcgaaggaaatccaaacaacattttgtggaaaaaaacaagctcact

SEQ ID NO: 175346 - DNA, 120 bp, Artificial Sequence
  ENSG00000109944_11 (sequence is synthesized)
ttgggattacccaccccgaaaacggactcttatcttcaacttcacaataaaaaaagaggggaatctcatccagaacagatctcctaccccgtcagagtaacagacaagacgtctattcag

SEQ ID NO: 175347 - DNA, 120 bp, Artificial Sequence
  ENSG00000109944_12 (sequence is synthesized)
aatgccaaggaaatggaaaatgctgccatcgatcctgaagataaatggcatcaaagagcacaacagctaaagaattaccaggaacactggtctcaatatgaaagtacaaaatcaagcaat

SEQ ID NO: 175348 - DNA, 120 bp, Artificial Sequence
  ENSG00000109944_13 (sequence is synthesized)
gtgaatgaccatcaaccttccagaagaccagccaagctcaagattcgaaagcagtgtaaacaccagaatggcctgaagtcttccacaacggaagaggtgactgccagtcaggggaaccag

SEQ ID NO: 175349 - DNA, 120 bp, Artificial Sequence
  ENSG00000109944_14 (sequence is synthesized)
aataaccctcccaggcagcaacaaaaccaaaataagcctcttgatacttcaacaaagcctgaatcgattgtgattatgcatgcctctaacaatgatgtacaagcctcaagggcacttaga

SEQ ID NO: 175350 - DNA, 120 bp, Artificial Sequence
  ENSG00000109944_15 (sequence is synthesized)
agccacaatctcaaagaaacctccaatacatttgctccaccaaaacaggcttttgacaaggtcttatctaaaaactctactggatgtgactctgggctgaatgttaataaagaaagagga

SEQ ID NO: 175351 - DNA, 120 bp, Artificial Sequence
  ENSG00000109944_16 (sequence is synthesized)
cacaaagaccaagaagagaaaagattttcatatcagcagctacacaccctttctgacatggatttgaacaaccttaatgaactttctaagagacacgtgctcctgagccagaaaggctct

SEQ ID NO: 175352 - DNA, 120 bp, Artificial Sequence
  ENSG00000109944_17 (sequence is synthesized)
cagtttgtttatcacataaatactcatggatcaaccaaaaataagaaacaactcaaacagccttatacagagacaaaatacaggaacttagaaatgttatggaaattccattcttcttct

SEQ ID NO: 175353 - DNA, 120 bp, Artificial Sequence
  ENSG00000109944_18 (sequence is synthesized)
gacagccagacggttagagcttctccagattcatggctcacccagataatggagcagcatcagcaagccttggtgcagctgaccgacgtgcagcccagtgaaggggccttatccagcgtc

SEQ ID NO: 175354 - DNA, 120 bp, Artificial Sequence
  ENSG00000109944_19 (sequence is synthesized)
acgcttccacctatactgtcaagggtagaaagtgaatcccaactcagttcagagagaagccaaagaaaccaagtgaaaattagccgtagcaattctgaaggctatctgtttcaactggaa

SEQ ID NO: 175355 - DNA, 120 bp, Artificial Sequence
  ENSG00000109944_20 (sequence is synthesized)
aagggaaaaaagcataagaaaagaagcagcagtaagaacaccaagctgaaaggttatcagaaaagagacgtgaagcttggaggcctcggacctgactttgagtccatcagagacaaaacg

SEQ ID NO: 175356 - DNA, 120 bp, Artificial Sequence
  ENSG00000109944_21 (sequence is synthesized)
caaaaattaatacagcaaaaggaatatgcaaaacaagtcaaggagtacaacatgaagacactatccattctatcaaaaccacaaacagaaaaaactcaaaagaaatctgctatccctcgg

SEQ ID NO: 175357 - DNA, 120 bp, Artificial Sequence
  ENSG00000109944_22 (sequence is synthesized)
cagaaggctttggaatacgctaagaccatccccaaacccaaaccatcaaatctgactcatcaagcatcaaaggaacaaaaaaatccaacctatgctgggaaagaagaaagtttacctgaa

SEQ ID NO: 175358 - DNA, 120 bp, Artificial Sequence
  ENSG00000109944_23 (sequence is synthesized)
atctcactgctggaaatactgcagaacagacacgaaagggaaaaacaggctgtggctgctttcaaagtccttcacatcgtatagacaacatttgataggaaggagaccaaaaatggtcca

SEQ ID NO: 175359 - DNA, 120 bp, Artificial Sequence
  ENSG00000109944_24 (sequence is synthesized)
ggaatgaacgtggagaaaagaaacgccaaccaccttctctgcgttgagagtaatggcctattattatcatctatctgccgtccatgtttgctttctgcaggatttaaaatatgaggccca

SEQ ID NO: 175360 - DNA, 120 bp, Artificial Sequence
  ENSG00000109944_25 (sequence is synthesized)
attggattatggtgccatattttactttctaggaagaaaattttttaaattatttattttcaaatcagttagaattggagctgaataataactagagaataaagcttttgttttatattg

SEQ ID NO: 175361 - DNA, 120 bp, Artificial Sequence
  ENSG00000109944_26 (sequence is synthesized)
tcattttgagagtaaattctctcccacgtgatggattcaaaaccttttggagccagtaaacttagttccatttcacaggtgcacataaagaccttcctgcccacctcctatggacatgtc

SEQ ID NO: 175362 - DNA, 120 bp, Artificial Sequence
  ENSG00000109944_27 (sequence is synthesized)
cagggatacaggacaagagtggggttagaatggtagagtccaccactcttactggaaagagcttgagatttatcacctgctaatgtgaggtcattttcaaatacaaaggagaggttatta

SEQ ID NO: 175363 - DNA, 120 bp, Artificial Sequence
  ENSG00000109944_28 (sequence is synthesized)
tgttaaatgtggttgcccttagacctattccaaatcccaactggtatttttttttaacatattctaacctgttctaacctctaagcattttctaatggaacaaaatagatgaggtggatg

SEQ ID NO: 175364 - DNA, 120 bp, Artificial Sequence
  ENSG00000109944_29 (sequence is synthesized)
gcattttctaatggaacaaaatagatgaggtggatgaacatttgtggcttttcttcagagactcccttttttgtcttaaagaattacgtctggtggcacgttggctcatgcctgtaatcc

SEQ ID NO: 175365 - DNA, 120 bp, Artificial Sequence
  ENSG00000109944_30 (sequence is synthesized)
ctcttccattttgagaatacagatggaccttgatgtaattatagccctggaatagggatggtcattactgagttgctgccacactgggtcgcccagagtcctaaggagtttcttactcct

SEQ ID NO: 175366 - DNA, 120 bp, Artificial Sequence
  ENSG00000109944_31 (sequence is synthesized)
tccatttgcagagtggcagaactcctcctttcatccccagctgaaacatctcttccttaggaaagcttccatactccaccccaagccccatgctaacctgagtcttcatggttattaaat

SEQ ID NO: 175367 - DNA, 120 bp, Artificial Sequence
  ENSG00000109944_32 (sequence is synthesized)
catttcttcccaggtcattctcatatcttaaaaagtagagaaagtagggctgagtgagtgaaagcgcctgttgccattgcattttcccaccatctgccactatgaggactcatcttggcc

SEQ ID NO: 175368 - DNA, 120 bp, Artificial Sequence
  ENSG00000109944_33 (sequence is synthesized)
ctaatctcaccccaacttctgcagtaaaatacctgggctggccagtgattgaactttcctctcaaacattagctgacctttactgagttctttgtctcaaatcaccattactagcacctt

SEQ ID NO: 175369 - DNA, 120 bp, Artificial Sequence
  ENSG00000109944_34 (sequence is synthesized)
tgcgcacttcagtcttttctcatagggcctacatgatttaacaagtaaaattggggacccaaagtagaatgttttcagtaagaaatgaaggcgcctaggaaggggactttttatgtcctg

SEQ ID NO: 175370 - DNA, 80 bp, Artificial Sequence
  ENSG00000109956_0 (sequence is synthesized)
gcctccctgcccgcgccctccctcccgcgcgctcccagccttcggccgccgcctcgctgagcccagaacgagccgggccg

SEQ ID NO: 175371 - DNA, 80 bp, Artificial Sequence
  ENSG00000109956_1 (sequence is synthesized)
gctatgaagtggcccccgggggcccggagcccgacagtccccggggagggagccgcacgcggcccagggcagcggtctag

SEQ ID NO: 175372 - DNA, 120 bp, Artificial Sequence
  ENSG00000109956_2 (sequence is synthesized)
gggcgccggggccggggcgtaggggccgttgcccgcgatggaccgcaccggagacgctccggactcgtcgccgcaggtgtccaccccccagggttcctgacccctgcccctggacagcga

SEQ ID NO: 175373 - DNA, 120 bp, Artificial Sequence
  ENSG00000109956_3 (sequence is synthesized)
ccccttctcagactccagttgggccggactctccaaacctgcttccgcaatgggtgggttgtgagtgctggtaagacctgctagccaacattcagctgctctgtcctctccatgcctggc

SEQ ID NO: 175374 - DNA, 120 bp, Artificial Sequence
  ENSG00000109956_4 (sequence is synthesized)
cggcccggcccatgcctgttcttttctcccctgtgctgccgccgcccgtggccgcccctctcctgaacttaccgccactcaggtaatgaggagccgtgggtgcagccagccttggagatg

SEQ ID NO: 175375 - DNA, 120 bp, Artificial Sequence
  ENSG00000109956_5 (sequence is synthesized)
ccgaagagacgggacatcctagcgatcgtcctcatcgtgctgccctggactctgctcatcactgtctggcaccagagcaccctcgcacccctgctcgcggtacataaggatgagggcagt

SEQ ID NO: 175376 - DNA, 120 bp, Artificial Sequence
  ENSG00000109956_6 (sequence is synthesized)
gacccccgacgcgaaacgccgcccggcgccgaccccagggagtactgcacgtctgaccgcgacatcgtggaggtggtgcgcaccgagtacgtgtacacgcggcccccgccatggtccgac

SEQ ID NO: 175377 - DNA, 120 bp, Artificial Sequence
  ENSG00000109956_7 (sequence is synthesized)
acgctgcccaccatccacgtggtgacgcccacctacagccgcccggtgcagaaggccgagctgacgcgcatggccaacacgctgctgcacgtgcccaacctccactggctggtggtggag

SEQ ID NO: 175378 - DNA, 120 bp, Artificial Sequence
  ENSG00000109956_8 (sequence is synthesized)
gatgcgccgcgccggacgccgctgaccgcgcgcctgctgcgcgacaccggcctcaactacacgcacctgcacgtggagacgccccgcaactacaagctgcgcggagacgcccgcgaccca

SEQ ID NO: 175379 - DNA, 120 bp, Artificial Sequence
  ENSG00000109956_9 (sequence is synthesized)
cgcatcccgcggggcaccatgcagcgcaacctggccctgcgctggctgcgcgagaccttcccgcgcaactccagccagcctggcgtggtctacttcgccgacgacgacaacacctacagc

SEQ ID NO: 175380 - DNA, 120 bp, Artificial Sequence
  ENSG00000109956_10 (sequence is synthesized)
ctggagctcttcgaagagatgcgcagcaccaggagggtgtccgtgtggcccgtcgccttcgtgggtggcctgcggtacgaggccccacgggtgaacggggcagggaaggtggtcggctgg

SEQ ID NO: 175381 - DNA, 120 bp, Artificial Sequence
  ENSG00000109956_11 (sequence is synthesized)
aagacggtgtttgacccccaccggccatttgcaatagacatggctggatttgccgtcaacctgcggctcattctgcagcgaagccaggcctacttcaagctgcgaggtgtgaagggaggc

SEQ ID NO: 175382 - DNA, 120 bp, Artificial Sequence
  ENSG00000109956_12 (sequence is synthesized)
taccaggaaagcagcctccttcgagaacttgtcaccctcaacgacctggagcccaaggcagccaactgcaccaagatcctggtgtggcacacacggacagagaagccagtgctggtgaat

SEQ ID NO: 175383 - DNA, 120 bp, Artificial Sequence
  ENSG00000109956_13 (sequence is synthesized)
gagggcaagaagggcttcactgacccctcggtggagatctgagcctcaggatgcaggagcctcctcctcagaccctgttcttggccttccatcctctccccacggctgatggtccctcca

SEQ ID NO: 175384 - DNA, 120 bp, Artificial Sequence
  ENSG00000109956_14 (sequence is synthesized)
aggccgactcctaaggaatcaccatcaccctcctttctattctgggggcttctgagagagcccagcctgatgccagaacaaaggacagagaatttaagcacagaaatcccagacctgttg

SEQ ID NO: 175385 - DNA, 120 bp, Artificial Sequence
  ENSG00000109956_15 (sequence is synthesized)
tgaccagggcccgagagacctgatggccagggtggggtgtccagcaccagccaagctggtgctccagcgcacctccccagagctccccgcactgacggggctgcaggagcaggtgcagtg

SEQ ID NO: 175386 - DNA, 120 bp, Artificial Sequence
  ENSG00000109956_16 (sequence is synthesized)
ggcgcccacactggccctgcagtgatgcagggcgggagggagataagaagaccccgcagtcaagtggagcatggccctccctggctccctgtccctgggctcagcacgaccacacaggac

SEQ ID NO: 175387 - DNA, 120 bp, Artificial Sequence
  ENSG00000109956_17 (sequence is synthesized)
acccagccagggaattctgaagaccagagagcagcccacgggcatcacgagcgctctgctcctctcctgggcccctgctcttcccgagagctgcccccaaatcagacatacctctgtggc

SEQ ID NO: 175388 - DNA, 120 bp, Artificial Sequence
  ENSG00000109956_18 (sequence is synthesized)
tctcctctggttcacgtttacagagcataaggctgtcttggatcccaacaggcacccagccctgcatggggggagcctgggcctaataggcaccccctgtacctcaggctgtggcgggag

SEQ ID NO: 175389 - DNA, 120 bp, Artificial Sequence
  ENSG00000109956_19 (sequence is synthesized)
cagagtccccccctccggcccctcttcctttaccccttctcctccagcagtggcaaaggggtaggctctagagccagcacaggtcactgcctgacctggactaagaaccccacggcccca

SEQ ID NO: 175390 - DNA, 120 bp, Artificial Sequence
  ENSG00000109956_20 (sequence is synthesized)
ctgtccacacactgcctccccaccgcccacctcggctgctaggcccctcgcctggactggactggggagggaaagcgccttttcctgcagctcttcagagccacagacctcagggtggag

SEQ ID NO: 175391 - DNA, 120 bp, Artificial Sequence
  ENSG00000109956_21 (sequence is synthesized)
tgagcccatggtgggcagtgggcaaggcggtgggtggtgggcaaggtgggacctcctgcagcctggaaagaggagggaggccaaggccattccctaactccctcctgcccctggtctgag

SEQ ID NO: 175392 - DNA, 120 bp, Artificial Sequence
  ENSG00000109956_22 (sequence is synthesized)
gaggagggactctggagtagcagaggggctgggaaagagggggcaggggctgctgggacactgagcaggagggaggcctgagcacactgctttggaaattattctaaacacaaaaaaggg

SEQ ID NO: 175393 - DNA, 120 bp, Artificial Sequence
  ENSG00000109956_23 (sequence is synthesized)
aaagaaaatgttatttctccctaagtcaggagcatgcagagctagcccacctcatgtccagctgtccactttccatcctggagaaagaacagtgtgcctcaaactcctgccctccccagg

SEQ ID NO: 175394 - DNA, 120 bp, Artificial Sequence
  ENSG00000109956_24 (sequence is synthesized)
cctctggggcccactggaaagggctctgaccccctggcccagccgggctctctagtggtgatccggctcattctcctgcaagttggaagcacaattttccccccaagtggaggaaaagga

SEQ ID NO: 175395 - DNA, 120 bp, Artificial Sequence
  ENSG00000109956_25 (sequence is synthesized)
aagggccccagcctactgaagaggtgtttattttttaactaacagcctcccaccccattaagactcaccaggagaggtctgagggccattcagaacccactcctgagtgggtgggtgggt

SEQ ID NO: 175396 - DNA, 120 bp, Artificial Sequence
  ENSG00000109956_26 (sequence is synthesized)
gggactcagtccagagacctaacattcagaatatagcattggttgcctattttgagatggatttaatctcccacagtattcatgagaccatctgatggaatcagatccctgagccacctt

SEQ ID NO: 175397 - DNA, 120 bp, Artificial Sequence
  ENSG00000109956_27 (sequence is synthesized)
gcaggacgttttccccaacctcttacaccctggatgtcactttggaaaccaagcccttggaagcaagtggggtggcatgggagagaagggaggaggtgggcacaggtggtgagcttatgt

SEQ ID NO: 175398 - DNA, 120 bp, Artificial Sequence
  ENSG00000109956_28 (sequence is synthesized)
gtgggcactctactgcctcacagaagccagccaagtgccaaggtcagcttggctggtctgaggccaccttcttagccaaaaacctagggttcattttcaggactttgataatgaacaaca

SEQ ID NO: 175399 - DNA, 120 bp, Artificial Sequence
  ENSG00000109956_29 (sequence is synthesized)
aaatggggacttctttgggcagatgctaggtcagttgttttcacctaatatcctcttttagctgcatgtatatttatttataattataaccctggtggactgcagccttcatctttattg

SEQ ID NO: 175400 - DNA, 120 bp, Artificial Sequence
  ENSG00000109956_30 (sequence is synthesized)
ggaatgagtttgttataaatcagaaatgggtccatgatgaccactgttttccaaacccagtctgttccctgctccctcgctggcaagccccaccacacaggagtgaggccaggggctagg

SEQ ID NO: 175401 - DNA, 120 bp, Artificial Sequence
  ENSG00000109956_31 (sequence is synthesized)
agttctaagaacagaggctggggtgagggtggcacccaggcagctgcatctggtctgttttaatttaactgtatttaatttgctttcaaaattaaaagtcaaatacagtttttaacagtc

SEQ ID NO: 175402 - DNA, 120 bp, Artificial Sequence
  ENSG00000109956_32 (sequence is synthesized)
agaggtgttcccagtatggccgatctccataggcatactggcccttaagtcaggactcagttccacgggcccttaagtcaggactcagttccatgggtgctggcccttaagtcaggactc

SEQ ID NO: 175403 - DNA, 120 bp, Artificial Sequence
  ENSG00000109956_33 (sequence is synthesized)
agttccacgggtgctggcccttaagtcaggactcagttccacggaggctgttttgttggcgctcttgcctcgcctctggccctaggtgcccactgagctacactttcctcacataggaca

SEQ ID NO: 175404 - DNA, 120 bp, Artificial Sequence
  ENSG00000109956_34 (sequence is synthesized)
tcccttcatcttcgcagagccctatggtaacctccagttgctaaaatggcaggatcgttgaaacttccagctcaacctccctattgtaaagacgaggtcaaggagggcaatcagcatgac

SEQ ID NO: 175405 - DNA, 120 bp, Artificial Sequence
  ENSG00000109956_35 (sequence is synthesized)
ccaggtccccgtggagcacctgccggacacgtccaggccgccaccctcccactcccatgtgctgccccagcttctgctccccatctgggaaccaccctccactctcccacagggaagtgc

SEQ ID NO: 175406 - DNA, 120 bp, Artificial Sequence
  ENSG00000109956_36 (sequence is synthesized)
ttgcttccctctgaggctctgagggcacccggggagggcagggcacagccttttgtgtctctacttgccgagacgcctgagatctgaggttggtcacagatatggtgcaagtgtcaggat

SEQ ID NO: 175407 - DNA, 120 bp, Artificial Sequence
  ENSG00000109956_37 (sequence is synthesized)
gggagttgtgaccacggcaggcctgggccctacactcacacacactgcccacgccgcgtcctgcctctccacgaagtcccccttgtgcctccacccatctcctcctccagcaccccattc

SEQ ID NO: 175408 - DNA, 120 bp, Artificial Sequence
  ENSG00000109956_38 (sequence is synthesized)
ttccccgtgcttgcctccatctcctgggctctcctgggtgtggccaagccactcctgcacctttgtgctgattcttctgcctgacccaaggtcctagaagccattctggggtccttgtta

SEQ ID NO: 175409 - DNA, 120 bp, Artificial Sequence
  ENSG00000109956_39 (sequence is synthesized)
gagacagcctgcgaccacagacaaacaccgccctcctccaagccccaggcagaagcagcaggctgcgagaggggaccagtgctggccaaccttgcagccccgtctcagactggggcccag

SEQ ID NO: 175410 - DNA, 120 bp, Artificial Sequence
  ENSG00000109956_40 (sequence is synthesized)
agctgggggcaggtgcagcccacccgctgcctggccccaagcccctgcccagcccaggcatcacatcccacgacctgccccctgccggccagctggcgttctccaggctgggggctctct

SEQ ID NO: 175411 - DNA, 120 bp, Artificial Sequence
  ENSG00000109956_41 (sequence is synthesized)
gtgttctgcttgataactgcctggtaattagctccacgattttgctactatgcttataatagcctccattaaagttatggggttttcaagccataatggcttccagagtaattaatgcac

SEQ ID NO: 175412 - DNA, 120 bp, Artificial Sequence
  ENSG00000109956_42 (sequence is synthesized)
aactgggtttattgctgagtttatttttagaggttttctccctctctccccctcccttttctctcatagatgttttgaccaaaaagactggatgggagcagaaggcaccccacggcaccc

SEQ ID NO: 175413 - DNA, 120 bp, Artificial Sequence
  ENSG00000109956_43 (sequence is synthesized)
ttgcccacaggccccatcctcccctctcttcccttcccgcccctccttcctgcttcagcctccaagcaggtgctagggccctgcagtgggggcagccattgcagaggagggtggctgtgg

SEQ ID NO: 175414 - DNA, 120 bp, Artificial Sequence
  ENSG00000109956_44 (sequence is synthesized)
tccaggccagaggaagcatttggcctgtgtgtgccccttacccaccctgcgcctggcccaggttcgagaggcttggaggcctgggacctcttatcctatgcccccgatgacagcatagag

SEQ ID NO: 175415 - DNA, 120 bp, Artificial Sequence
  ENSG00000109956_45 (sequence is synthesized)
ccagatggcctggactcaattccagctccaccatttcctaatggttgacctcaggcaagttactccccttctctggcctcgatgaacccacagggaccacagccatgcctactgcacagg

SEQ ID NO: 175416 - DNA, 120 bp, Artificial Sequence
  ENSG00000109956_46 (sequence is synthesized)
gctgctgtgacgttgcaggagcaggtgcatgtgaagagctgagcctcatcttcggacatctctcatgctatagggaagtttgtataaacaacagtgcaagcgggggctgagaggctgccc

SEQ ID NO: 175417 - DNA, 120 bp, Artificial Sequence
  ENSG00000109956_47 (sequence is synthesized)
caaaggaaaggcagtggcccacagggactgagctggcaggacactcatcttctctccttggctttctccatcctggtattagaacctgcaccaacaccaggagcacttgagaaagctcct

SEQ ID NO: 175418 - DNA, 120 bp, Artificial Sequence
  ENSG00000109956_48 (sequence is synthesized)
tcgagagtctctgagaacacagaagaaatcttcctggacatttctgaagccccagccaggcccagcctccccatccttcatcagatgtggcctaagatccaaacgtgtcttggccaaaga

SEQ ID NO: 175419 - DNA, 120 bp, Artificial Sequence
  ENSG00000109956_49 (sequence is synthesized)
accaaaacgtgtcttgacacgcagccccatgcagccccagcagtggcctgggtgtggagggacaggctaaatctgggggatgtggcatgaagtcacttgcatctcagaccacaagaccca

SEQ ID NO: 175420 - DNA, 120 bp, Artificial Sequence
  ENSG00000109956_50 (sequence is synthesized)
gcaggcatcccgtgtggggttctaggctctgtccctcactgggccagcaaagaggagtttacgggcggacacagacacacacggcctagaatgtccactaggggaactacgtgcctgtga

SEQ ID NO: 175421 - DNA, 120 bp, Artificial Sequence
  ENSG00000109956_51 (sequence is synthesized)
cgttgaaccccagtgggtcttccactccccggggaatgggtgggggagactctctggatggagtgggcctctgatggcggggtgtgggcaggggatgccggccgtcctgggaaaccacag

SEQ ID NO: 175422 - DNA, 120 bp, Artificial Sequence
  ENSG00000109956_52 (sequence is synthesized)
tgctccttaatggaggggatgccggccgtcccgggaaaccacagtgctccttaatggaagacaaatcctggtcttccacaggcgtcagaactatttggagagaggacccggtgaggagag

SEQ ID NO: 175423 - DNA, 120 bp, Artificial Sequence
  ENSG00000109956_53 (sequence is synthesized)
gaaaacacgctattttggaaactcaggggctaaaaaccctcctcggccatagcactcgactctgcctgaaatggtgagcacacgtgagctggggcaggagcaggcagcatggcccccagg

SEQ ID NO: 175424 - DNA, 120 bp, Artificial Sequence
  ENSG00000109956_54 (sequence is synthesized)
tgaggtactgtccgtatccaacactgggcactgggacgggtgggcacagtgaggctggctgggctgcccgaggctgcctgccctccccaccacccccacgggtccctgctgcatcatgca

SEQ ID NO: 175425 - DNA, 120 bp, Artificial Sequence
  ENSG00000109956_55 (sequence is synthesized)
agaacggttcccagagatgctaccagtggaccctctgcaggactgaggaatcccagtggctcattctcctcacttgggccccctgctgttctcattttggaggactgtctcccctcaatg

SEQ ID NO: 175426 - DNA, 120 bp, Artificial Sequence
  ENSG00000109956_56 (sequence is synthesized)
tggcagcccctgcggggacccctcttcttgctgctgcccagcccagcacctggtgctctgtcctgcacagagcggtgctccacaaggatgtcctattgacacggaagaggaaggcactct

SEQ ID NO: 175427 - DNA, 120 bp, Artificial Sequence
  ENSG00000109956_57 (sequence is synthesized)
cgtacttccccccagggaccatcccagaaacatctcttctttgtcctcaaaagactgtcaccaaaatgcaaattgaaaccacagtgagatactatctcacaccagtcagaatggctatta

SEQ ID NO: 175428 - DNA, 120 bp, Artificial Sequence
  ENSG00000109956_58 (sequence is synthesized)
atactatctcacaccagtcagaatggctattactaaaaagccaaaaaatattagatgctgatgaggctgcagagaaaaggcaacacgtatactctgttggtgggaatgtaaattagttca

SEQ ID NO: 175429 - DNA, 120 bp, Artificial Sequence
  ENSG00000109956_59 (sequence is synthesized)
agaacttaaaacagagctgccattctagccagcagtcccattactgggtatgtatccaaaggaaaataaagtgtttcacaaaaaaaacacctgcacctgtatgttcatcgcagcactatt

SEQ ID NO: 175430 - DNA, 120 bp, Artificial Sequence
  ENSG00000109956_60 (sequence is synthesized)
cccaatagcaaaggcatggaatcaatctaggtgcccatcagtggtgaactgggtaaagaaaacatggtgcatatacagcaaggaatactacacagccataaaaaaggacaaaatcatggc

SEQ ID NO: 175431 - DNA, 120 bp, Artificial Sequence
  ENSG00000109956_61 (sequence is synthesized)
ctttgcagcagcctggatgcagctggaggccattatcctgagcaaattgacacaggaacagaaaaccaaacacgatgcattctcacttatgagtgagagctaaacactgggtactcatga

SEQ ID NO: 175432 - DNA, 120 bp, Artificial Sequence
  ENSG00000109956_62 (sequence is synthesized)
ctgtaaacatgagaagaatacacactgaggactctcaaaggaagaacggctgaaaaacgccctgttgggtactatgctcatacctgggcagcgggattcatcatactccagatctcagca

SEQ ID NO: 175433 - DNA, 120 bp, Artificial Sequence
  ENSG00000109956_63 (sequence is synthesized)
tcacatgcaatatgacccataacaaacctgcacatgtgcccccaaatctaaaatgttgaaattatttttaatataataattcgtggtccatatatggttaaaaaaaagaaaaaagagaga

SEQ ID NO: 175434 - DNA, 120 bp, Artificial Sequence
  ENSG00000109956_64 (sequence is synthesized)
gagaaaataaaacctctcacccctttatccaggctttgataagtagctggcattttagggctgcacgggagttaccctgtttaattctgagaatgaccttatgaggtagggatccacagt

SEQ ID NO: 175435 - DNA, 120 bp, Artificial Sequence
  ENSG00000109956_65 (sequence is synthesized)
gccccattttatagatgggaaaactgtggcatggagaacggaaatgacttggcaaaggtcttacagcctgtgggtggcacagttgggatttaaacctggtgtctctgcagtctgtgcttc

SEQ ID NO: 175436 - DNA, 120 bp, Artificial Sequence
  ENSG00000109956_66 (sequence is synthesized)
tgacccctgcaccctactgactttcataaatggagcagagccatggccctgtgcctgtgggaaggacagagcccattccactctaacaggcagacaaaagaggtcctcaggtgatggaca

SEQ ID NO: 175437 - DNA, 120 bp, Artificial Sequence
  ENSG00000109956_67 (sequence is synthesized)
gttgaggctccattgtggaacccccgatgctgtgtgtcccagagcagggcccagccttgctggcatccattcctatacctgggtctctggctatccgcttctgctctctcttgcaggtgt

SEQ ID NO: 175438 - DNA, 120 bp, Artificial Sequence
  ENSG00000109956_68 (sequence is synthesized)
ccaccccccagggttcctgacccctgcccctggacagcgaccccttctcagactccagttgggccggactctccaaacctgcttccgcaatgggtaatgaggagccgtgggtgcagccag

SEQ ID NO: 175439 - DNA, 120 bp, Artificial Sequence
  ENSG00000109956_69 (sequence is synthesized)
ggccacctgaaagtatccaggcattaactttcacccacgcagctgggtccttctgccaccagactcttcagagggtgtcaccttccaaacatcttgctgatttttctgctggcagtgacg

SEQ ID NO: 175440 - DNA, 120 bp, Artificial Sequence
  ENSG00000109956_70 (sequence is synthesized)
ctgatgagaatggagaggaggagaggaacgggctcaggaggaggaggaatccgagagagagcctgactgaggcagagaaagaggcagtgagacaagagacaaaggcacggaggcgcactg

SEQ ID NO: 175441 - DNA, 120 bp, Artificial Sequence
  ENSG00000109956_71 (sequence is synthesized)
gtgggagtctttagtgtggttttggtaggaaggaaagtggttttcataggaagggaagggcgaagcactgtcggcagctgagctggcccagaattgcatagtctgaagaaagtcagtggg

SEQ ID NO: 175442 - DNA, 120 bp, Artificial Sequence
  ENSG00000109956_72 (sequence is synthesized)
tttaggatatgggtgtggtttctaattgtctggtatcgccctggggtggtttagggcagcggaagattggcttgggtgggagagctccataaaggtggtagtgggtatgagctctagatc

SEQ ID NO: 175443 - DNA, 120 bp, Artificial Sequence
  ENSG00000109956_73 (sequence is synthesized)
aggtagtttgcatatgaaaagtgtgtttgcaggcaaggtgtgtactgtcactaggaattagctagtcccgggaggggcagtccctccccatatctgcaagtcccccaagatgtcgacgca

SEQ ID NO: 175444 - DNA, 120 bp, Artificial Sequence
  ENSG00000109956_74 (sequence is synthesized)
tcttaaaatacagaaaaacttaaaaaacaaacatcattaatacacacacatacacagaaagacacgcatgtacaacttcacatgccatttcatgacatgcaaggaaagcgaccattctga

SEQ ID NO: 175445 - DNA, 120 bp, Artificial Sequence
  ENSG00000109956_75 (sequence is synthesized)
agtggatggtgggggaggaataggatttctggcctgcagtgtgttttaaaccctttcacagagagtatattgtttgcctctcttcttttcctgtgtaggaaaccctgatctagtgctacc

SEQ ID NO: 175446 - DNA, 120 bp, Artificial Sequence
  ENSG00000109956_76 (sequence is synthesized)
tggtggaaatagggctggagagaggaaaagtcccgtgaagaactagtggaagaactaggggtagaactcctttcccctggctctgggtcctgggtcgcctttccctctcactcccaaacc

SEQ ID NO: 175447 - DNA, 120 bp, Artificial Sequence
  ENSG00000109956_77 (sequence is synthesized)
tgccacgcaccccacagctggctgccccagctcttcagcactttgtctcgtgcttttctgccccctcccccacttacatgcacaggctcacgtggggtcaggcagctgttcgtttgcagc

SEQ ID NO: 175448 - DNA, 120 bp, Artificial Sequence
  ENSG00000109956_78 (sequence is synthesized)
gtgcatgataccacctggcagtgtgataaacaagaaggcagcaccaagcccatgcagagagaggtggtgagtgcctgtaaccccaagatgcaggcagtgtccaaaaatcacagcctgaag

SEQ ID NO: 175449 - DNA, 120 bp, Artificial Sequence
  ENSG00000109956_79 (sequence is synthesized)
tcgtgctgctcctcacagtcaaataccaagtcctgcaaacccatagctgttcctgaagcttccatgaggaagggccaagctcaacattgcggcagcccactgcccgtggctggcacttgg

SEQ ID NO: 175450 - DNA, 120 bp, Artificial Sequence
  ENSG00000109956_80 (sequence is synthesized)
cgcctgtcttcctgacatcatcctctcctcccgaccctagggcctcttctctgtgcttgtcagttcagaatcattgttatcttgcaaatacatcactccagaggggttaaaactactata

SEQ ID NO: 175451 - DNA, 120 bp, Artificial Sequence
  ENSG00000109956_81 (sequence is synthesized)
tataaagcgacatgatatcgtgtcgattgcgttcttggcagagctccagcgctggagacgtcaggctgtttgctaagcactgatggtgctgcctgaggctggggacttggcattctgtct

SEQ ID NO: 175452 - DNA, 120 bp, Artificial Sequence
  ENSG00000109956_82 (sequence is synthesized)
ccccagagcatgccaagagcaagcgaatgaaagctgcagctgagtgaagttagggtcaccaggaggcctttaggacccaaaattgcagacgccctgaagccaatgggaagggcgaagccc

SEQ ID NO: 175453 - DNA, 120 bp, Artificial Sequence
  ENSG00000109956_83 (sequence is synthesized)
aggagcacacgcagtagccgtgccctaatgtatggggactgtccaagggcacaggtcctctgcggccttgggatgatttgggtggcagagaggtggacaaagtggctccaaacttcctct

SEQ ID NO: 175454 - DNA, 120 bp, Artificial Sequence
  ENSG00000109956_84 (sequence is synthesized)
caaggcctcagtttccaaaacttgactgcccataggatgaattaagtcctctgtctaggtcagaaccctagacacccatcccgctttcttccacgttgctcttctcacagtttgacccca

SEQ ID NO: 175455 - DNA, 120 bp, Artificial Sequence
  ENSG00000109956_85 (sequence is synthesized)
gactcctctaagcagccccctctgagcgactgcgtgtgtgctggtttcctcccccgaccctcagcaattgctgtgtgcctggtgccatttgcccatgagaactcctgaagagccacgagc

SEQ ID NO: 175456 - DNA, 120 bp, Artificial Sequence
  ENSG00000109956_86 (sequence is synthesized)
aggcctcctgggtccgttcagatgagctccacgctagcgtgccacacaccccacatgctgccgatgacagtggccggagggaggcagcagaagagctgatgcccggggtcctcccctttg

SEQ ID NO: 175457 - DNA, 120 bp, Artificial Sequence
  ENSG00000109956_87 (sequence is synthesized)
gtgtgacttgctggttctgtccccaccgattgcctgaagccagaaggaagcagagttggccactgcccttccgcaagagaggaaactgtgcctggcggtgctctcagcccttgtggactc

SEQ ID NO: 175458 - DNA, 120 bp, Artificial Sequence
  ENSG00000109956_88 (sequence is synthesized)
attaatccacataataactcgataagttcgatgctattattagctccattttacagttgctgaaattgaggcgccagaagctaagcagcttgctcaagggcacagggttcgtaacggcag

SEQ ID NO: 175459 - DNA, 120 bp, Artificial Sequence
  ENSG00000109956_89 (sequence is synthesized)
aagtgggcagggtctcagcccaggcaccgggatttcttacctttaccacccgacggtaagctaggacaggagggccacaccgtcattggtgcatgagcccttccgatggaaggacagaat

SEQ ID NO: 175460 - DNA, 120 bp, Artificial Sequence
  ENSG00000109956_90 (sequence is synthesized)
ttggagagaagggacgcatggaaaacaagaatcccaatggccctgatttctcctcttgctaggactgctagatctacatataccttggcaactatgggcaaaacccacgagaataaaatg

SEQ ID NO: 175461 - DNA, 120 bp, Artificial Sequence
  ENSG00000109956_91 (sequence is synthesized)
cggtgaaataggaagttctgcaccgagattcagagaatgccttacgtaaggccaggagggaagaggccccgcttgactggagggcttgagaactccgggagctgcctcaggctcctgcgg

SEQ ID NO: 175462 - DNA, 120 bp, Artificial Sequence
  ENSG00000109956_92 (sequence is synthesized)
gcccacagtgggccctggttgctgccgcagtgctgcggccctggggctttgtggcgtccacaccacagcggggcagtgccacgtgctctgctagcccagccctgcacagggcagtgtggc

SEQ ID NO: 175463 - DNA, 120 bp, Artificial Sequence
  ENSG00000109956_93 (sequence is synthesized)
cagctccctccagatgagtagggctagggaggggagggtcgggacgccttttcataggaaagtcagcacattcaggaactgaggatgcaatcttggaatatgggcaactgcgctcaaata

SEQ ID NO: 175464 - DNA, 120 bp, Artificial Sequence
  ENSG00000109956_94 (sequence is synthesized)
gctagagggctgcaaaggtgggaaggaagaggttatgtctgtgtcatcagagctaggaccctcccagagaggattccagggctgcagatttcaaccttagagctaacaggtcaggcaagg

SEQ ID NO: 175465 - DNA, 120 bp, Artificial Sequence
  ENSG00000109956_95 (sequence is synthesized)
cgggggtctgagcagcccctgcagcgggggaggaggagggtgccctggcagggtgggtggcgtcccgctctgaatccagggccgtagccggcgctctcctcccacatcgccggtctcccg

SEQ ID NO: 175466 - DNA, 120 bp, Artificial Sequence
  ENSG00000109971_0 (sequence is synthesized)
cagcaaccatgtccaagggacctgcagttggtattgatcttggcaccacctactcttgtgtgggtgttttccagcacggaaaagtcgagataattgccaatgatcagggaaaccgaacca

SEQ ID NO: 175467 - DNA, 120 bp, Artificial Sequence
  ENSG00000109971_1 (sequence is synthesized)
ctccaagctatgtcgcctttacggacactgaacggttgatcggtgatgccgcaaagaatcaagttgcaatgaaccccaccaacacagtttttgatgccaaacgtctgattggacgcagat

SEQ ID NO: 175468 - DNA, 120 bp, Artificial Sequence
  ENSG00000109971_2 (sequence is synthesized)
ttgatgatgctgttgtccagtctgatatgaaacattggccctttatggtggtgaatgatgctggcaggcccaaggtccaagtagaatacaagggagagaccaaaagcttctatccagagg

SEQ ID NO: 175469 - DNA, 120 bp, Artificial Sequence
  ENSG00000109971_3 (sequence is synthesized)
aggtgtcttctatggttctgacaaagatgaaggaaattgcagaagcctaccttgggaagactgttaccaatgctgtggtcacagtgccagcttactttaatgactctcagcgtcaggcta

SEQ ID NO: 175470 - DNA, 120 bp, Artificial Sequence
  ENSG00000109971_4 (sequence is synthesized)
ccaaagatgctggaactattgctggtctcaatgtacttagaattattaatgagccaactgctgctgctattgcttacggcttagacaaaaaggttggagcagaaagaaacgtgctcatct

SEQ ID NO: 175471 - DNA, 120 bp, Artificial Sequence
  ENSG00000109971_5 (sequence is synthesized)
ttgacctgggaggtggcacttttgatgtgtcaatcctcactattgaggatggaatctttgaggtcaagtctacagctggagacacccacttgggtggagaagattttgacaaccgaatgg

SEQ ID NO: 175472 - DNA, 120 bp, Artificial Sequence
  ENSG00000109971_6 (sequence is synthesized)
tcaaccattttattgctgagtttaagcgcaagcataagaaggacatcagtgagaacaagagagctgtaagacgcctccgtactgcttgtgaacgtgctaagcgtaccctctcttccagca

SEQ ID NO: 175473 - DNA, 120 bp, Artificial Sequence
  ENSG00000109971_7 (sequence is synthesized)
cccaggccagtattgagatcgattctctctatgaaggaatcgacttctatacctccattacccgtgcccgatttgaagaactgaatgctgacctgttccgtggcaccctggacccagtag

SEQ ID NO: 175474 - DNA, 120 bp, Artificial Sequence
  ENSG00000109971_8 (sequence is synthesized)
agaaagcccttcgagatgccaaactagacaagtcacagattcatgatattgtcctggttggtggttctactcgtatccccaagattcagaagcttctccaagacttcttcaatggaaaag

SEQ ID NO: 175475 - DNA, 120 bp, Artificial Sequence
  ENSG00000109971_9 (sequence is synthesized)
gaagctgttgcttatggtgcagctgtccaggcagccatcttgtctggagacaagtctgagaatgttcaagatttgctgctcttggatgtcactcctctttcccttggtattgaaactgct

SEQ ID NO: 175476 - DNA, 120 bp, Artificial Sequence
  ENSG00000109971_10 (sequence is synthesized)
ggtggagtcatgactgtcctcatcaagcgtaataccaccattcctaccaagcagacacagaccttcactacctattctgacaaccagcctggtgtgcttattcaggtttatgaaggcgag

SEQ ID NO: 175477 - DNA, 120 bp, Artificial Sequence
  ENSG00000109971_11 (sequence is synthesized)
cgtgccatgacaaaggataacaacctgcttggcaagtttgaactcacaggcatacctcctgcaccccgaggtgttcctcagattgaagtcacttttgacattgatgccaatggtatactc

SEQ ID NO: 175478 - DNA, 120 bp, Artificial Sequence
  ENSG00000109971_12 (sequence is synthesized)
aatgtctctgctgtggacaagagtacgggaaaagagaacaagattactatcactaatgacaagggccgtttgagcaaggaagacattgaacgtatggtccaggaagctgagaagtacaaa

SEQ ID NO: 175479 - DNA, 120 bp, Artificial Sequence
  ENSG00000109971_13 (sequence is synthesized)
gctgaagatgagaagcagagggacaaggtgtcatccaagaattcacttgagtcctatgccttcaacatgaaagcaactgttgaagatgagaaacttcaaggcaagattaacgatgaggac

SEQ ID NO: 175480 - DNA, 120 bp, Artificial Sequence
  ENSG00000109971_14 (sequence is synthesized)
aaacagaagattctggacaagtgtaatgaaattatcaactggcttgataagaatcagactgctgagaaggaagaatttgaacatcaacagaaagagctggagaaagtttgcaaccccatc

SEQ ID NO: 175481 - DNA, 120 bp, Artificial Sequence
  ENSG00000109971_15 (sequence is synthesized)
atcaccaagctgtaccagagtgcaggaggcatgccaggaggaatgcctgggggatttcctggtggtggagctcctccctctggtggtgcttcctcagggcccaccattgaagaggttgat

SEQ ID NO: 175482 - DNA, 120 bp, Artificial Sequence
  ENSG00000109971_16 (sequence is synthesized)
taagccaaccaagtgtagatgtagcattgttccacacatttaaaacatttgaaggacctaaattcgtagcaaattctgtggcagttttaaaaagttaagctgctatagtaagttactggg

SEQ ID NO: 175483 - DNA, 120 bp, Artificial Sequence
  ENSG00000109971_17 (sequence is synthesized)
cattctcaatacttgaatatggaacatatgcacaggggaaggaaataacattgcactttataaacactgtattgtaagtggaaaatgcaatgtcttaaataaaactatttaaaattggca

SEQ ID NO: 175484 - DNA, 120 bp, Artificial Sequence
  ENSG00000109971_18 (sequence is synthesized)
ccaaaaccattcgtagtttccaccagaaagtcttatgttggccagttccttccttggatgtttgagcgaccattcttccttagcaggaccctagcactgtcacagacctggagtccattg

SEQ ID NO: 175485 - DNA, 120 bp, Artificial Sequence
  ENSG00000109971_19 (sequence is synthesized)
ctaaaggcaggcaggcccaaggtgactcgctgtgatgagtgattgttaaacattcgtagtttccaccaaaagcttggctaatgatggcaacaccttccttggatgtctgagcgagtgata

SEQ ID NO: 175486 - DNA, 120 bp, Artificial Sequence
  ENSG00000109971_20 (sequence is synthesized)
agcaggggcgggccccttctggaaggttctaagatagggtataagaggcagggtggcgggcggaaaccggtctcattgaactcgcctgcagctcttgggttttttgtggcttccttcgtt

SEQ ID NO: 175487 - DNA, 120 bp, Artificial Sequence
  ENSG00000109971_21 (sequence is synthesized)
gggagacgcccggcggccgcgtggcgggggagggttgctgcatcggtttgcctggcgcgcggggaagtggagccagcgttttctttcacccagttccctgcttagtccagtcccaccgtg

SEQ ID NO: 175488 - DNA, 120 bp, Artificial Sequence
  ENSG00000109971_22 (sequence is synthesized)
gttcttcagagctgttcttggcgtgcttccagtatgggggtacattccggagtagttaaaagcccgttgactcccgggggcactggcacctggcgagggaggggaacagacagtgctcag

SEQ ID NO: 175489 - DNA, 120 bp, Artificial Sequence
  ENSG00000109971_23 (sequence is synthesized)
acaccagaaaccagtgaatcttgacaattacacagtaatttacattttggtggggggggtgctccagctgttctttcaccagcattaatccatttgctggagtttgcatatatgtaagta

SEQ ID NO: 175490 - DNA, 120 bp, Artificial Sequence
  ENSG00000109971_24 (sequence is synthesized)
gaaaagagaacaagattactatcactaatgacaagggtaaggaggcactgtcatctggtcttgacagggataatggtatttcaattgagttactggtgcctaagggcgtctagctaagag

SEQ ID NO: 175491 - DNA, 120 bp, Artificial Sequence
  ENSG00000109971_25 (sequence is synthesized)
cattggccctttatggtggtgaatgatgctggcagaccttcactacctattctgacaaccagcctggtgtgcttattcaggtttatgaaggcgagcgtgccatgacaaaggataacaacc

SEQ ID NO: 175492 - DNA, 120 bp, Artificial Sequence
  ENSG00000109971_26 (sequence is synthesized)
atcgtgaggcggagcgcggtggggtgggtgcggaagggggcgaggcccgaggagtggagccgggcttgtgattgggtcttgtaagggcagccgggcgtctattggccggggaagccgtaa

SEQ ID NO: 175493 - DNA, 120 bp, Artificial Sequence
  ENSG00000109971_27 (sequence is synthesized)
ttccgtcttctcctgcccggctcccgcgcccaaacccctcccttcaggccccgcgcgattccgcccccagttctgtgccggccaagatcccggctagcgccgctatcattggttagttcc

SEQ ID NO: 175494 - DNA, 120 bp, Artificial Sequence
  ENSG00000109971_28 (sequence is synthesized)
aagtttgcccgcccctcttcctcctcctttttccgccccctccctcccgcggaagctgggggcgcatgcgtagaggtggacgctcccctcccccgcccggggtaactgaggactcccgcg

SEQ ID NO: 175495 - DNA, 120 bp, Artificial Sequence
  ENSG00000109971_29 (sequence is synthesized)
accatttaaacctgtttattttataaacaacggggaaatgtagggcttgggctagttggggaaggactgagccaagaagccgaatctgttctagacggaggtgggaaggggcctaacggt

SEQ ID NO: 175496 - DNA, 120 bp, Artificial Sequence
  ENSG00000109971_30 (sequence is synthesized)
cagggctcagagaagcggtttcgccttcttttccgcggagggatccagacacgaccgcgtcctgaggcggttctgaaaagccgggccccttaaacctctgcgtcgggggctgcctcccga

SEQ ID NO: 175497 - DNA, 120 bp, Artificial Sequence
  ENSG00000109971_31 (sequence is synthesized)
cagttgccgtagggaaatgcaggtgctgggaggcctgccgagctaacccgccccaccccgcggcggcctggcggctccctccaatcccaatcctggggggccgtgagcgagcagccctag

SEQ ID NO: 175498 - DNA, 120 bp, Artificial Sequence
  ENSG00000109971_32 (sequence is synthesized)
tggcaccctgaagccggaaccttcgccccagcccctcggggtcagcccttgtccaaagccacgctatgaaatacagattcgcgaaacccggggcacttagaggcccgtctggaacacgaa

SEQ ID NO: 175499 - DNA, 120 bp, Artificial Sequence
  ENSG00000109971_33 (sequence is synthesized)
gtgcagcctccacacaggcctgttgggcttgctgaggcttgggggttctgagaatctcgtcgaggcgagtgtgcggctccttctaccggcttaaagggcctcagttttcggtgggatggc

SEQ ID NO: 175500 - DNA, 120 bp, Artificial Sequence
  ENSG00000109971_34 (sequence is synthesized)
agtttatgaaacgtgaggagggaactttttgattttagaaaaactgagctgagagacttgttatcaagtctgttataaaacaggttgtagaaacctttcaggctgaaatctggataacgt

SEQ ID NO: 175501 - DNA, 120 bp, Artificial Sequence
  ENSG00000109971_35 (sequence is synthesized)
aggaggttgaagtttgaacctttgctacctatatggtagttgaattcacctacctatgaactgttaggtatttgagtaatcatggacttgagttttatcagaagagctatgaaattgaaa

SEQ ID NO: 175502 - DNA, 120 bp, Artificial Sequence
  ENSG00000109971_36 (sequence is synthesized)
gtctgggagcgtgcagcctccacacaggcctgttgggcttgctgaggcttgggggttctgagaatctcgtcgaggcgagtgtgcggctccttctaccggcttaaagggcctcagttttcg

SEQ ID NO: 175503 - DNA, 120 bp, Artificial Sequence
  ENSG00000109991_0 (sequence is synthesized)
ggcctcttggaagccagagtatcaagagcagagaatctcactaggattgcatggcttaaagggacaggctccccattcctccaacccctctaagctgccccctccaggtcgtgatctcgt

SEQ ID NO: 175504 - DNA, 120 bp, Artificial Sequence
  ENSG00000109991_1 (sequence is synthesized)
ctccctgtcctgtaggacctccctctcctgaggccaccactgggcccccttctgagtgtcccctgagcactctctcagcatgaactgcatatccgacttcttcacctatgagaccaccaa

SEQ ID NO: 175505 - DNA, 120 bp, Artificial Sequence
  ENSG00000109991_2 (sequence is synthesized)
gtcggtggttgtgaagagctggaccatcgggatcatcaaccgagtagttcagcttctgatcatctcctactttgtagggtgggttttcttgcacgagaaggcttaccaggtacgggacac

SEQ ID NO: 175506 - DNA, 120 bp, Artificial Sequence
  ENSG00000109991_3 (sequence is synthesized)
agccattgagtcctcggtggtaaccaaggtgaagggctccggactctacgccaacagagtcatggatgtgtctgattacgtgacgccacctcagggcacctcggtctttgtcatcatcac

SEQ ID NO: 175507 - DNA, 120 bp, Artificial Sequence
  ENSG00000109991_4 (sequence is synthesized)
caagatgattgttactgaaaatcagatgcaaggattctgcccagagagtgaggagaaataccgctgtgtatcagacagccagtgcgggcctgagcgcttgccaggtggggggatcctcac

SEQ ID NO: 175508 - DNA, 120 bp, Artificial Sequence
  ENSG00000109991_5 (sequence is synthesized)
tggccgctgcgtgaactacagctctgtgctccggacctgtgagatccagggctggtgccccacggaggtggacacagtggaaacgcccatcatgatggaagctgagaacttcactatttt

SEQ ID NO: 175509 - DNA, 120 bp, Artificial Sequence
  ENSG00000109991_6 (sequence is synthesized)
catcaagaacagcatccgtttccccctcttcaactttgagaagggaaacctccttcccaacctgacagccagggacatgaagacctgccgcttccacccggacaaggaccctttctgccc

SEQ ID NO: 175510 - DNA, 120 bp, Artificial Sequence
  ENSG00000109991_7 (sequence is synthesized)
catcttgcgggtaggggacgtggtcaagtttgcggggcaggattttgccaaactggcgcgcacggggggagttctgggcattaagatcggctgggtgtgcgacttggacaaggcctggga

SEQ ID NO: 175511 - DNA, 120 bp, Artificial Sequence
  ENSG00000109991_8 (sequence is synthesized)
ccagtgcatccccaaatactccttcacccggctcgacagcgtttctgagaaaagcagcgtgtccccaggctacaacttcaggtttgccaagtactacaaaatggaaaatggcagtgagta

SEQ ID NO: 175512 - DNA, 120 bp, Artificial Sequence
  ENSG00000109991_9 (sequence is synthesized)
ccgcaccctcctgaaggcttttggcatccgcttcgacgtgctggtatacgggaatgctggcaagttcaacatcatccccaccatcatcagctctgtggcggcctttacttctgtgggagt

SEQ ID NO: 175513 - DNA, 120 bp, Artificial Sequence
  ENSG00000109991_10 (sequence is synthesized)
gggaactgttctctgtgacatcatcctgctcaacttcctcaagggggccgaccagtacaaagccaagaagtttgaggaggtgaatgagactacgctgaaaatcgcggctttgaccaaccc

SEQ ID NO: 175514 - DNA, 120 bp, Artificial Sequence
  ENSG00000109991_11 (sequence is synthesized)
agtgtaccccagcgaccagaccacagcggagaagcagtccaccgattcgggggccttctccataggccactagggcctctttccagggccccacactcacaaaggctccaggcctcccca

SEQ ID NO: 175515 - DNA, 120 bp, Artificial Sequence
  ENSG00000109991_12 (sequence is synthesized)
cagaggaccctgcctgagcaaggggcatgggagggaagaggggctctcatttctgctgctcattccatgagcatagctgggacccaagtgtctgggcctccgactgctccagcagacagg

SEQ ID NO: 175516 - DNA, 120 bp, Artificial Sequence
  ENSG00000109991_13 (sequence is synthesized)
cagtgctccctgctgagaccccaatctcaccttcactccttgcctggccccatctgcttcctaggacccctggggcaggagcacctgagccatccccttcccaaagagtagagattataa

SEQ ID NO: 175517 - DNA, 120 bp, Artificial Sequence
  ENSG00000109991_14 (sequence is synthesized)
tgtaggacagatggccacaagggcctaccaagtgccaggcactttcacacacgttatctcatttaatccttagaataatcctatgaggtagatattagtttcccttgttttgaagataaa

SEQ ID NO: 175518 - DNA, 120 bp, Artificial Sequence
  ENSG00000109991_15 (sequence is synthesized)
gtccgtctgactaactccatcgcccacaccccatgagagaagaatgaactcccagggtccatcagccctgctgcttcagccgcctccaccctgacggtgattcggttaataaagagtaag

SEQ ID NO: 175519 - DNA, 120 bp, Artificial Sequence
  ENSG00000109991_16 (sequence is synthesized)
ccccatgcctttcccagcaacaaagtttgcattttagggagactggttagacagtggtgagggaccccatctctgacttgggtgcatcccaaatttagaaggaaacagaaggcatggctg

SEQ ID NO: 175520 - DNA, 120 bp, Artificial Sequence
  ENSG00000109991_17 (sequence is synthesized)
tcagtgaatttttcctcatcactccccatagctctctccccaaaccagggaaggggtcattcttgttcttctctgggaccccacacccacacacatctgggccccctcactctggggatt

SEQ ID NO: 175521 - DNA, 120 bp, Artificial Sequence
  ENSG00000109991_18 (sequence is synthesized)
tgattcccggacctgggatcctgtcgtaggctgggaccctgttccaggagttcagcagtcctcatttacaacaacagtgaaaatgctccagtaaggcctggtgccttgtgagctgctcag

SEQ ID NO: 175522 - DNA, 120 bp, Artificial Sequence
  ENSG00000109991_19 (sequence is synthesized)
ctgggttggccaggcctgtccccatagggtcttaataaggtgccccattttctaaggttagaagctaaaggggccttttaaaccatcttatctaaccctcttgcttacagatgagcaaac

SEQ ID NO: 175523 - DNA, 120 bp, Artificial Sequence
  ENSG00000109991_20 (sequence is synthesized)
tgaggccagaaagggaaaatgactggttcagtgccacagttcatggccaaaaaggaacccacatgtcctggcccttcagggaaggaggcaagaacaggaagctggatccattgacccaga

SEQ ID NO: 175524 - DNA, 120 bp, Artificial Sequence
  ENSG00000109991_21 (sequence is synthesized)
catcctctatcccctttctgtcctctcctacagtgagaggcccagaaattgccccagggcagggctctggggcagaaccaggttttgtgaatcctaagcatatacaatttgggggcatct

SEQ ID NO: 175525 - DNA, 120 bp, Artificial Sequence
  ENSG00000109991_22 (sequence is synthesized)
ctttagaaagaatacaaaattaggtattagaaggggctcatgcaagtgaatgagcctaaagaatgtttcaatagcttcatgataaatctgcatctggcagtcagagtgggcatgatcatg

SEQ ID NO: 175526 - DNA, 120 bp, Artificial Sequence
  ENSG00000109991_23 (sequence is synthesized)
aggtcttagctgcaccagctcaactgtagatggagggcggcccctcaacacacggcacaggaagtggggaagggacagcttcaggagtagttcaggaggctcaaatggtgggtacttgca

SEQ ID NO: 175527 - DNA, 120 bp, Artificial Sequence
  ENSG00000109991_24 (sequence is synthesized)
aaggccttgcccaatgaccccccgctccagggggagaaggggtaagacccaccccacataaagctcaacaccccttccctcactctgccctaacccacagccccatgcccaggatggtgg

SEQ ID NO: 175528 - DNA, 120 bp, Artificial Sequence
  ENSG00000109991_25 (sequence is synthesized)
ggcatatctccccagggtcagccttgggaattgggcagtgcctggagatctgaccagactatgcttctccagcagagacatcagtgaaggcagcaccacattctccacctgggactcccc

SEQ ID NO: 175529 - DNA, 120 bp, Artificial Sequence
  ENSG00000109991_26 (sequence is synthesized)
caggcatccctggggaattcagctcttgggaggctggggtcacagggattctctctaatggggagatggaggcagtggtgtcctgaagggaccctcccccccaacccctcccttttaccc

SEQ ID NO: 175530 - DNA, 120 bp, Artificial Sequence
  ENSG00000109991_27 (sequence is synthesized)
agatggaggtggtcctcctgtaggtgcctccgcccctctggagccggccagcaagtgtgtgtgagcctgaggttgtcctccgcatatctgaactaagttaccacttctgtgtgctagatg

SEQ ID NO: 175531 - DNA, 120 bp, Artificial Sequence
  ENSG00000109991_28 (sequence is synthesized)
tagggttaatatcagtagtgataaaaacagctaccttgtctctgttgcattatggtttactcagcacaatcaccaacataatcacatggaccctcacaccaacgctggtgagtccgctat

SEQ ID NO: 175532 - DNA, 120 bp, Artificial Sequence
  ENSG00000109991_29 (sequence is synthesized)
ggtttgtcattaatcctatttgatagaaaaagaaatttacagtacgtggaaatgagatctggaacctatgcccattcctaacactacattgcctctttaatcattcaacataaaagccaa

SEQ ID NO: 175533 - DNA, 120 bp, Artificial Sequence
  ENSG00000109991_30 (sequence is synthesized)
cactgattacttactattggcaggcaatggaccaaatgagtgacagggattgtctaactcaacccccactttacagaagaagaaacagatgcatactaaaataaagaaactgaaatagaa

SEQ ID NO: 175534 - DNA, 120 bp, Artificial Sequence
  ENSG00000109991_31 (sequence is synthesized)
tgccccacggaggtggacacagtggaaacgtaaggctccaagccagacaggaggagacaggcccccacctcagctcccctttgcccatgtgggagccgtgcgtctctgagcttgaggagg

SEQ ID NO: 175535 - DNA, 120 bp, Artificial Sequence
  ENSG00000109991_32 (sequence is synthesized)
accacagcacttctttactgagcagtatatgacatgtcactttccgttctccctgcctccgtctcccacctggaggatgggaggaaatcatttgtcaccacctccaccccacccccaccc

SEQ ID NO: 175536 - DNA, 120 bp, Artificial Sequence
  ENSG00000109991_33 (sequence is synthesized)
tggtgggcaaaagcagacagggtcctcgccctcctggggcttacagcggaaggcaagagatggcattcatctgatgatctccacaaacgtgaaatgtcaactgtggcttagaggtgcaca

SEQ ID NO: 175537 - DNA, 120 bp, Artificial Sequence
  ENSG00000110002_0 (sequence is synthesized)
cggttctttccggaaattatgactgcagctgttttcactccgctgtgactcagagcgctccgggctgcaggagaggaagaaatcttgcatcaccatggtgcacttctgtggcctactcac

SEQ ID NO: 175538 - DNA, 120 bp, Artificial Sequence
  ENSG00000110002_1 (sequence is synthesized)
cctccaccgggagccagtgccgctgaagagtatctctgtgagcgtgaacatttacgagtttgtggctggtgtgtctgcaactttgaactacgagaatgaggagaaagttcctttggaggc

SEQ ID NO: 175539 - DNA, 120 bp, Artificial Sequence
  ENSG00000110002_2 (sequence is synthesized)
cttctttgtgttccccatggatgaagactctgctgtttacagctttgaggccttggtggatgggaagaaaattgtagcagaattacaagacaagatgaaggcccgcaccaactatgagaa

SEQ ID NO: 175540 - DNA, 120 bp, Artificial Sequence
  ENSG00000110002_3 (sequence is synthesized)
agccatctcccagggccaccaggccttcttattggagggggacagcagctccagggatgtcttctcttgcaatgtgggtaacctccaacctgggtcgaaggcggcagtcaccctgaagta

SEQ ID NO: 175541 - DNA, 120 bp, Artificial Sequence
  ENSG00000110002_4 (sequence is synthesized)
tgtgcaggagctgcctctggaagcagatggggctctgcgctttgtgctcccagctgtcctgaatcctagataccagttctctgggtcgtctaaggacagttgccttaatgtgaagactcc

SEQ ID NO: 175542 - DNA, 120 bp, Artificial Sequence
  ENSG00000110002_5 (sequence is synthesized)
tatagtccctgtggaggacctgccctacacactcagcatggtcgccaccatagattcccagcatggcattgagaaggtccaatccaactgccccttgagtcctaccgagtacctaggaga

SEQ ID NO: 175543 - DNA, 120 bp, Artificial Sequence
  ENSG00000110002_6 (sequence is synthesized)
ggacaagacttctgctcaggtttccctggctgctggacacaagtttgatcgggacgtggaactcctgatttactacaatgaggtgcatacccccagcgtggttttggagatggggatgcc

SEQ ID NO: 175544 - DNA, 120 bp, Artificial Sequence
  ENSG00000110002_7 (sequence is synthesized)
taacatgaagccaggtcatttgatgggagatccatctgcaatggtgagtttctatccaaatatcccagaagatcaaccatcaaatacctgtggagagtttatctttctcatggaccgctc

SEQ ID NO: 175545 - DNA, 120 bp, Artificial Sequence
  ENSG00000110002_8 (sequence is synthesized)
gggaagtatgcagagccccatgagtagccaggatacatctcagctgcgaatacaggcagccaaggaaacactgattttgctgctgaagagtttacctataggctgttatttcaacatcta

SEQ ID NO: 175546 - DNA, 120 bp, Artificial Sequence
  ENSG00000110002_9 (sequence is synthesized)
tggatttggctcttcctatgaggcatgctttccggagagtgtgaagtacactcagcaaacaatggaggaggctctggggagagtgaagcttatgcaggccgacctagggggcactgaaat

SEQ ID NO: 175547 - DNA, 120 bp, Artificial Sequence
  ENSG00000110002_10 (sequence is synthesized)
cttggcaccactccagaacatttacaggggaccctccatcccaggccaccccctacagctttttgtctttacagatggagaagttacagacacgtttagtgtaattaaagaagttaggat

SEQ ID NO: 175548 - DNA, 120 bp, Artificial Sequence
  ENSG00000110002_11 (sequence is synthesized)
caacagacagaaacacaggtgtttctcatttggtattggagaaggcacctccaccagcctaataaaaggtattgcccgggcatcagggggcacctcagaatttatcacaggcaaagacag

SEQ ID NO: 175549 - DNA, 120 bp, Artificial Sequence
  ENSG00000110002_12 (sequence is synthesized)
gatgcagtccaaggctctcaggactctgaaacgctctctgcagcctgtggtagaggatgtctctctgagctggcatttgcctcctggtctgtctgctaaaatgctttccccagaacagac

SEQ ID NO: 175550 - DNA, 120 bp, Artificial Sequence
  ENSG00000110002_13 (sequence is synthesized)
tgtcatctttaggggtcagagattaatcagctatgcccagctgaccgggaggatgccagcagcagagacaacaggagaagtatgcctcaaatatacactccagggcaagacttttgagga

SEQ ID NO: 175551 - DNA, 120 bp, Artificial Sequence
  ENSG00000110002_14 (sequence is synthesized)
ctgccaagtccttgctccagaccaaggacatgggcctcagggagactccagcaagtgataaaaaagatgcattgaaccttagccttgagtctggtgtcataagctccttcacagctttca

SEQ ID NO: 175552 - DNA, 120 bp, Artificial Sequence
  ENSG00000110002_15 (sequence is synthesized)
ttgctatcaataaggagctcaacaagccggttcaggggcctctggctcatagggacgtcccaaggccaattctgttgggtgcttctgccccattgaagataaaatgccaatcaggttttc

SEQ ID NO: 175553 - DNA, 120 bp, Artificial Sequence
  ENSG00000110002_16 (sequence is synthesized)
gaaaggccttacactctgaccgtcctccttctgcatctcagcccagaggggaacttatgtgttataaggccaagacattccagatggacgattacagtctctgtgggttgataagtcaca

SEQ ID NO: 175554 - DNA, 120 bp, Artificial Sequence
  ENSG00000110002_17 (sequence is synthesized)
aggaccagcacagtccaggctttggagagaatcaccttgtgcagctgatttaccaccaaaatgcaaatggttcctgggatctgaatgaagatctagccaagatcctaggtatgagtttgg

SEQ ID NO: 175555 - DNA, 120 bp, Artificial Sequence
  ENSG00000110002_18 (sequence is synthesized)
aagaaataatggctgcacagcctgccgagcttgtggattcctcaggctgggccaccatcctggccgtgatctggctgcacagcaatggtaaggacttgaagtgtgaatgggagcttctgg

SEQ ID NO: 175556 - DNA, 120 bp, Artificial Sequence
  ENSG00000110002_19 (sequence is synthesized)
aaaggaaggccgtggcctggatgcgtgcccatgcaggctccaccatgccttcggttgtgaaagctgctattactttcctgaagtcatctgtggatcctgctatctttgccttttgaagat

SEQ ID NO: 175557 - DNA, 120 bp, Artificial Sequence
  ENSG00000110002_20 (sequence is synthesized)
accatccagaaaaagaagtgcctttaatttgctactgtcatttcctctagtatcacttttgctgtgatgatgtgttcttgtgtattataactctttattttttgccataaaagtaaagga

SEQ ID NO: 175558 - DNA, 120 bp, Artificial Sequence
  ENSG00000110002_21 (sequence is synthesized)
tgcttactccacttcgcttctctgctccaggttcactttggatatgatctttcttttcccaacatatgccctcagaaaagtgacagtggtcccagaacctattccctttcttgagggagt

SEQ ID NO: 175559 - DNA, 120 bp, Artificial Sequence
  ENSG00000110002_22 (sequence is synthesized)
tcaaaacattcataggcagtaatgttcctcccagggtttccagggaaacaacatgaaaaacaggtgacatgaactacagactaaagattgcagcatttatgttagagaatgcttgaatta

SEQ ID NO: 175560 - DNA, 120 bp, Artificial Sequence
  ENSG00000110002_23 (sequence is synthesized)
gagaattttctgcattatctttgtctgttcactttctatcttatatacttatcagggccatactggtaagcttgcgtaggaggagttagagggaagttgaaagccaacatctggatcaat

SEQ ID NO: 175561 - DNA, 120 bp, Artificial Sequence
  ENSG00000110002_24 (sequence is synthesized)
gtaatgtcaagatcacaaagacagagactgcaggggtccactgtgagaggtgacactgttggggaccttcctgattcattcttcttgggctttgctagcctgtacaacctacatgtcttt

SEQ ID NO: 175562 - DNA, 120 bp, Artificial Sequence
  ENSG00000110002_25 (sequence is synthesized)
tcttccactgcctgaaagacttgggttgaactataactgttggagagagatgttcctctttaatcatgaaacaccttaagaagtctataatgcaatccttagtcctaccctgaacctatg

SEQ ID NO: 175563 - DNA, 120 bp, Artificial Sequence
  ENSG00000110002_26 (sequence is synthesized)
tgtcctctaagtcaggccctgatctagtgcagtaaagggaagggtgggcttaatgggagctttgcctgggacctgaacctggagcacttaccgcattaggaagaaaggagctccccgtaa

SEQ ID NO: 175564 - DNA, 120 bp, Artificial Sequence
  ENSG00000110002_27 (sequence is synthesized)
tcgttcctgacccttgtgtctcatataccctatcctggtggaaatgaccctatttgatatgctgtcccttaaaataacttgtatcaatattaaaatgactatttctaccctttgatgagt

SEQ ID NO: 175565 - DNA, 120 bp, Artificial Sequence
  ENSG00000110002_28 (sequence is synthesized)
gactcagagcgctccgggctgcaggagaggaagcccagcctgttctaccagagaacttgcccaggtcagaggtctgcgtagaagcccttttctgagcatcctctcctctcctcacacctg

SEQ ID NO: 175566 - DNA, 120 bp, Artificial Sequence
  ENSG00000110002_29 (sequence is synthesized)
ccggaacacagttgtggaaatttgacctgaagttagtgaaataaaacttagtagggaaaaaaagcttagcaagaggtctactcctccatagattcatttattgaacttacattggtttta

SEQ ID NO: 175567 - DNA, 120 bp, Artificial Sequence
  ENSG00000110002_30 (sequence is synthesized)
ttgtcccttgttttctgttccagcttttctgatgcctccactgttcccatggtatcctgaccctctatcttctgttgtaggctgacttcttttatatgaagcaagtaaaggatactaata

SEQ ID NO: 175568 - DNA, 120 bp, Artificial Sequence
  ENSG00000110002_31 (sequence is synthesized)
agaataccactgtagaatcctgaccatacccttaaatagttatgtgatgatgggcaaatgatttcaccctcaggcacttaatatcctcatctgtaaaactaagggattaaactagaactt

SEQ ID NO: 175569 - DNA, 120 bp, Artificial Sequence
  ENSG00000110002_32 (sequence is synthesized)
tattaacactttcgagttccactcagaattcctagaggaacatcggtgacttttcactcagaaagtgggtggactaggcctgagtttctttaagttgttgagttacctggtattaggaag

SEQ ID NO: 175570 - DNA, 120 bp, Artificial Sequence
  ENSG00000110002_33 (sequence is synthesized)
acttgtgtgacttgcatagtggactctaatctctcagtctttcttccaagtttgtttatgctgaatgtgatctgcggaacagggttgttagaaatgcagctttttagaaatgcagaattt

SEQ ID NO: 175571 - DNA, 120 bp, Artificial Sequence
  ENSG00000110002_34 (sequence is synthesized)
taatcgataccaggaactactttatttaacaaggctcccaggtatcatgcatgcacattgaagtttgaaaagtaaaggcttaatattttcatgaaataggcttatatccaagcctgccat

SEQ ID NO: 175572 - DNA, 120 bp, Artificial Sequence
  ENSG00000110002_35 (sequence is synthesized)
cacacagactctagtgctacatgatgccggtgttgaccttccttcaagaggaccaaatgatttcagaatttagttttagcagctgaaaatttatttctccctgtaaacgttaaaaacagt

SEQ ID NO: 175573 - DNA, 120 bp, Artificial Sequence
  ENSG00000110002_36 (sequence is synthesized)
tttccaaataacatcaacaacacagcaaaaccattgtttcttattctttctaaactacaacgaacacaagaattgaatagtaagatgttaattttttttactataaacatttttagagaa

SEQ ID NO: 175574 - DNA, 120 bp, Artificial Sequence
  ENSG00000110002_37 (sequence is synthesized)
gtaaaacatgctgaaaactacacaaattataagcatacaactggactcattatcacagtgaatgcactgtgtgatcgccacataggtaaaaactggaatggtcgtaggcctctccatctg

SEQ ID NO: 175575 - DNA, 120 bp, Artificial Sequence
  ENSG00000110002_38 (sequence is synthesized)
tacccttttccatcatgtcctattccctgtcactacacactaaaactttcctgacttacaataccatgggttatttatgcttgtttttgaatgaaaataaataagttatacagtatgctt

SEQ ID NO: 175576 - DNA, 120 bp, Artificial Sequence
  ENSG00000110002_39 (sequence is synthesized)
gactcagagcgctccgggctgcaggagaggaaggtaggggaccaagctaccggtgcagggcctggatccaacccctgctctggaagactgagagctccacattctagctccctttcccca

SEQ ID NO: 175577 - DNA, 120 bp, Artificial Sequence
  ENSG00000110002_40 (sequence is synthesized)
gtccccaaatttgtaggggctccttgaattgcacgccccatgggtggaggatttcatcctgatgtatgatccccaggaaggttcctgcaagtttggcagtttaggggaatcttttggagg

SEQ ID NO: 175578 - DNA, 120 bp, Artificial Sequence
  ENSG00000110002_41 (sequence is synthesized)
ttgaaggagggatttagccatctcctaatctcaaggcccttcttcctactttccttctcttttactttactttttttcccgctttctttctttgatatagacaattgatgttttctcagt

SEQ ID NO: 175579 - DNA, 120 bp, Artificial Sequence
  ENSG00000110002_42 (sequence is synthesized)
ttcaggatagtgtaagctgaggaaatgaggctgtaagcctcatctactccaatcagttgcagcccctaagcccttctctatagaaatgtaagagaccgacgcagtctcttctgtaaatac

SEQ ID NO: 175580 - DNA, 120 bp, Artificial Sequence
  ENSG00000110002_43 (sequence is synthesized)
gtggacattggaaatctaggactgaatggaaaggttaaatcaatctctgattttatccaagccccacttcttaccccaaatctcctccttgtctggttccgagttctccacttcacccct

SEQ ID NO: 175581 - DNA, 120 bp, Artificial Sequence
  ENSG00000110002_44 (sequence is synthesized)
gccacaggccgcaggggtgtgtgtggccggtggtgccacccagctcccctcccaccctcctagctgctgagcggctggtgctgggactctgcattcctgaagcagctacctggctaggcc

SEQ ID NO: 175582 - DNA, 120 bp, Artificial Sequence
  ENSG00000110002_45 (sequence is synthesized)
ggaagccttgtattctcccagctgcctcagattcatggctttcagcttggtggccagtctctacctaagccttgcaagttgcctttctgaagtgccatcctgagagacagaactaattct

SEQ ID NO: 175583 - DNA, 120 bp, Artificial Sequence
  ENSG00000110002_46 (sequence is synthesized)
gacccaaactaattttgtttgtactgggaagagtgggggcaagggtgcagaatagcaagttttcctcaacggaggatttgttctgagcttagaatcaggaagcgaaggctatttccttgt

SEQ ID NO: 175584 - DNA, 120 bp, Artificial Sequence
  ENSG00000110002_47 (sequence is synthesized)
aggggtgccctttgcgtctctctctcttttactctagccaccttggtgagtattgcccagcctgagagcttctctttcagctgttttactcctgtgtgagtctcctgctttaggctctct

SEQ ID NO: 175585 - DNA, 120 bp, Artificial Sequence
  ENSG00000110002_48 (sequence is synthesized)
gcttaatgtgttattagaaattcttccctcccccagcccagcctgttctaccagagaacttgcccaggtcagaggtctgcgtagaagcccttttctgagcatcctctcctctcctcacac

SEQ ID NO: 175586 - DNA, 120 bp, Artificial Sequence
  ENSG00000110002_49 (sequence is synthesized)
ctgccactgtcctctgcgttgctgtcgaattgttccaacttcctaactccaacattaaccctttgaatgtattcttatgccagagaaaggcacataaagtactggtgtttgaacagataa

SEQ ID NO: 175587 - DNA, 120 bp, Artificial Sequence
  ENSG00000110002_50 (sequence is synthesized)
ctcctcccttcttatttccttaatgcatactctttatgatctctactaaatgtaccttcacaaaacatgctgatgttgaaagctctttcttccactcttttctaactgccatttttctaa

SEQ ID NO: 175588 - DNA, 120 bp, Artificial Sequence
  ENSG00000110002_51 (sequence is synthesized)
aatcatttggggaaagaaatcaatcagaggcattcagagtatagctgtgattagacaagaccaatcacacagtcgctctgcactgctcgtctctttttcagccatgtcaccttggatgtt

SEQ ID NO: 175589 - DNA, 120 bp, Artificial Sequence
  ENSG00000110011_0 (sequence is synthesized)
acaaagccgcagagagcgggctctgtcccgcccgctccccaggtggacgtggtcttggcatccacgccaatgagaatgtgagggcggggcctgaatagacgcaggaaatggcgacggccg

SEQ ID NO: 175590 - DNA, 120 bp, Artificial Sequence
  ENSG00000110011_1 (sequence is synthesized)
cgggtctgtgagcagcgggggcggggcctggttgtggcccctccttctcccgtccccaagttccctgggtgggaacggggtcttggggtccctggctgggtggccagaccccgaagccag

SEQ ID NO: 175591 - DNA, 120 bp, Artificial Sequence
  ENSG00000110011_2 (sequence is synthesized)
cgctgggaagggctgcggatgcccgggtcagaggaaggggcaggtccaaggacacgcgggtctggtcctgggcaagaaccgccccctctccgggcctgcttcagtcttcctttgcagaac

SEQ ID NO: 175592 - DNA, 120 bp, Artificial Sequence
  ENSG00000110011_3 (sequence is synthesized)
aacgggccaggccccttccctctgcccccgggtgcttgaagtctagccccatcctggtccaatgcgctcttggtagcctcctttcccagctgcccgcccgccgccatgccgcccttactg

SEQ ID NO: 175593 - DNA, 120 bp, Artificial Sequence
  ENSG00000110011_4 (sequence is synthesized)
cccctgcgcctgtgccggctgtggccccgcaaccctccctcccggctcctcggagcggccgccgggcagcggtccagacccagtacttattatgaactgttgggggtgcatcctggtgcc

SEQ ID NO: 175594 - DNA, 120 bp, Artificial Sequence
  ENSG00000110011_5 (sequence is synthesized)
gctttgtggagctgagcgaggcataccgtgtgctcagccgtgagcagagccgccgcagctatgatgaccagctccgctcaggtagtcccccaaagtctccacgaaccacagtccatgaca

SEQ ID NO: 175595 - DNA, 120 bp, Artificial Sequence
  ENSG00000110011_6 (sequence is synthesized)
agtctgcccaccaaacacacagctcctggacaccccccaacgcacagtactggtcccagtttcacagcgtgaggccacaggggccccagttgaggcagcagcaacacaaacaaaacaaac

SEQ ID NO: 175596 - DNA, 120 bp, Artificial Sequence
  ENSG00000110011_7 (sequence is synthesized)
aagtgctggggtactgcctcctcctcatgctggcgggcatgggcctgcactacattgccttcaggaaggtgaagcagatgcaccttaacttcatggatgaaaaggatcggatcatcacag

SEQ ID NO: 175597 - DNA, 120 bp, Artificial Sequence
  ENSG00000110011_8 (sequence is synthesized)
ccttctacaacgaagcccgggcacgggccagggccaacagaggcatccttcagcaggagcgacaacggctagggcagcggcagccgccaccatccgagccaacccaaggccccgagatcg

SEQ ID NO: 175598 - DNA, 120 bp, Artificial Sequence
  ENSG00000110011_9 (sequence is synthesized)
tgccccggggcgccggcccctgaggggctcacctggatggggcctgcagtgcgttcccgctttgcttccttccctggacggcccgctccccgaaacgcgcgcaataaagtgattcgcaga

SEQ ID NO: 175599 - DNA, 120 bp, Artificial Sequence
  ENSG00000110011_10 (sequence is synthesized)
ggtcagccagtcctccacagcacctcgtggcccgtactcttgtgtctctcaagctaagagctgcttgaagttggtctctggagcctctccttacttattaaaggcagcgctgcaccaaga

SEQ ID NO: 175600 - DNA, 120 bp, Artificial Sequence
  ENSG00000110011_11 (sequence is synthesized)
aggcgtgagccaccgcgcctgtccaggaatcagttttttccaacaagtttttggactccactttgagaaatcctgacctgcactatgcctgaaacactccaaagggggtgctgatctgga

SEQ ID NO: 175601 - DNA, 120 bp, Artificial Sequence
  ENSG00000110011_12 (sequence is synthesized)
gacagatctgtcctgggacctgtttcagccctgtcagctcctggtggctgagttgaagggtgtggcccagaaggcagggcagagctagcttctgggttccttcagcccctgcaaggtttg

SEQ ID NO: 175602 - DNA, 120 bp, Artificial Sequence
  ENSG00000110011_13 (sequence is synthesized)
cctgaggtggggagggggagcaggaactttgagccagtgggggtgtgcttcaaattcccaggagtagaccagcatctctggcgggtgccacattttttcagccctcatagggagtggcag

SEQ ID NO: 175603 - DNA, 120 bp, Artificial Sequence
  ENSG00000110011_14 (sequence is synthesized)
gtgctcaatggtaggggaaaggctgtgggcaggagccaggggtcctgtctgatgggctgggcttggttttcttgacctgcctgcctgctcttgagaaacctggaccagggcatatggtga

SEQ ID NO: 175604 - DNA, 120 bp, Artificial Sequence
  ENSG00000110011_15 (sequence is synthesized)
gggagggcttgaacacaggaggaagcaggagtccatgctctctggccttctgaggagtgggcaggcctgagtgagggtcactgaccaggcagggcctctgggtatgactggagccctggt

SEQ ID NO: 175605 - DNA, 120 bp, Artificial Sequence
  ENSG00000110011_16 (sequence is synthesized)
ctcccaaagtactgggattacaggtgagagctaccgcgcctggccacaaagccgattttctatagcagatacctaaaggccagtgcccactgctagcagcctgcctagttcagtgatgga

SEQ ID NO: 175606 - DNA, 120 bp, Artificial Sequence
  ENSG00000110011_17 (sequence is synthesized)
tggagttagacgcataccctttctagtcttctgggaggagcacccccatgtccacagctgctgtcacacctcaaagtgaccagggacttcggatgccattggaccctagacaagccaggg

SEQ ID NO: 175607 - DNA, 120 bp, Artificial Sequence
  ENSG00000110011_18 (sequence is synthesized)
cccagtacttattatgaactgttgggggtgcatcctggtgccagcactgaggaagttaaacgagctttcttctccaagtccaaagaggcaaagggagataaggggagtcctgccccaccc

SEQ ID NO: 175608 - DNA, 120 bp, Artificial Sequence
  ENSG00000110011_19 (sequence is synthesized)
aggatcagagatagagaagacccccaaggtcatacaccgatttaagcggcagaggaggaagtttgagtccaggtccagacccagtacttattatgaactgttgggggtgcatcctggtgc

SEQ ID NO: 175609 - DNA, 120 bp, Artificial Sequence
  ENSG00000110013_0 (sequence is synthesized)
agtcctaggcggcggtcagatccttgcaagcatggtcgcgccggggcttgtactcgggctggtgctgccattaatcctgtgggccgacagaagtgcaggtattggttttcgctttgcttc

SEQ ID NO: 175610 - DNA, 120 bp, Artificial Sequence
  ENSG00000110013_1 (sequence is synthesized)
atacatcaataatgatatggtgctgcagaaggagcctgctggggcagtgatatggggcttcggtacacctggagccacagtgaccgtgaccctgcgccaaggtcaggaaaccatcatgaa

SEQ ID NO: 175611 - DNA, 120 bp, Artificial Sequence
  ENSG00000110013_2 (sequence is synthesized)
gaaagtgaccagtgtgaaagctcactctgatacgtggatggtggtactggatcctatgaagcctggaggacctttcgaagtgatggcacaacagactttggagaaaataaacttcaccct

SEQ ID NO: 175612 - DNA, 120 bp, Artificial Sequence
  ENSG00000110013_3 (sequence is synthesized)
gagagttcatgacgtcctgtttggagatgtctggctctgtagtgggcagagtaacatgcagatgactgtgttacagatatttaatgctacaagggagttgtctaacactgcggcatatca

SEQ ID NO: 175613 - DNA, 120 bp, Artificial Sequence
  ENSG00000110013_4 (sequence is synthesized)
gtctgtccgcatcctctctgtctctcccattcaagcagagcaggagctggaggaccttgttgcggttgacttgcagtggtctaagcccacctcagaaaacttaggccatggatatttcaa

SEQ ID NO: 175614 - DNA, 120 bp, Artificial Sequence
  ENSG00000110013_5 (sequence is synthesized)
gtacatgtcagcagtgtgctggctctttggacgtcacctttatgacactctgcagtatcccatcgggctgatcgcctccagctggggcgggacacccattgaagcctggtcatctggacg

SEQ ID NO: 175615 - DNA, 120 bp, Artificial Sequence
  ENSG00000110013_6 (sequence is synthesized)
gtcactgaaagcctgtggggtccctaaacaagggtccattccatacgattctgtaactggtcccagtaagcactctgttctctggaatgccatgatccatccactgtgcaatatgactct

SEQ ID NO: 175616 - DNA, 120 bp, Artificial Sequence
  ENSG00000110013_7 (sequence is synthesized)
gaaaggggtagtatggtaccagggggagtccaatataaattataacacggatctgtacaattgcacattccctgcactcatcgaagactggcgtgaaaccttccaccgtggttcccaggg

SEQ ID NO: 175617 - DNA, 120 bp, Artificial Sequence
  ENSG00000110013_8 (sequence is synthesized)
gcagacggagcgtttcttcccatttggacttgtccagttatcttcagatttgtctaagaagagctcagacgatggatttccccagatccgttggcatcaaacagcagacttcggctatgt

SEQ ID NO: 175618 - DNA, 120 bp, Artificial Sequence
  ENSG00000110013_9 (sequence is synthesized)
ccccaacccaaagatgcccaatactttcatggctgtagctatggatctctgtgatagagactcgccttttggcagcatccaccctcgagataaacagactgtggcttatcggctgcattt

SEQ ID NO: 175619 - DNA, 120 bp, Artificial Sequence
  ENSG00000110013_10 (sequence is synthesized)
gggggcccgtgctctggcttatggtgagaagaatttgacctttgaaggaccactgcctgagaagatagaactcttggctcacaaggggctgctcaatctcacatattaccagcaaatcca

SEQ ID NO: 175620 - DNA, 120 bp, Artificial Sequence
  ENSG00000110013_11 (sequence is synthesized)
ggtgcagaaaaaggacaacaagatatttgagatctcctgttgcagtgaccatcgatgcaagtggcttccagcttctatgaacaccgtctccacccagtccctgaccctggcgatcgattc

SEQ ID NO: 175621 - DNA, 120 bp, Artificial Sequence
  ENSG00000110013_12 (sequence is synthesized)
ttgtcatggcactgtggttgctctccgctatgcttggaccacgtggccttgtgaatataagcagtgtcccctataccaccccagtagtgccctgccagcccctcccttcattgctttcat

SEQ ID NO: 175622 - DNA, 120 bp, Artificial Sequence
  ENSG00000110013_13 (sequence is synthesized)
tacagaccagggtcctggacatcagagcaatgttgctaaatgactgtttcagtatgatcagaacttagatataaggatgggtccttcagattttagcatttaggagtttcaataataacc

SEQ ID NO: 175623 - DNA, 120 bp, Artificial Sequence
  ENSG00000110013_14 (sequence is synthesized)
attgcttttaaaggaaattaatagaaagcctcattgaatggctttcagctagcacatggctgtttctatattctgatgagcccaggcttataggtaacttgaaatgcttgctttttgttc

SEQ ID NO: 175624 - DNA, 120 bp, Artificial Sequence
  ENSG00000110013_15 (sequence is synthesized)
cctagttggtctaagggtctgtattggactaattctgaactacagacaaattggacctcaatgtcatttacttccctcatattaatgggagtgaaatgtctaatacttttgccccttttt

SEQ ID NO: 175625 - DNA, 120 bp, Artificial Sequence
  ENSG00000110013_16 (sequence is synthesized)
ttgcccctttttatccagagttgtgggaatctcaggattggaagagattttaaaggccacataggccagctagtgttcatgtgttctttataaaatttctcccatccaagtactaaccag

SEQ ID NO: 175626 - DNA, 120 bp, Artificial Sequence
  ENSG00000110013_17 (sequence is synthesized)
ttagcttccgagatcagatgagatcaggcgcgttcagggtgatatggccgtagacgtctttacaaaattcctgacaggtggttactgaatctctctatgaactttccattcaaaactttc

SEQ ID NO: 175627 - DNA, 120 bp, Artificial Sequence
  ENSG00000110013_18 (sequence is synthesized)
caagtttttccttatgtggaaccgaaatctttctttctcccgtgaaactttactactatcagataattgaagacagatctctttgtattctcttcaagcccaaaccaattctgttccttc

SEQ ID NO: 175628 - DNA, 120 bp, Artificial Sequence
  ENSG00000110013_19 (sequence is synthesized)
aatctaaatagtggtaatatgaatgtttaagaaatgaaataagaaacatgtgcaggcactttggaaggtgctaagtgactgccctaaggaatgaaaagcaagggccaggtgggagtagcc

SEQ ID NO: 175629 - DNA, 120 bp, Artificial Sequence
  ENSG00000110013_20 (sequence is synthesized)
cagcgaaggcacttgggctgccaggaacaggaggcgtgggaaactctggcttaggaaaacatgaacacaggggcaacagaggcaaactgttgttcgagttaaatataaatctcaggctct

SEQ ID NO: 175630 - DNA, 120 bp, Artificial Sequence
  ENSG00000110013_21 (sequence is synthesized)
ttaaaggtaaaaggtttaaggataatccatttggaagaagaaaagagtgaggctgaaagtaaagccacatgacaagcatataaaaaaaaatgcagatgatacaaatatgaaagaggcctt

SEQ ID NO: 175631 - DNA, 120 bp, Artificial Sequence
  ENSG00000110013_22 (sequence is synthesized)
gattaaaaacagctaacattgtctgaaaattatgttacctataagaagttggaaataaataaaagcataatcactagtgatgtgtatgtatttatatccacttgcaaactgtccttgaag

SEQ ID NO: 175632 - DNA, 120 bp, Artificial Sequence
  ENSG00000110013_23 (sequence is synthesized)
catgtgaaaaggagtaagaatactatctatgggtagctttcctccccttaatgtgaaaaatgagaactaaagcaaaaagcatcactcactgtacatatacaatgtattttacgtagtgta

SEQ ID NO: 175633 - DNA, 120 bp, Artificial Sequence
  ENSG00000110013_24 (sequence is synthesized)
aaaaatatggtttagatagtgaatatattaatgaaatcatatgtaaatttatttttagtggctgaataatttaaaacattatgtggaattcactatgtttcccccaatttaggaactttt

SEQ ID NO: 175634 - DNA, 120 bp, Artificial Sequence
  ENSG00000110013_25 (sequence is synthesized)
tactgtgtgaaaatgaaatttataatactctgtagggtgaatgatggtttttgctttagttctacccctctgtagagttccaaggggttctggtgtagctccaaacagcaggaataactt

SEQ ID NO: 175635 - DNA, 120 bp, Artificial Sequence
  ENSG00000110013_26 (sequence is synthesized)
tgtcagtgccaagattttatttagttaaaaaacaaaaaatctacacactttacaaggaacgttggctcccctgaggacttcctagcattcaactcgttcagttaacccctattgcccatg

SEQ ID NO: 175636 - DNA, 120 bp, Artificial Sequence
  ENSG00000110013_27 (sequence is synthesized)
ctttgacctctcatgcatctggccccatagaaaccatgaaccttgtaacagattgatgcctgagaaaaagtcaatctacccgtccactcctccactcccaatacacatacccccatgggc

SEQ ID NO: 175637 - DNA, 120 bp, Artificial Sequence
  ENSG00000110013_28 (sequence is synthesized)
tgttctaattcgggggcagccagaggtagccaagaactctaagtccagattcctttcacctccaggaacctagagtacatagtgtgaaaaatacggttcaggcaatgattatgttaatga

SEQ ID NO: 175638 - DNA, 120 bp, Artificial Sequence
  ENSG00000110013_29 (sequence is synthesized)
cgccatgcacattcatttttagtggctgagtaatttaaaacatgatgtgggaattcactgcatttccccaaatgtaagaactttttagttttaaaatgaaatttatagtcactgtagaaa

SEQ ID NO: 175639 - DNA, 120 bp, Artificial Sequence
  ENSG00000110013_30 (sequence is synthesized)
atttggacactaaagtataagcaagtaaaaatcacccccaaattcatcattcagagaaacactattttgctgaaccattcacttgacttgagttatataattttatacagtacatattat

SEQ ID NO: 175640 - DNA, 120 bp, Artificial Sequence
  ENSG00000110013_31 (sequence is synthesized)
tttgtaatctgtgtttttgacttacttactttaccaaaataattttcttatgtaaataatagaatatagatttagagtgtttcagtttgtggaagcctcattttatttaaccaatttcct

SEQ ID NO: 175641 - DNA, 120 bp, Artificial Sequence
  ENSG00000110013_32 (sequence is synthesized)
attaatggacatatagatttttaacaattttctactattaaaataatactgtaatgaatatcacatgcaaacatcataccacactcgtccagttatttcttagggttcttaacatggaag

SEQ ID NO: 175642 - DNA, 120 bp, Artificial Sequence
  ENSG00000110013_33 (sequence is synthesized)
aggataaatatatatttaaaatttagatatctacagcttaaccctcccaaaggattaaacaacttacattctcaccaaggtagtcctttttttgccctcaccctcattgacactggatgt

SEQ ID NO: 175643 - DNA, 120 bp, Artificial Sequence
  ENSG00000110013_34 (sequence is synthesized)
tgtcaaatttaaaaaaaatccttaacaatctgatagatgaaaagatagtttaagtatactaaggcagtgtttttcaaggtgtttttgtttttgtttttgagttggagttttgctctgttg

SEQ ID NO: 175644 - DNA, 120 bp, Artificial Sequence
  ENSG00000110013_35 (sequence is synthesized)
gtgcccagcttttcaagtttcttaaatccatgatccatagtaaaaacattttacacatatcttcatacaagtatatgtatatgtggtatacgtacacactatagttgtatatgcattata

SEQ ID NO: 175645 - DNA, 120 bp, Artificial Sequence
  ENSG00000110013_36 (sequence is synthesized)
gctgaaaaaccagttcaacctttctacatgtggtatgttccaaaaattttaaatgtctttctaaaatgaggctcttttaatacgggtattactcaggctgtaatagtgggaaaatatttg

SEQ ID NO: 175646 - DNA, 120 bp, Artificial Sequence
  ENSG00000110013_37 (sequence is synthesized)
ttatatgataaaagcagcatatatcatttctgtgtaaatgccagtatgctcaagccatttatgcagagaaaaaaagaaaaacactgcattaacattttaagcagtccccttcccgatttg

SEQ ID NO: 175647 - DNA, 120 bp, Artificial Sequence
  ENSG00000110013_38 (sequence is synthesized)
ctattatacaaagtttgtttcttttacattgtaaagtgtatacaacttataaaaagactatactcaaaatcataaaataccagttaacttagcttctcagtttacagtggccagtgtggt

SEQ ID NO: 175648 - DNA, 120 bp, Artificial Sequence
  ENSG00000110013_39 (sequence is synthesized)
gtgctctaaacactgctgcctgatccctccctctgctggtcagatttattactataaagtaccaatcccatttgtgttgtcctcaattggcaattatgaatggcagtgcattaaccattc

SEQ ID NO: 175649 - DNA, 120 bp, Artificial Sequence
  ENSG00000110013_40 (sequence is synthesized)
aattctcaccactccatccccattcttctacttctgggtccttttgtccctccctttccagacagcccttggtaacctgctgctgggtaactaaggcatcccacaggtagtgttgaggtg

SEQ ID NO: 175650 - DNA, 120 bp, Artificial Sequence
  ENSG00000110013_41 (sequence is synthesized)
ttaggtgatagagtaaacctctaccttaatgctattaacagggtccaaaaatccagttgcatggaacatggagttatattattacatggctaatgaaaagacaggactaagtctgttata

SEQ ID NO: 175651 - DNA, 120 bp, Artificial Sequence
  ENSG00000110013_42 (sequence is synthesized)
gagtatgggactaacccccaattatatgtgaatttgtgttatcatatggtttcagtgtactgagctaaaaagcacattatctgaggtgcaatacaaaggttaaagaggttaaagatcccc

SEQ ID NO: 175652 - DNA, 120 bp, Artificial Sequence
  ENSG00000110013_43 (sequence is synthesized)
agttaccttccacgctgtatgtccgtgagaaatacaatgaagacggtctgaataatgaactggtaatcttcgataatatgaaacgaatttaagagaacatatcaaagagaaggctctcaa

SEQ ID NO: 175653 - DNA, 120 bp, Artificial Sequence
  ENSG00000110013_44 (sequence is synthesized)
aataggctgctgcaaaagctggtatattgtccggttgctctctcagaatctcgcgtgtcagcccttcaagaagattcccaaatccttgtggaattcggtagtgggtgttggagaatggaa

SEQ ID NO: 175654 - DNA, 120 bp, Artificial Sequence
  ENSG00000110013_45 (sequence is synthesized)
ctatggtgcaggcaggaattggaaccagccagagaatcacctcagtctgctggactatgctacaacattatggtagaaggcaacagcattaactaaatggaagaaatgacattaataaga

SEQ ID NO: 175655 - DNA, 120 bp, Artificial Sequence
  ENSG00000110013_46 (sequence is synthesized)
aggttgatggatttggattatttttcatgtttcctggaggtaaaaccagtgtcctcacttgttttcctctttttcctcattttgaagactatttgttttcattttctttgcctcctctct

SEQ ID NO: 175656 - DNA, 120 bp, Artificial Sequence
  ENSG00000110013_47 (sequence is synthesized)
gtagtgggcagagtaacatgcagatgactgtgttacaggtaatttgcagagtctcagcaataatacacagtgttggtgatgaagaaggaaaagaaggaggaataagggggcaacaaggag

SEQ ID NO: 175657 - DNA, 120 bp, Artificial Sequence
  ENSG00000110013_48 (sequence is synthesized)
aagcagggctgtttctatttagtgagtaccatgagccaagatatgttctaaatgctttgaatgaattcattaatttgacttaacaatcttaagagataagctattgattaaattggtagt

SEQ ID NO: 175658 - DNA, 120 bp, Artificial Sequence
  ENSG00000110013_49 (sequence is synthesized)
tattgattggtgctaatgtattctatataggttaagaacttagaaggagtattgttttctctagcactttctccaaaactgagtttcttctcaagttgatttttattttcttgctttttt

SEQ ID NO: 175659 - DNA, 120 bp, Artificial Sequence
  ENSG00000110013_50 (sequence is synthesized)
cctgtatagaactagaccgttaactcaattcatctctttttgaaaaatttatgaaatacaatatgtttgtatactctatgatttattgttttgcttctgtttcttagttttttctatttt

SEQ ID NO: 175660 - DNA, 120 bp, Artificial Sequence
  ENSG00000110013_51 (sequence is synthesized)
tttctttttgtagtcttctactaaataatgctactaaaatgatcttactctgaacatatctacttcatttcatcattagttttctgatttagaatttaaattcttgcattgaagtcttcc

SEQ ID NO: 175661 - DNA, 120 bp, Artificial Sequence
  ENSG00000110013_52 (sequence is synthesized)
ttatcaacattttatttactcttacattctgtcttatttatatatacggaagcccccccccccccttttttttttttaaagagataaggtccttctctgtcacccaggctgaagtgcagt

SEQ ID NO: 175662 - DNA, 85 bp, Artificial Sequence
  ENSG00000110013_53 (sequence is synthesized)
caaggggcaggtgtgagccaccatatccagctgattttttattttttatagagatagggtcttgctatgttacccatgctgggct

SEQ ID NO: 175663 - DNA, 120 bp, Artificial Sequence
  ENSG00000110013_54 (sequence is synthesized)
ttatagagatagggtcttgctatgttacccatgctgggctttttgaattaaaatgtttattaaactgaactttggactcttttagcataagagagtagaagcagaatcaaagttttattt

SEQ ID NO: 175664 - DNA, 120 bp, Artificial Sequence
  ENSG00000110013_55 (sequence is synthesized)
cttgatagaaaggatggttttgtgtagaagcagaattgctgttaactcattaaggaaaacagtatttttcttaatgctgtaattgcagttccctgtttgcacagaaaggcatggaccaga

SEQ ID NO: 175665 - DNA, 120 bp, Artificial Sequence
  ENSG00000110013_56 (sequence is synthesized)
tctgtttgtatctatatagtcgctttctcaacagcagtctatgccaggggattccatcccattttctgtcaagctaaattagattttgattgttaagagtaaacatattttctctgccta

SEQ ID NO: 175666 - DNA, 120 bp, Artificial Sequence
  ENSG00000110013_57 (sequence is synthesized)
gaatttacccctgagcatcttctgtataaagctaggtctctaagctctgagatataggggaacagaaaaaaattctgtctgaaacatccaagtgttaatatttattttttatttttgttt

SEQ ID NO: 175667 - DNA, 120 bp, Artificial Sequence
  ENSG00000110013_58 (sequence is synthesized)
aaatcatgcacttagtttgcaagataacattttagatgctgacagtaccaaaagccaagtttctagtctcttaacagtctatggaaccttgttttttgattaaaagaatgttctacatgg

SEQ ID NO: 175668 - DNA, 120 bp, Artificial Sequence
  ENSG00000110025_0 (sequence is synthesized)
gcaggcctggcgaggcggcggcgggcggaggctgggccggaggggtggggacggcgaggaggtggaggccggcgctccgctccgctccagctcggtttcatgtcccgccaggcgaaggat

SEQ ID NO: 175669 - DNA, 120 bp, Artificial Sequence
  ENSG00000110025_1 (sequence is synthesized)
gacttcctgcggcactacacagtgtcggaccccaggactcaccccaagggctacaccgagtacaaagtaaccgcgcagttcatctcaaagaaggacccagaggatgtcaaagaggtggtg

SEQ ID NO: 175670 - DNA, 120 bp, Artificial Sequence
  ENSG00000110025_2 (sequence is synthesized)
gtctggaagcggtacagcgacttccgcaagctgcatggagacctggcctacacccaccgcaacctcttccgccgcctcgaggagttccctgctttcccccgggcccaggtgtttggccgg

SEQ ID NO: 175671 - DNA, 120 bp, Artificial Sequence
  ENSG00000110025_3 (sequence is synthesized)
tttgaagcctcagtgatcgaggagcggcgaaagggggcagaggacctgcttcgcttcactgtgcacatacctgcgctcaacaacagcccccagctcaaggagttcttccggggtggggag

SEQ ID NO: 175672 - DNA, 120 bp, Artificial Sequence
  ENSG00000110025_4 (sequence is synthesized)
gtgacccgacccttggaggtgtccagggacctacacatcctgccaccccctctgatccccaccccgccccctgatgacccccggctatcccaactgctccctgcagaaaggaggggcctc

SEQ ID NO: 175673 - DNA, 120 bp, Artificial Sequence
  ENSG00000110025_5 (sequence is synthesized)
gaggaattggaggtgccagtggaccccccaccatccagccctgcccaggaggccctggatctcctctttaactgtgagagcaccgaggaggcatctggttcccctgcccgaggccccctc

SEQ ID NO: 175674 - DNA, 120 bp, Artificial Sequence
  ENSG00000110025_6 (sequence is synthesized)
accgaggctgagcttgccctcttcgaccccttctccaaggaagaaggcgcagcccccagccccacccatgtggctgagctggcaacgatggaggtggagtctgcaaggctggaccaggaa

SEQ ID NO: 175675 - DNA, 120 bp, Artificial Sequence
  ENSG00000110025_7 (sequence is synthesized)
aaggcaggcgcttacgctgctgcactccagggctatcgagacggcgtgcacgtcttgcttcagggagtccccagtgacccgttgcctgcccgccaggaaggtgtgaagaagaaggcagct

SEQ ID NO: 175676 - DNA, 120 bp, Artificial Sequence
  ENSG00000110025_8 (sequence is synthesized)
gagtacctgaagcgggcagaggagatcctgcgcctgcacctgtctcaactcccaccctaacagggagtgggccattccctgggactctcgctcctgcactgccagccccttctcctctcc

SEQ ID NO: 175677 - DNA, 120 bp, Artificial Sequence
  ENSG00000110025_9 (sequence is synthesized)
ccagggcctggccctacctcctggtcttgtaattacaggagccatttctgtaggtaactggaccaagaatgagaaaaataatgaattcttagctccctgattacacctgccaccttggaa

SEQ ID NO: 175678 - DNA, 120 bp, Artificial Sequence
  ENSG00000110025_10 (sequence is synthesized)
tcaaggactcacacttctgaccctgcctgtctttttggggtttttttgagttggagtctcgctgtgtcgcccagactggagtgcagtggtgggatcgcggctcactgcaacctccacctc

SEQ ID NO: 175679 - DNA, 62 bp, Artificial Sequence
  ENSG00000110025_11 (sequence is synthesized)
agtggtgggatccagtagctgagattgcaggcacatgccaccacgcccagctaatattttgt

SEQ ID NO: 175680 - DNA, 85 bp, Artificial Sequence
  ENSG00000110025_12 (sequence is synthesized)
tcactacgcccggcccatgtctgtctgtcttgatgtgtgagcagcagctgtggtcattaaaccattagtttacccctctagaact

SEQ ID NO: 175681 - DNA, 120 bp, Artificial Sequence
  ENSG00000110025_13 (sequence is synthesized)
agctgtggtcattaaaccattagtttacccctctagaactggggtctgcaaactcccacctgcagccaaatctggcccacctcctttttaatgtaagggctgtgagagtggtttttactt

SEQ ID NO: 175682 - DNA, 120 bp, Artificial Sequence
  ENSG00000110025_14 (sequence is synthesized)
tttttaatgattaaaaaaatcaaaataatattctgtgacaatgacaggtgaaatttatatgtgacaagtgaaaattatatgaaatttaagagtccataaataaaatttgttggaacacaa

SEQ ID NO: 175683 - DNA, 120 bp, Artificial Sequence
  ENSG00000110025_15 (sequence is synthesized)
agggcagagccccactagcctgctcagtgcctgcgcagatcagggagagacgtctcctcagcagtgctgccctgtgggccaatagcagcttcaatgagaattagaagccctgtgccaggg

SEQ ID NO: 175684 - DNA, 120 bp, Artificial Sequence
  ENSG00000110025_16 (sequence is synthesized)
cacgtggtgtggtgtgctggatgcacctgtgcaacaaatagccacgaggaaggaaaggaggcacttcccatgttggggccatctcactgagaaggctttggaaagagccgggtcacactg

SEQ ID NO: 175685 - DNA, 120 bp, Artificial Sequence
  ENSG00000110025_17 (sequence is synthesized)
ctctgggacattttagttccttccctgcaagctcttggtgggatttcctgactggccagggtctggctgcagatcctgaaggcaagaggcctgctggtcaatgggagtgagttctcagct

SEQ ID NO: 175686 - DNA, 120 bp, Artificial Sequence
  ENSG00000110025_18 (sequence is synthesized)
caaagggcagctgcaaagggaaatccctctgggggcctggagccactggcatttggggatgctggaggtagaagggcccccccaatggaggtcagggtcctgggcaccttcttgctgtga

SEQ ID NO: 175687 - DNA, 120 bp, Artificial Sequence
  ENSG00000110025_19 (sequence is synthesized)
gatcctgggactcgacagtcccaagctctgagacactggagtttttcattctaaaatttgccaacgcctggcacattggctcacacctgtaatctcgacactttgggaggctgaggcagg

SEQ ID NO: 175688 - DNA, 72 bp, Artificial Sequence
  ENSG00000110025_20 (sequence is synthesized)
gcaccacggtgcctgctaattttgtatttttagtcgagatgggatttttccatgttggtcaggctggtctca

SEQ ID NO: 175689 - DNA, 88 bp, Artificial Sequence
  ENSG00000110025_21 (sequence is synthesized)
cccgacctcaggtggtgcgggatgtgagccaccgcgcttggcccgtttttttttttgagatcgagtcttgctctggattgccgaggct

SEQ ID NO: 175690 - DNA, 86 bp, Artificial Sequence
  ENSG00000110025_22 (sequence is synthesized)
gctgggattacggatgtgagccaccgcgcttggcccgtttttttttttgagatcgagtcttgctctggattgccgcccacctccgc

SEQ ID NO: 175691 - DNA, 120 bp, Artificial Sequence
  ENSG00000110025_23 (sequence is synthesized)
gcctccgcctcccagagtgctgagattacgggcgtgagccaaaatgccctgcctctttcacttttcttgttctgcctcctcccgttcctgctcctgcctctccagggttggggagtggga

SEQ ID NO: 175692 - DNA, 120 bp, Artificial Sequence
  ENSG00000110025_24 (sequence is synthesized)
agaaggaatgggagggaaaggcaatgttggtgtcacagggctgttatgcctggcctctgggtggcaggcatccaagtgctctgtccttgtgccagctgagtccctgctgggcagctagct

SEQ ID NO: 175693 - DNA, 83 bp, Artificial Sequence
  ENSG00000110025_25 (sequence is synthesized)
ctgtccttgtgccagctgagtccctgctgggcagctagctgcctgggcaggagcttttctattttttttcctctccgacagag

SEQ ID NO: 175694 - DNA, 76 bp, Artificial Sequence
  ENSG00000110025_26 (sequence is synthesized)
caactcctaaggaccacaggcatgcaccatcatgcccagctaagtttttgattttttgtagagatgagatctcact

SEQ ID NO: 175695 - DNA, 120 bp, Artificial Sequence
  ENSG00000110025_27 (sequence is synthesized)
cccacctcagcctcccaaagtgctggatcataggcatgagtgactgtgtccagccaggatcttttcaagacccttcacagacagctccaatgagacattcactcagcccatgggaaaagt

SEQ ID NO: 175696 - DNA, 120 bp, Artificial Sequence
  ENSG00000110025_28 (sequence is synthesized)
agacattcactcagcccatgggaaaagtccccaaagcctggaactgcagtgtgctcagacactgccttatttccctaccctgccatggtgggcacctccaacaagcctctcaccaccaga

SEQ ID NO: 175697 - DNA, 120 bp, Artificial Sequence
  ENSG00000110025_29 (sequence is synthesized)
attctcgaggcaaggagtgggcacctgtgtctcccttcttcacagcaaactccttaactcgagtgtgcaggtgtcccaggtactcttctgctctctgctccctgagcaatacatggaggg

SEQ ID NO: 175698 - DNA, 120 bp, Artificial Sequence
  ENSG00000110025_30 (sequence is synthesized)
ctgtaggcccagccaggaggtgccttctccctcctgcaggaggcccggacttctcagggctctcatggaactcacagggatggggttagagaggcacccactttttccctctccaggatg

SEQ ID NO: 175699 - DNA, 120 bp, Artificial Sequence
  ENSG00000110025_31 (sequence is synthesized)
atagggtatcatgatgcttcctgcccccgcaccttcccctcagaggccttttcaccaaaggtgcaccagatttccagtcgcctcgtgtgtaagctgcaggtaggatgtccgacccccttt

SEQ ID NO: 175700 - DNA, 120 bp, Artificial Sequence
  ENSG00000110025_32 (sequence is synthesized)
tagccagtccagggggatataatgagcctttacctgggaaatgtgaggacacctgtcactcactgtctttacatttgggggcctcagctgaaactgcaaggcttcagaaaacccctgaga

SEQ ID NO: 175701 - DNA, 120 bp, Artificial Sequence
  ENSG00000110025_33 (sequence is synthesized)
ttctctaagtctcctattctaagattattccaagtcttggagcatttctaccctcagcctggtggtggtggcctagcatccttcagggaaactttctggaggggatttttggatttctag

SEQ ID NO: 175702 - DNA, 120 bp, Artificial Sequence
  ENSG00000110025_34 (sequence is synthesized)
gtcaactggagtcaagagggaaataggaccagtgacccagagcttacaaactagagtgtgtacctaaagacataattaggaaggtaaggctgtttttacagaagcacatgaaccctatcg

SEQ ID NO: 175703 - DNA, 120 bp, Artificial Sequence
  ENSG00000110025_35 (sequence is synthesized)
atcaaatagctcatggctagtttttgatccacagacgacttctggattgctctggcattggtcccctctactggggacaggctgataccctgatggacaaaagaagtcttggggttgggc

SEQ ID NO: 175704 - DNA, 120 bp, Artificial Sequence
  ENSG00000110025_36 (sequence is synthesized)
ttctccaaggaaggtgacccgttgcctgcccgccaggaaggtgtgaagaagaaggcagctgagtacctgaagcgggcagaggagatcctgcgcctgcacctgtctcaactcccaccctaa

SEQ ID NO: 175705 - DNA, 120 bp, Artificial Sequence
  ENSG00000110031_0 (sequence is synthesized)
catccagttcctttgcggtcctcttcttcagcacatgccaaagctgttcctcacggcctgtgagacaagagcatcttggatgtaggacaatggaagagttagatgccttattggaggaac

SEQ ID NO: 175706 - DNA, 120 bp, Artificial Sequence
  ENSG00000110031_1 (sequence is synthesized)
tggaacgctccacccttcaggacagtgatgaatattccaacccagctcctcttcccctggatcagcattccagaaaggagactaaccttgatgagacttcggagatcctttctattcagg

SEQ ID NO: 175707 - DNA, 120 bp, Artificial Sequence
  ENSG00000110031_2 (sequence is synthesized)
ataacacaagtcccttgccggcgcagctcgtgtatactaccaatatccaggagctcaatgtctacagtgaagcccaagagccaaaggaatcaccaccaccttctaaaacgtcagcagctg

SEQ ID NO: 175708 - DNA, 120 bp, Artificial Sequence
  ENSG00000110031_3 (sequence is synthesized)
ctcagttggatgagctcatggctcacctgactgagatgcaggccaaggttgcagtgagagcagatgctggcaagaagcacttaccagacaagcaggatcacaaggcctccctggactcaa

SEQ ID NO: 175709 - DNA, 120 bp, Artificial Sequence
  ENSG00000110031_4 (sequence is synthesized)
tgcttgggggtctggagcaggaattgcaggaccttggcattgccacagtgcccaagggccattgtgcatcctgccagaaaccgattgctgggaaggtgatccatgctctagggcaatcat

SEQ ID NO: 175710 - DNA, 120 bp, Artificial Sequence
  ENSG00000110031_5 (sequence is synthesized)
ggcatcctgagcattttgtctgtactcattgcaaagaagagattggctccagtcccttctttgagcggagtggcttggcctactgccccaacgactaccaccaacttttttctccacgct

SEQ ID NO: 175711 - DNA, 120 bp, Artificial Sequence
  ENSG00000110031_6 (sequence is synthesized)
gtgcttactgcgctgctcccatcctggataaagtgctgacagcaatgaaccagacctggcacccagagcacttcttctgctctcactgcggagaggtgtttggtgcagaaggctttcatg

SEQ ID NO: 175712 - DNA, 120 bp, Artificial Sequence
  ENSG00000110031_7 (sequence is synthesized)
tcttagccatgttctcacccaagtgtggtggctgcaatcgcccagtgttggaaaactacctttcagccatggacactgtctggcacccagagtgctttgtttgtggggactgcttcacca

SEQ ID NO: 175713 - DNA, 120 bp, Artificial Sequence
  ENSG00000110031_8 (sequence is synthesized)
gtttttctactggctccttctttgaactggatggacgtccattctgtgagctccattaccatcaccgccggggaacgctctgccatgggtgtgggcagcccatcactggccgttgtatca

SEQ ID NO: 175714 - DNA, 120 bp, Artificial Sequence
  ENSG00000110031_9 (sequence is synthesized)
gtgccatggggtacaagttccatcctgagcactttgtgtgtgctttctgcctgacacagttgtcgaagggcattttcagggagcagaatgacaagacctattgtcaaccttgcttcaata

SEQ ID NO: 175715 - DNA, 120 bp, Artificial Sequence
  ENSG00000110031_10 (sequence is synthesized)
agctcttcccactgtaatgccaactgatccatagcctcttcagattccttataaaatttaaaccaagagaggagaggaaagggtaaattttctgttactgaccttctgcttaatagtctt

SEQ ID NO: 175716 - DNA, 120 bp, Artificial Sequence
  ENSG00000110031_11 (sequence is synthesized)
atagaaaaaggaaaggtgatgagcaaataaaggaacttctagactttacatgactaggctgataatcttattttttaggcttctatacagttaattctataaattctctttctccctctc

SEQ ID NO: 175717 - DNA, 120 bp, Artificial Sequence
  ENSG00000110031_12 (sequence is synthesized)
ttctccaatcaagcacttggagttagatctaggtccttctatctcgtccctctacagatgtattttccacttgcataattcatgccaacactggttttcttaggtttctccattttcacc

SEQ ID NO: 175718 - DNA, 120 bp, Artificial Sequence
  ENSG00000110031_13 (sequence is synthesized)
tctagtgatggccctactcatatcttctctaatttggtcctgatacttgtttcttttcacgttttcccatttccctgtggctcactgtcttacaatcactgctgtggaatcatgatacca

SEQ ID NO: 175719 - DNA, 120 bp, Artificial Sequence
  ENSG00000110031_14 (sequence is synthesized)
cttttagctctttgcatcttccttcagtgtatttttgtttttcaagaggaagtagattttaactggacaactttgagtactgacatcattgataaataaactggcttgtggtttcaataa

SEQ ID NO: 175720 - DNA, 120 bp, Artificial Sequence
  ENSG00000110031_15 (sequence is synthesized)
acatccgggctcaagcgtcgagccaattgctggtctgatgggagggtttttcctactttttcttactttttatctgggcgttggcgtacctttctcggggtgtctgcgtaactgcccaga

SEQ ID NO: 175721 - DNA, 120 bp, Artificial Sequence
  ENSG00000110031_16 (sequence is synthesized)
cttgccttggtttggtcagatgacacctcctctgggactggctagccagcgttcatgtctacattattgatctcgtcttccggtgtgtgagtcactcacctgtgagctcctagagatgcc

SEQ ID NO: 175722 - DNA, 60 bp, Artificial Sequence
  ENSG00000110031_17 (sequence is synthesized)
aaacgtcagcagctgctcagttggatgagctcatggctcacctgactgagatgcaggcca

SEQ ID NO: 175723 - DNA, 120 bp, Artificial Sequence
  ENSG00000110031_18 (sequence is synthesized)
gagccactgcgcccggccaaaaggactgttaaagagacctgactaagcaggacagaggagaccagtgagcaagctgagacacagcaagggagatcaaagtatggctctgacagtaggaag

SEQ ID NO: 175724 - DNA, 120 bp, Artificial Sequence
  ENSG00000110031_19 (sequence is synthesized)
gctcatggctcacctgactgagatgcaggccaaggtgagtgcaggccaaggtgagtgcaggccaaggtgagtgcagtccagatgataaacagggcccatggggtcaccagtttatctttg

SEQ ID NO: 175725 - DNA, 120 bp, Artificial Sequence
  ENSG00000110042_0 (sequence is synthesized)
attccgagcgcggccgtgcggcgagatcccaccccggcgtctgcagaggccgaggcgcaactggtgcgagggctgggtccttgcctcgccgtcagccccagctcgcggccgccggggctc

SEQ ID NO: 175726 - DNA, 120 bp, Artificial Sequence
  ENSG00000110042_1 (sequence is synthesized)
gggccgcgcgcccgccgagtggcttttgcaaggcgggggcctgtttgcagagagccgggcatttgcatgaagcgactcgaccccacagagcagcggcagcagcagcggaccccggcggcg

SEQ ID NO: 175727 - DNA, 80 bp, Artificial Sequence
  ENSG00000110042_2 (sequence is synthesized)
cggcgcgcggtcccagccaggcggccccggtgtcccggccccggtggatgcacggctggggaggagcccatgggccggag

SEQ ID NO: 175728 - DNA, 120 bp, Artificial Sequence
  ENSG00000110042_3 (sequence is synthesized)
gcaggaggaagcggaggaggtcgggcgctcggggcccgggaggcgggccgcgcagcgccgcagccccgggctcgccatgctcctggcctcggccgtggtggtctgggaatggctgaacga

SEQ ID NO: 175729 - DNA, 120 bp, Artificial Sequence
  ENSG00000110042_4 (sequence is synthesized)
ccgtggtggtctgggaatggctgaacgagcacggccgctggcgtccctacagcccagcggtgagccaccacatcgaggcggtggtccgcgccggcccccgcgcggggggcagcgtggtgc

SEQ ID NO: 175730 - DNA, 120 bp, Artificial Sequence
  ENSG00000110042_5 (sequence is synthesized)
tgggccaggtggacagccgtctcgcgccctacatcatcgacctgcagtccatgaaccagttccgccaagacacgggaactctccgcccagttcgccgcaactactacgacccctcctcgg

SEQ ID NO: 175731 - DNA, 120 bp, Artificial Sequence
  ENSG00000110042_6 (sequence is synthesized)
cccctgggaagggcgtggtgtgggagtgggagaacgacaatggctcctggacgccctacgacatggaagtgggcatcaccatccagcatgcctatgagaagcagcacccctggatcgacc

SEQ ID NO: 175732 - DNA, 120 bp, Artificial Sequence
  ENSG00000110042_7 (sequence is synthesized)
tcacttccattggctttagctacgtaattgacttcaacaccatgggccagatcaaccgtcagacccagcgccaacgccgcgtccgccggcgcctcgacctcatctaccccatggtcacag

SEQ ID NO: 175733 - DNA, 120 bp, Artificial Sequence
  ENSG00000110042_8 (sequence is synthesized)
ggaccttgcctaaggctcagtcctggccagtcagccctgggccagccacctcgccccccatgtccccctgctcctgtccccagtgtgtcttggtgatgagtgttaaggcagccgtggtca

SEQ ID NO: 175734 - DNA, 120 bp, Artificial Sequence
  ENSG00000110042_9 (sequence is synthesized)
atggcagcactgggcccctacagctgccagtgacccgcaagaacatgccgcctcctggagtggtcaagctacccccactgccaggctctggggccaagccactggacagcacaggcacca

SEQ ID NO: 175735 - DNA, 120 bp, Artificial Sequence
  ENSG00000110042_10 (sequence is synthesized)
ttcgaggcccactgaagaccgccccatcgcaggtgatccggagacaagcctccagcatgcccactgggacaaccatgggctctcctgccagtcccccaggacccaacagcaagaccggaa

SEQ ID NO: 175736 - DNA, 120 bp, Artificial Sequence
  ENSG00000110042_11 (sequence is synthesized)
gggtggccctggccaccttgaatcgtaccaacctgcagcgactggccattgcccagtcccgggtgctgatcgcctctggggtccccacagtcccagtgaagaacctaaatgggtccagtc

SEQ ID NO: 175737 - DNA, 120 bp, Artificial Sequence
  ENSG00000110042_12 (sequence is synthesized)
ctgtcaaccctgccttggcaggaatcactgggatcctcatgagtgcagcggggctgcctgtgtgtctcaccaggccaccaaagctggtcctacacccaccccccgtcagcaagagtgaaa

SEQ ID NO: 175738 - DNA, 120 bp, Artificial Sequence
  ENSG00000110042_13 (sequence is synthesized)
taaaatccatcccaggggtttccaacacaagccgcaagaccaccaaaaaacaagccaagaaaggtaaaaccccagaggaagtgctaaaaaaatatctacagaaagtccggcacccaccag

SEQ ID NO: 175739 - DNA, 120 bp, Artificial Sequence
  ENSG00000110042_14 (sequence is synthesized)
atgaggactgcaccatctgtatggaacgcctcacggccccctcaggctacaagggcccgcagcctacggtaaaacctgacctggtagggaagctgtccagatgcggccacgtctaccaca

SEQ ID NO: 175740 - DNA, 120 bp, Artificial Sequence
  ENSG00000110042_15 (sequence is synthesized)
tctactgcttggttgccatgtacaacaatgggaacaaggatggaagtttgcagtgtccaacctgcaagaccatttatggggtgaagacaggcacccaacctccagggaagatggagtacc

SEQ ID NO: 175741 - DNA, 120 bp, Artificial Sequence
  ENSG00000110042_16 (sequence is synthesized)
acctcatcccccactccttgcctggccacccagactgcaaaaccatccggatcatctacagcatcccccccggcattcagggaccggaacacccgaatcctgggaagagtttcagcgccc

SEQ ID NO: 175742 - DNA, 120 bp, Artificial Sequence
  ENSG00000110042_17 (sequence is synthesized)
gaggcttcccacgacactgttaccttccggacagcgagaaagggagaaaagttctgaagctgctgctcgtggcctgggatcgccgcctcatttttgccattggcacctccagcaccacag

SEQ ID NO: 175743 - DNA, 120 bp, Artificial Sequence
  ENSG00000110042_18 (sequence is synthesized)
gcgagtcagacaccgtcatctggaatgaggtccaccacaagacagagtttggctctaatctcactggccatggctacccagatgccaattacctggataatgtgctggctgaactggctg

SEQ ID NO: 175744 - DNA, 120 bp, Artificial Sequence
  ENSG00000110042_19 (sequence is synthesized)
cccagggcatctctgaggacagcactgcccaggagaaggactgaggccagaaaagctttgaggtgggaggggccatggagactgcaggacaggaagtgaggagagtgagtcaatgtagaa

SEQ ID NO: 175745 - DNA, 120 bp, Artificial Sequence
  ENSG00000110042_20 (sequence is synthesized)
gaagttggtgtcctgccctcccaactttctatcctcccctcctgccctgtgtccatccctcatccctcccaaccacagtgggagccagactgaatatagcgacatcattcataaatctca

SEQ ID NO: 175746 - DNA, 120 bp, Artificial Sequence
  ENSG00000110042_21 (sequence is synthesized)
tccaacacaaagggagatgggatgagggccatcctgggtctgttcccatggagtttttggtgctgggtaggcaggaatcccctccctaccccacctcccaagtaggggcatggtcagcac

SEQ ID NO: 175747 - DNA, 120 bp, Artificial Sequence
  ENSG00000110042_22 (sequence is synthesized)
acctagggtatgggcagtgcttaggcactccatatcctggctttgggaagccggggtttcttgcctcagccggcttcttgctacttccactctgctttgagactggagtttctgctattc

SEQ ID NO: 175748 - DNA, 120 bp, Artificial Sequence
  ENSG00000110042_23 (sequence is synthesized)
tccctctgctggaggcagggagctctcactgtgcaaggttggggggtgggcaaaggggtgaatcactaaactgctgtgacatcagaaactgatgccttggtgtagagcaaggaagcactt

SEQ ID NO: 175749 - DNA, 120 bp, Artificial Sequence
  ENSG00000110042_24 (sequence is synthesized)
cttcccaagagggtcggagaaggaaaagcctctgggagcacattctgctgtcatcacagtccttggcttctctgggccctcctctcctcctcacagctctcacctgtccaaagaggcatc

SEQ ID NO: 175750 - DNA, 120 bp, Artificial Sequence
  ENSG00000110042_25 (sequence is synthesized)
ttctctcatgtggatggatggactctggggttcctctttggagtggcatcccatgatgctgtttctagaccctctctgatcaaaccagagcctgcatcccactgagcatctgaactgtcc

SEQ ID NO: 175751 - DNA, 120 bp, Artificial Sequence
  ENSG00000110042_26 (sequence is synthesized)
tcagggagaggagcccacagccttcttcccaactcattctagaccagctcaaagattccatgagtttcatcgagtcactgtgagtggagcccatgctgggctctgtgccctctgtgtctg

SEQ ID NO: 175752 - DNA, 120 bp, Artificial Sequence
  ENSG00000110042_27 (sequence is synthesized)
tgcatgcgcgtgtgtgtgtgggcgtgtgtgcattgctgggccagcttgaagggaaggcccgtcatgtccctgcactctgttttgcaagatgccaaaccccagttctgatggggctccaac

SEQ ID NO: 175753 - DNA, 120 bp, Artificial Sequence
  ENSG00000110042_28 (sequence is synthesized)
agccaggctgtggtcctttgacgttcctcacctgttgccaacctatcccgtagtgaactgaaaccccaatgaagacagaactgtgcctggggagatgcaatgaggtgagggctgaactca

SEQ ID NO: 175754 - DNA, 120 bp, Artificial Sequence
  ENSG00000110042_29 (sequence is synthesized)
tccttttatatttcttttcaagattggatcagagctcatctccatccagtcttgtttctatgaaggcttcaatctgtttccatgcaaatttgctaatcagagcccagagctgctgggtcc

SEQ ID NO: 175755 - DNA, 120 bp, Artificial Sequence
  ENSG00000110042_30 (sequence is synthesized)
ctcatctccctcatctattatagattgacttacagcagggagagaatctctttagctcattcctaatggagttgggatcacaatatggtctggtccaatctgcatcttgttgtgtcccaa

SEQ ID NO: 175756 - DNA, 120 bp, Artificial Sequence
  ENSG00000110042_31 (sequence is synthesized)
gaccctatctcctccccaacattcttattgcctttggctcccagtaaggaacgaattgggggccagggaggagaacaggggggatcaagaagggaaacccaattccccctttgaaagtgg

SEQ ID NO: 175757 - DNA, 120 bp, Artificial Sequence
  ENSG00000110042_32 (sequence is synthesized)
gttctttgaactatgtgtttgggggaagttcctctggatactaatttgaatttatatacctcatgttttgggggtttgacgtatatatatatatatatatatgcatatatatttcataat

SEQ ID NO: 175758 - DNA, 120 bp, Artificial Sequence
  ENSG00000110042_33 (sequence is synthesized)
atttggaaggtttttgatgctagaaaaatggaaacaagagaaccttcaaaaatggtacttagatgggaactggaggccaatctttcataaagccagccccatagctgcttgctgttaggc

SEQ ID NO: 175759 - DNA, 120 bp, Artificial Sequence
  ENSG00000110042_34 (sequence is synthesized)
ctccagccattttgacattggggtggatagtcgattcacctgcctgtcagtcgattcacctgcctgtcacccagttctgtggatgtgctggtgctgagcctttgctctctttccaaatgg

SEQ ID NO: 175760 - DNA, 120 bp, Artificial Sequence
  ENSG00000110042_35 (sequence is synthesized)
ttacagggatgttgatcagctccaccagagggagctctgatgggaggaattgctctgccatccttgtccctgtgtctcctgtcggcaggcagccattgtatctcaccagcagaccaggag

SEQ ID NO: 175761 - DNA, 120 bp, Artificial Sequence
  ENSG00000110042_36 (sequence is synthesized)
actggtcccaaggttactgcaccacagggcaatttcctgccatagttaggaaggaaacacctgaactaaatggaagagacatccctgcggtgtttaatatcacacccatgccctttgtca

SEQ ID NO: 175762 - DNA, 120 bp, Artificial Sequence
  ENSG00000110042_37 (sequence is synthesized)
ggttaccatgtacagagattacttggagagcctcatgccgtctctaccttcgcacactggtcaagtatctgctgagcttcttggccgcaaggatgcagaaataggctgagggtccatggg

SEQ ID NO: 175763 - DNA, 120 bp, Artificial Sequence
  ENSG00000110042_38 (sequence is synthesized)
aagaaagacacaatgaggcagtaggaggtggggaagaaaagaagacagactttcaaaatggaattaggcactggggagagatcagtttccccacatcagggagaagaaggtataggtggg

SEQ ID NO: 175764 - DNA, 120 bp, Artificial Sequence
  ENSG00000110042_39 (sequence is synthesized)
gaagggggtggccaggagcagaaggaagaagactcaagatggaaagggagccgctgtgcctgtggcaataccacttggagaggtcgacttcataccttcaagccttttcccctgggcttt

SEQ ID NO: 175765 - DNA, 120 bp, Artificial Sequence
  ENSG00000110042_40 (sequence is synthesized)
tgattgtgtctgtgccccctttcttgtcctctctgcagatgcccagtaggggctacctcatcctcgtgctgttcttgtgtggctttctgggcagtagggatcttgaatttcctttctaac

SEQ ID NO: 175766 - DNA, 120 bp, Artificial Sequence
  ENSG00000110042_41 (sequence is synthesized)
actgtgcccggcaaggcggggagcattcctctgccctttgtcttgtgccaacctggaaaggtgcagtctagatttcagtgagaaccctgccagctgagccctgtgcatctactaccttga

SEQ ID NO: 175767 - DNA, 120 bp, Artificial Sequence
  ENSG00000110042_42 (sequence is synthesized)
cacagagtgttttcccactagaagctctgctctgctctcctggcccaagtaggggattccatgccttccctttcatggtcttagcaccagcagcctagtttctcccttccagagtctcca

SEQ ID NO: 175768 - DNA, 120 bp, Artificial Sequence
  ENSG00000110042_43 (sequence is synthesized)
gggatgacaaattggattggagacaaacctcgtcagatgctcatcccctaaaaggttaattgtgtatttgtggctgcgtgtgcctttgtgttttcattctcttcccatttttgtacattt

SEQ ID NO: 175769 - DNA, 120 bp, Artificial Sequence
  ENSG00000110042_44 (sequence is synthesized)
tggtcttctctgtggttttatacttggtcaaaagtactcgtcttggtattgcactgttgtgtgcatgagaaaactgggggaaggctcactggtacaagaaaggacccctgacccctttcc

SEQ ID NO: 175770 - DNA, 120 bp, Artificial Sequence
  ENSG00000110042_45 (sequence is synthesized)
ttctctgtggtccccggcattagattgggggttctgggagaggcaggtgaatgtcctaagtgaattgttctgtttgtaactggaatgtttttgaagtctttggtgttgctccgtgaaagg

SEQ ID NO: 175771 - DNA, 120 bp, Artificial Sequence
  ENSG00000110042_46 (sequence is synthesized)
acatcgccacctggtgctcatgaggtgtctttgcagaacaataaatggcaaatgaacaaccacaaaattgttactcttgttggccttctgctgtttgtagattagtgcacctatctgtga

SEQ ID NO: 175772 - DNA, 120 bp, Artificial Sequence
  ENSG00000110042_47 (sequence is synthesized)
gggatttgggttacctccctgagtctgtaagcaaccacaagccctgccactgggtgggggaagtccctccccaaccacttaaaaacaaattttccacatattacccacccacacatttga

SEQ ID NO: 175773 - DNA, 120 bp, Artificial Sequence
  ENSG00000110042_48 (sequence is synthesized)
cctggctagactttgtttgcctaaaggaacagaccacattgctgggaaaatgagtaagtgaacgtgtgggagaaaaacacttttagaatcacgaatattcacttttaaaggtctctttgc

SEQ ID NO: 175774 - DNA, 120 bp, Artificial Sequence
  ENSG00000110042_49 (sequence is synthesized)
ctggctgcaatatagtgtgtgtttaaattatttacaggctgttgtttctcaaataaatgtttaatattaatcattcccaaactgacaagaacacaaaaataaaatgcaaatacagagcca

SEQ ID NO: 175775 - DNA, 120 bp, Artificial Sequence
  ENSG00000110042_50 (sequence is synthesized)
tactgagtggctgaataatgactccctgtgtaggctcctgccctagagagctggtcccctcctcagggacaggggcttctcttacatatccctcagcatggagcatgggaccagttgtgg

SEQ ID NO: 175776 - DNA, 120 bp, Artificial Sequence
  ENSG00000110042_51 (sequence is synthesized)
aatttacctcctattactttggagaaagcagaaatagcctaggtgactgggctgggagggaaaaactaagatctatcactcaccagggtgcattttgttcccctggcccttcatctctgg

SEQ ID NO: 175777 - DNA, 120 bp, Artificial Sequence
  ENSG00000110046_0 (sequence is synthesized)
agtgaacagcggagccggacggggatcgccggcgggcggcaagcggaggcggcccaggcccggcggtctccgagatgtcacgatggctgtggccatggtcaaactgtgtgaaagagcggg

SEQ ID NO: 175778 - DNA, 120 bp, Artificial Sequence
  ENSG00000110046_1 (sequence is synthesized)
tctgccgctacttgctgcaccactacttaggtcacttcttccaagagcacctcagcctggaccagctcagcctcgatctgtacaagggcagcgttgccctgcgagacatccacctggaaa

SEQ ID NO: 175779 - DNA, 120 bp, Artificial Sequence
  ENSG00000110046_2 (sequence is synthesized)
tctggtctgtgaacgaggtgctggagtcaatggagtcaccgctggagctggtggaaggcttcgtgggctccatcgaggtggccgtgccctgggctgctctgctcaccgaccactgcacag

SEQ ID NO: 175780 - DNA, 120 bp, Artificial Sequence
  ENSG00000110046_3 (sequence is synthesized)
tgcgcgtgtccggcctccagctcaccttgcagccccgccggggtccagcgccaggggctgccgactcacagagctgggcctcatgcatgaccacaagcctgcagctggcccaggagtgtc

SEQ ID NO: 175781 - DNA, 120 bp, Artificial Sequence
  ENSG00000110046_4 (sequence is synthesized)
tgcgggatgggctaccggagccctctgagccaccacagcccctggaggggctggagatgtttgcccagaccattgagactgtgcttcggaggatcaaagtgaccttcctggacactgtcg

SEQ ID NO: 175782 - DNA, 120 bp, Artificial Sequence
  ENSG00000110046_5 (sequence is synthesized)
tgagggtggagcactctccgggtgatggggaacgtggtgtggccgtcgaggtccgtgtgcagagactggagtactgtgatgaggcagtgcgggacccaagccaggcgccgccggtggacg

SEQ ID NO: 175783 - DNA, 120 bp, Artificial Sequence
  ENSG00000110046_6 (sequence is synthesized)
tgcatcagccgcctgccttcctgcacaagctgctgcagctggcaggggtccgcctgcactacgaggagctcccggcacaggaagagcctccagagccccccttgcagatcggcagctgct

SEQ ID NO: 175784 - DNA, 120 bp, Artificial Sequence
  ENSG00000110046_7 (sequence is synthesized)
cagggtacatggagctgatggtgaagttgaagcaaaatgaggccttccctggccccaagttggaggtggcgggacagctgggctccctgcacctgctcctgaccccgaggcagctccagc

SEQ ID NO: 175785 - DNA, 120 bp, Artificial Sequence
  ENSG00000110046_8 (sequence is synthesized)
aacttcaggaactgctcagcgccgtgagccttacagaccacgagggcctggctgacaagctgaacaagagccgcccgctaggtgccgaagacctgtggctgattgagcaggacctgaacc

SEQ ID NO: 175786 - DNA, 120 bp, Artificial Sequence
  ENSG00000110046_9 (sequence is synthesized)
agcagctgcaggcaggggcagtggctgagcccctcagcccagacccccttaccaacccccttctcaacctggataacactgacctcttcttctccatggctggcctcacaagcagtgtgg

SEQ ID NO: 175787 - DNA, 120 bp, Artificial Sequence
  ENSG00000110046_10 (sequence is synthesized)
cctcagccctctctgagctctccctctccgatgtagacctggcctcctctgtgcgcagcgacatggcctcccgccggctctctgcccaggcccacccagctggcaagatggcccccaacc

SEQ ID NO: 175788 - DNA, 120 bp, Artificial Sequence
  ENSG00000110046_11 (sequence is synthesized)
ccctcctggacaccatgcgccctgactcgctgctgaagatgaccttggggggtgtgaccctgaccttgcttcagacgtctgccccatcttccggaccacctgacctcgccacgcactttt

SEQ ID NO: 175789 - DNA, 120 bp, Artificial Sequence
  ENSG00000110046_12 (sequence is synthesized)
tcaccgagtttgatgccaccaaggatgggcccttcggttcccgagacttccatcaccttcgaccacgcttccagagggcctgtccctgtagccatgttcggctaacgggcacagccgtgc

SEQ ID NO: 175790 - DNA, 120 bp, Artificial Sequence
  ENSG00000110046_13 (sequence is synthesized)
agctgtcctgggagctgcggacgggcagtcggggccggcggacaaccagcatggaagtgcacttcgggcagctggaggtgctggagtgtctgtggccccggggcacctctgagcctgagt

SEQ ID NO: 175791 - DNA, 120 bp, Artificial Sequence
  ENSG00000110046_14 (sequence is synthesized)
acacggagatcctgacctttcctggtacgctgggctcccaggcctcagctcggccctgcgcccatctgcgccacacacagatcctgcgccgtgtgcctaagagccgaccccggcgctcag

SEQ ID NO: 175792 - DNA, 120 bp, Artificial Sequence
  ENSG00000110046_15 (sequence is synthesized)
ttgcctgccattgccactcagaactggccctggacctggccaacttccaggcggacgtggagctgggggccctggaccggctggccgccctactgcgcctggccaccgtacctgctgagc

SEQ ID NO: 175793 - DNA, 120 bp, Artificial Sequence
  ENSG00000110046_16 (sequence is synthesized)
ctccagccggcctgctgacagagcccctgccggcgatggagcagcagacggtatttcggctctctgcaccccgggccacgctgcggctgcgcttccccattgccgacctgcggcctgagc

SEQ ID NO: 175794 - DNA, 120 bp, Artificial Sequence
  ENSG00000110046_17 (sequence is synthesized)
cggacccctgggcgggccaggccgtgcgggctgagcagcttcggctggagctgagtgagccccagttccggtcagagcttagcagtgggcctggtcccccagtccccacccacctggaac

SEQ ID NO: 175795 - DNA, 120 bp, Artificial Sequence
  ENSG00000110046_18 (sequence is synthesized)
tcacctgctccgacctacatggtatctatgaagatggagggaagccacctgtcccttgcctgcgtgtctccaaagccctggaccccaagagcactgggcgcaagtacttcctgccccagg

SEQ ID NO: 175796 - DNA, 120 bp, Artificial Sequence
  ENSG00000110046_19 (sequence is synthesized)
tagtggtgactgtgaacccccagtccagcagcacacagtgggaggtggccccggagaagggagaggaactggagctgtcagtggagagtccctgtgagctgcgggaacctgagccctcgc

SEQ ID NO: 175797 - DNA, 120 bp, Artificial Sequence
  ENSG00000110046_20 (sequence is synthesized)
ccttctcctctaagaggaccatgtatgagacagaggagatggtgatccctggagaccctgaggagatgaggacgttccagagccggaccctggcactgtcccgctgcagcctggaagtga

SEQ ID NO: 175798 - DNA, 120 bp, Artificial Sequence
  ENSG00000110046_21 (sequence is synthesized)
tcctgcccagtgtccacatctttctgcccagcaaggaggtctacgagagcatctacaacaggatcaacaacgacctgctcatgtgggagcctgcagatctgcttcccacccccgaccccg

SEQ ID NO: 175799 - DNA, 120 bp, Artificial Sequence
  ENSG00000110046_22 (sequence is synthesized)
ccgcccagccctcgggcttccccggcccctcaggcttctggcacgacagctttaagatgtgcaagtcagccttcaagctggccaactgctttgatctcaccccagactcggactcggatg

SEQ ID NO: 175800 - DNA, 120 bp, Artificial Sequence
  ENSG00000110046_23 (sequence is synthesized)
acgaggatgcccacttcttctcagtgggggcatcaggtggcccacaggccgctgcccctgaggccccaagtcttcacttgcagagcaccttctctacactggtgacagtgctgaaggggc

SEQ ID NO: 175801 - DNA, 120 bp, Artificial Sequence
  ENSG00000110046_24 (sequence is synthesized)
ggatcacagccctctgtgagaccaaggatgagggtgggaagcggctggaggctgtgcacggggagctggtgctggacatggagcacggtaccctcttcagcgtctcccagtactgtggcc

SEQ ID NO: 175802 - DNA, 120 bp, Artificial Sequence
  ENSG00000110046_25 (sequence is synthesized)
agccaggacttggctacttctgtctggaagctgaaaaggcaacactctaccaccgagcggccgtggatgactacccgctgcccagtcacctggaccttcccagtttcgctcccccggctc

SEQ ID NO: 175803 - DNA, 120 bp, Artificial Sequence
  ENSG00000110046_26 (sequence is synthesized)
gaccccacatgttgtccactgctgtgcgcatccacctggacccccacaagaatgtgaaggagttcctggtgacactgcggttgcacaaagccaccttgcgccactacatggccctgcccg

SEQ ID NO: 175804 - DNA, 120 bp, Artificial Sequence
  ENSG00000110046_27 (sequence is synthesized)
agcagagctggcattcccagttgttggagttcctagacgtgctggatgaccctgtgctgggctacctgcccccgacggtcatcaccatcctgcacacacacctgttctcctgctctgtgg

SEQ ID NO: 175805 - DNA, 120 bp, Artificial Sequence
  ENSG00000110046_28 (sequence is synthesized)
actataggccactctacctcccagtgcgtgtcctcatcaccgcggagaccttcactctctccagcaacatcatcatggacacctccaccttcctgctcaggttcatcctcgatgactccg

SEQ ID NO: 175806 - DNA, 120 bp, Artificial Sequence
  ENSG00000110046_29 (sequence is synthesized)
ccttgtacctgtccgacaagtgtgaggtggagaccctggacctgcggcgagattatgtctgtgttttggatgttgacctcttggaacttgtgattaaaacctggaaagggagcaccgagg

SEQ ID NO: 175807 - DNA, 120 bp, Artificial Sequence
  ENSG00000110046_30 (sequence is synthesized)
gcaaactgagccagccactattcgagctgcgctgctccaacaatgtggtacacgtgcacagctgtgccgactcctgtgccctgctggtcaacctgctccagtacgtaatgagcacaggcg

SEQ ID NO: 175808 - DNA, 120 bp, Artificial Sequence
  ENSG00000110046_31 (sequence is synthesized)
atctgcaccccccaccccggccccccagccccacggagatcgccggccagaagctctcggagagtcctgcctctctgccctcgtgccccccagtggagacggccctcatcaaccagcgtg

SEQ ID NO: 175809 - DNA, 120 bp, Artificial Sequence
  ENSG00000110046_32 (sequence is synthesized)
acctggccgacgccctcctggacaccgagcgcagcctacgggagctggcccagccttcaggtggccacctccctcaggcgtcgcccatctccgtctacctattcccaggtgaacggagtg

SEQ ID NO: 175810 - DNA, 120 bp, Artificial Sequence
  ENSG00000110046_33 (sequence is synthesized)
gggccccacccccttcaccacctgtcgggggccctgctggcagcttagggtcatgctcagaggagaaggaagatgaaagggaagaggagggcgatggagacaccctggacagtgatgagt

SEQ ID NO: 175811 - DNA, 120 bp, Artificial Sequence
  ENSG00000110046_34 (sequence is synthesized)
tctgcatccttgatgctcccggcctgggcatcccgccccgagatggggagcctgtggtgacacagctgcatcccggccccatcgttgtgagggacggttacttctcacggccgatcggca

SEQ ID NO: 175812 - DNA, 120 bp, Artificial Sequence
  ENSG00000110046_35 (sequence is synthesized)
gcacggacttgctgcgggcacctgcccatttcccagtgcccagcactcgggtggtgctacgtgaggtctccctcgtctggcacctctatgggggccgagactttggcccccaccccggcc

SEQ ID NO: 175813 - DNA, 120 bp, Artificial Sequence
  ENSG00000110046_36 (sequence is synthesized)
acagggcaagaactggcctctcaggtcccaggagctccccttcccgctgctctggccccaaccggccccagaactcatggcgcacgcaggggggcagcgggcggcagcaccatgtcctca

SEQ ID NO: 175814 - DNA, 120 bp, Artificial Sequence
  ENSG00000110046_37 (sequence is synthesized)
tggagatccagctgagcaaggtaagcttccagcacgaggtgtacccagcggagccagccacaggccctgcggcccccagccaggagctggaggagcgaccgctgtcccgtcaggtgttca

SEQ ID NO: 175815 - DNA, 120 bp, Artificial Sequence
  ENSG00000110046_38 (sequence is synthesized)
tcgtgcaggagctggaggtccgagaccggctcgcctcctcccagatcaacaagttcctgtacctacacacgagtgagcggatgccgcgacgtgcccactctaacatgctcaccatcaaag

SEQ ID NO: 175816 - DNA, 120 bp, Artificial Sequence
  ENSG00000110046_39 (sequence is synthesized)
cgctgcatgtggcccccactaccaacctgggtgggcctgagtgctgtctccgcgtctcgctgatgcccctgcggctcaatgtggaccaggatgccctcttcttcctcaaggacttcttca

SEQ ID NO: 175817 - DNA, 120 bp, Artificial Sequence
  ENSG00000110046_40 (sequence is synthesized)
ctagtctggtggccggcatcaaccccgtggtcccaggggagacctccgctgaggctcgccccgagactcgagcccagcccagcagccccctggaagggcaggccgaaggcgtagagacca

SEQ ID NO: 175818 - DNA, 120 bp, Artificial Sequence
  ENSG00000110046_41 (sequence is synthesized)
ctggttcgcaggaggccccaggaggtggacacagcccctcccctcctgaccagcagcccatctacttcagagagttccgcttcacgtctgaggtccccatctggctggattaccatggca

SEQ ID NO: 175819 - DNA, 120 bp, Artificial Sequence
  ENSG00000110046_42 (sequence is synthesized)
agcacgtcacgatggaccaggtgggcacttttgctggcctcctcatcggcctggcccaactcaactgctccgagctgaagctaaagcggctctgttgcaggcacgggctcctgggtgtgg

SEQ ID NO: 175820 - DNA, 120 bp, Artificial Sequence
  ENSG00000110046_43 (sequence is synthesized)
acaaggtgctgggctatgccctcaacgagtggctgcaggacatccgcaagaaccagctgcccggcctgctgggaggcgtgggccccatgcactcggttgtccagctcttccaagggttcc

SEQ ID NO: 175821 - DNA, 120 bp, Artificial Sequence
  ENSG00000110046_44 (sequence is synthesized)
gggacctgctgtggctgcccattgagcagtacaggaaggatggccgcctcatgcgggggctgcagcgaggggctgcctcctttggctcatccacagcctctgccgccctggaactcagca

SEQ ID NO: 175822 - DNA, 120 bp, Artificial Sequence
  ENSG00000110046_45 (sequence is synthesized)
accggttggtacaggctatccaggccacagctgagaccgtgtatgacatcctgtccccggcagcccccgtctcccgctccctgcaggataagcgctctgcgcggaggctgcgcaggggcc

SEQ ID NO: 175823 - DNA, 120 bp, Artificial Sequence
  ENSG00000110046_46 (sequence is synthesized)
agcagcctgccgacctgcgggagggtgtggccaaggcctacgacacagtgcgagagggcatcttggatacagctcagaccatctgtgacgtggcatcgcggggccatgagcagaaggggc

SEQ ID NO: 175824 - DNA, 120 bp, Artificial Sequence
  ENSG00000110046_47 (sequence is synthesized)
tgacgggcgccgtggggggcgtgatccgccagctgcccccgactgtggtgaagccgctcatcctggccacggaggccacgtccagcctgctcgggggcatgcgcaaccagattgtccccg

SEQ ID NO: 175825 - DNA, 120 bp, Artificial Sequence
  ENSG00000110046_48 (sequence is synthesized)
acgcccacaaggaccacgccctcaagtggcgctcggacagtgcccaagactgagcctggggtgcccggcacccagagggtgctgcccaccatgctcctgagcctcccaagagctgcagcc

SEQ ID NO: 175826 - DNA, 120 bp, Artificial Sequence
  ENSG00000110046_49 (sequence is synthesized)
cacgggcccggcccggcctggcccttcaggggatggccactgtgaaggacgccttcccagcctgcccgttgccaatctgctgtgagaggggggcctccctgccttggggccttagccctg

SEQ ID NO: 175827 - DNA, 120 bp, Artificial Sequence
  ENSG00000110046_50 (sequence is synthesized)
gctctgcacttttcctccggggagaaaggacactgcccctcccccgacctgggcccacactgctgccttctcccaggacggaggcttttggaccctcggaccccatcccactcagccaag

SEQ ID NO: 175828 - DNA, 120 bp, Artificial Sequence
  ENSG00000110046_51 (sequence is synthesized)
tgtctttctgtgtctggggggaggaggggatgatatccgtgtggttcgatgtattatttttaagctccgtgagtgcgtgggtcagtgtctgcatgaagtggaataaactgcccaccgcca

SEQ ID NO: 175829 - DNA, 120 bp, Artificial Sequence
  ENSG00000110046_52 (sequence is synthesized)
ggcaggcaagtggggagagtgggctggggcgtccaggacctgactgggcctgcctgccttgagaccctgtttctccctacagcgccaggggctgccgactcacagagctgggcctcatgc

SEQ ID NO: 175830 - DNA, 120 bp, Artificial Sequence
  ENSG00000110046_53 (sequence is synthesized)
cctgcccttcagtggcacacagaacaggggctccagacaacggcacggccaccctggtgcccagatgggaaattctgcctcccctttgctgctctacctgacctgagacccctccccaac

SEQ ID NO: 175831 - DNA, 120 bp, Artificial Sequence
  ENSG00000110046_54 (sequence is synthesized)
tcctcagtgcttcggaggatcaaagtgaccttcctggacactgtcgtgagggtggagcactctccgggtgatggggaacgtggtgtggccgtcgaggtccgtgtgcagaggtaagggcag

SEQ ID NO: 175832 - DNA, 120 bp, Artificial Sequence
  ENSG00000110046_55 (sequence is synthesized)
ggtggtagggttggggaggtgggctgcatcgtgagcccggactggtgtccagaggccaggtgatacaggcccagagtggccgaggccccaagaaccaagttagatgctgagggtctgagg

SEQ ID NO: 175833 - DNA, 120 bp, Artificial Sequence
  ENSG00000110046_56 (sequence is synthesized)
agcaagggctggcctgagcctccgggctggacatggtggttcaggacggcctaggtgtgatggggcagctctgcaggctaggctccctgaccccgtgcccctagagcagagcactgtgtg

SEQ ID NO: 175834 - DNA, 120 bp, Artificial Sequence
  ENSG00000110046_57 (sequence is synthesized)
acatggagctgatggtgaagttgaagcaaaatgaggccttccctggccccaaggtgggtccccaggcccctggggagggggtgagtaccccatctcaagactcctcctcctcagcaaggc

SEQ ID NO: 175835 - DNA, 120 bp, Artificial Sequence
  ENSG00000110046_58 (sequence is synthesized)
tgattatctacagcccacagtggggatgtcaagtgcgggatttacttccttcttggcagctaaagaaactgaggctgtaggccaggcacagggttcacacctgtaatcccagcactttgg

SEQ ID NO: 175836 - DNA, 78 bp, Artificial Sequence
  ENSG00000110046_59 (sequence is synthesized)
cccttctcagggcctcagtttctcctctgtaaaaaggacgcagttggctgggcatgatggctcacacatccgtctcta

SEQ ID NO: 175837 - DNA, 120 bp, Artificial Sequence
  ENSG00000110047_0 (sequence is synthesized)
attcggcagagggcgcttcgacgggctgggctgtgcgcctgcgcagtgtgggtcgctcccgattccctgccccggccggccccgcctcggctccgcaccctcgccccgctctcagccgcc

SEQ ID NO: 175838 - DNA, 120 bp, Artificial Sequence
  ENSG00000110047_1 (sequence is synthesized)
gctctgccccgcagcagccagccccgtgtccggcagtatgttcagctgggtcagcaaggatgcccgccgcaagaaggagccggagctcttccagacggtggctgaggggctgcggcagct

SEQ ID NO: 175839 - DNA, 120 bp, Artificial Sequence
  ENSG00000110047_2 (sequence is synthesized)
gtacgcgcagaagctgctacccctggaggagcactaccgcttccacgagttccactcgcccgcgctggaggacgctgacttcgacaacaagcctatggtgctcctcgtggggcagtacag

SEQ ID NO: 175840 - DNA, 120 bp, Artificial Sequence
  ENSG00000110047_3 (sequence is synthesized)
cacgggcaagaccaccttcatccgacacctgatcgagcaggacttcccggggatgcgcatcgggcccgagcccaccaccgactccttcatcgccgtcatgcacggccccactgagggcgt

SEQ ID NO: 175841 - DNA, 120 bp, Artificial Sequence
  ENSG00000110047_4 (sequence is synthesized)
ggtgccgggcaacgcgctcgtggtggacccgcggcgccccttccgcaagctcaacgcgtttggcaacgctttcctcaacaggttcatgtgtgcccagctgcccaaccccgtcctggacag

SEQ ID NO: 175842 - DNA, 120 bp, Artificial Sequence
  ENSG00000110047_5 (sequence is synthesized)
catcagcatcatcgacacccccgggatcctgtctggagagaagcagcggatcagcagaggctatgactttgcagccgtcctggagtggttcgcggagcgtgtggaccgcatcatcctgct

SEQ ID NO: 175843 - DNA, 120 bp, Artificial Sequence
  ENSG00000110047_6 (sequence is synthesized)
cttcgacgcccacaagctggacatctccgatgagttctcggaagtgatcaaggctctgaagaaccatgaggacaagatccgcgtggtgctgaacaaggcagaccagatcgagacgcagca

SEQ ID NO: 175844 - DNA, 120 bp, Artificial Sequence
  ENSG00000110047_7 (sequence is synthesized)
gctgatgcgggtgtacggggccctcatgtggtccctgggcaagatcatcaacacccccgaggtggtcagggtctacatcggctccttctggtcccacccgctcctcatccccgacaaccg

SEQ ID NO: 175845 - DNA, 120 bp, Artificial Sequence
  ENSG00000110047_8 (sequence is synthesized)
caagctctttgaggccgaggagcaggacctcttcaaggacatccagtcactgccccgaaacgccgccctcaggaagctcaatgacctgatcaagcgggcacggctggccaaggttcacgc

SEQ ID NO: 175846 - DNA, 120 bp, Artificial Sequence
  ENSG00000110047_9 (sequence is synthesized)
ctacatcatcagctccctcaagaaagagatgcccaatgtctttggtaaagagagcaaaaagaaagagctggtgaacaacctcggagagatctaccagaagattgagcgcgagcaccagat

SEQ ID NO: 175847 - DNA, 120 bp, Artificial Sequence
  ENSG00000110047_10 (sequence is synthesized)
ctcccctggggacttcccgagcctccgcaagatgcaggaactcctgcagacccaggacttcagcaagttccaggcgctgaagcccaagctgctggacacggtggatgacatgctggccaa

SEQ ID NO: 175848 - DNA, 120 bp, Artificial Sequence
  ENSG00000110047_11 (sequence is synthesized)
cgacatcgcgcggctgatggtgatggtgcggcaggaggagtccctgatgccttcccaggtggtcaagggcggcgcctttgacggcaccatgaacgggccgttcgggcacggctacggcga

SEQ ID NO: 175849 - DNA, 120 bp, Artificial Sequence
  ENSG00000110047_12 (sequence is synthesized)
gggggccggcgagggcatcgacgacgtggagtgggtggtgggcaaggacaagcccacctacgacgagatcttctacacgctgtcccctgtcaacggcaagatcacgggcgccaacgccaa

SEQ ID NO: 175850 - DNA, 120 bp, Artificial Sequence
  ENSG00000110047_13 (sequence is synthesized)
gaaggagatggtgaagtccaagctccccaacaccgtgctagggaagatctggaagctggccgacgtggacaaggacgggctgctggacgacgaggagttcgcgctggccaaccacctcat

SEQ ID NO: 175851 - DNA, 120 bp, Artificial Sequence
  ENSG00000110047_14 (sequence is synthesized)
caaggtcaagctggagggccacgagctgcccgccgacctgcccccgcacctggtgccgccctccaagcgcagacatgagtgatggcgcccggccccgcacctgccatttgcacgcccggc

SEQ ID NO: 175852 - DNA, 120 bp, Artificial Sequence
  ENSG00000110047_15 (sequence is synthesized)
cgggaggcagagacggggggaggggaagcctcaccatttctcaaggtccataaagactgagcggatgtttcctcgcctctcgaaaaggaaaaccaccatctttcttttaaggctgttcct

SEQ ID NO: 175853 - DNA, 120 bp, Artificial Sequence
  ENSG00000110047_16 (sequence is synthesized)
gggcctggcgggggaggcaggggtgagaggatggaattgtgtgcacaagaactgtggctattttaatatataacgttagaggctgcgttctttgtcgccgcctcccctgtgtgccagccc

SEQ ID NO: 175854 - DNA, 120 bp, Artificial Sequence
  ENSG00000110047_17 (sequence is synthesized)
tgtgtgcacggcctctgccccccggcctttgctgtggctggagctggacagtgcagcgactgcgaccgtgggggagccaggtcgcccttttggcagctgctaggctgaggctgcatggac

SEQ ID NO: 175855 - DNA, 120 bp, Artificial Sequence
  ENSG00000110047_18 (sequence is synthesized)
accctccgtgtgcttctgagctgaggttgcttcacgggaccgtggcttccttcctcacctggctctgcctcccccgtgctctcgggcgaagtgggttcttgtgccttcccctcccgggcc

SEQ ID NO: 175856 - DNA, 120 bp, Artificial Sequence
  ENSG00000110047_19 (sequence is synthesized)
caggctccccgtgcgcgggccctgccctttcctcccgcgccccaccggctccgacgcgcaaccccgctcagcagtcacagaagcagggcccagccaccttggtctttttttgggagttca

SEQ ID NO: 175857 - DNA, 120 bp, Artificial Sequence
  ENSG00000110047_20 (sequence is synthesized)
ggggagtaggagaatgtcttccagaaaaatacataagctagtttctgttctgtaaagtgatatctttcatacttgaccaaagttcccaataacttcccaaccactgttcaaaagctgtga

SEQ ID NO: 175858 - DNA, 120 bp, Artificial Sequence
  ENSG00000110047_21 (sequence is synthesized)
tttttgtctccccttcccaccctccagccaaggagcagccctgcccagggggcattaggtgtgggtacccggggagcaccccgttcctggaccccagtgttgcatttcctggctgaggaa

SEQ ID NO: 175859 - DNA, 120 bp, Artificial Sequence
  ENSG00000110047_22 (sequence is synthesized)
gggtggtcatcccagctcctgccctaccctctcacttaactggagctttgggacgcaccctccacagtgggaggtggtggtgggtggcggtggcggggcctcacgacagcttggtgctgg

SEQ ID NO: 175860 - DNA, 120 bp, Artificial Sequence
  ENSG00000110047_23 (sequence is synthesized)
taagaggaagcccgtggttctggctaggctctcatgtccagacagcggggaccaggggaaaacccagccccttctgtaatcccccttcatttcctaccttccttcctcctctgtttagca

SEQ ID NO: 175861 - DNA, 120 bp, Artificial Sequence
  ENSG00000110047_24 (sequence is synthesized)
aaggagggcagctcacttggatgtccttacaacgcccctggcccccaggttgagcaataagaaaccagaaccttgcggcccagtggcccgggccagttcaggccgcctccccctcctctg

SEQ ID NO: 175862 - DNA, 120 bp, Artificial Sequence
  ENSG00000110047_25 (sequence is synthesized)
cctggggccattgagcccagcctccagggcccgggcgcgtttgcaggccagtggccactgtccgggctgtgatggcaccaaggcaggtggagcaccaggtaccacacagctgggcttccc

SEQ ID NO: 175863 - DNA, 120 bp, Artificial Sequence
  ENSG00000110047_26 (sequence is synthesized)
accaggctttcccgcgggggtctcagggagcttctccccagcgctgctcggagtctgcaggaactggccttgttctccttagcccgtcactccatacagtattaggtgaggatggatgcg

SEQ ID NO: 175864 - DNA, 120 bp, Artificial Sequence
  ENSG00000110047_27 (sequence is synthesized)
ggcgctgtccttgccgggaagtcactgttgaagttgcagtggcttgttcacacctgtgggaagagaagtgaagactttctccttgcattaaaaagtctgaactgtgcgaaagcttcgggt

SEQ ID NO: 175865 - DNA, 120 bp, Artificial Sequence
  ENSG00000110047_28 (sequence is synthesized)
gcttccttgtcttttccaggggcagcagtcctgggccatcctcccctggtgtctgagggggtgatgccagcagggacagagtggcaaggcagccggggcaaggtgaccaaccctgcccag

SEQ ID NO: 175866 - DNA, 120 bp, Artificial Sequence
  ENSG00000110047_29 (sequence is synthesized)
tcctgctctgctgggcagtagctgccccctcctactaagagggccaggcctgtagggaaaagggtttctggggtgatgcccccttccctgagcaaggtgggagctgagcagttcacttgg

SEQ ID NO: 175867 - DNA, 120 bp, Artificial Sequence
  ENSG00000110047_30 (sequence is synthesized)
ggtggggaggggggaaacagttgggaggatgttgatagctgaggcctaggctggcacccctcagccacagacggatgagtgggcacctgcaggccctcggcactgggtggcatcaagtaa

SEQ ID NO: 175868 - DNA, 120 bp, Artificial Sequence
  ENSG00000110047_31 (sequence is synthesized)
acaagggtttctgggctttggagccagactggctccttgctagccccaaggacggtttaagtacagggaagccgggcctctgaagacaaagcagatagcctgtgacaaacatgcaactaa

SEQ ID NO: 175869 - DNA, 120 bp, Artificial Sequence
  ENSG00000110047_32 (sequence is synthesized)
gggtggggccagtcaggcccaggtgatgtcacagatgggggactgtttataccagcagagggaagggtgactgattagtgacccttcataaaagggtgcagacttgaggtgccatgggta

SEQ ID NO: 175870 - DNA, 120 bp, Artificial Sequence
  ENSG00000110047_33 (sequence is synthesized)
gaggctgctccagcccctctggcagaaggcaggacagaaacaagttcctgagggtttcagggacccagttgtgtgctccgagcctagctggtgtggtggtgtctggtcctatgaccagca

SEQ ID NO: 175871 - DNA, 120 bp, Artificial Sequence
  ENSG00000110047_34 (sequence is synthesized)
cttgaggtgccagtggatgcttcagttgctgcagggctggccggccctccctgcgtcactcagctgccacctgtgggcattcaccctgtgccaggtggagctgcgctgtcacgatctgag

SEQ ID NO: 175872 - DNA, 120 bp, Artificial Sequence
  ENSG00000110047_35 (sequence is synthesized)
gaagttcatgttcccccatttcacagagggagagtccgagactgaggactgccgaaataacaaaggtggtagaagcagatgcaaaccaggccgtccaactccagcgtgctttccatcagg

SEQ ID NO: 175873 - DNA, 120 bp, Artificial Sequence
  ENSG00000110047_36 (sequence is synthesized)
ttactaatccaaagcacacactaagaggaaaaaacggtagatccccccaaccccacccttagactgcagctgtactcagggctgagagacccacattaaaggttaaatgctgtcactcca

SEQ ID NO: 175874 - DNA, 120 bp, Artificial Sequence
  ENSG00000110047_37 (sequence is synthesized)
aaaggggtctgtgtgtggccggggaggatggcgggggagtgagccccatggaacagccaggaactgataaaagatgaggggacaaagacagtgtgtgtctgggaagctgggctgagagga

SEQ ID NO: 175875 - DNA, 120 bp, Artificial Sequence
  ENSG00000110047_38 (sequence is synthesized)
ggaggtgccgccgcctgggggtactccgatgcttccggggattccgagccagctggaggaccgcacgtggcgaacggcgggcgcggcgcgtagtcagggaaccagggtgcctgactgggt

SEQ ID NO: 175876 - DNA, 120 bp, Artificial Sequence
  ENSG00000110047_39 (sequence is synthesized)
gtctcgtggagccatcccgcgggggtgtgggggggccacggtgccggaaggcgcgcggcccagaggccgtctccgccgaacgcccgctcctcgccttcctaaccgcagcactttcgcgag

SEQ ID NO: 175877 - DNA, 120 bp, Artificial Sequence
  ENSG00000110047_40 (sequence is synthesized)
ctggcactcagggccccaggattgcccgagacccttcccagctcacttcacaggcagacctgcactgcgctgtttccctctatagaaaccagtctttggtcagcacccgcgtgcagcctg

SEQ ID NO: 175878 - DNA, 120 bp, Artificial Sequence
  ENSG00000110047_41 (sequence is synthesized)
ctcttaactaagattctctacccggcctccctctaaacctgttctgtttgtggtttataccccatctactttcaggaagggtttgactgtgcttacaacacagaaacagcacacaggaag

SEQ ID NO: 175879 - DNA, 120 bp, Artificial Sequence
  ENSG00000110047_42 (sequence is synthesized)
ccaggcccccacccagggcacaggctcaggctgagcggggtggtggatgggctggagccggggagaagggcagcaaggctggctggccgcagccctctgtggctggacacgacttggcaa

SEQ ID NO: 175880 - DNA, 120 bp, Artificial Sequence
  ENSG00000110047_43 (sequence is synthesized)
ggccgagggatctgagggctgggctactctcgagggctgccaggttcccagcttgctgcagggaaatgaagggggtgccgccctgaacaggcacatgcctaagcaaggtattgatgcttg

SEQ ID NO: 175881 - DNA, 120 bp, Artificial Sequence
  ENSG00000110047_44 (sequence is synthesized)
gataaagctggcaaccaccaggagaagcctttttgggatttttcaaatccttcgtcatccgagctgtgatgatggagtggagcgtggcacgggcccattggagttctgtgggctccatcg

SEQ ID NO: 175882 - DNA, 120 bp, Artificial Sequence
  ENSG00000110047_45 (sequence is synthesized)
gcactcagcagggatttggacgtgcaggctggtgggccctgcaggaagcctgctccctgctctgctgcgtgggagggggcagctcgggggaagggggcttgcagagaaacagaagaacat

SEQ ID NO: 175883 - DNA, 120 bp, Artificial Sequence
  ENSG00000110047_46 (sequence is synthesized)
gggctgtggggcaccttcagcagcccggggttccaatcccagctcctccatgtgggagccaagcaccccaggcagcctttcccagccttgcttagggccgggttgggagaatcccacccc

SEQ ID NO: 175884 - DNA, 120 bp, Artificial Sequence
  ENSG00000110047_47 (sequence is synthesized)
gcagggctgtggtgagggttgaacggagggtgtgtggtgagggttgagcggagggtgtgtgatgcgtggtgagggttgagcggagggtgtgtgatgcgtggtgagggttgagcggagggt

SEQ ID NO: 175885 - DNA, 120 bp, Artificial Sequence
  ENSG00000110047_48 (sequence is synthesized)
gtgtgatgcgtggtgagggttgagcggagggtgtgtgatgcgtggtgagggttgagcggagggtgtgtgatgcgtggtgagggttgaacagagggtgtgtgatgtgcccagtggtacacg

SEQ ID NO: 175886 - DNA, 120 bp, Artificial Sequence
  ENSG00000110047_49 (sequence is synthesized)
acaaattgccttctttgggttgacagactgggttttactcttcctgaatcatcacaatgatccgtgcaaggccaaggctgttgtcttctgtttcaagtgcgttttcctgtcctgtcctct

SEQ ID NO: 175887 - DNA, 120 bp, Artificial Sequence
  ENSG00000110047_50 (sequence is synthesized)
gtcctgtggcagtggacagctgtggctcttgccagattgtgtctgctcctaggactgtgggagccggtggtggtagcggccttgagcttgacccatccctcctgcttccctgttcctgag

SEQ ID NO: 175888 - DNA, 120 bp, Artificial Sequence
  ENSG00000110047_51 (sequence is synthesized)
gggccctgccccttcccagagtaaacccactgggggtctaagagtgggcgttgtcggctcccccagcttctgtcctccccagaatcttccagggttcatgtgtgcccagctgcccaaccc

SEQ ID NO: 175889 - DNA, 120 bp, Artificial Sequence
  ENSG00000110047_52 (sequence is synthesized)
ggtggccatcagggcagaaggaaggcccagggcactggatttggagggaatcccatctccatggggaagggcctccctgaacggaagcagctgggttaatcaccagcaccccacccaact

SEQ ID NO: 175890 - DNA, 120 bp, Artificial Sequence
  ENSG00000110047_53 (sequence is synthesized)
cagagttgacccaggcggtgacactgcagaggggaatgtggtgactcaccctgcgtggtggggggagggcagggccatgccaggcgctctggtgccctgtccatgaatccttgccgcagc

SEQ ID NO: 175891 - DNA, 120 bp, Artificial Sequence
  ENSG00000110047_54 (sequence is synthesized)
gtggcaccagtcggaggggcggggctgggaggggctcctccctaccgcccccaattccgccctgcccccgccgcggcggcgctagccgccactgagggaccgaccctataaaggccgctc

SEQ ID NO: 175892 - DNA, 120 bp, Artificial Sequence
  ENSG00000110048_0 (sequence is synthesized)
ggggacgctgcgcggcggtggctgatgcggtagccgtgtggggcgctccgggcggcgacggcggctctcgtaggcggttccggtcttgtatctccaggcggcggcggctcatggcggcga

SEQ ID NO: 175893 - DNA, 120 bp, Artificial Sequence
  ENSG00000110048_1 (sequence is synthesized)
tcatggcggcgacggagctgagaggagtggtggggccaggcccggcagccattgcagcacttggcggcggcggcgccggtcccccagtggtgggaggaggcggcggccgcggagatgcgg

SEQ ID NO: 175894 - DNA, 80 bp, Artificial Sequence
  ENSG00000110048_2 (sequence is synthesized)
gcccctgcgccgccgactgggggctcgggcggctcgggcgctgggggttcgggctcggctcgagagggctggctcttcaa

SEQ ID NO: 175895 - DNA, 120 bp, Artificial Sequence
  ENSG00000110048_3 (sequence is synthesized)
ctgggggttcgggctcggctcgagagggctggctcttcaaatggaccaattatatcaaaggctaccagcggcgatggttcgtgctgagcaacgggctcctgagctactacagatcaaagg

SEQ ID NO: 175896 - DNA, 120 bp, Artificial Sequence
  ENSG00000110048_4 (sequence is synthesized)
cagaaatgagacatacctgccgtggtaccatcaacctcgccacagccaacatcaccgtggaggactcctgcaacttcatcatttccaatgggggtgctcagacctaccatctgaaagcta

SEQ ID NO: 175897 - DNA, 120 bp, Artificial Sequence
  ENSG00000110048_5 (sequence is synthesized)
gttcagaagttgagcggcagcgctgggtgacggccctggaactggccaaggccaaagctgtgaagatgctggcagagtcagatgaatcaggagatgaagagtctgtctcacaaactgaca

SEQ ID NO: 175898 - DNA, 120 bp, Artificial Sequence
  ENSG00000110048_6 (sequence is synthesized)
agactgagctgcagaatacccttcggaccctctctagcaaagtagaggacttgagcacgtgcaatgacttgatagctaagcatggcacagctctgcagcgttctctcagtgagctggagt

SEQ ID NO: 175899 - DNA, 120 bp, Artificial Sequence
  ENSG00000110048_7 (sequence is synthesized)
ccctgaagttgcctgctgagagcaatgaaaagatcaaacaggtcaacgaacgagccacactctttaggataacatccaatgccatgatcaacgcctgcagagatttcctcatgttagccc

SEQ ID NO: 175900 - DNA, 120 bp, Artificial Sequence
  ENSG00000110048_8 (sequence is synthesized)
agacccatagtaaaaaatggcaaaagtcactacagtatgaaagagaccagcgtatccgactggaagaaaccctcgagcagctggcgaagcagcataatcacctggagagggccttccgag

SEQ ID NO: 175901 - DNA, 120 bp, Artificial Sequence
  ENSG00000110048_9 (sequence is synthesized)
gagccacggtgctgccggcaaacactcctggcaatgtgggttctggtaaagatcagtgctgctctggcaaaggggacatgagcgatgaagatgatgagaatgaattttttgatgcacctg

SEQ ID NO: 175902 - DNA, 120 bp, Artificial Sequence
  ENSG00000110048_10 (sequence is synthesized)
agatcatcaccatgcctgaaaatttgggccacaaacgtactggcagcaatatcagtggagccagcagtgacatcagccttgatgaacagtacaagcatcagctggaggagaccaaaaagg

SEQ ID NO: 175903 - DNA, 120 bp, Artificial Sequence
  ENSG00000110048_11 (sequence is synthesized)
aaaagagaaccagaataccatacaagccaaactatagcctcaatttatggagcatcatgaagaactgcattggaaaagaactctctaagatccccatgccggtaaactttaatgagccct

SEQ ID NO: 175904 - DNA, 120 bp, Artificial Sequence
  ENSG00000110048_12 (sequence is synthesized)
tgtccatgcttcagcgccttactgaagatctggaataccatgagctgttagaccgagctgcaaaatgtgagaattctctagaacagctctgttatgttgcagctttcaccgtgtcctcct

SEQ ID NO: 175905 - DNA, 120 bp, Artificial Sequence
  ENSG00000110048_13 (sequence is synthesized)
actccactactgtcttccgcaccagtaagccattcaacccactgcttggggagacctttgagctggaccgattagaggagaatgggtaccgatccctctgtgaacaggtgagtcatcatc

SEQ ID NO: 175906 - DNA, 120 bp, Artificial Sequence
  ENSG00000110048_14 (sequence is synthesized)
cccctgctgctgcgcaccatgctgagtccaaaaatggctggacattgcgtcaggaaatcaaaatcaccagcaagtttcgaggcaaatacctctccattatgcccctcggtaccattcatt

SEQ ID NO: 175907 - DNA, 120 bp, Artificial Sequence
  ENSG00000110048_15 (sequence is synthesized)
gtattttccatgcaactgggcaccactacacttggaagaaagttaccacaactgtacacaacattattgtgggcaagttgtggatagatcagtctggcgaaattgatattgtgaatcaca

SEQ ID NO: 175908 - DNA, 120 bp, Artificial Sequence
  ENSG00000110048_16 (sequence is synthesized)
agacaggagacaagtgtaatcttaaatttgttccttatagctacttctctcgggatgtagcaagaaaggtgacgggggaagtgacagatccatcaggaaaagtccactttgctcttctgg

SEQ ID NO: 175909 - DNA, 120 bp, Artificial Sequence
  ENSG00000110048_17 (sequence is synthesized)
ggacgtgggatgagaaaatggaatgtttcaaagtacagccagtcattggggaaaatgggggtgatgctcgacagagaggccatgaagcagaggaaagcagggtcatgctgtggaaaagga

SEQ ID NO: 175910 - DNA, 120 bp, Artificial Sequence
  ENSG00000110048_18 (sequence is synthesized)
atcctttaccgaagaatgcagaaaacatgtactacttctcagagcttgctctgactctcaatgcttgggaaagtggcactgcccccacagacagccggttacgacctgaccagagactga

SEQ ID NO: 175911 - DNA, 120 bp, Artificial Sequence
  ENSG00000110048_19 (sequence is synthesized)
agaagcagcgcctggaggaaaaacaaagactttccagaaagaagagagaagcggaagctatgaaagccacagaggatggcacaccatatgatccctataaggcactgtggtttgagcgga

SEQ ID NO: 175912 - DNA, 120 bp, Artificial Sequence
  ENSG00000110048_20 (sequence is synthesized)
agaaggaccctgttaccaaggagttaacccatatttataggggagaatactgggagtgtaaagaaaaacaggactggagctcatgcccggacattttctgaaacggcagtaacaaaaaag

SEQ ID NO: 175913 - DNA, 120 bp, Artificial Sequence
  ENSG00000110048_21 (sequence is synthesized)
aggagcatataatggagaagaggacagaggatgtgtgggaaagctggaagttgtgactctcttaccaagtgctttcctcaagtttgtctctcttgaccaatcattttttccaaatcaatc

SEQ ID NO: 175914 - DNA, 120 bp, Artificial Sequence
  ENSG00000110048_22 (sequence is synthesized)
accagaaggagacaccagtggtggtgattggctggttgccttagctgattgaaactgaaatcgacataggagatactatgtctgtaagggagaggtttagtggccgaaggttagtgttat

SEQ ID NO: 175915 - DNA, 120 bp, Artificial Sequence
  ENSG00000110048_23 (sequence is synthesized)
tccacatccacgaagtcaagtattcttggctcttctttctccctctgcccccatttaagacaatgtcactcaccctccccttgtagtatcctgctcagccaagatctgcctaagattatg

SEQ ID NO: 175916 - DNA, 120 bp, Artificial Sequence
  ENSG00000110048_24 (sequence is synthesized)
attcaggggcattttggtgctgttaaaagcaagagccgaatttagaagttcccttaaaaagaaacacataagacttaccaatggaggcattgtgaatggttgcagtggagcttaggtata

SEQ ID NO: 175917 - DNA, 120 bp, Artificial Sequence
  ENSG00000110048_25 (sequence is synthesized)
acatcatcaagtgtgttcacacgcggggtcggtttaatggagtgtccacgcggagataactgcgatattggaacacctgtgagagagattgttctatagggctggaatattcagagttac

SEQ ID NO: 175918 - DNA, 120 bp, Artificial Sequence
  ENSG00000110048_26 (sequence is synthesized)
attcttggaagtttctgtttttacttgcatcaaacacccctctgttgttctccatcatctttaatagcaactggagaccactttggtcattggtaagggggtgcattctcctcacaaagg

SEQ ID NO: 175919 - DNA, 120 bp, Artificial Sequence
  ENSG00000110048_27 (sequence is synthesized)
ggttttatggacttcctcaggcggagagcttctgagaacacaggcaggatggaaaaagactactagccacttttgctttcccaaccccccttaatgccatccttcattgtctttctggct

SEQ ID NO: 175920 - DNA, 120 bp, Artificial Sequence
  ENSG00000110048_28 (sequence is synthesized)
tctcttcttctggcacagtaccattttgggtctgtgccccagtgtggagcaaaacattgcctgtcccattctgatatacttcagaatttgagagcagaagttaatgtggaacaaaagttt

SEQ ID NO: 175921 - DNA, 120 bp, Artificial Sequence
  ENSG00000110048_29 (sequence is synthesized)
tcaccatctctcaagccccaaggactggagccacctctggaataatgtgttaaatatctgtatattatatatatgtagagaaaaatctaattttttggtttgatttccttcccattaaga

SEQ ID NO: 175922 - DNA, 120 bp, Artificial Sequence
  ENSG00000110048_30 (sequence is synthesized)
atcttgttttttgatacccttgtctccctgagactctttcttggacacgtgttgatgtggatggcactcctgctctccatcttttatgggcagagagatttcaaaacctgagcaggatca

SEQ ID NO: 175923 - DNA, 120 bp, Artificial Sequence
  ENSG00000110048_31 (sequence is synthesized)
tgtctggcagttactaaacagggactttgtccatggtttgtatcatggggtgcctactgctgtctaaactctgctctcctaattagctgactcttgaaaatgaaatcctaacctctttcc

SEQ ID NO: 175924 - DNA, 120 bp, Artificial Sequence
  ENSG00000110048_32 (sequence is synthesized)
tgcctcttttctttctcttttcaggaagagtgtgggtagaaagtccggagggcaacttccaatttaattctgctctgtccggcgcataggctgaattccaaaagaactttcttcctagga

SEQ ID NO: 175925 - DNA, 120 bp, Artificial Sequence
  ENSG00000110048_33 (sequence is synthesized)
tgtggggcttaaagcaccgtcatgtggggtggatcagataattgctcctgtggggccctggcttccttctctgtttgtgcagtatttgtttttgttgtcttgttgagaaatatcccctgt

SEQ ID NO: 175926 - DNA, 120 bp, Artificial Sequence
  ENSG00000110048_34 (sequence is synthesized)
gcaacccacccttggttgaggatcacaaattgaggtgccttccttgtatgctttttgttagtattttttgtttttgttccttaactgctgagcctcagccagcgtgggtcctgggggaaa

SEQ ID NO: 175927 - DNA, 120 bp, Artificial Sequence
  ENSG00000110048_35 (sequence is synthesized)
taccattccaaaggaagccatccctatggggaaattggttttactgggtaaattaatacttttatttcttcccctatcccttccttcctagttgtgataaacatgggagaggagtgactt

SEQ ID NO: 175928 - DNA, 120 bp, Artificial Sequence
  ENSG00000110048_36 (sequence is synthesized)
tgactgctggggaatttcctcctaagaaccttattcccaaaataagccagggattatgtcaaggcttctttcaaggaggctcataaaagcagtgacctcatccggggctttggatagagt

SEQ ID NO: 175929 - DNA, 120 bp, Artificial Sequence
  ENSG00000110048_37 (sequence is synthesized)
gagaattccccaactaaattggacttctctgctttatccccttctcttccttcaccatctgcactacatttctggctgatcccaatcagattcccgctaatggaagaagtttagaatctt

SEQ ID NO: 175930 - DNA, 120 bp, Artificial Sequence
  ENSG00000110048_38 (sequence is synthesized)
tcaggtggaataaagtcacatgaaaacaaaacacaactatatatattttcagtttttttgccttattgatttttttccaaaaaaaaaaaactactaaattaaataattttttaaaagtca

SEQ ID NO: 175931 - DNA, 120 bp, Artificial Sequence
  ENSG00000110048_39 (sequence is synthesized)
attttttggttaatcccctgggtcttatgtttgcagaaattctagtccctgtcatcccagcttttattctttttcttcagaacgtcagcgttggagaccctggaggttctgggattcacc

SEQ ID NO: 175932 - DNA, 120 bp, Artificial Sequence
  ENSG00000110048_40 (sequence is synthesized)
tactgttgtgggtgtaaaaacgtcaagtgtgaattttggtgtttctcaccaatttataggcagtatctttttcttctcctttctgccgtcttaatttgaacctgatttcttcaaggtgag

SEQ ID NO: 175933 - DNA, 120 bp, Artificial Sequence
  ENSG00000110048_41 (sequence is synthesized)
ggttaccatctttgtcagaattaatgctcctggaatgaaaggttttctggcacgatggaggaggtcactggctaaagagtcaggagacaggaggtctgattcgagcactgaccctcacta

SEQ ID NO: 175934 - DNA, 120 bp, Artificial Sequence
  ENSG00000110057_0 (sequence is synthesized)
gggcggtcgcagggactccggggcgaccgccgcgagtccgcagtagttcgggccatggaggcggagccgccgctctacccgatggcgggggctgcggggccgcagggcgacgaggacctg

SEQ ID NO: 175935 - DNA, 120 bp, Artificial Sequence
  ENSG00000110057_1 (sequence is synthesized)
ctcggggtcccggacgggcccgaggccccgctggacgagctggtgggcgcgtaccccaactacaacgaggaggaggaggagcgccgctactaccgccgcaagcgcctgggcgtgctcaag

SEQ ID NO: 175936 - DNA, 120 bp, Artificial Sequence
  ENSG00000110057_2 (sequence is synthesized)
aacgtgctggctgccagcgccgggggcatgctcacctacggcgtctacctgggcctcctgcagatgcagctgatcctgcactacgacgagacctaccgcgaggtgaagtatggcaacatg

SEQ ID NO: 175937 - DNA, 120 bp, Artificial Sequence
  ENSG00000110057_3 (sequence is synthesized)
gggctgcccgacatcgacagcaaaatgctgatgggcatcaacgtgactcccatcgccgccctgctctacacacctgtgctcatcaggttttttggaacgaagtggatgatgttcctcgct

SEQ ID NO: 175938 - DNA, 120 bp, Artificial Sequence
  ENSG00000110057_4 (sequence is synthesized)
gtgggcatctacgccctctttgtctccaccaactactgggagcgctactacacgcttgtgccctcggctgtggccctgggcatggccatcgtgcctctttgggcttccatgggcaactac

SEQ ID NO: 175939 - DNA, 120 bp, Artificial Sequence
  ENSG00000110057_5 (sequence is synthesized)
atcaccaggatggcgcagaagtaccatgagtactcccactacaaggagcaggatgggcaggggatgaagcagcggcctccgcggggctcccacgcgccctatctcctggtcttccaagcc

SEQ ID NO: 175940 - DNA, 120 bp, Artificial Sequence
  ENSG00000110057_6 (sequence is synthesized)
atcttctacagcttcttccatctgagcttcgcctgcgcccagctgcccatgatttatttcctgaaccactacctgtatgacctgaaccacacgctgtacaatgtgcagagctgcggcacc

SEQ ID NO: 175941 - DNA, 120 bp, Artificial Sequence
  ENSG00000110057_7 (sequence is synthesized)
aacagccacgggatcctcagcggcttcaacaagacggttctgcggacgctcccgcggagcggaaacctcattgtggtggagagcgtgctcatggcagtggccttcctggccatgctgctg

SEQ ID NO: 175942 - DNA, 120 bp, Artificial Sequence
  ENSG00000110057_8 (sequence is synthesized)
gtgctgggtttgtgcggagccgcttaccggcccacggaggagatcgatctgcgcagcgtgggctggggcaacatcttccagctgcccttcaagcacgtgcgtgactaccgcctgcgccac

SEQ ID NO: 175943 - DNA, 120 bp, Artificial Sequence
  ENSG00000110057_9 (sequence is synthesized)
tatctacagcggcttcgaggtgctctttgcctgcactggtatcgccttgggctatggcgtgtgctcggtggggctggagcggctggcttacctcctcgtggcttacagcctgggcgcctc

SEQ ID NO: 175944 - DNA, 120 bp, Artificial Sequence
  ENSG00000110057_10 (sequence is synthesized)
agccgcctcactcctgggcctgctgggcctgtggctgccacgcccggtgcccctggtggccggagcaggggtgcacctgctgctcaccttcatcctctttttctgggcccctgtgcctcg

SEQ ID NO: 175945 - DNA, 120 bp, Artificial Sequence
  ENSG00000110057_11 (sequence is synthesized)
ggtcctgcaacacagctggatcctctatgtggcagctgccctttggggtgtgggcagtgccctgaacaagactggactcagcacactcctgggaatcttgtacgaagacaaggagagaca

SEQ ID NO: 175946 - DNA, 120 bp, Artificial Sequence
  ENSG00000110057_12 (sequence is synthesized)
ggacttcatcttcaccatctaccactggtggcaggctgtggccatcttcaccgtgtacctgggctcgagcctgcacatgaaggctaagctggcggtgctgctggtgacgctggtggcggc

SEQ ID NO: 175947 - DNA, 120 bp, Artificial Sequence
  ENSG00000110057_13 (sequence is synthesized)
cgcggtctcctacctgcggatggagcagaagctgcgccggggcgtggccccgcgccagccccgcatcccgcggccccagcacaaggtgcgcggttaccgctacttggaggaggacaactc

SEQ ID NO: 175948 - DNA, 120 bp, Artificial Sequence
  ENSG00000110057_14 (sequence is synthesized)
tacttggaggaggacaactcggacgagagcgacgcggagggcgagcatggggacggcgcggaggaggaggcgccgcccgcagggcccaggcctggccccgagcccgctggactcggccgc

SEQ ID NO: 175949 - DNA, 120 bp, Artificial Sequence
  ENSG00000110057_15 (sequence is synthesized)
ggcgcaggggggagacgggccggaggagcagtgaggggccgcctggtccccggactcagcctccctcctcgccggcctcagtttaccacgtctgaggtcggggggaccccctccgagtcc

SEQ ID NO: 175950 - DNA, 120 bp, Artificial Sequence
  ENSG00000110057_16 (sequence is synthesized)
cgcgctgtcttcaaaggcccctgtctcccctcccccacgttggggacgcccctcccagagcccaggtcacctccgggcttccgcagccccctccaaggcggagtggagccttgggaaccc

SEQ ID NO: 175951 - DNA, 120 bp, Artificial Sequence
  ENSG00000110057_17 (sequence is synthesized)
ctcggccaagcacaggggttcgaaaatacagctgaaaccccgcgggcccttagcacgcgccccagcgccggagcacggtcagggtcttcttgcgacccggcccgctccagatccccacag

SEQ ID NO: 175952 - DNA, 120 bp, Artificial Sequence
  ENSG00000110057_18 (sequence is synthesized)
ctctcggccgcggacccgggccgcgtgtgagcgcactttgcacctcctatccccagggtccgccgagagccacgattttttacagaaaatgagcaataaagagattttgtactgtcctga

SEQ ID NO: 175953 - DNA, 120 bp, Artificial Sequence
  ENSG00000110057_19 (sequence is synthesized)
ccagagcctcggtgtgggtgggggacgggggtccgggctcccggacagacctgccaccgtcagaattggaggccggcggagcaaggcgggtgggggtctgggcttagctggccaagtggc

SEQ ID NO: 175954 - DNA, 120 bp, Artificial Sequence
  ENSG00000110057_20 (sequence is synthesized)
cgcgggctggcagaaggcgtggcgcagcccgggaaccccgctgtcctgaggggcgctgtcagcgggaatgccttcggtgattggagctccctgcgaggcctgcatgccgtcttctgctcg

SEQ ID NO: 175955 - DNA, 120 bp, Artificial Sequence
  ENSG00000110057_21 (sequence is synthesized)
tcgcaggggggtgaggcacccccgcgatgcggggagggctgagactgtggtctgggctgttccagacttcaacactcaccccttgtccccccgcagggctatggcgtgtgctcggtgggg

SEQ ID NO: 175956 - DNA, 120 bp, Artificial Sequence
  ENSG00000110057_22 (sequence is synthesized)
acctacggcgtctacctgggtaggtgccgctcggggacccggggccgccccgcccgctcccagcccggcccgggaaacagaaaccgcgggccgccgcctcccgcccgctctcacttcccc

SEQ ID NO: 175957 - DNA, 120 bp, Artificial Sequence
  ENSG00000110057_23 (sequence is synthesized)
ggaagccccttccgccctctgggcctcagtttccccacaccggggctggtctgctcctagctctgggtgcaggacacacaggagtggcacaggtcgggctggggagagccttctctcctt

SEQ ID NO: 175958 - DNA, 80 bp, Artificial Sequence
  ENSG00000110057_24 (sequence is synthesized)
ctcggggtcccggacgggcccgaggccccggtgagcggggacccggagtgcgaggcgcgggcgtcccctgtgggccaggg

SEQ ID NO: 175959 - DNA, 120 bp, Artificial Sequence
  ENSG00000110057_25 (sequence is synthesized)
ggaaaaccagaagggaagtgaagggactgcattctctgcagggatggtctcttgttctgagagctgagtgggaaggaagccacctgggaggcgcagcaggaagagcattcaaaccagaag

SEQ ID NO: 175960 - DNA, 120 bp, Artificial Sequence
  ENSG00000110060_0 (sequence is synthesized)
cctttctcggaaacgcggcgcggccggctgccggaaaacagggcagacctgtatggttcgtttattcctggggttgtcatatcatggcttataatgacacagacagaaaccagactgaga

SEQ ID NO: 175961 - DNA, 120 bp, Artificial Sequence
  ENSG00000110060_1 (sequence is synthesized)
agctcctaaaaagagtacgagaactggagcaagaggtgcaaagacttaaaaaggaacaggccaaaaataaggaggactcaaacattagagaaaattcagcaggagctggaaaaactaagc

SEQ ID NO: 175962 - DNA, 120 bp, Artificial Sequence
  ENSG00000110060_2 (sequence is synthesized)
gtgcatttgatttcagtgctcatggccgaagacacgtagccctaagaatagcctatatgggctggggataccagggctttgctagtcaggaaaacacaaataataccattgaagagaaac

SEQ ID NO: 175963 - DNA, 120 bp, Artificial Sequence
  ENSG00000110060_3 (sequence is synthesized)
tgtttgaagctctaaccaagactcgactagtagaaagcagacagacatccaactatcaccgatgtgggagaacagataaaggagttagtgcctttggacaggtgatctcacttgaccttc

SEQ ID NO: 175964 - DNA, 120 bp, Artificial Sequence
  ENSG00000110060_4 (sequence is synthesized)
gctctcagtttccaaggggcagggattccgaggactttaatgtaaaagaggaggctaatgctgctgctgaagagatccgttatacccacattctcaatcgggtactccctccagacatcc

SEQ ID NO: 175965 - DNA, 120 bp, Artificial Sequence
  ENSG00000110060_5 (sequence is synthesized)
gtatattggcctgggcccctgtagaaccaagcttcagtgctaggttcagctgccttgagcggacttaccgctattttttccctcgtgctgatttagatattgtaaccatggattatgcag

SEQ ID NO: 175966 - DNA, 120 bp, Artificial Sequence
  ENSG00000110060_6 (sequence is synthesized)
ctcagaagtatgttggcacccatgatttcaggaacttgtgtaaaatggatgtagccaacggtgtgattaattttcagaggactattctatctgctcaagtacagctagtgggccagagcc

SEQ ID NO: 175967 - DNA, 120 bp, Artificial Sequence
  ENSG00000110060_7 (sequence is synthesized)
cagttatgtcagtttgaagtgactggccaggcattcctttatcatcaagtccgatgtatgatggctatcctctttctgattggccaaggaatggagaagccagagattattgatgagctg

SEQ ID NO: 175968 - DNA, 120 bp, Artificial Sequence
  ENSG00000110060_8 (sequence is synthesized)
ctgaatatagagaaaaatccccaaaagcctcaatatagtatggctgtagaatttcctctagtcttatatgactgtaagtttgaaaatgtcaagtggatctatgaccaggaggctcaggag

SEQ ID NO: 175969 - DNA, 120 bp, Artificial Sequence
  ENSG00000110060_9 (sequence is synthesized)
ttcaatattacccacctacaacaactgtgggctaatcatgctgtcaaaactcacatgttgtatagtatgctacaaggactggacactgttccagtaccctgtggaataggaccaaagatg

SEQ ID NO: 175970 - DNA, 120 bp, Artificial Sequence
  ENSG00000110060_10 (sequence is synthesized)
gatggaatgacagaatggggaaatgttaagccctctgtcataaagcagaccagtgcctttgtagaaggagtgaagatgcgcacatataagcccctcatggaccgtcctaaatgccaagga

SEQ ID NO: 175971 - DNA, 120 bp, Artificial Sequence
  ENSG00000110060_11 (sequence is synthesized)
ctggaatcccggatccagcattttgtacgtaggggacgaattgagcacccacatttattccatgaggaagaaacaaaagccaaaagggactgtaatgacacactagaggaagagaatact

SEQ ID NO: 175972 - DNA, 120 bp, Artificial Sequence
  ENSG00000110060_12 (sequence is synthesized)
aatttggagacaccaacgaagagggtctgtgttgacacagaaattaaaagcatcatttaaccatagacaatttgccaggatctaggaaccacctaatggtaggtggacagaaaaggaaaa

SEQ ID NO: 175973 - DNA, 120 bp, Artificial Sequence
  ENSG00000110060_13 (sequence is synthesized)
aaaaaaaaatttacttgcaagtactaggaattcagatgatcagctcttaaaagaaaaaaaaaagcaaaaagactaaagccctattaaggaagttattgctttaataagaaatttcaaata

SEQ ID NO: 175974 - DNA, 120 bp, Artificial Sequence
  ENSG00000110060_14 (sequence is synthesized)
ttctcttatcccggtccaaaaggattaagcgattaaagaacgtaaaatggagatgtatttacatacacctggaaacctgtgccttgtattcaaattcattaaagcctaatcctgcaagta

SEQ ID NO: 175975 - DNA, 120 bp, Artificial Sequence
  ENSG00000110060_15 (sequence is synthesized)
aggcgtgagccaccgcgcccggcttgttccttcttttgagctctcatcatagcccaggttcaagatcatcttagacagggcagacctgtatggttcgtttattcctggggttgtcatatc

SEQ ID NO: 175976 - DNA, 120 bp, Artificial Sequence
  ENSG00000110063_0 (sequence is synthesized)
gcacaccgcctccgcggcagcatggcggacgcagctcctcaactaggcaagaggaagcgcgaattggacgtggaggaggcccacgccgccagcacagaggaaaaggaggcaggagttgga

SEQ ID NO: 175977 - DNA, 120 bp, Artificial Sequence
  ENSG00000110063_1 (sequence is synthesized)
aatggtacctgtgctcctgtccgcttaccgttctccggcttcagactgcagaaggtgctgagggagtctgcgcgggacaaaatcattttcctacacgggaaggtgaatgaggcctctggg

SEQ ID NO: 175978 - DNA, 120 bp, Artificial Sequence
  ENSG00000110063_2 (sequence is synthesized)
gatggggatggagaggatgccgttgtgatcctggagaagacgccatttcaggtggaacaggtggctcagctcctgacgggcagccctgagctccagttgcagttctccaatgatatctac

SEQ ID NO: 175979 - DNA, 120 bp, Artificial Sequence
  ENSG00000110063_3 (sequence is synthesized)
agcacctatcacttgttccctccaagacaactgaatgatgtaaagacgaccgtggtttaccctgccacagagaaacacctgcagaagtacctgcgccaggacctccgcctgatccgagag

SEQ ID NO: 175980 - DNA, 120 bp, Artificial Sequence
  ENSG00000110063_4 (sequence is synthesized)
acgggagatgactacaggaatattactttaccccacctggagtcccagagcctcagcatccagtgggtgtataacattctcgacaagaaggctgaagcggaccggattgttttcgagaac

SEQ ID NO: 175981 - DNA, 120 bp, Artificial Sequence
  ENSG00000110063_5 (sequence is synthesized)
ccagatccctctgatggttttgtcctcatccctgacctcaagtggaaccaacagcagctcgatgacttgtacttgatcgccatctgccatcgccggggcatcagatccctacgcgacctt

SEQ ID NO: 175982 - DNA, 120 bp, Artificial Sequence
  ENSG00000110063_6 (sequence is synthesized)
actccggagcacttgccgctgctcaggaacatcctccaccaggggcaggaggccatcctgcagcgctaccggatgaagggagaccatctgcgagtatacctgcactacctgccctcctac

SEQ ID NO: 175983 - DNA, 120 bp, Artificial Sequence
  ENSG00000110063_7 (sequence is synthesized)
taccacctgcatgtgcacttcaccgccctgggcttcgaggcccccggctcaggcgtggagcgggcccacctgctggctgaggtgatcgagaacttggagtgtgaccctaggcactaccag

SEQ ID NO: 175984 - DNA, 120 bp, Artificial Sequence
  ENSG00000110063_8 (sequence is synthesized)
cagcgcacgctcaccttcgccctcagggctgacgaccccctgctcaagctcttgcaggaggctcagcaaagctgaattaactcaggcagaagagcacagatgtgtgggattgggggagga

SEQ ID NO: 175985 - DNA, 120 bp, Artificial Sequence
  ENSG00000110063_9 (sequence is synthesized)
gtggggacaagattttttatctccaagtgaattttctaaaaatgtattttataccggcttattcctagtattgaataaactagcgggctcactcagtgtggacagcgtggcctgggaggc

SEQ ID NO: 175986 - DNA, 120 bp, Artificial Sequence
  ENSG00000110063_10 (sequence is synthesized)
agacagatggtgggggacagtgggtgggtagaacctgtgggaaggccttgagaatggtggaaagtctccaggtggtggtttcaactgacaggtgggagctgccctggaagggtgccgagg

SEQ ID NO: 175987 - DNA, 120 bp, Artificial Sequence
  ENSG00000110063_11 (sequence is synthesized)
gccttctccaagccccagggctcaccgtccgtggtggcttccttctccccactctgtgcctctcctgtttgtacaacttcttattctgctcctccccatcacccctcctccttcccctgc

SEQ ID NO: 175988 - DNA, 120 bp, Artificial Sequence
  ENSG00000110063_12 (sequence is synthesized)
catccacctctcctttgaggagttccccaaaaaaccaaacttggaagctttcaggaaattatctatacaggtttctgatggcacttcctccttccagcagtgaggtcacacctccctgtg

SEQ ID NO: 175989 - DNA, 120 bp, Artificial Sequence
  ENSG00000110063_13 (sequence is synthesized)
agtcagtcaaccctgctgataaacttcttgttgacgaggataggggcttggtgcctggaaatcggcgggttttaataagaatcagattatgcaaggccgaaaagcctgccttgctctgtt

SEQ ID NO: 175990 - DNA, 120 bp, Artificial Sequence
  ENSG00000110063_14 (sequence is synthesized)
atttggtcagcgagtccccagccttgagtttttatctcggcaggaagacaaaacagactcacatgaagcagccagaagatcaagtgcaaaacagtgaatcagcaagggcaaatgatatgg

SEQ ID NO: 175991 - DNA, 120 bp, Artificial Sequence
  ENSG00000110063_15 (sequence is synthesized)
ttgcagttgaatacaaaagcccggaggcggctcgggttcaaggcctatcagaggcagatgttcagaggatcttgagaccaggaagggacctcaaagcgtcagaggctgatgagcagttag

SEQ ID NO: 175992 - DNA, 120 bp, Artificial Sequence
  ENSG00000110063_16 (sequence is synthesized)
gcagccaacagggctcaagcggcgcagggacatggcttgtatgggcgggcacacaagtaaacacacaggctctctccagcacacaggaccaaggcatcatgctgccagaggggctggtgt

SEQ ID NO: 175993 - DNA, 120 bp, Artificial Sequence
  ENSG00000110063_17 (sequence is synthesized)
ttgccactttgtcagagtagggctgtggattttgtgccttgcttgggaagctctcagggatggcaggatggcaggctcctaagtgacagcaggggggaagcttgaggcacagtgggtggt

SEQ ID NO: 175994 - DNA, 120 bp, Artificial Sequence
  ENSG00000110063_18 (sequence is synthesized)
ccttactctccatcccctgcctgagaaccaggaagcctcattcagagattagcccctttactgcaggtggtagcccaggtgcagccaacctgcttcagggtctcagggcctgctgtggac

SEQ ID NO: 175995 - DNA, 120 bp, Artificial Sequence
  ENSG00000110063_19 (sequence is synthesized)
agggcctgctgtggacccccatggtcctgggagagactccttagaaacagcagaatcacgaacatggtgaaacccatctctactaaaaaacagaaaaattagccaggtgtggtggtgggc

SEQ ID NO: 175996 - DNA, 90 bp, Artificial Sequence
  ENSG00000110063_20 (sequence is synthesized)
ggcggaggttgccgtgagccaccgcactttggaaaaaaaaattaaaaaaatagaaacagccggggagtggagggtgtggtcagaaagcct

SEQ ID NO: 175997 - DNA, 120 bp, Artificial Sequence
  ENSG00000110063_21 (sequence is synthesized)
tagaaacagccggggagtggagggtgtggtcagaaagcctcagggacctgcttcagccttcagggagttcagatgaggcacaatgaagccactggcctccactcagccattcttccctgc

SEQ ID NO: 175998 - DNA, 120 bp, Artificial Sequence
  ENSG00000110063_22 (sequence is synthesized)
gattccaggcgtgagccaccgcgcccagcccctgcaatacgtcaacagtccctagattcaggcaacatggagttgcagccaaggaactttgaggtagtgaccaatgcagggaggtctgac

SEQ ID NO: 175999 - DNA, 120 bp, Artificial Sequence
  ENSG00000110063_23 (sequence is synthesized)
ggtctgacagagaatcagcaggatccatttcatggccaccacacatctgactgactccttcttgggctaagcaaatacttttgtgggcagtgacactggcagctgctggggtcttggcag

SEQ ID NO: 176000 - DNA, 120 bp, Artificial Sequence
  ENSG00000110063_24 (sequence is synthesized)
gaggttggatggaggtcttctcccagagcagtgtccagcttgcaggaatgctccctgcgtctcagttgtgcccattccaggtccaggggaaagaagtgacccgcttcccctctgaaagca

SEQ ID NO: 176001 - DNA, 120 bp, Artificial Sequence
  ENSG00000110063_25 (sequence is synthesized)
gatgtggtcccaacaagcaaacacggtctccatctccagcaccacaactgccacggagcagagggaggcctccctgtggagcagcccttccctgtggcctcagcccatgccctcctgccc

SEQ ID NO: 176002 - DNA, 120 bp, Artificial Sequence
  ENSG00000110063_26 (sequence is synthesized)
agcccccagtggtgctgctggagggtctgactccacgggctcccgctgaccttgccgttccttcccctcatctcgtagcgcctggcccctggaggaaggtgggtaggaatttgacaccgg

SEQ ID NO: 176003 - DNA, 120 bp, Artificial Sequence
  ENSG00000110063_27 (sequence is synthesized)
ataaataaatgtttgaggggcaagagagatgggacagagttcacccaacaggacagacgaggctggcagtcacagcagagggcaggcactcaggtctggagaggcagggcatggagacag

SEQ ID NO: 176004 - DNA, 120 bp, Artificial Sequence
  ENSG00000110063_28 (sequence is synthesized)
ggacccacactctggaaggtttctcgactcccccgaggggctggccagttctgtcttccttctgcccactctgtggggaggagcctctctgggatagcgtcccctcactcctctcccagc

SEQ ID NO: 176005 - DNA, 120 bp, Artificial Sequence
  ENSG00000110063_29 (sequence is synthesized)
ctcgtttatcttcaccacagtacagaagggggcccctctccaggcctcaccacttaacttttcttgtacatggaaagacaagcctctgctagaggcctggcaagggttccccttcagagc

SEQ ID NO: 176006 - DNA, 120 bp, Artificial Sequence
  ENSG00000110063_30 (sequence is synthesized)
cagccagtgctctgctgctgtaatctccagggaccctgccggccacggcccccatgcagctccctccctcaatccaaccctctttgggcttatcaccctcaaggtctagagtgcaccagg

SEQ ID NO: 176007 - DNA, 120 bp, Artificial Sequence
  ENSG00000110063_31 (sequence is synthesized)
gttggctgctctgccaagtcctgttgagactccaaaagcatagtctgtctttattagggtgaccttcatatcagactcccaggtaactcaagatgatagctttgcaatatagtgcctcct

SEQ ID NO: 176008 - DNA, 120 bp, Artificial Sequence
  ENSG00000110063_32 (sequence is synthesized)
tttattcctatttgtgagtttctccgctttcctcactagactgagagggtcttgagggtaggagctttgttttagttatctctctatccctggcccctaagacactacctggctcagcaa

SEQ ID NO: 176009 - DNA, 120 bp, Artificial Sequence
  ENSG00000110063_33 (sequence is synthesized)
accaacctttgagacaaagcaacattataacactacattcatatagcagatcatttcatgacccacattctccttcctttttacgaagaaatgggctcaggatgtcttgtccagcattat

SEQ ID NO: 176010 - DNA, 120 bp, Artificial Sequence
  ENSG00000110063_34 (sequence is synthesized)
ggagtgaacgtcagctccaggaagcagagacttctggccctttgttcaccatttccccagaacctagggtggtgactcacctataagtgctcaaaaaacatgtggcgaatggaggaccag

SEQ ID NO: 176011 - DNA, 120 bp, Artificial Sequence
  ENSG00000110063_35 (sequence is synthesized)
agctaggctctgaatgaggcctcctggatctcacgcaggggatggagagtaaggaccagcccctctacctcatgctttcttcctgctatctcgtaagagcccaacatccttctgtcctga

SEQ ID NO: 176012 - DNA, 120 bp, Artificial Sequence
  ENSG00000110063_36 (sequence is synthesized)
gcaagccacaagctgcagccctgccttgacaaaatggcaaatgccagcccctctggcagcatgacaccttggtcctgtgtgctgcagagtgcctcatgtgttgaactgtgtgccctcaga

SEQ ID NO: 176013 - DNA, 120 bp, Artificial Sequence
  ENSG00000110063_37 (sequence is synthesized)
agcatgccatgcccccgctctgctggagcagtggcagatgtcacccttcctagataaatcctggacggctccacgactggcttttagccctcaacacttggcctacattctttctggctt

SEQ ID NO: 176014 - DNA, 120 bp, Artificial Sequence
  ENSG00000110063_38 (sequence is synthesized)
ggttggagaaggaaagaagcagttggaggcatgactgctattgttccttggcttctctccatttgtctcaaactttcctaatagagcaaaattgctgagtggtctctatttaccaacatg

SEQ ID NO: 176015 - DNA, 120 bp, Artificial Sequence
  ENSG00000110063_39 (sequence is synthesized)
aaacagaaaaataccatctcaggctccatattccatgtccctgttgaatacagatccccgaactgagaaataagaaacaactacatacgaagtaatacttgaaaatgtttctcttgtaat

SEQ ID NO: 176016 - DNA, 120 bp, Artificial Sequence
  ENSG00000110063_40 (sequence is synthesized)
acttccatatccaaagcatttgaatatatttattttattgatgtaggtctgccaactcttccttctcaggaaggactgtttttattccaaacatgtatatataaggttaaaatgtatttt

SEQ ID NO: 176017 - DNA, 120 bp, Artificial Sequence
  ENSG00000110063_41 (sequence is synthesized)
ttaaaataagataattattgatagttgtttttaaaatagccttgcttagcaaaataaatgttggcaaccctaagtttgttctattataatattattgaaattacattgaattctgaaatc

SEQ ID NO: 176018 - DNA, 120 bp, Artificial Sequence
  ENSG00000110063_42 (sequence is synthesized)
catgtcaacttgaagttaccaagttttaaccactgttagaaaataagcaggaatgaaatctgtttcaagcgtttcaatttcaatacaatttaataaacaggctttgagcatctaccccca

SEQ ID NO: 176019 - DNA, 120 bp, Artificial Sequence
  ENSG00000110063_43 (sequence is synthesized)
atagtagttggggagtcagacagtccatccacctgctgctgtgagggagtgagaagtgaagaggaagcaagctggtggaggagacagaggaccccgaggttagggctgctgttttaccag

SEQ ID NO: 176020 - DNA, 120 bp, Artificial Sequence
  ENSG00000110063_44 (sequence is synthesized)
agctgaccgagcctgaggagctggcctcagagcagaggcctggatgaagcgaggagcagcgtggctcgttggggagctccactgcccaacccaggcaacggaggcaacagcggagagaat

SEQ ID NO: 176021 - DNA, 120 bp, Artificial Sequence
  ENSG00000110063_45 (sequence is synthesized)
ccaagctagcctggggggagcgcttttctccatgtgaggcacttcctgaatctttccttctactgactcgtttaattctcccaacagccctggaaggggacacattggcaatgtctggag

SEQ ID NO: 176022 - DNA, 120 bp, Artificial Sequence
  ENSG00000110063_46 (sequence is synthesized)
acattttgggttgtcacaacttggggagggtgctactaacatcccaacagaggccacagggatgcagctgaacatccttcaatgcacaggacagcccctgcaacagaattatccaggcca

SEQ ID NO: 176023 - DNA, 120 bp, Artificial Sequence
  ENSG00000110063_47 (sequence is synthesized)
aaatgtcagtggtgctgagattgagaaaccctggattaaacatcacagcacttatgtggtgtttactgtgtgccagacattgttttaagaacttcacagatgtaaagacgaccgtggttt

SEQ ID NO: 176024 - DNA, 120 bp, Artificial Sequence
  ENSG00000110063_48 (sequence is synthesized)
tctctgaaaaccttcaccacccttatgtagatatcatcagccccattttacaaaggaggcatcagtcgctcacccagtgacagctgggagatgaaaccaggtctccttggctcagaacct

SEQ ID NO: 176025 - DNA, 120 bp, Artificial Sequence
  ENSG00000110063_49 (sequence is synthesized)
gttcactctcactcttatactagtcacaggcagatgccccttttctgtgaatcagggactggccgtggggaggcctgcttatggggtgcgttggggctgtctgtagggaatgccgtctcc

SEQ ID NO: 176026 - DNA, 120 bp, Artificial Sequence
  ENSG00000110063_50 (sequence is synthesized)
ctccctcccttgtatttccgctggcttcctctggcatcacattcccaggagatttcaggtcagagaggaaatgcctctgtggatgtactggccatgcattgctctggccccggcactgca

SEQ ID NO: 176027 - DNA, 120 bp, Artificial Sequence
  ENSG00000110063_51 (sequence is synthesized)
tgaggaagtggctgccaggtgtcctccagacccctcccaggaaggggcctcattcggtttcttgggaactgcctgtcttttgttgtgaatggaccacattgtgaccggcctgtgggtctt

SEQ ID NO: 176028 - DNA, 120 bp, Artificial Sequence
  ENSG00000110063_52 (sequence is synthesized)
gtcaggggtttggggccctctgagctgaaatgcttcctgtgggtagagagttgcaggagacctcgaggcccagctgccctctcccccggtccatcccagctgagaggcgaggatgcaatg

SEQ ID NO: 176029 - DNA, 120 bp, Artificial Sequence
  ENSG00000110063_53 (sequence is synthesized)
cagtgtgttcagccctccaggctcaaggtgtgaggttgtgtggaccataaggcagtccccgtgcctctagccttcggtgatgctacctgtccagcacttctgggagtggaaggaggacca

SEQ ID NO: 176030 - DNA, 120 bp, Artificial Sequence
  ENSG00000110063_54 (sequence is synthesized)
tggatggctgcctggtagtgtcggttccctggcctccccatcccacctcgtgtccatggctccttctcctacatcagtgagctcggagaccattctgactgtgaggaggaaggggcagta

SEQ ID NO: 176031 - DNA, 120 bp, Artificial Sequence
  ENSG00000110063_55 (sequence is synthesized)
gtatgtcctcagccactcccctctctggtttcctagcaggtctctcccccagatgtagggcagagttcactgtcctgcatgagttcatgtttgcaaagggccctgagagccgggggaagt

SEQ ID NO: 176032 - DNA, 120 bp, Artificial Sequence
  ENSG00000110063_56 (sequence is synthesized)
agaggagagctgggggtactggggtttgaggcctgtgagctcaggggccttctcagcccaacctcctgcagcctcctaacctcagacaggcctccaggaccatctctgtaaagtaatgtc

SEQ ID NO: 176033 - DNA, 120 bp, Artificial Sequence
  ENSG00000110063_57 (sequence is synthesized)
cttgggtcaacacaggcctgggaaaggtcctctgcagactgttgacagcagctgatccaagggtgacacaagggctgggagccctgggtagccctgaaaggtcttggtgaggtcactgtc

SEQ ID NO: 176034 - DNA, 120 bp, Artificial Sequence
  ENSG00000110063_58 (sequence is synthesized)
taaaccggcatctgcagcggctccaggcgggcagaggtgctgagcccactgctgatgagaatcccagtgcggcgggaaacgtgcacacatgagctgctagaggcaaaggctctcactgct

SEQ ID NO: 176035 - DNA, 120 bp, Artificial Sequence
  ENSG00000110063_59 (sequence is synthesized)
ctggtgggtagctggcccctccacagaaggaaaccgtggtgccctcagcctcctacctctctttgccccatagtcctgaatagagtgaaataggatccatggaggcagctcttcccctga

SEQ ID NO: 176036 - DNA, 120 bp, Artificial Sequence
  ENSG00000110063_60 (sequence is synthesized)
gtcctgtgagcggtggagggggtcactgctatagagggcagacacagcctgggtttggaggcctccgcagagcatgtgcactatgctgaccaggaagagcctggccccttccaagctgca

SEQ ID NO: 176037 - DNA, 120 bp, Artificial Sequence
  ENSG00000110063_61 (sequence is synthesized)
gagacccttgtgatgacgcatggctgagtgccagctggagtgggaagggggaagtcccttctggacccctaagaacagatgcttggggacagggcagcccggatgtagatcctctgagcg

SEQ ID NO: 176038 - DNA, 120 bp, Artificial Sequence
  ENSG00000110063_62 (sequence is synthesized)
tggcggccttttatggcttggttctgtctcctggagaggccagggaatgccctgagctcagtttggggtatctctcaaggggtgatgagtggatttgtgaaccatctctctccccctcct

SEQ ID NO: 176039 - DNA, 120 bp, Artificial Sequence
  ENSG00000110066_0 (sequence is synthesized)
atcttggattttactctccatttttctctggaattatttttggtgattaattttctgggggggactgggacgcggggcccggcggcgcggccccgcatcgcagcggccgggcagcggggc

SEQ ID NO: 176040 - DNA, 120 bp, Artificial Sequence
  ENSG00000110066_1 (sequence is synthesized)
ctgggacgcgccccgaggaggagcggggcggcgcaggcggagagaacattgaaagtattctctaagctatttgaagagagtgactaaatgcacctgggtcaggctgtctgtgggtatgaa

SEQ ID NO: 176041 - DNA, 120 bp, Artificial Sequence
  ENSG00000110066_2 (sequence is synthesized)
gtggttgggagaatccaagaacatggtggtgaatggcaggagaaatggaggcaagttgtctaatgaccatcagcagaatcaatcaaaattacagcacacggggaaggacaccctgaaggc

SEQ ID NO: 176042 - DNA, 120 bp, Artificial Sequence
  ENSG00000110066_3 (sequence is synthesized)
tggcaaaaatgcagtcgagaggaggtcgaacagatgtaatggtaactcgggatttgaaggacagagtcgctatgtaccatcctctggaatgtccgccaaggaactctgtgaaaatgatga

SEQ ID NO: 176043 - DNA, 120 bp, Artificial Sequence
  ENSG00000110066_4 (sequence is synthesized)
cctagcaaccagtttggttcttgatccctatttaggttttcaaacacacaaaatgaatactagcgcctttccttcgaggagctcaaggcatttttcaaaatctgacagtttttctcacaa

SEQ ID NO: 176044 - DNA, 120 bp, Artificial Sequence
  ENSG00000110066_5 (sequence is synthesized)
caaccctgtgagatttaggcctattaaaggaaggcaggaagaactaaaggaagtaattgaacgttttaagaaagatgaacacttggagaaagccttcaaatgtttgacttcaggcgaatg

SEQ ID NO: 176045 - DNA, 120 bp, Artificial Sequence
  ENSG00000110066_6 (sequence is synthesized)
ggcacggcactattttctcaacaagaataaaatgcaggagaaattattcaaagaacatgtatttatttatttgcgaatgtttgcaactgacagtggatttgaaatattgccatgtaatag

SEQ ID NO: 176046 - DNA, 120 bp, Artificial Sequence
  ENSG00000110066_7 (sequence is synthesized)
atactcatcagaacaaaatggagccaaaatagttgcaacaaaagagtggaaacgaaatgacaaaatagaattactggtgggttgtattgccgaactttcagaaattgaggagaacatgct

SEQ ID NO: 176047 - DNA, 120 bp, Artificial Sequence
  ENSG00000110066_8 (sequence is synthesized)
acttagacatggagaaaacgacttcagtgtcatgtactccacaaggaaaaactgtgctcaactctggctgggtcctgctgcgtttataaaccatgattgcagacctaattgtaagtttgt

SEQ ID NO: 176048 - DNA, 120 bp, Artificial Sequence
  ENSG00000110066_9 (sequence is synthesized)
gtcaactggtcgagatacagcatgtgtgaaggctctaagagacattgaacctggagaagaaatttcttgttattatggagatgggttctttggagaaaataatgagttctgcgagtgtta

SEQ ID NO: 176049 - DNA, 120 bp, Artificial Sequence
  ENSG00000110066_10 (sequence is synthesized)
cacttgcgaaagacggggcactggtgcttttaaatccagagtgggactgcctgcgcctgctcctgttatcaatagcaaatatggactcagagaaacagataaacgtttaaataggcttaa

SEQ ID NO: 176050 - DNA, 120 bp, Artificial Sequence
  ENSG00000110066_11 (sequence is synthesized)
aaagttaggtgacagcagcaaaaattcagacagtcaatctgtcagctctaacactgatgcagataccactcaggaaaaaaacaatgcaacttctaaccgaaaatcttcagttggcgtaaa

SEQ ID NO: 176051 - DNA, 120 bp, Artificial Sequence
  ENSG00000110066_12 (sequence is synthesized)
aaagaatagcaagagcagaacgttaacgaggcaatctatgtcaagaattccagcttcttccaactctacctcatctaagctaactcatataaataattccagggtaccaaagaaactgaa

SEQ ID NO: 176052 - DNA, 120 bp, Artificial Sequence
  ENSG00000110066_13 (sequence is synthesized)
gaagcctgcaaagcctttactttcaaagataaaattgagaaatcattgcaagcggctggagcaaaagaatgcttcaagaaaactcgaaatgggaaacttagtactgaaagagcctaaagt

SEQ ID NO: 176053 - DNA, 120 bp, Artificial Sequence
  ENSG00000110066_14 (sequence is synthesized)
agttctgtataaaaatttgcccattaaaaaagataaggagccagagggaccagcccaagccgcagttgccagcgggtgcttgactagacacgcggcgagagaacacagacagaatcctgt

SEQ ID NO: 176054 - DNA, 120 bp, Artificial Sequence
  ENSG00000110066_15 (sequence is synthesized)
gagaggtgctcattcgcagggggagagctcgccctgcacctacataactcggcggtcagtgaggacaagaacaaatctgaaggaggcctctgacatcaagcttgaaccaaatacgttgaa

SEQ ID NO: 176055 - DNA, 120 bp, Artificial Sequence
  ENSG00000110066_16 (sequence is synthesized)
tggctataaaagcagtgtgacggaaccttgccccgacagtggtgaacagctgcagccagctcctgtgctgcaggaggaagaactggctcatgagactgcacaaaaaggggaggcaaagtg

SEQ ID NO: 176056 - DNA, 120 bp, Artificial Sequence
  ENSG00000110066_17 (sequence is synthesized)
tcataagagtgacacaggcatgtccaaaaagaagtcacgacaaggaaaacttgtgaaacagtttgcaaaaatagaggaatctactccagtgcacgattctcctggaaaagacgacgcggt

SEQ ID NO: 176057 - DNA, 120 bp, Artificial Sequence
  ENSG00000110066_18 (sequence is synthesized)
accagatttgatgggtccccattctgaccagggtgagcacagtggcactgtgggcgtgcctgtgagctacacagactgtgctccttcacccgtcggttgttcagttgtgacatcagatag

SEQ ID NO: 176058 - DNA, 120 bp, Artificial Sequence
  ENSG00000110066_19 (sequence is synthesized)
cttcaaaacaaaagacagctttagaactgcaaaaagtaaaaagaagaggcgaatcacaaggtatgatgcacagttaatcctagaaaataactctgggattcccaaattgactcttcgtag

SEQ ID NO: 176059 - DNA, 120 bp, Artificial Sequence
  ENSG00000110066_20 (sequence is synthesized)
gcgtcatgatagcagcagcaaaacaaatgaccaagagaatgatggaatgaactcttccaaaataagcatcaagttaagcaaagaccatgacaacgataacaatctctatgtagcaaagct

SEQ ID NO: 176060 - DNA, 120 bp, Artificial Sequence
  ENSG00000110066_21 (sequence is synthesized)
taataatggatttaactcaggatcaggcagtagttctacaaaattaaaaatccagctaaaacgagatgaggaaaatagggggtcttatacagaggggcttcatgaaaatggggtgtgctg

SEQ ID NO: 176061 - DNA, 120 bp, Artificial Sequence
  ENSG00000110066_22 (sequence is synthesized)
cagtgatcctctttctctcttggagtctcgaatggaggtggatgactatagtcagtatgaggaagaaagtacagatgattcctcctcttctgagggcgatgaagaggaggatgactatga

SEQ ID NO: 176062 - DNA, 120 bp, Artificial Sequence
  ENSG00000110066_23 (sequence is synthesized)
tattgacatttcttcaaggagaagagaagatcagtctttaaggcttaatgcctaagctcttggtcttaacttgacctgggataactactttaaagaaataaaaaattccagtcaattatt

SEQ ID NO: 176063 - DNA, 120 bp, Artificial Sequence
  ENSG00000110066_24 (sequence is synthesized)
cctcaactgaaagtttagtggcagcacttctattgtcccttcacttatcagcatactattgtagaaagtgtacagcatactgactcaattcttaagtctgatttgtgcaaatttttatcg

SEQ ID NO: 176064 - DNA, 120 bp, Artificial Sequence
  ENSG00000110066_25 (sequence is synthesized)
tactttttaaatagccttcttacgtgcaattctgagttagaggtaaagccctgttgtaaaataaaggctcaagcaaaattgtacagtgatagcaactttccacacaggacgttgaaaaca

SEQ ID NO: 176065 - DNA, 120 bp, Artificial Sequence
  ENSG00000110066_26 (sequence is synthesized)
gtaatgtggctacacagtttttttaactgtaagagcatcagctggctctttaatatatgactaaacaataatttaaaacaaatcatagtagcagcatattaagggtttctagtatgctaa

SEQ ID NO: 176066 - DNA, 120 bp, Artificial Sequence
  ENSG00000110066_27 (sequence is synthesized)
tatcaccagcaatgatctttggctttttgatttatttgctagatgtttcccccttggagttttgtcagtttcacactgtttgctggcccaggtgtactgtttgtggcctttgttaatatc

SEQ ID NO: 176067 - DNA, 120 bp, Artificial Sequence
  ENSG00000110066_28 (sequence is synthesized)
gcaaaccattggttgggagtcagattggtttcttaaaaaaaaaaaaaaaatgacatacgtgacagctcacttttcagttcattatatgtacgagggtagcagtgtgtgggatgaggttcg

SEQ ID NO: 176068 - DNA, 120 bp, Artificial Sequence
  ENSG00000110066_29 (sequence is synthesized)
atacagcgtatttattgcttgtcatgtaaattaaaaaccttgtatttaactcttttcaatccttttagataaaattgttctttgcaagaatgattggtgcttattttttcaaaaatttgc

SEQ ID NO: 176069 - DNA, 120 bp, Artificial Sequence
  ENSG00000110066_30 (sequence is synthesized)
tgtgaacaacgtgatgacaacaagcaacatttatctaatgaactacagctatcttaatttggttcttcaagttttctgttgcacttgtaaaatgctacaaggaatattaaaaaaatctat

SEQ ID NO: 176070 - DNA, 120 bp, Artificial Sequence
  ENSG00000110066_31 (sequence is synthesized)
tcactttaacttataatagtttatgaaataaaaacatgagtcacagcttttgttctgtggtaacctataaaaaaagtttgtctttgagattcaatgtaaagaactgaaaacaatgtatat

SEQ ID NO: 176071 - DNA, 120 bp, Artificial Sequence
  ENSG00000110066_32 (sequence is synthesized)
gttgtaaatatttgtgtgttgtgagaaatttttgtcataagaaattaaaagaacttaccaggaaggtttttaagtttagaaatattcatgccaataaaataggaaattataaatatatag

SEQ ID NO: 176072 - DNA, 120 bp, Artificial Sequence
  ENSG00000110066_33 (sequence is synthesized)
ttttaagcactgcatcagtgggagttcttggcttatgttagtttatgttagtttattatgaaaacatcaaagatttttttgactatattatcagttaaacaaaaaggagtcagatttaat

SEQ ID NO: 176073 - DNA, 120 bp, Artificial Sequence
  ENSG00000110066_34 (sequence is synthesized)
ttgttttttgaagcactttgagaaattaattttaattaacttaatgagcaaatttttattactactttatgttcaataccaggttcttttcatttctctggattattttgcaaatcattg

SEQ ID NO: 176074 - DNA, 120 bp, Artificial Sequence
  ENSG00000110066_35 (sequence is synthesized)
gacagagaatttgggaatataaatctgtaacaggtgtttgacaccagtaggtctctttatttctgggaaatgtgtacctgtactttctgatatacagtgttcctaagtaaaaatcaattc

SEQ ID NO: 176075 - DNA, 120 bp, Artificial Sequence
  ENSG00000110066_36 (sequence is synthesized)
aggggatttgtatagtgtctataggaaagtagcccatgtcttgaaatatgaaaaggaatctgaaggtcatgaaaagtccagtggagaaaatctcaatgcttactgttactactaattgat

SEQ ID NO: 176076 - DNA, 120 bp, Artificial Sequence
  ENSG00000110066_37 (sequence is synthesized)
tcctactagtttccaggtttggggggatattgtttcaatgacgctccttaagactgttgattgcccataggttccaaatagaaattaagactcatgaacatttttagaaagtagattgtt

SEQ ID NO: 176077 - DNA, 120 bp, Artificial Sequence
  ENSG00000110066_38 (sequence is synthesized)
ttctcctggttctctaaggaactacttctgcagtcttacatagtctcatccttgtttgttgtggtgcagtcgaactcctcaggcgtttggaaagcatgtggtagaccttcttccacaccc

SEQ ID NO: 176078 - DNA, 120 bp, Artificial Sequence
  ENSG00000110066_39 (sequence is synthesized)
acccatacccccgttcactgcgtctggaggtcttcaacagtgaagtagggcagcccacacagcctctcaggagcacctgtccgaggcacccggagcactttgcagagcacgtccagccct

SEQ ID NO: 176079 - DNA, 120 bp, Artificial Sequence
  ENSG00000110066_40 (sequence is synthesized)
catggggtccctgcatagaaatgtgaacccctgccactgaggaagatgaaggtagaccctgtgtctggaggtgctggagggcagcgggtcacctcttgtattcccaccttagtttggggt

SEQ ID NO: 176080 - DNA, 120 bp, Artificial Sequence
  ENSG00000110066_41 (sequence is synthesized)
gttttgaagaggttcagagactaaatcttaaaccttatttgaataccaacgatagctattttgggaatttcgatcttaaaaagtgacaaaacacatttcccattttcatttttcagctga

SEQ ID NO: 176081 - DNA, 120 bp, Artificial Sequence
  ENSG00000110066_42 (sequence is synthesized)
attttagtaacttatttttgatgttttaattttatcatggcctcctctttggaggccaaccttcccatgggtctcaaagcagtgacatttggtagtaaatcactgcctctcaggagtcgg

SEQ ID NO: 176082 - DNA, 120 bp, Artificial Sequence
  ENSG00000110066_43 (sequence is synthesized)
tatgcacaagcactcagcagccactgttgatgccttctagggaaacctaatttccgttggtaaaggtaggggcctcggaactgttccggatctgctgtagaacttcaccgtgtggaatgg

SEQ ID NO: 176083 - DNA, 120 bp, Artificial Sequence
  ENSG00000110066_44 (sequence is synthesized)
tgacagccacacaccgttgaccagtttagaagaggttgcattcaataaaactcttagcttgagcttatgcaatgattggttaagattttggcattgtaagaattaggagatgatcataga

SEQ ID NO: 176084 - DNA, 120 bp, Artificial Sequence
  ENSG00000110066_45 (sequence is synthesized)
aatatatgtaaagtattcaattttcaatcattttcaaattactgttataaattgtttttgctgagttgtaatacttttgagatacaatgtattccttgtactgaaagaatgaaaaaggac

SEQ ID NO: 176085 - DNA, 120 bp, Artificial Sequence
  ENSG00000110066_46 (sequence is synthesized)
tttttcagcatttgaggtaagttctttaacgtttcattaaaaacattttttacaaatattttgtacatgcacttgcagtattgaggttaatcattttaataaattcggaaattaaaacaa

SEQ ID NO: 176086 - DNA, 120 bp, Artificial Sequence
  ENSG00000110066_47 (sequence is synthesized)
tgcttcagtagttttaaacttttaaatactcagagagactgggacttgtgagctttggctgcacttcaaggctctagacgtgatttgagtagaggcacagtctgtatcccatctctaact

SEQ ID NO: 176087 - DNA, 120 bp, Artificial Sequence
  ENSG00000110066_48 (sequence is synthesized)
tcagtaccgtcctctagactatttttcttgaataccttggtaactggatatgagttcttcatcatatgttccaaggtcatcatatgttttaaacattttcaaggtgttagagactgtgat

SEQ ID NO: 176088 - DNA, 120 bp, Artificial Sequence
  ENSG00000110066_49 (sequence is synthesized)
gatgtcgctaagtcctgcaagaagacaaaaggactgagtagaattaaattagactctatacattccagtgcctagccagtttgttagaaaagatgatggacttggggaattcatagcttc

SEQ ID NO: 176089 - DNA, 120 bp, Artificial Sequence
  ENSG00000110066_50 (sequence is synthesized)
tggccttaaggcttccaccttttcattgcttgctgacctttttcaaaacgaactgactcagttcagcagaccaccagtaccagactcagaattgtgatagaggagcattttgaacagtgc

SEQ ID NO: 176090 - DNA, 120 bp, Artificial Sequence
  ENSG00000110066_51 (sequence is synthesized)
cgtattgtgacatgctgtattggctactccagaaagtaggagtaaagatggaaaggagaaagaagcaacctctgagattccagtggtgtgtgggggcaagatctgatggaaactgaaaaa

SEQ ID NO: 176091 - DNA, 120 bp, Artificial Sequence
  ENSG00000110066_52 (sequence is synthesized)
gagaacgaagactaaacaaagagaaaggaaagagaagaaaccctaaatgggcaaaggaaagcacatcctgtttgcggagctttgaaatattggaaccatttctaattgctcctgtttttc

SEQ ID NO: 176092 - DNA, 120 bp, Artificial Sequence
  ENSG00000110066_53 (sequence is synthesized)
tgggtaacaccagttttctgtagttgccactaaagcagtagactcttgagtctcacttgtctctgagagagacagaagttagaaagttttgacttggcgattccgaaagtatgcctttgt

SEQ ID NO: 176093 - DNA, 120 bp, Artificial Sequence
  ENSG00000110066_54 (sequence is synthesized)
tggcacttaaatgtccagtgagacttcttggcaccttagagccctctgagatactgattattttaggttcttctccctactttcagatgttttcagcccaacactgggtgctctcttcca

SEQ ID NO: 176094 - DNA, 120 bp, Artificial Sequence
  ENSG00000110066_55 (sequence is synthesized)
ctacagagaatcctgaagaaaagggaaggtgtttcccatgatggtgaatgtcactgccatgaattcctgaatctacctgctgctgggagtcagagtccaagcataacccgtgtagcataa

SEQ ID NO: 176095 - DNA, 120 bp, Artificial Sequence
  ENSG00000110066_56 (sequence is synthesized)
aagcagcgctgtagccctattccagtctttttcgttaatgtccagagtgaacaacaagagttagtcaatcattaactgttgactgttgattctcataataaatgcagcataacgaccatt

SEQ ID NO: 176096 - DNA, 120 bp, Artificial Sequence
  ENSG00000110066_57 (sequence is synthesized)
tcccgcacagagccccgtggaagcgccgcggcggctgggcctggcgggaggcgcgcgcacactgtggcagctgcgccgcacggtgtccctccgccgtcgaggccgcggccttcttttcgt

SEQ ID NO: 176097 - DNA, 120 bp, Artificial Sequence
  ENSG00000110066_58 (sequence is synthesized)
tcgaggccgcggccttcttttcgtatccttccaccgtgcccgggcggggtccaggcggctcaccgggggcggcgacgcggcggcggtgcgggcggcagggcagcggggcgatgaggtgag

SEQ ID NO: 176098 - DNA, 120 bp, Artificial Sequence
  ENSG00000110066_59 (sequence is synthesized)
gaggtgaggacgcccgggaaccggaggcggcaccgcgcggcgcacggacctgggacgcggagtcctgaagccggcggacggttttcgtacgggcggccgtgcgcgaggcgaggagagaac

SEQ ID NO: 176099 - DNA, 120 bp, Artificial Sequence
  ENSG00000110066_60 (sequence is synthesized)
gtattctgttttcttttgtcttaaataattttttgcattttcataattaacaatatagtctttttactctcaaagttgtgtcaatttttattctcatcaaactatataaaactcaagttt

SEQ ID NO: 176100 - DNA, 120 bp, Artificial Sequence
  ENSG00000110066_61 (sequence is synthesized)
aatgcttcatataattattttaatcatgcttttctgtctgttactttatattttgtagaatttacctgaatggttgatatgtcttactaaatttttaaaattttaattgaacttcttaca

SEQ ID NO: 176101 - DNA, 83 bp, Artificial Sequence
  ENSG00000110066_62 (sequence is synthesized)
ccctaggactacaggcgtgtaccactacgtgggcctggctaattttttgcattttagagacggggtttcaccaggttggccag

SEQ ID NO: 176102 - DNA, 120 bp, Artificial Sequence
  ENSG00000110066_63 (sequence is synthesized)
ggactgaagagctgatctgcgactcctcactcagcgtctacaaactgtggatttgcagctaaactttcttcagagggggaaatgtgttcactatgttgcctcatggttttattttatatc

SEQ ID NO: 176103 - DNA, 120 bp, Artificial Sequence
  ENSG00000110066_64 (sequence is synthesized)
ttaaatatttgagcatttttctctcttcctctctccttccctgtctcccttttttctgttccccttcctgttccccacccctccagtcagctcttgattgtgcatgctaatgaagggcac

SEQ ID NO: 176104 - DNA, 120 bp, Artificial Sequence
  ENSG00000110066_65 (sequence is synthesized)
tttttgtttttgttttggcccgagcgcatttcggagccctcccgagctcgtcctgcagcccaccctcctccccgacggcgcccctggccgtggcccggcgaccccgcggccgctgcgtcc

SEQ ID NO: 176105 - DNA, 120 bp, Artificial Sequence
  ENSG00000110074_0 (sequence is synthesized)
gataatagcgaggcagcagtgcagctttcagagggtccgggctcagaggggttatgattcggagggttctgccgcacggcatgggccggggcctcttgacccggaggccaggcacgcgca

SEQ ID NO: 176106 - DNA, 120 bp, Artificial Sequence
  ENSG00000110074_1 (sequence is synthesized)
gaggaggcttttctctggactgggatggaaaggtgtctgagattaagaagaagatcaagtcgatcctgcctggaaggtcctgtgatctactgcaagacaccagccacctgcctcccgagc

SEQ ID NO: 176107 - DNA, 120 bp, Artificial Sequence
  ENSG00000110074_2 (sequence is synthesized)
actcggatgtggtgatcgtgggaggtggggtgcttggcttgtctgtggcctattggctgaagaagctggagagcagacgaggtgctattcgagtgctagtggtggaacgggaccacacgt

SEQ ID NO: 176108 - DNA, 120 bp, Artificial Sequence
  ENSG00000110074_3 (sequence is synthesized)
attcacaggcctccactgggctctcagtaggtgggatttgtcagcagttctcattgcctgagaacatccagctctccctcttttcagccagctttctacggaacatcaatgagtacctgg

SEQ ID NO: 176109 - DNA, 120 bp, Artificial Sequence
  ENSG00000110074_4 (sequence is synthesized)
ccgtagtcgatgctcctcccctggacctccggttcaacccctcgggctacctcttgctggcttcagaaaaggatgctgcagccatggagagcaacgtgaaagtgcagaggcaggagggag

SEQ ID NO: 176110 - DNA, 120 bp, Artificial Sequence
  ENSG00000110074_5 (sequence is synthesized)
ccaaagtttctctgatgtctcctgatcagcttcggaacaagtttccctggataaacacagagggagtggctttggcgtcttatgggatggaggacgaaggttggtttgacccctggtgtc

SEQ ID NO: 176111 - DNA, 120 bp, Artificial Sequence
  ENSG00000110074_6 (sequence is synthesized)
tgctccaggggcttcggcgaaaggtccagtccttgggagtccttttctgccagggagaggtgacacgttttgtctcttcatctcaacgcatgttgaccacagatgacaaagcggtggtct

SEQ ID NO: 176112 - DNA, 120 bp, Artificial Sequence
  ENSG00000110074_7 (sequence is synthesized)
tgaaaaggatccatgaagtccatgtgaagatggaccgcagcctggagtaccagcctgtggaatgcgccattgtgatcaacgcagccggagcctggtctgcgcaaatcgcagcactggctg

SEQ ID NO: 176113 - DNA, 120 bp, Artificial Sequence
  ENSG00000110074_8 (sequence is synthesized)
gggcaccaagctacctgtggagccgaggaaaaggtatgtgtatgtgtggcactgcccccagggaccaggcctagagactccgcttgttgcagacaccagtggagcctattttcgccggga

SEQ ID NO: 176114 - DNA, 120 bp, Artificial Sequence
  ENSG00000110074_9 (sequence is synthesized)
aggattaggtagcaactacctaggtggtcgtagccccactgagcaggaagaaccggacccggcgaacctggaagtggaccatgatttcttccaggacaaggtgtggccccatttggccct

SEQ ID NO: 176115 - DNA, 120 bp, Artificial Sequence
  ENSG00000110074_10 (sequence is synthesized)
gagggtcccagcttttgagactctgaaggttcagagcgcctgggccggctattacgactacaacacctttgaccagaatggcgtggtgggcccccacccgctagttgtcaacatgtactt

SEQ ID NO: 176116 - DNA, 120 bp, Artificial Sequence
  ENSG00000110074_11 (sequence is synthesized)
tgctactggcttcagtggtcacgggctccagcaggcccctggcattgggcgagctgtagcagagatggtactgaagggcaggttccagaccatcgacctgagccccttcctctttacccg

SEQ ID NO: 176117 - DNA, 120 bp, Artificial Sequence
  ENSG00000110074_12 (sequence is synthesized)
cttttacttgggagagaagatccaggagaacaacatcatctgagcatgtgtgctctgcactggctccactggcttgcatcctggctgtgttcacagccttgtttgctgcttccatcttcc

SEQ ID NO: 176118 - DNA, 120 bp, Artificial Sequence
  ENSG00000110074_13 (sequence is synthesized)
ccagtactgtgccaggccttctccccctccccagtgtcctctcctctcaggcaggccattgcacccatatggctgggcaggcacaggcagtgaggccgaggccaatagcgagtgatgagc

SEQ ID NO: 176119 - DNA, 120 bp, Artificial Sequence
  ENSG00000110074_14 (sequence is synthesized)
gggatcctaggactgatctgtagcccatgctgatgtcacccaccagggcaatccatctggaggcctgagcaccctggcccaggactggcttcatcctggcactgaccaggaaagactgcc

SEQ ID NO: 176120 - DNA, 120 bp, Artificial Sequence
  ENSG00000110074_15 (sequence is synthesized)
tctgaccctcttagcagacagagcccaggcatgggagcactctggggcagcctggctcaggtttattgattttcgtctgtttaccctatccattaatcaatacatgtaattaactccttc

SEQ ID NO: 176121 - DNA, 120 bp, Artificial Sequence
  ENSG00000110074_16 (sequence is synthesized)
ggggttatgattcggagggttctgccgcacggcatgggccggggcctcttgacccggaggccaggcacgcgcagaggaggcttttctctggtgcttggcacaatgcatgaagagactgat

SEQ ID NO: 176122 - DNA, 120 bp, Artificial Sequence
  ENSG00000110074_17 (sequence is synthesized)
ggcatgtggactattcagaaaactgtggcaacactgttgggtgcaaggtgaccttatgagatgggctgacagtggggactgccaactcatgtgtctgtttagctcaccttttcctgtgcc

SEQ ID NO: 176123 - DNA, 120 bp, Artificial Sequence
  ENSG00000110074_18 (sequence is synthesized)
gatatccgggatgttggggtggttacccctcctttagcccagagtggggagcagcccagctagcaaggtagccagagagcaagaatgggtcagccaactaggagaggggggccctggcct

SEQ ID NO: 176124 - DNA, 120 bp, Artificial Sequence
  ENSG00000110074_19 (sequence is synthesized)
tcttcctagtggtggtgccgcaggtctggggcactgagcctggggagctgtgggggaagaaggcaggaaaactctttctggcatccttaagtcagtttctttcaggagcttctgtctgca

SEQ ID NO: 176125 - DNA, 120 bp, Artificial Sequence
  ENSG00000110074_20 (sequence is synthesized)
tcggagggtccaacggacagagattgtgctttggactttgttgagaaattttcctaggatcttcctcagtcgaaccaggaagcttggcaataaggtttgttcttttgaaagcagatatca

SEQ ID NO: 176126 - DNA, 120 bp, Artificial Sequence
  ENSG00000110074_21 (sequence is synthesized)
gtattgtggttctgggttgtccccaacctccgactgtgtgtccttcaggacccgaaaccatggcccacactggcaggacagtgggtcggcttggggaaggggtattcacaggcctccact

SEQ ID NO: 176127 - DNA, 120 bp, Artificial Sequence
  ENSG00000110074_22 (sequence is synthesized)
gggctctcagtaggtgggatttgtcagcagttctcattgcctgagaacatccagctctccctcttttcagccagctttctacggaacatcaatgagcttctgtctgcacacaggagtacc

SEQ ID NO: 176128 - DNA, 120 bp, Artificial Sequence
  ENSG00000110074_23 (sequence is synthesized)
aaacacagagggagtggctttggcgtcttatggtgaggcttgcttgcagaggggacagcttttttcctgaagatggagactaaggggtgctacacgttgggagtctcggtactccacagc

SEQ ID NO: 176129 - DNA, 120 bp, Artificial Sequence
  ENSG00000110074_24 (sequence is synthesized)
caagctgaaggaggaacacttccctcctgtgtcacgggaactgccctgggccgtggtagttctctgtccttcatcaggctttgtctctgtggttcagttggttaagatgaccttccccgg

SEQ ID NO: 176130 - DNA, 120 bp, Artificial Sequence
  ENSG00000110074_25 (sequence is synthesized)
cttacaagccctagagaggggttggggggcacaggaaatacaatccaagagcagaagtcctcatccctctttgtgagttctctttttcttatcacagggatggaggacgaaggttggttt

SEQ ID NO: 176131 - DNA, 120 bp, Artificial Sequence
  ENSG00000110074_26 (sequence is synthesized)
ggggggctgtgtgctgtgttaattgatattagagccccctccagatttgaactgggaccatttctccccatcccctacctgcacagggattgttaaacaagtctgggcctgtccttgtgt

SEQ ID NO: 176132 - DNA, 120 bp, Artificial Sequence
  ENSG00000110074_27 (sequence is synthesized)
gagaaagtggagttgataagacagatccctgcggtctaggacctcagtgtgtcaggaagaaaatacacagacctgcaatgccctgggagtgctgtaccacagatatggacaaaacactgc

SEQ ID NO: 176133 - DNA, 120 bp, Artificial Sequence
  ENSG00000110074_28 (sequence is synthesized)
gagcccacaaatctgggtttttaacaagaaccttaagtcaggagttagcaaactttttctgtaaagggccagatagtatatattttaggttttgctggccatacagtctctattccaacc

SEQ ID NO: 176134 - DNA, 120 bp, Artificial Sequence
  ENSG00000110074_29 (sequence is synthesized)
actttgctatcacagcatgaaagcagccatagacaaaagtgcaaatgaaggagtgtggctcatttatgaaaacaggcagcaggtcggatttggcaacccctgctctaagtgattctcatg

SEQ ID NO: 176135 - DNA, 120 bp, Artificial Sequence
  ENSG00000110074_30 (sequence is synthesized)
gtcaggtgagggtgggcatgtttgtgatgcaatatggccagaggctttatttgtatgtttatttaacaaacacccaagtctcagagtgacatcaattaatatcctaaatgctgtacagat

SEQ ID NO: 176136 - DNA, 120 bp, Artificial Sequence
  ENSG00000110074_31 (sequence is synthesized)
ggattacaggcatgagccacccacccggctggtttttacactttaggtgttcctgtttgcattgccagctagccacgagtcttgctactttacttcaatcataacctttcatttcccaaa

SEQ ID NO: 176137 - DNA, 120 bp, Artificial Sequence
  ENSG00000110074_32 (sequence is synthesized)
tagtaagtggtggcggtaggatcttatttgaagccagcagtctggcttgtgagtgttctgttggtgtgtccgctatgctgcctttgagggacagtgtcccagaggagatacctgtgctca

SEQ ID NO: 176138 - DNA, 120 bp, Artificial Sequence
  ENSG00000110074_33 (sequence is synthesized)
ggaacaggattgtacaaggagtggagaggaggtggatccaggcaggagtggagggaacaaggttaccaccttgttgtgaaagttcatggaataggctgggtgcagtgtctcatgcctgta

SEQ ID NO: 176139 - DNA, 120 bp, Artificial Sequence
  ENSG00000110074_34 (sequence is synthesized)
ccagactcattgaaaaaaaaaaaaagaagtcatggaatagactgggatagcagggagctctgtgtgctgaagggagacaagggagtagggaaggaaaggcagtcaaggctgaagagcctg

SEQ ID NO: 176140 - DNA, 120 bp, Artificial Sequence
  ENSG00000110074_35 (sequence is synthesized)
actaggaggcttggtcttcagccgctcagcaatgaggaaaaataggggcatttggggcagagaagtgacatgactgagctggactccccacttgtggagttggggtccatacatcatccc

SEQ ID NO: 176141 - DNA, 120 bp, Artificial Sequence
  ENSG00000110074_36 (sequence is synthesized)
gagtccttttctgccagggagaggtgacacgtgagtctgagcttgtttcctctagcaaccggggcataggcctagactaggtcttatcttctcactcacaagctaagcaagggctggagg

SEQ ID NO: 176142 - DNA, 120 bp, Artificial Sequence
  ENSG00000110074_37 (sequence is synthesized)
gggaaaggggtctccctgagagcaggtcctaggcatcttgacctgggctcctcactgatctgcgttgtgacttgtgatctgcttgatgattgcacctgagcactgtcctgtcagagtgtg

SEQ ID NO: 176143 - DNA, 120 bp, Artificial Sequence
  ENSG00000110074_38 (sequence is synthesized)
gccaagctcatgccagctccctcatctctgtttgcttcagtgtctgtgggaaagctcccatccttccagctttctttccttaagaaaccagtgaaatccccatttcattcctcttcagca

SEQ ID NO: 176144 - DNA, 120 bp, Artificial Sequence
  ENSG00000110074_39 (sequence is synthesized)
gttacttggaagccggagcccgcagaacttgattatggataggatataaatgtaggtttggtggtggtgatggatatccaggataagcatggcaccgcttagcggtgacatgcttcagag

SEQ ID NO: 176145 - DNA, 120 bp, Artificial Sequence
  ENSG00000110074_40 (sequence is synthesized)
ggtgccgtgacttggggtgtgccagggcctcttggtccaaggcctggaagacccaagtggggatgacagtgcagttgaatatgtgagttgggatcaggagaggtctatgcaggaggtaat

SEQ ID NO: 176146 - DNA, 120 bp, Artificial Sequence
  ENSG00000110074_41 (sequence is synthesized)
gggctcagaggggttatgattcggagggttctgccgcacggcatgggccggggcctcttgacccggaggccaggcacgcgcagaggaggcttttctctgggactctagcgacaagggaag

SEQ ID NO: 176147 - DNA, 120 bp, Artificial Sequence
  ENSG00000110075_0 (sequence is synthesized)
gtcggtgagcgcgtttcccgcctgagcgcaactagcggcgggtcgtgggcacctccaggagagcttgtttcatatccatatcccactgtattcctgctaatctgctaatgcagtaaattg

SEQ ID NO: 176148 - DNA, 120 bp, Artificial Sequence
  ENSG00000110075_1 (sequence is synthesized)
gaggaaaactgttaccaggataacctgtaatgggcaaggagccacaaagaagaaaacatttcttttaatttttaaacttggtttgaaagaccagcatgttttggaaatttgatcttcact

SEQ ID NO: 176149 - DNA, 120 bp, Artificial Sequence
  ENSG00000110075_2 (sequence is synthesized)
catcatcccacatagacacacttctagaaagagaagatgtaacactgaaggagttaatggatgaggaagatgttttacaggaatgtaaagctcagaaccgcaaacttatagagtttctgt

SEQ ID NO: 176150 - DNA, 120 bp, Artificial Sequence
  ENSG00000110075_3 (sequence is synthesized)
taaaagcagaatgtctcgaagatttagtctcattcattatagaagaaccacctcaagacatggatgaaaagatcagatacaagtatccaaatatatcttgtgagttgctcacttctgatg

SEQ ID NO: 176151 - DNA, 120 bp, Artificial Sequence
  ENSG00000110075_4 (sequence is synthesized)
tctcccagatgaatgatagactgggagaagatgaatccttgctaatgaaattatatagcttcctcctaaacgattcccctttgaatccactacttgccagtttcttcagcaaggtgctaa

SEQ ID NO: 176152 - DNA, 120 bp, Artificial Sequence
  ENSG00000110075_5 (sequence is synthesized)
gtattcttatcagcagaaaaccagaacagattgtggatttcttaaagaagaagcatgattttgtagaccttattataaagcacataggaacttctgctatcatggatttgttgctcaggc

SEQ ID NO: 176153 - DNA, 120 bp, Artificial Sequence
  ENSG00000110075_6 (sequence is synthesized)
tcctgacgtgtatcgaacctccacagcccaggcaagatgtgctgaattggttaaatgaggagaaaattatccagaggcttgtggaaatagttcatccatcgcaagaagaagatcgacatt

SEQ ID NO: 176154 - DNA, 120 bp, Artificial Sequence
  ENSG00000110075_7 (sequence is synthesized)
caaatgcatcacaatcactttgtgaaattgttcgcctgagcagagaccagatgttacaaattcagaacagtacagagcccgaccccctgcttgccactctagaaaagcaagaaattatag

SEQ ID NO: 176155 - DNA, 120 bp, Artificial Sequence
  ENSG00000110075_8 (sequence is synthesized)
agcagcttctatcaaatattttccacaaggagaaaaatgagtcagccatagtcagtgcaatccagatattgctgactttacttgagacacgacgaccaacatttgaaggccatatagaga

SEQ ID NO: 176156 - DNA, 120 bp, Artificial Sequence
  ENSG00000110075_9 (sequence is synthesized)
tctgcccaccaggcatgagccattcagcttgttcagtaaacaagagtgttctagaagccatcagaggaagacttggatcttttcatgaactcctgctggagccacccaagaaaagtgtga

SEQ ID NO: 176157 - DNA, 120 bp, Artificial Sequence
  ENSG00000110075_10 (sequence is synthesized)
tgaagaccacatggggtgtgctggatcctcctgtggggaatacccggttgaatgtcattaggttgatatccagcctgcttcaaaccaataccagcagtataaatggggaccttatggagc

SEQ ID NO: 176158 - DNA, 120 bp, Artificial Sequence
  ENSG00000110075_11 (sequence is synthesized)
tgaatagcattggagtcatattgaacatgttcttcaagtatacatggaataactttttgcatacacaagtggaaatttgtattgcactgattcttgcaagtccttttgaaaacacagaaa

SEQ ID NO: 176159 - DNA, 120 bp, Artificial Sequence
  ENSG00000110075_12 (sequence is synthesized)
atgccacaattaccgatcaagactccactggtgataatttgttattaaaacatcttttccaaaaatgtcaattaatagaacgaatacttgaagcctgggaaatgaatgagaagaaacagg

SEQ ID NO: 176160 - DNA, 120 bp, Artificial Sequence
  ENSG00000110075_13 (sequence is synthesized)
ctgagggaggaagacggcatggttacatgggacacctaacgaggatagctaactgtatcgtgcacagcactgacaagggccccaacagtgcattagtgcagcagcttatcaaagatcttc

SEQ ID NO: 176161 - DNA, 120 bp, Artificial Sequence
  ENSG00000110075_14 (sequence is synthesized)
ccgacgaagtcagggaacgatgggagacgttctgcacaagctccttaggagaaactaacaagaggaacacggtagatctagttacaacctgccatattcattcatccagtgatgatgaaa

SEQ ID NO: 176162 - DNA, 120 bp, Artificial Sequence
  ENSG00000110075_15 (sequence is synthesized)
ttgactttaaagaaacgggtttctcacaggattcttctttgcagcaagccttttctgattatcagatgcaacaaatgacgtccaattttattgaccagtttggcttcaacgatgagaagt

SEQ ID NO: 176163 - DNA, 120 bp, Artificial Sequence
  ENSG00000110075_16 (sequence is synthesized)
ttgcagatcaagatgacattggcaatgtttcttttgatcgagtatcagacatcaactttactctcaatacaaatgaaagtggaaatattgccttgtttgaagcatgttgtaaggaaagaa

SEQ ID NO: 176164 - DNA, 120 bp, Artificial Sequence
  ENSG00000110075_17 (sequence is synthesized)
tacaacagtttgatgatggtggctctgatgaggaagatatatgggaggaaaagcacatcgcattcacaccagaatcccaaagacgatccagctcggggagtacagacagtgaggaaagta

SEQ ID NO: 176165 - DNA, 120 bp, Artificial Sequence
  ENSG00000110075_18 (sequence is synthesized)
cagactctgaagaagaagatggagcaaagcaagacttgtttgaacccagcagtgccaacacggaggataaaatggaggtggacctgagtgaaccacccaactggtcagctaactttgatg

SEQ ID NO: 176166 - DNA, 120 bp, Artificial Sequence
  ENSG00000110075_19 (sequence is synthesized)
tcccaatggaaacaacccacggtgctccattggattctgtgggatctgatgtctggagcacagaggagccgatgccaactaaagagacgggctgggcttctttttcagagttcacgtctt

SEQ ID NO: 176167 - DNA, 120 bp, Artificial Sequence
  ENSG00000110075_20 (sequence is synthesized)
ccctgagcacaaaagattctttaaggagtaattctccagtggaaatggaaaccagcactgaacccatggaccctctgactcccagtgcggctgccctggcagtgcagccagaagcggcag

SEQ ID NO: 176168 - DNA, 120 bp, Artificial Sequence
  ENSG00000110075_21 (sequence is synthesized)
ggagaggaggatgcagaaagtacagacaaggtaactgagacagtgatgaatggcggcatgaaggaaacgctcagcctcactgtagatgccaagacagagactgcggtcttcaaaagagtg

SEQ ID NO: 176169 - DNA, 120 bp, Artificial Sequence
  ENSG00000110075_22 (sequence is synthesized)
ttgaaatcctatcgtgaggaagggaaactgtctacctctcaagatgctgcttgtaaagacgcagaggagtgtcccgagactgcagaggcgaagtgcgcggcgcccaggcctcccagcagc

SEQ ID NO: 176170 - DNA, 120 bp, Artificial Sequence
  ENSG00000110075_23 (sequence is synthesized)
agtcccgagcagaggactggccaaccaagcgcaccaggtgacacttcagtgaatggccctgtatgacgggtgacgtctgctgctgctgactgaggactgcagaccgccaccactcagggg

SEQ ID NO: 176171 - DNA, 120 bp, Artificial Sequence
  ENSG00000110075_24 (sequence is synthesized)
ctctggaggggtcagctggagcccaccaagctgtcactgctgcactcactctgcaagggatcaggaccagcaacctttatattctagattctaagacattgtacagagaaattcagaagt

SEQ ID NO: 176172 - DNA, 120 bp, Artificial Sequence
  ENSG00000110075_25 (sequence is synthesized)
gtaaaaatattgcacattgacaaataccaagaatttttgcgtatgtttatattgtattgttctaaataatgggtagcctgtgaaataagatcttgccacccatgtaataatagtagtaat

SEQ ID NO: 176173 - DNA, 120 bp, Artificial Sequence
  ENSG00000110075_26 (sequence is synthesized)
actatagttaaaatggctgtaagaatagttttataaaagtgaatacacagatctattgtatttgaaacataactttgacaattattagtgtgaccaaagtattaggcggttttcatacat

SEQ ID NO: 176174 - DNA, 120 bp, Artificial Sequence
  ENSG00000110075_27 (sequence is synthesized)
ttttcaccttgtacaaaattatgaattcatttttcctccaggccgacaaggagttgtagaatgaaaatgccctctaagtgttattttggttgttctaacttacaaaagtgattttgaata

SEQ ID NO: 176175 - DNA, 120 bp, Artificial Sequence
  ENSG00000110075_28 (sequence is synthesized)
agaaatatttggtgttctttttataaccagtttttgattggtaattgttttctgtattgtttaaaacggatcaaaaatgtaagtctattggtagagattaagtaaagtatttattgctac

SEQ ID NO: 176176 - DNA, 120 bp, Artificial Sequence
  ENSG00000110075_29 (sequence is synthesized)
atcatagttgataaattgatgttatcgtaaagccatatgttctgttcaagtcttgtttgcttgaaatgattattcctacaagtgaaacactagactatttggagtgtatatggcttgtgt

SEQ ID NO: 176177 - DNA, 120 bp, Artificial Sequence
  ENSG00000110075_30 (sequence is synthesized)
tttttttttggcttttgtttttgtttgtttttttgtttcatttggtagttcatctgccttttaacccattcaccaaaatttaccttgttaacaagcatcaccaatgaacatttcagagca

SEQ ID NO: 176178 - DNA, 120 bp, Artificial Sequence
  ENSG00000110075_31 (sequence is synthesized)
tgaacatttcagagcaatctgcatatttaacagacctaaaataaatcctattaggcaagtcagttgaaaatgctcgtgctgctaatggaattagagtgcgttcattttacaggctagtat

SEQ ID NO: 176179 - DNA, 120 bp, Artificial Sequence
  ENSG00000110075_32 (sequence is synthesized)
tttaaaagtagaaatcaaaatctggcaccgaagcatgctaattgtttactgtaccttgtgaggttttcactcataaatttaaaccagtgtatttttttagaactggtttgtgtatatata

SEQ ID NO: 176180 - DNA, 120 bp, Artificial Sequence
  ENSG00000110075_33 (sequence is synthesized)
tagtgattatggatactaattcaatgtaatttataattttctatgtcaatacaaaaatacatcacagccttctcaaacagctcaagcaatatattgtatattgccatatcgtctggtgaa

SEQ ID NO: 176181 - DNA, 120 bp, Artificial Sequence
  ENSG00000110075_34 (sequence is synthesized)
agggttaaattacttcacctcttgcacttttagatgcaaatcagtttttcatttctgtaatagaaaattattcacgtatttttacatcatttgtttttcctgaccagtatttaaaaccaa

SEQ ID NO: 176182 - DNA, 120 bp, Artificial Sequence
  ENSG00000110075_35 (sequence is synthesized)
aaggatattctgaaaaatggccaacaatttttttagaagtagcatcccaagcagcgtgcctaaacattacattgcatatggaaataaaagaatcaaacgtctaatgccttattatttctg

SEQ ID NO: 176183 - DNA, 120 bp, Artificial Sequence
  ENSG00000110075_36 (sequence is synthesized)
atttcctttttcattttaagtggtgtggagattccagcactcccaggacagtggagtcagcagtaagccctgggacaggtggcaagggtgggtcccttgacctttgcacgcctcctcagg

SEQ ID NO: 176184 - DNA, 120 bp, Artificial Sequence
  ENSG00000110075_37 (sequence is synthesized)
aaccccctttcccgggtgagcccctctctgaagagactgtccttgggcctcctctggaagcagcacccccagaggacagggctcctcctgcttgcctcagggctgcctgacttgaatggc

SEQ ID NO: 176185 - DNA, 120 bp, Artificial Sequence
  ENSG00000110075_38 (sequence is synthesized)
gttggacctcggggattactggtagataatatgctctggtctcgcctggtggtgagttttgccagccatggccagggtttggctccactggtggcacacgtggcctccgtggtatggacc

SEQ ID NO: 176186 - DNA, 120 bp, Artificial Sequence
  ENSG00000110075_39 (sequence is synthesized)
tggtggcttctccatcccactgtggcctctgtggtatggacctggtggcttctccatcctacccaaggtaacagtgtcttgcttcatcccactgactgctgggagagagcctctgggact

SEQ ID NO: 176187 - DNA, 120 bp, Artificial Sequence
  ENSG00000110075_40 (sequence is synthesized)
tttctttggggcatcattttgttttgtctttcgtagcagggaaaggatatgacaatggggaggacagttcttttggaggttggaggggccaagccaaggacaggagcaagtgtgccctca

SEQ ID NO: 176188 - DNA, 120 bp, Artificial Sequence
  ENSG00000110075_41 (sequence is synthesized)
ttttgtttctacttttaatttctgtgtgttggccatactgaattatgagactaacagatgtctacaatacaatacctgtattcaaaataacaaaaataaagcctgattctttgtttctag

SEQ ID NO: 176189 - DNA, 120 bp, Artificial Sequence
  ENSG00000110075_42 (sequence is synthesized)
agagctttgtgctgaacatcagtcctccacatcgactcctcttgtaagatgttgtgtccaggtggatcatcacagtggctgccatccttaaatatgtcttggtcctgttgctgctaattg

SEQ ID NO: 176190 - DNA, 120 bp, Artificial Sequence
  ENSG00000110075_43 (sequence is synthesized)
tttgcctcataaaagataaagctgcagttcagaagaactgatttctttttgatgtaattaatattaatgctggctgtcattgtccattcataggtccagaactcagctcagcagcccagg

SEQ ID NO: 176191 - DNA, 120 bp, Artificial Sequence
  ENSG00000110075_44 (sequence is synthesized)
acttgtccctacccttctgctttcagccagacccccgtgctcagccttggtttacactccatgccttaccaagtggccattccacagccagtcgcttgctgccccctgctccctgccccc

SEQ ID NO: 176192 - DNA, 120 bp, Artificial Sequence
  ENSG00000110075_45 (sequence is synthesized)
atgtgctcatctaatatcacctctgggggcaagaaagggggcagcacaaaagtgggagtgagcagaggggcagtgggtgtgctgttgtcttgcatgagcgacaagggaggttttgggttc

SEQ ID NO: 176193 - DNA, 120 bp, Artificial Sequence
  ENSG00000110075_46 (sequence is synthesized)
tctctgtctagtcaaactagacatatagagcttttcttcagacctaagcagtatagataccttccaaagcctaatataaggtttatttttaaattatctgcaataattatccatgccata

SEQ ID NO: 176194 - DNA, 120 bp, Artificial Sequence
  ENSG00000110075_47 (sequence is synthesized)
attccctgccaccagaatgagtaatcaggaattaatggtagaggcatttctgcagtgtacatctgcaaggtggaatctggaggctctgcccatatgtggaaccaaggagaaggtggttta

SEQ ID NO: 176195 - DNA, 120 bp, Artificial Sequence
  ENSG00000110075_48 (sequence is synthesized)
atacagttacagctgcctccttcccagcaaatgccagtgggagtgatgccttcagttgagccaacagccgcctccctgcccctcatgggctcacccacagaaaacggcagtctcatctgt

SEQ ID NO: 176196 - DNA, 120 bp, Artificial Sequence
  ENSG00000110075_49 (sequence is synthesized)
atgcagctctggtcactgtatttattgtttgggttagaatgaggaggtggcactagtttgtcttcatatgttctttactcctgattaatacgtaagaacatacttgctgatttcacttgc

SEQ ID NO: 176197 - DNA, 120 bp, Artificial Sequence
  ENSG00000110075_50 (sequence is synthesized)
ttctttgggcctgcttgttttaaattagaatatcaacattttcctggggtccattataacaccccccccccccacattttcaactaaaaacccgaacaagtctggtactctctagatttg

SEQ ID NO: 176198 - DNA, 120 bp, Artificial Sequence
  ENSG00000110075_51 (sequence is synthesized)
gtgttaaggaaacagaactggctcctctgtgggtcttctagtgttagagacttttcagagtgattttggataaatagtcaaacgtttactctcttcataaggtaggtagggtagaaatta

SEQ ID NO: 176199 - DNA, 120 bp, Artificial Sequence
  ENSG00000110075_52 (sequence is synthesized)
ttttcgttttatattcttcccagcctctaagacttaatttttttaaaaaaagaaatgaaatgtccctgaacattttgtttctaggattatgcttgtgttcatcagtcggttttcctctgg

SEQ ID NO: 176200 - DNA, 120 bp, Artificial Sequence
  ENSG00000110075_53 (sequence is synthesized)
tgtgattttgctgtagtagattgggggtggaggaggtggcaaggagggagggggtggtcaccacttgttggatcttaggataaagttggttgtgtccagaggtgactgatacaccttata

SEQ ID NO: 176201 - DNA, 120 bp, Artificial Sequence
  ENSG00000110075_54 (sequence is synthesized)
atttcagactgttccatgtcatgtgatcactttaaactaggcttaatccaaacctctctctaaagataattcacaatagaggacagagtggtcacatagtgtttcttacagtgacatgtg

SEQ ID NO: 176202 - DNA, 120 bp, Artificial Sequence
  ENSG00000110075_55 (sequence is synthesized)
cattagaatgatttgtagaccaaatttcaaacgtttccttttttggcaaattgtgtctgaaattatttgatttttcttttagaaaaacacaccaacttttatagccctatggctatgtaa

SEQ ID NO: 176203 - DNA, 120 bp, Artificial Sequence
  ENSG00000110075_56 (sequence is synthesized)
ataagatgatttctggaacacaaatgggcaaatagtatgtagaatatcattagaatcattatatcactgtcactggtcctggggttgccaggccttttctgattatcagatgcaacaaat

SEQ ID NO: 176204 - DNA, 120 bp, Artificial Sequence
  ENSG00000110075_57 (sequence is synthesized)
acgtccgccattttgggcgcttcgctgatggtgtcggtgagcgcgtttcccgcctgagcgcaactagcggcgggtcgtgggcacctccagataagaaaacaagctcagagagatgtggtg

SEQ ID NO: 176205 - DNA, 120 bp, Artificial Sequence
  ENSG00000110075_58 (sequence is synthesized)
acttgctcaaatagtgacagaacttcctcggccatatggaggggtcatataatacccttgtgtcttcagtttgaggtacctcccataattttaaggggctcagaaggaaagaaaacatct

SEQ ID NO: 176206 - DNA, 120 bp, Artificial Sequence
  ENSG00000110075_59 (sequence is synthesized)
ctcagtcccaggatgctttgcctccgcggcagtcatgactccagagccatctgcatgtgacctcatcctctggtgcctaggtgctggtccctagggtgtttgatgtgcctgtcatcctct

SEQ ID NO: 176207 - DNA, 120 bp, Artificial Sequence
  ENSG00000110075_60 (sequence is synthesized)
gttaagtccatgagtgcatgaagtttactgttggtgctactggttcagtaacaggtgatggatttcaaaagtctccagatgcctgctggcgaataatcaaagaataactaccagcatgtt

SEQ ID NO: 176208 - DNA, 120 bp, Artificial Sequence
  ENSG00000110075_61 (sequence is synthesized)
ttttgggcgcttcgctgatggtgtcggtgagcgcgtttcccgcctgagcgcaactagcggcgggtcgtgggcacctccaggctcagaaggaaagaaaacatctcccaggaccagatgtgg

SEQ ID NO: 176209 - DNA, 120 bp, Artificial Sequence
  ENSG00000110075_62 (sequence is synthesized)
agtagatgggagttggagagaagctgaagcccaggcccagcaacaggctgggggcccaggtgcttcgggggtcccagccattaacagagcttcgtgcaggagagcttgtttcatatccat

SEQ ID NO: 176210 - DNA, 120 bp, Artificial Sequence
  ENSG00000110075_63 (sequence is synthesized)
gtgctgaattgttcaaagtccagagaaacctgtaacattctacttaaaatgtgatggatatttccaagtatgttaatctacattggggcttgaacaagagccactcattgctatgattac

SEQ ID NO: 176211 - DNA, 120 bp, Artificial Sequence
  ENSG00000110075_64 (sequence is synthesized)
ttctacaatgtgttttacagtggttaaatgaggagaaaattatccagaggcttgtggaaatagttcatccatcgcaagaagaagatgtaagttcacttgtgtgactgtaaacttgattag

SEQ ID NO: 176212 - DNA, 120 bp, Artificial Sequence
  ENSG00000110075_65 (sequence is synthesized)
tgtcttcttgccacccccagccccagtcatcatcatcatcagagtcttggtttgagtaggaggtgacttggtcttgagattctgttggctctcgacaaaattggcaaagacaagcatggc

SEQ ID NO: 176213 - DNA, 120 bp, Artificial Sequence
  ENSG00000110075_66 (sequence is synthesized)
ccaggttattttgctgagggaaagagatagaagggtgagtgagtgagtgtgtttgtgtgcgggtgcatgtgtgtaatttataaataggatcaattgcctactttaataagtatatagaaa

SEQ ID NO: 176214 - DNA, 120 bp, Artificial Sequence
  ENSG00000110076_0 (sequence is synthesized)
gagcatcctcctcggagaggcaccgcggcggggcgggcgggcgggcggggacgcggcggggagggagagaggcgcgaggcggcagacaccgctagccctggctctgccacccgtcggaga

SEQ ID NO: 176215 - DNA, 120 bp, Artificial Sequence
  ENSG00000110076_1 (sequence is synthesized)
ggcagacaccgctagccctggctctgccacccgtcggagacggggcggccctgtagctctgctacccaccctccagcttctggcgccccgagaaccaggcatccctccctgctcttctgt

SEQ ID NO: 176216 - DNA, 80 bp, Artificial Sequence
  ENSG00000110076_2 (sequence is synthesized)
gagggaagccggcatctgggcctctgcgcgcctcgccccgcggccgggcccatggcactgtgagcctgcaagggagcccc

SEQ ID NO: 176217 - DNA, 80 bp, Artificial Sequence
  ENSG00000110076_3 (sequence is synthesized)
caagggagccccgctcagcgcggggagcgcccggccccctcccgccccatgcgcccgcggctctgaagcctgagcggggg

SEQ ID NO: 176218 - DNA, 80 bp, Artificial Sequence
  ENSG00000110076_4 (sequence is synthesized)
tggcggccgacaccgccgccgctgctgttgctgctgctgctggcgctggcggcgcgcgcggacggcctggagttcggcgg

SEQ ID NO: 176219 - DNA, 120 bp, Artificial Sequence
  ENSG00000110076_5 (sequence is synthesized)
gcggcgagcagcggcgagctcagcttcagcctgcgcaccaacgccacgcgcgcgctgctgctctacctggacgacggcggcgactgcgacttcctggagctgctgctggtggacggccgc

SEQ ID NO: 176220 - DNA, 120 bp, Artificial Sequence
  ENSG00000110076_6 (sequence is synthesized)
ctgcggctgcgcttcacgctttcgtgcgccgagccggccacgctgcagctggacacgccggtggccgacgaccgctggcacatggtgctgctgacccgcgacgcgcgccgcacggcgctg

SEQ ID NO: 176221 - DNA, 120 bp, Artificial Sequence
  ENSG00000110076_7 (sequence is synthesized)
gcggtggacggcgaggcccgcgccgccgaggtgcgctccaagcggcgcgagatgcaggtggccagcgacctgttcgtgggcggcatcccgcccgacgtgcgcctctcggcgcttacgctg

SEQ ID NO: 176222 - DNA, 120 bp, Artificial Sequence
  ENSG00000110076_8 (sequence is synthesized)
agcaccgtcaagtacgagccgcccttccgcggcctcttggccaacctgaagctgggcgagcggccccccgcgctgctgggcagccagggcctgcgcggcgccaccgccgacccgctgtgc

SEQ ID NO: 176223 - DNA, 120 bp, Artificial Sequence
  ENSG00000110076_9 (sequence is synthesized)
gcgcccgcgcgcaacccctgcgccaacggcggcctctgcaccgtgctggcccccggcgaggtgggctgcgactgcagccacacgggcttcggcggcaagttctgcagcgaagaggagcac

SEQ ID NO: 176224 - DNA, 120 bp, Artificial Sequence
  ENSG00000110076_10 (sequence is synthesized)
cccatggaaggtccggctcacctgacgttaaacagcgaagtagggtccttactgttctccgaggggggggccgggagaggaggagccggcgatgtgcaccagccaacaaaaggcaaggag

SEQ ID NO: 176225 - DNA, 120 bp, Artificial Sequence
  ENSG00000110076_11 (sequence is synthesized)
gagtttgtggcgaccttcaaaggcaatgagttcttctgctacgacctgtcacacaaccccatccagagcagcactgatgagatcacactggccttccgcaccctgcaacgcaacggcctg

SEQ ID NO: 176226 - DNA, 120 bp, Artificial Sequence
  ENSG00000110076_12 (sequence is synthesized)
atgctgcatacaggcaagtcggccgactacgtcaacctgtccctcaagtctggggctgtctggctggtcatcaacctaggctcaggtgccttcgaggcccttgtggaacccgtcaatggc

SEQ ID NO: 176227 - DNA, 120 bp, Artificial Sequence
  ENSG00000110076_13 (sequence is synthesized)
aagttcaacgacaacgcctggcacgacgtccgggtcacccgaaacctgcgccagcacgcagggattggacacgctatggtaaacaaactgcattatctggtgaccatctcggtggacggg

SEQ ID NO: 176228 - DNA, 120 bp, Artificial Sequence
  ENSG00000110076_14 (sequence is synthesized)
atcctgaccaccacaggctacacgcaggaggattacaccatgctgggctctgatgacttcttctacattgggggcagccccaacacagctgacctgccgggctcgcccgtcagcaacaac

SEQ ID NO: 176229 - DNA, 120 bp, Artificial Sequence
  ENSG00000110076_15 (sequence is synthesized)
ttcatgggctgcctcaaggacgtggtctataagaacaatgacttcaaattggaactatcccgcctggcaaaggaaggggaccccaagatgaagctgcagggggacttgtcattccgctgt

SEQ ID NO: 176230 - DNA, 120 bp, Artificial Sequence
  ENSG00000110076_16 (sequence is synthesized)
gaggatgtggctgccctggaccctgtgacctttgagagtcccgaggcctttgtggcgctgccccgctggagcgctaagcgcactggctccatctccctagacttccgcaccaccgagccc

SEQ ID NO: 176231 - DNA, 120 bp, Artificial Sequence
  ENSG00000110076_17 (sequence is synthesized)
aatgggctgctgctcttcagccagggccggcgggctgggggtggagctggcagccacagctctgctcagcgggccgactactttgccatggagctattggacggccacctctatcttctg

SEQ ID NO: 176232 - DNA, 120 bp, Artificial Sequence
  ENSG00000110076_18 (sequence is synthesized)
ctggacatgggatctgggggcatcaagctgcgggcatccagccgcaaggtcaatgatggcgagtggtgtcacgtggacttccagagggatgggcgaaaaggctccatctcagtgaatagt

SEQ ID NO: 176233 - DNA, 120 bp, Artificial Sequence
  ENSG00000110076_19 (sequence is synthesized)
cgcagcacgccgttcttggccactggagacagcgagattctggacctggagagtgagctgtacctgggcggtctccctgaggggggccgggtggacctgcccctgcccccagaggtgtgg

SEQ ID NO: 176234 - DNA, 120 bp, Artificial Sequence
  ENSG00000110076_20 (sequence is synthesized)
acagcagcactccgggcaggctacgtgggctgtgtgcgggacctcttcatagatgggcgtagccgagacctccggggcctggctgaggctcagggggctgtgggcgttgcccccttttgc

SEQ ID NO: 176235 - DNA, 120 bp, Artificial Sequence
  ENSG00000110076_21 (sequence is synthesized)
tcccgggagacgctgaagcagtgtgcatctgccccctgtcgcaatgggggcgtctgtcgagaaggctggaaccgcttcatctgtgactgcatcgggaccggctttcttgggcgggtctgt

SEQ ID NO: 176236 - DNA, 120 bp, Artificial Sequence
  ENSG00000110076_22 (sequence is synthesized)
gagagagaggccacggtcctgagctacgatggctccatgtacatgaagatcatgctgcctaacgccatgcacacggaggcagaggatgtgtccctgcgtttcatgtcccagcgggcctac

SEQ ID NO: 176237 - DNA, 120 bp, Artificial Sequence
  ENSG00000110076_23 (sequence is synthesized)
ggactcatgatggccaccacttccagggagtctgccgacaccctacgcctggagctggatggggggcagatgaagctcactgtcaacctcgactgcctgcgcgtcggctgcgcacccagt

SEQ ID NO: 176238 - DNA, 120 bp, Artificial Sequence
  ENSG00000110076_24 (sequence is synthesized)
aaaggccccgaaacgctgtttgcggggcacaagctcaatgacaatgagtggcacacggtgagggtggtccggcgtggcaagagcctgcagctgtctgtggacaacgtgactgtggaggga

SEQ ID NO: 176239 - DNA, 120 bp, Artificial Sequence
  ENSG00000110076_25 (sequence is synthesized)
cagatggcaggagcccatatgcggctggagttccacaacattgagacgggcatcatgacggagcggcggtttatctccgtggtgccctccaacttcatcgggcatctgagtgggctcgtg

SEQ ID NO: 176240 - DNA, 120 bp, Artificial Sequence
  ENSG00000110076_26 (sequence is synthesized)
ttcaatggccagccctacatggaccagtgcaaggatggtgacatcacctactgtgagctcaatgctcgctttggcctgcgtgccatcgtggccgatcccgtcaccttcaagagtcgcagc

SEQ ID NO: 176241 - DNA, 120 bp, Artificial Sequence
  ENSG00000110076_27 (sequence is synthesized)
ctccaagcctatgcttccatgcacctcttcttccagttcaagaccacggcccctgatgggcttcttctgttcaactcgggcaacggcaatgacttcattgtcatcgagctggtcaagggg

SEQ ID NO: 176242 - DNA, 120 bp, Artificial Sequence
  ENSG00000110076_28 (sequence is synthesized)
tacatccactacgtgtttgacctggggaatggcccgtccttgatgaaggggaactcagacaaaccagtcaatgacaaccagtggcacaacgtggtggtgtccagggacccaggcaacgtg

SEQ ID NO: 176243 - DNA, 120 bp, Artificial Sequence
  ENSG00000110076_29 (sequence is synthesized)
cacacgctcaagattgactcccgcactgtcacgcagcactccaatggcgcccgaaacctcgatctcaaaggggagttgtacattggcggtctgagcaagaatatgttcagcaacctgccc

SEQ ID NO: 176244 - DNA, 120 bp, Artificial Sequence
  ENSG00000110076_30 (sequence is synthesized)
aagctggtggcctcccgggatggctttcagggctgcctggcctcagtggacctcaacggacgtctcccagacctcatcgccgacgccctgcaccgcattgggcaggtggagaggggctgt

SEQ ID NO: 176245 - DNA, 120 bp, Artificial Sequence
  ENSG00000110076_31 (sequence is synthesized)
gatggccccagcaccacctgcactgaagagtcctgtgccaaccagggcgtctgcttgcagcagtgggatggcttcacctgcgactgcaccatgacttcctatggaggccctgtctgcaat

SEQ ID NO: 176246 - DNA, 120 bp, Artificial Sequence
  ENSG00000110076_32 (sequence is synthesized)
gatcccgggaccacatacatctttgggaaggggggagcgctcatcacctacacgtggccccccaatgacaggcccagcacgaggatggatcgcctggccgtgggcttcagcacccaccag

SEQ ID NO: 176247 - DNA, 120 bp, Artificial Sequence
  ENSG00000110076_33 (sequence is synthesized)
cggagcgctgtgctggtgcgggtggacagcgcctccggccttggagactacctgcagctgcacatcgaccagggcaccgtgggggtgatctttaacgtgggcacggacgacattaccatc

SEQ ID NO: 176248 - DNA, 120 bp, Artificial Sequence
  ENSG00000110076_34 (sequence is synthesized)
gacgagcccaacgccatagtaagcgacggcaaataccacgtggtgcgcttcactcgaagcggcggcaacgccaccctgcaggtggacagctggccggtcaacgagcggtacccggcagga

SEQ ID NO: 176249 - DNA, 120 bp, Artificial Sequence
  ENSG00000110076_35 (sequence is synthesized)
aactttgataacgagcgcctggcgattgctagacagagaatcccctaccggcttggtcgagtagtagatgagtggctgctcgacaaaggccgccagctgaccatcttcaacagccaggct

SEQ ID NO: 176250 - DNA, 120 bp, Artificial Sequence
  ENSG00000110076_36 (sequence is synthesized)
gccatcaagatcgggggccgggatcagggccgccccttccagggccaggtgtccggcctctactacaatgggctcaaggtgctggcgctggccgccgagagcgaccccaatgtgcggact

SEQ ID NO: 176251 - DNA, 120 bp, Artificial Sequence
  ENSG00000110076_37 (sequence is synthesized)
gagggtcacctgcgcctggtgggggaggggccgtccgtgctgctcagtgcggagaccacggccaccaccctgctggctgacatggccaccaccatcatggagactaccaccaccatggcc

SEQ ID NO: 176252 - DNA, 120 bp, Artificial Sequence
  ENSG00000110076_38 (sequence is synthesized)
actaccaccacgcgccggggccgctcccccacactgagggacagcaccacccagaacacagatgacctgctggtggcctctgctgagtgtccaagcgatgatgaggacctggaggagtgt

SEQ ID NO: 176253 - DNA, 120 bp, Artificial Sequence
  ENSG00000110076_39 (sequence is synthesized)
gagcccagtactggaggagagttaatattgcccattatcacggaggactccttagacccccctcccgtggccacccgatcccccttcgtgcccccgccccctaccttctaccccttcctc

SEQ ID NO: 176254 - DNA, 120 bp, Artificial Sequence
  ENSG00000110076_40 (sequence is synthesized)
cttctaccccttcctcacgggagtgggcgccacccaagacacgctgcccccgcccgccgcgcgccgcccgccctctgggggcccgtgccaggccgagcgggacgacagcgactgcgagga

SEQ ID NO: 176255 - DNA, 120 bp, Artificial Sequence
  ENSG00000110076_41 (sequence is synthesized)
ggcttcgcctccggggaggtctttgactccagcctcccccccacggacgacgaggacttttacaccacctttcccctggtcacggaccgcaccaccctcctgtcaccccgcaaacccgct

SEQ ID NO: 176256 - DNA, 120 bp, Artificial Sequence
  ENSG00000110076_42 (sequence is synthesized)
ccccggcccaacctcaggacagatggggccacgggcgcccctggggtgctgtttgccccctccgccccggcccccaacctgccggcgggcaaaatgaaccaccgagacccgcttcagccc

SEQ ID NO: 176257 - DNA, 120 bp, Artificial Sequence
  ENSG00000110076_43 (sequence is synthesized)
ttgctggagaacccgcccttggggcccggggcccccacgtcctttgagccgcggaggccccctcccctgcgccccggcgtgacctcagcccccggcttcccccatctgcccacagccaac

SEQ ID NO: 176258 - DNA, 120 bp, Artificial Sequence
  ENSG00000110076_44 (sequence is synthesized)
cccacagggcctggggagcggggcccgccgggcgcagtggaggtgatccgggagtccagcagcaccacgggcatggtggtgggcattgtggcggcggcggcgctctgcatcctcatcctc

SEQ ID NO: 176259 - DNA, 120 bp, Artificial Sequence
  ENSG00000110076_45 (sequence is synthesized)
ctctacgccatgtataagtaccgcaatcgtgatgagggctcctaccaggtggaccagagccgaaactacatcagtaactcggcccagagcaatggggcggtggtgaaagagaaggccccg

SEQ ID NO: 176260 - DNA, 120 bp, Artificial Sequence
  ENSG00000110076_46 (sequence is synthesized)
gctgcccccaagacgcccagcaaggccaagaagaacaaagacaaggagtattatgtctgagcccccggcactgcgccccactgccagctgcccctcctgggagggcccgggaggagggtg

SEQ ID NO: 176261 - DNA, 120 bp, Artificial Sequence
  ENSG00000110076_47 (sequence is synthesized)
ccaccctctccctgccaggggcctggggaccctctccctggctgcctcaggcttctcttacgaagaggaaacgcaaaaaaagaaaaggaaaaaccccgtgctcgcccccttcctcctgcc

SEQ ID NO: 176262 - DNA, 120 bp, Artificial Sequence
  ENSG00000110076_48 (sequence is synthesized)
gtccactgcgcggcctcgtcagtcccggggctgactgtccctctcagctctgcgcctgccaggcagggcacgtgctcacagccctgggttgatttatttttttaagggggtagttttatt

SEQ ID NO: 176263 - DNA, 120 bp, Artificial Sequence
  ENSG00000110076_49 (sequence is synthesized)
ttggtggggttgggtgggaaggaaggctgggggttttgtaaagtgtccactgctcgtcctgttaattttcctcaatttttcttcttcttccttctgtccctcctgccttccttctcttcc

SEQ ID NO: 176264 - DNA, 120 bp, Artificial Sequence
  ENSG00000110076_50 (sequence is synthesized)
caagccctccaatccccatcccaggcttgctgtgtctcactgtccccaccctccttccctacttctttttttgtgtgtctggtttctcccttcctttcctccctttgggtttccagagtc

SEQ ID NO: 176265 - DNA, 120 bp, Artificial Sequence
  ENSG00000110076_51 (sequence is synthesized)
ggtgggagaagggcgggagggtgggcccgagtggcccagtgggtgggtggggtggggtggggcaagtgccccaactcccctcaccaggagaggcacctgcttggtgccgcccagggaagg

SEQ ID NO: 176266 - DNA, 120 bp, Artificial Sequence
  ENSG00000110076_52 (sequence is synthesized)
ggctcaggcctgacggaaggcctgttctgtgtgtgccgccgggcgacgtgcattgatggggaagctgctggaggagcaggggtggggggtgggagggaggggaaaggcaaatgcagatat

SEQ ID NO: 176267 - DNA, 120 bp, Artificial Sequence
  ENSG00000110076_53 (sequence is synthesized)
atattacagacaaatactctagattccacgagcagcagcctgtggcacccgctgggcgcgggcagcagggaagagggagcaaggcattgtccacagactgctggggtcacttctttgccc

SEQ ID NO: 176268 - DNA, 120 bp, Artificial Sequence
  ENSG00000110076_54 (sequence is synthesized)
acgggctccctgctcccccagttttttttctctctttgttaacaaatgtgtctgagtcttggaaaacaccccaaccccggaaatgtgtgggaaaaagaaaacaaaaactttccaaattcc

SEQ ID NO: 176269 - DNA, 120 bp, Artificial Sequence
  ENSG00000110076_55 (sequence is synthesized)
ctcgcaggctcgcgcctttcctcggctcagccccgctcccctcctctcctatcccctcctctcctatcccttcattcccccctcacccggatttgcttcccttcccccttctcccgcccc

SEQ ID NO: 176270 - DNA, 120 bp, Artificial Sequence
  ENSG00000110076_56 (sequence is synthesized)
ccgctccctcctttcccccggcctccgtcgggcggcagcggcagcagcggcgcggccggccccagtcgccgtcggtctcccgccttcgggggaaccagcaagcacggcaccgtgcccatc

SEQ ID NO: 176271 - DNA, 120 bp, Artificial Sequence
  ENSG00000110076_57 (sequence is synthesized)
tgttttgctcttccaattgttttttgcgtcctggacaatctttagattttgcttctcttttagtttccctctttcccttttctttcttttttggtccaaactgaaatacaaaagacaaat

SEQ ID NO: 176272 - DNA, 120 bp, Artificial Sequence
  ENSG00000110076_58 (sequence is synthesized)
ccctaactcctgaattcagattcctggccagagagacctgggggcaggccccatgttcatcggctctggttagaccagccccgatgccaggctgcttatttctattgctttattttgttc

SEQ ID NO: 176273 - DNA, 120 bp, Artificial Sequence
  ENSG00000110076_59 (sequence is synthesized)
ttttccctcccctcccttgttttttctctttgatttagtttcttggtctcctgaaaatccatggaaaacaccatcccatgacatgctatgctctgctcactgtcagctccctggacaggg

SEQ ID NO: 176274 - DNA, 120 bp, Artificial Sequence
  ENSG00000110076_60 (sequence is synthesized)
ccgctcaagtttgaggaggggtctgggggtgagacctccagtggcagccagtggggtgggttcccaggggtggagggcatggccttgggagatgcggagctgcctgagatcagtccagac

SEQ ID NO: 176275 - DNA, 120 bp, Artificial Sequence
  ENSG00000110076_61 (sequence is synthesized)
ctcatgcaaatcatcagttcatagcagtttgggggctgccccatgctggctgctctgggaaaggtgccatcccctccctcacttctcagccttgagggttcctggttccatgtcccccac

SEQ ID NO: 176276 - DNA, 120 bp, Artificial Sequence
  ENSG00000110076_62 (sequence is synthesized)
attttgcatggcatgaatggtcttttcccctgaccagggatagcgtccagttcccccaactgctccgctgctctgactaacactgtgtttcacactgtcttccttcccgtcaccccctgc

SEQ ID NO: 176277 - DNA, 120 bp, Artificial Sequence
  ENSG00000110076_63 (sequence is synthesized)
cctctctgcccgctgcctgccccgcatggcctctgacaggggctggtttccttccctgttgaggggagcgagaggaggaggcctgcaggggtgggaaggggcagcattggttgtccttgt

SEQ ID NO: 176278 - DNA, 120 bp, Artificial Sequence
  ENSG00000110076_64 (sequence is synthesized)
caccgagctcctctgtttgggttaggctcagtcctggtgagtgttggtgtgggtgtctgtgtaaatgcagctggtgtgtgttggtgtgtgggtgtgactgtgtgtaaatgttggcgtgac

SEQ ID NO: 176279 - DNA, 120 bp, Artificial Sequence
  ENSG00000110076_65 (sequence is synthesized)
atttcggggtgttagtgggaagctgtactgtgtgtgcgaggctctgctggtgactctccacgtgtgagctggtgtgagctgggggctgcgtgactatgtgggtttttgagcctggtgagg

SEQ ID NO: 176280 - DNA, 120 bp, Artificial Sequence
  ENSG00000110076_66 (sequence is synthesized)
actctgtgtggaggtggactgtggagactggcccttcagttgcagtgccatggcagtcaggaacagggaaggagctggggctagccctttgctccttgccttgcctcagagtgtgtgtgc

SEQ ID NO: 176281 - DNA, 120 bp, Artificial Sequence
  ENSG00000110076_67 (sequence is synthesized)
gcaggccctgctgcgtgtgatcccctgggattccctcgtgcctgcccagtcctggctctgcagcagcagccggttagtcatcgcctattaataatgcagagtgactgaacaccaggctgg

SEQ ID NO: 176282 - DNA, 120 bp, Artificial Sequence
  ENSG00000110076_68 (sequence is synthesized)
ggaccctgcagatggacgtgtctgctcccgtggggcagctgcctggcctgcccagcctcccaggtttgtatggctggctggtgaggagggaagcgtgacagttggggctcccaatctgag

SEQ ID NO: 176283 - DNA, 120 bp, Artificial Sequence
  ENSG00000110076_69 (sequence is synthesized)
tgtctctcccacttccctaggaggctctacctctgaggctacatctggcttttcctgatacttttgcagatccatgttttcctgcacccatatagactagtgcccatggccaaagccatt

SEQ ID NO: 176284 - DNA, 120 bp, Artificial Sequence
  ENSG00000110076_70 (sequence is synthesized)
ccagccctccccaatttaagacctcaggtggccactcccagtggtcttggtgttccaatggggcatacagtgccaggtttcttgttcctccagctgctgcttctaggagttagctgctac

SEQ ID NO: 176285 - DNA, 120 bp, Artificial Sequence
  ENSG00000110076_71 (sequence is synthesized)
ggcagcagcggcgcggccggccccagtcgccgtcggtctcccgccttcgggggaaccaggtctccgtccctcttctctcctccagcccgcaccgccccgctccccagctcggtttttccg

SEQ ID NO: 176286 - DNA, 120 bp, Artificial Sequence
  ENSG00000110076_72 (sequence is synthesized)
caggatttccctcgctctcccctccctgcttggcccccgcgctcccctccctctccactcggcaccatgccccctcccccgggcgctcccccgggtttctgacggccctctgcgccgctc

SEQ ID NO: 176287 - DNA, 120 bp, Artificial Sequence
  ENSG00000110076_73 (sequence is synthesized)
cgaccccgccgggatgcagagagacccctagctcctcgcgatggacccaggcatcctggaccttggcgttgccgctccgcggacccccgatttcccggcgggatccagttgattttgttg

SEQ ID NO: 176288 - DNA, 120 bp, Artificial Sequence
  ENSG00000110076_74 (sequence is synthesized)
gctccggaccgaggcttgggccctggtttacctccgcttcatccctaccccgctcccggagctcggagccggaggggggcttcgcggggctgcgcagccccgcgtccccgcccccggcca

SEQ ID NO: 176289 - DNA, 80 bp, Artificial Sequence
  ENSG00000110076_75 (sequence is synthesized)
cccggccctggctgggcccctgccgccgcctccaccgccgccgccgccacctctgctgccgctgttgccgctgttgctgc

SEQ ID NO: 176290 - DNA, 120 bp, Artificial Sequence
  ENSG00000110076_76 (sequence is synthesized)
cgccacctctgctgccgctgttgccgctgttgctgctgttgctgctgggggcggccgagggggcccgggtctcctccagcctcagcaccacccaccacgtccaccacttccacagcaagc

SEQ ID NO: 176291 - DNA, 120 bp, Artificial Sequence
  ENSG00000110076_77 (sequence is synthesized)
ttttctaaaaaccaaaccaaaacaacaaactcagagggttaaaccgacccccagatccactaaaaacaaacagaacagcccaaccccacccagctgggaattctgaggtgtcatactgga

SEQ ID NO: 176292 - DNA, 120 bp, Artificial Sequence
  ENSG00000110076_78 (sequence is synthesized)
gtgtggggtgagattggagctggagcgggttttattggctgtcagtgagcgaagcaaggtccctttaacattttccacttctgtgcttgcatgtccaggtggggaggaagggctcggctt

SEQ ID NO: 176293 - DNA, 120 bp, Artificial Sequence
  ENSG00000110076_79 (sequence is synthesized)
aacagggcctggtcccaggcagtgctgggccttggcagtccgggagaagagaggggatcctggccaggggtcagaaggcctggttgtaggtgggaggtcagcctgggcaggttgctgctt

SEQ ID NO: 176294 - DNA, 120 bp, Artificial Sequence
  ENSG00000110076_80 (sequence is synthesized)
ccacacaccatcactctgtctcacctccttctctgctctcacacgcaccgactccaccttggcctggcagctacctcctctgtctctgcctctttgtctcctctatctgcctcttccagg

SEQ ID NO: 176295 - DNA, 120 bp, Artificial Sequence
  ENSG00000110076_81 (sequence is synthesized)
ggctccatggcttcagggcttggggctggacactggggcaggatgtttggggaagcagagggagaagatggggatggactgagggaagaggatgaagaggggagatgaccttggagctgg

SEQ ID NO: 176296 - DNA, 120 bp, Artificial Sequence
  ENSG00000110076_82 (sequence is synthesized)
agaggagagggaatggggaaggtgggaaggcttgcacatggtggggaggagggactgggctccccttccccagcccatgtgtaccctgggtgccctccccttctggggtccccacctggc

SEQ ID NO: 176297 - DNA, 120 bp, Artificial Sequence
  ENSG00000110076_83 (sequence is synthesized)
tgggctaggggctgtggctgacaaggactttccctttggctttctgccccttcctcatttctccccgtcccctcctcccttactggctttctcctccattcctctttcctctccttggct

SEQ ID NO: 176298 - DNA, 120 bp, Artificial Sequence
  ENSG00000110076_84 (sequence is synthesized)
attctgcagctgggctggggctgcgtcacagaagcctctgagcctgggggcctttgtcaagcagtttttgcagtgagtgaggccgagcttccagcccaggactgctgctcgtcctcctga

SEQ ID NO: 176299 - DNA, 120 bp, Artificial Sequence
  ENSG00000110077_0 (sequence is synthesized)
attccgaagggttctgtgctaggaaccttacacgtgttgtctcacataatccttaaaactcagaaatgattttaaattaaatagcacagagaggaaaactgactggagagggagcctttg

SEQ ID NO: 176300 - DNA, 120 bp, Artificial Sequence
  ENSG00000110077_1 (sequence is synthesized)
cttagattagaaaactgaagcttcaagaacagacttgcctaacaacaggaaacttgtatgtctcgaagtggcaattcacacataaggctccatgactcctgaactctcacaaatattagt

SEQ ID NO: 176301 - DNA, 120 bp, Artificial Sequence
  ENSG00000110077_2 (sequence is synthesized)
tggctcttttcatggttttactgaagttgctagaagtttacagaaaaggaagtgcaggaacatttcacaaatctacaatctgtgagtatcacatcctgtatagctgtaaacactggaata

SEQ ID NO: 176302 - DNA, 120 bp, Artificial Sequence
  ENSG00000110077_3 (sequence is synthesized)
aggaagggctgatgactttcagaagatgaaggtaagtagaaaccgttgatgggactgagaaaccagagttaaaacctctttggagcttctgaggactcagctggaaccaacgggcacagt

SEQ ID NO: 176303 - DNA, 120 bp, Artificial Sequence
  ENSG00000110077_4 (sequence is synthesized)
tggcaacaccatcatgacatcacaacctgttcccaatgagaccatcatagtgctcccatcaaatgtcatcaacttctcccaagcagagaaacccgaacccaccaaccaggggcaggatag

SEQ ID NO: 176304 - DNA, 120 bp, Artificial Sequence
  ENSG00000110077_5 (sequence is synthesized)
gatggtattgagcttggggatcattttggcatctgcttccttctctccaaattttacccaagtgacttctacactgttgaactctgcttacccattcataggaccctttttttttatcat

SEQ ID NO: 176305 - DNA, 120 bp, Artificial Sequence
  ENSG00000110077_6 (sequence is synthesized)
ctctggctctctatcaatcgccacagagaaaaggttaaccaagcttttggtgcatagcagcctggttggaagcattctgagtgctctgtctgccctggtgggtttcattatcctgtctgt

SEQ ID NO: 176306 - DNA, 120 bp, Artificial Sequence
  ENSG00000110077_7 (sequence is synthesized)
caaacaggccaccttaaatcctgcctcactgcagtgtgagttggacaaaaataatataccaacaagaagttatgtttcttacttttatcatgattcactttataccacggactgctatac

SEQ ID NO: 176307 - DNA, 120 bp, Artificial Sequence
  ENSG00000110077_8 (sequence is synthesized)
agccaaagccagtctggctggaactctctctctgatgctgatttgcactctgctggaattctgcctagctgtgctcactgctgtgctgcggtggaaacaggcttactctgacttccctgg

SEQ ID NO: 176308 - DNA, 120 bp, Artificial Sequence
  ENSG00000110077_9 (sequence is synthesized)
gagtgtacttttcctgcctcacagttacattggtaattctggcatgtcctcaaaaatgactcatgactgtggatatgaagaactattgacttcttaagaaaaaagggagaaatattaatc

SEQ ID NO: 176309 - DNA, 120 bp, Artificial Sequence
  ENSG00000110077_10 (sequence is synthesized)
agaaagttgattcttatgataatatggaaaagttaaccattatagaaaagcaaagcttgagtttcctaaatgtaagcttttaaagtaatgaacattaaaaaaaaccattatttcactgtc

SEQ ID NO: 176310 - DNA, 120 bp, Artificial Sequence
  ENSG00000110077_11 (sequence is synthesized)
gcactgtgttgagtatgtcaccaagagtggtagaaggaacaatcagtcagtcatgagatacacatgggagggcatttgcattgtgatggaagacagagaagaaaagcagatggcaattga

SEQ ID NO: 176311 - DNA, 120 bp, Artificial Sequence
  ENSG00000110077_12 (sequence is synthesized)
gtagctgataagctgaaaattcactggatatgaaaatagttaatcatgagaaatcaactgattcaatcttcctattttgtcagcgaagggaatgagactctgggaagttaaatgactggc

SEQ ID NO: 176312 - DNA, 120 bp, Artificial Sequence
  ENSG00000110077_13 (sequence is synthesized)
ctggcattatgctatgagtttgtgcctttgctgaggacactagaacctggcttgcctcccttataagcagaaacaatttctgccacaaccactagtctctttaatagtattgacttggta

SEQ ID NO: 176313 - DNA, 120 bp, Artificial Sequence
  ENSG00000110077_14 (sequence is synthesized)
aagggcatttacacacgtaactggatccagtgaatgtcttatgctctgcatttgcccctggtgatcttaaaattcgtttgcctttttaaagctatattaaaaatgtattgttgaatcaaa

SEQ ID NO: 176314 - DNA, 120 bp, Artificial Sequence
  ENSG00000110077_15 (sequence is synthesized)
cttaggtaggcaactttaactggtttattagcacattcccctgaagggaaagggggtgtgattgctcctgaagagaccaaagagactgggctcctttttaatcaaagctcaggaggagag

SEQ ID NO: 176315 - DNA, 120 bp, Artificial Sequence
  ENSG00000110077_16 (sequence is synthesized)
ctatggacttatggctttatttaactgaattaaaaagccttgatttatccaaaattgtattatagagtgtagaatgaatactagggtgataaattgcaattatttgaagaacctggtgat

SEQ ID NO: 176316 - DNA, 120 bp, Artificial Sequence
  ENSG00000110077_17 (sequence is synthesized)
gattattatttggaaccctcagttagactcggaactactaactagatctgtgctgtttaatttaactttctttgaggatggaaatgaaatgtaactttctatgatgatagaaatgaaatg

SEQ ID NO: 176317 - DNA, 120 bp, Artificial Sequence
  ENSG00000110077_18 (sequence is synthesized)
taactttctatgatgatggaaatgcactacagctgtactgtacaatatggcagtcacatgtggctatcgatgatgtgaaatatagtgcaactgaataaaaatttctcttaattttacttt

SEQ ID NO: 176318 - DNA, 120 bp, Artificial Sequence
  ENSG00000110077_19 (sequence is synthesized)
gatacattgaagtcagcttccaaagaatgccacccaaggttttgaaggggcacagtgcctctgtcctcacaaaaccagcctgcatatgagtttactgaattcatttaggtcctgctgaat

SEQ ID NO: 176319 - DNA, 120 bp, Artificial Sequence
  ENSG00000110077_20 (sequence is synthesized)
ctttcccatttgttccttctctgtttcaatatttcaatgcttccctggaggggcccaacctttctggagggcaaagatctgttgttagagaaaaagagcagccagaggaggaagatgact

SEQ ID NO: 176320 - DNA, 120 bp, Artificial Sequence
  ENSG00000110077_21 (sequence is synthesized)
gggggaagtgccaagagatgatatatgtcttgggactggacatctgtcgtgagtgtggagaccctaaaattttgctagagggactttagggtagaagccacttggagaaaactgtcccag

SEQ ID NO: 176321 - DNA, 120 bp, Artificial Sequence
  ENSG00000110077_22 (sequence is synthesized)
aacttttccacaagaggttgtcttaaaaatatattttcccttattctgaatatgaggaattgattttctattgttgtctttgtatttttacaatacagtgcttttctatattttctttta

SEQ ID NO: 176322 - DNA, 120 bp, Artificial Sequence
  ENSG00000110077_23 (sequence is synthesized)
caaaagtaatggtggtaaataatgacatattgtgtgtatgtgtatatattccacaactgcatgcttaataatccaaactgactttttgcaaataatttttccctcactgcaaattagagg

SEQ ID NO: 176323 - DNA, 120 bp, Artificial Sequence
  ENSG00000110077_24 (sequence is synthesized)
aaatatacaactccttttcctcttttctcctaacgtttttgagaatggaaatgatattcaccttttgtttgtctgtttctcctctcacccagaatttattaaagaagctgtattgcatga

SEQ ID NO: 176324 - DNA, 120 bp, Artificial Sequence
  ENSG00000110077_25 (sequence is synthesized)
agggaggagagaaagaagggatctatcttggattgggagggaaacacagagttttggtttctagaattgcctctgcacttatgtgatctgaggtgaggcactctgtttgactggatttca

SEQ ID NO: 176325 - DNA, 120 bp, Artificial Sequence
  ENSG00000110077_26 (sequence is synthesized)
ggacctggtgggactggtttccttgcctcatgtacaatcacatgggtttctatgaggctcatgtgacataaggtctagaaaactttttggtaaatgataatagagctgtgaatctctgag

SEQ ID NO: 176326 - DNA, 120 bp, Artificial Sequence
  ENSG00000110077_27 (sequence is synthesized)
gtggatgtcaggaaggaaaactacctcctaagacagagcttcagttatacatgagaacatgcagtatttggtttctgtccctgtgttagtctgctaagggggatggcctctaaatgatga

SEQ ID NO: 176327 - DNA, 120 bp, Artificial Sequence
  ENSG00000110077_28 (sequence is synthesized)
agggggatggcctctaaatgatgagaacacatggacacgtagaacagaacaatgcacactgaggcctttcagagggtggagggtgggaggagagagaggatcaggaaaaataactaatgg

SEQ ID NO: 176328 - DNA, 120 bp, Artificial Sequence
  ENSG00000110077_29 (sequence is synthesized)
gcaaacccccatgacacaagtttatctatgtaacagacatgcagttgtacccttgaacttaaaataaaagctaaaaataaaagagcttccagagcttcagctatagggttgtgaactgca

SEQ ID NO: 176329 - DNA, 120 bp, Artificial Sequence
  ENSG00000110077_30 (sequence is synthesized)
gtttccgaggaagtgaccaaaggggcaaactccatgtccagtggagtctgggagatgaggggagggccttctgcactgccaatactgcagagaatgtgggggctttcagatgtcccctgt

SEQ ID NO: 176330 - DNA, 120 bp, Artificial Sequence
  ENSG00000110077_31 (sequence is synthesized)
tttcagagagatagaaagagagttaactagtcatggacttagaggtcctgagagctgggaaagtaaatctcagcacttgctgtgagctggaagcaagtctcatgagcagaccagggcctg

SEQ ID NO: 176331 - DNA, 120 bp, Artificial Sequence
  ENSG00000110077_32 (sequence is synthesized)
agaggcagaaatgcagaagccttcctgagcacctgccagacacctgagactgtggcttctgtggcagagctgcacaccctccaggatgtcttttcatatttctcactccagagtttccac

SEQ ID NO: 176332 - DNA, 120 bp, Artificial Sequence
  ENSG00000110077_33 (sequence is synthesized)
agggtttgtatcctcattaggatcttgcagaaggcgataatgcattagtgccatgggagcggcaaaaaggccctgtctttacaaatgctggttttcatcctcaatctcactttctcttcc

SEQ ID NO: 176333 - DNA, 120 bp, Artificial Sequence
  ENSG00000110077_34 (sequence is synthesized)
aggagcaaggagtcaacggtgaatcttgttctcctgtcgggtaggatgacaggggttgcttgattttagatcaatttcttatcagactcaaataaacatttcttttgaagatcatcttat

SEQ ID NO: 176334 - DNA, 120 bp, Artificial Sequence
  ENSG00000110077_35 (sequence is synthesized)
tcttcacattatcatcttgagctatgatgaagctagtgacttctctccaggtttaggcgaaaaaaaaatccatgaattaggataaagttgggaaggaacattttatacaaaaaaaaaaaa

SEQ ID NO: 176335 - DNA, 120 bp, Artificial Sequence
  ENSG00000110077_36 (sequence is synthesized)
tccactgtttcacagatgctgtgagggtgacaaagatgcagggcacccactggaaacacagacggcactctgcgaaagaggaaggggcgccaggagcttgggtgagcaaggttggaggtg

SEQ ID NO: 176336 - DNA, 120 bp, Artificial Sequence
  ENSG00000110077_37 (sequence is synthesized)
taaaacttagacagaactctttaaggctagtctttctactttgaaaagttgaaaactcagttccagagcagttggttgttgttagaattaggagctgggcctggatcctctgtatccttg

SEQ ID NO: 176337 - DNA, 120 bp, Artificial Sequence
  ENSG00000110077_38 (sequence is synthesized)
ttcagagaacatttctccaattattgtaccctacatcaaagtctgcattcaggggattataatattccctctgcccatgccgaagaatgtatcacagagaaattgtgcctgtttatgagg

SEQ ID NO: 176338 - DNA, 120 bp, Artificial Sequence
  ENSG00000110077_39 (sequence is synthesized)
attagaggagtaatttaacttgaaactccttgacagcagttaagagacactagggccttttggaaatagagtgggcaaatggaaggagtatctgtttttaactctgtgtccgctgtattc

SEQ ID NO: 176339 - DNA, 120 bp, Artificial Sequence
  ENSG00000110077_40 (sequence is synthesized)
taccactgcatgcagctgtttctccagcctgagtaaactcagacacaggctggcaatgccaggtgggaaattaggaagaggtagaatgatctagagatttatgcaaaggcttcagactcc

SEQ ID NO: 176340 - DNA, 120 bp, Artificial Sequence
  ENSG00000110077_41 (sequence is synthesized)
aggaaagctgagatccaagactggttttacagcttcccggctgtgtgaaccagggtgaacaataagggtaactgcaaatatttcttcagcattaactctgggccacacatatatgcaata

SEQ ID NO: 176341 - DNA, 120 bp, Artificial Sequence
  ENSG00000110079_0 (sequence is synthesized)
agagccctgcatgcatcagacctacagcagacattgcaggcctgaagaaagcaccttttctgctgccatgacaaccatgcaaggaatggaacaggccatgccaggggctggccctggtgt

SEQ ID NO: 176342 - DNA, 120 bp, Artificial Sequence
  ENSG00000110079_1 (sequence is synthesized)
gccccagctgggaaacatggctgtcatacattcacatctgtggaaaggattgcaagagaagttcttgaagggagaacccaaagtccttggggttgtgcagattctgactgccctgatgag

SEQ ID NO: 176343 - DNA, 120 bp, Artificial Sequence
  ENSG00000110079_2 (sequence is synthesized)
ccttagcatgggaataacaatgatgtgtatggcatctaatacttatggaagtaaccctatttccgtgtatatcgggtacacaatttgggggtcagtaatgtttattatttcaggatcctt

SEQ ID NO: 176344 - DNA, 120 bp, Artificial Sequence
  ENSG00000110079_3 (sequence is synthesized)
gtcaattgcagcaggaattagaactacaaaaggcctggtccgaggtagtctaggaatgaatatcaccagctctgtactggctgcatcagggatcttaatcaacacatttagcttggcgtt

SEQ ID NO: 176345 - DNA, 120 bp, Artificial Sequence
  ENSG00000110079_4 (sequence is synthesized)
ttattcattccatcacccttactgtaactactatggcaactcaaataattgtcatgggactatgtccatcttaatgggtctggatggcatggtgctcctcctaagtgtgctggaattctg

SEQ ID NO: 176346 - DNA, 120 bp, Artificial Sequence
  ENSG00000110079_5 (sequence is synthesized)
cattgctgtgtccctctctgcctttggatgtaaagtgctctgttgtacccctggtggggttgtgttaattctgccatcacattctcacatggcagaaacagcatctcccacaccacttaa

SEQ ID NO: 176347 - DNA, 120 bp, Artificial Sequence
  ENSG00000110079_6 (sequence is synthesized)
aattaccagtatccaacttcgatactgatagacttgttgatattattattatatgtaatccaattatgaactgtgtgtgtatagagagataataaattcaaaattatgttctcatttttt

SEQ ID NO: 176348 - DNA, 120 bp, Artificial Sequence
  ENSG00000110079_7 (sequence is synthesized)
tccctggaactcaataactcatttcactggctctttatcgagagtactagaagttaaattaataaataatgcatttaatgaggcaacagcacttgaaagtttttcattcatcataagaac

SEQ ID NO: 176349 - DNA, 120 bp, Artificial Sequence
  ENSG00000110079_8 (sequence is synthesized)
tttatataaaggcattacattggcaaataaggtttggaagcagaagagcaaaaaaaagatattgttaaaatgaggcctccatgcaaaacacatacttccctcccatttatttaacttttt

SEQ ID NO: 176350 - DNA, 120 bp, Artificial Sequence
  ENSG00000110079_9 (sequence is synthesized)
ttttctcctacctatggggaccaaagtgctttttccttcaggaagtggagatgcatggccatctccccctccctttttccttctcctgcttttctttccccatagaaagtaccttgaagt

SEQ ID NO: 176351 - DNA, 120 bp, Artificial Sequence
  ENSG00000110079_10 (sequence is synthesized)
agcacagcccgtccttgcatgtgcacgagctatcatttgagtaaaagtatacatggagtaaaaatcatattaagcatcagattcaacttatattttctatttcatcttcttcctttccct

SEQ ID NO: 176352 - DNA, 120 bp, Artificial Sequence
  ENSG00000110079_11 (sequence is synthesized)
tctcccaccttctactgggcataattatatcttaatcatatatggaaatgtgcaacatatggtatttgttaaatacgtttgtttttattgcagagcaaaaataaatcaaattagaagcaa

SEQ ID NO: 176353 - DNA, 120 bp, Artificial Sequence
  ENSG00000110079_12 (sequence is synthesized)
attctcagcacagcctttaaggttccaaacatctgctagaagaggaatgcagatttaaactgagtgaggtgtggagtgggggaagttgattgggtctagaccaaagaactttgaggaact

SEQ ID NO: 176354 - DNA, 78 bp, Artificial Sequence
  ENSG00000110079_13 (sequence is synthesized)
acataccccctgcttgctcaattgatcaagaccctctcatggggacccccttagagttgtatttttagagatgaaaca

SEQ ID NO: 176355 - DNA, 120 bp, Artificial Sequence
  ENSG00000110079_14 (sequence is synthesized)
aggtggcttaggcctgccctgtggagcatacctgagggggactccagccagcttgagtgaagcagatcctgagagcactcccaggtaggcaattgccccagtggaatgcctcatcagagc

SEQ ID NO: 176356 - DNA, 120 bp, Artificial Sequence
  ENSG00000110079_15 (sequence is synthesized)
actcccaggtaggcaattgccccagtggaatgcctcatcagagcagtgcacagcaggcccctgtggaggatcaatgcagtggctgaacaccatgaaggaactggcacttggagtccggac

SEQ ID NO: 176357 - DNA, 120 bp, Artificial Sequence
  ENSG00000110079_16 (sequence is synthesized)
tgcctttggatgtaaagtgctctgttgtacccctggtggggggaaaataaaacattatgccagcattcaagttttcatttcaagagaaagaaagaaagaaagaagaaaagaaagaaagga

SEQ ID NO: 176358 - DNA, 120 bp, Artificial Sequence
  ENSG00000110079_17 (sequence is synthesized)
gaacttgcccagagccctgcatgcatcagacctacagcagacattgcaggcctgaagaaaggtggtcacaagaggggtggaacattcctgcaaatggtttcaatatatgcagatgtctca

SEQ ID NO: 176359 - DNA, 120 bp, Artificial Sequence
  ENSG00000110079_18 (sequence is synthesized)
atataggaatgaaattacgtctttggaacaacttaaataagtcaaatatacttggagctttaaaaattaaaaggagagagattcgagcaccttttctgctgccatgacaaccatgcaagg

SEQ ID NO: 176360 - DNA, 120 bp, Artificial Sequence
  ENSG00000110079_19 (sequence is synthesized)
acaattactaagatatggaatcatagtattttctcaatgatatgagtttctagtactcaataggatatgatgacaattatctttatactaccttcctaactttttaaagcactttcatct

SEQ ID NO: 176361 - DNA, 120 bp, Artificial Sequence
  ENSG00000110079_20 (sequence is synthesized)
tccatgcccacaatagcactgggaggtgctgaactagggaataaatgtctgtgattattttatcagtgaaaaaagtgagaagctacttcagcagatcaagaattggtcaagggtatggct

SEQ ID NO: 176362 - DNA, 120 bp, Artificial Sequence
  ENSG00000110079_21 (sequence is synthesized)
gccattgggaggcaggtttcctgactcccagccagtgctttttctcttatgacattgtggttactgggaaatgttttcacttgtcatctccatttctcacattcctttgttatgagtttt

SEQ ID NO: 176363 - DNA, 120 bp, Artificial Sequence
  ENSG00000110079_22 (sequence is synthesized)
atgagaaaaaaagagaaataattgtggtagaagtaacatcgtaggtatcagaaaagcacctctgggctggttctggcatactccttttaaccttgaaattattggcaatgatagacgtcg

SEQ ID NO: 176364 - DNA, 120 bp, Artificial Sequence
  ENSG00000110079_23 (sequence is synthesized)
acctacagcagacattgcaggcctgaagaaaggcttgtatcaaggatatctacttccttctttatggactccaatggaggacttattcagagactgattgccttctaaatatgtgtcttt

SEQ ID NO: 176365 - DNA, 120 bp, Artificial Sequence
  ENSG00000110079_24 (sequence is synthesized)
ttggtgatttctcctttactactgacttcgatgattctcagaactatacttttccagggaagtgacagttatcaactgatgtatttaattcccaggattataaacacaccttttctgctg

SEQ ID NO: 176366 - DNA, 80 bp, Artificial Sequence
  ENSG00000110080_0 (sequence is synthesized)
cgggtccccgcctcccctgcaggcggactcgcccgctcccaggccggacccgcgcccgggacagggacccggccgagtcg

SEQ ID NO: 176367 - DNA, 120 bp, Artificial Sequence
  ENSG00000110080_1 (sequence is synthesized)
tgcgcctagcggatcggagctgcgcgcggaaccgtgctgccccgccccgctccacccgtgagggtggcccgaggcagccgggatgacagctctccccaggaatcctgctgcctgctgaga

SEQ ID NO: 176368 - DNA, 120 bp, Artificial Sequence
  ENSG00000110080_2 (sequence is synthesized)
aacatggtcagcaagtcccgctggaagctcctggccatgttggctctggtcctggtcgtcatggtgtggtattccatctcccgggaagacagtttttattttcccatcccagagaagaag

SEQ ID NO: 176369 - DNA, 120 bp, Artificial Sequence
  ENSG00000110080_3 (sequence is synthesized)
gagccgtgcctccagggtgaggcagagagcaaggcctctaagctctttggcaactactcccgggatcagcccatcttcctgcggcttgaggattatttctgggtcaagacgccatctgct

SEQ ID NO: 176370 - DNA, 120 bp, Artificial Sequence
  ENSG00000110080_4 (sequence is synthesized)
tacgagctgccctatgggaccaaggggagtgaggatctgctcctccgggtgctagccatcaccagctcctccatccccaagaacatccagagcctcaggtgccgccgctgtgtggtcgtg

SEQ ID NO: 176371 - DNA, 120 bp, Artificial Sequence
  ENSG00000110080_5 (sequence is synthesized)
gggaacgggcaccggctgcggaacagctcactgggagatgccatcaacaagtacgatgtggtcatcagattgaacaatgccccagtggctggctatgagggtgacgtgggctccaagacc

SEQ ID NO: 176372 - DNA, 120 bp, Artificial Sequence
  ENSG00000110080_6 (sequence is synthesized)
accatgcgtctcttctaccctgaatctgcccacttcgaccccaaagtagaaaacaacccagacacactcctcgtcctggtagctttcaaggcaatggacttccactggattgagaccatc

SEQ ID NO: 176373 - DNA, 120 bp, Artificial Sequence
  ENSG00000110080_7 (sequence is synthesized)
agctgacaaactgctgagcctgccaatgcaacagccacggaagattaagcagaagcccaccacgggcctgttggccatcacgctggccctccacctctgtgacttggtgcacattgccgg

SEQ ID NO: 176374 - DNA, 120 bp, Artificial Sequence
  ENSG00000110080_8 (sequence is synthesized)
ctttggctacccagacgcctacaacaagaagcagaccattcactactatgagcagatcacgctcaagtccatggcggggtcaggccataatgtctcccaagaggccctggccattaagcg

SEQ ID NO: 176375 - DNA, 120 bp, Artificial Sequence
  ENSG00000110080_9 (sequence is synthesized)
gatgctggagatgggagctatcaagaacctcacgtccttctgacctgggcaagagctgtagcctgtcggttgcctactctgctgtctgggtgacccccatgcgtggctgtgggggtggct

SEQ ID NO: 176376 - DNA, 120 bp, Artificial Sequence
  ENSG00000110080_10 (sequence is synthesized)
ggtgccagtatgacccacttggactcaccccctcttggggagggagttctgggcctggccaggtctgagatgaggccatgcccctggctgctcttatggagccgagatccagtcagggtg

SEQ ID NO: 176377 - DNA, 120 bp, Artificial Sequence
  ENSG00000110080_11 (sequence is synthesized)
ggggcgctggagccgtgggagcccggccagggcagggggctcgttgctgtggcaccccctctctgccagcaccaagagattatttaatgggctatttaattaaggggtaggaaggtgctg

SEQ ID NO: 176378 - DNA, 120 bp, Artificial Sequence
  ENSG00000110080_12 (sequence is synthesized)
tgggctggtcccacacatccaggaaagaggccagtagagaattctgcccactttttataaaaacttacagcgatggccccaccaaggcctagacacggcactggcctcccaggagggcag

SEQ ID NO: 176379 - DNA, 120 bp, Artificial Sequence
  ENSG00000110080_13 (sequence is synthesized)
gggcattgggaatgggtgggtgccctccagagaggggctgctacctcccagcaggcatgggaagagcactggtgtgggggttccaccgagaaggggacctcatctagaaaagaggttaca

SEQ ID NO: 176380 - DNA, 120 bp, Artificial Sequence
  ENSG00000110080_14 (sequence is synthesized)
ccggcgccgcgcctcccggagggggtcgggccctgcacgtgggcgcagcgcgggtcggggtggggctgccacagccctgcggagctgctttccggggtccctttccctggaccagatttt

SEQ ID NO: 176381 - DNA, 120 bp, Artificial Sequence
  ENSG00000110080_15 (sequence is synthesized)
tttccggggtccctttccctggaccagattttcgcgggaagccggatcctctccgttcccttggagtgagcaagcgggacagttctgcggaaagtttccgcccccaatcccccagccctg

SEQ ID NO: 176382 - DNA, 120 bp, Artificial Sequence
  ENSG00000110080_16 (sequence is synthesized)
cgcccggactgaagcggcggcccccacctccagcatcctcgagcgatggtttctcccacaactaccccggtcaggtccagcacttgggagctgactgtgctggaggtgacaggctttgcg

SEQ ID NO: 176383 - DNA, 120 bp, Artificial Sequence
  ENSG00000110080_17 (sequence is synthesized)
ctttcacaaaaggtgaaatgagctctttgtagtgtttcccgcccaggctgcattttagaatcacagaggaggtggcccgaggcagccgggatgacagctctccccaggaatcctgctgcc

SEQ ID NO: 176384 - DNA, 120 bp, Artificial Sequence
  ENSG00000110080_18 (sequence is synthesized)
cagaaggagatggtgagaagaaccacaccagagaggctggagtaggccagcctggcttgggaccgagtcccgagtccctggctggaccctcggttttcccttccgtggcagggctcacct

SEQ ID NO: 176385 - DNA, 120 bp, Artificial Sequence
  ENSG00000110080_19 (sequence is synthesized)
ggatccttaatgccgcccttggaggagttaggaggatcctggatgagaaaactcaccctcaggatgattgccccagggagcagcttcctgctttctggtggaagggaggggcagacagtg

SEQ ID NO: 176386 - DNA, 120 bp, Artificial Sequence
  ENSG00000110080_20 (sequence is synthesized)
ggtgtgtcctgctccagtgtctaggcaggagagtttgtgaagctgaccggacacctgtggctcttatttcctaggtggcccgaggcagccgggatgacagctctccccaggaatcctgct

SEQ ID NO: 176387 - DNA, 120 bp, Artificial Sequence
  ENSG00000110080_21 (sequence is synthesized)
ggctgtggaatgtgtggaagcaggtacagcccaggcccgcgctgaagttcggcagggaagccagaggagtccgcagcccgggagacctggcctacagcggagagagtggcccgaggcagc

SEQ ID NO: 176388 - DNA, 120 bp, Artificial Sequence
  ENSG00000110080_22 (sequence is synthesized)
ctccttgatgtccgcctggcagtcctaaagaggctgtgaggggacagcatgaaccgggctcccggaagtcagcgccttaggctgccctccaagggtggtgctctgataagctgccccagc

SEQ ID NO: 176389 - DNA, 120 bp, Artificial Sequence
  ENSG00000110080_23 (sequence is synthesized)
aactgggtataaaagcctgcaggcgtcaggtggcagcagccacaggcacccatgctccaggcgtgtctgtgacaggaaagctttccgagtaggtgtttgcctgtgaggaactcgggagct

SEQ ID NO: 176390 - DNA, 120 bp, Artificial Sequence
  ENSG00000110080_24 (sequence is synthesized)
gcagaatggcagctgaaccctgggagagcactgcctgttctgagaaaggcctgcaattgtgtcttcacgatgcttttccaagacagccaaggcaggtataattttcctcagcaagaaaga

SEQ ID NO: 176391 - DNA, 120 bp, Artificial Sequence
  ENSG00000110080_25 (sequence is synthesized)
ctggatcctcaaggacttgggttccaagtggaacttaacttgagatgattcctccccggcaccttgggaccttcatgccgtgggagaaggcttaggctgcctggaacatgggtccctggg

SEQ ID NO: 176392 - DNA, 120 bp, Artificial Sequence
  ENSG00000110080_26 (sequence is synthesized)
agtttgcttagcgcaacactgacgctgttttggaatgaagacaagacaatgtagaactttactggggaagaggtcgaagaagggctaattgtcttgttgttcaagactggttagcgctgc

SEQ ID NO: 176393 - DNA, 120 bp, Artificial Sequence
  ENSG00000110080_27 (sequence is synthesized)
tcacctctgacgctgctcacctctgacgccaaaggtttttccctggaaggcagccctggaggatacctgtgtatctgtctttcacaaaaggtggcccgaggcagccgggatgacagctct

SEQ ID NO: 176394 - DNA, 120 bp, Artificial Sequence
  ENSG00000110080_28 (sequence is synthesized)
aaggctcaggtgaaccagtttcatctgacctgcttgctaactcaaacatggctgcccaactgcgtgggctggcaaggtggcccgaggcagccgggatgacagctctccccaggaatcctg

SEQ ID NO: 176395 - DNA, 120 bp, Artificial Sequence
  ENSG00000110080_29 (sequence is synthesized)
gtttggctggattgatgatggagaggcaggcagtgaccagaccaagagacgccttggatggtggagaataggtgaccctctgttgggtaaaagaggactcaagccctcacacagtggccc

SEQ ID NO: 176396 - DNA, 120 bp, Artificial Sequence
  ENSG00000110080_30 (sequence is synthesized)
cgcttcctggggcttggtcctggggtttcatctcaggttgacccccgttaggaggaagtaagtaggaaggaaggagatttcctgggtattagggtgtcctcaagcctgcagctctcctgg

SEQ ID NO: 176397 - DNA, 120 bp, Artificial Sequence
  ENSG00000110080_31 (sequence is synthesized)
ccaccctggaggacaggcctcagaagccgtcttcagcaggatcctgggacctctgggggctgtggagggacagacagggagccaggggcccttctcttcatcttgaaggacagtgggtac

SEQ ID NO: 176398 - DNA, 120 bp, Artificial Sequence
  ENSG00000110080_32 (sequence is synthesized)
aatcagggtcaagccctcagccagggccaggagagggccagagactgcttctgttgagttaggggtcggagggactcagaagggggcaggtgggaaggtggacgggggttgtacctgcct

SEQ ID NO: 176399 - DNA, 120 bp, Artificial Sequence
  ENSG00000110080_33 (sequence is synthesized)
gggctcccccaccctggaggacaggcctcagaagccgtcttcagcaggatcctgggacctctgggggctgtggagggacagacagggagccaggggcccttctcttcatcttgaaggaca

SEQ ID NO: 176400 - DNA, 120 bp, Artificial Sequence
  ENSG00000110090_0 (sequence is synthesized)
tcggcctcgcccgcggccctccttccccggctcccgctcgccgctcgttcactccaccgccgccgccgccgccgccgctgccgctgccgctgccgcacctccgtagctgactcggtactc

SEQ ID NO: 176401 - DNA, 120 bp, Artificial Sequence
  ENSG00000110090_1 (sequence is synthesized)
ccgcacctccgtagctgactcggtactctctgaagatggcagaagctcaccaagctgtggcctttcagttcacggtcactccggacgggattgacctgcggctgagccatgaagctctta

SEQ ID NO: 176402 - DNA, 120 bp, Artificial Sequence
  ENSG00000110090_2 (sequence is synthesized)
gacaaatctatctctctggacttcattcctggaaaaagaagttcatcagattcaagaacggcatcatcactggcgtgtacccggcaagcccctccagttggcttatcgtggtggtgggcg

SEQ ID NO: 176403 - DNA, 120 bp, Artificial Sequence
  ENSG00000110090_3 (sequence is synthesized)
tgatgacaacgatgtacgccaagatcgacccctcgttaggaataattgcaaaaatcaatcggactctggaaacggccaactgcatgtccagccagacgaagaacgtggtcagcggcgtgc

SEQ ID NO: 176404 - DNA, 120 bp, Artificial Sequence
  ENSG00000110090_4 (sequence is synthesized)
tgtttggcaccggcctgtgggtggccctcatcgtcaccatgcgctactccctgaaagtgctgctctcctaccacgggtggatgttcactgagcacggcaagatgagtcgtgccaccaaga

SEQ ID NO: 176405 - DNA, 120 bp, Artificial Sequence
  ENSG00000110090_5 (sequence is synthesized)
tctggatgggtatggtcaagatcttttcaggccgaaaacccatgttgtacagcttccagacatcgctgcctcgcctgccggtcccggctgtcaaagacactgtgaacaggtatctacagt

SEQ ID NO: 176406 - DNA, 120 bp, Artificial Sequence
  ENSG00000110090_6 (sequence is synthesized)
cggtgaggcctcttatgaaggaagaagacttcaaacggatgacagcacttgctcaagattttgctgtcggtcttggaccaagattacagtggtatttgaagttaaaatcctggtgggcta

SEQ ID NO: 176407 - DNA, 120 bp, Artificial Sequence
  ENSG00000110090_7 (sequence is synthesized)
caaattacgtgagcgactggtgggaggagtacatctacctccgaggacgagggccgctcatggtgaacagcaactattatgccatggatctgctgtatatccttccaactcacattcagg

SEQ ID NO: 176408 - DNA, 120 bp, Artificial Sequence
  ENSG00000110090_8 (sequence is synthesized)
cagcaagagccggcaacgccatccatgccatcctgctttacaggcgcaaactggaccgggaggaaatcaaaccaattcgtcttttgggatccacgattccactctgctccgctcagtggg

SEQ ID NO: 176409 - DNA, 120 bp, Artificial Sequence
  ENSG00000110090_9 (sequence is synthesized)
agcggatgtttaatacttcccggatcccaggagaggagacagacaccatccagcacatgagagacagcaagcacatcgtcgtgtaccatcgaggacgctacttcaaggtctggctctacc

SEQ ID NO: 176410 - DNA, 120 bp, Artificial Sequence
  ENSG00000110090_10 (sequence is synthesized)
atgatgggcggctgctgaagccccgggagatggagcagcagatgcagaggatcctggacaatacctcggagcctcagcccggggaggccaggctggcagccctcaccgcaggagacagag

SEQ ID NO: 176411 - DNA, 120 bp, Artificial Sequence
  ENSG00000110090_11 (sequence is synthesized)
ttccctgggccaggtgtcgtcaggcctattttggacgtgggaaaaataagcagtctcttgatgctgtggagaaagcagcgttctttgtgacgttagatgaaactgaagaaggatacagaa

SEQ ID NO: 176412 - DNA, 120 bp, Artificial Sequence
  ENSG00000110090_12 (sequence is synthesized)
gtgaagacccggatacgtcaatggacagctacgccaaatctctactacacggccgatgttacgacaggtggtttgacaagtcgttcacgtttgttgtcttcaaaaacgggaagatgggcc

SEQ ID NO: 176413 - DNA, 120 bp, Artificial Sequence
  ENSG00000110090_13 (sequence is synthesized)
tcaacgctgaacactcctgggcagatgcgccgatcgtggcccacctttgggagtacgtcatgtccattgacagcctccagctgggctatgcggaggatgggcactgcaaaggcgacatca

SEQ ID NO: 176414 - DNA, 120 bp, Artificial Sequence
  ENSG00000110090_14 (sequence is synthesized)
atccgaacattccgtaccccaccaggctgcagtgggacatcccgggggaatgtcaagaggttatagagacctccctgaacaccgcaaatcttctggcaaacgacgtggatttccattcct

SEQ ID NO: 176415 - DNA, 120 bp, Artificial Sequence
  ENSG00000110090_15 (sequence is synthesized)
tcccattcgtagcctttggtaaaggaatcatcaagaaatgtcgcacgagcccagacgcctttgtgcagctggccctccagctggcgcactacaaggacatgggcaagttttgcctcacat

SEQ ID NO: 176416 - DNA, 120 bp, Artificial Sequence
  ENSG00000110090_16 (sequence is synthesized)
acgaggcctccatgacccggctcttccgagaggggaggacggagaccgtgcgctcctgcaccactgagtcatgcgacttcgtgcgggccatggtggacccggcccagacggtggaacaga

SEQ ID NO: 176417 - DNA, 120 bp, Artificial Sequence
  ENSG00000110090_17 (sequence is synthesized)
ggctgaagttgttcaagttggcgtctgagaagcatcagcatatgtatcgcctcgccatgaccggctctgggatcgatcgtcacctcttctgcctttacgtggtgtctaaatatctcgctg

SEQ ID NO: 176418 - DNA, 120 bp, Artificial Sequence
  ENSG00000110090_18 (sequence is synthesized)
tggagtcccctttccttaaggaagttttatctgagccttggagattatcaacaagccagacccctcagcagcaagtggagctgtttgacttggagaataacccagagtacgtgtccagcg

SEQ ID NO: 176419 - DNA, 120 bp, Artificial Sequence
  ENSG00000110090_19 (sequence is synthesized)
gagggggctttggaccggttgctgatgacggctatggtgtgtcgtacatccttgtgggagagaacctcatcaatttccacatttcttccaagttctcttgccctgagacggattctcatc

SEQ ID NO: 176420 - DNA, 120 bp, Artificial Sequence
  ENSG00000110090_20 (sequence is synthesized)
gctttggaaggcacctgaaagaagcaatgactgacatcatcactttgtttggtctcagttctaattccaaaaagtaattccactggagctgctgggaaggaaaacgagctcttctgatgc

SEQ ID NO: 176421 - DNA, 120 bp, Artificial Sequence
  ENSG00000110090_21 (sequence is synthesized)
tccagaaaatgtgggtgtttttttttcctagaacagtatctctcccctgtgaagcataaccccactacttccagacttgccctcccttgggggacatctgataaagtctcccctgatgtc

SEQ ID NO: 176422 - DNA, 120 bp, Artificial Sequence
  ENSG00000110090_22 (sequence is synthesized)
tccgcatcggcttggatttattaagggatgcaaatcttgttgagttaatgaaggaattagtagggttgtggcttcacacacagtggaatggaaatggtgtgctttctcagtggcaaccga

SEQ ID NO: 176423 - DNA, 120 bp, Artificial Sequence
  ENSG00000110090_23 (sequence is synthesized)
aggcctagtgcttaagggcatttagcatcatccaagcagggtaaacttttgttttgttaaaagaaaaatgtgttattcaagttggtgtccccagttgtagctaacacatctggaatgcac

SEQ ID NO: 176424 - DNA, 120 bp, Artificial Sequence
  ENSG00000110090_24 (sequence is synthesized)
taaccaaaatgctgtgctttggagacctgcttttgtcaccgtgggtaaccgttcccgtctggtccagtagcctgtgtttgcctctccacatttgaagcaagcaggatgcaaggtcttcag

SEQ ID NO: 176425 - DNA, 120 bp, Artificial Sequence
  ENSG00000110090_25 (sequence is synthesized)
ttttactgaccttgtatgtcttcaagtcttcacaacccagtgccttaaaaatgaaaggccctaaatgtaagggagatggagagaaagatttattttgtagagtctttgggtggaattgtg

SEQ ID NO: 176426 - DNA, 120 bp, Artificial Sequence
  ENSG00000110090_26 (sequence is synthesized)
ggtatactgttcccttcacaattgactgagtatggataaccgtacataagcatttgctacaccccaccagccccctccccctcagaaacaccagttccttcccaagggcagctgtgccag

SEQ ID NO: 176427 - DNA, 120 bp, Artificial Sequence
  ENSG00000110090_27 (sequence is synthesized)
actcccctcccgggactgccttcttgtcatcataagcaacaaaagaaataacaggcacatgtcataaaaggggagcaagggccgtgatggtcagataattcactcaagaataaaacatga

SEQ ID NO: 176428 - DNA, 120 bp, Artificial Sequence
  ENSG00000110090_28 (sequence is synthesized)
cacgtgcctcaggaggatctctttcccaaagtgacagcaaggagggcagggcatcggccaccaagcggggactagcaagtgaggaaggggagggcagcccaccgtggtgaggagagagtg

SEQ ID NO: 176429 - DNA, 120 bp, Artificial Sequence
  ENSG00000110090_29 (sequence is synthesized)
gctccacgaccccaagggatggccttctcctcccacccggtgaggggaaagactcaccagagggtgatggagacagtatgccggctcaccttggtgaccagccaagatgtctcaagtgac

SEQ ID NO: 176430 - DNA, 120 bp, Artificial Sequence
  ENSG00000110090_30 (sequence is synthesized)
agtgctaggtgttcacccagcctgtccttcagataggagtgccttcacgaaagcgtctcatggaccacaaagcaattatgcactgagtcatcttcagtatttaatgcaaaaatgaagcat

SEQ ID NO: 176431 - DNA, 120 bp, Artificial Sequence
  ENSG00000110090_31 (sequence is synthesized)
catggaatgaaattcccactgtctgtcatgacaagcttagctgtccattgttttaaattgtgtatttatttttttgaccacttggttctagttgggcctgactccttcagagtgctgcac

SEQ ID NO: 176432 - DNA, 120 bp, Artificial Sequence
  ENSG00000110090_32 (sequence is synthesized)
tgggcctgactccttcagagtgctgcaccccgatagtacaacagcgatggctgaactgttggagtcgatggaaggtgcttgccggagaacacgtgcctttttttttttttttttttttga

SEQ ID NO: 176433 - DNA, 67 bp, Artificial Sequence
  ENSG00000110090_33 (sequence is synthesized)
agtggtgcaatctcggctcactgcagcatctgccttgccaacaccatgccctgctaatttttgtatt

SEQ ID NO: 176434 - DNA, 120 bp, Artificial Sequence
  ENSG00000110090_34 (sequence is synthesized)
catgcgcggcccacatgcatgttttatgtatgtatacttcatgatgtaaaaatcccacctttatgggccaaagattttttttctcctgaaagcaagaaaaaatgaaaacaaaagacaaaa

SEQ ID NO: 176435 - DNA, 120 bp, Artificial Sequence
  ENSG00000110090_35 (sequence is synthesized)
cagagcgagactccgtctaaaaaaaaaagcaaaaacaaaccaacaacaaaagcccctgactgtccgtcaagcaggcagcggggatgtagctctctctgccctgggcaagaatagcacttc

SEQ ID NO: 176436 - DNA, 120 bp, Artificial Sequence
  ENSG00000110090_36 (sequence is synthesized)
tgtagctctctctgccctgggcaagaatagcacttcccgttaaaagccagcagccggcgtcagtccctatcagagccagctagatcatgcactgttgaccactgagcaatctgtgttaca

SEQ ID NO: 176437 - DNA, 120 bp, Artificial Sequence
  ENSG00000110090_37 (sequence is synthesized)
ctagagttcacagggcattttgagtgtagacgtgagtgcttaaacatatttgggtttctctctcaggttttaaatgtttcaaatgtaattgttgctcatcagtgcagttatcaatgcaat

SEQ ID NO: 176438 - DNA, 120 bp, Artificial Sequence
  ENSG00000110090_38 (sequence is synthesized)
tttatattccttgaggggagaaagaggggtcttattgtacatgtccaaggggggtgataagagtattatctgtttaatttaattggaacaaaccattgtcttaacgcagccatggtttga

SEQ ID NO: 176439 - DNA, 120 bp, Artificial Sequence
  ENSG00000110090_39 (sequence is synthesized)
atttgttatcttgggctgaccggtgcatgtaaatacagtatgctctttggatgtaaatcttagaaatgcagtgtgaatgtaggttatcattaataaaacattaaccccagtctactacaa

SEQ ID NO: 176440 - DNA, 120 bp, Artificial Sequence
  ENSG00000110090_40 (sequence is synthesized)
agacgccgccattttgcctctcagtgcgcatgcttcagcccactcgcccaacgcttgagatcttatcgggaagctgctggtcaccagctccatttctatctactgagagactgcctttcc

SEQ ID NO: 176441 - DNA, 120 bp, Artificial Sequence
  ENSG00000110090_41 (sequence is synthesized)
ctggcaccggctgtgacctattattattttagagagacagttcacaaccacctgaccatcactgatggtcgcgtgatattcccagtgtgtgtcggaggaagccctctcctggcctgctca

SEQ ID NO: 176442 - DNA, 120 bp, Artificial Sequence
  ENSG00000110090_42 (sequence is synthesized)
agacgcgccctgggctcttgagcgcggtgcctgcgtttctggctcgttggatgcagcatctgtcatcagaagcactgagcaccgagctgtccccacagctgggcaccgcagggctcgacc

SEQ ID NO: 176443 - DNA, 120 bp, Artificial Sequence
  ENSG00000110090_43 (sequence is synthesized)
ctgagacggggattataagtcaaggaccaagttcagatacttgagacaaagtggaaagtctcagcatatggaaacaaggccttggaggagaccatggacatcaccaagttcatgtgctgg

SEQ ID NO: 176444 - DNA, 120 bp, Artificial Sequence
  ENSG00000110090_44 (sequence is synthesized)
gctggaaagaaaagcctgttgattttcacttgctgtgcatttattcatccattccattgcctcaatgctgagaacagtgcctgacacataaaagatgctcaataaatatgttaaaagtaa

SEQ ID NO: 176445 - DNA, 120 bp, Artificial Sequence
  ENSG00000110090_45 (sequence is synthesized)
gaggacttgataaatattcgtggagtgaacgtacttcatcacatttctgtgatgtttaagcttactgaggagcttaaattactctgttttagtagtttttacggaatggcttggtttcgt

SEQ ID NO: 176446 - DNA, 120 bp, Artificial Sequence
  ENSG00000110090_46 (sequence is synthesized)
aattttccactttctttctcagaacatttctcgggttctcagaaacaattatcggaatgtttctcagcatattttctaagttgccctattgtcattaattaataaaaagttactatacgg

SEQ ID NO: 176447 - DNA, 120 bp, Artificial Sequence
  ENSG00000110090_47 (sequence is synthesized)
gagaaagattactctagtttcagaggcagacatggagacgtttttggccccagggaactgaggctcaggcccggagctccccgggaggcctcgttctctgcttctttattaatagactca

SEQ ID NO: 176448 - DNA, 120 bp, Artificial Sequence
  ENSG00000110090_48 (sequence is synthesized)
gctacgcagccgcgggagccgcagacccgggcaggagagctgcagcgtggtcggcgggaggggaataaggcctccccagtgcggctgcagttgcaggccggcgcgggctcgttgcagctg

SEQ ID NO: 176449 - DNA, 120 bp, Artificial Sequence
  ENSG00000110092_0 (sequence is synthesized)
gcttaacaacagtaacgtcacacggactacaggggagttttgttgaagttgcaaagtcctggagcctccagagggctgtcggcgcagtagcagcgagcagcagagtccgcacgctccggc

SEQ ID NO: 176450 - DNA, 120 bp, Artificial Sequence
  ENSG00000110092_1 (sequence is synthesized)
gaggggcagaagagcgcgagggagcgcggggcagcagaagcgagagccgagcgcggacccagccaggacccacagccctccccagctgcccaggaagagccccagccatggaacaccagc

SEQ ID NO: 176451 - DNA, 120 bp, Artificial Sequence
  ENSG00000110092_2 (sequence is synthesized)
tcctgtgctgcgaagtggaaaccatccgccgcgcgtaccccgatgccaacctcctcaacgaccgggtgctgcgggccatgctgaaggcggaggagacctgcgcgccctcggtgtcctact

SEQ ID NO: 176452 - DNA, 120 bp, Artificial Sequence
  ENSG00000110092_3 (sequence is synthesized)
tcaaatgtgtgcagaaggaggtcctgccgtccatgcggaagatcgtcgccacctggatgctggaggtctgcgaggaacagaagtgcgaggaggaggtcttcccgctggccatgaactacc

SEQ ID NO: 176453 - DNA, 120 bp, Artificial Sequence
  ENSG00000110092_4 (sequence is synthesized)
tggaccgcttcctgtcgctggagcccgtgaaaaagagccgcctgcagctgctgggggccacttgcatgttcgtggcctctaagatgaaggagaccatccccctgacggccgagaagctgt

SEQ ID NO: 176454 - DNA, 120 bp, Artificial Sequence
  ENSG00000110092_5 (sequence is synthesized)
gcatctacaccgacaactccatccggcccgaggagctgctgcaaatggagctgctcctggtgaacaagctcaagtggaacctggccgcaatgaccccgcacgatttcattgaacacttcc

SEQ ID NO: 176455 - DNA, 120 bp, Artificial Sequence
  ENSG00000110092_6 (sequence is synthesized)
tctccaaaatgccagaggcggaggagaacaaacagatcatccgcaaacacgcgcagaccttcgttgccctctgtgccacagatgtgaagttcatttccaatccgccctccatggtggcag

SEQ ID NO: 176456 - DNA, 120 bp, Artificial Sequence
  ENSG00000110092_7 (sequence is synthesized)
cggggagcgtggtggccgcagtgcaaggcctgaacctgaggagccccaacaacttcctgtcctactaccgcctcacacgcttcctctccagagtgatcaagtgtgacccggactgcctcc

SEQ ID NO: 176457 - DNA, 120 bp, Artificial Sequence
  ENSG00000110092_8 (sequence is synthesized)
gggcctgccaggagcagatcgaagccctgctggagtcaagcctgcgccaggcccagcagaacatggaccccaaggccgccgaggaggaggaagaggaggaggaggaggtggacctggctt

SEQ ID NO: 176458 - DNA, 120 bp, Artificial Sequence
  ENSG00000110092_9 (sequence is synthesized)
gcacacccaccgacgtgcgggacgtggacatctgagggcgccaggcaggcgggcgccaccgccacccgcagcgagggcggagccggccccaggtgctcccctgacagtccctcctctccg

SEQ ID NO: 176459 - DNA, 120 bp, Artificial Sequence
  ENSG00000110092_10 (sequence is synthesized)
gagcattttgataccagaagggaaagcttcattctccttgttgttggttgttttttcctttgctctttcccccttccatctctgacttaagcaaaagaaaaagattacccaaaaactgtc

SEQ ID NO: 176460 - DNA, 120 bp, Artificial Sequence
  ENSG00000110092_11 (sequence is synthesized)
tttaaaagagagagagagaaaaaaaaaatagtatttgcataaccctgagcggtgggggaggagggttgtgctacagatgatagaggattttataccccaataatcaactcgtttttatat

SEQ ID NO: 176461 - DNA, 120 bp, Artificial Sequence
  ENSG00000110092_12 (sequence is synthesized)
taatgtacttgtttctctgttgtaagaataggcattaacacaaaggaggcgtctcgggagaggattaggttccatcctttacgtgtttaaaaaaaagcataaaaacattttaaaaacata

SEQ ID NO: 176462 - DNA, 120 bp, Artificial Sequence
  ENSG00000110092_13 (sequence is synthesized)
gaaaaattcagcaaaccatttttaaagtagaagagggttttaggtagaaaaacatattcttgtgcttttcctgataaagcacagctgtagtggggttctaggcatctctgtactttgctt

SEQ ID NO: 176463 - DNA, 120 bp, Artificial Sequence
  ENSG00000110092_14 (sequence is synthesized)
gctcatatgcatgtagtcactttataagtcattgtatgttattatattccgtaggtagatgtgtaacctcttcaccttattcatggctgaagtcacctcttggttacagtagcgtagcgt

SEQ ID NO: 176464 - DNA, 120 bp, Artificial Sequence
  ENSG00000110092_15 (sequence is synthesized)
gcccgtgtgcatgtcctttgcgcctgtgaccaccaccccaacaaaccatccagtgacaaaccatccagtggaggtttgtcgggcaccagccagcgtagcagggtcgggaaaggccacctg

SEQ ID NO: 176465 - DNA, 120 bp, Artificial Sequence
  ENSG00000110092_16 (sequence is synthesized)
tcccactcctacgatacgctactataaagagaagacgaaatagtgacataatatattctatttttatactcttcctatttttgtagtgacctgtttatgagatgctggttttctacccaa

SEQ ID NO: 176466 - DNA, 120 bp, Artificial Sequence
  ENSG00000110092_17 (sequence is synthesized)
tgtaggaaatagcgctgtttttgttgtgtgtgcagggagggcagttttctaatggaatggtttgggaatatccatgtacttgtttgcaagcaggactttgaggcaagtgtgggccactgt

SEQ ID NO: 176467 - DNA, 120 bp, Artificial Sequence
  ENSG00000110092_18 (sequence is synthesized)
ggtggcagtggaggtggggtgtttgggaggctgcgtgccagtcaagaagaaaaaggtttgcattctcacattgccaggatgataagttcctttccttttctttaaagaagttgaagttta

SEQ ID NO: 176468 - DNA, 120 bp, Artificial Sequence
  ENSG00000110092_19 (sequence is synthesized)
ggaatcctttggtgccaactggtgtttgaaagtagggacctcagaggtttacctagagaacaggtggtttttaagggttatcttagatgtttcacaccggaaggtttttaaacactaaaa

SEQ ID NO: 176469 - DNA, 120 bp, Artificial Sequence
  ENSG00000110092_20 (sequence is synthesized)
tatataatttatagttaaggctaaaaagtatatttattgcagaggatgttcataaggccagtatgatttataaatgcaatctccccttgatttaaacacacagatacacacacacacaca

SEQ ID NO: 176470 - DNA, 120 bp, Artificial Sequence
  ENSG00000110092_21 (sequence is synthesized)
cacacacacaaaccttctgcctttgatgttacagatttaatacagtttatttttaaagatagatccttttataggtgagaaaaaaacaatctggaagaaaaaaaccacacaaagacattg

SEQ ID NO: 176471 - DNA, 120 bp, Artificial Sequence
  ENSG00000110092_22 (sequence is synthesized)
attcagcctgtttggcgtttcccagagtcatctgattggacaggcatgggtgcaaggaaaattagggtactcaacctaagttcggttccgatgaattcttatcccctgccccttccttta

SEQ ID NO: 176472 - DNA, 120 bp, Artificial Sequence
  ENSG00000110092_23 (sequence is synthesized)
aaaaacttagtgacaaaatagacaatttgcacatcttggctatgtaattcttgtaatttttatttaggaagtgttgaagggaggtggcaagagtgtggaggctgacgtgtgagggaggac

SEQ ID NO: 176473 - DNA, 120 bp, Artificial Sequence
  ENSG00000110092_24 (sequence is synthesized)
aggcgggaggaggtgtgaggaggaggctcccgaggggaaggggcggtgcccacaccggggacaggccgcagctccattttcttattgcgctgctaccgttgacttccaggcacggtttgg

SEQ ID NO: 176474 - DNA, 120 bp, Artificial Sequence
  ENSG00000110092_25 (sequence is synthesized)
aaatattcacatcgcttctgtgtatctctttcacattgtttgctgctattggaggatcagttttttgttttacaatgtcatatactgccatgtactagttttagttttctcttagaacat

SEQ ID NO: 176475 - DNA, 120 bp, Artificial Sequence
  ENSG00000110092_26 (sequence is synthesized)
tgtattacagatgccttttttgtagttttttttttttttatgtgatcaattttgacttaatgtgattactgctctattccaaaaaggttgctgtttcacaatacctcatgcttcacttag

SEQ ID NO: 176476 - DNA, 120 bp, Artificial Sequence
  ENSG00000110092_27 (sequence is synthesized)
ccatggtggacccagcgggcaggttctgcctgctttggcgggcagacacgcgggcgcgatcccacacaggctggcgggggccggccccgaggccgcgtgcgtgagaaccgcgccggtgtc

SEQ ID NO: 176477 - DNA, 120 bp, Artificial Sequence
  ENSG00000110092_28 (sequence is synthesized)
cccagagaccaggctgtgtccctcttctcttccctgcgcctgtgatgctgggcacttcatctgatcgggggcgtagcatcatagtagtttttacagctgtgttattctttgcgtgtagct

SEQ ID NO: 176478 - DNA, 120 bp, Artificial Sequence
  ENSG00000110092_29 (sequence is synthesized)
atggaagttgcataattattattattattattataacaagtgtgtcttacgtgccaccacggcgttgtacctgtaggactctcattcgggatgattggaatagcttctggaatttgttca

SEQ ID NO: 176479 - DNA, 120 bp, Artificial Sequence
  ENSG00000110092_30 (sequence is synthesized)
agttttgggtatgtttaatctgttatgtactagtgttctgtttgttattgttttgttaattacaccataatgctaatttaaagagactccaaatctcaatgaagccagctcacagtgctg

SEQ ID NO: 176480 - DNA, 120 bp, Artificial Sequence
  ENSG00000110092_31 (sequence is synthesized)
tgtgccccggtcacctagcaagctgccgaaccaaaagaatttgcaccccgctgcgggcccacgtggttggggccctgccctggcagggtcatcctgtgctcggaggccatctcgggcaca

SEQ ID NO: 176481 - DNA, 120 bp, Artificial Sequence
  ENSG00000110092_32 (sequence is synthesized)
ggcccaccccgccccacccctccagaacacggctcacgcttacctcaaccatcctggctgcggcgtctgtctgaaccacgcgggggccttgagggacgctttgtctgtcgtgatggggca

SEQ ID NO: 176482 - DNA, 120 bp, Artificial Sequence
  ENSG00000110092_33 (sequence is synthesized)
agggcacaagtcctggatgttgtgtgtatcgagaggccaaaggctggtggcaagtgcacggggcacagcggagtctgtcctgtgacgcgcaagtctgagggtctgggcggcgggcggctg

SEQ ID NO: 176483 - DNA, 120 bp, Artificial Sequence
  ENSG00000110092_34 (sequence is synthesized)
ggtctgtgcatttctggttgcaccgcggcgcttcccagcaccaacatgtaaccggcatgtttccagcagaagacaaaaagacaaacatgaaagtctagaaataaaactggtaaaacccca

SEQ ID NO: 176484 - DNA, 120 bp, Artificial Sequence
  ENSG00000110092_35 (sequence is synthesized)
ccagtgctctgagccggaggtgcggcgtggcccggcccccgtgctgccggcttccccgcgcccccgggctggcccgcacctcccctgatggccgctcaccctgtgttcgcagcaaatgga

SEQ ID NO: 176485 - DNA, 120 bp, Artificial Sequence
  ENSG00000110092_36 (sequence is synthesized)
cacctgggtgctgtctgggaagatgtccccagaccccctcctgcgctggagagcgctcttccagctctggtgagcagaggccctggattgtttgtcgcgctggatggagggagatttgct

SEQ ID NO: 176486 - DNA, 120 bp, Artificial Sequence
  ENSG00000110104_0 (sequence is synthesized)
accggctgagccatggatacaccgttaaggcgcagccgacggctgggaggcctaaggcccgaatcccccgagagcctcacctcagtttcgcggacgagacgggcccttgtggagttcgag

SEQ ID NO: 176487 - DNA, 120 bp, Artificial Sequence
  ENSG00000110104_1 (sequence is synthesized)
tcgaacccagaagaaacgagggagcccgggtctcctccgagtgtgcagcgggctggcctggggtcccccgaaaggccgccgaagacaagcccaggatcaccccgtctgcagcagggtgca

SEQ ID NO: 176488 - DNA, 120 bp, Artificial Sequence
  ENSG00000110104_2 (sequence is synthesized)
ggcttggagtcaccccaagggcagccagagccaggcgcagcgtccccccagcgtcagcaagacctacacctggagtcgcctcaaagacagccagagtacagtcctgaatccccacgatgt

SEQ ID NO: 176489 - DNA, 120 bp, Artificial Sequence
  ENSG00000110104_3 (sequence is synthesized)
cagccgaagccaagtgaggaggcaccaaagtgttctcaggaccagggagtactggcctcggagttggcccagaataaggaggagctgaccccgggggccccccagcatcagctaccgccg

SEQ ID NO: 176490 - DNA, 120 bp, Artificial Sequence
  ENSG00000110104_4 (sequence is synthesized)
gtcccaggatcaccagagccttaccccggtcagcaagctcccggtccggagccctctcagccactactggagctgacacccagggcacctggctccccccggggtcagcatgagccgagc

SEQ ID NO: 176491 - DNA, 120 bp, Artificial Sequence
  ENSG00000110104_5 (sequence is synthesized)
aagccacctccagctggggagacggtgacaggcggcttcggggcaaagaagcgaaaaggttcttcatcccaggccccagcgtccaagaagttgaataaagaggagcttcctgtaatcccg

SEQ ID NO: 176492 - DNA, 120 bp, Artificial Sequence
  ENSG00000110104_6 (sequence is synthesized)
aaggggaagcccaaatcggggcgagtgtggaaggaccgctccaagaaaagattctcccagatgcttcaggacaagcccctgcgcacatcgtggcagcggaagatgaaggaacgacaggag

SEQ ID NO: 176493 - DNA, 120 bp, Artificial Sequence
  ENSG00000110104_7 (sequence is synthesized)
cgccgccaggagaagaaacagcgccgggctgagaacctgaaacgccgcctggagaatgagcggaaggcagaggtcgtccaagtgatccgaaaccccgccaagctcaagcgggcaaagaag

SEQ ID NO: 176494 - DNA, 120 bp, Artificial Sequence
  ENSG00000110104_8 (sequence is synthesized)
aagcagctgcgctccattgagaagcgggacaccctggccctgctgcagaagcagccgccccagcagccggcagccaagatctgagctcaggacggcccgaggccttccatggccaacaac

SEQ ID NO: 176495 - DNA, 120 bp, Artificial Sequence
  ENSG00000110104_9 (sequence is synthesized)
catgtcagacacagcacctcaggccgctgctcagatgcctctgctggagctggcactccaaacccatggctccagaacagggacccccaccccgaccggggctcctcggcctttgaaggc

SEQ ID NO: 176496 - DNA, 120 bp, Artificial Sequence
  ENSG00000110104_10 (sequence is synthesized)
ttccaggcaggtctgtgtgggacagaagcccagagggggcctgggacctggcagagatgggggcgggaagagattcagctcccatccctccttcctctccttctccaagtgccttcaaac

SEQ ID NO: 176497 - DNA, 120 bp, Artificial Sequence
  ENSG00000110104_11 (sequence is synthesized)
caagaactgtacattcttctggttcctcagtgagctggtgactggcaggtgactccctcagcagtgtatgccctttctcagcatcctaggtccatcccaggcctggaggctgacagttgg

SEQ ID NO: 176498 - DNA, 120 bp, Artificial Sequence
  ENSG00000110104_12 (sequence is synthesized)
gaatccagcttcccccacaccttcccaaaggctgctctgagcacctccacaccccactgcctctgtccccagcagactgaatccggttcctctccacttttcaatactgaaagattaaaa

SEQ ID NO: 176499 - DNA, 120 bp, Artificial Sequence
  ENSG00000110104_13 (sequence is synthesized)
tggggaggttgcagggagcagagcttttccctagcacccactttcccaaaccagtctctgcagaagccccagagaatctaactcatgcctgtccagtctacagcaaaaatatttattgag

SEQ ID NO: 176500 - DNA, 120 bp, Artificial Sequence
  ENSG00000110104_14 (sequence is synthesized)
tgcctgttgcatacaggcacaatcctaggcaccggcaaatacagacaatagaccaaagtccctgccctcgaggagctttcattctgatggagagaaaacataataaacaagcaaaatgca

SEQ ID NO: 176501 - DNA, 120 bp, Artificial Sequence
  ENSG00000110104_15 (sequence is synthesized)
tttgtttttactttttttgaatggaaattttcaagcatacaaagaaagagcaaagctctcaagtccccattatcagcatcaacacagctcagcattttactagtgtagcttcatctttga

SEQ ID NO: 176502 - DNA, 77 bp, Artificial Sequence
  ENSG00000110104_16 (sequence is synthesized)
tctttggcatttttttttccctgaaatattttaaagtacatcctagacatatcatcccattcataaatccttgtagt

SEQ ID NO: 176503 - DNA, 120 bp, Artificial Sequence
  ENSG00000110104_17 (sequence is synthesized)
acatcctagacatatcatcccattcataaatccttgtagtatgcatttttacagagatgagctcagttctcctgtaactctaaaatcatcgttgctcttttcagatttccctgagagccc

SEQ ID NO: 176504 - DNA, 73 bp, Artificial Sequence
  ENSG00000110104_18 (sequence is synthesized)
taaaatcatcgttgctcttttcagatttccctgagagccctgatgcccacttcatctccaactgggggaagag

SEQ ID NO: 176505 - DNA, 120 bp, Artificial Sequence
  ENSG00000110104_19 (sequence is synthesized)
aatttttgtatttttagtagaaactttagtaggttttagtaggcttagtaggttttgccatgtttgcccggctggtctccaactcctggactcacgtggtctgcccaccttggcctccca

SEQ ID NO: 176506 - DNA, 120 bp, Artificial Sequence
  ENSG00000110104_20 (sequence is synthesized)
cactgcatccggtcttggcggggaagatcctgaatcattacccagaactttaaccactcacactgttctgaaatggaatgggccacctccctagggggtgagcgccccgcctccagaggc

SEQ ID NO: 176507 - DNA, 120 bp, Artificial Sequence
  ENSG00000110104_21 (sequence is synthesized)
attcacacccgggccaaatgcacttggcggaagcaacagaactttacagcaggggccgcgtagcctggactctgcagtcgctgacaggattcaagtcctgactgccacaaggtatcttta

SEQ ID NO: 176508 - DNA, 120 bp, Artificial Sequence
  ENSG00000110104_22 (sequence is synthesized)
gagaggataggagtacccacctcagaggcatgtagccaaggcttgagaaatggcagccagcacgatcagggttccctcccgccccaagtttctgcagccctggaaggccgcctgtcaggc

SEQ ID NO: 176509 - DNA, 120 bp, Artificial Sequence
  ENSG00000110104_23 (sequence is synthesized)
cagcaaggaggtggttctgcctgggctctggggaagaaggtccagagcctccggccgagaggagacagggcatgggtggcgcttgccccacagaccctgtatgcacccactctccccctt

SEQ ID NO: 176510 - DNA, 120 bp, Artificial Sequence
  ENSG00000110107_0 (sequence is synthesized)
aatttccgttaggtgctgaaggctgtggcgcgcggctgtccccattcccacgtgaagcgctacgctagcatcgctcggctggcggctcccagctcgccgcggagcagtcccggcagcagc

SEQ ID NO: 176511 - DNA, 120 bp, Artificial Sequence
  ENSG00000110107_1 (sequence is synthesized)
gggggaccggaagtggctcgcggaggctcagaagctagtcccggagcccggcgtgtggcgcctcggagcacggtgacggcgccatgtccctaatctgctccatctctaacgaagtgccgg

SEQ ID NO: 176512 - DNA, 120 bp, Artificial Sequence
  ENSG00000110107_2 (sequence is synthesized)
agcacccatgtgtatcccctgtctctaatcatgtttatgagcggcggctcatcgagaagtacattgcggagaatggtaccgaccccatcaacaaccagcctctctccgaggagcagctca

SEQ ID NO: 176513 - DNA, 120 bp, Artificial Sequence
  ENSG00000110107_3 (sequence is synthesized)
tcgacatcaaagttgctcacccaatccggcccaagcctccctcagccaccagcatcccggccattctgaaagctttgcaggatgagtgggatgcagtcatgctgcacagcttcactctgc

SEQ ID NO: 176514 - DNA, 120 bp, Artificial Sequence
  ENSG00000110107_4 (sequence is synthesized)
gccagcagctgcagacaacccgccaagagctgtcacacgctctgtaccagcacgatgccgcctgccgtgtcattgcccgtctcaccaaggaagtcactgctgcccgagaagctctggcta

SEQ ID NO: 176515 - DNA, 120 bp, Artificial Sequence
  ENSG00000110107_5 (sequence is synthesized)
ccctgaaaccacaggctggcctcattgtgccccaggctgtgccaagttcccaaccaagtgttgtgggtgcgggtgagccaatggatttgggtgagctggtgggaatgaccccagagatta

SEQ ID NO: 176516 - DNA, 120 bp, Artificial Sequence
  ENSG00000110107_6 (sequence is synthesized)
ttcagaagcttcaagacaaagccactgtgctaaccacggagcgcaagaagagagggaagactgtgcctgaggagctggtgaagccagaagagctcagcaaataccggcaggtggcatccc

SEQ ID NO: 176517 - DNA, 120 bp, Artificial Sequence
  ENSG00000110107_7 (sequence is synthesized)
acgtggggttgcacagtgccagcattcctgggatcctggccctggacctctgcccgtccgacaccaacaagatcctcactggtggggcggataaaaatgtcgttgtgtttgacaaaagtt

SEQ ID NO: 176518 - DNA, 120 bp, Artificial Sequence
  ENSG00000110107_8 (sequence is synthesized)
ctgaacaaatcctggctaccctcaaaggccataccaagaaggtcaccagcgtggtgtttcacccttcccaggacctggtgttttctgcttcccccgatgccactatcaggatttggtcgg

SEQ ID NO: 176519 - DNA, 120 bp, Artificial Sequence
  ENSG00000110107_9 (sequence is synthesized)
tcagccttcatgccactggcgactatctcctgagctcctccgatgatcagtactgggctttctctgacatccagacagggcgtgtgctcaccaaggtgacagatgagacctccggctgct

SEQ ID NO: 176520 - DNA, 120 bp, Artificial Sequence
  ENSG00000110107_10 (sequence is synthesized)
ctctcacctgtgcacagttccaccctgacggactcatctttggaacaggaaccatggactctcagatcaagatctgggacttgaaggaacgtactaatgtggccaacttccctggccact

SEQ ID NO: 176521 - DNA, 120 bp, Artificial Sequence
  ENSG00000110107_11 (sequence is synthesized)
cgggccccatcactagcatcgccttctctgagaatggttactacctggctacagcggctgatgactcctctgtcaagctctgggatctgcgcaagcttaagaactttaagactttgcagc

SEQ ID NO: 176522 - DNA, 120 bp, Artificial Sequence
  ENSG00000110107_12 (sequence is synthesized)
tggataacaactttgaggtaaagtcactgatctttgaccagagtggtacctacctggctcttgggggcacggatgtccagatctacatctgcaaacaatggacggagattcttcacttta

SEQ ID NO: 176523 - DNA, 120 bp, Artificial Sequence
  ENSG00000110107_13 (sequence is synthesized)
cagagcatagcggcctgaccacaggggtggccttcgggcatcacgccaagttcatcgcttcaacaggcatggacagaagcctcaagttctacagcctgtaggccctggcccttctgatgg

SEQ ID NO: 176524 - DNA, 120 bp, Artificial Sequence
  ENSG00000110107_14 (sequence is synthesized)
aagctgggcctcatctcagtagaggggtagaattagggtttgggggggggggtggggggaatctatggggggagggggctctgtggggtgggacattcacatcatttcactctggtctga

SEQ ID NO: 176525 - DNA, 120 bp, Artificial Sequence
  ENSG00000110107_15 (sequence is synthesized)
gtggtggcctgagaaccatggtggcatggaccaccctcatccatgcaactccaggccccatgggaacggatgtggaaggaagaactgtcaccctcttaaggcccagggtcggagcccagg

SEQ ID NO: 176526 - DNA, 120 bp, Artificial Sequence
  ENSG00000110107_16 (sequence is synthesized)
gcctctcccttcctgtcgttcaatggacgtggtggtggctgttccacacccattttgttgcagttcctgtgagacaggagaggctgagccaagggaactgtgaaggggatgggcaggagg

SEQ ID NO: 176527 - DNA, 120 bp, Artificial Sequence
  ENSG00000110107_17 (sequence is synthesized)
gcttgtgcagggttttgtaagcagtgatctagtttcattaaaaaaagaaaacaataaccataaccacctccccgtgtctgtctgcaccaggagcacctgggactgggaaggtcaagggga

SEQ ID NO: 176528 - DNA, 120 bp, Artificial Sequence
  ENSG00000110107_18 (sequence is synthesized)
gggagcacacactgggacactggcttccgggaagcccatcttcctttcctttcacagctcttaccctttttttttttttttaattgcacagcagaaataaaaacaaatctgcagatgaaa

SEQ ID NO: 176529 - DNA, 120 bp, Artificial Sequence
  ENSG00000110107_19 (sequence is synthesized)
ggtgcttgtggcacctggccctgaaggtggagagacactggctgtgcgtgtgtgatatgatggtgtggtctggggggtcccgctggctgtccttcctggaaggacgtgagggacatctca

SEQ ID NO: 176530 - DNA, 120 bp, Artificial Sequence
  ENSG00000110107_20 (sequence is synthesized)
gcctcactgggttaggaatttctagggcttgcatgaatttacctaagcagctttctgttaccacctgaggcagagctttatgactaaggaagcaactgagtcagactgcatggcagtaga

SEQ ID NO: 176531 - DNA, 120 bp, Artificial Sequence
  ENSG00000110107_21 (sequence is synthesized)
tgctagtgcttgttctgccacttccatgccctgtggcattgggcaggttactaaagggagagaaaagtccctctgaagttttgataactgaatctaaaataaatgaacattagacagtga

SEQ ID NO: 176532 - DNA, 120 bp, Artificial Sequence
  ENSG00000110107_22 (sequence is synthesized)
agaagagagggaagactgtgcctgaggagctggtgaagccagaagagctcagcaaataccggcaggagggcttgtgcagggttttgtaagcagtgatctagtttcattaaaaaaagaaaa

SEQ ID NO: 176533 - DNA, 120 bp, Artificial Sequence
  ENSG00000110108_0 (sequence is synthesized)
atcccgccttgcgcatgcggagaaggtaaaccagcgccccgagttgaggcgcgggtttggtggcgcgtttcagcgaagtcgcacgtgaaggatagcagtggcctgagaaagacccagtca

SEQ ID NO: 176534 - DNA, 120 bp, Artificial Sequence
  ENSG00000110108_1 (sequence is synthesized)
tggcagcctccagcatcagttcaccatggggaaagcatgtgttcaaagccattctgatggtcctagtggcccttatcctcctccactcagcattggcccagtcccgtcgagactttgcac

SEQ ID NO: 176535 - DNA, 120 bp, Artificial Sequence
  ENSG00000110108_2 (sequence is synthesized)
caccaggccaacagaagagagaagccccagttgatgtcttgacccagataggtcgatctgtgcgagggacactggatgcctggattgggccagagaccatgcacctggtgtcagagtctt

SEQ ID NO: 176536 - DNA, 120 bp, Artificial Sequence
  ENSG00000110108_3 (sequence is synthesized)
cgtcccaagtgttgtgggccatctcatcagccatttctgtggccttctttgctctgtctgggatcgccgcacagctgctgaatgccttgggactagctggtgattacctcgcccagggcc

SEQ ID NO: 176537 - DNA, 120 bp, Artificial Sequence
  ENSG00000110108_4 (sequence is synthesized)
tgaagctcagccctggccaggtccagaccttcctgctgtggggagcaggggccctggtcgtctactggctgctgtctctgctcctcggcttggtcttggccttgctggggcggatcctgt

SEQ ID NO: 176538 - DNA, 120 bp, Artificial Sequence
  ENSG00000110108_5 (sequence is synthesized)
ggggcctgaagcttgtcatcttcctggccggcttcgtggccctgatgaggtcggtgcctgacccttccacccgggccctgctactcctggccttgctgatcctctacgccctgctgagcc

SEQ ID NO: 176539 - DNA, 120 bp, Artificial Sequence
  ENSG00000110108_6 (sequence is synthesized)
ggctcactggctcccgagcctctggggcccaactcgaggccaaggtgcgagggctggaacgccaggtggaggagctgcgctggcgccagaggcgagcggccaagggggcccgcagtgtgg

SEQ ID NO: 176540 - DNA, 120 bp, Artificial Sequence
  ENSG00000110108_7 (sequence is synthesized)
aggaggagtgagccggatgccccacacaccgccagtgtcataccaaagagctgagctgcttcggggccatgcagccctcctgccagccccctgcccttttcttgccctgtctctgaacct

SEQ ID NO: 176541 - DNA, 120 bp, Artificial Sequence
  ENSG00000110108_8 (sequence is synthesized)
gaggttctctgtctggggttggctctcttaaccctttctctgctcccagcctgcctcaccagggaaggttggaggggcctccctctggcttctgcatctgcgccagcaaacatcactgcc

SEQ ID NO: 176542 - DNA, 120 bp, Artificial Sequence
  ENSG00000110108_9 (sequence is synthesized)
gttggtctctcatgacttaactggcttccctctgctgctgccttggcttcctcctaatgctcgtgctctcctgtccttctgaagttgctccttggccaaatctccagctcccttcttgtt

SEQ ID NO: 176543 - DNA, 120 bp, Artificial Sequence
  ENSG00000110108_10 (sequence is synthesized)
ttcctcatcctcctaccctgtactcccaccaaaccatggtcctttaaggcacgctcctgtcctcctcattgcccagcagtagggaggggcaggggtaaggggacctgaggataaagggtg

SEQ ID NO: 176544 - DNA, 120 bp, Artificial Sequence
  ENSG00000110108_11 (sequence is synthesized)
gggaaacagggtcccctgaggcctgtgggggctgcaggggaggaggatgtaccttgtgtctctttcaagtgccttaatccgagccagcagggccttctgcttgcctgctgccatactgta

SEQ ID NO: 176545 - DNA, 120 bp, Artificial Sequence
  ENSG00000110108_12 (sequence is synthesized)
tgtaggaaagtgttctgtggctgctttgtgtcaagaaaagagcagtcactctcagaatcttgattccccatcagccaaagcaaaagatggctgctgctttgtaggcatgtgcctgcaagt

SEQ ID NO: 176546 - DNA, 120 bp, Artificial Sequence
  ENSG00000110108_13 (sequence is synthesized)
gggaccttgctgggcattatatgccctgtgggggtttcagagaccctgaaagaggagggaggacccgcctccttgtctgcacaactgcatgcacttctctccccatcgctccacaacctg

SEQ ID NO: 176547 - DNA, 120 bp, Artificial Sequence
  ENSG00000110108_14 (sequence is synthesized)
aaaccgagaaggagttgctgaccagtgcccaccccggcagcccgggaggaacacaggcagctcctttcccttcacgtggtctgcagagagcagggtgagctgccagctgcccctctccac

SEQ ID NO: 176548 - DNA, 120 bp, Artificial Sequence
  ENSG00000110108_15 (sequence is synthesized)
cagggtaccctgtcttggtggttaggggccacttttcctttgaggctctagtggaggtggatgtccttctctgccaggcttggcacatgatgtgaagaataaatgcccaattcttactgt

SEQ ID NO: 176549 - DNA, 120 bp, Artificial Sequence
  ENSG00000110108_16 (sequence is synthesized)
tcaggtttgatgtggaatcacagctgcagtgatatatattttttatcagtgcttggttggttttaaataaagtgcacgctattttattatcttgttctgaataaaatgtatttactccaa

SEQ ID NO: 176550 - DNA, 120 bp, Artificial Sequence
  ENSG00000110148_0 (sequence is synthesized)
agcctgagccggaatcgcagcgtgagcaggtggagccgcgttgggagcccgccgggtcgagctgagtaaggcggcgggctcggcgggggccatggagctgctaaagctgaaccggagcgt

SEQ ID NO: 176551 - DNA, 120 bp, Artificial Sequence
  ENSG00000110148_1 (sequence is synthesized)
gcagggaaccggacccgggccgggggcttccctgtgccgcccgggggcgcctctcctcaacagcagcagtgtgggcaacctcagctgcgagccccctcgcattcgcggagccgggacacg

SEQ ID NO: 176552 - DNA, 120 bp, Artificial Sequence
  ENSG00000110148_2 (sequence is synthesized)
agaattggagctggccattagaatcactctttacgcagtgatcttcctgatgagcgttggaggaaatatgctcatcatcgtggtcctgggactgagccgccgcctgaggactgtcaccaa

SEQ ID NO: 176553 - DNA, 120 bp, Artificial Sequence
  ENSG00000110148_3 (sequence is synthesized)
tgccttcctcctctcactggcagtcagcgacctcctgctggctgtggcttgcatgcccttcaccctcctgcccaatctcatgggcacattcatctttggcaccgtcatctgcaaggcggt

SEQ ID NO: 176554 - DNA, 120 bp, Artificial Sequence
  ENSG00000110148_4 (sequence is synthesized)
ttcctacctcatgggggtgtctgtgagtgtgtccacgctaagcctcgtggccatcgcactggagcggtacagcgccatctgccgaccactgcaggcacgagtgtggcagacgcgctccca

SEQ ID NO: 176555 - DNA, 120 bp, Artificial Sequence
  ENSG00000110148_5 (sequence is synthesized)
cgcggctcgcgtgattgtagccacgtggctgctgtccggactactcatggtgccctaccccgtgtacactgtcgtgcaaccagtggggcctcgtgtgctgcagtgcgtgcatcgctggcc

SEQ ID NO: 176556 - DNA, 120 bp, Artificial Sequence
  ENSG00000110148_6 (sequence is synthesized)
cagtgcgcgggtccgccagacctggtccgtactgctgcttctgctcttgttcttcatcccgggtgtggttatggccgtggcctacgggcttatctctcgcgagctctacttagggcttcg

SEQ ID NO: 176557 - DNA, 120 bp, Artificial Sequence
  ENSG00000110148_7 (sequence is synthesized)
ctttgacggcgacagtgacagcgacagccaaagcagggtccgaaaccaaggcgggctgccaggggctgttcaccagaacgggcgttgccggcctgagactggcgcggttggcgaagacag

SEQ ID NO: 176558 - DNA, 120 bp, Artificial Sequence
  ENSG00000110148_8 (sequence is synthesized)
caagctgctggctaagaagcgcgtggtgcgaatgttgctggtgatcgttgtgcttttttttctgtgttggttgccagtttatagtgccaacacgtggcgcgcctttgatggcccgggtgc

SEQ ID NO: 176559 - DNA, 120 bp, Artificial Sequence
  ENSG00000110148_9 (sequence is synthesized)
acaccgagcactctcgggtgctcctatctccttcattcacttgctgagctacgcctcggcctgtgtcaaccccctggtctactgcttcatgcaccgtcgctttcgccaggcctgcctgga

SEQ ID NO: 176560 - DNA, 120 bp, Artificial Sequence
  ENSG00000110148_10 (sequence is synthesized)
aacttgcgctcgctgctgcccccggcctccacgagctcgccccagggctcttcccgatgaggaccctcccactccctccattgcttcgctgtccaggcttagctacaccaccatcagcac

SEQ ID NO: 176561 - DNA, 120 bp, Artificial Sequence
  ENSG00000110148_11 (sequence is synthesized)
actgggccctggctgaggagtagaggggccgtgggggttgaggcagggcaaatgacatgcactgacccttccagacatacgaaacacaaaccacaactgacacaggaaaccaacacccaa

SEQ ID NO: 176562 - DNA, 120 bp, Artificial Sequence
  ENSG00000110148_12 (sequence is synthesized)
agcatggactaaccccaacgcacaggaaaaggtagcttacctgacacaagaggaataagaatggagcagtacatgggaaaggaggcatgcctctgatatgggactgagcctggcccatag

SEQ ID NO: 176563 - DNA, 120 bp, Artificial Sequence
  ENSG00000110148_13 (sequence is synthesized)
aaacatgacactgaccttggagagacacagcgtccctagcagtgaactatttctacacagtgggaactctgacaagggctgacctgcctctcacacacatagattaatggcactgattgt

SEQ ID NO: 176564 - DNA, 120 bp, Artificial Sequence
  ENSG00000110148_14 (sequence is synthesized)
tttagagactatggagcctggcacaggactgattctgggatgctcctagtttgacctcacagtgacccttcccaatcagcactgaaaataccatcaggcctaatctcatacctctgacca

SEQ ID NO: 176565 - DNA, 120 bp, Artificial Sequence
  ENSG00000110148_15 (sequence is synthesized)
acaggctgttctgcactgaaaaggttcttcatccctttccagttaaggaccgtggccctgccctctccttccttacccaaactgttcaagaaataataaattgtttggcttcctcctgaa

SEQ ID NO: 176566 - DNA, 120 bp, Artificial Sequence
  ENSG00000110148_16 (sequence is synthesized)
ctgggcgaggcggagctttggagggcgacggggcctgctggagtgggtgggactgaaatgaaggtgagggtgagaaggaagctggaaatggagttgagctgggagcggaggtcaggtggg

SEQ ID NO: 176567 - DNA, 120 bp, Artificial Sequence
  ENSG00000110169_0 (sequence is synthesized)
gtcctgtggcctctgcagctcagcatggctagggtactgggagcacccgttgcactggggttgtggagcctatgctggtctctggccattgccacccctcttcctccgactagtgcccat

SEQ ID NO: 176568 - DNA, 120 bp, Artificial Sequence
  ENSG00000110169_1 (sequence is synthesized)
gggaatgttgctgaaggcgagaccaagccagacccagacgtgactgaacgctgctcagatggctggagctttgatgctaccaccctggatgacaatggaaccatgctgttttttaaaggg

SEQ ID NO: 176569 - DNA, 120 bp, Artificial Sequence
  ENSG00000110169_2 (sequence is synthesized)
gagtttgtgtggaagagtcacaaatgggaccgggagttaatctcagagagatggaagaatttccccagccctgtggatgctgcattccgtcaaggtcacaacagtgtctttctgatcaag

SEQ ID NO: 176570 - DNA, 120 bp, Artificial Sequence
  ENSG00000110169_3 (sequence is synthesized)
ggggacaaagtctgggtataccctcctgaaaagaaggagaaaggatacccaaagttgctccaagatgaatttcctggaatcccatccccactggatgcagctgtggaatgtcaccgtgga

SEQ ID NO: 176571 - DNA, 120 bp, Artificial Sequence
  ENSG00000110169_4 (sequence is synthesized)
gaatgtcaagctgaaggcgtcctcttcttccaaggtgaccgcgagtggttctgggacttggctacgggaaccatgaaggagcgttcctggccagctgttgggaactgctcctctgccctg

SEQ ID NO: 176572 - DNA, 120 bp, Artificial Sequence
  ENSG00000110169_5 (sequence is synthesized)
agatggctgggccgctactactgcttccagggtaaccaattcctgcgcttcgaccctgtcaggggagaggtgcctcccaggtacccgcgggatgtccgagactacttcatgccctgccct

SEQ ID NO: 176573 - DNA, 120 bp, Artificial Sequence
  ENSG00000110169_6 (sequence is synthesized)
cacaggaatgggactggccatgggaacagtacccaccatggccctgagtatatgcgctgtagcccacatctagtcttgtctgcactgacgtctgacaaccatggtgccacctatgccttc

SEQ ID NO: 176574 - DNA, 120 bp, Artificial Sequence
  ENSG00000110169_7 (sequence is synthesized)
agtgggacccactactggcgtctggacaccagccgggatggctggcatagctggcccattgctcatcagtggccccagggtccttcagcagtggatgctgccttttcctgggaagaaaaa

SEQ ID NO: 176575 - DNA, 120 bp, Artificial Sequence
  ENSG00000110169_8 (sequence is synthesized)
ctctatctggtccagggcacccaggtatatgtcttcctgacaaagggaggctataccctagtaagcggttatccgaagcggctggagaaggaagtcgggacccctcatgggattatcctg

SEQ ID NO: 176576 - DNA, 120 bp, Artificial Sequence
  ENSG00000110169_9 (sequence is synthesized)
gactctgtggatgcggcctttatctgccctgggtcttctcggctccatatcatggcaggacggcggctgtggtggctggacctgaagtcaggagcccaagccacgtggacagagcttcct

SEQ ID NO: 176577 - DNA, 120 bp, Artificial Sequence
  ENSG00000110169_10 (sequence is synthesized)
tggccccatgagaaggtagacggagccttgtgtatggaaaagtcccttggccctaactcatgttccgccaatggtcccggcttgtacctcatccatggtcccaatttgtactgctacagt

SEQ ID NO: 176578 - DNA, 120 bp, Artificial Sequence
  ENSG00000110169_11 (sequence is synthesized)
gatgtggagaaactgaatgcagccaaggcccttccgcaaccccagaatgtgaccagtctcctgggctgcactcactgaggggccttctgacatgagtctggcctggccccacctcctagt

SEQ ID NO: 176579 - DNA, 120 bp, Artificial Sequence
  ENSG00000110169_12 (sequence is synthesized)
tcctcataataaagacagattgcttcttcgcttctcactgaggggccttctgacatgagtctggcctggccccacctccccagtttctcataataaagacagattgcttcttcacttgaa

SEQ ID NO: 176580 - DNA, 120 bp, Artificial Sequence
  ENSG00000110169_13 (sequence is synthesized)
ttcgtaagtcaggagaggacattgagcctgatggcagaggcctggtgacatgttgttccagaggttccggaatgtgtgttttcctgttggaaggaaacttcgcagagtagaaaagggatc

SEQ ID NO: 176581 - DNA, 120 bp, Artificial Sequence
  ENSG00000110169_14 (sequence is synthesized)
tgagacttttggcactttttgcaaagccctttgccagtcagggaaggcgagaggctgggcatggggcttggacatttgacaacagtgagacattattgtccccagactcactagcccaag

SEQ ID NO: 176582 - DNA, 120 bp, Artificial Sequence
  ENSG00000110169_15 (sequence is synthesized)
cgtgttgcgacaccttggcccttaatctagccccatttccattctggattttcccattgccctcatatggggaaacccacaccccactaaccccagccatctcttccaccttggacctca

SEQ ID NO: 176583 - DNA, 120 bp, Artificial Sequence
  ENSG00000110169_16 (sequence is synthesized)
cagctcagcatggctagggtactgggagcacccgttgcactggggttgtggagcctatgctggtctctggccattgccacccctcttcctccgtgagtaaagctgggactagaagcgaag

SEQ ID NO: 176584 - DNA, 120 bp, Artificial Sequence
  ENSG00000110169_17 (sequence is synthesized)
ctccctaggactagtgcccatgggaatgttgctgaaggcgagaccaagccagacccagacgtgactgaacgctgctcagatggctggagctttgatgctaccaccctggatgacaatgga

SEQ ID NO: 176585 - DNA, 120 bp, Artificial Sequence
  ENSG00000110169_18 (sequence is synthesized)
tggcatggagcccatagcaataggtagcagatttctttcccatgtgccctcctttcctgtaaaagcttgggctaagggagtgtgcatgcgtgtgggcctggcaggtgcaccatccagtgg

SEQ ID NO: 176586 - DNA, 120 bp, Artificial Sequence
  ENSG00000110169_19 (sequence is synthesized)
ctgttcttcagtcctagtcttagttctacaccgctctgctgtacctcacactgctggccatcctttttttctctggcaattgcttcccttgccttccatgaccctgtatcaagtcctctt

SEQ ID NO: 176587 - DNA, 120 bp, Artificial Sequence
  ENSG00000110169_20 (sequence is synthesized)
catagggcaaggcaagttgttcccaacacaatggcacctggctagaagagcatgtggagcatgaaatccagtctgctgtgctcaccaagtcccatgtgacccaggctgtgtctgctcaga

SEQ ID NO: 176588 - DNA, 120 bp, Artificial Sequence
  ENSG00000110169_21 (sequence is synthesized)
ggaaggggtgccttttcctaccttgccaaaggtgctgtgtggttggggaagtcctgactgtcggctttgttttccctcctgcctcttttctctctcttctcaaatgtctcattctatctc

SEQ ID NO: 176589 - DNA, 120 bp, Artificial Sequence
  ENSG00000110169_22 (sequence is synthesized)
acacctgaaatccttagggagtgcccgccaaccccatgatgttggccttacctggaaacttagccactgttttccacacttgcctttctttcaggcacctgctgattccagtttcagcca

SEQ ID NO: 176590 - DNA, 120 bp, Artificial Sequence
  ENSG00000110169_23 (sequence is synthesized)
gggcacagtgcccaacattgctgaccaagtcttgctctatttctccttctcacctggcctcttccatcttggcctctggatgcattctctccctctcatgactcatttctgcattcatca

SEQ ID NO: 176591 - DNA, 120 bp, Artificial Sequence
  ENSG00000110169_24 (sequence is synthesized)
aaatctaccctctttagtcttacatacaagtctctccatggccaaatccctattggcccttcagctttgacttttattatacttttaccttaacactaagctccagaaaccctatgctat

SEQ ID NO: 176592 - DNA, 120 bp, Artificial Sequence
  ENSG00000110169_25 (sequence is synthesized)
tctctgtacactcagtttgctccatgctttggaatctttcctctctctggggttccatctctccttgtgtgccttttaattcctacttcagatttcactttaagtatcatcttccctggg

SEQ ID NO: 176593 - DNA, 120 bp, Artificial Sequence
  ENSG00000110169_26 (sequence is synthesized)
aagttttcccagactctccccactgcctttgctgagctgatcctgtgtgttttgctgctgaattttggtgtatgatcaccctcctttagccatctctctgatggctgtgagctccatgtg

SEQ ID NO: 176594 - DNA, 120 bp, Artificial Sequence
  ENSG00000110171_0 (sequence is synthesized)
gccggcgcggggacaggcggaggcgcgggcagggccgggcggacgggcgctggcagcagtagcagcgccgcgggcccttcagagtggccgcagtccgagctttgccctcgcatcctgttc

SEQ ID NO: 176595 - DNA, 120 bp, Artificial Sequence
  ENSG00000110171_1 (sequence is synthesized)
gagctttgccctcgcatcctgttccaacgcgaggctggtgtgagtggcgggagccatctgtgggcgccatggcaaagagggaggacagccctggcccagaggtccagccaatggacaagc

SEQ ID NO: 176596 - DNA, 120 bp, Artificial Sequence
  ENSG00000110171_2 (sequence is synthesized)
agttcctggtatgcagcatctgcctggatcggtaccagtgccccaaggttcttccttgcctgcacaccttctgtgagagatgtctccaaaactatatccctgcccagagcctgacgctat

SEQ ID NO: 176597 - DNA, 120 bp, Artificial Sequence
  ENSG00000110171_3 (sequence is synthesized)
cctgtccagtatgccggcagacgtccatcctcccagagcagggcgtctcggcactgcagaacaacttcttcatcagcagcctcatggaggcaatgcagcaggcacctgatggggcccacg

SEQ ID NO: 176598 - DNA, 120 bp, Artificial Sequence
  ENSG00000110171_4 (sequence is synthesized)
acccggaggacccccaccccctcagtgtagtggctggccgccctctctcctgccccaaccatgaaggcaagacgatggagttttactgtgaggcctgtgagacggccatgtgtggtgagt

SEQ ID NO: 176599 - DNA, 120 bp, Artificial Sequence
  ENSG00000110171_5 (sequence is synthesized)
gccgcgccggggagcatcgtgagcatggcacagtgctgctgagggatgtggtggagcagcacaaggcggccctgcagcgccagctcgaggctgtgcgtggccgattgccacagctgtccg

SEQ ID NO: 176600 - DNA, 120 bp, Artificial Sequence
  ENSG00000110171_6 (sequence is synthesized)
cagcaattgccttagtcgggggcatcagccagcagctgcaggagcgcaaggcagaggccctggcccagatcagtgcagcgttcgaggacctggagcaagcactgcagcagcgcaagcagg

SEQ ID NO: 176601 - DNA, 120 bp, Artificial Sequence
  ENSG00000110171_7 (sequence is synthesized)
ctctggtcagcgacctggagaccatttgtggggccaaacagaaggtgttgcaaagccagctggacacactgcgccagggtcaggaacacatcggcagtagctgcagctttgcagagcagg

SEQ ID NO: 176602 - DNA, 120 bp, Artificial Sequence
  ENSG00000110171_8 (sequence is synthesized)
cactgcgcctgggctcggccccggaggtgttgctggtgcgcaagcacatgcgagagcggctggctgcattggcggcacaggccttcccggagcggccacatgagaatgcacagctggaac

SEQ ID NO: 176603 - DNA, 120 bp, Artificial Sequence
  ENSG00000110171_9 (sequence is synthesized)
tggtccttgaggtggacggtctgcggcgatcggtgctcaatctgggcgcactgctcaccacgagcgccactgcacacgaaacggtggccacgggagagggcctgcgccaggcgctagtgg

SEQ ID NO: 176604 - DNA, 120 bp, Artificial Sequence
  ENSG00000110171_10 (sequence is synthesized)
gccagcctgcctcgctcactgtcactaccaaagacaaggacgggcggttggtgcgcacaggcagcgctgagctgcgtgcagagatcaccggcccggacggcacgcgccttccggtgccag

SEQ ID NO: 176605 - DNA, 120 bp, Artificial Sequence
  ENSG00000110171_11 (sequence is synthesized)
tctacggacagccagtgcgcggcagccccttccgcgtgcgtgccctgcgtccgggggacctgccaccttccccggacgatgtgaagcgccgtgtcaagtcccctggcggccccggcagcc

SEQ ID NO: 176606 - DNA, 120 bp, Artificial Sequence
  ENSG00000110171_12 (sequence is synthesized)
atgtgcgccagaaggcagtgcgtaggcccagctccatgtacagcacaggcggcaaacgaaaggacaacccaattgaggatgagctcgtcttccgtgttggcagtcgtggaagggagaaag

SEQ ID NO: 176607 - DNA, 120 bp, Artificial Sequence
  ENSG00000110171_13 (sequence is synthesized)
gtgaattcaccaatttacaaggtgtgtccgcagccagcagcggccgcatcgtggtagcagacagcaacaaccagtgtattcaggttttctccaatgagggccagttcaagttccgttttg

SEQ ID NO: 176608 - DNA, 120 bp, Artificial Sequence
  ENSG00000110171_14 (sequence is synthesized)
gggtccgaggacgctcacctgggcagctgcagcgccccacaggtgtggcagtggacaccaatggagacataattgtggcagactatgacaaccgttgggtcagcatcttctcccctgagg

SEQ ID NO: 176609 - DNA, 120 bp, Artificial Sequence
  ENSG00000110171_15 (sequence is synthesized)
gcaagttcaagaccaagattggagctggccgcctcatgggccccaagggagtggccgtagaccggaatggacatatcattgtggtcgacaacaagtcttgctgcgtctttaccttccagc

SEQ ID NO: 176610 - DNA, 120 bp, Artificial Sequence
  ENSG00000110171_16 (sequence is synthesized)
ccaatggcaaactggttggccgttttgggggccgtggggccactgaccgccactttgcagggccccattttgtggctgtgaacaacaagaatgaaattgtagtaacggacttccataacc

SEQ ID NO: 176611 - DNA, 120 bp, Artificial Sequence
  ENSG00000110171_17 (sequence is synthesized)
attcagtgaaggtgtacagtgccgatggagagttcctcttcaagtttggctcccatggcgagggcaatgggcagttcaatgcccccacaggagtagctgtggactccaatggaaacatca

SEQ ID NO: 176612 - DNA, 120 bp, Artificial Sequence
  ENSG00000110171_18 (sequence is synthesized)
ttgtggctgactggggcaacagccgcatccaggtattcgacagctctggctccttcctgtcctatatcaacacatctgcagaaccactgtatggtccacagggcctggcactgacctcgg

SEQ ID NO: 176613 - DNA, 120 bp, Artificial Sequence
  ENSG00000110171_19 (sequence is synthesized)
atggccatgtggtggtggctgatgctggcaaccactgctttaaagcctatcgctacctccagtagctgtacagaggccctgcctggcttgtggagggacagacattggggtgattggaca

SEQ ID NO: 176614 - DNA, 120 bp, Artificial Sequence
  ENSG00000110171_20 (sequence is synthesized)
agagggtctggctgggaggtgggccagacctggcagcactgaatgtgggctgtgggcatgggtgcacccggtgccctccctctcctacccccacccccacggttgcactttatttattcg

SEQ ID NO: 176615 - DNA, 120 bp, Artificial Sequence
  ENSG00000110171_21 (sequence is synthesized)
gttcttgctttggtgactgggtgagcctggactgtggtcccaaggatgtgtgcagagcttcaccctacccttcttacacacctccccacccctgtcagtctgctccccatcccccagcct

SEQ ID NO: 176616 - DNA, 120 bp, Artificial Sequence
  ENSG00000110171_22 (sequence is synthesized)
ggggccagaacagcctaccccaggacaggagtccctctagttgtctccctaccaccctatacacactgacagagacagcaataccccaccccccatattaaataaatgtcttcaccaaga

SEQ ID NO: 176617 - DNA, 120 bp, Artificial Sequence
  ENSG00000110171_23 (sequence is synthesized)
accccaggcccctccctggttctgacctcctcccttctgcaattggcttcagatcctgggctgcaaacctgcagggacagatggttgcaggttggaggggcaggctgcaccccagggaga

SEQ ID NO: 176618 - DNA, 120 bp, Artificial Sequence
  ENSG00000110171_24 (sequence is synthesized)
ccttctcccagagttctgggtactgcccttctgccgcccagagatcgtgctgaggtacagacggtttctacgtcttcctggtcagccgatagactagcatattccataggagcactccaa

SEQ ID NO: 176619 - DNA, 120 bp, Artificial Sequence
  ENSG00000110171_25 (sequence is synthesized)
ggaagccggaaagggcgcctccaggaggcaggcggcccagacaggctcccagagtccgaaatccctgctgccccagctgccttttcttgacggagtctcatctcaatccctgagaccgac

SEQ ID NO: 176620 - DNA, 120 bp, Artificial Sequence
  ENSG00000110171_26 (sequence is synthesized)
tacaccgcccttcccggagccggaggcagctggcggagatccgggatccgagatccgggatccggctcgccggcccgccggctccctagcagcaccaaggaggcagcgtccgcaggagag

SEQ ID NO: 176621 - DNA, 120 bp, Artificial Sequence
  ENSG00000110171_27 (sequence is synthesized)
tccctacagccagaatgttctttcttaaaagcaaaattgatcttgtcactgctatgcctagaaatgttaagaaactcctcattacacccaggataaaacataattccttcttttgttcac

SEQ ID NO: 176622 - DNA, 120 bp, Artificial Sequence
  ENSG00000110171_28 (sequence is synthesized)
ctgggtgctccctgcagtccagccacactggacaagtcctcaagtggtgcccatactggactttgtgccttttacaatctgttcactctgcttgaatgcctttcctcttcctttcctggc

SEQ ID NO: 176623 - DNA, 120 bp, Artificial Sequence
  ENSG00000110171_29 (sequence is synthesized)
cgaatttggtttatgtggcatcctcattaggctatttgttcagacatcttcttctcttggagccttttctcaccattccccttcatcccttcatgttctcacaatcccattcatatctct

SEQ ID NO: 176624 - DNA, 120 bp, Artificial Sequence
  ENSG00000110171_30 (sequence is synthesized)
gttgcattgccccagacctgctgccatgtttgattttgtcagtaagtgcttgttgaatgactgaataaatggtggtgggggggtctcctccctcaggatcctactcccttctgtctgtgc

SEQ ID NO: 176625 - DNA, 120 bp, Artificial Sequence
  ENSG00000110171_31 (sequence is synthesized)
tgaccactgtcccaacatcctttcctcttccacaagactcctctctattttacctcctccttttcccctttgagatcattcactcaaacaatacacatttacacatttatgcatggctgc

SEQ ID NO: 176626 - DNA, 120 bp, Artificial Sequence
  ENSG00000110171_32 (sequence is synthesized)
tttgtcccaggcagtatgctagaagctggagatacagtgatgcacaaagcaaatgtattctgtgtcttcttgattatagtctagtagggaagagaaaaaggtaaccaaaaaattacaata

SEQ ID NO: 176627 - DNA, 120 bp, Artificial Sequence
  ENSG00000110171_33 (sequence is synthesized)
tgatgtaatagattctgtgataggaaggtgcagggaactgtgggaagggatacagaagtgtatgattcaggaaagactatatgaggaggacctcaagcacaagtgggaattaaatggaag

SEQ ID NO: 176628 - DNA, 120 bp, Artificial Sequence
  ENSG00000110171_34 (sequence is synthesized)
caatttacaaggtgtgtccgcagccagcagcggccgcatcgtggtagcagacagcaacaaccagtgtattcagtctgctactaagtctcatgagcctacctcctacatatgtcttgagtc

SEQ ID NO: 176629 - DNA, 120 bp, Artificial Sequence
  ENSG00000110171_35 (sequence is synthesized)
tgagatagctatgcggcattcaagtggagatgtccagttcaggtctgagattgagctggggagttcattcatttgttgaatgcctactatgtgccaaatgccatatcagtgctgcaagtg

SEQ ID NO: 176630 - DNA, 120 bp, Artificial Sequence
  ENSG00000110171_36 (sequence is synthesized)
cagcagcaaacaaaacagatgcagtccttatgccatgcgaggcttacatccttagaaggggacaccgatatttaacagttatttagctgcaaagtgataattgttatgaagagagctgta

SEQ ID NO: 176631 - DNA, 120 bp, Artificial Sequence
  ENSG00000110171_37 (sequence is synthesized)
aagcatatatcctggtgacctaagtttatatgtgcatattgatttggtagggcggagggtggtacttggtcattagtcttctctgaaaaagtgacctggaaattctaagaatggaaagat

SEQ ID NO: 176632 - DNA, 120 bp, Artificial Sequence
  ENSG00000110171_38 (sequence is synthesized)
gagtaagagttggccaggtgtcaggggtgggataggctgggactggaagaacaagacatcccaaagcctcatcagtattgagccagaacctgagctgctcaaactggaggggcattacct

SEQ ID NO: 176633 - DNA, 120 bp, Artificial Sequence
  ENSG00000110171_39 (sequence is synthesized)
caccgctaaactgtaccttttagtgccccctcacttctactatttagctcgtggagctcatggtatctcccttctcatactgatgagtgctgtcctgccacaggggaccactgcagaacc

SEQ ID NO: 176634 - DNA, 120 bp, Artificial Sequence
  ENSG00000110171_40 (sequence is synthesized)
caagagctgtgctggtcagccagagaagagcttagtagaaggtccacattagaagaaagtgatgcctgttggtgggaccagtttaaacagccctgcaggactaagagatggagttggggt

SEQ ID NO: 176635 - DNA, 120 bp, Artificial Sequence
  ENSG00000110171_41 (sequence is synthesized)
ggggccggggcggggagaccagtccattaaggaaggcacagatttgaatccaagagcaaggccaatgcccagaacttgagttctccaaggctgctcctggctctcgttcatcttgtgtcc

SEQ ID NO: 176636 - DNA, 120 bp, Artificial Sequence
  ENSG00000110171_42 (sequence is synthesized)
ccagagcctataacaaagcagagtgtatgagacttatgtagtgagtaatgttttgactatgaaggaaaagccagaaagcttagctaaagtgggaaggaggattaaaggaggtgcttttgg

SEQ ID NO: 176637 - DNA, 120 bp, Artificial Sequence
  ENSG00000110171_43 (sequence is synthesized)
gatggggagacctgagcatattgggcagctaaattagaggaggttggagaagggagaggttgaaaggttcactctgtgtaggaggaaggtttccttgtcagccccatagcctgaatggac

SEQ ID NO: 176638 - DNA, 120 bp, Artificial Sequence
  ENSG00000110171_44 (sequence is synthesized)
cccttacgttagccctatcatctcagaaataatttgtctcagtcctggagaccccacccctctcctaacaccctagcttttatcttcccagatactcttccccatcccactcagcatccc

SEQ ID NO: 176639 - DNA, 120 bp, Artificial Sequence
  ENSG00000110171_45 (sequence is synthesized)
ggaggggaccgtgaaagctgagagtgaggcttgtgtgcccccttaaggggcttgctctcctcccaagagctatggggagtcacaggattgcaggcaggggagtgatgcagtcctgtgtgt

SEQ ID NO: 176640 - DNA, 120 bp, Artificial Sequence
  ENSG00000110171_46 (sequence is synthesized)
cttagatcactcaggctgaggcaagactgagacaggaagatcaatcttttgcagtgatccagatgagaaatgatgtgagcctggaccgtgagaaagacgagacagtgtatgcatagggta

SEQ ID NO: 176641 - DNA, 120 bp, Artificial Sequence
  ENSG00000110171_47 (sequence is synthesized)
tagacttgagagagggatttgagatggaatcaagagttgtgttaattcattggcctatcaaacagagaagaaattggagtcaagagtgactcatggccagctgggtggcaccagtcattg

SEQ ID NO: 176642 - DNA, 120 bp, Artificial Sequence
  ENSG00000110171_48 (sequence is synthesized)
agatagagaactaagagaactgatttcccaaagaaaatgagctgttagatttgatattcccaatggacatcagcaagagatgtctactaggcagtagggcacatggatgtgaagcctatg

SEQ ID NO: 176643 - DNA, 120 bp, Artificial Sequence
  ENSG00000110171_49 (sequence is synthesized)
aagcagatttgggctgtagctgtagatctgggtgggggttctcagccctggggcttcaccctatcctcctccaaagccctaccctctgcctgaggccaggtccccagtccctagcccctt

SEQ ID NO: 176644 - DNA, 120 bp, Artificial Sequence
  ENSG00000110171_50 (sequence is synthesized)
tgtggctgactggggcaacagccgcatccaggtgagtaaggcctgggaatgacatgagggggcggtttcctggtgtgtcccatatgcccgttcccccaaaacagactctcatctgcctga

SEQ ID NO: 176645 - DNA, 120 bp, Artificial Sequence
  ENSG00000110172_0 (sequence is synthesized)
agtcgtcagaccggtgctagcgacacgggagtggcaaacgcatcctcttgccgttcccggtgtttgggccttgcctgtgacggtgggaaaagaaaatggccttgctgtgctacaaccggg

SEQ ID NO: 176646 - DNA, 120 bp, Artificial Sequence
  ENSG00000110172_1 (sequence is synthesized)
gctgcggtcagcgcttcgatcctgagaccaattccgacgatgcttgcacataccacccaggtgttccggtctttcacgatgcattaaagggttggtcttgctgtaagagaagaacaactg

SEQ ID NO: 176647 - DNA, 120 bp, Artificial Sequence
  ENSG00000110172_2 (sequence is synthesized)
atttttctgatttcttaagcattgtaggctgtacaaaaggtagacataatagtgagaagccacctgagccagtcaaacctgaagtcaagactactgagaagaaggagctatgtgaattaa

SEQ ID NO: 176648 - DNA, 120 bp, Artificial Sequence
  ENSG00000110172_3 (sequence is synthesized)
aacccaaatttcaggaacacatcattcaagcccctaagccagtagaagcaataaaaagaccaagcccagatgaaccaatgacaaatttggaattaaaaatatctgcctccctaaaacaag

SEQ ID NO: 176649 - DNA, 120 bp, Artificial Sequence
  ENSG00000110172_4 (sequence is synthesized)
cacttgataaacttaaactgtcatcagggaatgaagaaaataagaaagaagaagacaatgatgaaattaagattgggacctcatgtaagaatggagggtgttcaaagacataccagggtc

SEQ ID NO: 176650 - DNA, 120 bp, Artificial Sequence
  ENSG00000110172_5 (sequence is synthesized)
tagagagtctagaagaagtctgtgtatatcattctggagtacctattttccatgaggggatgaaatactggagctgttgtagaagaaaaacttctgattttaatacattcttagcccaag

SEQ ID NO: 176651 - DNA, 120 bp, Artificial Sequence
  ENSG00000110172_6 (sequence is synthesized)
agggctgtacaaaagggaaacacatgtggactaaaaaagatgctgggaaaaaagttgttccatgtagacatgactggcatcagactggaggtgaagttaccatttcagtatatgctaaaa

SEQ ID NO: 176652 - DNA, 120 bp, Artificial Sequence
  ENSG00000110172_7 (sequence is synthesized)
actcacttccagaacttagccgagtagaagcaaatagcacattgttaaatgtgcatattgtatttgaaggagagaaggaatttgatcaaaatgtgaaattatggggtgtgattgatgtaa

SEQ ID NO: 176653 - DNA, 120 bp, Artificial Sequence
  ENSG00000110172_8 (sequence is synthesized)
agcgaagttatgtaactatgactgcaacaaagattgaaatcactatgagaaaagctgaaccgatgcagtgggcaagccttgaactgcctgcagctaaaaagcaggaaaaacaaaaagatg

SEQ ID NO: 176654 - DNA, 120 bp, Artificial Sequence
  ENSG00000110172_9 (sequence is synthesized)
ccacaacagattgagtgggagatggaaggaaggctattacattatttccgaatttttaatactgtgtgaagtggtggcttgctgctgtaatcttttgttttgttgttgtgttactgaatg

SEQ ID NO: 176655 - DNA, 120 bp, Artificial Sequence
  ENSG00000110172_10 (sequence is synthesized)
tggcatttcagggttaacattaggttcttaaaagccaaagtcagtttgtctttttgtgcctctcatctttcttttgtgttatgtaagattgattattcatttctccctactggtaggaac

SEQ ID NO: 176656 - DNA, 120 bp, Artificial Sequence
  ENSG00000110172_11 (sequence is synthesized)
catagttgtgtcctatacttgaagaggctggaaagtagcccataaccataattgcagtatttctttgtatttctctgttaagcaaagaaatattaaggaacattttttttatgtttttgt

SEQ ID NO: 176657 - DNA, 120 bp, Artificial Sequence
  ENSG00000110172_12 (sequence is synthesized)
tacagtacttgaaaatatttaaggaagagatgaagctctgcagttttttctatgtgggatgattacttttttaaggaggattaattctgaggtagtatagtaactaaaggggaatatatg

SEQ ID NO: 176658 - DNA, 120 bp, Artificial Sequence
  ENSG00000110172_13 (sequence is synthesized)
aattgtttaacaaattagaatttgtttacaactacttgaatttttaaattatgtcaaaacttacattacttgccaagcagtatgatgttataggaaacataaataagattacagaggtat

SEQ ID NO: 176659 - DNA, 120 bp, Artificial Sequence
  ENSG00000110172_14 (sequence is synthesized)
caatttggttaaaattcaccattttataagactaagcaataatcttaacaacctctttcctgaatatttaaatgtgtttgtatggtgttatgactaattgttactgatttagagactaag

SEQ ID NO: 176660 - DNA, 120 bp, Artificial Sequence
  ENSG00000110172_15 (sequence is synthesized)
ccctcttaaaacctttagttaaatataaaaagaaattatatatatcttgcctccctgatggaaaactatataaaattgtagacttaaaaggtttgtggaaatacattaggatatcagaaa

SEQ ID NO: 176661 - DNA, 120 bp, Artificial Sequence
  ENSG00000110172_16 (sequence is synthesized)
actaaatatatggagttgctttatgactattacatgttaaataaaaatagcttaattgttttggagtttttttttaaagtcatgaagagcttcacaattctagtgatacaatgttgacta

SEQ ID NO: 176662 - DNA, 120 bp, Artificial Sequence
  ENSG00000110172_17 (sequence is synthesized)
tatattgtactttatattaaatataggtaatacagaattagatcgtttggataggttttgagttagtgcagaactcaagaagaaaaattaggaaatattctgaaggccagaactctggaa

SEQ ID NO: 176663 - DNA, 120 bp, Artificial Sequence
  ENSG00000110172_18 (sequence is synthesized)
gaacttagaaagtttgggaataaattaaacttatgtagatttaaaattaaaaggggtttatttcccaaaccccttgagtcttttcttttccttggtatttatggaattcttacaaagaaa

SEQ ID NO: 176664 - DNA, 120 bp, Artificial Sequence
  ENSG00000110172_19 (sequence is synthesized)
aatttgcagaagtactattttcgtgaataaaacatatgtatcattctactaccattagcaaataacttagttgtagttaatataattgttaaaaggtttagctctgttacaaataaaaac

SEQ ID NO: 176665 - DNA, 120 bp, Artificial Sequence
  ENSG00000110172_20 (sequence is synthesized)
ataaagatctggcaaccagactttcatgatgttacattaccatgacaagaaactctgggcagtaaaagttggacccacatggagtacataagcatctgatacctggagatgtatttaaaa

SEQ ID NO: 176666 - DNA, 120 bp, Artificial Sequence
  ENSG00000110172_21 (sequence is synthesized)
tttttcaagttatcttccatgatttaggaaccatttagagacatgaagtctttatgggttgggggaaaggttgataattagtttgattaaaggtaatgattaatatccctttttgttcat

SEQ ID NO: 176667 - DNA, 120 bp, Artificial Sequence
  ENSG00000110172_22 (sequence is synthesized)
acttccttctgaggctgttttcccctaaacagtatcttaatctgttacatgtaattgaaatattatttgaagcagtgagttattgtaacctcagattagttacattgatcaaaacattga

SEQ ID NO: 176668 - DNA, 120 bp, Artificial Sequence
  ENSG00000110172_23 (sequence is synthesized)
tttatacacacacacacacacatacatatgtagcttttatatttagtctggttacattagtgaccatggtatttactttcttcttaaggagcctttgaatttcttgtccagataaaaatc

SEQ ID NO: 176669 - DNA, 120 bp, Artificial Sequence
  ENSG00000110172_24 (sequence is synthesized)
cgaatatttctcttagactcatacataaagggacacagttatcgttaggtagcatatgttttactatcggtttgtcaaaaaagttaataaaaagtgcttattgatttatttctctagaaa

SEQ ID NO: 176670 - DNA, 120 bp, Artificial Sequence
  ENSG00000110172_25 (sequence is synthesized)
agtgcgtgtagaatgaatgatagaatttgaaagtacagaaagtacagatggttccgaacttaccatggtgtaacttaagatttttttgacttaacaatggtattatcaggctataaccac

SEQ ID NO: 176671 - DNA, 120 bp, Artificial Sequence
  ENSG00000110172_26 (sequence is synthesized)
attgtaagcaaaggagcatctgcctgtattagcaggatttgctaatggattcgatgtgaagggaattcaagcatctgggtgattggtgacaccattaaccaacaaggtgaaaatggggtg

SEQ ID NO: 176672 - DNA, 120 bp, Artificial Sequence
  ENSG00000110172_27 (sequence is synthesized)
ggggcaggtttatactttttcctcatgttaaattttagatcacttaaggaatggagatacaattgtatttacatgtatatgaggtagaagtagtagataaaagggaattagtaattactg

SEQ ID NO: 176673 - DNA, 120 bp, Artificial Sequence
  ENSG00000110172_28 (sequence is synthesized)
gattggggaaggcagtgcaaatggtagggtaatagaggaagatcaaggagaaggtatcagatgtgttttgaaaagtgaatgacagggaaaacagagaaagggtatttcaagcgtaagtaa

SEQ ID NO: 176674 - DNA, 120 bp, Artificial Sequence
  ENSG00000110172_29 (sequence is synthesized)
tagcacaagtatagagaaaattatgtaatggtacaaatttgctgctgtggaattgagattaatagagataagtagacctggccagatcctaaaagggtttagtgatgcagggaagttaga

SEQ ID NO: 176675 - DNA, 120 bp, Artificial Sequence
  ENSG00000110172_30 (sequence is synthesized)
ttgtacgttagagtgtggaggccattgaaattgaagaattttttagtctttttcattgaaatataacattgaagtttgttaaaggatatacaaatataaatttgtagctcaagggatttt

SEQ ID NO: 176676 - DNA, 120 bp, Artificial Sequence
  ENSG00000110172_31 (sequence is synthesized)
cacaaaattaaacacaccagcaatgcagagcactccttatgtgttttctcattcattatcttcctcaaatgtttttctgtcagtcaacatatgttttttctgtttctgagtttaatgtaa

SEQ ID NO: 176677 - DNA, 120 bp, Artificial Sequence
  ENSG00000110172_32 (sequence is synthesized)
aaataaccatagaatatgtacttgtttttgtcgtcttctgcataataatgcttgttttatttatctttgttgcatgtagctttagttttgtttttttatttctttaaggtatgtcattat

SEQ ID NO: 176678 - DNA, 120 bp, Artificial Sequence
  ENSG00000110172_33 (sequence is synthesized)
ttgaatgtgccacaactaatttctactttatattgtcctttaattttaaaaaattgtttttaataatgctattatgaacattctttttgagatggagtttcactcttgtaacccaccctg

SEQ ID NO: 176679 - DNA, 70 bp, Artificial Sequence
  ENSG00000110172_34 (sequence is synthesized)
ttctttttgagatggagtttcactcttgtaacccaccctggagtacaatggtaggttcagcctcctgagt

SEQ ID NO: 176680 - DNA, 63 bp, Artificial Sequence
  ENSG00000110172_35 (sequence is synthesized)
ctggtctcaaactcctggccaccgcagccggcctattatgaacattcttgtgcatgacttttg

SEQ ID NO: 176681 - DNA, 120 bp, Artificial Sequence
  ENSG00000110172_36 (sequence is synthesized)
gcagccggcctattatgaacattcttgtgcatgacttttgtgacacatatacacatttccatttctagtattttggatttttttttttaaattttggcatatgtgcattatacttatcag

SEQ ID NO: 176682 - DNA, 120 bp, Artificial Sequence
  ENSG00000110172_37 (sequence is synthesized)
ttagttcagcatccctaatctgaaatgctccaatgagcattttctttaactgtcatgttggctctcaaaaagttaacagatttttggagcatttgagattttggattaggtatgcccacc

SEQ ID NO: 176683 - DNA, 120 bp, Artificial Sequence
  ENSG00000110172_38 (sequence is synthesized)
tgtatatctttagcattaacagatacttccacatagttttccaaggtggttgtatttgtttacgtttctaccagcagtatgtgaggctagttcaacttgtcctatggtttcttaacattt

SEQ ID NO: 176684 - DNA, 120 bp, Artificial Sequence
  ENSG00000110172_39 (sequence is synthesized)
tttttttttttttttttgtattttaaccattctagtgtgtgtatagtgttttgtcatggttttgatttgtacttccctaatgatgactgcttttttgtatgtttattagccatttgtata

SEQ ID NO: 176685 - DNA, 120 bp, Artificial Sequence
  ENSG00000110172_40 (sequence is synthesized)
gtttattagccatttgtatatcctcttgtgaagtgtgcagaatcttttacctatctctaatgtctcttgcttaccagtttgtaagaattctttatatattttagctgtgactcttatcag

SEQ ID NO: 176686 - DNA, 120 bp, Artificial Sequence
  ENSG00000110172_41 (sequence is synthesized)
aaattctatgctttttcactgtcttaatgacgactttgataaactttttatcaaattgctttttaacaaaatccaatttgtccatcattttgtttatgactagtgctttccatgttctat

SEQ ID NO: 176687 - DNA, 120 bp, Artificial Sequence
  ENSG00000110172_42 (sequence is synthesized)
ttaagaaatcgttgcttacttcagggctgtgagtgttttctcatatggaggcacatttaaatatgtaaatgacctggaactgattattgtataaggtgtgacatggatgtaattaaagaa

SEQ ID NO: 176688 - DNA, 120 bp, Artificial Sequence
  ENSG00000110172_43 (sequence is synthesized)
ctttaaacaaaagggtgatagtaatttgataattagtagaaaatagaagtcgaaggctgagaaatagtagaaacctgttagtatagtctgattgcttaaaatctgctagcttatgaggaa

SEQ ID NO: 176689 - DNA, 120 bp, Artificial Sequence
  ENSG00000110172_44 (sequence is synthesized)
gattaacaaattaatatattcaagtcaaattgatgagatttcattatagactgcctatgggtggagggagaggagatgctgaagaggaacgaatggattttgctttgagaaactgagtct

SEQ ID NO: 176690 - DNA, 120 bp, Artificial Sequence
  ENSG00000110172_45 (sequence is synthesized)
gtgccatcaaataatatggggaaaagaatggactgtgggggcaatagcattaagtttagtagatgctaacatactgagttttatgttcttgtgaaatatcttaaggagaaatacacatct

SEQ ID NO: 176691 - DNA, 120 bp, Artificial Sequence
  ENSG00000110172_46 (sequence is synthesized)
aatactgtactttggatttataaaagataaacacagaattttattttctgtttgtaggtagtgctataaatacaaaaatagaaaatatactactggctacatccatgttttattaacata

SEQ ID NO: 176692 - DNA, 120 bp, Artificial Sequence
  ENSG00000110172_47 (sequence is synthesized)
attttttgtgaattcatctgtagagcctccatctacagcagcaatggggcccggatcttccagacaaaccctggatatatatataggtctgcagctcattttaccctttatagggataag

SEQ ID NO: 176693 - DNA, 120 bp, Artificial Sequence
  ENSG00000110172_48 (sequence is synthesized)
aaatcaccatcactctagaacttccagaattgcttattagatttctcatattatttgacaatacttacatggagtttactgtacacataagtcatgcagtaactgtatttttattgagag

SEQ ID NO: 176694 - DNA, 120 bp, Artificial Sequence
  ENSG00000110172_49 (sequence is synthesized)
tattaatcccttggtttcaacattgtttttgaaattagtaactaagtaagtacttgaatatgattggatgggatctcatactcaaaaggctgaaagcatcttaatatgactttctcaaag

SEQ ID NO: 176695 - DNA, 120 bp, Artificial Sequence
  ENSG00000110172_50 (sequence is synthesized)
gaacctaaaacttaaccaagtccaaaagggaatcatttttcattttttaacagaatggcgtgggatggatttatgaattttctaggtaattgtcatttaagtattttgcaaagttcgtag

SEQ ID NO: 176696 - DNA, 120 bp, Artificial Sequence
  ENSG00000110172_51 (sequence is synthesized)
aggtcaccaatactgcaaatatgtatgagatgtaactgtaagatacgcagctaattttttttctctttgtttcctttttagacataccagggtctagagagtctagaagaagtctgtgta

SEQ ID NO: 176697 - DNA, 120 bp, Artificial Sequence
  ENSG00000110172_52 (sequence is synthesized)
tatcattctggagtacctattttccatgaggggtaacttatgcatgacttattaaaatagtttatggtagaatttagaaagttaaacctttctgtctttaaacattgtttgccatgcagt

SEQ ID NO: 176698 - DNA, 120 bp, Artificial Sequence
  ENSG00000110172_53 (sequence is synthesized)
gttattaggcattttacttacattgccattaacatcttcacaatagcctacacaaacacaggggtttgtatgttgtgtgtttatacatgagaaaacagaaacaaggttacagttcttaag

SEQ ID NO: 176699 - DNA, 120 bp, Artificial Sequence
  ENSG00000110172_54 (sequence is synthesized)
tggtcattgtgatataaactgcctgtttttcttcatattctgtatttaaaagtgatgctatttgggctaaatgttttgtttgaaggactgtcctacacattgcagggcatttagaatttt

SEQ ID NO: 176700 - DNA, 120 bp, Artificial Sequence
  ENSG00000110172_55 (sequence is synthesized)
gggccctggggcactaagacaacattatcccaagacgacccatacttttccgcatcctgcagttgagagcctctcttctgtattatgctctagtttatagaaatgcagcactgtgtaaaa

SEQ ID NO: 176701 - DNA, 120 bp, Artificial Sequence
  ENSG00000110172_56 (sequence is synthesized)
atcttccactctgtttccacattcttcctgatatactgtacattcatttttagtaacttagacacttgtaaaatgctagagtttgtacacttactggcttattaaaaatcagatttatcc

SEQ ID NO: 176702 - DNA, 120 bp, Artificial Sequence
  ENSG00000110172_57 (sequence is synthesized)
ctaaaatacttgtggatttaattggttgtgagattttatttctgaagtttttctgtgataatttaaaggatgaaatactggagctgttgtagaagaaaaacttctgattttaatacattc

SEQ ID NO: 176703 - DNA, 120 bp, Artificial Sequence
  ENSG00000110172_58 (sequence is synthesized)
tttcaggaacacatcattcaagcccctaagccagtagaagcaataaaaagaccaaggtatactttatacagttacatatttttgtcacacttgaatagtagcacttgtgcatggtacttt

SEQ ID NO: 176704 - DNA, 120 bp, Artificial Sequence
  ENSG00000110172_59 (sequence is synthesized)
cctttatgatttagcatgataccatttgtagctactatgtaggccaccaagctttgaaccatttggtttctcccttaaatctgccttaaatttttatttctcttcaacttgagagcatgt

SEQ ID NO: 176705 - DNA, 120 bp, Artificial Sequence
  ENSG00000110172_60 (sequence is synthesized)
acacaatataactacataacagatttgcatattgtactgtcataattacagggacatgtatcatcagggtagggaagtcacatttttcttgtgccttagagtgcatctttttcactgtgg

SEQ ID NO: 176706 - DNA, 120 bp, Artificial Sequence
  ENSG00000110172_61 (sequence is synthesized)
catggtaaaattctttgaagcagttttccttttcatggcatgagtttgaagtagaaaataatgcagaggcctaatcatccatctttactttcagatgcctgaaaactaccgttaatctca

SEQ ID NO: 176707 - DNA, 120 bp, Artificial Sequence
  ENSG00000110172_62 (sequence is synthesized)
ttactactggtcaatttttaatgcatttgatttagatgacatatttgtgaaagtagtcttaaaaaagcgtttgctcattgtgcaatagagttgtacagattcttcatacttgccttctga

SEQ ID NO: 176708 - DNA, 120 bp, Artificial Sequence
  ENSG00000110172_63 (sequence is synthesized)
taaccagactctgtattcccacacatgtatattgagtacctttgttgaaccaggtcttcttcgtgctacacttgagtactaaattgttttagaagcaaactacaggacttaaaaaaaggt

SEQ ID NO: 176709 - DNA, 120 bp, Artificial Sequence
  ENSG00000110172_64 (sequence is synthesized)
gatttttttttttttttttggctgcaagtaggcacttattgtaatttttattcatgctatgaactcatgattttccctttattctcctttgatcctacttaaataaatttatagagtatt

SEQ ID NO: 176710 - DNA, 120 bp, Artificial Sequence
  ENSG00000110172_65 (sequence is synthesized)
gaataatatagaaccaagataagaaccctaagagactttagatgtttatttgttcattagcactctgagtacagattattgctaaggaaactactcaggatgattttattctctctccat

SEQ ID NO: 176711 - DNA, 120 bp, Artificial Sequence
  ENSG00000110172_66 (sequence is synthesized)
cttcatagttagaggagaccattgaatgctttggccagtttagcagttagaaaaataattgggaaaagacaaaacttcagtcatggctcattcttaatctctttagtaatataatacagt

SEQ ID NO: 176712 - DNA, 120 bp, Artificial Sequence
  ENSG00000110172_67 (sequence is synthesized)
ctgtactataatagtatgagttaattttttctttaaatgatgggctgttattttacttaaagggcagtgagaggccaggcactgtggctcaagcccataatccagcactttgagaagcct

SEQ ID NO: 176713 - DNA, 120 bp, Artificial Sequence
  ENSG00000110172_68 (sequence is synthesized)
aggagggaggatcctttgagcctaggagtttgagaaccaatctgaaagagatcctgtctctccaaaaaaaataaattagctgggtttggtggtgtgctcatgtagttgcagctactcagg

SEQ ID NO: 176714 - DNA, 120 bp, Artificial Sequence
  ENSG00000110172_69 (sequence is synthesized)
ctgaggcaggaggatcttgagattgactttttgaaaaaaaaggacaaaggcagtgagatgagaaaaactaaatattttatcctaaattcatttggtggtattataacaattatgaggata

SEQ ID NO: 176715 - DNA, 120 bp, Artificial Sequence
  ENSG00000110172_70 (sequence is synthesized)
tcagtttttacatacttttcttttttttaagaagaaaagtccctctcttacccaggctgtaatgcagtggcattatagctcactgcagcctttaactcctgggctcaagccatcctcctc

SEQ ID NO: 176716 - DNA, 120 bp, Artificial Sequence
  ENSG00000110172_71 (sequence is synthesized)
cctccctaaccctccccggaactataggtgtatgctactatgactgtattagtccattttcacagttacgaagaaacacccgagactaagtgatttataaagaaaaagaggtttaatgaa

SEQ ID NO: 176717 - DNA, 89 bp, Artificial Sequence
  ENSG00000110172_72 (sequence is synthesized)
gggaggcctcacaatcatggcagaaggtagagcgagtaataaaggaatgttttacatggtggcaggcaagaaaaaaaccatcagaactt

SEQ ID NO: 176718 - DNA, 120 bp, Artificial Sequence
  ENSG00000110172_73 (sequence is synthesized)
tatcatgagaacagcatgggaaaaaggcatccccatgatccagttacctcccactaggtctgtcacacaccatgtggagattaggggagctagaattcaagatgagatttggttggtgac

SEQ ID NO: 176719 - DNA, 120 bp, Artificial Sequence
  ENSG00000110172_74 (sequence is synthesized)
tgacacagggaaaccatatcagtgaccgactaatattttttattattttgcggagacagggttccactttgttgcccaggcttcaagcagtcctcttgcctcagcctcccaaagtgttgg

SEQ ID NO: 176720 - DNA, 120 bp, Artificial Sequence
  ENSG00000110172_75 (sequence is synthesized)
atgggcataagcgaccatgccttgcctatgtacttttaaaatgcctcttttgtcagttttttcatcgaggatatagaatgaatagcctacgatttttatttttattgctgtgtttattaa

SEQ ID NO: 176721 - DNA, 120 bp, Artificial Sequence
  ENSG00000110172_76 (sequence is synthesized)
tatgtttaatacttatttattgagtggacttaaattatgtatacaacacttagccattatgaaatgttagaagatgttgttttttaaaccctactgaaattgccttgcaatacgatcgta

SEQ ID NO: 176722 - DNA, 120 bp, Artificial Sequence
  ENSG00000110172_77 (sequence is synthesized)
acttatatttcatgtttattatgtgctcagcattgagcttgggcatgggatgtaaaagtacattatggtcccttcctcagcattactcatcttgaaaaccttggattcctagtctttatt

SEQ ID NO: 176723 - DNA, 120 bp, Artificial Sequence
  ENSG00000110172_78 (sequence is synthesized)
cctttctcgttagtgcaactgattaatacttaaatatgctgacaatagcgtgattatttgagacttactattctaatataaggagcttttctgttaagacagaatgtagatacattgtaa

SEQ ID NO: 176724 - DNA, 120 bp, Artificial Sequence
  ENSG00000110172_79 (sequence is synthesized)
caattatttataaaataccttttaaccttttaatgggaatcatttgatacacaaagcatttggcttctcagaaagcttttaaggttattaatttggagtacaaagaaatattttggtata

SEQ ID NO: 176725 - DNA, 120 bp, Artificial Sequence
  ENSG00000110172_80 (sequence is synthesized)
ttaataatggtaataaggtttcaaaattctccagcccagatgaaccaatgacaaatttggaattaaaaatatctgcctccctaaaacaagcacttgataaacttaaactgtcatcaggga

SEQ ID NO: 176726 - DNA, 120 bp, Artificial Sequence
  ENSG00000110172_81 (sequence is synthesized)
atgaagaaaataagaaaggtaagattttattttgttttattgttaattattttctggtacagttaagcagttatccaaaagagagaatagtagtttactgcatataaatagggaaaagtc

SEQ ID NO: 176727 - DNA, 120 bp, Artificial Sequence
  ENSG00000110172_82 (sequence is synthesized)
gcacattgtagttaagaaactttttcttctaaatgtcagatatgataaactacaaatacttcagaacctaataggttaattccatatgtctttattcaaaacgagaacctatattaaatt

SEQ ID NO: 176728 - DNA, 120 bp, Artificial Sequence
  ENSG00000110172_83 (sequence is synthesized)
ttttttcttttatggttcattatttttttaagaatcagctaaatttctttgatattttaaaatgttttcttgtacattatacaaaatatattcactattctctgactttatacctggtac

SEQ ID NO: 176729 - DNA, 120 bp, Artificial Sequence
  ENSG00000110172_84 (sequence is synthesized)
catgggaggaaaacaccctttcatgatttattttacaaagttaagatactggatataacattttgttatggaaaaaattgtgtcctgcattgttgaagacaccaggtcctcaaaagaaga

SEQ ID NO: 176730 - DNA, 120 bp, Artificial Sequence
  ENSG00000110172_85 (sequence is synthesized)
agaaatgtgtcatatatcaatttggggatataagcaaatcctagtcacagtcgttttctaaaaagtattgttttctggaaaaacctagtttttaagaatgatgccacagcgaagttctat

SEQ ID NO: 176731 - DNA, 120 bp, Artificial Sequence
  ENSG00000110172_86 (sequence is synthesized)
gctttaagcgtatactccactaaagacaaagaaaagacagtagatgatgatcttaaggtcttttccagttataaaattgtattttaattctgggtttttttttttttttttgagatggag

SEQ ID NO: 176732 - DNA, 120 bp, Artificial Sequence
  ENSG00000110172_87 (sequence is synthesized)
agaccaaggtcttcttcgtgctacacttgagtactaaattgttttagaagcaaactacaggacttaaaaaaaggtgatttttttttttttttttggctgcaagtaggcacttattgtaat

SEQ ID NO: 176733 - DNA, 120 bp, Artificial Sequence
  ENSG00000110172_88 (sequence is synthesized)
gccctttgggccggagggtgtccgcggatctcctgcagccgtcctcgcgcggccccaggtccatgcccctcctgggcctcccttggctgcccgcgcagcccgccggccgcccctctgttg

SEQ ID NO: 176734 - DNA, 120 bp, Artificial Sequence
  ENSG00000110172_89 (sequence is synthesized)
cgtcgtccccgcactccttttaagtcgcctggaatttagaacgaacacgtttctcctctggccctccagtctctggggaagcaaaaattaacgagatgcttgcacataccacccaggtgt

SEQ ID NO: 176735 - DNA, 120 bp, Artificial Sequence
  ENSG00000110195_0 (sequence is synthesized)
tggaggcctggctggtgctcacatacaataattaactgctgagtggccttcgcccaatcccaggctccactcctgggctccattcccactccctgcctgtctcctaggccactaaaccac

SEQ ID NO: 176736 - DNA, 120 bp, Artificial Sequence
  ENSG00000110195_1 (sequence is synthesized)
agctgtcccctggaataaggcaagggggagtgtagagcagagcagaagcctgagccagacggagagccacctcctctcccagggacagacatggctcagcggatgacaacacagctgctg

SEQ ID NO: 176737 - DNA, 120 bp, Artificial Sequence
  ENSG00000110195_2 (sequence is synthesized)
ctccttctagtgtgggtggctgtagtaggggaggctcagacaaggattgcatgggccaggactgagcttctcaatgtctgcatgaacgccaagcaccacaaggaaaagccaggccccgag

SEQ ID NO: 176738 - DNA, 120 bp, Artificial Sequence
  ENSG00000110195_3 (sequence is synthesized)
gacaagttgcatgagcagtgtcgaccctggaggaagaatgcctgctgttctaccaacaccagccaggaagcccataaggatgtttcctacctatatagattcaactggaaccactgtgga

SEQ ID NO: 176739 - DNA, 120 bp, Artificial Sequence
  ENSG00000110195_4 (sequence is synthesized)
cgagtgctcccccaacttggggccctggatccagcaggtggatcagagctggcgcaaagagcgggtactgaacgtgcccctgtgcaaagaggactgtgagcaatggtgggaagattgtcg

SEQ ID NO: 176740 - DNA, 120 bp, Artificial Sequence
  ENSG00000110195_5 (sequence is synthesized)
cacctcctacacctgcaagagcaactggcacaagggctggaactggacttcagggtttaacaagtgcgcagtgggagctgcctgccaacctttccatttctacttccccacacccactgt

SEQ ID NO: 176741 - DNA, 120 bp, Artificial Sequence
  ENSG00000110195_6 (sequence is synthesized)
tctgtgcaatgaaatctggactcactcctacaaggtcagcaactacagccgagggagtggccgctgcatccagatgtggttcgacccagcccagggcaaccccaatgaggaggtggcgag

SEQ ID NO: 176742 - DNA, 120 bp, Artificial Sequence
  ENSG00000110195_7 (sequence is synthesized)
gttctatgctgcagccatgagtggggctgggccctgggcagcctggcctttcctgcttagcctggccctaatgctgctgtggctgctcagctgacctccttttaccttctgatacctgga

SEQ ID NO: 176743 - DNA, 120 bp, Artificial Sequence
  ENSG00000110195_8 (sequence is synthesized)
aatccctgccctgttcagccccacagctcccaactatttggttcctgctccatggtcgggcctctgacagccactttgaataaaccagacaccgcacatgtgtcttgagaattatttgga

SEQ ID NO: 176744 - DNA, 120 bp, Artificial Sequence
  ENSG00000110195_9 (sequence is synthesized)
ggaaaggattttctcagcccccatccccagcactgtgtgttggccgcacccatgagagcctcagcactctgaaggtgcagggggcaaaggccaaaagagctctggcctgaacttgggtgg

SEQ ID NO: 176745 - DNA, 120 bp, Artificial Sequence
  ENSG00000110195_10 (sequence is synthesized)
tccctactgtgtgacttggggcatggccctcatctgtgctgaaatgattccacaaagattaaactggctatcatttgttgatttcccccttcttacatttaatccttgcaggagaaagct

SEQ ID NO: 176746 - DNA, 120 bp, Artificial Sequence
  ENSG00000110195_11 (sequence is synthesized)
aagcctcaagatagtttgcttctctttcccccaaggccaaggagaaggtggagtgagggctggggtcgggacaggttgaacgggaaccctgtgctctaaacagttagggtttgttcccgc

SEQ ID NO: 176747 - DNA, 120 bp, Artificial Sequence
  ENSG00000110195_12 (sequence is synthesized)
actaaaccacagctgtcccctggaataaggcaagggggagtgtagagcagagcagaagcctgagccagacggagagccacctcctctcccaggaactgaacccaaaggatcacctggtat

SEQ ID NO: 176748 - DNA, 120 bp, Artificial Sequence
  ENSG00000110200_0 (sequence is synthesized)
gggcgggagcggggaaaacaaaaggagacgaaggacgcatgcgtttggtgagtcccggattctggtgggttcttccgctcaggctgggtgaagcgcttccgggtcgccgccggcagcagc

SEQ ID NO: 176749 - DNA, 120 bp, Artificial Sequence
  ENSG00000110200_1 (sequence is synthesized)
ctcccggcgcgatgaagacactgaggctcagagaggttaagtgactcagccaaggtcaaacagctagtaagtggtggagccaggactcaaagccagtctaggagccatgtccactttgtt

SEQ ID NO: 176750 - DNA, 120 bp, Artificial Sequence
  ENSG00000110200_2 (sequence is synthesized)
cccctcactcttccctcgtgtgactgagactctgtggtttaatctggatcgaccctgtgtggaagagacagagctgcagcagcaggaacagcagcatcaggcctggctccaaagcatcgc

SEQ ID NO: 176751 - DNA, 120 bp, Artificial Sequence
  ENSG00000110200_3 (sequence is synthesized)
cactatgatgacgaggaagaagaggatgatgaagatgatgaggatagtgaagaggactcagaggatgatgaggatatgcaggacatggacgagatgaatgactacaatgagtcaccggat

SEQ ID NO: 176752 - DNA, 120 bp, Artificial Sequence
  ENSG00000110200_4 (sequence is synthesized)
gatggagaggtcaatgaggtggacatggaaggcaacgaacaggatcaggaccagtggatgatctaggtagacaaggcagggtggcctcagggagattccaggccagcccaaactaccctg

SEQ ID NO: 176753 - DNA, 120 bp, Artificial Sequence
  ENSG00000110200_5 (sequence is synthesized)
catcccaacccccaacccctgcccacagaaccagctgatggccccagtgcctgaaagtgcccttgggcacctcctcagctgctgccaggatctggtctctttggcccctcccaggccatc

SEQ ID NO: 176754 - DNA, 120 bp, Artificial Sequence
  ENSG00000110200_6 (sequence is synthesized)
agtctgcacttgaaatccccagggcctgaaacctactccaccttcctggccagtacctcaccccttgattgccaggtctggtctaagtttctttaataaagacaaaggagtgattttcca

SEQ ID NO: 176755 - DNA, 120 bp, Artificial Sequence
  ENSG00000110200_7 (sequence is synthesized)
acttcttggacatgagggtgtttaccgtcgtgcctaattacgcgggttgggaatctgagatacagggaagggcagcggctggccctgggtcggtcagataaattaagacaaaagcaggac

SEQ ID NO: 176756 - DNA, 120 bp, Artificial Sequence
  ENSG00000110200_8 (sequence is synthesized)
caggcatcgattattttctcctgctcatccctttcacggaggaattctaagccccgacacactgtatgacctaaagccagtctctgcctgtcgctgggcctcagttcgcctgtcctaagt

SEQ ID NO: 176757 - DNA, 120 bp, Artificial Sequence
  ENSG00000110200_9 (sequence is synthesized)
gcgacggtgggttgggctttcggagccgagatcgctggtctgtcagtacttcttggacatgaggatgaagacactgaggctcagagaggttaagtgactcagccaaggtcaaacagctag

SEQ ID NO: 176758 - DNA, 120 bp, Artificial Sequence
  ENSG00000110200_10 (sequence is synthesized)
ccctggagctctcccatccagcttccttcgtgttaagagagaagattaaatctcagagcaagggaagtctggaaggccagtgtggtggaggcggcagcggtagcggccacagctcttagc

SEQ ID NO: 176759 - DNA, 120 bp, Artificial Sequence
  ENSG00000110200_11 (sequence is synthesized)
acttcctgtcacccagcatttctttcagttaattggtcctacccaggccccgcttttttcgcgtttagcaaccctataaggccaaatttctgtctgagacccgccctgctttctttctgt

SEQ ID NO: 176760 - DNA, 120 bp, Artificial Sequence
  ENSG00000110200_12 (sequence is synthesized)
ttcatgccacatgtgtatatgtggctggctttgcccttcccacccccatcgccatctgcctggccaactcagaacttccagattcagttcaaatgttgctctttctccatgaagtcccag

SEQ ID NO: 176761 - DNA, 120 bp, Artificial Sequence
  ENSG00000110200_13 (sequence is synthesized)
gcagaaacaaccaccctatctttcagatttatgaaaggtctctgttagaatttgtagtttcattccccttttattgctcatcaaatgtatttctgatcttggaattggatgaacttttat

SEQ ID NO: 176762 - DNA, 78 bp, Artificial Sequence
  ENSG00000110200_14 (sequence is synthesized)
ttatttatttttgagaccaacggctcactgcagccttgaccacccaggctcaggcaatcctcccacctcagcatttcc

SEQ ID NO: 176763 - DNA, 120 bp, Artificial Sequence
  ENSG00000110200_15 (sequence is synthesized)
gcctctcaaagtgctgggattacaggcaccagccaccacacagccgaatttcttaaataagaccctaaaagcacttatgctgggattgagataaatccaggcagacagctaccctaaatg

SEQ ID NO: 176764 - DNA, 120 bp, Artificial Sequence
  ENSG00000110200_16 (sequence is synthesized)
agataaatccaggcagacagctaccctaaatggtatgtggaagcctccatggtggagaggaaagatgtggagacagataattacaaagctatgggttatctgctgagatggttattccac

SEQ ID NO: 176765 - DNA, 120 bp, Artificial Sequence
  ENSG00000110200_17 (sequence is synthesized)
tgtgtattatggttcctttgaggccagcatttgtggctcattcatctctgtggcctctacccctctccctggcacctagcacattcctaatacaaaagaggtggcaataaatgtttgctg

SEQ ID NO: 176766 - DNA, 120 bp, Artificial Sequence
  ENSG00000110203_0 (sequence is synthesized)
agagcctggacctacagcgctgttggtggaggtcctgcctccaggaatagatggacatggcctggcagatgatgcagctgctgcttctggctttggtgactgctgcggggagtgcccagc

SEQ ID NO: 176767 - DNA, 120 bp, Artificial Sequence
  ENSG00000110203_1 (sequence is synthesized)
ccaggagtgcgcgggccaggacggacctgctcaatgtctgcatgaacgccaagcaccacaagacacagcccagccccgaggacgagctgtatggccagtgcagtccctggaagaagaatg

SEQ ID NO: 176768 - DNA, 120 bp, Artificial Sequence
  ENSG00000110203_2 (sequence is synthesized)
cctgctgcacggccagcaccagccaggagctgcacaaggacacctcccgcctgtacaactttaactgggatcactgtggtaagatggaacccacctgcaagcgccactttatccaggaca

SEQ ID NO: 176769 - DNA, 120 bp, Artificial Sequence
  ENSG00000110203_3 (sequence is synthesized)
atgagtgctcacccaacctggggccctggatccggcaggtcaaccagagctggcgcaaagagcgcattctgaacgtgcccctgtgcaaagaggactgtgagcgctggtgggaggactgtc

SEQ ID NO: 176770 - DNA, 120 bp, Artificial Sequence
  ENSG00000110203_4 (sequence is synthesized)
gcacctcctacacctgcaaaagcaactggcacaaaggctggaattggacctcagggattaatgagtgtccggccggggccctctgcagcacctttgagtcctacttccccactccagccg

SEQ ID NO: 176771 - DNA, 120 bp, Artificial Sequence
  ENSG00000110203_5 (sequence is synthesized)
ccctttgtgaaggcctctggagccactccttcaaggtcagcaactatagtcgagggagcggccgctgcatccagatgtggtttgactcagcccagggcaaccccaatgaggaggtggcca

SEQ ID NO: 176772 - DNA, 120 bp, Artificial Sequence
  ENSG00000110203_6 (sequence is synthesized)
agttctatgctgcggccatgaatgctggggccccgtctcgtgggattattgattcctgatccaagaagggtcctctggggttcttccaacaacctattctaatagacaaatccacatgtg

SEQ ID NO: 176773 - DNA, 120 bp, Artificial Sequence
  ENSG00000110203_7 (sequence is synthesized)
tggacgccctgccccctcccacagctctggtccccttcaagggtaaagctgctgagatacgtggctgacaggagtattctgtctcctccccactcaggtcaaccagagctggcgcaaaga

SEQ ID NO: 176774 - DNA, 120 bp, Artificial Sequence
  ENSG00000110203_8 (sequence is synthesized)
aggaaaagcagcaaaccagatggagaaggaaggccaaaaagataagtagaaagctggaccatgagctccttgagggcagggactgaatggttactatgtccccagggcccagcatgacct

SEQ ID NO: 176775 - DNA, 120 bp, Artificial Sequence
  ENSG00000110203_9 (sequence is synthesized)
tctcctggattcctcatcttccttctgtgacctgtgtctccatcagtttctcctccggcatctttttcttacaggattcttacctcaggaatagatggacatggcctggcagatgatgca

SEQ ID NO: 176776 - DNA, 120 bp, Artificial Sequence
  ENSG00000110203_10 (sequence is synthesized)
ctcctcaagggccctccccaggaagtgttcctctggatgacctacctggggcagaggagccagaatatggaggagatggctgtggtggggagagacttagtcctgtgtcttccccaccca

SEQ ID NO: 176777 - DNA, 120 bp, Artificial Sequence
  ENSG00000110203_11 (sequence is synthesized)
acagcagagatctgggcctgggagggagagagtacacaatcacatggctgttgcccctgtctcaggccttgtctacctctgactgtggctctctggcaggaatagatggacatggcctgg

SEQ ID NO: 176778 - DNA, 120 bp, Artificial Sequence
  ENSG00000110218_0 (sequence is synthesized)
gtacttggtttccccgcatggttccggaagagcgcggcgcagctggctgtgagcgcagggctatcccggcggccgcttcggcagccagggcggcgcggaggggcagggccagagggaagc

SEQ ID NO: 176779 - DNA, 120 bp, Artificial Sequence
  ENSG00000110218_1 (sequence is synthesized)
gctttgttccgcgcgtggttcccgcgcctgggggtgcgcgggagaggcgcgaatccgagtgccgcgcgcggcccggggacttgcacgggcgtgcggggtggaaccgcaggaagcggagct

SEQ ID NO: 176780 - DNA, 120 bp, Artificial Sequence
  ENSG00000110218_2 (sequence is synthesized)
ctcgggttcccgccccgccccgccccgccggcggcggaggcagcgagcgcgagagcccagcggagtcgctgggagcctgaggcaccgagacacaaaggcaggcgggatgcgggagcaggc

SEQ ID NO: 176781 - DNA, 120 bp, Artificial Sequence
  ENSG00000110218_3 (sequence is synthesized)
aaagggaaagcgaaagccgcgcgcccggccggtgactgggtgaaggcgccgcgcagctttcccgacgccggctgtacccggacctcctggtcgagcctggcgcgccgcagccatggccat

SEQ ID NO: 176782 - DNA, 120 bp, Artificial Sequence
  ENSG00000110218_4 (sequence is synthesized)
cgctcaactggccacggagtacgtgttctcggatttcttgctgaaggagcccacggagcccaagttcaaggggctgcgactggagctggctgtggacaagatggtcacgtgcattgcggt

SEQ ID NO: 176783 - DNA, 120 bp, Artificial Sequence
  ENSG00000110218_5 (sequence is synthesized)
ggggctgcccctgctgctcatctcgctggccttcgcgcaggagatctcgattggtacacagataagctgtttctctccaagttctttctcctggcgtcaggctgcctttgtggattcata

SEQ ID NO: 176784 - DNA, 120 bp, Artificial Sequence
  ENSG00000110218_6 (sequence is synthesized)
ttgctgggcggctgttcagcagaagaactcactgcagagcgagtctggaaacctcccactgtggctgcataagtttttcccctacatcctgctgctctttgcgatcctcctgtacctgcc

SEQ ID NO: 176785 - DNA, 120 bp, Artificial Sequence
  ENSG00000110218_7 (sequence is synthesized)
cccgctgttctggcgtttcgcagctgctcctcatatttgctcagacttgaagtttatcatggaagaacttgacaaagtttacaaccgtgcaattaaggctgcaaagagtgcgcgtgacct

SEQ ID NO: 176786 - DNA, 120 bp, Artificial Sequence
  ENSG00000110218_8 (sequence is synthesized)
tgacatgagagatggagcctgctcagttccaggtgttaccgagaacttagggcaaagtttgtgggaggtatctgaaagccacttcaagtacccaattgtggagcagtacttgaagacaaa

SEQ ID NO: 176787 - DNA, 120 bp, Artificial Sequence
  ENSG00000110218_9 (sequence is synthesized)
gaaaaattctaataatttaatcatcaagtacattagctgccgcctgctgacactcatcattatactgttagcgtgtatctacctgggctattacttcagcctctcctcactctcagacga

SEQ ID NO: 176788 - DNA, 120 bp, Artificial Sequence
  ENSG00000110218_10 (sequence is synthesized)
gtttgtgtgcagcatcaaatcagggatcctgagaaacgacagcaccgtgcccgatcagtttcagtgcaaactcattgccgtgggcatcttccagttgctcagtgtcattaaccttgtggt

SEQ ID NO: 176789 - DNA, 120 bp, Artificial Sequence
  ENSG00000110218_11 (sequence is synthesized)
cttttgatgttctgcatttcaaatctgaagggtacaacgatttgagcctctacaatctcttcttggaggaaaatataagtgaggtcaagtcatacaagtgtcttaaggtactggagaata

SEQ ID NO: 176790 - DNA, 120 bp, Artificial Sequence
  ENSG00000110218_12 (sequence is synthesized)
ttaagagcagtggtcaggggatcgacccaatgctactcctgacaaaccttggcatgatcaagatggatgttgttgatggcaaaactcccatgtctgcagagatgagagaggagcagggga

SEQ ID NO: 176791 - DNA, 120 bp, Artificial Sequence
  ENSG00000110218_13 (sequence is synthesized)
accagacggcagagctccaaggtatgaacatagacagtgaaactaaagcaaataatggagagaagaatgcccgacagagacttctggattcttcttgctgatgatttttttccttgagct

SEQ ID NO: 176792 - DNA, 120 bp, Artificial Sequence
  ENSG00000110218_14 (sequence is synthesized)
gtaaatctgtgacttctgcgacatgggatttaatttggctaaagcacccctgttggtttcacagctggtttgcaataaatggttcttggtggagatactgagcatgtcttattgagtccc

SEQ ID NO: 176793 - DNA, 120 bp, Artificial Sequence
  ENSG00000110218_15 (sequence is synthesized)
taatggaaatggtgatcaacaaaaggttatggaagaatggtttatgaacttcccataggaagcacctgagagatagtaaactgcagcaagtaactatgtgtaagtcctcatcaaatgaaa

SEQ ID NO: 176794 - DNA, 120 bp, Artificial Sequence
  ENSG00000110218_16 (sequence is synthesized)
agcagaaagacaagaacaattagtcaagagcagtagccctgtcagagcctcggagcaatacctttctgtacccgtggtgagacaagacccagagctactggaaaacaagcactttggaag

SEQ ID NO: 176795 - DNA, 120 bp, Artificial Sequence
  ENSG00000110218_17 (sequence is synthesized)
atttgttttgttttcatggaataataatatgtcagggtataatttaacgtgagtttcttatgtgcccttaaagactgttagacaagaaaagcattcactggctaataatccataggtcga

SEQ ID NO: 176796 - DNA, 120 bp, Artificial Sequence
  ENSG00000110218_18 (sequence is synthesized)
cctatgtcctaagttaggtgtaaggtccgatgccttggcccacactcgagctctctttacattgttagttgtcaaccttggctgatggaaatcccgtaaccactatttgttgcactgtgc

SEQ ID NO: 176797 - DNA, 120 bp, Artificial Sequence
  ENSG00000110218_19 (sequence is synthesized)
cttgaagggcagcaggcccaagtgctgctctgactgaaaactgagttaacaagatgaaatctaaaggatattcacagtgacttcaattcaggaagaatgcttccaaaagagcccagtggg

SEQ ID NO: 176798 - DNA, 120 bp, Artificial Sequence
  ENSG00000110218_20 (sequence is synthesized)
gaaatctgacatcacagaagacattaattcagtcactttcaaagagtttgtctacaggcggtttctctgttatcaaaggcatttgaaataggattttacttaaacaataatggaacacag

SEQ ID NO: 176799 - DNA, 120 bp, Artificial Sequence
  ENSG00000110218_21 (sequence is synthesized)
gagtatttaaagtgaagaacactttgcctgaatgtgatcagggcacataagtgacattggcatgcttcatatggcgtgcttggagccagaaaaacttagcggtttattttgtttatattt

SEQ ID NO: 176800 - DNA, 120 bp, Artificial Sequence
  ENSG00000110218_22 (sequence is synthesized)
aagcacagctttaaaaaattcattatcgtttattcagtgtccgaattgaggccatttgggaagaaaattctagcactggtggagaattatagaataaagattataaatggttggataaga

SEQ ID NO: 176801 - DNA, 120 bp, Artificial Sequence
  ENSG00000110237_0 (sequence is synthesized)
aaaagggtgccaggagcgagcagccaagggcgttgggcaggcggacgcagagtcgaggaaccaagcgctgggatcccgcccaggcggtgccgcggtgcccctggtcgctccagccgcggc

SEQ ID NO: 176802 - DNA, 120 bp, Artificial Sequence
  ENSG00000110237_1 (sequence is synthesized)
gggggctgggcctgggggtcggcgctgaggcgggaggggccgcccgggatggagacgttgcggccggtggccacagaaacttgagccgcggcagagaaacctctgctccggtctctgcgt

SEQ ID NO: 176803 - DNA, 120 bp, Artificial Sequence
  ENSG00000110237_2 (sequence is synthesized)
cctcttcccacactcccgtgcgctgctttcggcgtgggccgctgcgctcctagggagtgggggcgcagggggggttggccgcggctgcccgaggccagcccccccggagtgagttacgcc

SEQ ID NO: 176804 - DNA, 120 bp, Artificial Sequence
  ENSG00000110237_3 (sequence is synthesized)
actatggcggacggggcaccccggccccagctttaccgcagcgtctcgttcaagctgctggagcgctggagcggcggccccgggctgagggaggaggacacggacacccccggcttgagg

SEQ ID NO: 176805 - DNA, 120 bp, Artificial Sequence
  ENSG00000110237_4 (sequence is synthesized)
ctgagggaggaggacacggacacccccggcttgaggcgacgcgcctcgtgccggccgaccacggctgcccggggccagccctctcggcgcgtgtccaagctggcgtctgggcccctggcc

SEQ ID NO: 176806 - DNA, 120 bp, Artificial Sequence
  ENSG00000110237_5 (sequence is synthesized)
ccgtcggttcgccagctctcccggcgcttcgacgcgccgcgtctggacgacggctccgctgggacccgagacggaggcgtcttacccgcggccgcggaagaagcggccgagggcccagcg

SEQ ID NO: 176807 - DNA, 120 bp, Artificial Sequence
  ENSG00000110237_6 (sequence is synthesized)
cgaggagcctggcccagcgtcaccgagatgcgcaagctcttcggcggtcctggctccaggaggcccagcgccgactctgaatccccaggaacgcccagccccgacggtgccgcgtgggag

SEQ ID NO: 176808 - DNA, 120 bp, Artificial Sequence
  ENSG00000110237_7 (sequence is synthesized)
cctccggctcgggagtcgcggcagccaccgacgccaccccctcggacatgcttccccctggcgggtctgcgttcggcgcggcccctgaccgggccggagaccgaagggaggctgcgccgg

SEQ ID NO: 176809 - DNA, 120 bp, Artificial Sequence
  ENSG00000110237_8 (sequence is synthesized)
ccgcagcagcaacaggagcgggcgcagcgtccagcggatggtttacattcttggcatatcttctcccaaccgcaggccggggcccgggcctcctgctcctcctcctccatcgccgcctcc

SEQ ID NO: 176810 - DNA, 120 bp, Artificial Sequence
  ENSG00000110237_9 (sequence is synthesized)
tatcctgtcagccgcagtcgtgctgccagctccagcgaggaggaagaggagggcccgccgcagctgcctggagcccagagtccggcctaccacggcggccactcctcgggcagtgacgac

SEQ ID NO: 176811 - DNA, 120 bp, Artificial Sequence
  ENSG00000110237_10 (sequence is synthesized)
gaccgagacggtgagggcggccaccgctggggagggaggcccgggctcaggcctggaagctccctattggatcaggactgcaggcctgacagtgatgggttaaatctaagcagcatgaac

SEQ ID NO: 176812 - DNA, 120 bp, Artificial Sequence
  ENSG00000110237_11 (sequence is synthesized)
tcagcaggggtttctgggagccctgagcccccaacatctccaagagcccctagagaagaaggactccgggagtggggtagtggctctccgccctgcgtcccaggtccccaggagggactt

SEQ ID NO: 176813 - DNA, 120 bp, Artificial Sequence
  ENSG00000110237_12 (sequence is synthesized)
cggcctatgtctgactctgtgggaggagctttccgtgtggccaaggtgagctttccctcgtacctggccagccccgcaggctcccgcggtagcagccgttattccagcacggagaccctc

SEQ ID NO: 176814 - DNA, 120 bp, Artificial Sequence
  ENSG00000110237_13 (sequence is synthesized)
aaggacgacgacctatggtctagtaggggttctgggggctggggcgtgtaccgctcccctagctttggagctggggaagggctcctgcggtcccaggctcgaacccgtgccaaaggacct

SEQ ID NO: 176815 - DNA, 120 bp, Artificial Sequence
  ENSG00000110237_14 (sequence is synthesized)
ggaggcacctctagggcattgagggatggaggatttgagcctgaaaagagtcgacagcggaagtccctgtcaaatccagatatcgcctcagagaccctgacgcttctcagtttcctgcgc

SEQ ID NO: 176816 - DNA, 120 bp, Artificial Sequence
  ENSG00000110237_15 (sequence is synthesized)
tcagacctttcagagctgagggtccgaaaacctggtgggagctccggggaccgtggaagcaaccccctagatggcagagactcaccatccgcaggtggccctgtggggcaacttgaaccc

SEQ ID NO: 176817 - DNA, 120 bp, Artificial Sequence
  ENSG00000110237_16 (sequence is synthesized)
atacccatcccagccccagcatcacctggcacgcgccccacactcaaggacttgacagccactctgcggagagcaaagtcattcacctgctctgagaagcccatggcccgccgcctgccc

SEQ ID NO: 176818 - DNA, 120 bp, Artificial Sequence
  ENSG00000110237_17 (sequence is synthesized)
cgcaccagtgctctgaagtccagctcctccgagctcctgctcacaggccctggtgccgaggaggatccgctgcccctcatcgtccaggaccaatatgtgcaggaggcccgccaggttttt

SEQ ID NO: 176819 - DNA, 120 bp, Artificial Sequence
  ENSG00000110237_18 (sequence is synthesized)
gagaagatccagcgcatgggtgcccaacaagatgatggaagcgatgccccccctggaagccctgactgggcaggggatgtgacccgagggcagcggtcccaggaggagctctcaggccct

SEQ ID NO: 176820 - DNA, 120 bp, Artificial Sequence
  ENSG00000110237_19 (sequence is synthesized)
gagtccagtctgacagatgaaggcattggggcagaccctgagcctcctgttgcagcattttgcggcctgggtaccacagggatgtggcgacctctttcctcatcctcggcccagacgaac

SEQ ID NO: 176821 - DNA, 120 bp, Artificial Sequence
  ENSG00000110237_20 (sequence is synthesized)
caccatggccctgggactgaggacagtctgggcgggtgggccctggtgtcgcctgagacccctcccacaccaggtgccctccgccgacgacgcaaagtcccaccttcaggttctggtggg

SEQ ID NO: 176822 - DNA, 120 bp, Artificial Sequence
  ENSG00000110237_21 (sequence is synthesized)
agcgaattgagcaatggggaggcaggggaggcctacaggtccctgagtgacccaattcctcagcgccaccgggctgccacctctgaagagcctactgggttctctgtggacagcaacctc

SEQ ID NO: 176823 - DNA, 120 bp, Artificial Sequence
  ENSG00000110237_22 (sequence is synthesized)
ctgggctcactgagccccaagacagggctccctgccacctcagccatggatgagggcttgaccagtggtcacagtgactggtctgtgggcagtgaagagagcaagggatatcaggaggtt

SEQ ID NO: 176824 - DNA, 120 bp, Artificial Sequence
  ENSG00000110237_23 (sequence is synthesized)
attcagagcatagttcaggggcctggcaccctggggcgtgtggtggacgacaggattgctggcaaagcccccaagaagaaatccctgagtgaccccagccgccgtggggagctggctggg

SEQ ID NO: 176825 - DNA, 120 bp, Artificial Sequence
  ENSG00000110237_24 (sequence is synthesized)
cctggattcgagggccctggaggggagcccatccgagaagttgagcccatgctgcctccatccagcagcgagcccatccttgtagagcagcgggcagagccagaagaacctggtgccacc

SEQ ID NO: 176826 - DNA, 120 bp, Artificial Sequence
  ENSG00000110237_25 (sequence is synthesized)
aggagccgggcacagtctgaaagggccctacctgaggctctgcctccccctgccactgcccaccgaaactttcaccttgaccccaagctggctgacattctgtccccgaggctaatccgc

SEQ ID NO: 176827 - DNA, 120 bp, Artificial Sequence
  ENSG00000110237_26 (sequence is synthesized)
cgaggctccaagaagcgcccagctcggagtagtcaccaggagcttcggagagacgagggcagtcaggaccagactggcagcctgtctcgggcccggccctcctccagacacgttcgccat

SEQ ID NO: 176828 - DNA, 120 bp, Artificial Sequence
  ENSG00000110237_27 (sequence is synthesized)
gccagtgtgcccgccacatttatgcctattgtggtgcctgagccaccaacttctgttggtccccctgtggctgtgccagaacccataggcttccctacccgagcccatcccacgttgcag

SEQ ID NO: 176829 - DNA, 120 bp, Artificial Sequence
  ENSG00000110237_28 (sequence is synthesized)
gcaccatcgctcgaggacgtcaccaagcagtacatgctgaacctgcactccggtgaggtccctgccccagtgccagtggacatgccctgcttgcctctggctgcaccgccctctgctgag

SEQ ID NO: 176830 - DNA, 120 bp, Artificial Sequence
  ENSG00000110237_29 (sequence is synthesized)
gccaagccccctgaggcagctcggcctgcagatgagcctacccctgccagcaagtgctgcagcaagccacaggtggacatgcggaagcacgtggccatgaccctgctggacacagagcag

SEQ ID NO: 176831 - DNA, 120 bp, Artificial Sequence
  ENSG00000110237_30 (sequence is synthesized)
tcgtatgtggagtcgctgcgcaccctgatgcagggctacatgcagccgctgaagcagccagagaactccgtgctctgtgacccttcactggtggacgagatcttcgaccagatccccgag

SEQ ID NO: 176832 - DNA, 120 bp, Artificial Sequence
  ENSG00000110237_31 (sequence is synthesized)
ctcctggagcaccacgagcaattcctggagcaggttcggcactgcatgcagacctggcatgcccagcagaaggtgggagccctgctcgtccagtcgttctccaaggatgtcctagtaaac

SEQ ID NO: 176833 - DNA, 120 bp, Artificial Sequence
  ENSG00000110237_32 (sequence is synthesized)
atctattctgcctatatcgataacttcctcaatgcaaaggatgctgtgcgtgtggccaaggaggcgaggcctgcctttctcaagttcctagagcaaagcatgcgtgagaacaaggagaag

SEQ ID NO: 176834 - DNA, 120 bp, Artificial Sequence
  ENSG00000110237_33 (sequence is synthesized)
caggcgctgtctgacctcatgatcaagcctgtgcagcggatcccacgctacgagcttctggtgaaggacctcctgaagcatacacctgaggaccacccggaccatccactcctgctggag

SEQ ID NO: 176835 - DNA, 120 bp, Artificial Sequence
  ENSG00000110237_34 (sequence is synthesized)
cagcggaacatcaagcaggtggctgagcgcatcaacaagggtgtgcggagtgccgaggaggcggagcgccatgcccgtgtgctgcaggagatagaggctcacatcgagggcatggaggat

SEQ ID NO: 176836 - DNA, 120 bp, Artificial Sequence
  ENSG00000110237_35 (sequence is synthesized)
ctccaggcccctctgcggcggttcctgagacaggagatggtcattgaagtgaaggcgatcggtggcaagaaggaccggtctctcttcctgttcacggacctcatcgtctgcaccactctg

SEQ ID NO: 176837 - DNA, 120 bp, Artificial Sequence
  ENSG00000110237_36 (sequence is synthesized)
aagcgaaagtcaggctccctgcggcgcagctccatgagcctgtacacggcagccagtgtcattgacacagccagcaagtacaagatgctgtggaagctgccgctggaagacgcagacatc

SEQ ID NO: 176838 - DNA, 120 bp, Artificial Sequence
  ENSG00000110237_37 (sequence is synthesized)
atcaaaggggcatcccaagccaccaatcgggagaacatccagaaggccatcagccgccttgatgaggacctcaccaccctgggccaaatgagcaagctctctgagagccttggtttcccc

SEQ ID NO: 176839 - DNA, 120 bp, Artificial Sequence
  ENSG00000110237_38 (sequence is synthesized)
caccagagcctggacgatgcactgcgggacctctcagctgccatgcaccgggacctgtcggagaagcaggcgctgtgctacgcgctttccttcccgccaaccaagctggagctgtgcgcc

SEQ ID NO: 176840 - DNA, 120 bp, Artificial Sequence
  ENSG00000110237_39 (sequence is synthesized)
actcggcccgagggcaccgactcctacatttttgagttccctcaccctgacgcccgccttggttttgaacaggccttcgatgaggccaagaggaagctggcatccagcaaaagctgtcta

SEQ ID NO: 176841 - DNA, 120 bp, Artificial Sequence
  ENSG00000110237_40 (sequence is synthesized)
gaccctgagttcctgaaggccatccccatcatgaaaacccgcagtggcatgcagttctcctgtgcggctcccaccctgaacagctgcccggagccctcgcctgaggtatgggtctgcaac

SEQ ID NO: 176842 - DNA, 120 bp, Artificial Sequence
  ENSG00000110237_41 (sequence is synthesized)
agcgacggctacgtgggccaggtgtgcctgctgagcctgcgcgccgagccggacgtggaggcctgcatcgccgtctgttccgcccgcatcctctgcatcggggcggtgcccgggctgcag

SEQ ID NO: 176843 - DNA, 120 bp, Artificial Sequence
  ENSG00000110237_42 (sequence is synthesized)
cctcgctgccaccgggagcctcctccgtcgctgaggagtcctccagagacggcaccggagcccgccgggccggagctggacgtcgaggccgctgcagacgaggaagccgcgacgctcgcg

SEQ ID NO: 176844 - DNA, 120 bp, Artificial Sequence
  ENSG00000110237_43 (sequence is synthesized)
gagccggggccgcagccctgccttcacatctccattgcaggctcgggcttggagatgacgccgggcctcggcgagggtgacccccgcccagagctggtgccctttgacagtgactctgac

SEQ ID NO: 176845 - DNA, 120 bp, Artificial Sequence
  ENSG00000110237_44 (sequence is synthesized)
gatgagtcttcgcccagcccctcggggacgctgcagagccaggccagccggtccaccatctcctccagctttggcaatgaggagaccccgagttccaaggaggccacggcagagaccacc

SEQ ID NO: 176846 - DNA, 120 bp, Artificial Sequence
  ENSG00000110237_45 (sequence is synthesized)
agctcagaggaggagcaggagccaggcttcctgccactgtctggctcctttgggcctggtggtccctgcggcaccagcccaatggatgggagagcccttcgccgctccagccacggctcc

SEQ ID NO: 176847 - DNA, 120 bp, Artificial Sequence
  ENSG00000110237_46 (sequence is synthesized)
ttcacccggggcagccttgaggacctgctgagtgtcgaccctgaggcctaccagagctccgtgtggctgggcactgaggatggctgtgtccacgtgtaccagtcctccgacagcatccgt

SEQ ID NO: 176848 - DNA, 120 bp, Artificial Sequence
  ENSG00000110237_47 (sequence is synthesized)
gaccgcaggaacagcatgaagctccagcatgcggcctctgtgacctgcatcttgtatctgaataaccaggtgtttgtgtctctggccaatggagagcttgtggtctaccaaagggaagca

SEQ ID NO: 176849 - DNA, 120 bp, Artificial Sequence
  ENSG00000110237_48 (sequence is synthesized)
ggccatttctgggacccccagaacttcaaatcagtgaccttgggcacccaggggagccccatcaccaagatggtatctgtgggtgggcggctgtggtgtggctgccagaaccgagtcctt

SEQ ID NO: 176850 - DNA, 120 bp, Artificial Sequence
  ENSG00000110237_49 (sequence is synthesized)
gtcctgagccctgacacgctgcagctggagcacatgttttacgtgggtcaggattcaagccgctgcgtggcttgcatggtggactccagcctgggtgtgtgggtgacattgaaaggtagt

SEQ ID NO: 176851 - DNA, 120 bp, Artificial Sequence
  ENSG00000110237_50 (sequence is synthesized)
gcccacgtgtgtctctaccatccagacacctttgagcagctggcagaagtagacgtcactcctcccgtgcacaggatgctggcaggctcggatgccatcatccggcagcacaaggctgcc

SEQ ID NO: 176852 - DNA, 120 bp, Artificial Sequence
  ENSG00000110237_51 (sequence is synthesized)
tgtctgcgaatcacagcgctgctggtgtgtgaggagctgctgtgggtgggcaccagtgctggtgtcgtcctcaccatgcccacttcgcccggtactgtcagctgcccacgggcaccactc

SEQ ID NO: 176853 - DNA, 120 bp, Artificial Sequence
  ENSG00000110237_52 (sequence is synthesized)
agtcccacaggcctcggccagggacacaccggccacgtccgcttcttggctgcagtccagctgccagatggcttcaacctgctctgcccaaccccaccacctcccccagacacaggcccc

SEQ ID NO: 176854 - DNA, 120 bp, Artificial Sequence
  ENSG00000110237_53 (sequence is synthesized)
gagaagctgccatcactggagcaccgggactccccttggcaccgaggccccgcccctgccaggcctaaaatgctggttatcagtggaggtgatggctatgaggacttccgactcagcagt

SEQ ID NO: 176855 - DNA, 120 bp, Artificial Sequence
  ENSG00000110237_54 (sequence is synthesized)
gggggcggcagcagcagtgagactgtgggtcgagacgacagcacaaaccacctcctcctgtggagggtgtgaccctgtctgccgtggcccaggactcgcccgcccacctgccttcagcct

SEQ ID NO: 176856 - DNA, 120 bp, Artificial Sequence
  ENSG00000110237_55 (sequence is synthesized)
gcttgcctctccctagcccacacgcagactttgaccaggagtatccagccaggggcacacatgtgcctgcgtgggctctgccttgtcttcgcggaagcattcctgatggaacacccactg

SEQ ID NO: 176857 - DNA, 120 bp, Artificial Sequence
  ENSG00000110237_56 (sequence is synthesized)
gccagccaggccatggcttctcccgaccctctggctgccccggtgcttccagtcatgatcgggtgggggacatgtgggctgaccaggacctctgaccctggagcttctaccaaagacaca

SEQ ID NO: 176858 - DNA, 120 bp, Artificial Sequence
  ENSG00000110237_57 (sequence is synthesized)
gctgggtctggaccccacggggctggggagggccatgtgcaatatttggagggttttctggagggcagcaggaaggctggggaattccccatgtacagtatttatgtttctttttagatg

SEQ ID NO: 176859 - DNA, 120 bp, Artificial Sequence
  ENSG00000110237_58 (sequence is synthesized)
tgtaccttcccaagcacttatttatgcagtgacctggtcacctggggtgggggtgatttgaggaaatgacatgaggaaaagaaacctattcctgccctggggaccaccctgggactctaa

SEQ ID NO: 176860 - DNA, 120 bp, Artificial Sequence
  ENSG00000110237_59 (sequence is synthesized)
ccaagccttcctggagggacccatgcgcccctgagccccattccattcatacagacacacacgtacgcacactgcatgtccaaggccctaaacattgcccgttgacataaactttccagg

SEQ ID NO: 176861 - DNA, 120 bp, Artificial Sequence
  ENSG00000110237_60 (sequence is synthesized)
gccccagcctgatggggctgccctcagtcctctagatcaagatgctgactattagggggcagtgattgccatctggggacctgtcaggctttgtcatttcccagtttgttggtggtgcct

SEQ ID NO: 176862 - DNA, 120 bp, Artificial Sequence
  ENSG00000110237_61 (sequence is synthesized)
ttagtggttccctaatttgggaacactgatggggccttggacagggctttctctcaggtaggagaaatgggcccatgatctcctcacagtcgcccccagtccttggccctgcttccctgt

SEQ ID NO: 176863 - DNA, 120 bp, Artificial Sequence
  ENSG00000110237_62 (sequence is synthesized)
gtctcatgcactggcacatatggtcaccttggagggcagacctaggagcccctctgaccactgaatccgtctccacaccccttctgccaagggaagccccttcaggaaggaccccccaaa

SEQ ID NO: 176864 - DNA, 120 bp, Artificial Sequence
  ENSG00000110237_63 (sequence is synthesized)
gctgaggggctgaatgtagccttttcaacagagaaggctcccacttgagagcagcctctacctgaccccctggaccacagagagccactctgaccctcagccccctcgcttcttcagcta

SEQ ID NO: 176865 - DNA, 120 bp, Artificial Sequence
  ENSG00000110237_64 (sequence is synthesized)
aaactccaaaggtttggtttcagatggggtttgttttgttctgtttggttttggttttgtttggggtgggtgggtcattgcggtcttagattatgtttctcttgctaccaaacagtcatg

SEQ ID NO: 176866 - DNA, 120 bp, Artificial Sequence
  ENSG00000110237_65 (sequence is synthesized)
tattaactctctttggatgatgaagtttaaagagtcaataaatagaaacaccagatgactgcattggtggccacagtggcctcctgtcagcaacctcagggctcagtctccctggccaca

SEQ ID NO: 176867 - DNA, 120 bp, Artificial Sequence
  ENSG00000110237_66 (sequence is synthesized)
tgggccttccgacgtccacacacttgggaagaagggaggccttggagacccagaagagtgctggacggcgaggttgccacgatttgctgtgttacctgggcaggtggctgggctgcagtt

SEQ ID NO: 176868 - DNA, 120 bp, Artificial Sequence
  ENSG00000110237_67 (sequence is synthesized)
tcctcatcaggaaaataaaggggttgtaccagttcagtgctttgtaaccagggttacatggtagaatcccttgcagatgacatgtaaatgcagaaacatgattcgtaacttatttacgta

SEQ ID NO: 176869 - DNA, 120 bp, Artificial Sequence
  ENSG00000110237_68 (sequence is synthesized)
ccagcgcggaggaggcagcagcgccgccggcggccgggccgcagcgctcagatcgacgctggaactgaccaccgcgaccgccactgcggctgccgccgcggccgggctgagcccttaggg

SEQ ID NO: 176870 - DNA, 120 bp, Artificial Sequence
  ENSG00000110237_69 (sequence is synthesized)
ctgacccccgccccccgccccgccgccaccccggcgcccccgccccagcggctggccggccgcatgctgcagatggtgaagaccctggcccagttcaccatcgcgctggaagacatgcgc

SEQ ID NO: 176871 - DNA, 120 bp, Artificial Sequence
  ENSG00000110237_70 (sequence is synthesized)
ctggcccagttcaccatcgcgctggaagacatgcgcgatatgggcccagccgccgcctccggggagcctgccgggggcagcagcactgacgccgaggagcctggggaggcccaggacatg

SEQ ID NO: 176872 - DNA, 120 bp, Artificial Sequence
  ENSG00000110237_71 (sequence is synthesized)
ctcatttcttctgtagctgatgaggaatacagtaagtgtcccatatacattaggaatcttattcatcctcctgcccaccctatctctcaactcaggttttagggtcctttggggatagga

SEQ ID NO: 176873 - DNA, 120 bp, Artificial Sequence
  ENSG00000110237_72 (sequence is synthesized)
caagagtcctttctgatgtcaacatccattagcattagactctggcatttattgctgcacatgtcacttgcacacatgtcagaagtatccaggggcaacgggttcccttaatttccctca

SEQ ID NO: 176874 - DNA, 120 bp, Artificial Sequence
  ENSG00000110237_73 (sequence is synthesized)
cttattccattgttggctgggcaggagtccaaagccctgggttcaggccccagctctgtgactgacttgctgtgtgacctttcccttctaggcttcagcttccccacctgtccaggggga

SEQ ID NO: 176875 - DNA, 120 bp, Artificial Sequence
  ENSG00000110237_74 (sequence is synthesized)
ccgctgctgccaattcccacaagcacaggccctcctggaaggggctggatgtggccacggaccccacccccacccatcccacctggatactgactctgtttccagatctgaccatagaac

SEQ ID NO: 176876 - DNA, 120 bp, Artificial Sequence
  ENSG00000110237_75 (sequence is synthesized)
ttggctagacattggtacttaccccagcccctgggtggacctgaacttggacactcccctaccccaaagcttggccagactctggcacggactccgaccccagccagacactgactctga

SEQ ID NO: 176877 - DNA, 120 bp, Artificial Sequence
  ENSG00000110237_76 (sequence is synthesized)
tgcatccatgtctgccagcctctgtggccacacgtctccacctgtctgttcttccacgtctgtctctgaccttgggtcctgtggcctggcagcacaagggcattgagggtgggaagcatg

SEQ ID NO: 176878 - DNA, 120 bp, Artificial Sequence
  ENSG00000110237_77 (sequence is synthesized)
gctccaggcccctctgcggcggttcctgagacaggagatggtcattgaagtgaaggcgatcggtggcaagaaggaccggtctctcttcctgttcacggacctcatcgtctgcaccactct

SEQ ID NO: 176879 - DNA, 120 bp, Artificial Sequence
  ENSG00000110237_78 (sequence is synthesized)
actaagttgggaggtgctggtgaaaccaagcttcgaaaggttaatcagaccaaggaccaacgctagtgtgagttgtgagggatggacactggtgaagctccaggctagggtgggccaagg

SEQ ID NO: 176880 - DNA, 120 bp, Artificial Sequence
  ENSG00000110237_79 (sequence is synthesized)
tgcaggtggggctcggggcccactcccctgagaatggcctttctgagcctaggaggctgtcagatgggtgtgagcaaacccctttcatggacaagggactgaggccagagagccgtgtcc

SEQ ID NO: 176881 - DNA, 120 bp, Artificial Sequence
  ENSG00000110237_80 (sequence is synthesized)
ctggcatccgtcgcctttccatgaagaacccccagcatggccattccagagaaggaggaaggcttctcccgggcaagagagaatgcagaggggccaggccaccccagggcaggcgtccct

SEQ ID NO: 176882 - DNA, 120 bp, Artificial Sequence
  ENSG00000110243_0 (sequence is synthesized)
caggcctccctccacctgtcttctcagagcaggtaatggcaagcatggctgccgtgctcacctgggctctggctcttctttcagcgttttcggccacccaggcacggaaaggcttctggg

SEQ ID NO: 176883 - DNA, 120 bp, Artificial Sequence
  ENSG00000110243_1 (sequence is synthesized)
actacttcagccagaccagcggggacaaaggcagggtggagcagatccatcagcagaagatggctcgcgagcccgcgaccctgaaagacagccttgagcaagacctcaacaatatgaaca

SEQ ID NO: 176884 - DNA, 120 bp, Artificial Sequence
  ENSG00000110243_2 (sequence is synthesized)
agttcctggaaaagctgaggcctctgagtgggagcgaggctcctcggctcccacaggacccggtgggcatgcggcggcagctgcaggaggagttggaggaggtgaaggctcgcctccagc

SEQ ID NO: 176885 - DNA, 120 bp, Artificial Sequence
  ENSG00000110243_3 (sequence is synthesized)
cctacatggcagaggcgcacgagctggtgggctggaatttggagggcttgcggcagcaactgaagccctacacgatggatctgatggagcaggtggccctgcgcgtgcaggagctgcagg

SEQ ID NO: 176886 - DNA, 120 bp, Artificial Sequence
  ENSG00000110243_4 (sequence is synthesized)
agcagttgcgcgtggtgggggaagacaccaaggcccagttgctggggggcgtggacgaggcttgggctttgctgcagggactgcagagccgcgtggtgcaccacaccggccgcttcaaag

SEQ ID NO: 176887 - DNA, 120 bp, Artificial Sequence
  ENSG00000110243_5 (sequence is synthesized)
agctcttccacccatacgccgagagcctggtgagcggcatcgggcgccacgtgcaggagctgcaccgcagtgtggctccgcacgcccccgccagccccgcgcgcctcagtcgctgcgtgc

SEQ ID NO: 176888 - DNA, 120 bp, Artificial Sequence
  ENSG00000110243_6 (sequence is synthesized)
aggtgctctcccggaagctcacgctcaaggccaaggccctgcacgcacgcatccagcagaacctggaccagctgcgcgaagagctcagcagagcctttgcaggcactgggactgaggaag

SEQ ID NO: 176889 - DNA, 120 bp, Artificial Sequence
  ENSG00000110243_7 (sequence is synthesized)
cgccatcgaccaggagactgaggaggtccagcagcagctggcgccacctccaccaggccacagtgccttcgccccagagtttcaacaaacagacagtggcaaggttctgagcaagctgca

SEQ ID NO: 176890 - DNA, 120 bp, Artificial Sequence
  ENSG00000110243_8 (sequence is synthesized)
ggcccgtctggatgacctgtgggaagacatcactcacagccttcatgaccagggccacagccatctgggggacccctgaggatctacctgcccaggcccattcccagctccttgtctggg

SEQ ID NO: 176891 - DNA, 120 bp, Artificial Sequence
  ENSG00000110243_9 (sequence is synthesized)
gagccttggctctgagcctctagcatggttcagtccttgaaagtggcctgttgggtggagggtggaaggtcctgtgcaggacagggaggccaccaaaggggctgctgtctcctgcacatc

SEQ ID NO: 176892 - DNA, 120 bp, Artificial Sequence
  ENSG00000110243_10 (sequence is synthesized)
cagcctcctgcgactccccaatctggatgcattacattcaccaggctttgcaaacccagcctcccagtgctcatttgggaatgctcatgagttactccattcaagggtgagggagtaggg

SEQ ID NO: 176893 - DNA, 120 bp, Artificial Sequence
  ENSG00000110243_11 (sequence is synthesized)
agggagaggcaccatgcatgtgggtgattatctgcaagcctgtttgccgtgatgctggaagcctgtgccactacatcctggagtttggctctagtcacttctggctgcctggtggccact

SEQ ID NO: 176894 - DNA, 120 bp, Artificial Sequence
  ENSG00000110243_12 (sequence is synthesized)
gctacagctggtccacagagaggagcacttgtctccccagggctgccatggcagctatcaggggaatagaagggagaaagagaatatcatggggagaacatgtgatggtgtgtgaatatc

SEQ ID NO: 176895 - DNA, 120 bp, Artificial Sequence
  ENSG00000110243_13 (sequence is synthesized)
cctgctggctctgatgctggtgggtacgaaaggtgtgggctgtgataggagagggcagagcccatgtttcctgacatagctctacacctaaataagggactgaaccctcccaactgtggg

SEQ ID NO: 176896 - DNA, 120 bp, Artificial Sequence
  ENSG00000110243_14 (sequence is synthesized)
agctccttaaaccctctggggagcatactgtgtgctctccccatctccagcccctccctctgggttcccaagttgaagcctagacttctggctcaaatgaaatagatgtttatgatagaa

SEQ ID NO: 176897 - DNA, 120 bp, Artificial Sequence
  ENSG00000110244_0 (sequence is synthesized)
agttcccactgcagcgcaggtgagctctcctgaggacctctctgtcagctcccctgattgtagggaggatccagtgtggcaagaaactcctccagcccagcaagcagctcaggatgttcc

SEQ ID NO: 176898 - DNA, 120 bp, Artificial Sequence
  ENSG00000110244_1 (sequence is synthesized)
tgaaggccgtggtcctgaccctggccctggtggctgtcgccggagccagggctgaggtcagtgctgaccaggtggccacggtgatgtgggactacttcagccagctgagcaacaatgcca

SEQ ID NO: 176899 - DNA, 120 bp, Artificial Sequence
  ENSG00000110244_2 (sequence is synthesized)
aggaggccgtggaacatctccagaaatctgaactcacccagcaactcaatgccctcttccaggacaaacttggagaagtgaacacttacgcaggtgacctgcagaagaagctggtgccct

SEQ ID NO: 176900 - DNA, 120 bp, Artificial Sequence
  ENSG00000110244_3 (sequence is synthesized)
ttgccaccgagctgcatgaacgcctggccaaggactcggagaaactgaaggaggagattgggaaggagctggaggagctgagggcccggctgctgccccatgccaatgaggtgagccaga

SEQ ID NO: 176901 - DNA, 120 bp, Artificial Sequence
  ENSG00000110244_4 (sequence is synthesized)
agatcggggacaacctgcgagagcttcagcagcgcctggagccctacgcggaccagctgcgcacccaggtcagcacgcaggccgagcagctgcggcgccagctgaccccctacgcacagc

SEQ ID NO: 176902 - DNA, 120 bp, Artificial Sequence
  ENSG00000110244_5 (sequence is synthesized)
gcatggagagagtgctgcgggagaacgccgacagcctgcaggcctcgctgaggccccacgccgacgagctcaaggccaagatcgaccagaacgtggaggagctcaagggacgccttacgc

SEQ ID NO: 176903 - DNA, 120 bp, Artificial Sequence
  ENSG00000110244_6 (sequence is synthesized)
ccagaccgtggaggagctgcgccgcagcctggctccctatgctcaggacacgcaggagaagctcaaccaccagcttgagggcctgaccttccagatgaagaagaacgccgaggagctcaa

SEQ ID NO: 176904 - DNA, 120 bp, Artificial Sequence
  ENSG00000110244_7 (sequence is synthesized)
ggccaggatctcggccagtgccgaggagctgcggcagaggctggcgcccttggccgaggacgtgcgtggcaacctgaggggcaacaccgaggggctgcagaagtcactggcagagctggg

SEQ ID NO: 176905 - DNA, 120 bp, Artificial Sequence
  ENSG00000110244_8 (sequence is synthesized)
tgggcacctggaccagcaggtggaggagttccgacgccgggtggagccctacggggaaaacttcaacaaagccctggtgcagcagatggaacagctcaggcagaaactgggcccccatgc

SEQ ID NO: 176906 - DNA, 120 bp, Artificial Sequence
  ENSG00000110244_9 (sequence is synthesized)
gggggacgtggaaggccacttgagcttcctggagaaggacctgagggacaaggtcaactccttcttcagcaccttcaaggagaaagagagccaggacaagactctctccctccctgagct

SEQ ID NO: 176907 - DNA, 120 bp, Artificial Sequence
  ENSG00000110244_10 (sequence is synthesized)
ggagcaacagcaggaacagcagcaggagcagcagcaggagcaggtgcagatgctggcccctttggagagctgagctgcccctggtgcactggccccaccctcgtggacacctgccctgcc

SEQ ID NO: 176908 - DNA, 120 bp, Artificial Sequence
  ENSG00000110244_11 (sequence is synthesized)
ctgccacctgtctgtctgtctgtcccaaagaagttctggtatgaacttgaggacacatgtccagtgggaggtgagaccacctctcaatattcaataaagctgctgagaatctagcctcaa

SEQ ID NO: 176909 - DNA, 120 bp, Artificial Sequence
  ENSG00000110245_0 (sequence is synthesized)
ctgctcagttcatccctagaggcagctgctccaggaacagaggtgccatgcagccccgggtactccttgttgttgccctcctggcgctcctggcctctgcccgagcttcagaggccgagg

SEQ ID NO: 176910 - DNA, 120 bp, Artificial Sequence
  ENSG00000110245_1 (sequence is synthesized)
atgcctcccttctcagcttcatgcagggttacatgaagcacgccaccaagaccgccaaggatgcactgagcagcgtgcaggagtcccaggtggcccagcaggccaggggctgggtgaccg

SEQ ID NO: 176911 - DNA, 120 bp, Artificial Sequence
  ENSG00000110245_2 (sequence is synthesized)
gttctgggatttggaccctgaggtcagaccaacttcagccgtggctgcctgagacctcaataccccaagtccacctgcctatccatcctgcgagctccttgggtcctgcaatctccaggg

SEQ ID NO: 176912 - DNA, 120 bp, Artificial Sequence
  ENSG00000110245_3 (sequence is synthesized)
ctgcccctgtaggttgcttaaaagggacagtattctcagtgctctcctaccccacctcatgcctggcccccctccaggcatgctggcctcccaataaagctggacaagaagctgctatga

SEQ ID NO: 176913 - DNA, 120 bp, Artificial Sequence
  ENSG00000110245_4 (sequence is synthesized)
ggctgcagggctggcgggacagcagcgtggactcagtctcctagggatttcccaactctcccgcccgcttgctgcatctggacaccctgcctcaggccctcatctccactggtcagcagg

SEQ ID NO: 176914 - DNA, 120 bp, Artificial Sequence
  ENSG00000110245_5 (sequence is synthesized)
ttcatccctagaggcagctgctccaggggccacgccacctccccagggaggggtccagaggcatggggacctggggtgcccctcacaggacacttccttgcaggaacagaggtgccatgc

SEQ ID NO: 176915 - DNA, 120 bp, Artificial Sequence
  ENSG00000110274_0 (sequence is synthesized)
gttgcgcgctgcagggcaacaccccggcgtccctggaagctgggggagcgggagaaataactttatttggactgagagctggagaatgagaataggacctgagagtatattgggctaagg

SEQ ID NO: 176916 - DNA, 120 bp, Artificial Sequence
  ENSG00000110274_1 (sequence is synthesized)
aggagaggtgtttgagcccagatgagtcatggctggacgacccctccgcataggagatcagctggttctggaagaagattatgatgagacctacattcctagtgagcaagaaattcttga

SEQ ID NO: 176917 - DNA, 120 bp, Artificial Sequence
  ENSG00000110274_2 (sequence is synthesized)
atttgcccgggagattggtattgatcccatcaaggaaccagaactgatgtggctggcgcgagagggcatcgtggccccactgcctggagagtggaaaccatgccaggacatcacaggtga

SEQ ID NO: 176918 - DNA, 120 bp, Artificial Sequence
  ENSG00000110274_3 (sequence is synthesized)
catttactatttcaacttcgccaacgggcagtctatgtgggaccatccatgtgacgaacactatcggagcttggtgatccaagagcgggcaaagctgtcaacttctggggccattaagaa

SEQ ID NO: 176919 - DNA, 120 bp, Artificial Sequence
  ENSG00000110274_4 (sequence is synthesized)
gaagaaaaaaaaaaaggaaaagaaagacaagaaggacagagacccccccaaaagttcgctggccttgggttcctcattagccccagttcatgttcctcttgggggcctggctcctttacg

SEQ ID NO: 176920 - DNA, 120 bp, Artificial Sequence
  ENSG00000110274_5 (sequence is synthesized)
aggtcttgtggataccccaccctctgctcttcgtggatctcaaagcgtgagcctggggagctcagtggagtctggacgtcagcttggagaactcatgctgccttcacagggtctcaagac

SEQ ID NO: 176921 - DNA, 120 bp, Artificial Sequence
  ENSG00000110274_6 (sequence is synthesized)
ctctgcttatacaaagggtctcttgggctccatatatgaggacaagactgctctcagcctcttgggtttaggagaagaaaccaatgaggaggatgaggaggaaagtgacaaccagagtgt

SEQ ID NO: 176922 - DNA, 120 bp, Artificial Sequence
  ENSG00000110274_7 (sequence is synthesized)
ccacagctcaagtgagcctcttaggaacctacacctggacattggggcactggggggtgactttgagtatgaggagtctctgagaacaagccagccagaggagaagaaggatgtttctct

SEQ ID NO: 176923 - DNA, 120 bp, Artificial Sequence
  ENSG00000110274_8 (sequence is synthesized)
ggattcagatgctgccggtccccctactccctgcaagccctccagcccaggtgcagacagcagtctgagcagtgctgttggcaaagggcgacagggaagtggagcaagacctggtcttcc

SEQ ID NO: 176924 - DNA, 120 bp, Artificial Sequence
  ENSG00000110274_9 (sequence is synthesized)
agaaaaagaggaaaatgagaagagtgaacctaagatttgcaggaatctggtgacccccaaggcagaccctacaggcagtgagcctgccaaagcctctgaaaaggaagcaccagaggacac

SEQ ID NO: 176925 - DNA, 120 bp, Artificial Sequence
  ENSG00000110274_10 (sequence is synthesized)
agtagatgcaggagaggagggttccaggagggaagaggcagccaaggagccaaagaagaaggcttctgctctggaagagggcagttcagacgccagccaagaactggaaattagtgaaca

SEQ ID NO: 176926 - DNA, 120 bp, Artificial Sequence
  ENSG00000110274_11 (sequence is synthesized)
catgaaggaaccacagctctcagactccatagcttctgaccccaagtccttccatggcctggacttcggttttcgcagccggatctcggagcacctgctggatgttgatgtgctttcccc

SEQ ID NO: 176927 - DNA, 120 bp, Artificial Sequence
  ENSG00000110274_12 (sequence is synthesized)
agtcctgggtggagcttgtcggcaggcccagcaaccactgggaatagaagacaaggatgacagccagtccagccaagatgagctgcagagcaagcagtccaaaggcctggaggagaggtt

SEQ ID NO: 176928 - DNA, 120 bp, Artificial Sequence
  ENSG00000110274_13 (sequence is synthesized)
atctcctccacttccacacgaggagcgggcccagagtccccctcgcagcctggccactgaagaagagcctccccagggccccgaggggcagcccgagtggaaggaggcagaggagcttgg

SEQ ID NO: 176929 - DNA, 120 bp, Artificial Sequence
  ENSG00000110274_14 (sequence is synthesized)
ggaggactctgcagccagcctcagcctgcagctgtccctccagagggagcaggccccaagcccacctgctgcctgtgagaagggcaaggagcagcattcccaggccgaggagctgggccc

SEQ ID NO: 176930 - DNA, 120 bp, Artificial Sequence
  ENSG00000110274_15 (sequence is synthesized)
tgggcaggaagaggcagaggatcctgaggagaaggtggcggtcagccccaccccgccagtctctccagaggtgcgatccacagagcctgtggctcccccagagcagctctcagaggctgc

SEQ ID NO: 176931 - DNA, 120 bp, Artificial Sequence
  ENSG00000110274_16 (sequence is synthesized)
actaaaggccatggaagaggcagtggcccaagtactcgagcaagaccagaggcacctgctggaatccaagcaagagaagatgcagcaactgcgggagaagctgtgccaagaggaggaaga

SEQ ID NO: 176932 - DNA, 120 bp, Artificial Sequence
  ENSG00000110274_17 (sequence is synthesized)
ggagatcctccggcttcaccagcagaaagagcaatctctcagttccttgagggagcggctgcagaaagccattgaggaggaggaggcccggatgagagaggaggaaagccagaggctatc

SEQ ID NO: 176933 - DNA, 120 bp, Artificial Sequence
  ENSG00000110274_18 (sequence is synthesized)
ctggctccgagctcaggtccagtccagcacacaagcagatgaggaccaaatcagggctgagcaagaggcttccctgcagaaactgagagaagagttggagtctcaacagaaggctgagag

SEQ ID NO: 176934 - DNA, 120 bp, Artificial Sequence
  ENSG00000110274_19 (sequence is synthesized)
ggccagcttggaacagaaaaataggcaaatgctggagcagctcaaggaagagatagaggcttcggagaagagcgagcaggctgccctgaatgctgcaaaggagaaggctctgcagcagct

SEQ ID NO: 176935 - DNA, 120 bp, Artificial Sequence
  ENSG00000110274_20 (sequence is synthesized)
gagggagcagctggaaggggagaggaaagaagctgtggcaacgctggagaaggagcacagtgctgagctggagcggctctgctcctcattggaggccaagcaccgggaggtggtctccag

SEQ ID NO: 176936 - DNA, 120 bp, Artificial Sequence
  ENSG00000110274_21 (sequence is synthesized)
cctccagaagaagatacaggaagctcaacagaaagaggaggcccagctgcagaagtgccttgggcaagtggagcacagagttcaccagaagtcttatcacgtggctgggtatgagcacga

SEQ ID NO: 176937 - DNA, 120 bp, Artificial Sequence
  ENSG00000110274_22 (sequence is synthesized)
gctcagcagtctcctgcgagagaagcgccaggaagtggaaggggagcatgagaggaggttggacaagatgaaggaggagcaccagcaagtgatggctaaggccagagagcagtatgaagc

SEQ ID NO: 176938 - DNA, 120 bp, Artificial Sequence
  ENSG00000110274_23 (sequence is synthesized)
aagcgtcttgaggacttgcggcgccggcacagggagcaggaaaggaagctccaggatttagagttggaccttgaaaccagagctaaagatgtcaaggccagattggctctgctggaggtc

SEQ ID NO: 176939 - DNA, 120 bp, Artificial Sequence
  ENSG00000110274_24 (sequence is synthesized)
caggaggagaccgcccggagggagaagcagcagctgcttgatgtgcagaggcaggttgctctgaagagtgaggaagccacagccacccatcagcagctggaggaggcacagaaggagcac

SEQ ID NO: 176940 - DNA, 120 bp, Artificial Sequence
  ENSG00000110274_25 (sequence is synthesized)
acccacctgttgcagtcaaaccagcagctccgagaaattcttgatgagctgcaggcccgcaagctgaagctggagtcccaagtggatctgctgcaggctcagagccagcaactgcagaaa

SEQ ID NO: 176941 - DNA, 120 bp, Artificial Sequence
  ENSG00000110274_26 (sequence is synthesized)
cacttcagcagcctggaggctgaagctcaaaagaagcagcacctgttgagagaagtgacagttgaggaaaataatgcttccccacattttgagccagatctccatattgaggacctgagg

SEQ ID NO: 176942 - DNA, 120 bp, Artificial Sequence
  ENSG00000110274_27 (sequence is synthesized)
aaatcccttggaacaaaccagaccaaagaggtgtcttcttctctctcccagagcaaggaggacttatacttggacagcctgtcctcccacaatgtctggcacctcctctctgctgagggg

SEQ ID NO: 176943 - DNA, 120 bp, Artificial Sequence
  ENSG00000110274_28 (sequence is synthesized)
gtagccctccgtagtgccaaggagttccttgtgcagcagacacgctccatgcggaggcggcagacagctctgaaagctgcccagcagcattggcgccatgagctggccagtgcgcaggag

SEQ ID NO: 176944 - DNA, 120 bp, Artificial Sequence
  ENSG00000110274_29 (sequence is synthesized)
gtggccaaagacccaccaggcatcaaggccctggaagatatgcgcaagaacctggagaaggagaccaggcacctggatgagatgaagtcggccatgcggaaaggccacaacctgctgaag

SEQ ID NO: 176945 - DNA, 120 bp, Artificial Sequence
  ENSG00000110274_30 (sequence is synthesized)
aagaaagaggagaagctgaatcagttggagtcctctctttgggaagaggcctcagatgagggcactctgggaggatcccccaccaagaaggcagtaaccttcgacctcagtgacatggac

SEQ ID NO: 176946 - DNA, 120 bp, Artificial Sequence
  ENSG00000110274_31 (sequence is synthesized)
agcctgagcagtgaaagttctgaatctttttccccgcctcaccgtgagtggtggcggcagcagaggatcgactcaaccccgagtctcacctcccgcaagatccacgggcttagccactcc

SEQ ID NO: 176947 - DNA, 120 bp, Artificial Sequence
  ENSG00000110274_32 (sequence is synthesized)
ctccggcagatcagcagccagctgagcagtgtcctcagcatcctggacagcctcaaccctcagtcgccgccgccgctcctcgcctccatgccagcccagctccctccccgggaccctaag

SEQ ID NO: 176948 - DNA, 120 bp, Artificial Sequence
  ENSG00000110274_33 (sequence is synthesized)
agcacccccacccccacctactatggctccctggccaggttctcagccttatcatctgctacacccacgtccacccaatgggcctgggattcagggcaggggcccaggctcccctcctct

SEQ ID NO: 176949 - DNA, 120 bp, Artificial Sequence
  ENSG00000110274_34 (sequence is synthesized)
gtggctcaaacggtggacgacttcctgttggagaagtggcgcaagtattttccatctggcatcccgctgctcagcaacagccccaccccgctggagagcaggctgggttacatgtctgcc

SEQ ID NO: 176950 - DNA, 120 bp, Artificial Sequence
  ENSG00000110274_35 (sequence is synthesized)
agtgagcagctccggctcctacagcactcccattcgcaagtccctgaggcgggcagcaccacctttcagggcataattgaggccaaccggaggtggctggaacgtgtcaagaatgacccc

SEQ ID NO: 176951 - DNA, 120 bp, Artificial Sequence
  ENSG00000110274_36 (sequence is synthesized)
aggttacctctcttctcgtcaacacccaagccaaaagctactttgagcctcctgcagctgggccttgatgagcacaacagagtgaaggtgtatcgcttctgaggccctgagcaggggctt

SEQ ID NO: 176952 - DNA, 120 bp, Artificial Sequence
  ENSG00000110274_37 (sequence is synthesized)
ggggcagcccagcctctcctccacccagaccaagtgcctgaggagctgcctgccttcttccatctgagaaagcaccctccttccccctttgacttgcaggagccaccagggaccaggggg

SEQ ID NO: 176953 - DNA, 120 bp, Artificial Sequence
  ENSG00000110274_38 (sequence is synthesized)
ttgagtggaacagtaaagccacacattctgtgactatataacctatctcaggctaaaatgtgtggactcgtacgagctcttgtcattgacatggcaagctgatggcgtgcggtggctgcg

SEQ ID NO: 176954 - DNA, 120 bp, Artificial Sequence
  ENSG00000110274_39 (sequence is synthesized)
gggtatcagggccgggagccctttgggaggaagggaggcgttagaggagctgccttcggaggctcagggagtccctttggagctggttgtttccttggccctgcagcgcactgctcgggg

SEQ ID NO: 176955 - DNA, 120 bp, Artificial Sequence
  ENSG00000110274_40 (sequence is synthesized)
ctcccaaggaggttgtgtgtatggttcttaattcatcaggacaaagacccccagcatgtgtgtaccctgggacccgatttctctgggcccacatctatctccaatacctcagcctcagat

SEQ ID NO: 176956 - DNA, 120 bp, Artificial Sequence
  ENSG00000110274_41 (sequence is synthesized)
cagaccctttcttttttgtctttcttctcttaatttttaaatgcctcttttcttgagcattccatctctctttttgaccctctcaggactgggcttagctgtccagagccctgccggagg

SEQ ID NO: 176957 - DNA, 120 bp, Artificial Sequence
  ENSG00000110274_42 (sequence is synthesized)
gtgctgggggctgtccctctgcaggcactgtgttttcctcaggggctgtcctcagaacacccctcctgctccctggggctcctcagggagccatttcagctggagtctcaggtctcaaaa

SEQ ID NO: 176958 - DNA, 120 bp, Artificial Sequence
  ENSG00000110274_43 (sequence is synthesized)
acaacttctccaggaggccaaaaaaagactgggttggcttctggtcctcatgatggcttttatcctcctgggacactttgggtatattcatgggcattgtttccatctgtcttttctacc

SEQ ID NO: 176959 - DNA, 120 bp, Artificial Sequence
  ENSG00000110274_44 (sequence is synthesized)
tgtgccacccctgccctgattccacggctgcctcaggcaggcaggcaaggagctaggccggtgcccggccctggcagcaaggggtctttgtgcagttggagatgctgccgttgtggcaga

SEQ ID NO: 176960 - DNA, 120 bp, Artificial Sequence
  ENSG00000110274_45 (sequence is synthesized)
gcgtcctgcagccccgcttccatcagcaggctctggggtgggggctttgcaggggatgctctctgatgtttgttccgttgtttaaataaaatgcacttatttttgtttttttttttgcaa

SEQ ID NO: 176961 - DNA, 120 bp, Artificial Sequence
  ENSG00000110274_46 (sequence is synthesized)
agctgcgcctcgcccagagcctcgcccggagcctcgcccggagccttccggggtgggggatagttgaggacctcatcgagggaggggttgggcggcggggaagggagcgagcgtggcggg

SEQ ID NO: 176962 - DNA, 120 bp, Artificial Sequence
  ENSG00000110274_47 (sequence is synthesized)
ggacccgaggcacgctctcgagccaacgagcgtgatgcgctcgagtgtgggcggggactgagggaagaagtgaaaatcggactgccaggcgacagttcctccgtttgaaatctcgccggc

SEQ ID NO: 176963 - DNA, 120 bp, Artificial Sequence
  ENSG00000110274_48 (sequence is synthesized)
ggcagcagaggagtgagtgggggagatgcggggtgaggaccatggtatccatggaatgggaggaacttggggaatagaagaagagctctcttccctcagccctgcagagggaggcctctg

SEQ ID NO: 176964 - DNA, 120 bp, Artificial Sequence
  ENSG00000110274_49 (sequence is synthesized)
tgagccggtgtctggactaggtgctcggtcagtgctgggaaggaatcacaccatctaggtttgccagcacgtggggctgaaaggtcagggaagccctctgaatgctgcagagcactctac

SEQ ID NO: 176965 - DNA, 120 bp, Artificial Sequence
  ENSG00000110274_50 (sequence is synthesized)
ggtgtgaccactggccttgctggcctcttctcttccagggcctccttgaggaggcttttctctctcagctgccctggcctgtatgtgacagaagggccctctccccttccttctctctgg

SEQ ID NO: 176966 - DNA, 120 bp, Artificial Sequence
  ENSG00000110274_51 (sequence is synthesized)
ggtcctgggcccttcacccagcaccttgccctggaaacctgtttctcatggccagcttctcacttgcactgtctggaacacagaagccctgccatccctgaccccctcataaggttgagg

SEQ ID NO: 176967 - DNA, 120 bp, Artificial Sequence
  ENSG00000110274_52 (sequence is synthesized)
ggctgttgtctggagaagcagggaggggtggccagtagggtcctccatgacagctgtgtctgggaatggtccagggtcctgagcttgagtcccttcccaccatccacctcttttctttca

SEQ ID NO: 176968 - DNA, 120 bp, Artificial Sequence
  ENSG00000110274_53 (sequence is synthesized)
ttgtctgggcctgacttggagagcagcagcagcagcagcagcaacagcaacctggcctcacacctgggctctcctgtcctggatgaggtgaacaacttcccttggaacctgcagagctca

SEQ ID NO: 176969 - DNA, 120 bp, Artificial Sequence
  ENSG00000110274_54 (sequence is synthesized)
cggggatctgaggagggtatggctcagtcagactcgggtctcagagatcaacacttcagccccttcttagatcctcacatgtcccacatgcagagccctgacgaggagcagtcagaaagt

SEQ ID NO: 176970 - DNA, 120 bp, Artificial Sequence
  ENSG00000110274_55 (sequence is synthesized)
gaagactactctgaggaccagaggttctaccagcacatcctgcagatggtcaagatctccaggtggccggagggcctggggctgcctgagagcatgcaggacatgccgtgcagacacagc

SEQ ID NO: 176971 - DNA, 120 bp, Artificial Sequence
  ENSG00000110274_56 (sequence is synthesized)
gccagcacagtctgttgcatggcagctgagtcttctaggatgtctagtgagggtgagcacgaggccatcagagtcatggagagggactcgaggtttctgtcatgggagccagagctgctg

SEQ ID NO: 176972 - DNA, 120 bp, Artificial Sequence
  ENSG00000110274_57 (sequence is synthesized)
gaacatcctcaggaggtggccctcgcccctgcttggcaagaggcctctcagcaagcccatttccagccaagcagcagcaccctcaggcaggggctagtccagcagagctccagcagaggg

SEQ ID NO: 176973 - DNA, 120 bp, Artificial Sequence
  ENSG00000110274_58 (sequence is synthesized)
atgaggtctctctgttgaccagactggtttcaaactcccggtctcaagcagtccttccatcttggtctcccaaagtgctggaattacaggagtctctgagaacaagccagccagaggaga

SEQ ID NO: 176974 - DNA, 120 bp, Artificial Sequence
  ENSG00000110274_59 (sequence is synthesized)
tttgcttcgcccagggtacctggtggaactctgggccccagaggagtctactcaccaagtcctcagttcccacacatcacaagggcgacagcctacataccaccttgaatttgtagcaac

SEQ ID NO: 176975 - DNA, 120 bp, Artificial Sequence
  ENSG00000110274_60 (sequence is synthesized)
gatcagattcaaggtgacacgcaccagcatacacagaaccacagggctgcccgggcccggactgccccacagaggcggcagatgcacacagaggtcagccacagcaccccacatggaggg

SEQ ID NO: 176976 - DNA, 120 bp, Artificial Sequence
  ENSG00000110274_61 (sequence is synthesized)
ggggaagggctgggcttaccctgccaaccccctgaggaagctgccctctggcccctgtggggaggagtcagcccctggtgggaccctgcccccgcccctccctctagcccctccagcccc

SEQ ID NO: 176977 - DNA, 120 bp, Artificial Sequence
  ENSG00000110274_62 (sequence is synthesized)
ggagtctggcctttgtctttgcccttgagctcttgtttgcttcctgtggctcccttattcccccagtcctgctgagcaacatctggagtgagagggacaccctgtggaggagacagacgg

SEQ ID NO: 176978 - DNA, 120 bp, Artificial Sequence
  ENSG00000110274_63 (sequence is synthesized)
gcaattatttaaacctgttattaattttccattcatctcattccttgccaaatgttttcccctctccctcccttaggcagctaacagtgagtaccccccactaaccctttggccaacttg

SEQ ID NO: 176979 - DNA, 120 bp, Artificial Sequence
  ENSG00000110274_64 (sequence is synthesized)
agagctgatgctggccaaggattgagttgacagaggggagcgctttgctgatgagattggcgggagcaggcggatgtgggagcccagagccttgtatcagtagcacccagcaagggggca

SEQ ID NO: 176980 - DNA, 120 bp, Artificial Sequence
  ENSG00000110274_65 (sequence is synthesized)
gagggcctccaccactttcccgtttgggaactgttctggaggggcagatgttttgaagctttgaattgctagggacctcggagaagctgctctggtagctgagagaaagagggaggaggt

SEQ ID NO: 176981 - DNA, 120 bp, Artificial Sequence
  ENSG00000110274_66 (sequence is synthesized)
gtacatcttaagcctcttgctttcttactggctttaacacagttgtttccttactgctatcaagggagcaggccccaagcccacctgctgcctgtgagaagggcaaggagcagcattccc

SEQ ID NO: 176982 - DNA, 120 bp, Artificial Sequence
  ENSG00000110274_67 (sequence is synthesized)
attcctttgtcttgtgtttctcccgccatcccagcgaggctgcccctgctagggtctgagaaatacctgaccacgcagtttcagtttataccatccccttaggaaatgccttctcttcct

SEQ ID NO: 176983 - DNA, 120 bp, Artificial Sequence
  ENSG00000110274_68 (sequence is synthesized)
ttcctgagtctcttcaggccccatcgcttccgtgttattaatctttacagcggcatcaggaatggatgggttgtctaggttttgtgggagtagctctgtgtctgtcagcttccaaaggtg

SEQ ID NO: 176984 - DNA, 120 bp, Artificial Sequence
  ENSG00000110274_69 (sequence is synthesized)
tagtcaagctggatctgaagggttaggagcagagggcaagctagagggagcaggtaggtccaggaggcaacatgtgccactcaccgaatgctttctggccaaggccagggctaggaaaca

SEQ ID NO: 176985 - DNA, 120 bp, Artificial Sequence
  ENSG00000110274_70 (sequence is synthesized)
ggaaggtcctccccgtgtcatgccagcatctttcgtgaggatttccagagaagagggtaaaagaatccaaaccaccaagttgagtatgagaggagacataacttttgtggtagtaccatg

SEQ ID NO: 176986 - DNA, 120 bp, Artificial Sequence
  ENSG00000110274_71 (sequence is synthesized)
aaaaccatttcacagtgtttctaggtgccatttccccgccctccgctctctttcttccctgtctctccctgctttcccttcttgctttctctcccgtatctttgagctacttggtggcca

SEQ ID NO: 176987 - DNA, 120 bp, Artificial Sequence
  ENSG00000110274_72 (sequence is synthesized)
gcctgaaatgattatgctcctgcagagcctcccctttgtcactcactgtaggaaactgggtcccactgattctgatacctgaggagttggcctagaaatcagagctgtttcttcccctgg

SEQ ID NO: 176988 - DNA, 120 bp, Artificial Sequence
  ENSG00000110274_73 (sequence is synthesized)
agtcctcaacttcccaatcatgtcatggacctttcaggcattgtttactgccttggaactgagctagcagtttgggctactagacctttaaaacagtgcgagggagaagaggtccactga

SEQ ID NO: 176989 - DNA, 120 bp, Artificial Sequence
  ENSG00000110274_74 (sequence is synthesized)
cagacagcccaggttgcctctgtgcaagttcactggtgctcatagcctgggcacatgccccacatggtctgatgccccatctttccacagcattatccctagggctccacatagcttgca

SEQ ID NO: 176990 - DNA, 120 bp, Artificial Sequence
  ENSG00000110274_75 (sequence is synthesized)
gcctgcaggagagagagacattaaaaggtaccatctcagggaaaaaagatgttttcagccaaggttggaaatgagttggagggttgatgaggcggagagctgtgggggaagcctctttct

SEQ ID NO: 176991 - DNA, 120 bp, Artificial Sequence
  ENSG00000110274_76 (sequence is synthesized)
gagggcaggattctcagaggaggtggcagccacatgtcttatatatgcattaattgggctgtgtcaggggactgagaggaagccaggctttggaaggaaggagaagatggagttgggagc

SEQ ID NO: 176992 - DNA, 120 bp, Artificial Sequence
  ENSG00000110274_77 (sequence is synthesized)
agaagagaattgaaggcataggctgaagatcatttctggtccgagttatgattttaggaaaggggaaacgaaaggtctttatggtaattcagagatgacagtagcctgtcctgtcttcct

SEQ ID NO: 176993 - DNA, 120 bp, Artificial Sequence
  ENSG00000110274_78 (sequence is synthesized)
ctctctatagtctcaaggtgctgcaatgggattcgtaagcccttgttttcctctactgttctaatccggtcctgcccgctgctttccatctgcagcggggctcgagctggagggagaagg

SEQ ID NO: 176994 - DNA, 120 bp, Artificial Sequence
  ENSG00000110274_79 (sequence is synthesized)
gattctgagtccacagcagggaggaccagctcccctgtttgactcttgcccagccctctttgttttggatcatgcccacactttccgcttaggttgactgagccaccatgccaggcctgc

SEQ ID NO: 176995 - DNA, 120 bp, Artificial Sequence
  ENSG00000110274_80 (sequence is synthesized)
aacagcctgagtgctgtgcgaggagggtgtgtggtgaggccactttccaccgtaagattgagggacctggacgtggagacacattctggcctttaggaaagtcactctgggagacaaaat

SEQ ID NO: 176996 - DNA, 120 bp, Artificial Sequence
  ENSG00000110274_81 (sequence is synthesized)
gctttatcctgctcatggtttcctcatgctttatcctgctcatgctttatcctgctcagaatgttctcaggattcctctttgggcatttcgttgaagaaccagaaaacaagcaaaataac

SEQ ID NO: 176997 - DNA, 120 bp, Artificial Sequence
  ENSG00000110274_82 (sequence is synthesized)
agtccttattactttatacacatctttttaatggataccattattcctgatctcaccaccctcctatgtatccaggtcagctctgaattccttttattcatttctaaacatttaattaac

SEQ ID NO: 176998 - DNA, 120 bp, Artificial Sequence
  ENSG00000110274_83 (sequence is synthesized)
tctaagcagacgaaaacgtgcccccatgggtagacggggaacatggcactcatgtgcatgcttgctacattttttggcttaggggagcatctcctcctggcccccttggtggtgtgatag

SEQ ID NO: 176999 - DNA, 120 bp, Artificial Sequence
  ENSG00000110274_84 (sequence is synthesized)
gggagcttcctattcctgggccttcctggactgttgtagttctcagagctgggatacctgctgctgcttctttcatgggcccatatacattggccactactcagtttgggaggcagaaag

SEQ ID NO: 177000 - DNA, 120 bp, Artificial Sequence
  ENSG00000110274_85 (sequence is synthesized)
caatctctggggactgttcacaaattgctggcatgagccttaagtagcaggcagagctctagcggggaggtggtaacggggctgtgagccattctaggaaggaatccattagggacagag

SEQ ID NO: 177001 - DNA, 120 bp, Artificial Sequence
  ENSG00000110274_86 (sequence is synthesized)
cttcactctctccctgctgctgccagctcttgagccgcagcttcagattttgatcttgggccataacctcgtaagtctgctgagagcctgctatgggctacccttctccctaggctcttg

SEQ ID NO: 177002 - DNA, 120 bp, Artificial Sequence
  ENSG00000110274_87 (sequence is synthesized)
gggccttaaacagccacaatggggcttgtcctatggaacaagcattgactgtatctcttggcctgcccttgggtgacctctttgactcctgattgtgggccctccattaggattccatct

SEQ ID NO: 177003 - DNA, 120 bp, Artificial Sequence
  ENSG00000110274_88 (sequence is synthesized)
gtgatgttccgtatccattctaacctggatgcagaggtgggtggacattaaccctgtgatgatatgccattccccacccatggtaggcgatccacagagcctgtggctcccccagagcag

SEQ ID NO: 177004 - DNA, 120 bp, Artificial Sequence
  ENSG00000110274_89 (sequence is synthesized)
gcggagccttcccacctgcctcctcctcctcctcttccttccttttcttctaccctctttctcctgctccttttctcctcttcctcttttgcatccctttgccacacctctcctccccca

SEQ ID NO: 177005 - DNA, 120 bp, Artificial Sequence
  ENSG00000110274_90 (sequence is synthesized)
acgttaccatagtccattggtccattgactctacctgtgggtccctggggaaggagacattgcaggtggccctgcagccaggagttctatgggttgggacggtttagatggagcctggct

SEQ ID NO: 177006 - DNA, 120 bp, Artificial Sequence
  ENSG00000110274_91 (sequence is synthesized)
gactggggcctttattgtggattctggagctcagtagaacctaaaaggtcattgtcgtcattatcttaatagctaccatcttgtgcaatacatgatgggccaagcagtttatatatattt

SEQ ID NO: 177007 - DNA, 120 bp, Artificial Sequence
  ENSG00000110274_92 (sequence is synthesized)
tttcatttagttcttaattctctgaggtagtaattatttatccccattttacagatgaggaaactgagtttcagagagtttaagtagtatgctccagggtacccagtgagtgagtaacaa

SEQ ID NO: 177008 - DNA, 120 bp, Artificial Sequence
  ENSG00000110274_93 (sequence is synthesized)
actcagttgtgaccccatgtctctgtgactccaggattctgcttggaacctcttggctgtgtggctaattcttgcttctgagccaggtggcctccccaggtctcagccctgctgaggatt

SEQ ID NO: 177009 - DNA, 120 bp, Artificial Sequence
  ENSG00000110274_94 (sequence is synthesized)
atgaaaagccataaaacaaggcatttgaggggaaacaaaatatcttctttttgccctaacccaaattgaaaagtagattaagttttaaaaataaaataaataggaccattcctgtctctc

SEQ ID NO: 177010 - DNA, 120 bp, Artificial Sequence
  ENSG00000110274_95 (sequence is synthesized)
tctctgcagcttgtctcctccgtcagcacctgggcttgctgatctggacctagatcaagagatgcaggctataagtgagggatcctataacaaaggaaagagcccaggcatgctgggtga

SEQ ID NO: 177011 - DNA, 120 bp, Artificial Sequence
  ENSG00000110274_96 (sequence is synthesized)
cactccctggcgtttcatgggtgcccttcccagaaagctgcagccactctccaaaggccaaccttcccaaatccaccaggtctttgctgacatggagaaaatcttaggcagggccccagc

SEQ ID NO: 177012 - DNA, 120 bp, Artificial Sequence
  ENSG00000110274_97 (sequence is synthesized)
ccaatgcaggagagaattaggtgatcagcagggtctggagaaactccagaaggcgacagagaaaatctacctggggttttcagatcctgaaacagaagagctggaaatgagaagcaggca

SEQ ID NO: 177013 - DNA, 120 bp, Artificial Sequence
  ENSG00000110274_98 (sequence is synthesized)
gcagaaactgggcactccagcccctcagaacactgggcttctccaaaatatgcaggatgtggtagaaagcaggaaccaggcctctgtccactcaaagctttctgaagccatcaaaggcct

SEQ ID NO: 177014 - DNA, 120 bp, Artificial Sequence
  ENSG00000110274_99 (sequence is synthesized)
gccactgaaaggggagcagcacagccacagcttagccaaactgagccccactggccctggaggggacaagggccaaagccccattcccatgtcatcccctgaggaggagccctccctgtc

SEQ ID NO: 177015 - DNA, 120 bp, Artificial Sequence
  ENSG00000110274_100 (sequence is synthesized)
ctcttgttcttccggccacatgttgcctgccaggaagagcaagttgttgttagatagcagccctactgaagacctgagctggcagggagttcctggggaaggtgggagcataggcagcgg

SEQ ID NO: 177016 - DNA, 120 bp, Artificial Sequence
  ENSG00000110274_101 (sequence is synthesized)
gaggaggaggagagaacctcctggactgtggatggaacaggtctccaagcttgtcaataaggatatcccaggaagctgcaaggaaacagagcccagtgaccctgaggctctaggggcctc

SEQ ID NO: 177017 - DNA, 120 bp, Artificial Sequence
  ENSG00000110274_102 (sequence is synthesized)
ggtctcttgctaataccacctgaaaccctggcatcagaaccagctcagaatccccttttagggagggctcccgaggagcctcctgccagtgagaagagacaggccctagggtctgcagag

SEQ ID NO: 177018 - DNA, 120 bp, Artificial Sequence
  ENSG00000110315_0 (sequence is synthesized)
aggtctgagctgtgggctgaggcagcgcagccgctgccgcagggtgcgcgatgccttgaacctgggaaactatgtgaagcaacactctggattttgaaagacatcttttcatcatgggac

SEQ ID NO: 177019 - DNA, 120 bp, Artificial Sequence
  ENSG00000110315_1 (sequence is synthesized)
agcaaatttcggatcagacacagttggttattaacaagttaccagaaaaagtagcaaaacatgttacgttggttcgagagagtggctccttaacttatgaagaatttcttgggagagtag

SEQ ID NO: 177020 - DNA, 120 bp, Artificial Sequence
  ENSG00000110315_2 (sequence is synthesized)
ctgagcttaatgatgtaacggctaaagtggcttctggccaggaaaaacatcttctctttgaggtacaacctgggtctgattcctctgctttttggaaagtggttgtacgggtggtctgta

SEQ ID NO: 177021 - DNA, 120 bp, Artificial Sequence
  ENSG00000110315_3 (sequence is synthesized)
ccaagattaacaaaagcagtggcattgtggaggcatcacggatcatgaatttataccagtttattcaactttataaagatatcacaagtcaagcagcaggagtattggcacagagctcca

SEQ ID NO: 177022 - DNA, 120 bp, Artificial Sequence
  ENSG00000110315_4 (sequence is synthesized)
cctctgaagaacctgatgaaaactcatcctctgtaacatcttgtcaggctagtctttggatgggaagggtgaagcagctgaccgatgaggaggagtgttgtatctgtatggatgggcggg

SEQ ID NO: 177023 - DNA, 120 bp, Artificial Sequence
  ENSG00000110315_5 (sequence is synthesized)
ctgacctcatcctgccttgtgctcacagcttttgtcagaagtgtattgataaatggagtgatcgacacaggaattgccctatttgtcgcctacagatgactggagcaaatgaatcttggg

SEQ ID NO: 177024 - DNA, 120 bp, Artificial Sequence
  ENSG00000110315_6 (sequence is synthesized)
tggtatcagatgcacccactgaagatgatatggctaactatattcttaacatggctgatgaggcaggccagccccacaggccatgaccttgaagtgaaagtcttctgttgctattgtggg

SEQ ID NO: 177025 - DNA, 120 bp, Artificial Sequence
  ENSG00000110315_7 (sequence is synthesized)
ctcaaatatttggtcatgggggaagaatgtagggttgtggcactggcacagacacaggaaaatccattttccccactcttttatttttgctattctgatcatttgtcccccttttaaaaa

SEQ ID NO: 177026 - DNA, 120 bp, Artificial Sequence
  ENSG00000110315_8 (sequence is synthesized)
taaacttcccatgtcttccatttgtggtactaaaatttgctactgttttagaccatattttcctattatttatctgttcaaatttgtattattacaactaatagctcttgaattctttgc

SEQ ID NO: 177027 - DNA, 120 bp, Artificial Sequence
  ENSG00000110315_9 (sequence is synthesized)
taaaggtaacagcaacacttccagaggcttctaaaacactactgttttgcagggcaggagtattctggaatctttttacttagatataaaataaacctcgaatattaaaaagttgtagcc

SEQ ID NO: 177028 - DNA, 120 bp, Artificial Sequence
  ENSG00000110315_10 (sequence is synthesized)
atctgagagaggaaagtttaagtgactgaaaatgtagaatacttcaacgtgcatgttactacttaaaactagtctttctgctggaatctaaggagtatatatatatatgcccccttgtgg

SEQ ID NO: 177029 - DNA, 120 bp, Artificial Sequence
  ENSG00000110315_11 (sequence is synthesized)
ttaattattgctcctttaataatttttacttgaaatgatccacaattatttcataactttagcagtgtgttttggaactactgtacttaaaggtttgtttgtttgtttttgccatactgt

SEQ ID NO: 177030 - DNA, 120 bp, Artificial Sequence
  ENSG00000110315_12 (sequence is synthesized)
ataatttgggtgaggtctacaaaattgggtgtgactttcctttgcaaatggatttctcctggggaattttcttggctgttctggaaatgctttcccacagctgggtaactgttctaaatg

SEQ ID NO: 177031 - DNA, 120 bp, Artificial Sequence
  ENSG00000110315_13 (sequence is synthesized)
gctttgataatgctcacacatcttggagtttcagaaggaaattattctgcatcacaaatactaaattttatatttctaaattactataggtcatttaatattggtttatggtgcttttat

SEQ ID NO: 177032 - DNA, 120 bp, Artificial Sequence
  ENSG00000110315_14 (sequence is synthesized)
ttggtttatggtgcttttatttccttaacttgaaaacatctttctgagatttcagagtcctcaaatttcttagattaagagacaagaggccagtgcagtggttcacacctgtaatcccag

SEQ ID NO: 177033 - DNA, 120 bp, Artificial Sequence
  ENSG00000110315_15 (sequence is synthesized)
acgagactcctaatcaaaaaaaaaacacaagaaaatagagtgaggcttttttaccgtatatacataaaatacttatgaaaattagaagataatttggcattcctactgtttcactgtact

SEQ ID NO: 177034 - DNA, 120 bp, Artificial Sequence
  ENSG00000110315_16 (sequence is synthesized)
tccattgaaatactctttccattaaaatattctgaaacaatatagtaataatggaattgtgatcttcagttgcacctcaaccattttttttgcttatgaactaaaatttctaacattaac

SEQ ID NO: 177035 - DNA, 120 bp, Artificial Sequence
  ENSG00000110315_17 (sequence is synthesized)
atttcggcatgtaataaaacaagggcctatctcctttaaaatttaacattccatgtaacttttctgacttatcattcataagttgcaaatattactattttcctaaaccagggtacacaa

SEQ ID NO: 177036 - DNA, 120 bp, Artificial Sequence
  ENSG00000110315_18 (sequence is synthesized)
tttaagttgccacttattgatgacagaatttctggatagtaggattttaataggcgagcaaataaaattcaaatcaatttcaaggaaaaacatctggccaggggtagcttgatttcgccc

SEQ ID NO: 177037 - DNA, 120 bp, Artificial Sequence
  ENSG00000110315_19 (sequence is synthesized)
ccaaaaatactgaagactaatccattgacattcataatgggacagctaagtaccaaatagctaactactccctatggaggtttatgcaagcagagtaccaggggttccatcatatcaacc

SEQ ID NO: 177038 - DNA, 120 bp, Artificial Sequence
  ENSG00000110315_20 (sequence is synthesized)
tggcaatgcacttggtggttgtgtgaccttgagaaagtctcttactcttgtttatgtgttcttactttagaaactgagactttatttgtggttttcacactatttcagcagcaaaaactt

SEQ ID NO: 177039 - DNA, 120 bp, Artificial Sequence
  ENSG00000110315_21 (sequence is synthesized)
tttcaaggaaaatcttacagaacctttaaacacgtgtgcatacacacataccctataccccactatataaaagtcatattattataaatttccttattatataaactttatatactataa

SEQ ID NO: 177040 - DNA, 120 bp, Artificial Sequence
  ENSG00000110315_22 (sequence is synthesized)
atgtgattaagtcaatgaataaaaacattaatgcattggtgatatccagcatgtttgaatttggtgagtaacacacatatagtgggagtcgttttttttaaaaaaattttttaattaaat

SEQ ID NO: 177041 - DNA, 120 bp, Artificial Sequence
  ENSG00000110315_23 (sequence is synthesized)
tcaagtcaaatttgcagaaccctgtatctcctccatagattcttagtattccatggaacatattttgaaaaccttgggatagatgatccactgaaatcttttccagctctaagattttaa

SEQ ID NO: 177042 - DNA, 120 bp, Artificial Sequence
  ENSG00000110315_24 (sequence is synthesized)
attgtccttttagattagacttgctgagtttaattcagattacctaattttaaaatgtttctgaaaagtgaacagagttaccttacagagttttggatctttccagggatagccaatgat

SEQ ID NO: 177043 - DNA, 120 bp, Artificial Sequence
  ENSG00000110315_25 (sequence is synthesized)
tttatcccccagaatccttcacctttcaaggagttatttaacaatgagcccagtgactcaatagggcccaaacctttttattttacaatatgagctccaagacacttactgatctactgt

SEQ ID NO: 177044 - DNA, 120 bp, Artificial Sequence
  ENSG00000110315_26 (sequence is synthesized)
gaatataaaatgttattagccttatcaaataaataaatgagcacagctctttgttcgctctattgaactgggtgataattatttagatgtgaatgttaggtcagttctactgtaataact

SEQ ID NO: 177045 - DNA, 120 bp, Artificial Sequence
  ENSG00000110315_27 (sequence is synthesized)
aatcgtaaaagttgtaaatttgtttaatggatgaaatgtacactttttgtattctgtacagctttgtcttttttaaatatgaagtacttaaatgtacttactatgataggaaatataatg

SEQ ID NO: 177046 - DNA, 120 bp, Artificial Sequence
  ENSG00000110315_28 (sequence is synthesized)
tgtgccttctaggatttgtgaagtggtttcatgaactctaaggaatttgttttccctatcctaactcagtaacagagggtttactccgattatgtatagaaccttagtttgagaaaatga

SEQ ID NO: 177047 - DNA, 120 bp, Artificial Sequence
  ENSG00000110315_29 (sequence is synthesized)
attttactatgtactgaatttagaggttgagaataataggatctgtgttattcttagtacccactgataaattgtgcaataaataatctttcgcaagtgattttagctaattgaagagat

SEQ ID NO: 177048 - DNA, 120 bp, Artificial Sequence
  ENSG00000110315_30 (sequence is synthesized)
tattttcctatgtaatttcacattctaatatactaaatgtttatattccttagagaactattttatattgtgcgctgggggcttgtgatgtttgtgtgctgttttaaaattcatttcaaa

SEQ ID NO: 177049 - DNA, 120 bp, Artificial Sequence
  ENSG00000110315_31 (sequence is synthesized)
ttggactcgatttccttatatctaatatatatctgggagaaaaggctgcttgaaaatatcttttgattcagtgatttttaacattgggaagttgagtttattaaaaggtagtctgaagaa

SEQ ID NO: 177050 - DNA, 120 bp, Artificial Sequence
  ENSG00000110315_32 (sequence is synthesized)
gacttgagagtattttttctttcagtatgttaataatgttgcttcacactcatcttgtttgcattgtttctaatgagaactctgtcatccttttttcctctgtaggtaatgtgccatttt

SEQ ID NO: 177051 - DNA, 120 bp, Artificial Sequence
  ENSG00000110315_33 (sequence is synthesized)
ttccctctgtttttaaggttgttttcttttcactggttttgagcactttgattatgatgtgccttagagtagttttttcatgtttcttgtgcttggggtttattgagcttcttggatttg

SEQ ID NO: 177052 - DNA, 120 bp, Artificial Sequence
  ENSG00000110315_34 (sequence is synthesized)
ttgatttacggtgtcatcaaatttggaaatttttcagccattattttttcagatttttttctatcttctctcccctctcctgtgattccaattaccatgtattagcccacttgaagttgt

SEQ ID NO: 177053 - DNA, 120 bp, Artificial Sequence
  ENSG00000110315_35 (sequence is synthesized)
ctcacagctcactggtgctatttttttctttcttttttgagtctttctctgggtttcatcctggatagttactattgctatctcttttcatattcaccatttttcttcaatgtctaactt

SEQ ID NO: 177054 - DNA, 120 bp, Artificial Sequence
  ENSG00000110315_36 (sequence is synthesized)
gccattaattctatccagtgtatttttttaacctcagataattttcatttctagaagtttgatttgggtttttattatctttcatgtctcttcttactatctttgagctttcctctagtt

SEQ ID NO: 177055 - DNA, 120 bp, Artificial Sequence
  ENSG00000110315_37 (sequence is synthesized)
aactatatagaatatagctataataactttccattttatctgctaattctaatatctgtgttagttctgggtggttatgattgatttttctctttattatagattatatttttctgctgc

SEQ ID NO: 177056 - DNA, 120 bp, Artificial Sequence
  ENSG00000110315_38 (sequence is synthesized)
ctgcttttttgtatgtctggtagttctcaactggatgccagactttgtggcagactttgtgaattttacctttttgggtattggatatttttgtattcctatgaatattcttgagctttt

SEQ ID NO: 177057 - DNA, 120 bp, Artificial Sequence
  ENSG00000110315_39 (sequence is synthesized)
tttctggactatagttaagtgacttggaaacagtttgattcttttggatcttgcttttgtgatttgttaggcaggaccagagcagtatttagtttagaactaattatgtcccactaatag

SEQ ID NO: 177058 - DNA, 120 bp, Artificial Sequence
  ENSG00000110315_40 (sequence is synthesized)
caagaccctttagagaactctactgataccccaagagttatgaggttttccagtctggctggtgaaacaggcagtatcccaggcccagtgagctttaggggactatcccctcaaagccct

SEQ ID NO: 177059 - DNA, 120 bp, Artificial Sequence
  ENSG00000110315_41 (sequence is synthesized)
ttgattgattgttcagcctcggtagtgtcttcacatgcacacactgatcagcactctgctgagtattctggcggggacacttccgtagacctctggaattttccctctgtgcagctttcc

SEQ ID NO: 177060 - DNA, 120 bp, Artificial Sequence
  ENSG00000110315_42 (sequence is synthesized)
attaccctgccctgtaaaccctagctgtttggccccccaagattctcagctctgtgtgttcagctcagggagtttgccatgttccatcaagcttcccgcttcttgatcaggggctagaaa

SEQ ID NO: 177061 - DNA, 120 bp, Artificial Sequence
  ENSG00000110315_43 (sequence is synthesized)
ctctcgaggctgtaagctgaggcaagtataggtctcaccttctttgactcccatgtcccagggatcactgtcctttgttgtctgatggccagtgctttatttgaaagattgtatgaaacc

SEQ ID NO: 177062 - DNA, 120 bp, Artificial Sequence
  ENSG00000110315_44 (sequence is synthesized)
attgttttagtaattttaggtgggaagataaatctagcctctgttggttggaaacagaagttgactatttttaaattgtgatgttttgtgcacagaagagcatacatataattatcttgt

SEQ ID NO: 177063 - DNA, 120 bp, Artificial Sequence
  ENSG00000110315_45 (sequence is synthesized)
aaaatacctctgaagaactagaaatcaacctaaataatatatgccagctgtagctttcacatttagtttttggaacagagttctaaatttttgcataaaagccaaagagcagttgataca

SEQ ID NO: 177064 - DNA, 120 bp, Artificial Sequence
  ENSG00000110315_46 (sequence is synthesized)
aataattactttggtcccagatttcactgagagatgaaaagaaaaacatttttctctgcataatatgtctctggctcaaatacggtattttttaaattaccaaaataatgtttgaccaga

SEQ ID NO: 177065 - DNA, 120 bp, Artificial Sequence
  ENSG00000110315_47 (sequence is synthesized)
aaaaaatccttttcgaaaacataatcttatttaagtgatcatatatgagttcttcccctgccagaaaaattactgtgcatgtaaagtttatcttttaactttgtatgctccatttttata

SEQ ID NO: 177066 - DNA, 120 bp, Artificial Sequence
  ENSG00000110315_48 (sequence is synthesized)
taagtcttcctgttgcttatgagccataggaattttttcagacctttaagcaagcaacaggtagatatattgttgaaagtcatgtagatatttcttagaaaaataattaataatatcctt

SEQ ID NO: 177067 - DNA, 120 bp, Artificial Sequence
  ENSG00000110315_49 (sequence is synthesized)
tcttcttgtcatattcccctgccactgccaagaagttattcctagagtaatggcttccatttaaataatcacgaataagcatttatacttgacactttgaccaaatcttccattgatgcg

SEQ ID NO: 177068 - DNA, 120 bp, Artificial Sequence
  ENSG00000110315_50 (sequence is synthesized)
agggaatttcctcttgggactcagaaggaatttttattataaaggaatactttacctgtttaggtatggggatgcgaattgctgcattgttggtagcaacaaaagatgggaaaaaaaact

SEQ ID NO: 177069 - DNA, 120 bp, Artificial Sequence
  ENSG00000110315_51 (sequence is synthesized)
aaatgtccttctgcaggagactagttaaacaaattatggcatagcgatacagtgtatgttaaaaagaataaacagctctaacaggtgctgatacatactagtctgtaagatatattgaca

SEQ ID NO: 177070 - DNA, 120 bp, Artificial Sequence
  ENSG00000110315_52 (sequence is synthesized)
agtggagaaatgtgtgtgtgcacgtgcgtgcatgtgtgtacacataagcttaatccagcttagtctatctctggaggaatatataagaaactggtaactgtggttgcccctgggaaagag

SEQ ID NO: 177071 - DNA, 120 bp, Artificial Sequence
  ENSG00000110315_53 (sequence is synthesized)
aattgaagattgagataggagggagggatttatttttcactatatatttctatgctatttcctttttaaaagccatgtgcatgtattactttaaataaaatcctgtttttaaaaaagaag

SEQ ID NO: 177072 - DNA, 120 bp, Artificial Sequence
  ENSG00000110315_54 (sequence is synthesized)
aatggtaagttacctactgcattcatgggctgggccaaggtcagtgggatagtgtacatgaataaactttgaaaagtgcaaaaatactgtagttaagtatgagagagattttattcttta

SEQ ID NO: 177073 - DNA, 120 bp, Artificial Sequence
  ENSG00000110315_55 (sequence is synthesized)
gtactttgaattttatggcatgccttctactggttaaaactatttttgtttttacacctaacatttattaaatatgggggtgtaccttagttttgacacttttcttttgctgtatgaaaa

SEQ ID NO: 177074 - DNA, 120 bp, Artificial Sequence
  ENSG00000110315_56 (sequence is synthesized)
tttgtgcctgacttaagtctaaaatcaaacatttccctttttcctcctttttttctcctcatttctacatttattctgtgtatgtgtttagaaggaataaattcttgaatactggacctc

SEQ ID NO: 177075 - DNA, 120 bp, Artificial Sequence
  ENSG00000110315_57 (sequence is synthesized)
agggaactttagagatcagctagtcaagttcattattttacaaaataagacttgagcgtttaggataatttataaaatacatacaataaactacatgtatttaatgtacagtttaatatg

SEQ ID NO: 177076 - DNA, 120 bp, Artificial Sequence
  ENSG00000110315_58 (sequence is synthesized)
ttttggcatatatacacacccataaaagttatgaatttttataaatggaatcatataatatgtgctttttttgtctggcttctttcattcagtctaattaccttggtatttattcatgtt

SEQ ID NO: 177077 - DNA, 120 bp, Artificial Sequence
  ENSG00000110315_59 (sequence is synthesized)
gtagcatgtatcaatagttcatgcctttttattgctgagtaatgtctgttatgtggataccatagcttgtttattcacctattgagggaaattagattattttccatatttatctattac

SEQ ID NO: 177078 - DNA, 120 bp, Artificial Sequence
  ENSG00000110315_60 (sequence is synthesized)
cagttgcccggggtggcggtggcttgtcccgcctcggggtggttctgagggacccggagagagtttttccttctctatcccaaaacggttgtttgaatattgccgccggctcagtcattc

SEQ ID NO: 177079 - DNA, 120 bp, Artificial Sequence
  ENSG00000110318_0 (sequence is synthesized)
gcgccgtcggttgttgtcaagatggcggctgcagggttgctgccgccccatctgctattgcccggcgaggtcgccgctgcctcagctgccatcgccgctacaggcaccagtgccgctgcg

SEQ ID NO: 177080 - DNA, 120 bp, Artificial Sequence
  ENSG00000110318_1 (sequence is synthesized)
cgggagctagggctgtcgaggccaacccttccgcgcccgtgacgcggggcctgagagacggagtgtagggaggggccgagcaggaggaggaggaagccggagctgccatgagggaggttc

SEQ ID NO: 177081 - DNA, 120 bp, Artificial Sequence
  ENSG00000110318_2 (sequence is synthesized)
tgggggcgagcagacaggcggcgctgaagtgaaggatgctggcggggaggcccggaacccggagcgcggtcggggaactgggcactgaatcatcggacaacctcgacagagcccccctcg

SEQ ID NO: 177082 - DNA, 120 bp, Artificial Sequence
  ENSG00000110318_3 (sequence is synthesized)
gccctcgggagagcggcgggcatcaccgacctggctcttacctagatatgaaaatccatctggagaaaaatttagaagaagagcgccagatattactgcagcaacaaaaaatatgtcgaa

SEQ ID NO: 177083 - DNA, 120 bp, Artificial Sequence
  ENSG00000110318_4 (sequence is synthesized)
atcgagcacgtaaatattttgtggagtcaaatcggagaaaaaaagcttttgaggagaaacgaaaagaacaggaagaaaaagaacaccaaattagagaacaaatacttcaacaaagaaaac

SEQ ID NO: 177084 - DNA, 120 bp, Artificial Sequence
  ENSG00000110318_5 (sequence is synthesized)
agaagtttgaagaagttactgaaaaattccagcgtgcccatgttcctctttcacagcggaggaaagcagtttcccgaaaaccagttcctccattagaagaggccctcaaacaaattcagg

SEQ ID NO: 177085 - DNA, 120 bp, Artificial Sequence
  ENSG00000110318_6 (sequence is synthesized)
aatccaacttaaaatcagaagtaaaccttcccttttcccgtagaccaacaataaactggagagctatagattctgccttgccttccgcattatcaaaaaatgatcacaagcatcagaaac

SEQ ID NO: 177086 - DNA, 120 bp, Artificial Sequence
  ENSG00000110318_7 (sequence is synthesized)
aactcttatccaaaatcaattgtgagaaagaaatgaatgaaaacatgagggcaaccttggctactagcaaaaatgtgttccagcttaaactggaggaaactcagaaactcctcgaagatc

SEQ ID NO: 177087 - DNA, 120 bp, Artificial Sequence
  ENSG00000110318_8 (sequence is synthesized)
aacatctaagcaatttgcaaaaattttgtgatgaagttaatcagataaccaattctgaaaccctctcaagtatagacagtcttgaggctacagagcatgaagaaatatatttaacactta

SEQ ID NO: 177088 - DNA, 120 bp, Artificial Sequence
  ENSG00000110318_9 (sequence is synthesized)
ataaggagcattccacatccatccagcggaataccatttccctcaaaccagcaaatatgcaatcaactaatctcagctgctttgatgaagataaactggcattctctaaaactcaacata

SEQ ID NO: 177089 - DNA, 120 bp, Artificial Sequence
  ENSG00000110318_10 (sequence is synthesized)
taaataattggcttacaaatttagatgcttcaaatactcagaatgtcacagctttctcagatattttaagtaaatctaatgttctgccttcatgggaatattttaatagtaaagaacaaa

SEQ ID NO: 177090 - DNA, 120 bp, Artificial Sequence
  ENSG00000110318_11 (sequence is synthesized)
atccatctcctttgaatggaacagtggaaagagccacaaatactgctaataattcagtaccctttgtatctagcccacccatgtttgtactagataaaaaatgtgaaaagacctctgaaa

SEQ ID NO: 177091 - DNA, 120 bp, Artificial Sequence
  ENSG00000110318_12 (sequence is synthesized)
ctagcactatgaggacaactgactccacttctggagcattcaaaagagagagaccattagttactgagagcccaacatttaaatttagcaaatcccaaagcacttcagattctctaaccc

SEQ ID NO: 177092 - DNA, 120 bp, Artificial Sequence
  ENSG00000110318_13 (sequence is synthesized)
aggaagtggctacatttccagaccaagagaaatattctgaattaaatcaagaaaatggaactacttcaattcctacttcatgtgtaccagtggcaacgcctttagttttgccatctaata

SEQ ID NO: 177093 - DNA, 120 bp, Artificial Sequence
  ENSG00000110318_14 (sequence is synthesized)
tacagtcagctagaccttcagcaaagaacagtatacacataaaagaaattgatgcagtgcagtgttctgataagttagatgaattgaaagatggtaaagaagaagagataaaatatttta

SEQ ID NO: 177094 - DNA, 120 bp, Artificial Sequence
  ENSG00000110318_15 (sequence is synthesized)
attgcaataaggaagagttgcctttattttcagacagttttcaagatgcctatatacctcacaatcctgattcaaaagatgaaaaacaaaaattagctgaaacatcatccttgtctaatg

SEQ ID NO: 177095 - DNA, 120 bp, Artificial Sequence
  ENSG00000110318_16 (sequence is synthesized)
taacttctaattatgactttgttggccagcataagaaaatgaaatacaacatccatgagagaaatggtgtgagatttcttaaaagtattttaaagaaagaatctaaatatgaacatggtt

SEQ ID NO: 177096 - DNA, 120 bp, Artificial Sequence
  ENSG00000110318_17 (sequence is synthesized)
atcttaaggcattaattataaatcagagctttaagtttggaaatcaaaaagcagcagctatcagagatagtattgaattaacaaaggaaaaaggtgcagaaattccaaagaccattaaaa

SEQ ID NO: 177097 - DNA, 120 bp, Artificial Sequence
  ENSG00000110318_18 (sequence is synthesized)
aactgaggtggtttgatgaaactagcaatatagaaaacaatgctgaaaacagtcattcactgaagaataaaacaggaacaactcaacagcattctcaacaattccacattcaaagtggtg

SEQ ID NO: 177098 - DNA, 120 bp, Artificial Sequence
  ENSG00000110318_19 (sequence is synthesized)
ctggaagcaacataattagtgtttctacttgtgctgtaaattctgctgatacaaagaagtccagggaggattctatctctgaaaatgttacgactttaggaggatctggagcagaccata

SEQ ID NO: 177099 - DNA, 120 bp, Artificial Sequence
  ENSG00000110318_20 (sequence is synthesized)
tgcctttgaactgttttataccttcaggttataactttgctaaacatgcctggccagcctcaaaaaaagaagaaagtaaaatccctgtacatgatgattctaaaactaagcaaggtaagc

SEQ ID NO: 177100 - DNA, 120 bp, Artificial Sequence
  ENSG00000110318_21 (sequence is synthesized)
cacaaagaggtagagcaaaaataattagaaaaccaggatctgcaaaagtccaatcaggctttatatgtacaaacagaaaaggcgctgtcattcaaccacagtctgcaagcaaagtcaaca

SEQ ID NO: 177101 - DNA, 120 bp, Artificial Sequence
  ENSG00000110318_22 (sequence is synthesized)
tatttacacaagctcagggaaaattaattataccttgtcctcctcctcaatctacatcaaatattagaagtggtaaaaatatacaagtgtctcagtgtcaaccagtaactcctgaaaatc

SEQ ID NO: 177102 - DNA, 120 bp, Artificial Sequence
  ENSG00000110318_23 (sequence is synthesized)
ctcaaaacattattacacataactcttttaattcaaaacatgtgcttccaacagaacacagtttgaatcagtggaatcaggaaagtagttctccactctcaaatgcttgttctgacctag

SEQ ID NO: 177103 - DNA, 120 bp, Artificial Sequence
  ENSG00000110318_24 (sequence is synthesized)
tcactgtgataccatcactgccatcatattgttcttcagagtgccaaactttcgcaaaaataaatcattcaaatggcactcaagcagttgcccggcaagatgcgacattatattgcaccc

SEQ ID NO: 177104 - DNA, 120 bp, Artificial Sequence
  ENSG00000110318_25 (sequence is synthesized)
aaagaagtcctgtttgtgaagaaagttatccgtctgtgactctaagaactgctgaagaagaatcagttcccttatggaaaagaggtcctaatgtcctgcatcaaaataagagggctacag

SEQ ID NO: 177105 - DNA, 120 bp, Artificial Sequence
  ENSG00000110318_26 (sequence is synthesized)
ggtctactgttatgagaagaaaacgaattgctgaaactaagcggagaaatattttagagcagaaaagacaaaaccctggatctgtaggacagaagtacagtgagcaaattaataattttg

SEQ ID NO: 177106 - DNA, 120 bp, Artificial Sequence
  ENSG00000110318_27 (sequence is synthesized)
gacaaagtgtcctgctaagttcaagtgagccaaaacaaactacaaggggtacttcttatattgaagaagtttcagatagtacttctgagtttttgatggctgaaaacttagtgaaagcat

SEQ ID NO: 177107 - DNA, 120 bp, Artificial Sequence
  ENSG00000110318_28 (sequence is synthesized)
cagtgccggaggatgagattctgactgtcttgaatagcaaacagatacagaaatcaaatctacctttaaataaaactcaacaattcaacatctgcacactgtcagctgaagaacagaaga

SEQ ID NO: 177108 - DNA, 120 bp, Artificial Sequence
  ENSG00000110318_29 (sequence is synthesized)
aataataccacttctggagaagagagaagatagaaccagcagctgcagagacaagagataattccagcagaatccgtctaagaagacctttcatgtacttccctaggactagatgcatac

SEQ ID NO: 177109 - DNA, 120 bp, Artificial Sequence
  ENSG00000110318_30 (sequence is synthesized)
cgttttgtgaaaaccagccataggaaaacatgtgagcaacaacccccatgaacatttgtcctaactcagattttgtgagcagtgaagtttaacagagcagtgacatttaacaaagcagtg

SEQ ID NO: 177110 - DNA, 120 bp, Artificial Sequence
  ENSG00000110318_31 (sequence is synthesized)
aagtttaacagagttctgagaataccatgaaagacattatgcctgcctaaacaaaaagcaggacataacctagctctgaatacatgccacaaggatgaagcttgtgagtagagcaaacaa

SEQ ID NO: 177111 - DNA, 120 bp, Artificial Sequence
  ENSG00000110318_32 (sequence is synthesized)
acgtttttccaaagaattcacagtgctcctttgcaatttatagatttcatgttgaaatatatgttaaataaaatttctgtttattgaacctctttattaaacctctaacttactgataag

SEQ ID NO: 177112 - DNA, 120 bp, Artificial Sequence
  ENSG00000110318_33 (sequence is synthesized)
atgtttatgaagtatggcatattttgatttttttaattgtaataaatattcttaaagttaccacatcccacaaaatggcccttggtggcagcaatagagcaaaggttacctttttgtatg

SEQ ID NO: 177113 - DNA, 120 bp, Artificial Sequence
  ENSG00000110318_34 (sequence is synthesized)
gtgaagggaggccttcctatggctgtacaattacatcgattcttccaaatttcatatttcatacatggcactttggcataccgaaaaaacatgaaatttttcattaaaatgccatgaatc

SEQ ID NO: 177114 - DNA, 90 bp, Artificial Sequence
  ENSG00000110318_35 (sequence is synthesized)
cagggccgtaggccgaggtagacagatggcttgagctcaggagttcgtgaccagcctgggcaaccctgtctctacaaaaaatacaaaaat

SEQ ID NO: 177115 - DNA, 90 bp, Artificial Sequence
  ENSG00000110318_36 (sequence is synthesized)
catgcacctgtagtcccagctacttggggtgctgaggcgggaggattacttgagcccaggaggattacttcaatttcgccactgcacacc

SEQ ID NO: 177116 - DNA, 120 bp, Artificial Sequence
  ENSG00000110318_37 (sequence is synthesized)
gtgtttcgccactgcacaccagcctgggtgacagtgtgagacccagcctcaaaaaaaaaaaaaaaaaagtgatgaatcaaaattagaaattaagagttttaagaaaacatgtggcctttt

SEQ ID NO: 177117 - DNA, 120 bp, Artificial Sequence
  ENSG00000110318_38 (sequence is synthesized)
attaataacactactaaattttggttcctccatagaattagttttgaaacacttgatgtagtgagaaatgcattaacatgttgaatgcctaccatgtaccaaattttgtgcatatatttt

SEQ ID NO: 177118 - DNA, 120 bp, Artificial Sequence
  ENSG00000110318_39 (sequence is synthesized)
ttatttaatctgaccagccacccaaaccatgggtatttttgtctccactttagagatgagaaactgagccaaggccacatagctacctacagtgacagaatcaaaattcaaactcaggtt

SEQ ID NO: 177119 - DNA, 120 bp, Artificial Sequence
  ENSG00000110318_40 (sequence is synthesized)
tatctagttccaaaacccatgttctttctgccacaccatgttagtagaaatggaaactattggatgaaatgaggaaaaacaggaaaagaattcactttttaaatgaagaaattagtgaaa

SEQ ID NO: 177120 - DNA, 120 bp, Artificial Sequence
  ENSG00000110318_41 (sequence is synthesized)
aaattgacctaatgaaggaaacatttgtgctttcctatatttttaattttaagaataggatttcggaaggcgacagaaaatttagttcttagacatttaaatagaaagttgtgtgcccct

SEQ ID NO: 177121 - DNA, 120 bp, Artificial Sequence
  ENSG00000110318_42 (sequence is synthesized)
atagaaaatatttgagaatttcttatactatcaagaaaaaattctgtgaattaagatgtaatttataaaataacatttcaatgggggtaaacaggccagaagagtgtgccaagttgtttg

SEQ ID NO: 177122 - DNA, 120 bp, Artificial Sequence
  ENSG00000110318_43 (sequence is synthesized)
tgaatcattccaagcacctcagatgaaaactcacttttattaaaaaaaaaaaagacaagggtttatattcatatacactagtatatatgtacacagcagcatcctgcatgccaaagtagc

SEQ ID NO: 177123 - DNA, 120 bp, Artificial Sequence
  ENSG00000110318_44 (sequence is synthesized)
ttcaccgttagtaatccctcactttaatacctcttaggaaccaaagaatgcctctacaagcaaaaagatagttgaaaatagttaagatccaaagtcagaataggccaaaaaaaaaaaaaa

SEQ ID NO: 177124 - DNA, 120 bp, Artificial Sequence
  ENSG00000110318_45 (sequence is synthesized)
aaaaagcctaaatagtaagctggtgaaacaagataagatttgcattttactagaacttgcacattatgatattgtccttttatgaaactgtcatatgaccagaattcttctgtaattctg

SEQ ID NO: 177125 - DNA, 120 bp, Artificial Sequence
  ENSG00000110318_46 (sequence is synthesized)
cccatgactcctccagaattttagtagatacagggtgggttcattaagagtgataaaagtgggaagacataaagagcctttgtgaattaaagtggaagagaataacactttgcatgctat

SEQ ID NO: 177126 - DNA, 120 bp, Artificial Sequence
  ENSG00000110318_47 (sequence is synthesized)
aaagtggaagagaataacactttgcatgctataaacgtgaaaactaacatttttggccagacacagtggctcatgcatgtaattctagcactttggaggccaaggcaggaggactgcttg

SEQ ID NO: 177127 - DNA, 69 bp, Artificial Sequence
  ENSG00000110318_48 (sequence is synthesized)
catctctatataaaatataaaaatgttggctgtgcacggtagcttatgcctgtaatctcagcactttgg

SEQ ID NO: 177128 - DNA, 88 bp, Artificial Sequence
  ENSG00000110318_49 (sequence is synthesized)
cagtgagctgagattgcaccactgcacaaaaatgaataaataaaataaaaataaaaatgttactttttaaaaagtaacttttttaata

SEQ ID NO: 177129 - DNA, 120 bp, Artificial Sequence
  ENSG00000110318_50 (sequence is synthesized)
agtaacttttttaataatataagaaagaaaaatgccctttcacactgaatcttcaagttctaaggaagaaaagagtctcctttcgaatgtgaagaagtaaatttagaggaaatcaaacaa

SEQ ID NO: 177130 - DNA, 120 bp, Artificial Sequence
  ENSG00000110318_51 (sequence is synthesized)
gtaaatttagaggaaatcaaacaagcatcactttcctcagtggaaaaacttatgaaacttcttataagagagagtaatctcaggccggacatgctggctcatacctgtaatcccagaact

SEQ ID NO: 177131 - DNA, 120 bp, Artificial Sequence
  ENSG00000110318_52 (sequence is synthesized)
gagctcaggaattcaagaccagcctgggtaatatggcaagagcccaactctactaaaaatacaaaaagaaaagaaaacagccaagcttggtggtatgtgcctgtggtcccagctactggg

SEQ ID NO: 177132 - DNA, 120 bp, Artificial Sequence
  ENSG00000110318_53 (sequence is synthesized)
gagcctgggaggcagaggttgcagtgatcaggaattgtgccactgcactccaacctgagtgacagagcaacactctgtcttaaaagaaaaaaaaaaaagagagagatagtaatctcttgg

SEQ ID NO: 177133 - DNA, 120 bp, Artificial Sequence
  ENSG00000110318_54 (sequence is synthesized)
aaaaaagagagagatagtaatctcttgggcaaaaggtatcaaataattgaaagaaaagtttaaacacatttccgagaggcagggcaactaataactggtcagaaaaatttagacggtctt

SEQ ID NO: 177134 - DNA, 120 bp, Artificial Sequence
  ENSG00000110318_55 (sequence is synthesized)
cattttaaaattggcatcaggaaggattaccatgaacttattttaaatccatattgtaccagaatgactatgtctgtgtttcttaggaatgttgaagctttttgtgaaaactgtactgta

SEQ ID NO: 177135 - DNA, 120 bp, Artificial Sequence
  ENSG00000110318_56 (sequence is synthesized)
gtactgtatacatatataaatatacacacacttacatgtatgtattttgatagatattacatggactaaattttgtcaatttcatgtaatttaccctttgcaataaaaatgattcattaa

SEQ ID NO: 177136 - DNA, 120 bp, Artificial Sequence
  ENSG00000110318_57 (sequence is synthesized)
tccaacttaaaatcagaagtaaaccttcccttttcccgtagaccaacaataaactggagctccactggttgtttccccaacccctttggaacctctccctgttttgaagccttcctgttt

SEQ ID NO: 177137 - DNA, 120 bp, Artificial Sequence
  ENSG00000110318_58 (sequence is synthesized)
atccagtcaccccccttatccaccagtccccactctttcttatgtcactccgttgcctgcacatcctgctagcttggatccttttcagtcagtccagcaatctgttccacaagccacagc

SEQ ID NO: 177138 - DNA, 120 bp, Artificial Sequence
  ENSG00000110318_59 (sequence is synthesized)
attgtcaaatcagcccgaggcctttgcagatcatccaccagcctcagttctctcccttgcatctccctgtcattctccatcttcttctttgccttcatctccttctacttccacatcctt

SEQ ID NO: 177139 - DNA, 120 bp, Artificial Sequence
  ENSG00000110318_60 (sequence is synthesized)
ttcttcagcctgtatactgttttcttcctcctcatctattctttcctcttcttcgacttcctgttctacttctccatccttacctccttcatctatccctcttttttcctctcctttgca

SEQ ID NO: 177140 - DNA, 120 bp, Artificial Sequence
  ENSG00000110318_61 (sequence is synthesized)
ttcatcttcctctccaggtttgcctccaacttatttagcttttccctctccagtttctcctgtttcttcttcctttatgatttcctcttcctttccccctattcttcactctccttctgt

SEQ ID NO: 177141 - DNA, 120 bp, Artificial Sequence
  ENSG00000110318_62 (sequence is synthesized)
ttctacctccccatctccttttattcctatccaccccttcaatcctcctcattgggggaagaaagtagagaagagaagagaagaaagtggagtagagaagaaaggaatagagaagaaagt

SEQ ID NO: 177142 - DNA, 120 bp, Artificial Sequence
  ENSG00000110318_63 (sequence is synthesized)
tttcccgtagaccaacaataaactggagatccattcctgcctgtccagctgtctccacacctgacccctacttacctgatcaactgtctcctccacgggtcccattgcggtcccaccact

SEQ ID NO: 177143 - DNA, 120 bp, Artificial Sequence
  ENSG00000110318_64 (sequence is synthesized)
tccaaattcttcctagctacccaactgtttctcctgcccgccagccccatatactgcctatccatccatctgtaccctctactcttccaaagacctttgcaccagtcccattactgcctt

SEQ ID NO: 177144 - DNA, 120 bp, Artificial Sequence
  ENSG00000110318_65 (sequence is synthesized)
acccaattaaatatcatccttgtcctccaaccccggctacttccagcatttctagcagtttccctcgtctaccagcaccaattccttcttgcccacctggccatccaccccacgcacccc

SEQ ID NO: 177145 - DNA, 120 bp, Artificial Sequence
  ENSG00000110318_66 (sequence is synthesized)
agagttctccaatcattcctgaccctgagtcacagcacaagttattttacaaaactttcagacccaaacatttccttccagcacagcattctactgcagccactctaatgcctacccttg

SEQ ID NO: 177146 - DNA, 120 bp, Artificial Sequence
  ENSG00000110321_0 (sequence is synthesized)
aaagagctgggcgccgggctggcgggggtggcctcagctgctcctccccgtcgagcgacccgggcctcgcggggaggttgtcggaagcacttccctaacttgcgcctgggtgggaggaat

SEQ ID NO: 177147 - DNA, 120 bp, Artificial Sequence
  ENSG00000110321_1 (sequence is synthesized)
gctccgctcttttgttcccaggaagggaaaaacggggcggaggttcctgctgccatgttgtggccctggtcttccgcctgcaagtgctagtcctgtacacccggccccctctcgcgcgtc

SEQ ID NO: 177148 - DNA, 120 bp, Artificial Sequence
  ENSG00000110321_2 (sequence is synthesized)
tttccacgagctctccacggggaggaggcgaaagggtggacaggggaaaactgctgaagagctttcggagagacctcatctagtcgctggcctcgtcaaggcagtaaaaattcctagggc

SEQ ID NO: 177149 - DNA, 120 bp, Artificial Sequence
  ENSG00000110321_3 (sequence is synthesized)
agacattttccacgtgatgttgctcgtgtctgtagttagacttttctattgatctcagtgctcagttttaaagatagtagaatgtggctttttcaaaagattcgttctgagccgtttaaa

SEQ ID NO: 177150 - DNA, 120 bp, Artificial Sequence
  ENSG00000110321_4 (sequence is synthesized)
atgctcttgtgttctacgaagtctctttgcatccttgaacaccggggaatttccaggtggctaaacaaaatgtatttcatttctcctgtcccctcccctccccaccccatctattaatat

SEQ ID NO: 177151 - DNA, 120 bp, Artificial Sequence
  ENSG00000110321_5 (sequence is synthesized)
tattcttttgaagattcttcgttgtcaagccgccaaagtggagagtgcgattgcagaagggggtgcttctcgtttcagtgcttcttcgggcggaggaggaagtaggggtgcacctcagca

SEQ ID NO: 177152 - DNA, 120 bp, Artificial Sequence
  ENSG00000110321_6 (sequence is synthesized)
ctatcccaagactgctggcaacagcgagttcctggggaaaaccccagggcaaaacgctcagaaatggattcctgcacgaagcactagacgagatgacaactccgcagcaaacaactccgc

SEQ ID NO: 177153 - DNA, 120 bp, Artificial Sequence
  ENSG00000110321_7 (sequence is synthesized)
aaacgaaaaagaacgacatgatgcaatcttcaggaaagtaagaggcatactaaataagcttactcctgaaaagtttgacaagctatgccttgagctcctcaatgtgggtgtagagtctaa

SEQ ID NO: 177154 - DNA, 120 bp, Artificial Sequence
  ENSG00000110321_8 (sequence is synthesized)
gagccaaagtatagctcactgtatgctcagctatgtctgcgattggcagaagatgcaccaaactttgatggcccagcagcagagggtcaaccaggacagaagcaaagcaccacattcaga

SEQ ID NO: 177155 - DNA, 120 bp, Artificial Sequence
  ENSG00000110321_9 (sequence is synthesized)
cgcctcctaatttccaaattacaagatgaatttgaaaaccgaactagaaatgttgatgtctatgataagcgtgaaaatcccctcctccccgaggaggaggaacagagagccattgctaag

SEQ ID NO: 177156 - DNA, 120 bp, Artificial Sequence
  ENSG00000110321_10 (sequence is synthesized)
atcaagatgttgggaaacatcaaattcattggagagcttggcaagcttgatcttattcacgaatctatccttcataagtgcatcaaaacacttttggaaaagaagaagagagtccaactc

SEQ ID NO: 177157 - DNA, 120 bp, Artificial Sequence
  ENSG00000110321_11 (sequence is synthesized)
aaagatatgggagaggatttggagtgcctctgtcagataatgaggacagtgggacctagattagaccatgaacgagccaagtccttaatggatcagtactttgcccgaatgtgctccttg

SEQ ID NO: 177158 - DNA, 120 bp, Artificial Sequence
  ENSG00000110321_12 (sequence is synthesized)
atgttaagtaaggaattgccagcaaggattcgtttcctgctgcaggataccgtagagttgcgagaacaccattgggttcctcgcaaggcttttcttgacaatggaccaaagacgatcaat

SEQ ID NO: 177159 - DNA, 120 bp, Artificial Sequence
  ENSG00000110321_13 (sequence is synthesized)
caaattcgtcaagatgcagtaaaagatctaggggtgtttattcctgctcctatggctcaagggatgagaagtgacttctttctggagggaccgttcatgccacccaggatgaaaatggat

SEQ ID NO: 177160 - DNA, 120 bp, Artificial Sequence
  ENSG00000110321_14 (sequence is synthesized)
agggacccacttggaggacttgctgatatgtttggacaaatgccaggtagcggaattggtactggtccaggagttatccaggatagattttcacccaccatgggacgtcatcgttcaaat

SEQ ID NO: 177161 - DNA, 120 bp, Artificial Sequence
  ENSG00000110321_15 (sequence is synthesized)
caactcttcaatggccatgggggacacatcatgcctcccacacaatcgcagtttggagagatgggaggcaagtttatgaaaagccagattagcctgaggcctgctcagtcgttcctaatg

SEQ ID NO: 177162 - DNA, 120 bp, Artificial Sequence
  ENSG00000110321_16 (sequence is synthesized)
aggcgtcccggagcctggcctcccggcggggaggtgtgtaggacctggagtcggcaggggctgcccttcgtcggggaggaaagagagagtgatgatttctgccccttttgtcagcagagg

SEQ ID NO: 177163 - DNA, 120 bp, Artificial Sequence
  ENSG00000110321_17 (sequence is synthesized)
ctgaaatacgttgtaattgaatgaaggcttatagatctgtatgttagcagtgtctaattttggtgctctttctcgttccaggtatttcatttctcctgtcccctcccctccccaccccat

SEQ ID NO: 177164 - DNA, 120 bp, Artificial Sequence
  ENSG00000110321_18 (sequence is synthesized)
tgggaggcaagtttatgaaaagccaggggctaagccagctctaccataaccagagtcagggactcttatcccagctgcaaggacagtcgaaggatatgccacctcggttttctaagaaag

SEQ ID NO: 177165 - DNA, 120 bp, Artificial Sequence
  ENSG00000110321_19 (sequence is synthesized)
gcactcaaacaccacctctgggacagacacctcagcttggtctcaaaactaatccaccgcttatccaggaaaagcctgccaagaccagcaaaaagccaccaccgtcaaaggaagaactcc

SEQ ID NO: 177166 - DNA, 120 bp, Artificial Sequence
  ENSG00000110321_20 (sequence is synthesized)
aggctgtcaatggtgtaagagaaatgagggctcctaaacactttcttcctgagatgttaagcaaagtaatcatcctgtcactagatagaagcgatgaagataaagaaaaagcaagttctt

SEQ ID NO: 177167 - DNA, 120 bp, Artificial Sequence
  ENSG00000110321_21 (sequence is synthesized)
tgatcagtttactcaaacaggaagggatagccacaagtgacaacttcatgcaggctttcctgaatgtattggaccagtgtcccaaactggaggttgacatccctttggtgaaatcctatt

SEQ ID NO: 177168 - DNA, 120 bp, Artificial Sequence
  ENSG00000110321_22 (sequence is synthesized)
tagcacagtttgcagctcgtgccatcatttcagagctggtgagcatttcagaactagctcaaccactagaaagtggcacccattttcctctcttcctactttgtcttcagcagttagcta

SEQ ID NO: 177169 - DNA, 120 bp, Artificial Sequence
  ENSG00000110321_23 (sequence is synthesized)
aattacaagatcgagaatggttaacagaactttttcaacaaagcaaggtcaatatgcagaaaatgctcccagaaattgatcagaataaggaccgcatgttggagattttggaaggaaagg

SEQ ID NO: 177170 - DNA, 120 bp, Artificial Sequence
  ENSG00000110321_24 (sequence is synthesized)
gactgagtttcttattcccactcctcaaattggagaaggaactgttgaagcaaataaagttggatccatcccctcaaaccatatataaatggattaaagataacatctctcccaaacttc

SEQ ID NO: 177171 - DNA, 120 bp, Artificial Sequence
  ENSG00000110321_25 (sequence is synthesized)
atgtagataaaggatttgtgaacatcttaatgactagcttcttacagtacatttctagtgaagtaaacccccccagcgatgaaacagattcatcctctgctccttccaaagaacagttag

SEQ ID NO: 177172 - DNA, 120 bp, Artificial Sequence
  ENSG00000110321_26 (sequence is synthesized)
agcaggaaaaacaactactactatctttcaagccagtaatgcagaaatttcttcatgatcacgttgatctacaagtcagtgccctgtatgctctccaggtgcactgctataacagcaact

SEQ ID NO: 177173 - DNA, 120 bp, Artificial Sequence
  ENSG00000110321_27 (sequence is synthesized)
tcccaaaaggcatgttacttcgcttttttgtgcacttctatgacatggaaattattgaagaagaagctttcttggcttggaaagaagatataacccaagagtttccgggaaaaggcaagg

SEQ ID NO: 177174 - DNA, 120 bp, Artificial Sequence
  ENSG00000110321_28 (sequence is synthesized)
ctttgttccaggtgaatcagtggctaacctggttagaaactgctgaagaagaagaatcagaggaagaagctgactaaagaaccagccaaagccttaaattgtgcaaaacatactgttgct

SEQ ID NO: 177175 - DNA, 120 bp, Artificial Sequence
  ENSG00000110321_29 (sequence is synthesized)
atgatgtaactgcatttgacctaaccactgcgaaaattcattccgctgtaatgttttcacaatatttaaagcagaagcacgtcagttaggatttccttctgcataaggtttttttgtagt

SEQ ID NO: 177176 - DNA, 120 bp, Artificial Sequence
  ENSG00000110321_30 (sequence is synthesized)
gtaatgtcttaatcatagtctaccatcaaatattttaggagtatctttaatgtttagatagtatattagcagcatgcaataattacatcataagttctcaagcagaggcagtctattgca

SEQ ID NO: 177177 - DNA, 120 bp, Artificial Sequence
  ENSG00000110321_31 (sequence is synthesized)
aggaccttctttgctgccagttatcataggctgttttaagttagaaaactgaatagcaacactgaatactgtagaaatgcactttgctcagtaatacttgagttgttgcaatatttgatt

SEQ ID NO: 177178 - DNA, 120 bp, Artificial Sequence
  ENSG00000110321_32 (sequence is synthesized)
atccatttggttgttacagaaaaattcttaactgtaattgatggttgttgccgtaatagtatattgcctgtatttctacctctagtaatgggctttatgtgctagattttaatatccttg

SEQ ID NO: 177179 - DNA, 120 bp, Artificial Sequence
  ENSG00000110321_33 (sequence is synthesized)
agcctgggcaagtgcacaagtctttttaaaagaaacatggtttacttgcacaaaactgatcagttttgagagatcgttaatgcccttgaagtggtttttgtgggtgtgaaacaaatggtg

SEQ ID NO: 177180 - DNA, 120 bp, Artificial Sequence
  ENSG00000110321_34 (sequence is synthesized)
agaatttgaattggtccctcctattatagtattgaaattaagtctacttaatttatcaagtcatgttcatgccctgattttatatacttgtatctatcaataaacattgtgatacttgat

SEQ ID NO: 177181 - DNA, 120 bp, Artificial Sequence
  ENSG00000110321_35 (sequence is synthesized)
gccagcagtgagtcggagctctatggaggtggcagcgggtaccgagtggcggctgcagcagcgactcctctgagctgagtttgaggccgtccccgactccttcctcccccttccctcccc

SEQ ID NO: 177182 - DNA, 120 bp, Artificial Sequence
  ENSG00000110321_36 (sequence is synthesized)
cttttttttgttttccgttcccctttcccctcccttccctatccccgacgaccggatcctgaggaggcagctgcggtggcagctgctgagttctcggtgaaggtatttcatttctcctgt

SEQ ID NO: 177183 - DNA, 120 bp, Artificial Sequence
  ENSG00000110321_37 (sequence is synthesized)
ggtacaaaatggcggccgcaggcggagccgggtggggcgacccttttttagcatttcctctgcgcttcagatacctggaaagtcttggcttttgttctctcttcctgttgctgacggagt

SEQ ID NO: 177184 - DNA, 120 bp, Artificial Sequence
  ENSG00000110321_38 (sequence is synthesized)
agaaggaaaacgtcagtgttggccaggccgccgtgcggtcatggccggatggccgacgcctgcagggacgaggccgtggcggaccgaggcacggctgtgctcggacggcgagggagcgtg

SEQ ID NO: 177185 - DNA, 120 bp, Artificial Sequence
  ENSG00000110321_39 (sequence is synthesized)
acagcaaataagtccgacttaatgggctgcaattttcatttgaaaagttcttaagttttcattgacagccttctaagaactgccatctgaagaataaataaaatcaattatttgcctttc

SEQ ID NO: 177186 - DNA, 120 bp, Artificial Sequence
  ENSG00000110321_40 (sequence is synthesized)
ttgttaaaaatttggtctgcttacttcagtttgcttggtattaacttcaagttaagagcctttttcaactgaaatacaggcaaggtagtcctagttagtagtttgtcttcacctgtacat

SEQ ID NO: 177187 - DNA, 120 bp, Artificial Sequence
  ENSG00000110321_41 (sequence is synthesized)
ttcattctgcactatttgaagctattattaagtaaagctacacaatgaatcaattctagtggtgtataagatgttagaggtagctaacttttcaaggagtatagctacttatatacatgg

SEQ ID NO: 177188 - DNA, 120 bp, Artificial Sequence
  ENSG00000110321_42 (sequence is synthesized)
gacttgaaagttttgatatccatggcattttctgactcccaggagatggatgtgactagatgaaatctgtataactggacatttttggtagactgtaatagctaacatttaggtggttgt

SEQ ID NO: 177189 - DNA, 120 bp, Artificial Sequence
  ENSG00000110321_43 (sequence is synthesized)
ccaaattacaagatgaatttgaaaaccgaactagaaatgttgatggtaagacttatagctgataataagtactactgtatattttcagcttaattctgaatgttggcttacttcattggt

SEQ ID NO: 177190 - DNA, 120 bp, Artificial Sequence
  ENSG00000110321_44 (sequence is synthesized)
atctttttcagtctatgataagcgtgaaaatcccctcctccccgaggaggaggaacagagagccattgctaagatcaagatgttgggaaacatcaaattcattggagagcttggcaagct

SEQ ID NO: 177191 - DNA, 120 bp, Artificial Sequence
  ENSG00000110321_45 (sequence is synthesized)
gacgcgttattaagaggactttatgctggagttcttgacgtttttctctcttttctatacttctttttctttctttgaatgtccagcgtcctgtgagcgaagattatgagatatgagggc

SEQ ID NO: 177192 - DNA, 120 bp, Artificial Sequence
  ENSG00000110321_46 (sequence is synthesized)
aagtctcctaaagtctgttagagcaagaaaactggttgtcaaaatattgtggtttctttctttgtaagggtgatttaactaaggataaaacagggcattttctaaactgtagttaaattt

SEQ ID NO: 177193 - DNA, 120 bp, Artificial Sequence
  ENSG00000110321_47 (sequence is synthesized)
gcagttttttatttgaatattttagtcatgctaattctaagagaatgtaagatttataatagtatcttactactgtatgcatcagatctttaaattttttgccaaaaattaaacctgtta

SEQ ID NO: 177194 - DNA, 120 bp, Artificial Sequence
  ENSG00000110321_48 (sequence is synthesized)
accttctttagtttttcaaaaagcttaatgtttccctagattctgtcactgtataggattttagaatgttgtatttaatatgttcgccaactgcatgttgttaatttagatatattttgt

SEQ ID NO: 177195 - DNA, 120 bp, Artificial Sequence
  ENSG00000110321_49 (sequence is synthesized)
ggtccgagttcagtcttcatttgtagcataatatacaagcactaaaatacaggcctggctccagtctgggcaaaatagcgagacccccatctctacaagcaaagcaaaacacaaaataga

SEQ ID NO: 177196 - DNA, 120 bp, Artificial Sequence
  ENSG00000110321_50 (sequence is synthesized)
tgcttattctttttgagtgagacatagttgggatacagtaaacaatttttttcttttaaatagtgcttcttcgggcggaggaggaagtaggggtgcacctcagcactatcccaagactgc

SEQ ID NO: 177197 - DNA, 120 bp, Artificial Sequence
  ENSG00000110321_51 (sequence is synthesized)
tggcaacaggtgtggtaaacatgtaaaaaaacagtgagctttatttaacagattaaaagtctttcccatgtgacggtataattaaggcaatagccatcaagactcctaatcttaaggggc

SEQ ID NO: 177198 - DNA, 120 bp, Artificial Sequence
  ENSG00000110321_52 (sequence is synthesized)
gtggtttctgttgggtatcctaaatacagaatatcagttcctgattattccttagccaaattttctaagtgagttgagactctcaagctgttatttttttccttattctttgggttattt

SEQ ID NO: 177199 - DNA, 120 bp, Artificial Sequence
  ENSG00000110321_53 (sequence is synthesized)
ttactaatgtgtttttctgaaatcagtagctattattcctactgattgttattagtaaagtagtacgcactcaacatggtcaataaaacattagaaagtgtttattggcagccggtacag

SEQ ID NO: 177200 - DNA, 120 bp, Artificial Sequence
  ENSG00000110321_54 (sequence is synthesized)
tggctcacacctgtaatcccaacaacaactttgggaggcaaaggtgggagggtcgcttgaacccaagagtttgagatcagcctgggcaagacagcaagaccccatctcttaaaaaaaatg

SEQ ID NO: 177201 - DNA, 120 bp, Artificial Sequence
  ENSG00000110321_55 (sequence is synthesized)
ttaattttcaaaatgtggttccacagcgttgatactgggaatatttactagacatgcaaattcttaggccccaccccaaaccagtgaaagcagaaactgggtgggcccagcaatctgtat

SEQ ID NO: 177202 - DNA, 120 bp, Artificial Sequence
  ENSG00000110321_56 (sequence is synthesized)
taacaagcccttcaggtgattctgatgcacactactgttccagaagcactaatttccagagttggctttcttggaggggaagtcgagaaagcctaaattacttttttctatgtaagagaa

SEQ ID NO: 177203 - DNA, 120 bp, Artificial Sequence
  ENSG00000110321_57 (sequence is synthesized)
caagttgtgtttttttacacttggattactacttaaaacccttaggtgtgagttagataggtatgtatttttgaatactgatggtgattaaaaagaaccactgactttagtagcattaga

SEQ ID NO: 177204 - DNA, 120 bp, Artificial Sequence
  ENSG00000110321_58 (sequence is synthesized)
ttgaagaggtaaatgttaagttcatggtatggttgaagaggtaaatgggagtgcttagcaagctgttctttttcttttgtggaaaacaccgtatttaggtcttggaaatgcattgtatga

SEQ ID NO: 177205 - DNA, 120 bp, Artificial Sequence
  ENSG00000110321_59 (sequence is synthesized)
tgagtcaattattcatctaagagggaggttgactagttaaatacagatgtgcaacaaaatttactaaacagaataatttgaaatacgtggtgtgtttgacaaagtagagttagaactgat

SEQ ID NO: 177206 - DNA, 120 bp, Artificial Sequence
  ENSG00000110321_60 (sequence is synthesized)
caaccagactggtagaaagccctatactagattctgtaggaactgtgaatgagtcagtgcaaacataaagggaaagaaagtactacgcctaaaccagagtaactaaaactttgtcaccat

SEQ ID NO: 177207 - DNA, 120 bp, Artificial Sequence
  ENSG00000110321_61 (sequence is synthesized)
cttatctgcaacatttatttcaaactgaaatgtttatccttaagattagtaaagtattagtaaaatcacatcactttatttgataggttagatttttattcttccctgtttcatctttta

SEQ ID NO: 177208 - DNA, 120 bp, Artificial Sequence
  ENSG00000110321_62 (sequence is synthesized)
ctttctctgggcaaattcagttaaactaactttatggcttggctcatccctttggtacttgattaccataatttgtggacccctttttatctagactttctttctccttttctgaaatag

SEQ ID NO: 177209 - DNA, 120 bp, Artificial Sequence
  ENSG00000110321_63 (sequence is synthesized)
ttgttttgtttttttaatattatatctagagatttcaggtaccttgagtggatttatgtaggtcagacagtctgattgtcctgctcagataatgataaacattaccacagatctcaccta

SEQ ID NO: 177210 - DNA, 120 bp, Artificial Sequence
  ENSG00000110321_64 (sequence is synthesized)
taaagagagatttataatttaactactttcatttgatccgtatgttgagtttttttcatttgctgggttggttctctattctgctacatggatcttacatacttggggacatcatttgtg

SEQ ID NO: 177211 - DNA, 120 bp, Artificial Sequence
  ENSG00000110321_65 (sequence is synthesized)
aagctctgctctctggacaggacaacttggtaaaatgaactattagatgatgcaggtggctttgtctcttcagaaattgatcagaataaggaccgcatgttggagattttggaaggaaag

SEQ ID NO: 177212 - DNA, 120 bp, Artificial Sequence
  ENSG00000110321_66 (sequence is synthesized)
accgctagcgccgtggcgggaggcacgcgggccggcagggaaggccaggccgttggcgcgggaccagggaaccgcaggcgtcccggagcctggcctcccggcggggaggtatttcatttc

SEQ ID NO: 177213 - DNA, 120 bp, Artificial Sequence
  ENSG00000110321_67 (sequence is synthesized)
atataaatggattaaagataacatctctcccaaacttcatgtagataaaggatttgtgaacatcttaatgactaggtaagacgaatggttttctgcatatggtaatgtttcatgtactgg

SEQ ID NO: 177214 - DNA, 120 bp, Artificial Sequence
  ENSG00000110321_68 (sequence is synthesized)
agacacgccttagcgccagcagtgagtcggagctctatggaggtggcagcgggtaccgagaggcagctgcggtggcagctgctgagttctcggtgaaggtatttcatttctcctgtcccc

SEQ ID NO: 177215 - DNA, 120 bp, Artificial Sequence
  ENSG00000110324_0 (sequence is synthesized)
ctggcggagcgggcggcggagctgtcagtcccagcccaagggtagctggaggcgcgcaggccggctccgctccggccccggacgatgcggcgcgcccaggatgctgccgtgcctcgtagt

SEQ ID NO: 177216 - DNA, 120 bp, Artificial Sequence
  ENSG00000110324_1 (sequence is synthesized)
atgctgccgtgcctcgtagtgctgctggcggcgctcctcagcctccgtcttggctcagacgctcatgggacagagctgcccagccctccgtctgtgtggtttgaagcagaatttttccac

SEQ ID NO: 177217 - DNA, 120 bp, Artificial Sequence
  ENSG00000110324_2 (sequence is synthesized)
cacatcctccactggacacccatcccaaatcagtctgaaagtacctgctatgaagtggcgctcctgaggtatggaatagagtcctggaactccatctccaactgtagccagaccctgtcc

SEQ ID NO: 177218 - DNA, 120 bp, Artificial Sequence
  ENSG00000110324_3 (sequence is synthesized)
tatgaccttaccgcagtgaccttggacctgtaccacagcaatggctaccgggccagagtgcgggctgtggacggcagccggcactccaactggaccgtcaccaacacccgcttctctgtg

SEQ ID NO: 177219 - DNA, 120 bp, Artificial Sequence
  ENSG00000110324_4 (sequence is synthesized)
gatgaagtgactctgacagttggcagtgtgaacctagagatccacaatggcttcatcctcgggaagattcagctacccaggcccaagatggcccccgcaaatgacacatatgaaagcatc

SEQ ID NO: 177220 - DNA, 120 bp, Artificial Sequence
  ENSG00000110324_5 (sequence is synthesized)
ttcagtcacttccgagagtatgagattgccattcgcaaggtgccgggaaacttcacgttcacacacaagaaagtaaaacatgaaaacttcagcctcctaacctctggagaagtgggagag

SEQ ID NO: 177221 - DNA, 120 bp, Artificial Sequence
  ENSG00000110324_6 (sequence is synthesized)
ttctgtgtccaggtgaaaccatctgtcgcttcccgaagtaacaaggggatgtggtctaaagaggagtgcatctccctcaccaggcagtatttcaccgtgaccaacgtcatcatcttcttt

SEQ ID NO: 177222 - DNA, 120 bp, Artificial Sequence
  ENSG00000110324_7 (sequence is synthesized)
gcctttgtcctgctgctctccggagccctcgcctactgcctggccctccagctgtatgtgcggcgccgaaagaagctacccagtgtcctgctcttcaagaagcccagccccttcatcttc

SEQ ID NO: 177223 - DNA, 120 bp, Artificial Sequence
  ENSG00000110324_8 (sequence is synthesized)
atcagccagcgtccctccccagagacccaagacaccatccacccgcttgatgaggaggcctttttgaaggtgtccccagagctgaagaacttggacctgcacggcagcacagacagtggc

SEQ ID NO: 177224 - DNA, 120 bp, Artificial Sequence
  ENSG00000110324_9 (sequence is synthesized)
tttggcagcaccaagccatccctgcagactgaagagccccagttcctcctccctgaccctcacccccaggctgacagaacgctgggaaacagggagccccctgtgctgggggacagctgc

SEQ ID NO: 177225 - DNA, 120 bp, Artificial Sequence
  ENSG00000110324_10 (sequence is synthesized)
agtagtggcagcagcaatagcacagacagcgggatctgcctgcaggagcccagcctgagccccagcacagggcccacctgggagcaacaggtggggagcaacagcaggggccaggatgac

SEQ ID NO: 177226 - DNA, 120 bp, Artificial Sequence
  ENSG00000110324_11 (sequence is synthesized)
agtggcattgacttagttcaaaactctgagggccgggctggggacacacagggtggctcggccttgggccaccacagtcccccggagcctgaggtgcctggggaagaagacccagctgct

SEQ ID NO: 177227 - DNA, 120 bp, Artificial Sequence
  ENSG00000110324_12 (sequence is synthesized)
gtggcattccagggttacctgaggcagaccagatgtgctgaagagaaggcaaccaagacaggctgcctggaggaagaatcgcccttgacagatggccttggccccaaattcgggagatgc

SEQ ID NO: 177228 - DNA, 120 bp, Artificial Sequence
  ENSG00000110324_13 (sequence is synthesized)
ctggttgatgaggcaggcttgcatccaccagccctggccaagggctatttgaaacaggatcctctagaaatgactctggcttcctcaggggccccaacgggacagtggaaccagcccact

SEQ ID NO: 177229 - DNA, 120 bp, Artificial Sequence
  ENSG00000110324_14 (sequence is synthesized)
gaggaatggtcactcctggccttgagcagctgcagtgacctgggaatatctgactggagctttgcccatgaccttgcccctctaggctgtgtggcagccccaggtggtctcctgggcagc

SEQ ID NO: 177230 - DNA, 120 bp, Artificial Sequence
  ENSG00000110324_15 (sequence is synthesized)
gctcctctgcctggaccaggaggagggcccctggggcagaagttaggcacgaggcagtctgggcacttttctgcaagtccactggggctggccccagccaggccctgcagggctggtcag

SEQ ID NO: 177231 - DNA, 120 bp, Artificial Sequence
  ENSG00000110324_16 (sequence is synthesized)
ggtgtctggggcaggaggaggccaactcactgaactagtgcagggtatgtgggtggcactgacctgttctgttgactggggccctgcagactctggcagagctgagaagggcagggacct

SEQ ID NO: 177232 - DNA, 120 bp, Artificial Sequence
  ENSG00000110324_17 (sequence is synthesized)
tctccctcctaggaactctttcctgtatcataaaggattatttgctcaggggaaccatggggctttctggagttgtggtgaggccaccaggctgaagtcagctcagacccagacctccct

SEQ ID NO: 177233 - DNA, 120 bp, Artificial Sequence
  ENSG00000110324_18 (sequence is synthesized)
gcttaggccactcgagcatcagagcttccagcaggaggaagggctgtaggaatggaagcttcagggccttgctgctggggtcatttttaggggaaaaaggaggatatgatggtcacatgg

SEQ ID NO: 177234 - DNA, 120 bp, Artificial Sequence
  ENSG00000110324_19 (sequence is synthesized)
ggaacctcccctcatcgggcctctggggcaggaagcttgtcactggaagatcttaaggtatatattttctggacactcaaacacatcataatggattcactgaggggagacaaagggagc

SEQ ID NO: 177235 - DNA, 120 bp, Artificial Sequence
  ENSG00000110324_20 (sequence is synthesized)
cgagaccctggatggggcttccagctcagaacccatccctctggtgggtacctctggcacccatctgcaaatatctccctctctccaacaaatggagtagcatccccctggggcacttgc

SEQ ID NO: 177236 - DNA, 120 bp, Artificial Sequence
  ENSG00000110324_21 (sequence is synthesized)
tgaggccaagccactcacatcctcactttgctgccccaccatcttgctgacaacttccagagaagccatggttttttgtattggtcataactcagccctttgggcggcctctgggcttgg

SEQ ID NO: 177237 - DNA, 120 bp, Artificial Sequence
  ENSG00000110324_22 (sequence is synthesized)
gcaccagctcatgccagccccagagggtcagggttggaggcctgtgcttgtgtttgctgctaatgtccagctacagacccagaggataagccactgggcactgggctggggtccctgcct

SEQ ID NO: 177238 - DNA, 120 bp, Artificial Sequence
  ENSG00000110324_23 (sequence is synthesized)
tgttggtgttcagctgtgtgattttggactagccacttgtcagagggcctcaatctcccatctgtgaaataaggactccacctttaggggaccctccatgtttgctgggtattagccaag

SEQ ID NO: 177239 - DNA, 120 bp, Artificial Sequence
  ENSG00000110324_24 (sequence is synthesized)
ctggtcctgggagaatgcagatactgtccgtggactaccaagctggcttgtttcttatgccagaggctaacagatccaatgggagtccatggtgtcatgccaagacagtatcagacacag

SEQ ID NO: 177240 - DNA, 120 bp, Artificial Sequence
  ENSG00000110324_25 (sequence is synthesized)
ccccagaagggggcattatgggccctgcctccccataggccatttggactctgccttcaaacaaaggcagttcagtccacaggcatggaagctgtgaggggacaggcctgtgcgtgccat

SEQ ID NO: 177241 - DNA, 120 bp, Artificial Sequence
  ENSG00000110324_26 (sequence is synthesized)
ccagagtcatctcagccctgcctttctctggagcattctgaaaacagatattctggcccagggaatccagccatgacccccacccctctgccaaagtactcttaggtgccagtctggtaa

SEQ ID NO: 177242 - DNA, 120 bp, Artificial Sequence
  ENSG00000110324_27 (sequence is synthesized)
ctgaactccctctggaggcaggcttgagggaggattcctcagggttcccttgaaagctttatttatttattttgttcatttatttattggagaggcagcattgcacagtgaaagaattct

SEQ ID NO: 177243 - DNA, 120 bp, Artificial Sequence
  ENSG00000110324_28 (sequence is synthesized)
ggatatctcaggagccccgaaattctagctctgactttgctgtttccagtggtatgaccttggagaagtcacttatcctcttggagcctcagtttcctcatctgcagaataatgactgac

SEQ ID NO: 177244 - DNA, 120 bp, Artificial Sequence
  ENSG00000110324_29 (sequence is synthesized)
ttgtctaattcgtagggatgtgaggttctgctgaggaaatgggtatgaatgtgccttgaacacaaagctctgtcaataagtgatacatgttttttattccaataaattgtcaagaccaca

SEQ ID NO: 177245 - DNA, 120 bp, Artificial Sequence
  ENSG00000110324_30 (sequence is synthesized)
atgtatttttaatgtgctccccaagaagtccttacattctgctgcattgacaaacctgtggccaagttttaggcctaggttctaattaagcttaattctggaggcaaagtctcggcgggg

SEQ ID NO: 177246 - DNA, 120 bp, Artificial Sequence
  ENSG00000110324_31 (sequence is synthesized)
tccgtcttggctcagacgctcatggctcacctgttgtggaagtggaagaggctgaaattgacaggaactgacggattgggaaggatagagaagtatgcgcaaggccaaacccccaacccg

SEQ ID NO: 177247 - DNA, 120 bp, Artificial Sequence
  ENSG00000110324_32 (sequence is synthesized)
tgctggcggcgctcctcagcctccgtcttggctcagacgctcatggtaaggctccgggacgcggcccttccctgccctgccctctccgcgcccgctccattaaagttctccatccagtgg

SEQ ID NO: 177248 - DNA, 120 bp, Artificial Sequence
  ENSG00000110324_33 (sequence is synthesized)
gggaaggatagagaagtatgcgcaaggccaaacccccaacccgcaaacctcatcatccacccacttctagatgagccgtaagtttagctctaggttttttgctgtttaggttcaaatgat

SEQ ID NO: 177249 - DNA, 120 bp, Artificial Sequence
  ENSG00000110324_34 (sequence is synthesized)
gggacttcttgtccccttggggaataattttgatctcctgactctcccttctcttagtcgactcttcaactaacctctgtctgtccttctcccatctcaccttcatccctcactgatcac

SEQ ID NO: 177250 - DNA, 120 bp, Artificial Sequence
  ENSG00000110324_35 (sequence is synthesized)
cccgatctgatcccccttgctccacctgtagcccccaactcactcccactgccccctgcctctctcctcctaacccagccagttcaggcttctaacccagttcaggctcctaacccagac

SEQ ID NO: 177251 - DNA, 120 bp, Artificial Sequence
  ENSG00000110324_36 (sequence is synthesized)
agttctccggcaaggtttctgcaactaagaaaagtaaaccccagagacagaatgaaagagccgggagttggaaggaccaagagcagagacagagagcaaggaccgaaactgcttcttcat

SEQ ID NO: 177252 - DNA, 120 bp, Artificial Sequence
  ENSG00000110324_37 (sequence is synthesized)
gacaccaaaatacaaagtaaaacatgcagtcagccattcacgtgatcgagagctgagtcggagatgtgcagcccaaataccacaacgactcgctgcatttttcactttccgtctaatgtt

SEQ ID NO: 177253 - DNA, 120 bp, Artificial Sequence
  ENSG00000110324_38 (sequence is synthesized)
tcgaaatcaaggcactgacgtgaagatcaaagacggtataagaaagaaagcaagagacagatgacagagtcctcccccccaaaaaataaataaaaaacaggtgcatgattagagagatgt

SEQ ID NO: 177254 - DNA, 120 bp, Artificial Sequence
  ENSG00000110324_39 (sequence is synthesized)
agagaagttagaacactagggagcgggagcagagtcgctgtcaaatggagagaacttagaggatcaaggaggagagaaagggaaccaaccagccgttggccttgcacatacttcagtctg

SEQ ID NO: 177255 - DNA, 120 bp, Artificial Sequence
  ENSG00000110324_40 (sequence is synthesized)
cttgatcaacaagactcttaaagtagaaatgtttgttgcattcttacaaagaagacaatgccttcagcagtgtttcccatggtgaatggtgtgtactgggggtaaagggagagtagagct

SEQ ID NO: 177256 - DNA, 120 bp, Artificial Sequence
  ENSG00000110324_41 (sequence is synthesized)
aggaattggtattgagtatctctcctcggagctacaggtgccagctcttgtggggatgtcctcagccatgtgtagagccagagctgatttattccatctgtccttgcccagccagaggtt

SEQ ID NO: 177257 - DNA, 120 bp, Artificial Sequence
  ENSG00000110324_42 (sequence is synthesized)
ggacatctggctataggcaaagccctcccagaaactagggaatgaggcaagcacttagcttggggagcccaggagacctatgaagagaaggaggcagatgtcagcaagcaggctgtctgt

SEQ ID NO: 177258 - DNA, 120 bp, Artificial Sequence
  ENSG00000110324_43 (sequence is synthesized)
gtacttagtgaggtggctttgagctggagcctgggccaagccagggtggggatcaggtgtgtggatggggccaagcctaggaatagtgctagagcagggacagggattgggcagagccag

SEQ ID NO: 177259 - DNA, 120 bp, Artificial Sequence
  ENSG00000110324_44 (sequence is synthesized)
ggactaacacatctgagagctcattgccaacttgcttagccctcggcccctgccttcttccctggtaggcatcagactcagcttggctcttctcagcccccactgcagcttctgatcaca

SEQ ID NO: 177260 - DNA, 120 bp, Artificial Sequence
  ENSG00000110324_45 (sequence is synthesized)
gagagcacagggcagtgatttagggagacacactagctctagaatcagacacatgtggattcatgtgcccactctgccccttacgggctccgctggcctcgggcgagtcatagcctctct

SEQ ID NO: 177261 - DNA, 120 bp, Artificial Sequence
  ENSG00000110324_46 (sequence is synthesized)
gaacctccctttcttctttggtaaaattggggtcatcaatgcctgccccccctcccagctgtggtactgacactcttctccccagggacagagctgcccagccctccgtctgtgtggttt

SEQ ID NO: 177262 - DNA, 120 bp, Artificial Sequence
  ENSG00000110324_47 (sequence is synthesized)
gctgaggactcaggcttaaatctgacagacccagggagtcctcatgctacctgtattgtgaccttgggcccattacttatcctctccaagttttaatttccccacctgtcacgtggagtt

SEQ ID NO: 177263 - DNA, 120 bp, Artificial Sequence
  ENSG00000110324_48 (sequence is synthesized)
gacaactccccatgaggatgttgtgaggtgtaaatgaaattgcacataaaaagtttaacatggtgccaggcatgtggtactatgtgccactagctgtcattggctgttgagtctgtaaag

SEQ ID NO: 177264 - DNA, 120 bp, Artificial Sequence
  ENSG00000110324_49 (sequence is synthesized)
aaaaatggacagcttttcttggaaacaagtgaaaatgaaagcgataaggagtgtgcagcgggactctttcagaagacagaaaaggaagaggtggaaagcacaatgcaacgttttggatgt

SEQ ID NO: 177265 - DNA, 120 bp, Artificial Sequence
  ENSG00000110324_50 (sequence is synthesized)
gagttctgacaatgtggagagaagaacctggaaacccctcctttccaggaagacagcaaactgggcctccctggagctctgttcccagagccctgtccctggctccccttgcccaggagg

SEQ ID NO: 177266 - DNA, 120 bp, Artificial Sequence
  ENSG00000110324_51 (sequence is synthesized)
catgtcccagtggtggttctcctaagtgcggaagccatctgcactctattctagaagcagcctgctccctccatgaaaaaccccatgtgggtttgaatttctccccatgctcagcccagt

SEQ ID NO: 177267 - DNA, 120 bp, Artificial Sequence
  ENSG00000110324_52 (sequence is synthesized)
gggtagaacaaacccaggcccgcggcctgagcttcctgggtgtgcttttctcttcgtcctacctgaatcccctagaaggtgactggggacacctcacctcttttcccctgtgtcatctcc

SEQ ID NO: 177268 - DNA, 120 bp, Artificial Sequence
  ENSG00000110324_53 (sequence is synthesized)
aatcttgcctcacccagttcattctgagaaaataactagttctgaggaagtgctgatcctatcatcttcagagaacttgactaatatcacgccatttcagacctgctcaggcttttgccc

SEQ ID NO: 177269 - DNA, 120 bp, Artificial Sequence
  ENSG00000110324_54 (sequence is synthesized)
tagagccctccttgtcaatattggaaagaaaagtagtgttggtcactttctcctggaaatgaggtgttagcgatggcttattccccatggaaaaggcccctaaggtctaaatataaagat

SEQ ID NO: 177270 - DNA, 120 bp, Artificial Sequence
  ENSG00000110324_55 (sequence is synthesized)
tcagagagtaaaaggaattacattcaaggaactgcagccagtttggttggatacgacagatcaaagagcagcttgcaggacagaaggaagtcagaagacacagcccttggtgcaggccct

SEQ ID NO: 177271 - DNA, 120 bp, Artificial Sequence
  ENSG00000110324_56 (sequence is synthesized)
gcctgctccgtttctgtggaatgagtaggagtttgcgctggttcatctctgctttgaggctgctctgtaaccactcaccacagacaggcccttgggagaaactgagcgagtccttccaag

SEQ ID NO: 177272 - DNA, 120 bp, Artificial Sequence
  ENSG00000110324_57 (sequence is synthesized)
cagccggggctgatgagacacttgcagatttcttgggaatttggattacagcccccaacagaaggccccagctgttcttcaactgagcaatctccttcaagggcttttccaagctgagga

SEQ ID NO: 177273 - DNA, 120 bp, Artificial Sequence
  ENSG00000110324_58 (sequence is synthesized)
atgcgtaatgctgtctttgtgtgagctaatggaacttcctcttagtacagagagggggtaaatgggccaccattgagtgaagaggaaattcaataaactgtgttttcccaactttgtaaa

SEQ ID NO: 177274 - DNA, 120 bp, Artificial Sequence
  ENSG00000110324_59 (sequence is synthesized)
gtcttggctcagacgctcatgtggagagccctggctggctggccctctggcagagcggtgcccgggtgctcccttactctggcaaacctggatctcaggctcacctgttgtggaagtgga

SEQ ID NO: 177275 - DNA, 120 bp, Artificial Sequence
  ENSG00000110324_60 (sequence is synthesized)
tttttcatacattcattcactgatacatgaaatagttccaaatctcagctttacaacttttgaggtatatgactttgggcaaattacttaacttctatgtgcttcaggatcctaatatgt

SEQ ID NO: 177276 - DNA, 120 bp, Artificial Sequence
  ENSG00000110324_61 (sequence is synthesized)
aaaaatggggctgatgatagtatttacctcctataagtataaaagttaaaagaatctgatggtattggtacatggtcagtgctgtgtacttcacaactaccttatgaggtcagtggctct

SEQ ID NO: 177277 - DNA, 120 bp, Artificial Sequence
  ENSG00000110324_62 (sequence is synthesized)
gacagagtaattaatttgtccacaattgcacagctagtaagtggtgaagctgggacttgaacccagatctagcagcccccggagcctcgattcttacctgctgtaccatcctgcctcact

SEQ ID NO: 177278 - DNA, 120 bp, Artificial Sequence
  ENSG00000110324_63 (sequence is synthesized)
gttctgtttgctgtgatgggagtcatgtgcagagagctggaagcagttagcgcatctcctgagggaatccttcagggcatggtttggaaggccaggtagggattcgcagaaacctagaca

SEQ ID NO: 177279 - DNA, 120 bp, Artificial Sequence
  ENSG00000110324_64 (sequence is synthesized)
catctagagttgtggcctgtagtttgccttgggccactcactgaatggttcctgacagtgggcaatggatttcatgggaccagagtcctatgtccagaatcaccgtgccccatggtgaca

SEQ ID NO: 177280 - DNA, 120 bp, Artificial Sequence
  ENSG00000110328_0 (sequence is synthesized)
gctgttctcctagcagcgcgggccggtcggaccgccaaggcagccggcgctggcgatgggaagcggcgtggccgccgacacaggcagtggcaaagtttcccagacgtacacatctggacg

SEQ ID NO: 177281 - DNA, 120 bp, Artificial Sequence
  ENSG00000110328_1 (sequence is synthesized)
cgcggctgccggctacccgtgacccctctaggaagggttcagggatttttaatttggaaaaaaatccacctggtttcctttgtcaaggtctctccgggtggccagcggcaggagctgcaa

SEQ ID NO: 177282 - DNA, 120 bp, Artificial Sequence
  ENSG00000110328_2 (sequence is synthesized)
acttgggcacggcggctacaccggcagcggaccgggctttggagaacctcgggactcaggtgctgaggtgcccagcggctccggacgtgctacggggtgcgagcgcgggggagttcgggg

SEQ ID NO: 177283 - DNA, 120 bp, Artificial Sequence
  ENSG00000110328_3 (sequence is synthesized)
cgcacgacaaggaagggcccccgggagctctatatggaggaaggagcccagaatggtgtgcaccaggaagaccaaaactttggtgtccacttgcgtgatcctgagcggcatgactaacat

SEQ ID NO: 177284 - DNA, 120 bp, Artificial Sequence
  ENSG00000110328_4 (sequence is synthesized)
catctgcctgctctacgtgggctgggtcaccaactacatcgccagcgtgtatgtgcgggggcaggagccggcgcccgacaagaagctggaggaagacaaaggggacactctgaagattat

SEQ ID NO: 177285 - DNA, 120 bp, Artificial Sequence
  ENSG00000110328_5 (sequence is synthesized)
tgagcggctggaccacctggagaatgtcatcaagcagcacattcaagaggctcctgccaagcctgaggaggcagaggccgagcccttcacagactcctctctgtttgcacactggggcca

SEQ ID NO: 177286 - DNA, 120 bp, Artificial Sequence
  ENSG00000110328_6 (sequence is synthesized)
ggagctcagccccgaaggccggcgcgtggccctgaagcaattccagtactacggctacaacgcctacctcagcgaccgcctgcccctggaccggcccctgcctgacctcagacccagtgg

SEQ ID NO: 177287 - DNA, 120 bp, Artificial Sequence
  ENSG00000110328_7 (sequence is synthesized)
gtgccgtaacctctcatttcctgacagcctgccagaggtgagcatcgtgttcatcttcgtcaatgaagcgctttcagtgctgctgcgctccatccactcggccatggaacgcacgccccc

SEQ ID NO: 177288 - DNA, 120 bp, Artificial Sequence
  ENSG00000110328_8 (sequence is synthesized)
acatctgctcaaggagatcattctggtggatgacaacagcagtaacgaggaactgaaggagaagctgaccgaatatgtggacaaggtgaacagccagaagccaggcttcatcaaagtcgt

SEQ ID NO: 177289 - DNA, 120 bp, Artificial Sequence
  ENSG00000110328_9 (sequence is synthesized)
gcgtcacagcaagcaggaaggcctcatccgctccagggtcagtggctggagggcggccactgcccctgtggtggcactctttgatgcccacgtggagttcaatgtgggctgggctgaacc

SEQ ID NO: 177290 - DNA, 120 bp, Artificial Sequence
  ENSG00000110328_10 (sequence is synthesized)
cagggctttgactgggagctgtggtgccgctacctaaatccccccaaggcctggtggaagctggagaactccacagcgccaatcaggagccctgccctcattggctgcttcattgtggac

SEQ ID NO: 177291 - DNA, 120 bp, Artificial Sequence
  ENSG00000110328_11 (sequence is synthesized)
cggcagtacttccaggagatcggcctgctggacgaaggcatggaagtctacgggggcgagaatgtggagcttgggatcagggtgtggcagtgtggcgggagtgtggaggtcctgccctgc

SEQ ID NO: 177292 - DNA, 120 bp, Artificial Sequence
  ENSG00000110328_12 (sequence is synthesized)
tcacggattgcccacattgagcgagcccacaagccctacacagaggacctcaccgcccatgtccgcaggaacgctctcagggtggctgaagtctggatggatgaatttaaaagccacgtc

SEQ ID NO: 177293 - DNA, 120 bp, Artificial Sequence
  ENSG00000110328_13 (sequence is synthesized)
tacatggcatggaacataccgcaggaggactcaggaattgacattggggacatcactgcaaggaaggctctcaggaaacagctgcagtgcaagaccttccggtggtacctggtcagcgtg

SEQ ID NO: 177294 - DNA, 120 bp, Artificial Sequence
  ENSG00000110328_14 (sequence is synthesized)
tacccagagatgaggatgtactccgacatcattgcctatggagtgctgcagaattctctgaagactgatttgtgtcttgaccaggggccagatacagagaatgtccccatcatgtacatc

SEQ ID NO: 177295 - DNA, 120 bp, Artificial Sequence
  ENSG00000110328_15 (sequence is synthesized)
tgccatgggatgacgcctcagaacgtgtactacacgagcagtcagcagatccatgtgggcattctgagccccaccgtggatgatgatgacaaccgatgcctggtggacgtcaacagccgg

SEQ ID NO: 177296 - DNA, 120 bp, Artificial Sequence
  ENSG00000110328_16 (sequence is synthesized)
ccccggctcatcgaatgcagctacgccaaagccaagaggatgaagcttcactggcagttctctcagggaggacccatccagaaccgcaagtctaagcgctgtctggagctgcaggagaat

SEQ ID NO: 177297 - DNA, 120 bp, Artificial Sequence
  ENSG00000110328_17 (sequence is synthesized)
agcgacctggagttcggcttccagctggtgttgcagaagtgctcgggccagcactggagcatcaccaacgtcctgaggagcctcgcgtcctgacccaccggggccacttccggctgcctc

SEQ ID NO: 177298 - DNA, 120 bp, Artificial Sequence
  ENSG00000110328_18 (sequence is synthesized)
tttgctactgtgtagcacctgctgcaacgttgcctgctgtccacgtggggttgtttggagtctggggaaccaggttagtgggcccccaagaagagctttttatttcctattcaattttca

SEQ ID NO: 177299 - DNA, 120 bp, Artificial Sequence
  ENSG00000110328_19 (sequence is synthesized)
tggagtttatagaaagatgctgattggtaggtgatggtatgatatcaaactattttgcagttgtaaataggggacagatggaaaatatttataactgacaataaaatattattaagaaaa

SEQ ID NO: 177300 - DNA, 120 bp, Artificial Sequence
  ENSG00000110328_20 (sequence is synthesized)
ctggaccacctggagaatgtcatcaagcagcacattcaaggctataggagaaatttctgccttctgaatgtgtccaactagctctgttcacctgagaaatcacattccccagctctgggt

SEQ ID NO: 177301 - DNA, 120 bp, Artificial Sequence
  ENSG00000110328_21 (sequence is synthesized)
atccctgaataaccacaggagaacagttccaggccctgataagtcagctattgcaagggggacctggctggaagatatgaaggaaaaatatcattcttgaactaataagttgagagatca

SEQ ID NO: 177302 - DNA, 120 bp, Artificial Sequence
  ENSG00000110328_22 (sequence is synthesized)
cagccttcaggggaccagaagggaaggctgaacagggaagggcaatttcacgttcgccatgtccatatttctatcgtcatgagccatctcaccttacaggcagggaagttttgagcttag

SEQ ID NO: 177303 - DNA, 120 bp, Artificial Sequence
  ENSG00000110328_23 (sequence is synthesized)
gagtcagggtctacacagttggaattctatggaaccaagatgctgtgtggcagatggatgtggactccaactgtgacaatccagaaggccttggggacttgtttcatgaacagctccctg

SEQ ID NO: 177304 - DNA, 120 bp, Artificial Sequence
  ENSG00000110328_24 (sequence is synthesized)
taggatctctgttggggtgggggattctaggggcatctccgcagttttcttctgaaaacaaaacgaataccagttgggcaggtgcaacaactgtgcatgcagtcccctcccagggctggc

SEQ ID NO: 177305 - DNA, 120 bp, Artificial Sequence
  ENSG00000110328_25 (sequence is synthesized)
tagcagtattgttgggtaccgtaagcacttagcattgttaagtgagcataagtaacaagatgcaacagcctctggccaagttttgaagattttgttttaaagtatgcttttagatgttga

SEQ ID NO: 177306 - DNA, 120 bp, Artificial Sequence
  ENSG00000110328_26 (sequence is synthesized)
cattcatgattattaaaaggaacaaaactcaatttggggtctcaagagccacaattctagacttctaggatgtcaggagccatgctcttaagcttctcaccctgctgttttaatgagatt

SEQ ID NO: 177307 - DNA, 120 bp, Artificial Sequence
  ENSG00000110328_27 (sequence is synthesized)
aatgattattttccactgagcacctacctgtgatgttcataaaaaagtgaaataaatgactcacatggagatttggaaggatatcactgtggaaagtagatgttaacagcctctagaaat

SEQ ID NO: 177308 - DNA, 120 bp, Artificial Sequence
  ENSG00000110328_28 (sequence is synthesized)
atgataattatcagctatttgagatgcagtcactgtaatgtgataacaagatgtgttgtgcaggtagaaagcatggagagaaatggcacgaagtagttataagaaaaaagaaagaagaga

SEQ ID NO: 177309 - DNA, 120 bp, Artificial Sequence
  ENSG00000110330_0 (sequence is synthesized)
ggatggggcggcgggcttcgggagcgcccgggctgatccgagccgagcgggccgtatctccttgtcggcgccgctgattcccggctctgcggaggcctctaggcagccgcgcagcttccg

SEQ ID NO: 177310 - DNA, 120 bp, Artificial Sequence
  ENSG00000110330_1 (sequence is synthesized)
tgtttgctgcgcccgcactgcgatttacaaccctgaagaatctccctatccctattttgtccccctgcagtaataaatcccattatggagatctcgaaactttataaagggatatagttt

SEQ ID NO: 177311 - DNA, 120 bp, Artificial Sequence
  ENSG00000110330_2 (sequence is synthesized)
gaattctatggagtgtaattttgtgtatgaattatatttttaaaacattgaagagttttcagaaagaaggctagtagagttgattactgatactttatgctaagcagtacttttttggta

SEQ ID NO: 177312 - DNA, 120 bp, Artificial Sequence
  ENSG00000110330_3 (sequence is synthesized)
gtacaatattttgttaggcgtttctgataacactagaaaggacaagttttatcttgtgataaattgattaatgtttacaacatgactgataattatagctgaatagtccttaaatgatga

SEQ ID NO: 177313 - DNA, 120 bp, Artificial Sequence
  ENSG00000110330_4 (sequence is synthesized)
acaggttatttagtttttaaatgcagtgtaaaaagtgtgctgtggaaattttatggctaactaagtttatggagaaaataccttcagttgatcaagaataatagtggtatacaaagttag

SEQ ID NO: 177314 - DNA, 120 bp, Artificial Sequence
  ENSG00000110330_5 (sequence is synthesized)
gaagaaagtcaacatgatgctgcaggaaatggaaacaaatacaaatgatatttaacaaagatagagtttacagtttttgaactttaagccaaattcatttgacatcaagcactatagcag

SEQ ID NO: 177315 - DNA, 120 bp, Artificial Sequence
  ENSG00000110330_6 (sequence is synthesized)
gcacaggttcaacaaagcttgtgggtattgacttcccccaaaagttgtcagctgaagtaatttagcccacttaagtaaatactatgatgataagctgtgtgaacttagcttttaaatagt

SEQ ID NO: 177316 - DNA, 120 bp, Artificial Sequence
  ENSG00000110330_7 (sequence is synthesized)
gtgaccatatgaaggttttaattacttttgtttattggaataaaatgagattttttgggttgtcatgttaaagtgcttatagggaaagaagcctgcatataattttttaccttgtggcat

SEQ ID NO: 177317 - DNA, 120 bp, Artificial Sequence
  ENSG00000110330_8 (sequence is synthesized)
aatcagtaattggtctgttattcaggcttcatagcttgtaaccaaatataaataaaaggcataatttaggtattctatagttgcttagaattttgttaatataaatctctgtgaaaaatc

SEQ ID NO: 177318 - DNA, 120 bp, Artificial Sequence
  ENSG00000110330_9 (sequence is synthesized)
aaggagttttaatattttcagaagtgcatccacctttcagggctttaagttagtattactcaagattatgaacaaatagcacttaggttacctgaaagagttactacaaccccaaagagt

SEQ ID NO: 177319 - DNA, 120 bp, Artificial Sequence
  ENSG00000110330_10 (sequence is synthesized)
tgtgttctaagtagtatcttggtaattcagagagatactcatcctacctgaatataaactgagataaatccagtaaagaaagtgtagtaaattctacataagagtctatcattgatttct

SEQ ID NO: 177320 - DNA, 120 bp, Artificial Sequence
  ENSG00000110330_11 (sequence is synthesized)
ttttgtggtaaaaatcttagttcatgtgaagaaatttcatgtgaatgttttagctatcaaacagtactgtcacctactcatgcacaaaactgcctcccaaagacttttcccaggtccctc

SEQ ID NO: 177321 - DNA, 120 bp, Artificial Sequence
  ENSG00000110330_12 (sequence is synthesized)
gtatcaaaacattaagagtataatggaagatagcacgatcttgtcagattggacaaacagcaacaaacaaaaaatgaagtatgacttttcctgtgaactctacagaatgtctacatattc

SEQ ID NO: 177322 - DNA, 120 bp, Artificial Sequence
  ENSG00000110330_13 (sequence is synthesized)
aactttccccgccggggtgcctgtctcagaaaggagtcttgctcgtgctggtttttattatactggtgtgaatgacaaggtcaaatgcttctgttgtggcctgatgctggataactggaa

SEQ ID NO: 177323 - DNA, 120 bp, Artificial Sequence
  ENSG00000110330_14 (sequence is synthesized)
actaggagacagtcctattcaaaagcataaacagctatatcctagctgtagctttattcagaatctggtttcagctagtctgggatccacctctaagaatacgtctccaatgagaaacag

SEQ ID NO: 177324 - DNA, 120 bp, Artificial Sequence
  ENSG00000110330_15 (sequence is synthesized)
ccttggaacatagtagcttgttcagtggttcttactccagcctttctccaaaccctcttaattctagagcagttgaagacatctcttcatcgaggactaacccctacagttatgcaatga

SEQ ID NO: 177325 - DNA, 120 bp, Artificial Sequence
  ENSG00000110330_16 (sequence is synthesized)
gtactgaagaagccagatttcttacctaccatatgtggccattaacttttttgtcaccatcagaattggcaagagctggtttttattatataggacctggagatagggtagcctgctttg

SEQ ID NO: 177326 - DNA, 120 bp, Artificial Sequence
  ENSG00000110330_17 (sequence is synthesized)
cctgtggtgggaagctcagtaactgggaaccaaaggatgatgctatgtcagaacaccggaggcattttcccaactgtccatttttggaaaattctctagaaactctgaggtttagcattt

SEQ ID NO: 177327 - DNA, 120 bp, Artificial Sequence
  ENSG00000110330_18 (sequence is synthesized)
caaatctgagcatgcagacacatgcagctcgaatgagaacatttatgtactggccatctagtgttccagttcagcctgagcagcttgcaagtgctggtttttattatgtgggtcgcaatg

SEQ ID NO: 177328 - DNA, 120 bp, Artificial Sequence
  ENSG00000110330_19 (sequence is synthesized)
atgatgtcaaatgcttttgttgtgatggtggcttgaggtgttgggaatctggagatgatccatgggtagaacatgccaagtggtttccaaggtgtgagttcttgatacgaatgaaaggcc

SEQ ID NO: 177329 - DNA, 120 bp, Artificial Sequence
  ENSG00000110330_20 (sequence is synthesized)
aagagtttgttgatgagattcaaggtagatatcctcatcttcttgaacagctgttgtcaacttcagataccactggagaagaaaatgctgacccaccaattattcattttggacctggag

SEQ ID NO: 177330 - DNA, 120 bp, Artificial Sequence
  ENSG00000110330_21 (sequence is synthesized)
aaagttcttcagaagatgctgtcatgatgaatacacctgtggttaaatctgccttggaaatgggctttaatagagacctggtgaaacaaacagttcaaagtaaaatcctgacaactggag

SEQ ID NO: 177331 - DNA, 120 bp, Artificial Sequence
  ENSG00000110330_22 (sequence is synthesized)
agaactataaaacagttaatgatattgtgtcagcacttcttaatgctgaagatgaaaaaagagaagaggagaaggaaaaacaagctgaagaaatggcatcagatgatttgtcattaattc

SEQ ID NO: 177332 - DNA, 120 bp, Artificial Sequence
  ENSG00000110330_23 (sequence is synthesized)
ggaagaacagaatggctctctttcaacaattgacatgtgtgcttcctatcctggataatcttttaaaggccaatgtaattaataaacaggaacatgatattattaaacaaaaaacacaga

SEQ ID NO: 177333 - DNA, 120 bp, Artificial Sequence
  ENSG00000110330_24 (sequence is synthesized)
tacctttacaagcgagagaactgattgataccattttggttaaaggaaatgctgcggccaacatcttcaaaaactgtctaaaagaaattgactctacattgtataagaacttatttgtgg

SEQ ID NO: 177334 - DNA, 120 bp, Artificial Sequence
  ENSG00000110330_25 (sequence is synthesized)
ataagaatatgaagtatattccaacagaagatgtttcaggtctgtcactggaagaacaattgaggaggttgcaagaagaacgaacttgtaaagtgtgtatggacaaagaagtttctgttg

SEQ ID NO: 177335 - DNA, 120 bp, Artificial Sequence
  ENSG00000110330_26 (sequence is synthesized)
tatttattccttgtggtcatctggtagtatgccaggaatgtgccccttctctaagaaaatgccctatttgcaggggtataatcaagggtactgttcgtacatttctctcttaaagaaaaa

SEQ ID NO: 177336 - DNA, 120 bp, Artificial Sequence
  ENSG00000110330_27 (sequence is synthesized)
tagtctatattttaacctgcataaaaaggtctttaaaatattgttgaacacttgaagccatctaaagtaaaaagggaattatgagtttttcaattagtaacattcatgttctagtctgct

SEQ ID NO: 177337 - DNA, 120 bp, Artificial Sequence
  ENSG00000110330_28 (sequence is synthesized)
ttggtactaataatcttgtttctgaaaagatggtatcatatatttaatcttaatctgtttatttacaagggaagatttatgtttggtgaactatattagtatgtatgtgtacctaaggga

SEQ ID NO: 177338 - DNA, 120 bp, Artificial Sequence
  ENSG00000110330_29 (sequence is synthesized)
gtagtgtcactgcttgttatgcatcatttcaggagttactggatttgttgttctttcagaaagctttgaatactaaattatagtgtagaaaagaactggaaaccaggaactctggagttc

SEQ ID NO: 177339 - DNA, 120 bp, Artificial Sequence
  ENSG00000110330_30 (sequence is synthesized)
atcagagttatggtgccgaattgtctttggtgcttttcacttgtgttttaaaataaggatttttctcttatttctccccctagtttgtgagaaacatctcaataaagtgctttaaaaaga

SEQ ID NO: 177340 - DNA, 120 bp, Artificial Sequence
  ENSG00000110330_31 (sequence is synthesized)
gcggtgagtgctgctccttccgggctcgggcggcgtggggcgggtggggacgcgagggcccgcgggggcccacttccctgatgtggcggcgaacgaggaaggacggggcctgaggccctt

SEQ ID NO: 177341 - DNA, 120 bp, Artificial Sequence
  ENSG00000110330_32 (sequence is synthesized)
cggccaagggtcgagggtcgccgggggctctctgctttctactctcgccaaggttttattggattcggaagccccaacttcgagacttgcagtcaaagcgatttttaaaatgacttgttt

SEQ ID NO: 177342 - DNA, 120 bp, Artificial Sequence
  ENSG00000110330_33 (sequence is synthesized)
tcaagcctctggccgccgcccactcttctggcccttggactttgaccaagatgttttctcgcagtttttgcaaggttttaaacttagccctcggcgttcttttaatgtaatacattgaaa

SEQ ID NO: 177343 - DNA, 120 bp, Artificial Sequence
  ENSG00000110330_34 (sequence is synthesized)
cgaagatatttcggtggcggcgatatttcatatttcatagttgccactgcgctctgtcattccagtagtcgtctgttgtgtattgtgagaagcaactctgggaaattattggatttacaa

SEQ ID NO: 177344 - DNA, 120 bp, Artificial Sequence
  ENSG00000110330_35 (sequence is synthesized)
gatccgagccgagcgggccgtatctccttgtcggcgccgctgattcccggctctgcggaggcctctaggcagccgcgcagcttccgtgtttgctgcgcccgcactgcgacttttcccagg

SEQ ID NO: 177345 - DNA, 120 bp, Artificial Sequence
  ENSG00000110330_36 (sequence is synthesized)
ttgttcctgttagatatgtatgtgttctgggttgtgacgtaaaatgtttttactatggagtacaatgaaagatttgaaagccatttttctagaatgatcaggttatatttgatatgaaac

SEQ ID NO: 177346 - DNA, 120 bp, Artificial Sequence
  ENSG00000110344_0 (sequence is synthesized)
taacttccggttgctgtgctgagtcggaagtgggaacccttcggccgctgagattctgtcgtgtcgtcgctgctggcacttcaggctctgcctctcccactaggtctggatggaggatac

SEQ ID NO: 177347 - DNA, 120 bp, Artificial Sequence
  ENSG00000110344_1 (sequence is synthesized)
cttaaagtgaaatgacagaccaggagaataacaacaacatctcaagtaacccctttgctgctctttttggctccctggctgatgccaaacagtttgcggcaatccaaaaagagcagctga

SEQ ID NO: 177348 - DNA, 120 bp, Artificial Sequence
  ENSG00000110344_2 (sequence is synthesized)
agcaacaatctgatgaactcccagctagcccagatgactcggataatagcgtgtcagagagcctggatgaattcgattactctgtggctgagattagccgctcattccgatcacagcagg

SEQ ID NO: 177349 - DNA, 120 bp, Artificial Sequence
  ENSG00000110344_3 (sequence is synthesized)
aaatatgtgagcaactcaacatcaatcacatgatccaaaggatcttccttattactctggacaacagtgatcccagcttgaaaagcgggaatggcatccctagccgttgtgtgtatttgg

SEQ ID NO: 177350 - DNA, 120 bp, Artificial Sequence
  ENSG00000110344_4 (sequence is synthesized)
aagaaatggcagtagagctagaagatcaagactggcttgatatgagcaatgttgagcaggccctcttcgctcgcttattacttcaagatccaggcaaccacttaattaacatgacttctt

SEQ ID NO: 177351 - DNA, 120 bp, Artificial Sequence
  ENSG00000110344_5 (sequence is synthesized)
ctacaacgctaaatctctctgctgatcgagatgcaggagagaggcacattttttgttacctttactcctgcttccagagagccaaggaagagattaccaaagttccagagaacctgctac

SEQ ID NO: 177352 - DNA, 120 bp, Artificial Sequence
  ENSG00000110344_6 (sequence is synthesized)
cctttgcagtgcagtgcagaaacctcactgtgtccaatacccgaacagttcttctcaccccagagatctatgttgaccaaaacatccatgagcaactggtagatttgatgttagaagcca

SEQ ID NO: 177353 - DNA, 120 bp, Artificial Sequence
  ENSG00000110344_7 (sequence is synthesized)
tccagggagcccattttgaagatgtaactgagtttctggaagaggtcattgaagccttgatattggatgaggaagttagaacatttccagaagtcatgattccagtgtttgatattttat

SEQ ID NO: 177354 - DNA, 120 bp, Artificial Sequence
  ENSG00000110344_8 (sequence is synthesized)
tgggccgaataaaagatctagagctctgtcagatccttttgtatgcatatctggatattcttctctatttcactaggcaaaaagatatggcaaaggtttttgtagaatacattcagccca

SEQ ID NO: 177355 - DNA, 120 bp, Artificial Sequence
  ENSG00000110344_9 (sequence is synthesized)
aggaccctaccaatgggcaaatgtaccagaagaccttgctgggagtaattctgagtatctcctgcttattaaagactccgggtgttgtagaaaatcatggctactttttgaatccatctc

SEQ ID NO: 177356 - DNA, 120 bp, Artificial Sequence
  ENSG00000110344_10 (sequence is synthesized)
gttccagcccccaggagatcaaagtacaggaggccaacatccatcagttcatggctcagttccacgaaaagatctaccagatgctgaagaacttactccagctctctccagaaaccaaac

SEQ ID NO: 177357 - DNA, 120 bp, Artificial Sequence
  ENSG00000110344_11 (sequence is synthesized)
actgtatcttgtcctggcttggaaactgtttgcatgcaaatgcaggccgcaccaagatttgggccaatcagatgccagaaatctttttccaaatgtatgcctcagatgctttctttctga

SEQ ID NO: 177358 - DNA, 120 bp, Artificial Sequence
  ENSG00000110344_12 (sequence is synthesized)
atctgggtgctgctctcctgaagctatgccagccattttgcaaacccagatcctctcggctcctcacctttaatcccacatactgtgccctcaaggagttgaatgatgaagaacgaaaaa

SEQ ID NO: 177359 - DNA, 120 bp, Artificial Sequence
  ENSG00000110344_13 (sequence is synthesized)
ttaaaaatgtacacatgagaggtttggacaaagaaacctgtttgatcccagctgtgcaggagccgaagtttccacagaactacaaccttgtaacagagaaccttgctctgacagagtaca

SEQ ID NO: 177360 - DNA, 120 bp, Artificial Sequence
  ENSG00000110344_14 (sequence is synthesized)
ccttgtacttgggatttcacaggttgcatgatcagatggtaaaaatcaaccaaaatctgcatcggctgcaggttgcctggcgggatgctcagcaaagttctagccctgctgctgacaatc

SEQ ID NO: 177361 - DNA, 120 bp, Artificial Sequence
  ENSG00000110344_15 (sequence is synthesized)
ttcgtgagcagtttgaacgactgatgaccatctatctttctaccaagactgccatgacagagccacaaatgctacaaaactgcctaaacttgcaggtgtccatggctgttctactggttc

SEQ ID NO: 177362 - DNA, 120 bp, Artificial Sequence
  ENSG00000110344_16 (sequence is synthesized)
aactggccataggcaatgagggctcacagccaatagagctaacctttcctttgccagatggctacagctctttggcttatgtgccagaattttttgcagataacctgggtgattttctca

SEQ ID NO: 177363 - DNA, 120 bp, Artificial Sequence
  ENSG00000110344_17 (sequence is synthesized)
tttttctccgccgctttgccgatgacattttggagacatcagcagattccctggagcatgtccttcactttatcaccattttcactggaagcatagaaagaatgaagaatccccacctga

SEQ ID NO: 177364 - DNA, 120 bp, Artificial Sequence
  ENSG00000110344_18 (sequence is synthesized)
gggccaaactagcagaggtgttggaagcagtgatgccccacctggatcagaccccaaatcccttggtatccagtgtgttccaccggaaacgtgtgttctgcaactttcagtatgcacccc

SEQ ID NO: 177365 - DNA, 120 bp, Artificial Sequence
  ENSG00000110344_19 (sequence is synthesized)
aacttgcagaggctctaatcaaggtttttgtggacatcgaatttacaggagacccccatcaatttgaacagaagtttaattaccgccgtcccatgtatcctatcctaagatacatgtggg

SEQ ID NO: 177366 - DNA, 120 bp, Artificial Sequence
  ENSG00000110344_20 (sequence is synthesized)
ggacagatacctatcgggagagcattaaggatttggctgactatgcctctaagaatttagaagccatgaatcccccacttttcctccgctttcttaacctgctaatgaatgatgccatct

SEQ ID NO: 177367 - DNA, 120 bp, Artificial Sequence
  ENSG00000110344_21 (sequence is synthesized)
tccttttggatgaagccatacagtatttgagcaagataaagattcagcaaattgagaaggatcgaggtgaatgggatagtctgactccagaagcccgccgagaaaaggaggctggcctac

SEQ ID NO: 177368 - DNA, 120 bp, Artificial Sequence
  ENSG00000110344_22 (sequence is synthesized)
agatgtttggacagctggcacgtttccataacatcatgtccaatgaaacaatcggtacccttgcctttctcacatcagagatcaagtcactctttgtgcatcccttcctggctgagcgca

SEQ ID NO: 177369 - DNA, 120 bp, Artificial Sequence
  ENSG00000110344_23 (sequence is synthesized)
tcatctccatgttgaactacttcctgcaacacctggttggccccaagatgggtgccttaaaagtcaaggacttcagcgaatttgacttcaaaccccagcagcttgtatcagatatctgca

SEQ ID NO: 177370 - DNA, 120 bp, Artificial Sequence
  ENSG00000110344_24 (sequence is synthesized)
ctatctacttaaatcttggggatgaggagaatttctgtgccactgtgcccaaggatggacgttcctattccccaactctctttgcacagacagttcgagtcttgaagaaaataaataagc

SEQ ID NO: 177371 - DNA, 120 bp, Artificial Sequence
  ENSG00000110344_25 (sequence is synthesized)
gttcctggatcccattatgagcacactgatgtgtgaccctgtggtgctgccatcttccagagtcactgtggatagatccaccattgcaagacatttgctcagtgaccaaacagatccctt

SEQ ID NO: 177372 - DNA, 120 bp, Artificial Sequence
  ENSG00000110344_26 (sequence is synthesized)
taaccgtagtcccctcaccatggaccagatccggccaaacacagaactaaaagaaaaaatccaacggtggcttgcagagaggaaacaacaaaaggagcaacttgaatagatactgtgaac

SEQ ID NO: 177373 - DNA, 120 bp, Artificial Sequence
  ENSG00000110344_27 (sequence is synthesized)
cttgaatagatactgtgaactaaccaaaccaaaaccaaccccagagtgcagataaacaattgtttgtggtttctctctttctggttctgttccttttctttcttcttttctttttctttt

SEQ ID NO: 177374 - DNA, 120 bp, Artificial Sequence
  ENSG00000110344_28 (sequence is synthesized)
ttagagaactgctcttgctgaaattatgatagttaagattcctaagaacttgacaatgctcccctggcttgcaggaaattatacttattatagcatcaccaagtttagaaatcatcacta

SEQ ID NO: 177375 - DNA, 120 bp, Artificial Sequence
  ENSG00000110344_29 (sequence is synthesized)
attttcaccctctgttgtctcttcatattcttcttccttttcctaaatgaaattatattatttcaactactaaaacttcccgccaccctgctatttctcttccaattactgttcaaacat

SEQ ID NO: 177376 - DNA, 120 bp, Artificial Sequence
  ENSG00000110344_30 (sequence is synthesized)
ttttggtgagtgctgcttttataaatatgtgatgtcacatatttcagtgacagctgatgttatcagaaaaatcctgttatcctgtgtatttactagtcctcatgatctagacttaacccc

SEQ ID NO: 177377 - DNA, 120 bp, Artificial Sequence
  ENSG00000110344_31 (sequence is synthesized)
ttttctgtgttacagagtaacttcacataaaagcagatacctttaagtttgtgtagacttctgaataagatgatagacgagaattttttttaaaaaaggaatttaaaggaatcttgtgca

SEQ ID NO: 177378 - DNA, 120 bp, Artificial Sequence
  ENSG00000110344_32 (sequence is synthesized)
acttctgttgatagctcttaattttgttatacagtctttttaatgaggattggtagggcaatcctaccaattgatgggggtgaggagactgttgggcccttattctcttatgaaaatctg

SEQ ID NO: 177379 - DNA, 120 bp, Artificial Sequence
  ENSG00000110344_33 (sequence is synthesized)
tttctacaaggactaggcctaagtagatttaggcaacgggtatcatatccatgaaaaatgtcattttaagacactaatatcaacagtatatctcagtgtgtgagatatataaatacacat

SEQ ID NO: 177380 - DNA, 120 bp, Artificial Sequence
  ENSG00000110344_34 (sequence is synthesized)
acaccccatgtgcttttttgttggtttagtgtaaactgagtaccactttatattttctcttccatagtgagatgtatgcagtatgtggccatgtttactaacatactcattcttcacaaa

SEQ ID NO: 177381 - DNA, 120 bp, Artificial Sequence
  ENSG00000110344_35 (sequence is synthesized)
attctgagattataaaatgtatatagttaatatttgtttgagcttgtgacctgacttctaagagctacttctaacacagccttaggtcttcaattaacaaagtaggaagttgagcacaac

SEQ ID NO: 177382 - DNA, 120 bp, Artificial Sequence
  ENSG00000110344_36 (sequence is synthesized)
cttgtccacagccattttaaatatccacttagccctgtgtagttggtaggtggacaccactttcataagtgaacttgagctcactactcaattgtgcagcttaatatgctgactagggac

SEQ ID NO: 177383 - DNA, 120 bp, Artificial Sequence
  ENSG00000110344_37 (sequence is synthesized)
attcccctatggattatctttatatcactgtctttctaagcccagagatgtcataagtgacaagaaaagtgataggatcaagaaatgggtgtcactgcttcatttggaacatgttattaa

SEQ ID NO: 177384 - DNA, 120 bp, Artificial Sequence
  ENSG00000110344_38 (sequence is synthesized)
ctatggtctctttcaaataaatagtagttttatatttcaacacaagttgctataagcagtccttgatgggtttttgattgcatcagctggaaagcctcaaatctaagagggcttcccatc

SEQ ID NO: 177385 - DNA, 120 bp, Artificial Sequence
  ENSG00000110344_39 (sequence is synthesized)
ctagatataaaataggtgttgcctattgctgtgcttataaaatgaaaaaggaaattgaggacacttttgcaaatgccagaatgtaagattcattcagtgtgctccctgggcctttatggc

SEQ ID NO: 177386 - DNA, 120 bp, Artificial Sequence
  ENSG00000110344_40 (sequence is synthesized)
atgggttgacaggatttgtttattttctaaaattagcttcattcaatatttatcatcctcctttccctctctgagaatgaactatgtataaaataagcttctgcctatttgcatttatct

SEQ ID NO: 177387 - DNA, 120 bp, Artificial Sequence
  ENSG00000110344_41 (sequence is synthesized)
tccaaacccaatctagtaggatgttctcattttaaaaacgaggggaaaagaccagagtttttcaggagaaaactggaggaaaatgggcacaaaaactcagaaggcagctattcccagcag

SEQ ID NO: 177388 - DNA, 120 bp, Artificial Sequence
  ENSG00000110344_42 (sequence is synthesized)
cttcctagttaacaacccccatgctgcctccagtctttgtctgtattcttctgtatttaaccttcagattgtaagccttttctggcaagcttttcttctttttttaaactcttttcctga

SEQ ID NO: 177389 - DNA, 120 bp, Artificial Sequence
  ENSG00000110344_43 (sequence is synthesized)
aactttttatgaatggctatggcaccattaatgctgctgaatatctttaaactctgcacaagcaagtgtgtagcttaaggccactactggtaaggaaaccaagtgtcctctgtgcctttt

SEQ ID NO: 177390 - DNA, 120 bp, Artificial Sequence
  ENSG00000110344_44 (sequence is synthesized)
ttctttctgtgaagtaatttaagaatatccaaaaaaattagactttaaaaagttatcttggtacaacaccgtgtgtatatacacttggaagcttaaaaaggtgttttgtctggaacttag

SEQ ID NO: 177391 - DNA, 120 bp, Artificial Sequence
  ENSG00000110344_45 (sequence is synthesized)
aagcagctctaaatctagtagagcagactttctaacatacctagttttgtgtattggctttgctggagtatgatagcaaaatgaagactcttttactcagctctggtattgctcataact

SEQ ID NO: 177392 - DNA, 120 bp, Artificial Sequence
  ENSG00000110344_46 (sequence is synthesized)
taccaagaggctaatactaaacttggaaaattgtttaagtatgttttatcaagcagtctgggttttgttttttaatatactttttaatggatatgtgaaaactgaaggaaatgttaaagg

SEQ ID NO: 177393 - DNA, 120 bp, Artificial Sequence
  ENSG00000110344_47 (sequence is synthesized)
ttttttaatggtgcaagtgaaggtgccagttgctatttgatatcacactctacaaaagcttcattactttatttgatggtggttgctaagcagccattgcacagagcataagtctactgg

SEQ ID NO: 177394 - DNA, 120 bp, Artificial Sequence
  ENSG00000110344_48 (sequence is synthesized)
gtgcctttacatgccagaggctgatgctgcactgttgatgtcatgtgaggaaataatgcacatgctctaactgctcaacaggaaatgaacctagaaacagaaaatgaaaaggttgattga

SEQ ID NO: 177395 - DNA, 120 bp, Artificial Sequence
  ENSG00000110344_49 (sequence is synthesized)
aataaaacttgatcaacgcgactgtattttgaaacattccaggaaggttacttcttgtcaaacttgcctggcagtgtttgttcaaaacttgtatttaataaatgaacatctgacttacaa

SEQ ID NO: 177396 - DNA, 120 bp, Artificial Sequence
  ENSG00000110344_50 (sequence is synthesized)
gtataagtagaggaagaaaacagcaactcagtcatagaaagggacactaagaatagcaatttttaatgccttctcaagatacctgaattgatgcagagcatttttcaaaactactcagtc

SEQ ID NO: 177397 - DNA, 120 bp, Artificial Sequence
  ENSG00000110344_51 (sequence is synthesized)
aacacattgccggaagaaggaaattatgtctttagagagaaatctccatcatagacattttaaataagacagtagataaaagttcagcatgtgcttaagctgctcagctgcctagattca

SEQ ID NO: 177398 - DNA, 120 bp, Artificial Sequence
  ENSG00000110344_52 (sequence is synthesized)
aacaaaaaatgaatatcatctagtttcccaatattagctagctcaagacattatctacagggccaaaggaaatgattttggactattatccataactttgaattatgtgtcttcctttca

SEQ ID NO: 177399 - DNA, 120 bp, Artificial Sequence
  ENSG00000110367_0 (sequence is synthesized)
attttgggagcttcgagtcaacaataaaggaccgagggtgccgagcgggagtggcctcgttggtaggacacgggcccgagtcgcgaggcttgggattgacgtgagtgaattcagatataa

SEQ ID NO: 177400 - DNA, 120 bp, Artificial Sequence
  ENSG00000110367_1 (sequence is synthesized)
ctcaagcttgttagagggctttttaaaaataaaaagttgattccgtgcaagagagcaagttactgctgcttaccgttcagagacttacaggtgcttgcctgcattgcaataaaggactca

SEQ ID NO: 177401 - DNA, 120 bp, Artificial Sequence
  ENSG00000110367_2 (sequence is synthesized)
tttattgagcaagacttatatttatctcttcattttggagagcctaataaactgttattacagtttctctactgactttcaaaagttttgaagtttgaaagacctttgcaattaaaacag

SEQ ID NO: 177402 - DNA, 120 bp, Artificial Sequence
  ENSG00000110367_3 (sequence is synthesized)
catgagcacggccagaacagagaaccctgttataatgggtctgtccagtcaaaatggtcagctgagaggccctgtgaaacccactggtggccctggaggagggggcacacagacacagca

SEQ ID NO: 177403 - DNA, 120 bp, Artificial Sequence
  ENSG00000110367_4 (sequence is synthesized)
acagatgaaccagctgaaaaacaccaacacaatcaataatggcactcagcagcaagcacagagtatgaccaccactattaaacctggtgatgactggaaaaagactttaaaactccctcc

SEQ ID NO: 177404 - DNA, 120 bp, Artificial Sequence
  ENSG00000110367_5 (sequence is synthesized)
aaaggatctaagaatcaaaacttcggatgtgacctccacaaaaggaaatgagtttgaagattactgtttgaaacgggagttactgatgggaatttttgaaatgggctgggaaaagccatc

SEQ ID NO: 177405 - DNA, 120 bp, Artificial Sequence
  ENSG00000110367_6 (sequence is synthesized)
tcctattcaggaggagagcattcccattgctttatctggtagggatatcttagctagagcaaaaaatggaacaggcaagagcggtgcctacctcattcccttacttgaacggctagacct

SEQ ID NO: 177406 - DNA, 120 bp, Artificial Sequence
  ENSG00000110367_7 (sequence is synthesized)
gaagaaggacaatatacaagcaatggtgattgttcccactagagaacttgctctacaggtcagtcaaatttgcatccaggtcagcaaacacatgggaggggccaaagtgatggcaaccac

SEQ ID NO: 177407 - DNA, 120 bp, Artificial Sequence
  ENSG00000110367_8 (sequence is synthesized)
cgagatgacataatgaggcttgatgatacagtgcacgtggtgattgctacccctgggagaatcctggatcttattaagaaaggagtagcaaaggttgatcatgtccagatgatagtattg

SEQ ID NO: 177408 - DNA, 120 bp, Artificial Sequence
  ENSG00000110367_9 (sequence is synthesized)
gatgaggcagataagttgctgtcacaggattttgtgcagataatggaggatattattctcacgctacctaaaaacaggcagattttactatattccgctactttccctcttagtgtacag

SEQ ID NO: 177409 - DNA, 120 bp, Artificial Sequence
  ENSG00000110367_10 (sequence is synthesized)
aagttcatgaattcccatttgcagaaaccctatgagattaacctgatggaggaactaactctgaagggagtaacccagtactacgcatatgtaactgagcgccaaaaagtacactgcctc

SEQ ID NO: 177410 - DNA, 120 bp, Artificial Sequence
  ENSG00000110367_11 (sequence is synthesized)
aacacacttttctccaggcttcagataaaccagtcgatcattttctgtaactcctctcagcgagttgaattgctagccaagaagatttctcaactgggttattcttgcttctatattcat

SEQ ID NO: 177411 - DNA, 120 bp, Artificial Sequence
  ENSG00000110367_12 (sequence is synthesized)
gctaaaatgaggcaggaacatcgaaatcgtgtatttcatgatttccgaaatggcttatgccgcaatcttgtttgcactgatctgtttacccgaggtattgatatacaagctgtgaatgtg

SEQ ID NO: 177412 - DNA, 120 bp, Artificial Sequence
  ENSG00000110367_13 (sequence is synthesized)
gtaataaactttgatttcccaaagctggcagagacctatctccatcgtattggaagatcaggtcgctttggtcatcttggcttagccatcaacttgatcacatatgatgatcgcttcaac

SEQ ID NO: 177413 - DNA, 120 bp, Artificial Sequence
  ENSG00000110367_14 (sequence is synthesized)
ctgaaaagtattgaggagcagctgggaacagaaattaaacctattccgagcaacattgataagagcctgtatgtggcagaataccacagcgagcctgtagaagatgagaaaccttaacaa

SEQ ID NO: 177414 - DNA, 120 bp, Artificial Sequence
  ENSG00000110367_15 (sequence is synthesized)
gcatgtacgtccctgacagaacagctaagaggaacctttaaatgagggaaatcaaaatcttctttcctgggggaaatttgatgtcacaccatatataatagcaataaagggtaaaatacc

SEQ ID NO: 177415 - DNA, 120 bp, Artificial Sequence
  ENSG00000110367_16 (sequence is synthesized)
caaattacaaaaggctcgtttggatctgtgacacatcgttttggggggaatgctcctctctttgtgggtttttcatcttttattttggaactatgaagacttaaaagagctcagacattt

SEQ ID NO: 177416 - DNA, 120 bp, Artificial Sequence
  ENSG00000110367_17 (sequence is synthesized)
tctttttttaactggtgaagagaaaaaggctgaaaagaaggaatataccttttttgttccacttgtttgcactgtgtgctgactgaacattagttgcactaactgctggtttttaaaaaa

SEQ ID NO: 177417 - DNA, 120 bp, Artificial Sequence
  ENSG00000110367_18 (sequence is synthesized)
tgttttctggggaaaggggacaaggaaggaaaagaaagaagagaaggggagaaaccctaaaaagagaagaatcttaatgaacacacaagcttgtcaatgatttcaaaattctccaacagc

SEQ ID NO: 177418 - DNA, 120 bp, Artificial Sequence
  ENSG00000110367_19 (sequence is synthesized)
tgactctcgtgcatttcaacttctccctgattcctcatccgttttttaagcctgaagagcttattacttatttgtgcgaagtgccttatgctatgagaccattcagaatatcatctttta

SEQ ID NO: 177419 - DNA, 120 bp, Artificial Sequence
  ENSG00000110367_20 (sequence is synthesized)
gacacagcccgaggaatcaacaatagtaactctttctttccgtttttttttctttttcttttaaaaaatgtcttcttattttggtttcaggttgaagtctcttccctttctacccagtac

SEQ ID NO: 177420 - DNA, 120 bp, Artificial Sequence
  ENSG00000110367_21 (sequence is synthesized)
tcgagcccagggctagaagttgaaactcactagtaatgttaaacaccattttttttttctttttggggaggagttgatatgcaactgcagttcatccgcactgtaaatacatgtatttaa

SEQ ID NO: 177421 - DNA, 120 bp, Artificial Sequence
  ENSG00000110367_22 (sequence is synthesized)
aaaaacaatcccaagtaaaaatttcttctgggctgagtagataaaaaacatcatcgctcccaaaggaaagagcagtctatcattgcaggagccatatgacaagcctttgtgctctatagc

SEQ ID NO: 177422 - DNA, 120 bp, Artificial Sequence
  ENSG00000110367_23 (sequence is synthesized)
agacactaaagactgggttacatatgcctccagtagtagtatggcacttgatgtgtagacatgtcagagccttggccctctttcctctgtggcaaagcgtgtcccatagaaaattgggtg

SEQ ID NO: 177423 - DNA, 90 bp, Artificial Sequence
  ENSG00000110367_24 (sequence is synthesized)
gttcatttttttttggatgaaggttgctgggattaaggggattagagtgattatgggagcagctaaagatgagaggggctcagttttacg

SEQ ID NO: 177424 - DNA, 120 bp, Artificial Sequence
  ENSG00000110367_25 (sequence is synthesized)
ttatgggagcagctaaagatgagaggggctcagttttacgcaacactaaattctagaaagtactttggcctcgtgctgtagagagcagatttctatggtaccctgtgttagtaaaggggc

SEQ ID NO: 177425 - DNA, 120 bp, Artificial Sequence
  ENSG00000110367_26 (sequence is synthesized)
ctgggatgtactgtttgctgccacactgtctcatctagtacctttggagtaggtttaccagagagagcaaggaagcttcaaaacattgataattcaacatttattttgagaagctctgat

SEQ ID NO: 177426 - DNA, 120 bp, Artificial Sequence
  ENSG00000110367_27 (sequence is synthesized)
tttgcttcttccccctttctaaaagtttgaggaatatttcaagctctgcaacagggggcaaagattaatctaccttgcagtgtaggaattctattgagtggcagtgtcattgagcagtat

SEQ ID NO: 177427 - DNA, 120 bp, Artificial Sequence
  ENSG00000110367_28 (sequence is synthesized)
atatataaagcacagatttgcatttcagaatattagccagtaccagctttggtaatgttagcagttctggagcttaattttctgtggatcatttcctgtagtgtgtaaatgtgttgccct

SEQ ID NO: 177428 - DNA, 120 bp, Artificial Sequence
  ENSG00000110367_29 (sequence is synthesized)
ctgcccgctttgatacataaacttttgcaggaatgggcaacctgagagctgttaactttcatgctacagaaagctgcttgccattctcttgcattgtgacaagaattgttacctgtcatt

SEQ ID NO: 177429 - DNA, 120 bp, Artificial Sequence
  ENSG00000110367_30 (sequence is synthesized)
ttgcactgtaaattgctggcagatgctttacagtcaatagtgttgctttaaattgtgcccctcccaacatgcttgatgtttggcctgatctccaggcaaaaggagtgagatgaatcaaaa

SEQ ID NO: 177430 - DNA, 120 bp, Artificial Sequence
  ENSG00000110367_31 (sequence is synthesized)
ccagtgaacttttttttttaatgtttttaattcccttttaacccagtgtactaggtcaatcaggaggcatctggaaagggggggaaaaaagcaaaaaacaaaattaaaaaaaattgattt

SEQ ID NO: 177431 - DNA, 120 bp, Artificial Sequence
  ENSG00000110367_32 (sequence is synthesized)
ccatattttatttttcaaaaccctaaaatattacaaaataagtcccgcatatactttaatgttttaactcttttggacaaaggaatcaattacttgaagttgcttttttgactctgccta

SEQ ID NO: 177432 - DNA, 120 bp, Artificial Sequence
  ENSG00000110367_33 (sequence is synthesized)
cttctgagcaaactatttgcgactcacccacaattccttggagatcaaaatcctacagatgcctcctgatgggacatagccctaactccttaacaactgtagcaagaactgcacggtaca

SEQ ID NO: 177433 - DNA, 120 bp, Artificial Sequence
  ENSG00000110367_34 (sequence is synthesized)
aacccaaaaaagaacaagctcatctatttggaacccaagcctcatattttctgtccagtcaatgttggttactaaatagaaaacctaattaaggaagtaacttttttccagggaggggtg

SEQ ID NO: 177434 - DNA, 120 bp, Artificial Sequence
  ENSG00000110367_35 (sequence is synthesized)
ggagagggaatttaaaaggtgtcaacttttgaccaaaaaaattgtgcccttgtaccgatgcagctctctttctcccccacctcttgcgagataagagggatcattcatgtagaagaaaag

SEQ ID NO: 177435 - DNA, 120 bp, Artificial Sequence
  ENSG00000110367_36 (sequence is synthesized)
agtataaatgcaattctgtatctcgctagagaacgtgtgggtgactaaacaaaaagtgcagtctccttcaccaactttagactgcgtggtgccacatgcctgtgggtccctcttaaagca

SEQ ID NO: 177436 - DNA, 120 bp, Artificial Sequence
  ENSG00000110367_37 (sequence is synthesized)
cagacttaaaatggaaagtattactgaagtatagcctctaatgaggagtggcacttaaactatctgggacaccactactggacacggtcttgtagaggcagctgtccagttttggtgctt

SEQ ID NO: 177437 - DNA, 120 bp, Artificial Sequence
  ENSG00000110367_38 (sequence is synthesized)
gacacggtcttgtagaggcagctgtccagttttggtgcttgactcttgaataggaattgttaaatggaaagatgctctgaggactaggtcaaagcctggtcttttttttttttttttttt

SEQ ID NO: 177438 - DNA, 120 bp, Artificial Sequence
  ENSG00000110367_39 (sequence is synthesized)
tattggaagttgttttcacattctttccaatattaaatatgtatttttttaagtaatgataatattttccagtggctcatttggatgagaactaccctctatttttaatattaaaactac

SEQ ID NO: 177439 - DNA, 120 bp, Artificial Sequence
  ENSG00000110367_40 (sequence is synthesized)
atccaactcatcatttagcctttggttgtacagttgtgtaatgggctatggactgttacacaccttaccacctctaggcctatgttttttctttccccatatattctgatggggataaat

SEQ ID NO: 177440 - DNA, 120 bp, Artificial Sequence
  ENSG00000110367_41 (sequence is synthesized)
actgttttgcctctcccataggaatggaatacatttattctaaaatgatctttcacagaagtaagagagagggaaacctaaatatacctctaaattgtttgaagttggtcccagcagcat

SEQ ID NO: 177441 - DNA, 120 bp, Artificial Sequence
  ENSG00000110367_42 (sequence is synthesized)
aaaatgggttggccccaaagggttggagggtgggcttggttatcagtatttgttttcagaatgagatgggagcatctttcctttgccacgtgctttgtgcttgataacatcatgcttggt

SEQ ID NO: 177442 - DNA, 120 bp, Artificial Sequence
  ENSG00000110367_43 (sequence is synthesized)
tcaaacgacaactcagcacaaagccttgagtataaattgttggaatcaaaacatctcattctgatgacgtggtttaattttttaatttttttttttaataggggtgggagggagggtact

SEQ ID NO: 177443 - DNA, 120 bp, Artificial Sequence
  ENSG00000110367_44 (sequence is synthesized)
ttgccccagaagggagggtgtctgcactaaggatttagaaacactttggaagctcataacctcatcagaaactgcctttagccacactcctgaccttctagatgagtaacaaaaaaatga

SEQ ID NO: 177444 - DNA, 120 bp, Artificial Sequence
  ENSG00000110367_45 (sequence is synthesized)
aataagttcttggaaattaagccatttattttaatttgctatttttttcaatgttctaggtatctttaaatttgttattgtggaatcattttcctgccagatacctttatcaaaattatt

SEQ ID NO: 177445 - DNA, 120 bp, Artificial Sequence
  ENSG00000110367_46 (sequence is synthesized)
ggcctcatgagagctgaagtaagtcagctttttggtgaactttagtggacttctgtgagattgtagttgtactttgtatctctaaatctaaagatagttttttaaaactcccaaagaaaa

SEQ ID NO: 177446 - DNA, 120 bp, Artificial Sequence
  ENSG00000110367_47 (sequence is synthesized)
tctgctctcctttctgatctaaaaactcatctttggggtaaagagttaagtgtccaaaggttgtcacagttcatgaggtcagagggagctagcctggcacctggactctgcccatccaca

SEQ ID NO: 177447 - DNA, 120 bp, Artificial Sequence
  ENSG00000110367_48 (sequence is synthesized)
gctgacagattccaacagaagtgtatttaaattctccagtagacaatgctgggtaagggagggggtagggctgggttattaagatacaggctgctgtattttacattggttgtgtgggaa

SEQ ID NO: 177448 - DNA, 120 bp, Artificial Sequence
  ENSG00000110367_49 (sequence is synthesized)
ggggagcctggagaaaacaaagtcactattcccttttttgaaacaggaaaaaaaattattttttgttcagtaaaaatggtagagaattccaatgtccctagccacaagggaccagttcca

SEQ ID NO: 177449 - DNA, 120 bp, Artificial Sequence
  ENSG00000110367_50 (sequence is synthesized)
ctgagaagtgaacagtgggaactcaaaatttcagaaacattgggggaagggaaaattggctttctcttaattggcagatgttccagtggggggggggggggctctgtttttgttgggatg

SEQ ID NO: 177450 - DNA, 120 bp, Artificial Sequence
  ENSG00000110367_51 (sequence is synthesized)
tgttatgttgtatgtacgcatatatggaccggagtctgctgagtttataaggttccaaaaatatggtaaaatcttggtttttgttaatttatctcaataaaagcccactggaactccaaa

SEQ ID NO: 177451 - DNA, 120 bp, Artificial Sequence
  ENSG00000110367_52 (sequence is synthesized)
caaggttagttgaataaaagtttgtttttaaactaaaaatgggagtttcagccttggagccatgtgtagaagatactctttttttagtcagaatttacattatctaaaatttgtattctt

SEQ ID NO: 177452 - DNA, 120 bp, Artificial Sequence
  ENSG00000110367_53 (sequence is synthesized)
tcttttcaggttttttctttttttagcctgatgatggtctttttattaaaaatgattcccagctttttagagatttctagttttaagagtattcttatatgatacacacttgtgacagca

SEQ ID NO: 177453 - DNA, 120 bp, Artificial Sequence
  ENSG00000110367_54 (sequence is synthesized)
gatacacacttgtgacagcattccagtgagacaggaaaaataagtattagtgccctataggtaggaaagctgaggctgggcacggtgcctcacagcctgtaatcccagcactttgggagg

SEQ ID NO: 177454 - DNA, 67 bp, Artificial Sequence
  ENSG00000110367_55 (sequence is synthesized)
aactgtaatcccagctactcagaagtctgaggcacgagagtcactggaacccaggaggtggaggttg

SEQ ID NO: 177455 - DNA, 120 bp, Artificial Sequence
  ENSG00000110367_56 (sequence is synthesized)
cactccagcctgggtgacagagcaagattttgtctcagggtggcaggggggaaattctgtaatgacagatcatatattttgttttgaagagagttgcgtcccttacagcaagagtttatc

SEQ ID NO: 177456 - DNA, 120 bp, Artificial Sequence
  ENSG00000110367_57 (sequence is synthesized)
gagtatgaccaccactattaagtaagtgttagagtaaattattaataaacacttgtggggaaccaagatttgtgttactttggtgttgactattaatacttatgccttaatttaaccatt

SEQ ID NO: 177457 - DNA, 120 bp, Artificial Sequence
  ENSG00000110367_58 (sequence is synthesized)
ttgattccaaatagaggacagatgactttgttttatggccagtaggtatttgcaatagaataatatatttctgccataatttgttcagcaagtagtcatcctgaggtcagatgatacaca

SEQ ID NO: 177458 - DNA, 120 bp, Artificial Sequence
  ENSG00000110367_59 (sequence is synthesized)
attgtttgctactaatggagcggttgctggctcatattgcgcagataagattgcagagccccaaccttttgtgtttatggtcagaagtgtgtgtgtttggggcgtggggcggggtgcggg

SEQ ID NO: 177459 - DNA, 120 bp, Artificial Sequence
  ENSG00000110367_60 (sequence is synthesized)
gggacaagaaatttcctttcagttacggggttccagtcattagtcaatgactctttcccgtatctctctcctttctcttcctcagcccccatttcccttcagaataaaacccagtcactc

SEQ ID NO: 177460 - DNA, 120 bp, Artificial Sequence
  ENSG00000110367_61 (sequence is synthesized)
caacttgcaggcaaagctagaaaaactgcgctgcatttgcaaacaaaagctcttgttggcgatgacgatactgttttgggtgtgaaactgtcaattgctaactacgatctgtgaagtgct

SEQ ID NO: 177461 - DNA, 84 bp, Artificial Sequence
  ENSG00000110367_62 (sequence is synthesized)
tgtgaaactgtcaattgctaactacgatctgtgaagtgctgtaattaactccgctaggggctcctcccaactagtctacgtttc

SEQ ID NO: 177462 - DNA, 120 bp, Artificial Sequence
  ENSG00000110367_63 (sequence is synthesized)
taggaggaatatttccttctctgagaaaaagctgcagtgcaggtttcagtttaagaagggagcagttatcacatagtctcattttggatttaaggatataggaggtcttactgtgcatga

SEQ ID NO: 177463 - DNA, 120 bp, Artificial Sequence
  ENSG00000110367_64 (sequence is synthesized)
tggacagtaatgatgatatcgttcggtctttagaggttgcccttttcatcctcttagtgctctgcaaacagctaagtctctgtgaactgcgtgatatcgctgatcataatataaaaccgt

SEQ ID NO: 177464 - DNA, 120 bp, Artificial Sequence
  ENSG00000110367_65 (sequence is synthesized)
caatacaggaaagtagctgttaaccatatctgcttaagaggtcagagtctgaagtaaacagctttgtgtatgtgataatcaggatttgcttgtgagcaacttgttcattttttttttaag

SEQ ID NO: 177465 - DNA, 120 bp, Artificial Sequence
  ENSG00000110367_66 (sequence is synthesized)
gaaggcataatcaaggagcattttcttcataaatgttgagatctgttgactttaaaattttgagtttcacatgccttggtgtatggcagaaagaatcagcactcgtaagctagtgtattt

SEQ ID NO: 177466 - DNA, 62 bp, Artificial Sequence
  ENSG00000110367_67 (sequence is synthesized)
gtatggcagaaagaatcagcactcgtaagctagtgtattttatataagaaatgtaacggggt

SEQ ID NO: 177467 - DNA, 78 bp, Artificial Sequence
  ENSG00000110367_68 (sequence is synthesized)
tgggcgtgtaacggggttaaatcaaaagccaacagagtagggctttgttttcgtgtctttgtatgtttttattaactc

SEQ ID NO: 177468 - DNA, 120 bp, Artificial Sequence
  ENSG00000110367_69 (sequence is synthesized)
tgtaacggggttaaatcaaaagccaacagagtagggctttgttttcgtgtctttgtatgtttttattaactccaattaaaagtaagatttcagccgggcacggtggctctcgcctgtaat

SEQ ID NO: 177469 - DNA, 120 bp, Artificial Sequence
  ENSG00000110367_70 (sequence is synthesized)
catttgaggttaggagtccaagaccagcctggccaacttgataacaccccgtgtctactgaaaaatacagaaattagccagacctgtaatcccaccaagctacttgggaggctaaggcat

SEQ ID NO: 177470 - DNA, 120 bp, Artificial Sequence
  ENSG00000110367_71 (sequence is synthesized)
caccaagctacttgggaggctaaggcatgaggatcgcttgaacctgcgtggtggaggttgcagtgagctgagatcgggctactgcactccactctgggcaacagagtgagactctgtctc

SEQ ID NO: 177471 - DNA, 64 bp, Artificial Sequence
  ENSG00000110367_72 (sequence is synthesized)
gaggccgaggcgggcggatcacctgagctcagttgttcaagaccagcctggccaacatgtcgta

SEQ ID NO: 177472 - DNA, 120 bp, Artificial Sequence
  ENSG00000110367_73 (sequence is synthesized)
ggtgacagtgcaagattctgtctcaaaaaatacaataaaaaataaaagtaagtaagatttccatttacgggataattttaaactgaggttgactagttttgtgggttttgtttgtttgtt

SEQ ID NO: 177473 - DNA, 79 bp, Artificial Sequence
  ENSG00000110367_74 (sequence is synthesized)
aactgaggttgactagttttgtgggttttgtttgtttgtttgctttgtttgtttttaagtcagagtggactcactgcag

SEQ ID NO: 177474 - DNA, 83 bp, Artificial Sequence
  ENSG00000110367_75 (sequence is synthesized)
caccacgcccagttaatttttgtattttagtggaacggagtttcaccgtgttggtcatcttggcctcccaaagtgttgggatt

SEQ ID NO: 177475 - DNA, 120 bp, Artificial Sequence
  ENSG00000110367_76 (sequence is synthesized)
ccagttcttttttttttttttaaactattaattagctttactactctggatttcttggaaagttttcttaaaattactagtgtgtttagtcttccgcggatttttttttaaacaggaatt

SEQ ID NO: 177476 - DNA, 120 bp, Artificial Sequence
  ENSG00000110367_77 (sequence is synthesized)
aaattagaatagttattagctaagtttgttataaatgaataaaattattagagtcatcttggttttgtcaatttcaaaataaaaattcatttatacaaaatttgtgtatatcatccgtcc

SEQ ID NO: 177477 - DNA, 120 bp, Artificial Sequence
  ENSG00000110367_78 (sequence is synthesized)
tttgtgtatatcatccgtccttgggatcattacttgctggatgcattatggcagaaatacactattctcttgactgcttcatttattgttttaaaggacaaaaaggaaaaaagaaaatac

SEQ ID NO: 177478 - DNA, 120 bp, Artificial Sequence
  ENSG00000110367_79 (sequence is synthesized)
ggaaaaaagaaaatacatttttcttcttaaagttttttgttgttttttgagacaaggtctctgtcacctggctcactgcagcctccgtctgccaggttcaagcgattctcgtgcttcagc

SEQ ID NO: 177479 - DNA, 77 bp, Artificial Sequence
  ENSG00000110367_80 (sequence is synthesized)
acaggtgtgcaccaccatgcccggctaaagacggagtctggctctgtcgctgaggctggagtgcagtggcacaatct

SEQ ID NO: 177480 - DNA, 63 bp, Artificial Sequence
  ENSG00000110367_81 (sequence is synthesized)
agggtttcaccatcttggccaggctgatcctgaactcctgacctcatgatccacctttttgta

SEQ ID NO: 177481 - DNA, 90 bp, Artificial Sequence
  ENSG00000110367_82 (sequence is synthesized)
agatcgcccgcattggcctctcaaagtgctgcgattacaggcctgagccaccagcacccagcccataaagtttaatagttgaaatttgta

SEQ ID NO: 177482 - DNA, 120 bp, Artificial Sequence
  ENSG00000110367_83 (sequence is synthesized)
ccagcacccagcccataaagtttaatagttgaaatttgtaagggcacaaaggtgtttttttctggaagtgtgaagttcaagtcaaaagctcacttaaatctataaggactctcggttgct

SEQ ID NO: 177483 - DNA, 120 bp, Artificial Sequence
  ENSG00000110367_84 (sequence is synthesized)
attacaagtagaagaaaattaatgaattgtcttgtttaaattgtgtgatacttcagtgagttgtaatgcaattaagtataatgaatcactgacttttagagatgtcagagacttagagaa

SEQ ID NO: 177484 - DNA, 120 bp, Artificial Sequence
  ENSG00000110367_85 (sequence is synthesized)
ttcatggggaggaaactgaagagaagagattatcattgacgagtagtgctaatttactagtctctttctacttaatctctggattgctttgaattaacaattttaaatgtttgatattgg

SEQ ID NO: 177485 - DNA, 120 bp, Artificial Sequence
  ENSG00000110367_86 (sequence is synthesized)
cctcattgtgtttttgagatagttcaaagttgtgtctatcctagcttggctcgtgatttggtctaagtgtagctgtattattaattctttaatataaaagatgagaattcttttaaaggg

SEQ ID NO: 177486 - DNA, 120 bp, Artificial Sequence
  ENSG00000110375_0 (sequence is synthesized)
acttgcctcaggaaccccagcctgccagcacctattccacctcccagcccagcatggcacccctgctgcccatccggaccttgcccttgatcctgattctgctggctctgctgtccccag

SEQ ID NO: 177487 - DNA, 120 bp, Artificial Sequence
  ENSG00000110375_1 (sequence is synthesized)
gggctgcagacttcaacatctcaagcctctctggtctgctgtccccggcgctaacggagagcctgctggttgccttgcccccctgtcacctcacaggaggcaatgccacactgatggtcc

SEQ ID NO: 177488 - DNA, 120 bp, Artificial Sequence
  ENSG00000110375_2 (sequence is synthesized)
ggagagccaatgacagcaaagtggtgacgtccagctttgtggtgcctccgtgccgtgggcgcagggaactggtgagtgtggtggacagtggtgctggcttcacagtcactcggctcagtg

SEQ ID NO: 177489 - DNA, 120 bp, Artificial Sequence
  ENSG00000110375_3 (sequence is synthesized)
aatgtccacactccctcgaaggaacatggaatccattgggctgggtatggcccgcacagggggcatggtggtcatcacggtgctgctctctgtcgccatgttcctgctggtgctgggctt

SEQ ID NO: 177490 - DNA, 120 bp, Artificial Sequence
  ENSG00000110375_4 (sequence is synthesized)
catcattgccctggcactgggctcccgcaagtaaggaggtctgcccggagcagcagcttctccaggaagcccagggcaccatccagctccccagcccacctgctcccaggccccaggcct

SEQ ID NO: 177491 - DNA, 120 bp, Artificial Sequence
  ENSG00000110375_5 (sequence is synthesized)
gtggctcccttggtgccctcgcctcctcctcctgccctcctctcccctagagccctctcctccctctgtccctctccttgcccccagtgcctcaccttccaacactccattattcctctc

SEQ ID NO: 177492 - DNA, 120 bp, Artificial Sequence
  ENSG00000110375_6 (sequence is synthesized)
accccactcctgtcagagttgactttcctcccattttaccactttaaacacccccataacaattcccccatccttcagtgaactaagtccctataataaaggctgaggctgcatctgcca

SEQ ID NO: 177493 - DNA, 120 bp, Artificial Sequence
  ENSG00000110375_7 (sequence is synthesized)
tcaaactggatctccctcctcgcgcctctgctggcctggcatgactttcgccttgcccccagcccacccctcacctcacgcggattggggggtcctcacgccaggccggagctggacgcc

SEQ ID NO: 177494 - DNA, 120 bp, Artificial Sequence
  ENSG00000110395_0 (sequence is synthesized)
ggcggcggcggccgggagaggcccctccttcacgccctgcttctctccctcgctcgcagtcgagccgagccggcggacccgcctgggctccgaccctgcccaggccatggccggcaacgt

SEQ ID NO: 177495 - DNA, 120 bp, Artificial Sequence
  ENSG00000110395_1 (sequence is synthesized)
gggctccgaccctgcccaggccatggccggcaacgtgaagaagagctctggggccgggggcggcagcggctccgggggctcgggttcgggtggcctgattgggctcatgaaggacgcctt

SEQ ID NO: 177496 - DNA, 120 bp, Artificial Sequence
  ENSG00000110395_2 (sequence is synthesized)
ccagccgcaccaccaccaccaccaccacctcagcccccacccgccggggacggtggacaagaagatggtggagaagtgctggaagctcatggacaaggtggtgcggttgtgtcagaaccc

SEQ ID NO: 177497 - DNA, 120 bp, Artificial Sequence
  ENSG00000110395_3 (sequence is synthesized)
aaagctggcgctaaagaatagcccaccttatatcttagacctgctaccagatacctaccagcatctccgtactatcttgtcaagatatgaggggaagatggagacacttggagaaaatga

SEQ ID NO: 177498 - DNA, 120 bp, Artificial Sequence
  ENSG00000110395_4 (sequence is synthesized)
gtattttagggtgtttatggagaatttgatgaagaaaactaagcaaaccataagcctcttcaaggagggaaaagaaagaatgtatgaggagaattctcagcctaggcgaaacctaaccaa

SEQ ID NO: 177499 - DNA, 120 bp, Artificial Sequence
  ENSG00000110395_5 (sequence is synthesized)
actgtccctcatcttcagccacatgctggcagaactaaaaggaatctttccaagtggactctttcagggagacacatttcggattactaaagcagatgctgcggaattttggagaaaagc

SEQ ID NO: 177500 - DNA, 120 bp, Artificial Sequence
  ENSG00000110395_6 (sequence is synthesized)
ttttggggaaaagacaatagtcccttggaagagctttcgacaggctctacatgaagtgcatcccatcagttctgggctggaggccatggctctgaaatccactattgatctgacctgcaa

SEQ ID NO: 177501 - DNA, 120 bp, Artificial Sequence
  ENSG00000110395_7 (sequence is synthesized)
tgattatatttcggtttttgaatttgacatctttacccgactctttcagccctggtcctctttgctcaggaattggaacagccttgctgtaactcatcctggctacatggcttttttgac

SEQ ID NO: 177502 - DNA, 120 bp, Artificial Sequence
  ENSG00000110395_8 (sequence is synthesized)
gtatgacgaagtgaaagctcggctccagaaattcattcacaaacctggcagttatatcttccggctgagctgtactcgtctgggtcagtgggctattgggtatgttactgctgatgggaa

SEQ ID NO: 177503 - DNA, 120 bp, Artificial Sequence
  ENSG00000110395_9 (sequence is synthesized)
cattctccagacaatccctcacaataaacctctcttccaagcactgattgatggcttcagggaaggcttctatttgtttcctgatggacgaaatcagaatcctgatctgactggcttatg

SEQ ID NO: 177504 - DNA, 120 bp, Artificial Sequence
  ENSG00000110395_10 (sequence is synthesized)
tgaaccaactccccaagaccatatcaaagtgacccaggaacaatatgaattatactgtgagatgggctccacattccaactatgtaaaatatgtgctgaaaatgataaggatgtaaagat

SEQ ID NO: 177505 - DNA, 120 bp, Artificial Sequence
  ENSG00000110395_11 (sequence is synthesized)
tgagccctgtggacacctcatgtgcacatcctgtcttacatcctggcaggaatcagaaggtcagggctgtcctttctgccgatgtgaaattaaaggtactgaacccatcgtggtagatcc

SEQ ID NO: 177506 - DNA, 120 bp, Artificial Sequence
  ENSG00000110395_12 (sequence is synthesized)
gtttgatcctagagggagtggcagcctgttgaggcaaggagcagagggagctccctccccaaattatgatgatgatgatgatgaacgagctgatgatactctcttcatgatgaaggaatt

SEQ ID NO: 177507 - DNA, 120 bp, Artificial Sequence
  ENSG00000110395_13 (sequence is synthesized)
ggctggtgccaaggtggaacggccgccttctccattctccatggccccacaagcttcccttcccccggtgccaccacgacttgaccttctgccgcagcgagtatgtgttccctcaagtgc

SEQ ID NO: 177508 - DNA, 120 bp, Artificial Sequence
  ENSG00000110395_14 (sequence is synthesized)
ttctgctcttggaactgcttctaaggctgcttctggctcccttcataaagacaaaccattgccagtacctcccacacttcgagatcttccaccaccaccgcctccagaccggccatattc

SEQ ID NO: 177509 - DNA, 120 bp, Artificial Sequence
  ENSG00000110395_15 (sequence is synthesized)
tgttggagcagaatcccgacctcaaagacgccccttgccttgtacaccaggcgactgtccctccagagacaaactgccccctgtcccctctagccgccttggagactcatggctgccccg

SEQ ID NO: 177510 - DNA, 120 bp, Artificial Sequence
  ENSG00000110395_16 (sequence is synthesized)
gccaatccccaaagtaccagtatctgccccaagttccagtgatccctggacaggaagagaattaaccaaccggcactcacttccattttcattgccctcacaaatggagcccagaccaga

SEQ ID NO: 177511 - DNA, 120 bp, Artificial Sequence
  ENSG00000110395_17 (sequence is synthesized)
tgtgcctaggctcggaagcacgttcagtctggatacctccatgagtatgaatagcagcccattagtaggtccagagtgtgaccaccccaaaatcaaaccttcctcatctgccaatgccat

SEQ ID NO: 177512 - DNA, 120 bp, Artificial Sequence
  ENSG00000110395_18 (sequence is synthesized)
ttattctctggctgccagacctcttcctgtgccaaaactgccacctggggagcaatgtgagggtgaagaggacacagagtacatgactccctcttccaggcctctacggcctttggatac

SEQ ID NO: 177513 - DNA, 120 bp, Artificial Sequence
  ENSG00000110395_19 (sequence is synthesized)
atcccagagttcacgagcatgtgattgcgaccagcagattgatagctgtacgtatgaagcaatgtataatattcagtcccaggcgccatctatcaccgagagcagcacctttggtgaagg

SEQ ID NO: 177514 - DNA, 120 bp, Artificial Sequence
  ENSG00000110395_20 (sequence is synthesized)
gaatttggccgcagcccatgccaacactggtcccgaggagtcagaaaatgaggatgatgggtatgatgtcccaaagccacctgtgccggccgtgctggcccgccgaactctctcagatat

SEQ ID NO: 177515 - DNA, 120 bp, Artificial Sequence
  ENSG00000110395_21 (sequence is synthesized)
ctctaatgccagctcctcctttggctggttgtctctggatggtgatcctacaacaaatgtcactgaaggttcccaagttcccgagaggcctccaaaaccattcccgcggagaatcaactc

SEQ ID NO: 177516 - DNA, 120 bp, Artificial Sequence
  ENSG00000110395_22 (sequence is synthesized)
tgaacggaaagctggcagctgtcagcaaggtagtggtcctgccgcctctgctgccaccgcctcacctcagctctccagtgagatcgagaacctcatgagtcaggggtactcctaccagga

SEQ ID NO: 177517 - DNA, 120 bp, Artificial Sequence
  ENSG00000110395_23 (sequence is synthesized)
catccagaaagctttggtcattgcccagaacaacatcgagatggccaaaaacatcctccgggaatttgtttccatttcttctcctgcccatgtagctacctagcacaccatctccctgct

SEQ ID NO: 177518 - DNA, 120 bp, Artificial Sequence
  ENSG00000110395_24 (sequence is synthesized)
gcaggtttagaggaccagtgagttgggagttattactcaagtggcacctagaagggcaggagttcctttggtgacttcacagtgaagtcttgccctctctgtgggatatcacatcagtgg

SEQ ID NO: 177519 - DNA, 120 bp, Artificial Sequence
  ENSG00000110395_25 (sequence is synthesized)
ttccaagatttcaaagtggtgaaatgaaaatggagcagctagtatgttttattattttatgggtcttgagtgcatttgaaggtgtccttcagttcccacgtagagagagtgtggattata

SEQ ID NO: 177520 - DNA, 120 bp, Artificial Sequence
  ENSG00000110395_26 (sequence is synthesized)
ttacatgataacctacctggggaacagtccagaaagctatagaacaagtattttgctggaaatcctaattgaggacttaagacttcctgggttaaggatgtggccgtgtgtgtgtgtgtc

SEQ ID NO: 177521 - DNA, 120 bp, Artificial Sequence
  ENSG00000110395_27 (sequence is synthesized)
tgcctgtggttgtatgtgtccttgtgattataagattaacctgctgtgtgtgttaattccaggcagggaattagcacaaaaggtttaggaaggaatctttttttaaagacttccatctac

SEQ ID NO: 177522 - DNA, 120 bp, Artificial Sequence
  ENSG00000110395_28 (sequence is synthesized)
tgtggtattatacccaagcctagtgtgtattacaacttcaacactcccctttggcttatattaccatgtgcatagctaaagtcttctatttttagaacaccttctgtctgttctttcccc

SEQ ID NO: 177523 - DNA, 120 bp, Artificial Sequence
  ENSG00000110395_29 (sequence is synthesized)
atcaactccttcctcatccttcttggtgttctgtcatgggccatgggcttgctatggccagccttactgaggccaagcagcttatgggatgttctttattgtgtgtgatggtattggttt

SEQ ID NO: 177524 - DNA, 120 bp, Artificial Sequence
  ENSG00000110395_30 (sequence is synthesized)
gtttggtagataagtgggaggaaaagtactgttgctacactattataggcatgtttgatactagcagctaacactggtcactccaaagcactgtttctataggaacattgaagctattaa

SEQ ID NO: 177525 - DNA, 120 bp, Artificial Sequence
  ENSG00000110395_31 (sequence is synthesized)
gatgttttgattatcctaattacataatgaccgatttgagatagaggcctttaaatacattccatgccctccccagaaaatagtctgtgggagtcagttgccttggtgccaggtatgtgt

SEQ ID NO: 177526 - DNA, 120 bp, Artificial Sequence
  ENSG00000110395_32 (sequence is synthesized)
tctgatgtaggtcatgagtctttctacttaatgggaagggaagaacatttgtttccaggatgactttctggccagaataccggaaagcttttaggaagcttcgttcacatgctatttaaa

SEQ ID NO: 177527 - DNA, 120 bp, Artificial Sequence
  ENSG00000110395_33 (sequence is synthesized)
tgcacaaaatagacagtaaggatttatctgttcagtttttcttcccagtgaattaatttcagcttatatgggtgtcttcatttgaacatgaggaatattaggttatattttcagcagtgg

SEQ ID NO: 177528 - DNA, 120 bp, Artificial Sequence
  ENSG00000110395_34 (sequence is synthesized)
ttttttcctttgccctttaaggagtggggataatgtccacggtggcccagcctcttgctgatggcaccttccctgcattgctgcctcccgatgatgtggttcttttcttgtgcctgtggc

SEQ ID NO: 177529 - DNA, 120 bp, Artificial Sequence
  ENSG00000110395_35 (sequence is synthesized)
tttgggaatgtaacatctctttcctcctttccttcccttttcctcttcacctgaggtcctaaatactctctgtaattactgtgttcttcacggtaattagacatcattcagtgaataaat

SEQ ID NO: 177530 - DNA, 120 bp, Artificial Sequence
  ENSG00000110395_36 (sequence is synthesized)
tactgtagtcaaagacagtatgggctggcagtttgtgtaattgcaagttcataaagagaattgagggtccagttgggagaactattagtcagttcttttatatgctgataaatgatccct

SEQ ID NO: 177531 - DNA, 120 bp, Artificial Sequence
  ENSG00000110395_37 (sequence is synthesized)
cgagttcagttagtattctgtccagagtgtttagctcactttcttagcagtgtgtaagctttctccatgtcagaagcaagcctgctctttgataaatctgtcttcctgaaaatctaaatc

SEQ ID NO: 177532 - DNA, 120 bp, Artificial Sequence
  ENSG00000110395_38 (sequence is synthesized)
atgcttttgtctttagatctacacagaaatgaccctccttggatcagttttctttccagtctaatcatctttggaactaaaacttgttctaactcgtctcttggcattcagctactccta

SEQ ID NO: 177533 - DNA, 120 bp, Artificial Sequence
  ENSG00000110395_39 (sequence is synthesized)
gatcttttggttttatcccctggcctcagagccatttatattcccagagtaggcagtacaggatctcgtgttgatttgctgtggttacccagtgtcttctctacatggcataaagcggca

SEQ ID NO: 177534 - DNA, 120 bp, Artificial Sequence
  ENSG00000110395_40 (sequence is synthesized)
aagcccaccattaggtgaggcggtcccgagttgaggtagagtggggcagaggaagatggcagtgaatatcaaacagtagaccgccatcaacttctaacagccagtacacacactgtttca

SEQ ID NO: 177535 - DNA, 120 bp, Artificial Sequence
  ENSG00000110395_41 (sequence is synthesized)
ttttgaggtaacgttcagttttgcattttgtttaaatattgaaggcctagacaaagaactagaaaaaaaaaagcagtttccaggcccatccatattgtaatttttctttatctgcagata

SEQ ID NO: 177536 - DNA, 120 bp, Artificial Sequence
  ENSG00000110395_42 (sequence is synthesized)
ttgcctgtagtctaaagatctctttggaagacaaagcattggctatatatcttttgccttttccatgcatctaaatcttctctggagattatctccctactgtgtaggttaagggcagtc

SEQ ID NO: 177537 - DNA, 120 bp, Artificial Sequence
  ENSG00000110395_43 (sequence is synthesized)
tcgacttttccttttttgagtcctgtgtggctctttgaatcagcgtgaaactgaggctccagctccctgtgttgtgtgtgtgtgccatccatgggcttgggtgtcagtttgtcacaggta

SEQ ID NO: 177538 - DNA, 120 bp, Artificial Sequence
  ENSG00000110395_44 (sequence is synthesized)
tctgccagcattcaaggttttggatcatttcatgaggatctttcctttgactgggtgctgtgaggacacacctgggtctgtgcctgagattgccaggcaagattaaggaaagttttcatg

SEQ ID NO: 177539 - DNA, 120 bp, Artificial Sequence
  ENSG00000110395_45 (sequence is synthesized)
tggcttttgttttgaggttattctcaaaaccttaatttcttatattttctgttgactaaggcaccagtaacccattcttcaccctccatttgtatggcaatttaaaagtctttggctttg

SEQ ID NO: 177540 - DNA, 120 bp, Artificial Sequence
  ENSG00000110395_46 (sequence is synthesized)
ttgtcccttcctagtggctaataaagtaaaaaaacccacactactttgttctctttttctcatattcattgggctgttgtattcagccagtctcatgctttccctgggtcttcacggatt

SEQ ID NO: 177541 - DNA, 120 bp, Artificial Sequence
  ENSG00000110395_47 (sequence is synthesized)
gctttccaagctgccttgttgcggggttgctgcagagcagcaactggacctttccagctgtcgccatgttccttccactaaagtagagggttcttaaaatggaaaaacctgtgggctctt

SEQ ID NO: 177542 - DNA, 120 bp, Artificial Sequence
  ENSG00000110395_48 (sequence is synthesized)
catatacctccctttagttaagtaatagaccaggcagcttctcatctcagcatttacctgttaatatttttgtgaatagtgctctctacctgtgggtggccgttctcttccacttgctcg

SEQ ID NO: 177543 - DNA, 120 bp, Artificial Sequence
  ENSG00000110395_49 (sequence is synthesized)
tctccccccagccccattctgcataatctaccattcttctcctctctttctcttcttatacagaccctcattactggggcccaagatgtgggatactactgttagtattatttaactatt

SEQ ID NO: 177544 - DNA, 120 bp, Artificial Sequence
  ENSG00000110395_50 (sequence is synthesized)
ttgtagatttaaaagatttctggttaagggaggtgggggtcactgttcatcactcttaaaatatgtgttttctctatagaaaagtaaaatgtgtttatggtcccaaacagtcaactcaca

SEQ ID NO: 177545 - DNA, 120 bp, Artificial Sequence
  ENSG00000110395_51 (sequence is synthesized)
aatttttataacaaaatttccttgtaaaaactagggaccatctatatattccctttaagatctagttctttttgtaggtgttcagcaatggtgataaagcagaatattctcctacctcac

SEQ ID NO: 177546 - DNA, 120 bp, Artificial Sequence
  ENSG00000110395_52 (sequence is synthesized)
gtcattaaagtcagaagattatagaccttctcaaactataagtccctcttcttgccgttggcctttctgactctggaatgaccactgttcattgaaaaatagttttctgactattggtct

SEQ ID NO: 177547 - DNA, 120 bp, Artificial Sequence
  ENSG00000110395_53 (sequence is synthesized)
ggctctaacagtttgtttgttcatccagcaaatgtttatgagtgatgaccatgtgccagaaatgtcaggtatgtgtccttcccttggcgccacatagtagtttactaatgtttgggggat

SEQ ID NO: 177548 - DNA, 120 bp, Artificial Sequence
  ENSG00000110395_54 (sequence is synthesized)
tgtacttggactgtcatagcctctgcgtttgaccttaaaatagctcttcccagtaagattgtgcaatttttattcacagctcttccatgtagacttacctttcctcatagagctatcctg

SEQ ID NO: 177549 - DNA, 120 bp, Artificial Sequence
  ENSG00000110395_55 (sequence is synthesized)
gttaataacaggccaagattctcccattatcccctgttgtctcctgtagctttgataatgcctgggagattccttggtgtaagtgtcatggataccgactgtttttatgttggaatttgt

SEQ ID NO: 177550 - DNA, 120 bp, Artificial Sequence
  ENSG00000110395_56 (sequence is synthesized)
tccaacataattagaatctgtttggtgagttgaaaggtaagttggctcagagttgcacagtagggcattaaatgtttaagcaaagcatctgcccacactcccctttccaatctagtgcct

SEQ ID NO: 177551 - DNA, 120 bp, Artificial Sequence
  ENSG00000110395_57 (sequence is synthesized)
tccttgaactttttcctgagctgctacgtccctaatcccccttgttgggaggattttcgtatcacccttatgggacctgtcaccatgtcctgtactatttggaattggttttccagtctt

SEQ ID NO: 177552 - DNA, 120 bp, Artificial Sequence
  ENSG00000110395_58 (sequence is synthesized)
tcaacaaccgttgtggctaactatgttttagaagggctggaggtgtgggccctgtcttcgggtctcaggacccaaagatcctttagtcagttgttgggtcttccaagagccagacattaa

SEQ ID NO: 177553 - DNA, 120 bp, Artificial Sequence
  ENSG00000110395_59 (sequence is synthesized)
tacagattgaactccatcagtcccctaattgtcagcctttacctccctcccagagcaaggagtttagggattctaaagcttagtgtccacacatcattctaccagaccttagagctttag

SEQ ID NO: 177554 - DNA, 120 bp, Artificial Sequence
  ENSG00000110395_60 (sequence is synthesized)
aagctcaatctaaaatactgtaactcagcataaactattactatcactcctttgaactcagtctccatgagcagtgttttgttggaaatacatagaacggcttaatgcctagagggtggt

SEQ ID NO: 177555 - DNA, 120 bp, Artificial Sequence
  ENSG00000110395_61 (sequence is synthesized)
ggatagtgaaggacggtcaaggttatatttttgactgcttagggattctttggatccaagaaacagaaatgttcaagcggaataaaggagggagtggagttgtggtaaggatgcagggta

SEQ ID NO: 177556 - DNA, 120 bp, Artificial Sequence
  ENSG00000110395_62 (sequence is synthesized)
tttcgcagaacccaggacgggaagtgcctttggttcttgggtggagctggaactgcagagctttgcacctagtcctttctcccgcttcacagtctgcttatggtatatgtggcccccaaa

SEQ ID NO: 177557 - DNA, 120 bp, Artificial Sequence
  ENSG00000110395_63 (sequence is synthesized)
atatgtggcccccaaataggcactctagtcctcaagtctacaccaccttccaactctggggatcaccatgaacaaattctcaatttcccatacttaattttttttttttttgagatggag

SEQ ID NO: 177558 - DNA, 120 bp, Artificial Sequence
  ENSG00000110395_64 (sequence is synthesized)
ccaccgcgcccggcccatacttcgtattcttaaaaaaaactacactcagcccagcacattgatcaagtatctatctctgagcagttggccttgccagggagagcagagatgtggcaggct

SEQ ID NO: 177559 - DNA, 120 bp, Artificial Sequence
  ENSG00000110395_65 (sequence is synthesized)
ccttcagctggagacagggagcttctcagagaagtgagcagagactccacagacaccctaaaaaggcttctactcaagaagtaaagccactactcctgcctttttgcttagtggacagga

SEQ ID NO: 177560 - DNA, 120 bp, Artificial Sequence
  ENSG00000110395_66 (sequence is synthesized)
aggcacaggagtttgtctgggacatcatagaaattcttaggtttaacttaattctggtcattgtcttctttatttcctgtttttcttccctttgtcagtcttcgcatccaagatttcttc

SEQ ID NO: 177561 - DNA, 120 bp, Artificial Sequence
  ENSG00000110395_67 (sequence is synthesized)
cctccctcttgtgggccagcctgtcctgttccagagctagcctgttcctgggtagccttccttagcctccattcagcctcaggtcttttgccttcttccgtgtttatttagagagcagaa

SEQ ID NO: 177562 - DNA, 120 bp, Artificial Sequence
  ENSG00000110395_68 (sequence is synthesized)
tctaataacgggttccactgtagccactatccatggacttctgggtcctcttcaggtttgagtgcttgaaaatgttcattctctgggcttgtggcctgtctcctccactctcctcctcac

SEQ ID NO: 177563 - DNA, 120 bp, Artificial Sequence
  ENSG00000110395_69 (sequence is synthesized)
cctctcgctccttcctgtgtgagggccgctctgcagtaatgttctcaggcaagccttcctaggcacctcagaaactactttgccagagccagtaagaatatataatattggagcagttgc

SEQ ID NO: 177564 - DNA, 120 bp, Artificial Sequence
  ENSG00000110395_70 (sequence is synthesized)
caggatagaaattaaatatagattccagtttaggatagagtttttaccgagagctctttagacagtatacctgtgtcttctctggcaattgctttcattttagtcctatataaaagcttt

SEQ ID NO: 177565 - DNA, 120 bp, Artificial Sequence
  ENSG00000110395_71 (sequence is synthesized)
ccttttctgtttttttttaaaactatgcttttgcttgcctaaatcttttgatcttatatttctctcatctcagagcctgtcctgagttgtaaggtatttcatactgccttacttaaaagt

SEQ ID NO: 177566 - DNA, 120 bp, Artificial Sequence
  ENSG00000110395_72 (sequence is synthesized)
tttttaaactactagagtcatttgatacacacagaagttacctaataatccaaagatgtccatcaagggaggaagggtgggtcatcagactttgcctttgatgttgtagactaggctcct

SEQ ID NO: 177567 - DNA, 120 bp, Artificial Sequence
  ENSG00000110395_73 (sequence is synthesized)
gagttaagcagcagagggacagcagtgccatgtgccttcactgtgtcccaggaaatctgggttggttccagtgggaaataccagtatttcttggttctggaaagtagcaaaagagtagga

SEQ ID NO: 177568 - DNA, 120 bp, Artificial Sequence
  ENSG00000110395_74 (sequence is synthesized)
gatggggaaatagggatggggagagcaagccccgcatgtccatggcgagtcaggtggggagcacgggtggaagggccggctgttgacagacagactaagctgtgtggtgctcttgccgcc

SEQ ID NO: 177569 - DNA, 120 bp, Artificial Sequence
  ENSG00000110395_75 (sequence is synthesized)
ccttcctgggtacagagcttgagaaaaatgcagccgaccactccctgtgtttgtacagagcaaagcccaaaagccaacctcagatctcctgatttggcagctgaagaaatcagcagagtc

SEQ ID NO: 177570 - DNA, 120 bp, Artificial Sequence
  ENSG00000110395_76 (sequence is synthesized)
ctgattgcctgattcagtcccaaaaatgaatgtcaggccccgccccctccccaccaacattgcctctcctacattctccttctgcccctaaatcagacaggaggccagagaggagtattg

SEQ ID NO: 177571 - DNA, 120 bp, Artificial Sequence
  ENSG00000110395_77 (sequence is synthesized)
ctcaatgcgtgctatgtgcaactcctcaggccttgtgccacctccatgctgagccctgaagcagggtgtcctgggtgcctgtgtgtcagctccctcctctctacctacctctgaccttct

SEQ ID NO: 177572 - DNA, 120 bp, Artificial Sequence
  ENSG00000110395_78 (sequence is synthesized)
tgtgggtgagggtggccatgcttatggccatcttaaaactggagaggcagagaactacttatgagtctgtagaccacgtgttgtcttccatggcctgtttctcctgctgtctgggtgagt

SEQ ID NO: 177573 - DNA, 120 bp, Artificial Sequence
  ENSG00000110395_79 (sequence is synthesized)
gagcctgcaacgcaatgcccatgagagtaaatgcctcctgacctaccctgctcagcactgttctagtgtcttggccttgaaagaaaagcctgacttcctgctgacacatgtggtaggggc

SEQ ID NO: 177574 - DNA, 120 bp, Artificial Sequence
  ENSG00000110395_80 (sequence is synthesized)
atggcagctatgaggcacctcctacgtctgttttctggctgtggtgacttgggatttttaaccttatatatctttttcctttactcaaaacaaaacaatttttagcacactgaaaaaaaa

SEQ ID NO: 177575 - DNA, 120 bp, Artificial Sequence
  ENSG00000110395_81 (sequence is synthesized)
aaaaagccaaatgttttgtgcctttctaaggcagcactgtatcccaggctgcattttaggacttaatatggaaataccagagtctgagctcctctaccttgagtttcattagtccttagt

SEQ ID NO: 177576 - DNA, 120 bp, Artificial Sequence
  ENSG00000110395_82 (sequence is synthesized)
gtctaggagacaggaaagaatgctctctgtgactggagaggtgacatgcaggtgcagtgtgtctggagtccctttcccctgctgtgagacttcagtggaggagagaagcattgtaccctg

SEQ ID NO: 177577 - DNA, 120 bp, Artificial Sequence
  ENSG00000110395_83 (sequence is synthesized)
ggatcatttggttggttccaatcacaagcttagttatcaggttgcatgccttgtctcctgcaaaagacagaatgtttcacaattcccaggtaaactctggaccattccaagtgtcctagc

SEQ ID NO: 177578 - DNA, 120 bp, Artificial Sequence
  ENSG00000110395_84 (sequence is synthesized)
cttctgatgacattaattacctagttgtgtcgaggagtataggatggactctcctgagaaggggaggttggtggctttgtcttttctttttgctggatcctgaactggtctagacctcct

SEQ ID NO: 177579 - DNA, 120 bp, Artificial Sequence
  ENSG00000110395_85 (sequence is synthesized)
gcccccaccccccagcccccatcagatgtggctggcctttcatttgaaggcttcagacttaaagcattaagcagctagtgccctctgcagggcctggtttccccagggaagggcagcaag

SEQ ID NO: 177580 - DNA, 120 bp, Artificial Sequence
  ENSG00000110395_86 (sequence is synthesized)
gaacatgggaccagaagcctgtcctcagtaatgtgactatagtgagctttagcaaaagtttttctatataatgacatcttacttatcttttaccctttcctcagttttcccctgccttta

SEQ ID NO: 177581 - DNA, 120 bp, Artificial Sequence
  ENSG00000110395_87 (sequence is synthesized)
actaataaagaattgggagacagaaattttaaagtcctccttattcaagattttgaaattcttagcctgggagtgctggagagaacctgatgctttctccagaatgaagagtcccaattt

SEQ ID NO: 177582 - DNA, 120 bp, Artificial Sequence
  ENSG00000110395_88 (sequence is synthesized)
gtatatcagtgttaagaagaaaacaaaacaaacacataggtgagattttcgtggactattttaaaaatgtgtcattaatataaaaaatttatattagcagtatttaatcattctcacctg

SEQ ID NO: 177583 - DNA, 120 bp, Artificial Sequence
  ENSG00000110395_89 (sequence is synthesized)
taaagaataagaaaaacagaaggtaaatattcttacagagaatagcagagctttaagattcattttcattttaagtccattttattttgccagtgtattaatgtttagaagtctgtttta

SEQ ID NO: 177584 - DNA, 120 bp, Artificial Sequence
  ENSG00000110395_90 (sequence is synthesized)
ctaatgttatttattaattttttttcatttccatacacagttagttaactaaagagctttttcaagcacccatgtctgtaaaaaaatatttttaaataaagtttcttttgttgtagcaga

SEQ ID NO: 177585 - DNA, 120 bp, Artificial Sequence
  ENSG00000110395_91 (sequence is synthesized)
ccagccagcactactgatgttttaggccacgttgattctttattgtgggggctgtcctgtgccctataggatgttagcaacatccttggtctctctacctactagatggcagtagcaccc

SEQ ID NO: 177586 - DNA, 120 bp, Artificial Sequence
  ENSG00000110395_92 (sequence is synthesized)
cctctatgtgtgacaaccaaaaatatctccagacattgccaagtatctcctaggaggagggggtacaaaatcacccctggttaagaatgactgatttagataataaaacacagaagccta

SEQ ID NO: 177587 - DNA, 120 bp, Artificial Sequence
  ENSG00000110400_0 (sequence is synthesized)
aaagagagcgagagcagcgagcgcggctccacattgttgcggatcgccggcacccggcagagcggcggcggctgggacgcgcggcgcctccgacccgttctcctcgcgcccggccgcgca

SEQ ID NO: 177588 - DNA, 80 bp, Artificial Sequence
  ENSG00000110400_1 (sequence is synthesized)
cgccgcctgggccccgagccttctgcgccgcccgggtgcgtcccgccaccctcggaggacggccggccatggacgcctgc

SEQ ID NO: 177589 - DNA, 80 bp, Artificial Sequence
  ENSG00000110400_2 (sequence is synthesized)
aggagcccgcgccgcgcaaccgggcagccgggcgcgccgggggtgggtccctctccccagccccgctctgcgtggaagaa

SEQ ID NO: 177590 - DNA, 120 bp, Artificial Sequence
  ENSG00000110400_3 (sequence is synthesized)
gagggcggggaccggcgccgggaggagagcggaggaggcgaaggggcatgactcgtgcaacttgcggcgggcatctgccgagcctctgagccggcggcggcccggggcccggactgcggc

SEQ ID NO: 177591 - DNA, 120 bp, Artificial Sequence
  ENSG00000110400_4 (sequence is synthesized)
cgcgcggatcccacccagcccaccccgccccggccgacggctgcagctgacctggatccttcgagcgcccgccgaccgccagcgatcttccctcatcttccgggctggtttctgctgcgc

SEQ ID NO: 177592 - DNA, 120 bp, Artificial Sequence
  ENSG00000110400_5 (sequence is synthesized)
gaggagcgctgccctcgccgcccctctcgccggacccccggcccccgatggctcggatggggcttgcgggcgccgctggacgctggtggggactcgctctcggcttgaccgcattcttcc

SEQ ID NO: 177593 - DNA, 120 bp, Artificial Sequence
  ENSG00000110400_6 (sequence is synthesized)
tcccaggcgtccactcccaggtggtccaggtgaacgactccatgtatggcttcatcggcacagacgtggttctgcactgcagctttgccaacccgcttcccagcgtgaagatcacccagg

SEQ ID NO: 177594 - DNA, 120 bp, Artificial Sequence
  ENSG00000110400_7 (sequence is synthesized)
tcacatggcagaagtccaccaatggctccaagcagaacgtggccatctacaacccatccatgggcgtgtccgtgctggctccctaccgcgagcgtgtggaattcctgcggccctccttca

SEQ ID NO: 177595 - DNA, 120 bp, Artificial Sequence
  ENSG00000110400_8 (sequence is synthesized)
ccgatggcactatccgcctctcccgcctggagctggaggatgagggtgtctacatctgcgagtttgctaccttccctacgggcaatcgagaaagccagctcaatctcacggtgatggcca

SEQ ID NO: 177596 - DNA, 120 bp, Artificial Sequence
  ENSG00000110400_9 (sequence is synthesized)
aacccaccaattggatagagggtacccaggcagtgcttcgagccaagaaggggcaggatgacaaggtcctggtggccacctgcacctcagccaatgggaagcctcccagtgtggtatcct

SEQ ID NO: 177597 - DNA, 120 bp, Artificial Sequence
  ENSG00000110400_10 (sequence is synthesized)
gggaaactcggttaaaaggtgaggcagagtaccaggagatccggaaccccaatggcacagtgacggtcatcagccgctaccgcctggtgcccagcagggaagcccaccagcagtccttgg

SEQ ID NO: 177598 - DNA, 120 bp, Artificial Sequence
  ENSG00000110400_11 (sequence is synthesized)
cctgcatcgtcaactaccacatggaccgcttcaaggaaagcctcactctcaacgtgcagtatgagcctgaggtaaccattgaggggtttgatggcaactggtacctgcagcggatggacg

SEQ ID NO: 177599 - DNA, 120 bp, Artificial Sequence
  ENSG00000110400_12 (sequence is synthesized)
tgaagctcacctgcaaagctgatgctaaccccccagccactgagtaccactggaccacgctaaatggctctctccccaagggtgtggaggcccagaacagaaccctcttcttcaagggac

SEQ ID NO: 177600 - DNA, 120 bp, Artificial Sequence
  ENSG00000110400_13 (sequence is synthesized)
ccatcaactacagcctggcagggacctacatctgtgaggccaccaaccccatcggtacacgctcaggccaggtggaggtcaatatcacagaattcccctacaccccgtctcctcccgaac

SEQ ID NO: 177601 - DNA, 120 bp, Artificial Sequence
  ENSG00000110400_14 (sequence is synthesized)
atgggcggcgcgccgggccggtgcccacggccatcattgggggcgtggcggggagcatcctgctggtgttgattgtggtcggcgggatcgtggtcgccctgcgtcggcgccggcacacct

SEQ ID NO: 177602 - DNA, 120 bp, Artificial Sequence
  ENSG00000110400_15 (sequence is synthesized)
tcaagggtgactacagcaccaagaagcacgtgtatggcaacggctacagcaaggcaggcatcccccagcaccacccaccaatggcacagaacctgcagtaccccgacgactcagacgacg

SEQ ID NO: 177603 - DNA, 120 bp, Artificial Sequence
  ENSG00000110400_16 (sequence is synthesized)
agaagaaggccggcccactgggtggaagcagctatgaggaggaggaggaggaggaggagggcggtggagggggcgagcgcaaggtgggcggcccccaccccaaatatgacgaggacgcca

SEQ ID NO: 177604 - DNA, 120 bp, Artificial Sequence
  ENSG00000110400_17 (sequence is synthesized)
agcggccctacttcaccgtggatgaggccgaggcccgtcaggacggctacggggaccggactctgggctaccagtacgaccctgagcagctggacttggctgagaacatggtttctcaga

SEQ ID NO: 177605 - DNA, 120 bp, Artificial Sequence
  ENSG00000110400_18 (sequence is synthesized)
acgacgggtctttcatttccaagaaggagtggtacgtgtagccccccttccagagcctctgtctgtgaccgctcctccccagcccctccccgcacgccccctgcccaccccccacctccc

SEQ ID NO: 177606 - DNA, 120 bp, Artificial Sequence
  ENSG00000110400_19 (sequence is synthesized)
actccaggagctgaacagagacttgcccagctgcccaaagccagccccgaactcctggggggccaggggagcccagggcagccacgacttggctttgtgttttatttcctccctctcctc

SEQ ID NO: 177607 - DNA, 120 bp, Artificial Sequence
  ENSG00000110400_20 (sequence is synthesized)
cgcccttccccatggtgttgtgttcgactgtggctttagtgttactgtatcttccctttacgggccccacctgcctgccctctgtgtagggagccctgttctcgtcttgtgtacctgggc

SEQ ID NO: 177608 - DNA, 120 bp, Artificial Sequence
  ENSG00000110400_21 (sequence is synthesized)
atccctccagggtttggggagccagcctcccccgcccccctacactggaatttgtttgtgtttcttcactgggggtggagggctcaaggggctctaagagggaaaagctccccacacccc

SEQ ID NO: 177609 - DNA, 120 bp, Artificial Sequence
  ENSG00000110400_22 (sequence is synthesized)
cagatgctgctcctcctcccggctagagggaacccaacacccaccagtgaaatctgatgcagctgggagtttggaccttgggtctagacagctggtgcgcccaagaggtagggggagggg

SEQ ID NO: 177610 - DNA, 120 bp, Artificial Sequence
  ENSG00000110400_23 (sequence is synthesized)
tgcggcttctccccagttcccagggagtcttgtttgttaagcggggccttgggcagtgttttcctgctgagggtggttttacattttttttcctcattggcccacagagagtggagttgg

SEQ ID NO: 177611 - DNA, 120 bp, Artificial Sequence
  ENSG00000110400_24 (sequence is synthesized)
cttgctctctgcctctgctgacacgtgcacacacacacacatgcacacactgctcctctctgcctgctttcccctggagtcccatgccctgccccatccagacactgcccaaggcccacc

SEQ ID NO: 177612 - DNA, 120 bp, Artificial Sequence
  ENSG00000110400_25 (sequence is synthesized)
cgtctatttccacctcattccccctttaagctgagaatggggtctgcctatagaagcttccagagacagctgagactgggtccccggtgcctccaccctaggatctcaggcctgccccaa

SEQ ID NO: 177613 - DNA, 120 bp, Artificial Sequence
  ENSG00000110400_26 (sequence is synthesized)
actgcttcttacagcgtggaggtttctctgatttctcccttatctagcaacacttggttcttttggctagtcagggctgggatcccagggggatccacctgcaggagtcagaggtaaaga

SEQ ID NO: 177614 - DNA, 120 bp, Artificial Sequence
  ENSG00000110400_27 (sequence is synthesized)
agcatccacacggagggtagtggggaaggaagcccacatggcagaagctctgcaaacacagtccgagggactgaggagtccatacaatgcctcacacacaaaggccattgtcaaagcctc

SEQ ID NO: 177615 - DNA, 120 bp, Artificial Sequence
  ENSG00000110400_28 (sequence is synthesized)
gggcctggcagaaagtgaggggggtggggccgctaggccacctcctgctcagccacccctggtcctcattctgggatgaggggagggcctaggagaagccctccctttcagtgcagattc

SEQ ID NO: 177616 - DNA, 120 bp, Artificial Sequence
  ENSG00000110400_29 (sequence is synthesized)
ccttcttgaatgggacattgagttcctatcagccaccccagactgggtcttcccatgtatataatggaggaagacccctcccagccctctcagtcccccagctcaaagtgcctcagttcc

SEQ ID NO: 177617 - DNA, 120 bp, Artificial Sequence
  ENSG00000110400_30 (sequence is synthesized)
tccatctgctcccagatcccctggcactctagacaggcatgcccatgggaaggaccctgggatggagaggcaggcttcgcggcccttcatgcctgcccactgggattccagttaactcac

SEQ ID NO: 177618 - DNA, 120 bp, Artificial Sequence
  ENSG00000110400_31 (sequence is synthesized)
cccagggtgtcaggggctctgcaggatggcaagtgttggggaggagggaggcagaccactctgtgccccacgggcactgacccaccctgccataggcttcctaagggagccccccaaccc

SEQ ID NO: 177619 - DNA, 120 bp, Artificial Sequence
  ENSG00000110400_32 (sequence is synthesized)
ctcccctcccctccctggtgctgctattgaaccccctgccagctccatttctgccctggcaaccctgggcccagcaggtgggtcgtcgttgtctggccctcactgccctggccccagccc

SEQ ID NO: 177620 - DNA, 120 bp, Artificial Sequence
  ENSG00000110400_33 (sequence is synthesized)
aggctgcccagtagccacgtagcagaagtctgaagccatgccagccctggtgcggctctcccctctacacatttggggtactggatagggtgaagttaggggagaaaattgtggagtctt

SEQ ID NO: 177621 - DNA, 120 bp, Artificial Sequence
  ENSG00000110400_34 (sequence is synthesized)
tccagccacagggcagagggaggtggaggagctgggctgcttttcccagcagtattagtgtcccccaggacaggggaccttttccacattacatcactgccccatcccaccttacaacac

SEQ ID NO: 177622 - DNA, 120 bp, Artificial Sequence
  ENSG00000110400_35 (sequence is synthesized)
tctggcccctctgcttggtccccttttcccccaggcaggaggcaatcccaggggcctgcctgatagaggcatttcctgtccctgtctcctcctgcatctcctttatcctgcactgccacc

SEQ ID NO: 177623 - DNA, 120 bp, Artificial Sequence
  ENSG00000110400_36 (sequence is synthesized)
ctctattccccattctgtgttggactttgaaggccccaagcccagccaaagcactgagttcccccttaagacacctccacaccctccccacaagcaaagcacaaattttggggtccatgt

SEQ ID NO: 177624 - DNA, 120 bp, Artificial Sequence
  ENSG00000110400_37 (sequence is synthesized)
agcatgggccacgtaggaggctcctgacttgccaggggcccagcctcagcatacccaccgagcagctgccagcctgggctgagggtgggcatgaggcaggagtcagcacttggacctagg

SEQ ID NO: 177625 - DNA, 120 bp, Artificial Sequence
  ENSG00000110400_38 (sequence is synthesized)
gatgtgaggttttctgtgccccaagtttgtgggaaggtgggcactactgctgggcccacagacacagccagctggcaaaagggaggtctagcccagcagagagatgaggacattttgctt

SEQ ID NO: 177626 - DNA, 120 bp, Artificial Sequence
  ENSG00000110400_39 (sequence is synthesized)
ctccttcatgcccacagcatgagctgagcttctgctttgctggaaatgaaataaacttggtatgaattgtgccaaggcctccccagttgtcatcctgcctcttgttgccctccctgtcct

SEQ ID NO: 177627 - DNA, 120 bp, Artificial Sequence
  ENSG00000110400_40 (sequence is synthesized)
tgccccccaccccacacccatgcccctgtttccttacagattttgatattgttctaatgtgtaatagaaccagccgagtccccttttatcagaagggtctgaaaagcagcagcacagagt

SEQ ID NO: 177628 - DNA, 120 bp, Artificial Sequence
  ENSG00000110400_41 (sequence is synthesized)
aggtgaacacaggcctgcaagtgcgaccacctcagacccagtacgtgtgcccacagtggacacactcacacctccaacacacccacgcgcaggcatgtgtacacgcatgtacacacgcat

SEQ ID NO: 177629 - DNA, 120 bp, Artificial Sequence
  ENSG00000110400_42 (sequence is synthesized)
gcatgcacagccagatggccactcagcacagatgtggcagagggaatggtctgatcctgctgaaagccattaaggagaaacgaatttcccagtgcccgggctgcaagagagccttatagg

SEQ ID NO: 177630 - DNA, 120 bp, Artificial Sequence
  ENSG00000110400_43 (sequence is synthesized)
ggccctgtttcctgggcatgcgcttcctctgccagccaacccccacttgcccaagtcactggtgcaataacttttctgccttcctcagagcagagaaattgggaattgtgttaggtgggt

SEQ ID NO: 177631 - DNA, 120 bp, Artificial Sequence
  ENSG00000110400_44 (sequence is synthesized)
gtgggcagctctgctgagccaagcagacacggatgtcccctcttctgggaggagggtagtgctcccaggcctcaggagtccagacagagacccccaaagcctgactgccaacagaaaccc

SEQ ID NO: 177632 - DNA, 120 bp, Artificial Sequence
  ENSG00000110400_45 (sequence is synthesized)
tctcctagtgaggggcaggtgggtgtgccccaggtccccacacccacagggaggcttcacacactgcccagtaccggggatgccaggaggcaggcccctctgctgctgccactgctgcca

SEQ ID NO: 177633 - DNA, 120 bp, Artificial Sequence
  ENSG00000110400_46 (sequence is synthesized)
acactgcccagcttgtgaggccaggaggagcccctgtcccactcggtgctgctgctcttctgacccctgctgtgaggaatgggattcttggtcgaaaaaattggttttccttttttgtat

SEQ ID NO: 177634 - DNA, 120 bp, Artificial Sequence
  ENSG00000110400_47 (sequence is synthesized)
aaatgaaaagaatccaggagaagctgccaccctcccctcccagcgtgatgcgctaccttgcttcggcgtcttgtcgccctttccgcctttggtccagggacagcccagcagatcctcctg

SEQ ID NO: 177635 - DNA, 120 bp, Artificial Sequence
  ENSG00000110400_48 (sequence is synthesized)
gttctgacctggggggtgtttgcatcacccccttttacttgtattaaaaaaaaatgatgggttgaaaatgtactgaggattaaaaatgtacttttttataaataaagtgtttaaaacaaa

SEQ ID NO: 177636 - DNA, 120 bp, Artificial Sequence
  ENSG00000110400_49 (sequence is synthesized)
gtgaatggaaagtagaaagagcactttaccaggagtcccgagaattggctggagctcccatgctgctgcctgctagctgtggttccctggccttgaacctcaggtttcatctgttaaggg

SEQ ID NO: 177637 - DNA, 120 bp, Artificial Sequence
  ENSG00000110400_50 (sequence is synthesized)
ggaccggcacctacctagcctgcctatattcccatattatgatcaaatatgaaaagctgaataatataaaactaccaagtgaaagagattattattattatttttcttccttcaaagaca

SEQ ID NO: 177638 - DNA, 120 bp, Artificial Sequence
  ENSG00000110400_51 (sequence is synthesized)
gactctaccacacaagctcagcaaaaggctagggggcctggagccaagtgggtgacccaggaacagcttcttgaggctggagagtcataaccctacgctgtgtctcccacttcccacagg

SEQ ID NO: 177639 - DNA, 120 bp, Artificial Sequence
  ENSG00000110400_52 (sequence is synthesized)
aaagggaggacaagagctaggatgttctgaggagagacttcacctgggacgtgaaaggagcatgggcttgatgtcagacagctgtgaccctggacagggccccccccaccatctgtaaaa

SEQ ID NO: 177640 - DNA, 120 bp, Artificial Sequence
  ENSG00000110400_53 (sequence is synthesized)
cggggacagtatgatgtaccttgaagggctgttgtcagaattctacgtgatgtaagtcaagcacctagcacagatcagtctgtcaataaatggccaatgttccgtgattattaccctgac

SEQ ID NO: 177641 - DNA, 120 bp, Artificial Sequence
  ENSG00000110400_54 (sequence is synthesized)
accacgggtgatgaggggcaaccatcctacctccaggagcctttaggcagggaagaaattagggtctgggctcagtaagaagcggggccatgagagaacaacccccacccccaacacaca

SEQ ID NO: 177642 - DNA, 120 bp, Artificial Sequence
  ENSG00000110400_55 (sequence is synthesized)
catatacattacgtccatgtgtgacagtgtcaaggtcaatggaacaagctattctgccagaggggtttcctttgtgatctgcttccctccctcttcctaataaagagttttgtcgttttc

SEQ ID NO: 177643 - DNA, 120 bp, Artificial Sequence
  ENSG00000110400_56 (sequence is synthesized)
cttgcagaagctgtccctgcagcccccctactatgatctgggggtctccccctcctaccacccctcgggctctggcctaaaggacactcacagccactatgcagagctggacacctctgc

SEQ ID NO: 177644 - DNA, 120 bp, Artificial Sequence
  ENSG00000110400_57 (sequence is synthesized)
cctggaactcgtgccagggctgcggacccccgtgccagggcctgcagaggctgtggaatatgccaccatccagttgagcccaccctagctcataacccctagccacccacccctgcttct

SEQ ID NO: 177645 - DNA, 120 bp, Artificial Sequence
  ENSG00000110400_58 (sequence is synthesized)
ccatttcctccagcctcttttcactggcctccctgggctctgctccttcctgtaagggcacttgtggacaagactgtccctctcacacacacaccctgcccttacctgctgcctccaggc

SEQ ID NO: 177646 - DNA, 120 bp, Artificial Sequence
  ENSG00000110400_59 (sequence is synthesized)
cagcctgggacagaagccccatcctatatctcggttccctcctcccagacctccagagcccccaggctccacctccctccaccccgatcacggggataaacctgtggggtgaacacctga

SEQ ID NO: 177647 - DNA, 120 bp, Artificial Sequence
  ENSG00000110400_60 (sequence is synthesized)
cagaggggtctgggaagtgcagccaggctcctggcgggcaccgtggccgtgttcctcatcctagttgctgtgctcactgtcttcttcctgtacaaccggcagcagaagagcccaccggag

SEQ ID NO: 177648 - DNA, 120 bp, Artificial Sequence
  ENSG00000110400_61 (sequence is synthesized)
acggatggggccgggaccgaccagcccctctcccagaagccggagccttctcccagcaggcaaagctcccttgtgcctgaggatatccaggttgtccacctggacccagggaggcagcag

SEQ ID NO: 177649 - DNA, 120 bp, Artificial Sequence
  ENSG00000110400_62 (sequence is synthesized)
cagcaagaagaggaggacttgcagaagctgtccctgcagcccccctactatgatctgggggtctccccctcctaccacccctcggtaaggacaaccgaacctcgaggagagtgcccctag

SEQ ID NO: 177650 - DNA, 120 bp, Artificial Sequence
  ENSG00000110422_0 (sequence is synthesized)
ggtggcagctgcctcagtgacgactgccggcatcgcggcgacctgaggagatcaagccgcaggccccgccgtcgccaccactcccgccagtcttccttctccgctcccggccggggcgtc

SEQ ID NO: 177651 - DNA, 120 bp, Artificial Sequence
  ENSG00000110422_1 (sequence is synthesized)
aggaatgggccccaatcgccgtgggccccgcaccctgcgtcgcccgtaggccccagtagccggaggccgaccggcctcccactacccctcgccctagccaagccgtccccaccccaaatc

SEQ ID NO: 177652 - DNA, 120 bp, Artificial Sequence
  ENSG00000110422_2 (sequence is synthesized)
cccgggaaggaagatgagggagacgggcccggcgcttagcagccagagcagcagcagcagcagcagcggtcgggggagggtgtttcgccgtttcctctcagccgccaggacaagatggca

SEQ ID NO: 177653 - DNA, 120 bp, Artificial Sequence
  ENSG00000110422_3 (sequence is synthesized)
ggagaggggctgagcccgggctgggtggtgccgcctgctgaagcgcctggctcccggtccccggcacggccctgcgccccaccccggacatgctcagggctgcggccgcccgaagaggag

SEQ ID NO: 177654 - DNA, 120 bp, Artificial Sequence
  ENSG00000110422_4 (sequence is synthesized)
aagaggagagagcgcgggcctctaggaaggtatggcctcacaagtcttggtctacccaccatatgtttatcaaactcagtcaagtgccttttgtagtgtgaagaaactcaaagtagagcc

SEQ ID NO: 177655 - DNA, 120 bp, Artificial Sequence
  ENSG00000110422_5 (sequence is synthesized)
aagcagttgtgtattccaggaaagaaactatccacggacctatgtgaatggtagaaactttggaaattctcatcctcccactaagggtagtgcttttcagacaaagataccatttaatag

SEQ ID NO: 177656 - DNA, 120 bp, Artificial Sequence
  ENSG00000110422_6 (sequence is synthesized)
acctcgaggacacaacttttcattgcagacaagtgctgttgttttgaaaaacactgcaggtgctacaaaggtcatagcagctcaggcacagcaagctcacgtgcaggcacctcagattgg

SEQ ID NO: 177657 - DNA, 120 bp, Artificial Sequence
  ENSG00000110422_7 (sequence is synthesized)
ggcgtggcgaaacagattgcatttcctagaaggcccccagcgatgtggattgaagcgcaagagtgaggagttggataatcatagcagcgcaatgcagattgtcgatgaattgtccatact

SEQ ID NO: 177658 - DNA, 120 bp, Artificial Sequence
  ENSG00000110422_8 (sequence is synthesized)
tcctgcaatgttgcaaaccaacatgggaaatccagtgacagttgtgacagctaccacaggatcaaaacagaattgtaccactggagaaggtgactatcagttagtacagcatgaagtctt

SEQ ID NO: 177659 - DNA, 120 bp, Artificial Sequence
  ENSG00000110422_9 (sequence is synthesized)
atgctccatgaaaaatacttacgaagtccttgattttcttggtcgaggcacgtttggccaggtagttaaatgctggaaaagagggacaaatgaaattgtagcaatcaaaattttgaagaa

SEQ ID NO: 177660 - DNA, 120 bp, Artificial Sequence
  ENSG00000110422_10 (sequence is synthesized)
tcatccttcttatgcccgtcaaggtcaaatagaagtgagcatattagcaaggctcagtactgaaaatgctgatgaatataactttgtacgagcttatgaatgctttcagcaccgtaacca

SEQ ID NO: 177661 - DNA, 120 bp, Artificial Sequence
  ENSG00000110422_11 (sequence is synthesized)
tacttgtttagtctttgagatgctggaacaaaacttgtatgactttctgaaacaaaataaatttagtcccctgccactaaaagtgattcggcccattcttcaacaagtggccactgcact

SEQ ID NO: 177662 - DNA, 120 bp, Artificial Sequence
  ENSG00000110422_12 (sequence is synthesized)
gaaaaaattgaaaagtcttggtttaattcatgctgatctcaagccagagaatattatgttggtggatcctgttcggcagccttacagggttaaagtaatagactttgggtcggccagtca

SEQ ID NO: 177663 - DNA, 120 bp, Artificial Sequence
  ENSG00000110422_13 (sequence is synthesized)
tgtatcaaagactgtttgttcaacatatctacaatctcggtactacagagctccagagattatattggggttgccattttgtgaagccatagacatgtggtcattgggatgtgtgattgc

SEQ ID NO: 177664 - DNA, 120 bp, Artificial Sequence
  ENSG00000110422_14 (sequence is synthesized)
agaattatttcttggatggccgctctacccaggagccttggagtatgatcagattcgatacatttctcagactcaaggtttgccaggagaacagttgttaaatgtgggtactaaatccac

SEQ ID NO: 177665 - DNA, 120 bp, Artificial Sequence
  ENSG00000110422_15 (sequence is synthesized)
aagatttttttgcaaagaaacagatatgtctcattctggttggagattaaagacattggaagagcatgaggcagagacaggaatgaagtctaaagaagccagaaaatacattttcaacag

SEQ ID NO: 177666 - DNA, 120 bp, Artificial Sequence
  ENSG00000110422_16 (sequence is synthesized)
tctggatgatgtagcgcatgtgaacacagtgatggatttggaaggaagtgatcttttggctgagaaagctgatagaagagaatttgttagtctgttgaagaaaatgttgctgattgatgc

SEQ ID NO: 177667 - DNA, 120 bp, Artificial Sequence
  ENSG00000110422_17 (sequence is synthesized)
agatttaagaattactccagctgagaccctgaaccatccttttgttaatatgaaacatcttctagatttccctcatagcaaccatgtaaagtcctgttttcatattatggatatttgtaa

SEQ ID NO: 177668 - DNA, 120 bp, Artificial Sequence
  ENSG00000110422_18 (sequence is synthesized)
gtcccacctaaattcatgtgacacaaataatcacaacaaaacttcacttttaagaccagttgcttcaagcagtactgctacactgactgcaaattttactaaaatcggaacattaagaag

SEQ ID NO: 177669 - DNA, 120 bp, Artificial Sequence
  ENSG00000110422_19 (sequence is synthesized)
tcaggcattgaccacatctgctcattcagttgtgcaccatggaatacctctgcaggcaggaactgctcagtttggttgtggtgatgcttttcagcagacattgattatctgtcccccagc

SEQ ID NO: 177670 - DNA, 120 bp, Artificial Sequence
  ENSG00000110422_20 (sequence is synthesized)
tattcaaggtattcctgcaacacatggtaaacccaccagttattcaataagggtagataatacagttccacttgtaactcaggccccagctgtgcagccactacagatccgaccaggagt

SEQ ID NO: 177671 - DNA, 120 bp, Artificial Sequence
  ENSG00000110422_21 (sequence is synthesized)
tctttctcagacgtggtctggtagaacacagcagatgctggtgcctgcctggcaacaggtgacacccctggctcctgctactactacactaacttctgagagtgtggctggttcacacag

SEQ ID NO: 177672 - DNA, 120 bp, Artificial Sequence
  ENSG00000110422_22 (sequence is synthesized)
gcttggagactgggggaagatgatttcatgcagcaatcattataactcagtgatgccgcagcctcttctgaccaatcagataactttatctgcccctcagccagttagtgtggggattgc

SEQ ID NO: 177673 - DNA, 120 bp, Artificial Sequence
  ENSG00000110422_23 (sequence is synthesized)
acatgttgtctggcctcagcctgccactaccaagaaaaataaacagtgccagaacagaggtattttggtaaaactaatggaatgggagccaggaagagaggaaataaatgctttcagttg

SEQ ID NO: 177674 - DNA, 120 bp, Artificial Sequence
  ENSG00000110422_24 (sequence is synthesized)
gagtaattcattacagaataccaatatcccacattcagcatttatttctccaaagataattaatgggaaagatgtcgaggaagtaagttgtatagaaacacaggacaatcagaactcaga

SEQ ID NO: 177675 - DNA, 120 bp, Artificial Sequence
  ENSG00000110422_25 (sequence is synthesized)
aggagaggcaagaaattgctgtgaaacatctatcagacaggactctgattcatcagtttcagacaaacagcggcaaaccatcattattgccgactccccgagtcctgcagtgagtgtcat

SEQ ID NO: 177676 - DNA, 120 bp, Artificial Sequence
  ENSG00000110422_26 (sequence is synthesized)
cactatcagcagtgacactgatgaggaagagacttcccagagacattcactcagagaatgtaaaggtagtctagattgtgaagcttgccagagcactttgaatattgatcggatgtgttc

SEQ ID NO: 177677 - DNA, 120 bp, Artificial Sequence
  ENSG00000110422_27 (sequence is synthesized)
attaagtagtcctgatagtactctgagtaccagctcctcagggcagtccagcccatccccctgcaagagaccgaatagtatgtcagatgaagagcaagaaagtagttgtgatacggtgga

SEQ ID NO: 177678 - DNA, 120 bp, Artificial Sequence
  ENSG00000110422_28 (sequence is synthesized)
tggctctccgacatctgactcttccgggcatgacagtccatttgcagagagcacttttgtggaggacactcatgaaaacacagaattggtatcctctgctgacacagaaaccaagccagc

SEQ ID NO: 177679 - DNA, 120 bp, Artificial Sequence
  ENSG00000110422_29 (sequence is synthesized)
tgtctgttctgttgtggtgccaccagtggaactagaaaatggcttaaatgccgatgagcatatggcaaacacagattctatatgccagccattaataaaaggacgatctgcccctggaag

SEQ ID NO: 177680 - DNA, 120 bp, Artificial Sequence
  ENSG00000110422_30 (sequence is synthesized)
attaaaccagccttctgcagtgggtactcgtcagcaaaaattgacatcagcattccagcagcagcatttgaacttcagtcaggttcagcactttggatctgggcatcaagagtggaatgg

SEQ ID NO: 177681 - DNA, 120 bp, Artificial Sequence
  ENSG00000110422_31 (sequence is synthesized)
tccattcactctttctcatggaagtcccaatcacacagcagtgcatgcccacctggctggaaatacacacctcggaggacagcctactctacttccatacccatcatcagccaccctcag

SEQ ID NO: 177682 - DNA, 120 bp, Artificial Sequence
  ENSG00000110422_32 (sequence is synthesized)
tagtgctgcaccagtggcccacctgttagcctctccgtgtacctcaagacctatgttacagcatccaacttataatatctcccatcccagtggcatagttcaccaagtcccagtgggctt

SEQ ID NO: 177683 - DNA, 120 bp, Artificial Sequence
  ENSG00000110422_33 (sequence is synthesized)
aaatccccgtctgttaccatccccaaccattcatcagactcagtacaaaccaatcttcccaccacattcttacattgcagcatcacctgcatatactggatttccactgagtccaacaaa

SEQ ID NO: 177684 - DNA, 120 bp, Artificial Sequence
  ENSG00000110422_34 (sequence is synthesized)
actcagccagtatccatatatgtgaaaaacagtatattggggaagctcaatgatacaaacatttgattaaaaataaaaacatggtatttaatattagccatggcacaagaaaattatttt

SEQ ID NO: 177685 - DNA, 120 bp, Artificial Sequence
  ENSG00000110422_35 (sequence is synthesized)
tgaatcatgtagacttgggtgcaatttaaacaactttgagctttaaaaactcacttttgatgtgttttgcacatttggtataacttgtctttggtcatgttatcttcttatgtagtaact

SEQ ID NO: 177686 - DNA, 120 bp, Artificial Sequence
  ENSG00000110422_36 (sequence is synthesized)
ctagacaggtgacttatgggagcagaagtccagttttgctcctgctattttttataaattgccttctaactagtgcaagacacgtctacatttgggaagccattctgtgtacagacttag

SEQ ID NO: 177687 - DNA, 120 bp, Artificial Sequence
  ENSG00000110422_37 (sequence is synthesized)
agcaacagatgcacatatgtcagaattacagcatacaagtgaattgtattatccgtgtcttagtgtataaatgttgggtcacttacctaagaaattgagctattgttctttacatttgca

SEQ ID NO: 177688 - DNA, 120 bp, Artificial Sequence
  ENSG00000110422_38 (sequence is synthesized)
tgtgtcttttgcatgggcaaaatgttgcctagactttgctcttaaatgttgttctaataatctcagctgcattgtaaaccgttcctacacatagtgccttaaatatttgaggttgttaat

SEQ ID NO: 177689 - DNA, 120 bp, Artificial Sequence
  ENSG00000110422_39 (sequence is synthesized)
gttattacctatatataaatgttgaggactgcagcacttaaaattcagacctactatttagtttccttttgatagcgtaatgttcatttttgtttttgtgtggtatgatttcaggtagta

SEQ ID NO: 177690 - DNA, 120 bp, Artificial Sequence
  ENSG00000110422_40 (sequence is synthesized)
gctgtttttttccttattaagagggcagcatgtttgctatagctgaattctgctgtctgatttttcagaatgatctagcttcaagaaaagcaagcagttagtagtgcttaagaaaaattg

SEQ ID NO: 177691 - DNA, 120 bp, Artificial Sequence
  ENSG00000110422_41 (sequence is synthesized)
attcagtatctaatggatagttgataactgtcacagcacagcattttatatactgttaagtgaaactgcaatacaatctaagtttattttgagagtgtttgctgtataattggacttaat

SEQ ID NO: 177692 - DNA, 120 bp, Artificial Sequence
  ENSG00000110422_42 (sequence is synthesized)
aaaatgtttagaggtacagtaggcatgactttgggtagataataaaatgcaaaatgctcattgattcatgatgtggttttatcttagcttgggcaaaccatgcagtatttaataaatagt

SEQ ID NO: 177693 - DNA, 120 bp, Artificial Sequence
  ENSG00000110422_43 (sequence is synthesized)
agcagaacttttactattgaagcttgaaaagatgtgagttctttgtgtgcaatttttgatttatgcatgtgagagggttttttttttttttaagtatttttacattgcagtacttgtttt

SEQ ID NO: 177694 - DNA, 120 bp, Artificial Sequence
  ENSG00000110422_44 (sequence is synthesized)
gcttgttggtgatgtttgcttatttaatacattccgtcagggacagaaattacatgcttttttttctttctaggaagtgtgttgagttccccccttccccgacatttttttcttttttgg

SEQ ID NO: 177695 - DNA, 120 bp, Artificial Sequence
  ENSG00000110422_45 (sequence is synthesized)
gtggtggtgatggtagtggttatgtctgtttaaatgaagttgcttttacagcaccaaagacttaatcatccatttcctatataaaggtagctactttttgcatagacctcaagtatattg

SEQ ID NO: 177696 - DNA, 120 bp, Artificial Sequence
  ENSG00000110422_46 (sequence is synthesized)
tagtgtaaaggtggaatttaaggaaaggtattaaattgaggctgtgttttagcttacaggcaagtaataaattgtatcatttatcttgaatgtatcatagataagctgctatataacgat

SEQ ID NO: 177697 - DNA, 120 bp, Artificial Sequence
  ENSG00000110422_47 (sequence is synthesized)
tgccacttcagatagctgtgaaattaggtgattaactagttgttatttagccttctaatttctgtataagtctaattacatgaatagaaattggggttttgattttttactttgcttttc

SEQ ID NO: 177698 - DNA, 120 bp, Artificial Sequence
  ENSG00000110422_48 (sequence is synthesized)
tgtttggagtgtcattgtaactactgtattgtaaatggtggaaaataattgcatttgttactttggggtgtgttatttgcatcagtattttatctctattaatgtttgtgctcatcactg

SEQ ID NO: 177699 - DNA, 120 bp, Artificial Sequence
  ENSG00000110422_49 (sequence is synthesized)
catattaaaaaaacttggatgtatcagtgtaacttaattttttattttcatactggcattgtagacacttgagaaagctgtatcttgcaggcttgacttaacttttttccttaaaaatct

SEQ ID NO: 177700 - DNA, 120 bp, Artificial Sequence
  ENSG00000110422_50 (sequence is synthesized)
ggaatataatcttacagcatttactggaataaacagtacaaagcattggagtgtaaaactctagatgttttggatttacagcgtttctttgataaatgaattgtataccactagtacagc

SEQ ID NO: 177701 - DNA, 120 bp, Artificial Sequence
  ENSG00000110422_51 (sequence is synthesized)
tctagtacagcgttcacaataagctaataatggataagttttcttcactccattaacacaagcagtgttttatttaataatcatcaatgaaataaatgtgcctgaaattgattttaaaaa

SEQ ID NO: 177702 - DNA, 120 bp, Artificial Sequence
  ENSG00000110422_52 (sequence is synthesized)
ttacagtattagatcataaagtaaaaaccagcagtacatttttagtcacactgaaaatgaaggacttaattttccccacaagtttcagtgtttttagtaattaattctatgcattttata

SEQ ID NO: 177703 - DNA, 120 bp, Artificial Sequence
  ENSG00000110422_53 (sequence is synthesized)
tagaaatatatatatataaaaaattaaatgtttaaaaaggagtagcctaagattaatttaaaagattatttacagatgacacatttatggggtcactatttaagtaaatttgctgccctc

SEQ ID NO: 177704 - DNA, 120 bp, Artificial Sequence
  ENSG00000110422_54 (sequence is synthesized)
cctccacagccttctaattttatttatatgttccagcagattattaggatctgcttacttcttaggaaagaatcaatgctggcaacacattgtttcagaaacaccaagtgcaaaggattg

SEQ ID NO: 177705 - DNA, 120 bp, Artificial Sequence
  ENSG00000110422_55 (sequence is synthesized)
attgtatcacaacaggtacaaaactgacagagttttctttttgtttagggccatgtttactaccctgaaatgttgtattttttgtctttaatttccaagacttaaagcagtcttgttaaa

SEQ ID NO: 177706 - DNA, 120 bp, Artificial Sequence
  ENSG00000110422_56 (sequence is synthesized)
ttgacataaatggtaaacttcaacattttcataatacagtattaatgtttgataaaggtatatcccagttaactacactgctctttaattgcaatcatgggcattttaatgtattttaaa

SEQ ID NO: 177707 - DNA, 120 bp, Artificial Sequence
  ENSG00000110422_57 (sequence is synthesized)
ataaatttcaaaattctgctaaattcttaatttagcatattgacaaagtaatctggatttataccttttaaaaaccattttgaccagttttcttcggttttaatgctttcttaaataaaa

SEQ ID NO: 177708 - DNA, 120 bp, Artificial Sequence
  ENSG00000110422_58 (sequence is synthesized)
cactgcatgatttccaagttgcatatttgcatactattttaatttgcaaaatgttttttaaatcaaatatcctgatatttagttgttttttttttcctccagcgtgtttaattaaatatg

SEQ ID NO: 177709 - DNA, 120 bp, Artificial Sequence
  ENSG00000110422_59 (sequence is synthesized)
ttactgtattagcaaaacattttcatttttaaaatctgctaattttaaacttggactgtgttaagtaaaagttaaatcatacactgcaaggtgtaggaagatttgttttaatgaatccaa

SEQ ID NO: 177710 - DNA, 120 bp, Artificial Sequence
  ENSG00000110422_60 (sequence is synthesized)
tgatacagatttgattactaagtttgaactgttaattgtttaacaattttagacttgtggctttctttctttggtttatttgtttttgcttttactcctatgctacactagtttgccatg

SEQ ID NO: 177711 - DNA, 120 bp, Artificial Sequence
  ENSG00000110422_61 (sequence is synthesized)
tagcaattgcactgtgcaatattacaataaggactgggaaaattttatggatgtaatgtctattacggtttgcgatagtatttctctctagttctcagtgatttaaatgtgaccaagcct

SEQ ID NO: 177712 - DNA, 120 bp, Artificial Sequence
  ENSG00000110422_62 (sequence is synthesized)
tctgtactttgtcacaaaaagcgggttttccaggtgactattttggtgagtgtcaaaataagaatttatggtgtattactgtcgattcactttgaattaaaatatatatattgcagcaaa

SEQ ID NO: 177713 - DNA, 120 bp, Artificial Sequence
  ENSG00000110422_63 (sequence is synthesized)
ttcattaaggggaacaaacaaacgcgcaggcacgcagcttgagcaccccagccgatggccgcgtcccgggctttgtggccccgtccccagcgtcgcggagcagcgggtttgcagggtgtc

SEQ ID NO: 177714 - DNA, 120 bp, Artificial Sequence
  ENSG00000110422_64 (sequence is synthesized)
aactctggggacgtgcgtgcgtgtgtgtgattgttggggaggagaaatgtgatccgcggctccgcgtccccagcggcggcgggaggaaggcgtggcggccgcgcggcggggctgttgccg

SEQ ID NO: 177715 - DNA, 120 bp, Artificial Sequence
  ENSG00000110422_65 (sequence is synthesized)
gcttctctcgttacggtggctgccgcccgcttcccttcgccgcactgggagaactggcggaaagactttggatgaaaatgtctgtttctctgtcgggagggagacggctgttgtaaaatg

SEQ ID NO: 177716 - DNA, 120 bp, Artificial Sequence
  ENSG00000110422_66 (sequence is synthesized)
gccgctctacccaggagccttggagtatgatcaggatagaagatattgaacatttttgtatttggtggggagagagctcagagggaggaagaaatagaagatgcagaagaggatggacta

SEQ ID NO: 177717 - DNA, 120 bp, Artificial Sequence
  ENSG00000110427_0 (sequence is synthesized)
tcattccatcatctctgagccagcagagcaatcccccaaagtgctgttagttccccaaacagctccagccgacccctctttaggtcagaacatagctaatcccttaatcccattttctga

SEQ ID NO: 177718 - DNA, 120 bp, Artificial Sequence
  ENSG00000110427_1 (sequence is synthesized)
tgaaatggaccacactgcatcccaaaatgcccaggatctcataggcatccctcatctaggtgtttctggatcctcaacaaaatggcattccgagctgtccccaacagagggtccccattc

SEQ ID NO: 177719 - DNA, 120 bp, Artificial Sequence
  ENSG00000110427_2 (sequence is synthesized)
agcaggttcatccacacctgggtttttgagccccatggcagaactgtcccatccgtctccccctcccccagcacttggaagtcttcttcagcttccagatggaagcccctcatggtcaat

SEQ ID NO: 177720 - DNA, 120 bp, Artificial Sequence
  ENSG00000110427_3 (sequence is synthesized)
gttggaagtggcttcaggtcctgcatccacccagcagatcaaagctggggtgcctggaagagtgcacaatggggtgtctttgccaacttttaagaatacagaaacagcgacccatgaggc

SEQ ID NO: 177721 - DNA, 120 bp, Artificial Sequence
  ENSG00000110427_4 (sequence is synthesized)
tgagcctccacttttccagactgcagaatcaggggccatagaaatgaccagcagaaagctagcctctgccactgcaaatgactctgctaacccgctgcatttgtcagcagctccagagaa

SEQ ID NO: 177722 - DNA, 120 bp, Artificial Sequence
  ENSG00000110427_5 (sequence is synthesized)
ttccagagggcccgccctttcggcagaacacacctcttctttggtgccttctctgcatatcaccacactgggtcaagagcaagccatcctttctggggcggttcccgcatcaccatcaac

SEQ ID NO: 177723 - DNA, 120 bp, Artificial Sequence
  ENSG00000110427_6 (sequence is synthesized)
tgggacagccgactttccctccatacttactttcctccagcccacagagaatcatgcctccccatctcctgtgccagaaatgcccactcttccagcagagggcagtgatgggtcccctcc

SEQ ID NO: 177724 - DNA, 120 bp, Artificial Sequence
  ENSG00000110427_7 (sequence is synthesized)
tgcaactagagacttgctcctctcaagcaaagttcctaatcttctttccacatcttggacatttccccggtggaaaaaggacagtgtgacagccattttagggaagaatgaagaggcaaa

SEQ ID NO: 177725 - DNA, 120 bp, Artificial Sequence
  ENSG00000110427_8 (sequence is synthesized)
tgtgacgattcctctccaggcctttccaaggaaagaggttttgagtcttcacactgtaaatggatttgtctctgatttcagcaccggtagtgtctcatctcccatcattacagcaccaag

SEQ ID NO: 177726 - DNA, 120 bp, Artificial Sequence
  ENSG00000110427_9 (sequence is synthesized)
gacgaatccccttccttcaggaccacctctaccttccatactctccatacaagccacccagactgttttcccatctcttggcttttccagcaccaagccagaggcttatgcagctgctgt

SEQ ID NO: 177727 - DNA, 120 bp, Artificial Sequence
  ENSG00000110427_10 (sequence is synthesized)
ggaccattctgggttgccagcttcagcttccaaacaggtgagagcatcgccctcctccatggatgtatatgattccttaacaataggagacatgaaaaagccagcaaccacagatgtttt

SEQ ID NO: 177728 - DNA, 120 bp, Artificial Sequence
  ENSG00000110427_11 (sequence is synthesized)
ctggagttctctttcagcagaaactggatctctttccacagaatcaataatatctggcttgcagcagcaaacaaattatgatttaaatggacacacaattagcaccacaagttgggaaac

SEQ ID NO: 177729 - DNA, 120 bp, Artificial Sequence
  ENSG00000110427_12 (sequence is synthesized)
tcatttagctccaacagctcctcccaatggtttaacttcagctgccgatgccataaaatctcaggatttcaaagatactgctgggcattcagtgactgcagaagggtttagtattcagga

SEQ ID NO: 177730 - DNA, 120 bp, Artificial Sequence
  ENSG00000110427_13 (sequence is synthesized)
tctagtcctcggtacaagcattgagcagcctgtgcaacagtcagacatgaccatggttggaagccatatagacctctggcccacaagcaataacaaccattccagagacttccaaacagc

SEQ ID NO: 177731 - DNA, 120 bp, Artificial Sequence
  ENSG00000110427_14 (sequence is synthesized)
tgaagttgcatattactcacccacaactcgacattccgtgtctcatcctcagctacagttgcccaaccagccagcacatcctcttttgctaacctcaccaggaccaacttctacaggtag

SEQ ID NO: 177732 - DNA, 120 bp, Artificial Sequence
  ENSG00000110427_15 (sequence is synthesized)
cttgcaggaaatgctttcagatggaacagatacaggttctgaaatttccagtgacatcaattcatcacctgagagaaatgcttccacaccattccagaacatcttgggatatcactctgc

SEQ ID NO: 177733 - DNA, 120 bp, Artificial Sequence
  ENSG00000110427_16 (sequence is synthesized)
tgctgaatcttctatatcgaccagtgtctttcccaggacctcctccagagtgctgcgggcttctcagcaccccaagaaatggacagcggacacagtatcatctaaggtacagccaacagc

SEQ ID NO: 177734 - DNA, 120 bp, Artificial Sequence
  ENSG00000110427_17 (sequence is synthesized)
agcagctgccgtcacattgtttctgaggaaatcaagtccacctgcactgtctgcagccctggttgctaagggcaccagcagcagccctttggccgtggcctcaggaccagctaagagcag

SEQ ID NO: 177735 - DNA, 120 bp, Artificial Sequence
  ENSG00000110427_18 (sequence is synthesized)
ttcgatgactactcttgctaaaaatgtcacaaacaaggccgcatctggcccaaagaggacaccaggggcagtccatacagccttcccattcacaccaacctacatgtatgcaagaacagg

SEQ ID NO: 177736 - DNA, 120 bp, Artificial Sequence
  ENSG00000110427_19 (sequence is synthesized)
acataccacgagcacacatacagccatgcaaggaaacatggacactgcctctggcctgttgtctacaacttacctccccaggaaaccacaagccatgcacaccggcctcccaaaccccac

SEQ ID NO: 177737 - DNA, 120 bp, Artificial Sequence
  ENSG00000110427_20 (sequence is synthesized)
caacctggagatgcccagagcatccacgccacgcccactgacagtcacggccgcgctgacatccattacagcctcagtgaaggccacccggttgccaccattgcgagcagaaaacacaga

SEQ ID NO: 177738 - DNA, 120 bp, Artificial Sequence
  ENSG00000110427_21 (sequence is synthesized)
tgctgtccttcctgctgcatcggctgcagtggtcacgactggcaaaatggcatccaacctggagtgtcagatgtccagtaagctcctggtgaagacagttctctttctcacccaaaggag

SEQ ID NO: 177739 - DNA, 120 bp, Artificial Sequence
  ENSG00000110427_22 (sequence is synthesized)
agtgcagatcagtgaatccttgaagttcagtatcgccaaagggctcacacaggcattgcggaaggctttccaccagaacgatgtctcagctcacgtggacattctggaatattctcataa

SEQ ID NO: 177740 - DNA, 120 bp, Artificial Sequence
  ENSG00000110427_23 (sequence is synthesized)
tgtcacagttggttattatgctaccaaagggaagttggtgtatttgcctgctgtggtgatcgaaatgctgggtgtgtatggagtcagcaacgtcactgcagacctgaagcaacacacccc

SEQ ID NO: 177741 - DNA, 120 bp, Artificial Sequence
  ENSG00000110427_24 (sequence is synthesized)
acacttacagtctgtggcagtacttgcctccccatggaatccccagcctgcaggctacttccagctaaaaacagtgctgcagtttgtgagccaagcggacaacatacagtcctgcaagtt

SEQ ID NO: 177742 - DNA, 120 bp, Artificial Sequence
  ENSG00000110427_25 (sequence is synthesized)
tgctcagacaatggaacagaggctgcagaaggcattccaggatgccgagaggaaagtcctgaataccaaaagcaacttgacaattcagattgtgagcacgtccaatgcctcccaggcagt

SEQ ID NO: 177743 - DNA, 120 bp, Artificial Sequence
  ENSG00000110427_26 (sequence is synthesized)
caccttggtgtacgtcgtgggcaatcagagcacattcctcaacggcaccgtcgccagcagcctcctcagccagctctcggctgagctggtgggattctacctcacctatccgccgctaac

SEQ ID NO: 177744 - DNA, 120 bp, Artificial Sequence
  ENSG00000110427_27 (sequence is synthesized)
cattgctgaaccactggaatatcccaaccttgacatatcagaaacaaccagagactattgggtaattacagtgctgcagggtgtggacaattcgctggtgggcctgcacaaccagagctt

SEQ ID NO: 177745 - DNA, 120 bp, Artificial Sequence
  ENSG00000110427_28 (sequence is synthesized)
tgcccgggtcatggagcagcgcctggcccagctattcatgatgtcccagcaacaaggccggcggtttaaacgggccaccaccctgggaagctacactgtgcagatggtgaagatgcagcg

SEQ ID NO: 177746 - DNA, 120 bp, Artificial Sequence
  ENSG00000110427_29 (sequence is synthesized)
tgtcccaggcccgaaggacccagcggagctgacttactataccctgtacaacgggaagcctttgttggggaccgcagctgccaagatcctgagcaccattgattcccaaaggatggcctt

SEQ ID NO: 177747 - DNA, 120 bp, Artificial Sequence
  ENSG00000110427_30 (sequence is synthesized)
gacccttcatcacgttgtccttctgcaagctgaccccgtggtgaagaacccgcccaataacctgtggatcatcgctgcagtgctggcgcccattgccgtggtcacggtcatcatcatcat

SEQ ID NO: 177748 - DNA, 120 bp, Artificial Sequence
  ENSG00000110427_31 (sequence is synthesized)
catcactgccgtgctctgcaggaagaacaagaacgacttcaagcctgacaccatgataaacctgccgcagagagcaaagcctgtgcaaggctttgattatgccaagcaacacctgggcca

SEQ ID NO: 177749 - DNA, 120 bp, Artificial Sequence
  ENSG00000110427_32 (sequence is synthesized)
gcaaggggcagatgaggaggtcatccctgtgactcaggagacagtggttctcccactgcccattagagatgctcctcaggaaagagacgtcgctcaggatggaagcaccatcaagaccgc

SEQ ID NO: 177750 - DNA, 120 bp, Artificial Sequence
  ENSG00000110427_33 (sequence is synthesized)
caaatccactgaaaccaggaagagcaggtcgcccagtgagaatggctctgtcatcagcaacgaatcagggaagcccagctcagggagacgctcaccccagaatgtaatggcacagcagaa

SEQ ID NO: 177751 - DNA, 120 bp, Artificial Sequence
  ENSG00000110427_34 (sequence is synthesized)
agtgacaaaggaggaggcaaggaagagaaatgtgccagcgagtgacgaagaggagggagcggttctatttgacaactccagcaaggtggccgctgaaccctttgacacatcttctgggtc

SEQ ID NO: 177752 - DNA, 120 bp, Artificial Sequence
  ENSG00000110427_35 (sequence is synthesized)
tgtgcagctcattgccataaaacccacagccctccccatggtgccccccacctcggacaggagccaggagtcatcggcagtcctcaacggcgaggtgaacaaagccctgaagcagaagtc

SEQ ID NO: 177753 - DNA, 120 bp, Artificial Sequence
  ENSG00000110427_36 (sequence is synthesized)
agacatcgagcactatcggaacaagctgcgcctcaaagccaagaggaagggatattacgacttccctgcagtggagacgagcaagggtctgaccgaaagaaagaagatgtatgaaaaagc

SEQ ID NO: 177754 - DNA, 120 bp, Artificial Sequence
  ENSG00000110427_37 (sequence is synthesized)
cccgaaggaaatggagcatgttttggatccagattcagaactctgtgctccattcaccgagtctaaaaacaggcaacagatgaagaactctgtctacagaagccggcagtctctgaacag

SEQ ID NO: 177755 - DNA, 120 bp, Artificial Sequence
  ENSG00000110427_38 (sequence is synthesized)
cccgagtccaggggaaaccgagatggaccttctggtgactcgggagcgaccccggcgtggaatccgcaacagcggatacgatactgagcctgaaatcatagaggaaaccaacattgacag

SEQ ID NO: 177756 - DNA, 120 bp, Artificial Sequence
  ENSG00000110427_39 (sequence is synthesized)
agttcctgagccccggggctattccaggtctcgacaggtgaaaggccactcggagacctccacactgagctcccagccatccatcgacgaggtcaggcagcagatgcacatgctgctgga

SEQ ID NO: 177757 - DNA, 120 bp, Artificial Sequence
  ENSG00000110427_40 (sequence is synthesized)
ggaggccttcagcctggcatccgcgggccacgcaggccagagccggcaccaagaggcctacggctcagcccagcacctgccctattcggaggtggtgaccagcgctccggggaccatgac

SEQ ID NO: 177758 - DNA, 120 bp, Artificial Sequence
  ENSG00000110427_41 (sequence is synthesized)
gcggcccagggccggggtgcagtgggtgccgacctaccgcccagaaatgtatcagtacagtctgccccggccggcttacaggttttcccagcttcctgagatggtcatgggctcaccgcc

SEQ ID NO: 177759 - DNA, 120 bp, Artificial Sequence
  ENSG00000110427_42 (sequence is synthesized)
tccacccgtacctccccggactggtcctgtggctgtcgcttctctcaggcgatccacctcagacatcggcagcaagaccagaatggccgagtctacagggcccgagccggcccagctgca

SEQ ID NO: 177760 - DNA, 120 bp, Artificial Sequence
  ENSG00000110427_43 (sequence is synthesized)
cgacagcgcctccttcacgcagatgtccagaggccctgtgtccgtgacgcagttggatcagtcggctttaaattactcaggtaatacggtgccagcagtgttcgccatcccagctgccaa

SEQ ID NO: 177761 - DNA, 120 bp, Artificial Sequence
  ENSG00000110427_44 (sequence is synthesized)
cagacctggcttcaccggctacttcatcccaacgcctccctcatcctataggaaccaggcctggatgtcctatgcaggagagaatgagctcccgagccagtgggcagattcggtgcccct

SEQ ID NO: 177762 - DNA, 120 bp, Artificial Sequence
  ENSG00000110427_45 (sequence is synthesized)
cccagggtacatcgaggcctacccccgatcacggtacccccagagctctccctccaggcttcctcgtcagtacagccagccagccaacctgcaccccagcctggagcaggccccggcgcc

SEQ ID NO: 177763 - DNA, 120 bp, Artificial Sequence
  ENSG00000110427_46 (sequence is synthesized)
ctccacagcggcctcgcagcagagcctggcagaaaacgacccgtctgacgctcccctgaccaacatctccactgcggcccttgtgaaggccatccgggaggaggtggccaagctggccaa

SEQ ID NO: 177764 - DNA, 120 bp, Artificial Sequence
  ENSG00000110427_47 (sequence is synthesized)
aaaacagacagacatgtttgagttccaggtctaacgccttagccccgtgggactctggacttccaaactctgaggactcagcctttgggtttcccatgcctacgtgttaggacttgagac

SEQ ID NO: 177765 - DNA, 120 bp, Artificial Sequence
  ENSG00000110427_48 (sequence is synthesized)
atccaactgattgtgggtcaagtccctggcttggggccttatgtttgatactctctcatgtcaaatgtttgaactttgggcatgtgccctatggaagcttagtcacaagaggcactagct

SEQ ID NO: 177766 - DNA, 120 bp, Artificial Sequence
  ENSG00000110427_49 (sequence is synthesized)
aatctacagattcctatccaatgccacattttaataaatcaccggaagcgggagaatgtagctcttatcttcggtgacctctgcatgttaactctgtttctgtgttaaaggcaatgcagg

SEQ ID NO: 177767 - DNA, 120 bp, Artificial Sequence
  ENSG00000110427_50 (sequence is synthesized)
agtgtggattaagcaccagactgtattctcattcaaccatgaccgtgcgcattaaaatcagtttgtaagggagacactgactccagccaagaaacctgagccccttttttttaggttcat

SEQ ID NO: 177768 - DNA, 120 bp, Artificial Sequence
  ENSG00000110427_51 (sequence is synthesized)
attcaaagtcaaatgaactggatgaaagtcagtaccaatggctgtgcctataaatagacctgattctttgtttccctcgtcaattaaacaaaggccaagaaagagagaagatgagaggga

SEQ ID NO: 177769 - DNA, 120 bp, Artificial Sequence
  ENSG00000110427_52 (sequence is synthesized)
atggtggatttgcgttgacagattttttaaaaggtgttgccattttggaaataaaagtcccctacaagttaggatctaactgaaagagaatcggtgctaagagcttttaggatcctacaa

SEQ ID NO: 177770 - DNA, 120 bp, Artificial Sequence
  ENSG00000110427_53 (sequence is synthesized)
aagaaacacagttatttgtgaaggtttttctttgccttgttttgaaggtggcctgagaatggagcttctctttttcttgggataatagatacatcaacttttacaagaaaatctctgtct

SEQ ID NO: 177771 - DNA, 120 bp, Artificial Sequence
  ENSG00000110427_54 (sequence is synthesized)
cttcaacaatgatgtccagtgtgtgctgctgagtggtacaaaaggaaatagtacttgattcctgttagaaacaggagtggtagaaccacagtcttcccaggccgcagcctctgtttatag

SEQ ID NO: 177772 - DNA, 120 bp, Artificial Sequence
  ENSG00000110427_55 (sequence is synthesized)
aagcttctgaatgtagaaaagctgttgaatttcatttaaatgtaaataaccttttaaaaagcgtatggagttagccagttccccctagttaatggacataggaagacatttgctgaaatg

SEQ ID NO: 177773 - DNA, 120 bp, Artificial Sequence
  ENSG00000110427_56 (sequence is synthesized)
gtagggtggccactttgtgaccatgatgttgcaagttgccctccctggcatggtgagttggcttccagagctgtgggtagaggacatcgcctcacggcactgaggcaccagccgctgcct

SEQ ID NO: 177774 - DNA, 120 bp, Artificial Sequence
  ENSG00000110427_57 (sequence is synthesized)
acccatcaatgcaagcaaaacagctactgactttgtgtagcagggagattggggactctggttccctcgccaagtgtggcagcctgtgcagtgttgggggcttacttggtatctgttgga

SEQ ID NO: 177775 - DNA, 120 bp, Artificial Sequence
  ENSG00000110427_58 (sequence is synthesized)
gaatgaggtcctgtcctgctttcacccatgacccatctagcttcagctgtatccattttcttctgagcccatcttccattgtcctcaacgagtttctttggtctttactgaaagaagata

SEQ ID NO: 177776 - DNA, 120 bp, Artificial Sequence
  ENSG00000110427_59 (sequence is synthesized)
gtagaaatttaaaagttgagagaagactagaaatggaactgattagaaggggaggttcaaactgtcaatgcacagacttttcaaagaagttgtttatattttccaatggcaaactgccct

SEQ ID NO: 177777 - DNA, 120 bp, Artificial Sequence
  ENSG00000110427_60 (sequence is synthesized)
ttctggaatgttcagagatgatgtgtcatggaaccttcaaacaagtctcttgttcggatgataataggtagtgtccttttagtatgctggttgatctttcatagtgttagtgttttgtta

SEQ ID NO: 177778 - DNA, 120 bp, Artificial Sequence
  ENSG00000110427_61 (sequence is synthesized)
cttaaaaaggaaatcagctataaataaaatgtatttttgtaattcccgtgtgtatatatggtatatttctatcaatggccagttgttgtagtccaaaacctaaatcagtttgcaaaacac

SEQ ID NO: 177779 - DNA, 120 bp, Artificial Sequence
  ENSG00000110427_62 (sequence is synthesized)
tgtggacagtgcgagattttattgacaggttaacacaatgcctacgtctatccacataggcattcaatgcacttgaatgaacaaagagccaaagaaactcagcctgttcatgcaaatggt

SEQ ID NO: 177780 - DNA, 120 bp, Artificial Sequence
  ENSG00000110427_63 (sequence is synthesized)
atgagtctgataaaatcagctacattgtcctgctttatcaataataatatttcattagtgcaatgatatcaaccagtactttgtctacttggtaaatgcctggaaatactgtatgtgaaa

SEQ ID NO: 177781 - DNA, 120 bp, Artificial Sequence
  ENSG00000110427_64 (sequence is synthesized)
atgatgtttcaagatcttactgtaattgaagtatacgtaaatgtttcagaagacagtgtctgaaatttggctgtttcaatgacttacagagactgagtctacagtttgcagagctatggc

SEQ ID NO: 177782 - DNA, 120 bp, Artificial Sequence
  ENSG00000110427_65 (sequence is synthesized)
tccagagtgctaagagggtggagtcacaaatcactgtggtctttacagagccccaggaaatactgagtgagtcaactgagacgactaaaaagatagcatgctaaatcagatactgtctta

SEQ ID NO: 177783 - DNA, 120 bp, Artificial Sequence
  ENSG00000110427_66 (sequence is synthesized)
aactagacaccatgggttcaagaatagtattaatagatgagaggaaaaccttaagttggaaagaaatcagtctgttcatgttatcccactcatggggagacagagccactctggtcagat

SEQ ID NO: 177784 - DNA, 120 bp, Artificial Sequence
  ENSG00000110427_67 (sequence is synthesized)
tttctgtgagtgagatgtggtcccttccctgaagaatctcctaacctcatagaggtgagagagatgactggacagctgactctaagagatggtcaaaagtgcctcaaggaattgaaataa

SEQ ID NO: 177785 - DNA, 120 bp, Artificial Sequence
  ENSG00000110427_68 (sequence is synthesized)
ggttcccagagagccctgaggaggcagcaatgaacaaacaccctgttcatcagaaccctctagatagtcacagaagccacaaaaggaccttggttgaccttggaggaggaagcagaagta

SEQ ID NO: 177786 - DNA, 120 bp, Artificial Sequence
  ENSG00000110427_69 (sequence is synthesized)
ccacgaagtggagtgactggcccagtgattcagtcccaacctcctggttcacgaacctgcttgctttccatctcgccatgtggcctgcaggcttgtcagtaacacatttctttagctgtg

SEQ ID NO: 177787 - DNA, 120 bp, Artificial Sequence
  ENSG00000110427_70 (sequence is synthesized)
cctagaggtttaaaaaaaagataagggtcatatgaagaactccataatgttcttgccaagaaaaaagatgattgagtatataacgaacttcagatacagtgtatagaggatgatgcattt

SEQ ID NO: 177788 - DNA, 120 bp, Artificial Sequence
  ENSG00000110427_71 (sequence is synthesized)
gtggcataataaatagttttcagtgctggttttgatatgagttttctgcattcatgaaaaagaaatgcattttggctttttccagaaagagtaccatcaaggaaacggagacctcaactg

SEQ ID NO: 177789 - DNA, 120 bp, Artificial Sequence
  ENSG00000110427_72 (sequence is synthesized)
ctgttctagactgtgggggtgcattcctgtctcagcaccaaggatcccaacaggcaggcagggaggcccttgactttgtgtcactgtgaggcagcagagtccatgctctgcatcagggga

SEQ ID NO: 177790 - DNA, 120 bp, Artificial Sequence
  ENSG00000110427_73 (sequence is synthesized)
ggtgcagtaaaggtccattgtgtggcttgagacctatgatctgaggcttgtgcataataagatggcagctgttacctacagagcaaggagtttcctctttcagggtagattatgtaagaa

SEQ ID NO: 177791 - DNA, 120 bp, Artificial Sequence
  ENSG00000110427_74 (sequence is synthesized)
tcaattccctggtcccaggagaagttttattgtgagtttgttaatttaagaactcactcagcagaaggacatgtaatgtctgagtaatcttgatggaagaaaggaaatagatctgtgatt

SEQ ID NO: 177792 - DNA, 120 bp, Artificial Sequence
  ENSG00000110427_75 (sequence is synthesized)
cacacacacacacacacacacaccctacttcggagagagaatgtagaatggaggaggtgaggaatttaactaatagagatgctttttctaacaggcagaaattagagaaatggatcaaaa

SEQ ID NO: 177793 - DNA, 120 bp, Artificial Sequence
  ENSG00000110427_76 (sequence is synthesized)
gagaaatggatcaaaagatttaaacattgattacatataaacgagtttcctttttttctacatagcacacaggtgctcaacatttaatgaataatataacagatactgtcttaaaagttt

SEQ ID NO: 177794 - DNA, 120 bp, Artificial Sequence
  ENSG00000110427_77 (sequence is synthesized)
aaaaacaggatttgtacttaatcctaaattcctcttatcacacaccagaaaataatttggattttatttacaaactacatccaaatactcttaaggaaagagtgtcatttagcttggagt

SEQ ID NO: 177795 - DNA, 120 bp, Artificial Sequence
  ENSG00000110427_78 (sequence is synthesized)
agggactgactggggtctaagtgttggaaattaaattctgccattcagtccaacctcaaaggtgttccaggcaaggagttttgcaaggactagaaaccctttcacacttgaagtgcaggt

SEQ ID NO: 177796 - DNA, 120 bp, Artificial Sequence
  ENSG00000110427_79 (sequence is synthesized)
gttggctgaaagaatagagggacatttcacaaacacagaacacggctcccctacaggaaagggatggagacagctacctttgctcttgctctcacattctctgtcctcatggactttctt

SEQ ID NO: 177797 - DNA, 120 bp, Artificial Sequence
  ENSG00000110427_80 (sequence is synthesized)
ctctgtttccctctgcctatctatctgcctggttctcttgcttctcctggccaaccagctttctcattagtgcatatgtagctgaaaaatccacccctcaagaacccactccacacaacc

SEQ ID NO: 177798 - DNA, 120 bp, Artificial Sequence
  ENSG00000110427_81 (sequence is synthesized)
tttccttttcagtacccaccacgctctgactagcatctctgtgatgcctaaggcaaatttttgaggatctgattggtttagttcatctgcctatgggtgagccaccctggggtcaggtgc

SEQ ID NO: 177799 - DNA, 120 bp, Artificial Sequence
  ENSG00000110427_82 (sequence is synthesized)
ctgtccaatcacctgttaccaaggaggcagggccgtgtcatttaagcatggccccatggactgaccctttcagcagggacttttattgggggctggtacccagaagaaggagcatgagtg

SEQ ID NO: 177800 - DNA, 120 bp, Artificial Sequence
  ENSG00000110427_83 (sequence is synthesized)
ggcaagaccttcaaaaagaacctactacacactggaactgactagtactcctgggatgccatgccacgcagcagccagcactcggagagcagtcccctggatactaccacacagagaaaa

SEQ ID NO: 177801 - DNA, 120 bp, Artificial Sequence
  ENSG00000110427_84 (sequence is synthesized)
ggggcatcttcacttgcacatcaggtgagggtgcacacacttgaaactctgctagactggccagagctgccccagccacttctcaccccaccaccagttattgatacagccgctgggtct

SEQ ID NO: 177802 - DNA, 120 bp, Artificial Sequence
  ENSG00000110427_85 (sequence is synthesized)
aggaagcgatttctgaacaaggcccagttagcacaatgtcttgctcagcagacaataaatacttgtaaattgaattgcatgatcttagctcaggtgctactaatgtggctcacggccaca

SEQ ID NO: 177803 - DNA, 120 bp, Artificial Sequence
  ENSG00000110427_86 (sequence is synthesized)
cacttgcatggataagaaaaccaatgagcccctcaacagagtcttttgaaacaaaattggtttcaagtgaaacttacattattttttggctgtgaccttctgaatataataacttagtgt

SEQ ID NO: 177804 - DNA, 120 bp, Artificial Sequence
  ENSG00000110427_87 (sequence is synthesized)
cctgagaattgaaaggcctcttgatttcttaggtgaactgttacagaatcctagcctgtggtaaatgctaaaatgtaaggtgtttctgagaaggaatatttaggaaatataattgtgcca

SEQ ID NO: 177805 - DNA, 120 bp, Artificial Sequence
  ENSG00000110427_88 (sequence is synthesized)
cacacacattactttagaagatatgcagttgctctgattctgcaggtttaaaaaaaatgggaagtttgtgatatggcagaatctgtctccattggtcaaaccatacttcagtgagagcca

SEQ ID NO: 177806 - DNA, 120 bp, Artificial Sequence
  ENSG00000110427_89 (sequence is synthesized)
ttataagtgaaatctaaaaattgatcgttttcattctctgactttggtcagacttttgcaaattatggagagaggccatcaacatattttacataaattactgtggccccatcttatttc

SEQ ID NO: 177807 - DNA, 120 bp, Artificial Sequence
  ENSG00000110427_90 (sequence is synthesized)
tcctcatttcttccttatgtttaaacacgcccccatctcacacacaaactgagaaaagatttgtatcaaacagaatcagaggcatatgaatggactggaaattgtgaaaaaggtataaat

SEQ ID NO: 177808 - DNA, 120 bp, Artificial Sequence
  ENSG00000110427_91 (sequence is synthesized)
atcctagaccttgatcaactcactttaaactggtctctgattcctcatctgtcaaatgagtataagaccctctgtacttcccatggtgattttgaggagcacatgcataatgtatctgaa

SEQ ID NO: 177809 - DNA, 120 bp, Artificial Sequence
  ENSG00000110427_92 (sequence is synthesized)
aatggcttgacaagcacttgaagccattcttactaaattattagttttgtaattcggttttatccaggaaaatattttagctcctcctatctgctgaattaatttatacagtcacatgtt

SEQ ID NO: 177810 - DNA, 120 bp, Artificial Sequence
  ENSG00000110427_93 (sequence is synthesized)
ccatgacaccatgttttgccaaggaaaaataaagaaattcctaaatttgaaattgcccacaagatctagcctcatctggagttgctgttattgtccttgttgtctatgatttggaggata

SEQ ID NO: 177811 - DNA, 120 bp, Artificial Sequence
  ENSG00000110427_94 (sequence is synthesized)
tgtaagtacttgtacatgtgctttaactctgggtgaaaaaccccaaccggtgagtctttaaaaccatattagacacattgggcaaagtactgagcagaagctttgaatgtagctgttgtt

SEQ ID NO: 177812 - DNA, 120 bp, Artificial Sequence
  ENSG00000110427_95 (sequence is synthesized)
attttaatgcttcgctttctaatgaactttgtacgtccttagcctctgccgggaacagagtgttcatatgctgttagaattttttattgtaaaataaaatgacaaaggctttcatacccc

SEQ ID NO: 177813 - DNA, 120 bp, Artificial Sequence
  ENSG00000110427_96 (sequence is synthesized)
gttccggaggctacgtgctttctttgtcaatgaggcgccgctctgagctgcggtagcactcgcggcccgggaacccgagccggagccggggctggaacccgaagcccagcgaggagcgag

SEQ ID NO: 177814 - DNA, 80 bp, Artificial Sequence
  ENSG00000110427_97 (sequence is synthesized)
gcggcgggagggagggacccgagcgcgccccgcggccgccacccccgttcccggcagcctcgccccctagttctgcagga

SEQ ID NO: 177815 - DNA, 80 bp, Artificial Sequence
  ENSG00000110427_98 (sequence is synthesized)
ccctgcgcgggtgaagccgcggctccctggagcccgccccgggcgcggcaggacgagcgagccagtcgcgccgctcggcg

SEQ ID NO: 177816 - DNA, 120 bp, Artificial Sequence
  ENSG00000110427_99 (sequence is synthesized)
cgatgcccggtgaggaccggggcgccgagggctgggctccccggcgcggtgcagagcgaggcagcggcctggatgtgtgaagcgtccccatggctccgcaggaggccaagcctcagggct

SEQ ID NO: 177817 - DNA, 80 bp, Artificial Sequence
  ENSG00000110427_100 (sequence is synthesized)
cgcgtgggcttggtcgggctgcctggggagccgcgcgctgcacgggtgtgaggggccccggggccggcgcgtcccacgat

SEQ ID NO: 177818 - DNA, 120 bp, Artificial Sequence
  ENSG00000110427_101 (sequence is synthesized)
cccacgatgcgcccccgcggccaccgacgctgctgctgggacttctgctgctggcggccctcctggagcacggccaggccgacccgggaacagacaatctacagatgaatgtcacccgga

SEQ ID NO: 177819 - DNA, 120 bp, Artificial Sequence
  ENSG00000110427_102 (sequence is synthesized)
ctccagagtcatttcctcccgggaaattgttaccaatttcaccaacatggcctttcacagaagtcaggtcttcctcagcagcagacagaatcaagaccgtgctgggacagtcctctgaca

SEQ ID NO: 177820 - DNA, 120 bp, Artificial Sequence
  ENSG00000110427_103 (sequence is synthesized)
acacaagcttgccacagtcagcccgaacccctgcgtccaagacacaccacagaactagggctcacgcggacttctcttcttccctttaccaaggaagcggacatagcgcctccctcgaac

SEQ ID NO: 177821 - DNA, 120 bp, Artificial Sequence
  ENSG00000110427_104 (sequence is synthesized)
cttccaaggattctaccgagtccctggtccaaccggggcctaaagggggacaagaagcagccgatgtgtcaggtttgcctctcaccagcatgctcccctcgttgtccacagtcccatcag

SEQ ID NO: 177822 - DNA, 120 bp, Artificial Sequence
  ENSG00000110427_105 (sequence is synthesized)
ggacatccttcagtgctgtccccccatcccagccagtatgggcagggacttcctccatttcaaagcatcccccaaggtcagacattcccccactcctccctctacctccatcctcttcat

SEQ ID NO: 177823 - DNA, 120 bp, Artificial Sequence
  ENSG00000110427_106 (sequence is synthesized)
acacgtgtgcacaaactcacacacagccactgggctctgaccctcagtcgttctttctattctgccccacaagggccaggagtctgtatgtaccccttgggttctcaccttaccccttgt

SEQ ID NO: 177824 - DNA, 120 bp, Artificial Sequence
  ENSG00000110427_107 (sequence is synthesized)
ctgaattgtcctgtctcacttcctccgcccctgttcttatgaaatggtgtagttccttaggaaaaaccttttgcggaatgaactgatgtttgcttagaggtttttctaattctctagtta

SEQ ID NO: 177825 - DNA, 120 bp, Artificial Sequence
  ENSG00000110427_108 (sequence is synthesized)
gaaatcctctaaaatttctaatttctaatcacatgaattgacgcaatttcttgcaccagttccactaaggcagcagatctctgaaataactgctcatcttggagattcctctcattttcc

SEQ ID NO: 177826 - DNA, 120 bp, Artificial Sequence
  ENSG00000110427_109 (sequence is synthesized)
tgccctgactcccctgataagtttcatgggttcagtctgtgccactgagtccagatattgcaactccacttctcccaggaaaaaactaacccaaaacaataaaggaacagatctgtcatc

SEQ ID NO: 177827 - DNA, 120 bp, Artificial Sequence
  ENSG00000110429_0 (sequence is synthesized)
agacctgcaccgggccaggcaagatggcggccatggagaccgagacggcgccgctgaccctagagtcgctgcccaccgatcccctgctcctcatcttatcctttttggactatcgggatc

SEQ ID NO: 177828 - DNA, 120 bp, Artificial Sequence
  ENSG00000110429_1 (sequence is synthesized)
taatcaactgttgttatgtcagtcgaagacttagccagctatcaagtcatgatccgctgtggagaagacattgcaaaaaatactggctgatatctgaggaagagaaaacacagaagaatc

SEQ ID NO: 177829 - DNA, 120 bp, Artificial Sequence
  ENSG00000110429_2 (sequence is synthesized)
agtgttggaaatctctcttcatagatacttactctgatgtaggaagatacattgaccattatgctgctattaaaaaggcctgggatgatctcaagaaatatttggagcccaggtgtcctc

SEQ ID NO: 177830 - DNA, 120 bp, Artificial Sequence
  ENSG00000110429_3 (sequence is synthesized)
ggatggttttatctctgaaagagggtgctcgagaggaagacctcgatgctgtggaagcgcagattggctgcaagcttcctgacgattatcgatgttcataccgaattcacaatggacaga

SEQ ID NO: 177831 - DNA, 120 bp, Artificial Sequence
  ENSG00000110429_4 (sequence is synthesized)
agttagtggttcctgggttattgggaagcatggcactgtctaatcactatcgttctgaagatttgttagacgtcgatacagctgccggaggattccagcagagacagggactgaaatact

SEQ ID NO: 177832 - DNA, 120 bp, Artificial Sequence
  ENSG00000110429_5 (sequence is synthesized)
gtctccctttaactttttgcatacatactggtttgagtcagtacatagcagtggaagctgcagagggccgaaacaaaaatgaagttttctaccaatgtccagaccaaatggctcgaaatc

SEQ ID NO: 177833 - DNA, 120 bp, Artificial Sequence
  ENSG00000110429_6 (sequence is synthesized)
cagctgctattgacatgtttattataggtgctacttttactgactggtttacctcttatgtcaaaaatgttgtatcaggtggcttccccatcatcagagaccaaattttcagatatgttc

SEQ ID NO: 177834 - DNA, 120 bp, Artificial Sequence
  ENSG00000110429_7 (sequence is synthesized)
acgatccagaatgtgtagcaacaactggggatattactgtgtcagtttccacatcgtttctgccagaacttagctctgtacatccaccccactatttcttcacataccgaatcaggattg

SEQ ID NO: 177835 - DNA, 120 bp, Artificial Sequence
  ENSG00000110429_8 (sequence is synthesized)
aaatgtcaaaagatgcacttcctgagaaggcctgtcagttggacagtcgctattggagaataacaaatgctaagggtgacgtggaagaagttcaaggacctggagtagttggtgaatttc

SEQ ID NO: 177836 - DNA, 120 bp, Artificial Sequence
  ENSG00000110429_9 (sequence is synthesized)
caatcatcagcccaggtcgggtatatgaatacacaagctgtaccacattctctacaacatcaggatacatggaaggatattataccttccattttctttactttaaagacaagatcttta

SEQ ID NO: 177837 - DNA, 120 bp, Artificial Sequence
  ENSG00000110429_10 (sequence is synthesized)
ttgccattccccgattccatatggcatgtccaacattcagggtgtctatagcccgattggaaatgggtcctgatgaatatgaagagatggaagaagaggaggaggaggaagaggaggaag

SEQ ID NO: 177838 - DNA, 120 bp, Artificial Sequence
  ENSG00000110429_11 (sequence is synthesized)
acgaggatgatgattcagcagatatggatgaatcagatgaagatgatgaagaggagagacggaggagagtctttgatgttcccattcgcagacgccgctgctcacgccttttttagcaag

SEQ ID NO: 177839 - DNA, 120 bp, Artificial Sequence
  ENSG00000110429_12 (sequence is synthesized)
ccttctgctgatggaagcactaggatgattctaggctgttaaatagatttctcaataatgtaaataactaaattgttctctgcatatagcaggaaaactagcatgaaatattgtttcagg

SEQ ID NO: 177840 - DNA, 120 bp, Artificial Sequence
  ENSG00000110429_13 (sequence is synthesized)
ccctgggttctatgtgacactacattaggaattggattgtttgggtttgctttgtgtttttgaggtagaggaagaaatgggaatcttttttttctcttccaggagtcagtggaagaatag

SEQ ID NO: 177841 - DNA, 120 bp, Artificial Sequence
  ENSG00000110429_14 (sequence is synthesized)
ttctctagctaaggaatggacatacctttgttttaaaatattttatacttacaaaaatctagaaatggagagggaactgttttgaataaggatttaaaatacctgcacaaggatagagag

SEQ ID NO: 177842 - DNA, 120 bp, Artificial Sequence
  ENSG00000110429_15 (sequence is synthesized)
aaactatgtgactcattctgtgaaaagacttcttgcagttgtgagttatttagaaatgatcaaaatttgtaattaggctaatccatttagtgattcctaatattttgtactcacagagaa

SEQ ID NO: 177843 - DNA, 120 bp, Artificial Sequence
  ENSG00000110429_16 (sequence is synthesized)
ctaattgactaaacaacttgaacgctagtggtttgtccttagacaatctgtctttgaatttaaagtctttatcgctaagaccttgactttaaatttttcatcactacaaccttgaattta

SEQ ID NO: 177844 - DNA, 120 bp, Artificial Sequence
  ENSG00000110429_17 (sequence is synthesized)
atttcaggtcttcaacatgatgaccttggatttaatttaaagtcttcaacactatgcgctttatcatattattcacagatgcatttttgaaatgtagtatgtaaaagtatgtaacgtgct

SEQ ID NO: 177845 - DNA, 120 bp, Artificial Sequence
  ENSG00000110429_18 (sequence is synthesized)
gtttattaacaaaagattgttcacaacatctcatgtagtttaaatttgtaaatactgcttctgttttgtttctcctttatacacttgactgtctttgtgataagtgacatgaattttatg

SEQ ID NO: 177846 - DNA, 120 bp, Artificial Sequence
  ENSG00000110429_19 (sequence is synthesized)
ttaggattaagtatgttttcctgaaacttggattttttttgtaattatataattgagagttaagaatgaaatccttcaagtgttaaaaactcacattttaaaagcaaattttggttccaa

SEQ ID NO: 177847 - DNA, 120 bp, Artificial Sequence
  ENSG00000110429_20 (sequence is synthesized)
tttacatgactttgtagggttaacactgcagataagccaggcaaatagttagtttataaatagtgttccagagaaccctagagattttgagaaagtatcttgggggtcatgtgaatttgt

SEQ ID NO: 177848 - DNA, 120 bp, Artificial Sequence
  ENSG00000110429_21 (sequence is synthesized)
tgagagaaatggacaagtaaatgaggctccatagtctctaaccagagaatttctgctgttttaaagattcaacttgtttttcactgttcagtggcctaaatgtagattatgagaaatacc

SEQ ID NO: 177849 - DNA, 120 bp, Artificial Sequence
  ENSG00000110429_22 (sequence is synthesized)
acattagaccagtagaatcagctttaagactgggaaaacaacttcttacagtgtttttgctcaaacttccaatttaatgtcaaataaacaaatattccataaagatcattataaagaaaa

SEQ ID NO: 177850 - DNA, 120 bp, Artificial Sequence
  ENSG00000110429_23 (sequence is synthesized)
ggatggttttatctctgaaaggtgttggtatcaagatgatgctggccttataaaacgagtcgagaagtgttgcctctttttctgttccctggaagagtttatagggtgctcgagaggaag

SEQ ID NO: 177851 - DNA, 120 bp, Artificial Sequence
  ENSG00000110429_24 (sequence is synthesized)
attccatatggcatgtccaacattcagggtgtctatagcccgattgggttaccttatgacaagtgtaacagtaactccaaccttagagactataacatgattaaagaaagttatgaagct

SEQ ID NO: 177852 - DNA, 120 bp, Artificial Sequence
  ENSG00000110429_25 (sequence is synthesized)
ccagttatacaatggggataaaatatgaattatatacccagaatgcaattgagttgtaggtgttgaatctttggaaaatgccctctagcttctggaatgaccctgatggatgggtttaag

SEQ ID NO: 177853 - DNA, 120 bp, Artificial Sequence
  ENSG00000110429_26 (sequence is synthesized)
tttggaaagatggacatgatattaatctgatccagagctgacacattttcaactccagtttgaaaagagaaggatgataatgagactttgggccattacctgtgtggcatatctagtgaa

SEQ ID NO: 177854 - DNA, 120 bp, Artificial Sequence
  ENSG00000110429_27 (sequence is synthesized)
tgcataacagaattccttttttgactggcccagtatctgtatgagtttggaataatcttttccctaaatgtttgatatgattcatcactgaagttatctggggctagagttctgtttgtg

SEQ ID NO: 177855 - DNA, 120 bp, Artificial Sequence
  ENSG00000110429_28 (sequence is synthesized)
ggaaaattttgaaatttgaatttaatttctttaatattcatattttctatttcttcttgtttcagttttggtaatttgtgcctttcaaggaatttgtccattccatctaaatgttgaatt

SEQ ID NO: 177856 - DNA, 120 bp, Artificial Sequence
  ENSG00000110429_29 (sequence is synthesized)
tattggtataaagttattgacagtattcccttgatatccttttaatggctacaaaagccatagtcacttgtcctcttttgttcttaatattgttaatttatatcttctcttttgttcatt

SEQ ID NO: 177857 - DNA, 120 bp, Artificial Sequence
  ENSG00000110429_30 (sequence is synthesized)
gctttagttaggggtttgtaatttttattgatcatttaaaggagcaacttttggttttactaattttctctatttgcttattttctatcgcattgatttctgcagttatctttatttctt

SEQ ID NO: 177858 - DNA, 120 bp, Artificial Sequence
  ENSG00000110429_31 (sequence is synthesized)
tccttctactttgagtttgcttttcttctagcttttttaaggtagaagtttatattagtaattttagaacttttctctctccaagcactgttttagctgcatttcacaagttttgatgtg

SEQ ID NO: 177859 - DNA, 120 bp, Artificial Sequence
  ENSG00000110429_32 (sequence is synthesized)
ttttcatgaacgcgtagttcaaaatagtgtcagatttcccttgtaatttaattttgatctatgacttttctagaaatgtgttaattttcaaacatttgggggagttttcagttatctttt

SEQ ID NO: 177860 - DNA, 120 bp, Artificial Sequence
  ENSG00000110429_33 (sequence is synthesized)
ggctatcgattttttaaatttattgtggttagagaatttgctctgtattttcaatcctaaatgttttatggcccaaaattatggtttatcttggtaaatgatccttgtatatttgaaaat

SEQ ID NO: 177861 - DNA, 120 bp, Artificial Sequence
  ENSG00000110429_34 (sequence is synthesized)
aatgtacattctgctattttggggaatattactctataaatgataggtcaaatcggttgacagtttttttcaagtcttctgtatacttgctgattttttttttttttggtctttgtccta

SEQ ID NO: 177862 - DNA, 120 bp, Artificial Sequence
  ENSG00000110429_35 (sequence is synthesized)
tcaacaagtgagagatgattgttgaaatctccaaatataattatagttttttgtttctctttttagttctgtcaggtttgcttcatgtattttgaagctgtataattatatgcaaatatg

SEQ ID NO: 177863 - DNA, 120 bp, Artificial Sequence
  ENSG00000110429_36 (sequence is synthesized)
ctaaggattattatgtatttttaatgacataattctttcatcattatgaaatctccatctttatcgctgataatattccttgtcctaaagttcaaagagcattgaggtgtgttttggcag

SEQ ID NO: 177864 - DNA, 120 bp, Artificial Sequence
  ENSG00000110429_37 (sequence is synthesized)
gcagttgagttactattgggtcgacttgatcctttggaatcttgtttgtttttaatgtttgttagggtgggtgtaaagttgtctttatttaaggacggtggttgtcaactttcagtctca

SEQ ID NO: 177865 - DNA, 120 bp, Artificial Sequence
  ENSG00000110429_38 (sequence is synthesized)
tgaccccctgaaactctaaaaacttattgaggactccgaagaattcttgcttatgtggattgtattaatgcttaccatatcagaaattaaaactgagaaataagtaaaacaatatttact

SEQ ID NO: 177866 - DNA, 120 bp, Artificial Sequence
  ENSG00000110429_39 (sequence is synthesized)
tattagttccttttcaaatgacaataataaacccatttcatgttcagctctctcttaactatgttctttcttattagttttcgtttccttctaaccacaaataaacatataaaatcttga

SEQ ID NO: 177867 - DNA, 120 bp, Artificial Sequence
  ENSG00000110429_40 (sequence is synthesized)
ggcggtgaggcagggggaaagggggtcggggccgctgacaggacccgagcttccgcgacaccagaaggtgacgccagggccgccctcatcctgcggagccaccggggaccggggcgagac

SEQ ID NO: 177868 - DNA, 120 bp, Artificial Sequence
  ENSG00000110429_41 (sequence is synthesized)
gggggcggaaagggcctcgccctgagtcttcctcctgtcctgggcccaggtatgagaagcgacgagatatctctctcccaggcctcggtgaggcccacttgcaagagaaggaggtagtgg

SEQ ID NO: 177869 - DNA, 120 bp, Artificial Sequence
  ENSG00000110429_42 (sequence is synthesized)
ccctcgtgccgcaccgccgcgctccgcggacccccgctggccccgcaggtgcccgcccggttggggtcagtccctgctgctgtgtaaaagcccctgtcccggccaggcgctcttctctgc

SEQ ID NO: 177870 - DNA, 120 bp, Artificial Sequence
  ENSG00000110429_43 (sequence is synthesized)
tgggtccggggcctgcggagtctggcgccggggtgggcaggtgggtgagcgagaggagaagataggcaaccccttactcccctggcgcgacttccccagcgccagaatcgctgtccgggc

SEQ ID NO: 177871 - DNA, 120 bp, Artificial Sequence
  ENSG00000110429_44 (sequence is synthesized)
tcactttcggacttcagtgcgtgagaattgttttgctgtcagcattgctccttacggttcgatgttggattttatgttttggtactgacttccggtgatgccataccggtgactatcttt

SEQ ID NO: 177872 - DNA, 120 bp, Artificial Sequence
  ENSG00000110429_45 (sequence is synthesized)
tctcctggacaccttgggtttcccacattactagcatctgttccagaaataaacaccggttgctgataagggtggttcaatgcccagtttcttcagaacttgggactgtctggggtggtg

SEQ ID NO: 177873 - DNA, 120 bp, Artificial Sequence
  ENSG00000110429_46 (sequence is synthesized)
gaagaaatggcgctgccagcccgccccccagctgtcaggattgtttacacccttgacagggggtggcatggctgtgagtttcctgtgctaccgtatatatttgcagaggatgcaaagtcg

SEQ ID NO: 177874 - DNA, 120 bp, Artificial Sequence
  ENSG00000110429_47 (sequence is synthesized)
ccctcttaggataggtgggcgagatttgttttgtgtttggattaaccattagattctagccatttgatgattgtgccctgtgttattagaggtctttttataaatacagatttcttggag

SEQ ID NO: 177875 - DNA, 120 bp, Artificial Sequence
  ENSG00000110429_48 (sequence is synthesized)
ctacagatagttgttggcctagctaagtggtgatagagagatacctcaagtttttggtcactacctgtactggtcgctacctgtacctgctagcaattttatttttctagaaaatactta

SEQ ID NO: 177876 - DNA, 120 bp, Artificial Sequence
  ENSG00000110429_49 (sequence is synthesized)
caatttaactaacagtctccaacttttgattgctgccagagtaatctttccaagacacatctggttgtcattctccttaaaacctgtgacacccctatgtttatagactataacctaaac

SEQ ID NO: 177877 - DNA, 120 bp, Artificial Sequence
  ENSG00000110429_50 (sequence is synthesized)
ttctggggcattgaaagctcttatcatctggcttgtatatctaaggtcctccaggacttatttctccaccactatcacatttgcaccatccattctaaccaaatcagacctctgccagca

SEQ ID NO: 177878 - DNA, 120 bp, Artificial Sequence
  ENSG00000110429_51 (sequence is synthesized)
tacaacacacttgcactttctttttttttttttttcctgtggctcaagctctcgaccttgcctggaatgccttgcctacctcttctcaacttggcaaggtggagaagatgccctctctac

SEQ ID NO: 177879 - DNA, 120 bp, Artificial Sequence
  ENSG00000110429_52 (sequence is synthesized)
cttcttcctgcagaattgatttgccatgtcaggtagatggcgtgcttcttgattgtaagggctgccttgcttatcttcctattcaaagatttttttttccccgagggcttgctatgtgcc

SEQ ID NO: 177880 - DNA, 120 bp, Artificial Sequence
  ENSG00000110429_53 (sequence is synthesized)
agtctgttaagtgttgagggtacagtagtgaacaacgcagataaggcaactcttatggagcttacagtccagtgggcaagcgcataattgcaagaggtactaagtgctgtgaaggaaata

SEQ ID NO: 177881 - DNA, 120 bp, Artificial Sequence
  ENSG00000110429_54 (sequence is synthesized)
gattgctctgttaaggaataggaagtgagaagtgatcaaatcggaaggagctgccatatatgaagcagggcatatgcagttctggcagagggaaaagtatgttcagagattgacgggact

SEQ ID NO: 177882 - DNA, 120 bp, Artificial Sequence
  ENSG00000110429_55 (sequence is synthesized)
gctgaacggtactgttcaacagcatggcctggtggaagatacagaaggctggcgttgctggaggtagggagtgactcacagacagtgatgagatgagggtggtgagatcatgcaggacct

SEQ ID NO: 177883 - DNA, 120 bp, Artificial Sequence
  ENSG00000110429_56 (sequence is synthesized)
tgggaaccaaggtgaggaagtaagagtttactttaaatgctttaggtagtaatcacaattttaaacagaagtgacatgatccctctgtaaatgtctgtggaaataaattgagttgaatac

SEQ ID NO: 177884 - DNA, 120 bp, Artificial Sequence
  ENSG00000110429_57 (sequence is synthesized)
catttgaattttatctacagaaaagtatccagtgtattgcagcttttttcctgcaccatacagcccaattttgtcaagggtctagtctagtgataagctctgaagtttttggtattattt

SEQ ID NO: 177885 - DNA, 120 bp, Artificial Sequence
  ENSG00000110429_58 (sequence is synthesized)
gctgaactggattgggttggattggattagtacactggaatcatgtagcatcagttgcctagtttgaattgagatgatctgataccctctccatttcagagtgatttattctgaaatgga

SEQ ID NO: 177886 - DNA, 120 bp, Artificial Sequence
  ENSG00000110429_59 (sequence is synthesized)
gtgaataaatgccacactgtgcgtcagaatgacctgtgcatcagaatggcctgtggcactttttaaacatacagatgcctgaggtacagatctcagtccaaaccgactggatcagaatct

SEQ ID NO: 177887 - DNA, 120 bp, Artificial Sequence
  ENSG00000110429_60 (sequence is synthesized)
ctagaacagtagttttcactctcgatgtgcattgaattcatctttcatgcatattccagattcttttatgtcatttagctcctagggcagtggagggacaggaatcaagaagagggtatg

SEQ ID NO: 177888 - DNA, 120 bp, Artificial Sequence
  ENSG00000110429_61 (sequence is synthesized)
gaaactgaatgcacaaaactggagggattcctatgtttacaaaagttaatttgggcatctcctgagcttggcagaaaaggatgaggatgatgtttctgtaaaatctgaaaatcaaacaaa

SEQ ID NO: 177889 - DNA, 120 bp, Artificial Sequence
  ENSG00000110429_62 (sequence is synthesized)
ggcaattttgtttactatagatggtttttaacacaccttagtcatggccttgacaaacctgatgtgatttaagattctgttgatagctattgcccaagtgagatctttgaatacctactt

SEQ ID NO: 177890 - DNA, 120 bp, Artificial Sequence
  ENSG00000110429_63 (sequence is synthesized)
tcaattaatataacttgtaatttctctctggaaaggatagagtcctaatcttaggttcattctttttacaaattaattatgtagggtagaatttacaggattgcaacactgttgtgttag

SEQ ID NO: 177891 - DNA, 120 bp, Artificial Sequence
  ENSG00000110429_64 (sequence is synthesized)
ttcgatgttttggggcagctgatagcttgtgtagccatgactattgagtcagaactgttacgattcaggcaccctctataggtggactttccagtagttgctttaatgaaaacgtggttt

SEQ ID NO: 177892 - DNA, 120 bp, Artificial Sequence
  ENSG00000110429_65 (sequence is synthesized)
ttgtggcaatacttttttcctttaagtaaaaaattttaaaaaacaaaaataaaaagtctgtgtatttagtagcatacatcttacagatcttgggaaaaaaccccaagtccctttgtttat

SEQ ID NO: 177893 - DNA, 120 bp, Artificial Sequence
  ENSG00000110429_66 (sequence is synthesized)
gactaaataactttcttcctatatgtagaaatgagtattgtcctgataataagcataggacaactccttgacttgagattaactccaatggcatatatggtctgtagatatttttgtgaa

SEQ ID NO: 177894 - DNA, 120 bp, Artificial Sequence
  ENSG00000110429_67 (sequence is synthesized)
aaattacagttgtagatgtttcagggtttatttgtgaactcagtttcactactaacaaggcaattatactacttaacatgttaaacaggttttagaaaatagttttgtaattataagggt

SEQ ID NO: 177895 - DNA, 120 bp, Artificial Sequence
  ENSG00000110429_68 (sequence is synthesized)
aataagtgaaaagtaagagaaacaaaaggcataaaacaaaacaatgaatattttaatctttatttttaaattgttttcttacttttttaaatactatcggtgaatctggttactgccagc

SEQ ID NO: 177896 - DNA, 120 bp, Artificial Sequence
  ENSG00000110429_69 (sequence is synthesized)
atctctgaaaggtggattacccaaggcatgaaaaactaagtgttggtatcaagatgatgctggccttataaaacgagtcgagaagtgttgcctctttttctgttccctggaagagtttat

SEQ ID NO: 177897 - DNA, 120 bp, Artificial Sequence
  ENSG00000110429_70 (sequence is synthesized)
cctgccttgtggaaaatgttttctctcaaggatgagaaataaaatgagaattctggacttacttcttatcaacattaaaaaagccatgggggttgtatttgttgacctttcctgtttgta

SEQ ID NO: 177898 - DNA, 120 bp, Artificial Sequence
  ENSG00000110429_71 (sequence is synthesized)
tattagttttctgatatggagaattgttctgctttttcgtcctctaccagtctgattaattcgtaggcttaacacttcctttttctttctccttggaatgcctcttgggatatgcattag

SEQ ID NO: 177899 - DNA, 120 bp, Artificial Sequence
  ENSG00000110429_72 (sequence is synthesized)
ttggtcttatgtcttttcttggtctaggtggtgtgtgtgtttggcttgtttggggcacttttagaggctccagctgcacatttccactcctctctgtgtgttcctctctgcatctgctgt

SEQ ID NO: 177900 - DNA, 120 bp, Artificial Sequence
  ENSG00000110429_73 (sequence is synthesized)
ttgtgtgtgtacactttttttctgagcaatctttctccttagccacattgagttctttaacagtttttctgttttcttcttcattaagataattaataatcatactactcacatatcatg

SEQ ID NO: 177901 - DNA, 120 bp, Artificial Sequence
  ENSG00000110429_74 (sequence is synthesized)
ttttagaacttcctaagcctttccctttcccaccttttggacctcctaactgaatttcaaagtcttcattccttagattaaaaaaataaatccaaagataaaagaatgtaatgtcttata

SEQ ID NO: 177902 - DNA, 120 bp, Artificial Sequence
  ENSG00000110429_75 (sequence is synthesized)
agtcgtatcagtgtatattttctctgttattgttgttagtgttataataaatcctaagtgacacaattcctttctcctacattaattcatttgcttgtacaacaactatttattgagcac

SEQ ID NO: 177903 - DNA, 120 bp, Artificial Sequence
  ENSG00000110429_76 (sequence is synthesized)
tgtgattaacaatataatcaaattccctgccttggaatttacattccaattcaaagagacaaactgtaacaataaacactatgtccttatattaagtagtaataagtgctgtggagaaac

SEQ ID NO: 177904 - DNA, 120 bp, Artificial Sequence
  ENSG00000110429_77 (sequence is synthesized)
agcagagtaaaggggataaagaacgtattgttaggttgttctaatataaagatgtgtcaggagaggccttggtgacatttaagctgaaacgtgaaaggagcagagggaattaggtggata

SEQ ID NO: 177905 - DNA, 120 bp, Artificial Sequence
  ENSG00000110429_78 (sequence is synthesized)
tgtgggagacgagaggtcgaagcaaaggagcagcacgtgtggaggttccgaaacagtaatgtgcttggtgtgcttgacccaaggaggccagtgtagctggagtgcagtgaacaacaggga

SEQ ID NO: 177906 - DNA, 120 bp, Artificial Sequence
  ENSG00000110429_79 (sequence is synthesized)
gaggggctggagattagatcagagtgttaatggggtggtggatcacgtaacaccataaaagccttggtggaaggactctggctgacatcacgccccaagttgccccatactttccagaat

SEQ ID NO: 177907 - DNA, 120 bp, Artificial Sequence
  ENSG00000110429_80 (sequence is synthesized)
accaagtaggtccttgctgttcagaattctgttcaatgtagcagcccctcccattgcgtcttcaaatgtgtgagagagaacattgacagcagagtaagtcatggcttgattacagacatt

SEQ ID NO: 177908 - DNA, 120 bp, Artificial Sequence
  ENSG00000110429_81 (sequence is synthesized)
gcatgggcagaattgacatttccaagagatattcagatgcatgttcaacatcactactgtcctaatctgagagcctccaacaaggtaattttaaaatagaggctgtcatttccttccagt

SEQ ID NO: 177909 - DNA, 120 bp, Artificial Sequence
  ENSG00000110429_82 (sequence is synthesized)
gtgggttgatcttagatatatacttataacgaatcggcaaagtgacactgtgatttctgagttagaaaaaggtaatattccttcagcctagggttctgtctttctctcctgggacatgtg

SEQ ID NO: 177910 - DNA, 120 bp, Artificial Sequence
  ENSG00000110429_83 (sequence is synthesized)
tctttgacaccctgagccaccatgtaagaagtccagctaccatgaagccgtcatgcagaagagaccatgtagagacatcacacagagatagagggaggcacccaggagccccagctgttt

SEQ ID NO: 177911 - DNA, 120 bp, Artificial Sequence
  ENSG00000110429_84 (sequence is synthesized)
cagactccagatatttggatcatcctgcgcgggtaccagacatgtgaatgaagaagctcgtgagatgactgcagttccagctaccatcggactgcaacatcacgggacaccccaacccag

SEQ ID NO: 177912 - DNA, 120 bp, Artificial Sequence
  ENSG00000110429_85 (sequence is synthesized)
aaccaccccactgaatacttcccaaacaccaacccacatgaaccatgagagataataatgactgttgctgtttcaagccactaaaaaaataaaaatatttttttaaaaagtagaggctac

SEQ ID NO: 177913 - DNA, 120 bp, Artificial Sequence
  ENSG00000110429_86 (sequence is synthesized)
tgatggttgaattgaaatgatgtgtctttatggtaggagctcaataaaaatcttagatctcttgttgacagtgcataaaagttaccagtagaggtcatacttgattaatattttcatatc

SEQ ID NO: 177914 - DNA, 120 bp, Artificial Sequence
  ENSG00000110429_87 (sequence is synthesized)
ctcttttctgtaagtatatagcttaataattattattcagtatatgaatataagctcagtaaaactgtatcttggattgttacaagtggtctgtttgctaccttctgtgaattaccaact

SEQ ID NO: 177915 - DNA, 120 bp, Artificial Sequence
  ENSG00000110429_88 (sequence is synthesized)
gctaccttctgtgaattaccaactactgtgtaaaaaataagtactggcttagtgaaatatttaccattaaaaccatactgagctgggctgggtcgcatgcacctgtagtcccagctactc

SEQ ID NO: 177916 - DNA, 120 bp, Artificial Sequence
  ENSG00000110429_89 (sequence is synthesized)
ttgagcccaggagtttgaggctagcctaggcaacacagcaagaactcgtctctaagaaaaaataataatttttttaaaaagaagatcttccattaaacaacaacaaaaaaatcacactga

SEQ ID NO: 177917 - DNA, 120 bp, Artificial Sequence
  ENSG00000110429_90 (sequence is synthesized)
gcattatttaacacaagatatagaatccactccagaatcttgcatcagcatgtgtgttgtgagaatccactgttcaagtctatggaaattcatatttggcgtgtctggttgtttgaattc

SEQ ID NO: 177918 - DNA, 120 bp, Artificial Sequence
  ENSG00000110429_91 (sequence is synthesized)
tagataaatgagaatttacatgaaataactaaaaaactgatagatgctcttcttatcaaaagattgttttctctttcaaggaaatgggtcctgatgaatatgaagagatggaagaagagg

SEQ ID NO: 177919 - DNA, 120 bp, Artificial Sequence
  ENSG00000110429_92 (sequence is synthesized)
aagctgctgcccagcctctgtgagttccttactcttagtttggtgctcgtctgacatggtatgtagaacctcaccactccagcagagtactaaggtgtaataatactatgccagtagctg

SEQ ID NO: 177920 - DNA, 120 bp, Artificial Sequence
  ENSG00000110429_93 (sequence is synthesized)
ggatttctcttaaaatgggagagcaaagcaaaagattgagagacactgagaagagatgaggtgagaagttaatgcagggaggaaggatgaaaaaggagcttcctttcagctgccttgata

SEQ ID NO: 177921 - DNA, 120 bp, Artificial Sequence
  ENSG00000110429_94 (sequence is synthesized)
ttagcagctggcaatttcatacttggatttctttaaggtttgctggtttataaagtactgcatctaggttttcattagaaccgtttttgtattgaatatttttaattttgaaaaaagcta

SEQ ID NO: 177922 - DNA, 120 bp, Artificial Sequence
  ENSG00000110429_95 (sequence is synthesized)
gtccatatacaatctcatgctctgaggactcttctataaggcaatgaaatatgtagaagtgctgtgaatgtgtatatatttttcttaacatgcacatgtattattcattatattcatgta

SEQ ID NO: 177923 - DNA, 120 bp, Artificial Sequence
  ENSG00000110429_96 (sequence is synthesized)
taattggggatacagatatataaagcaactttaaactttttctcttttggtgctaatgcagtagcattaagatactaagtcacattagagacctccaaagcaagtctttagggactaata

SEQ ID NO: 177924 - DNA, 120 bp, Artificial Sequence
  ENSG00000110429_97 (sequence is synthesized)
taaactctatgccttataaactccttggtacaactagtttttcttggccttaaaagagtatttcttataggttttgagaacccttcaatttgtaagtaactacagctcacccctttgcta

SEQ ID NO: 177925 - DNA, 120 bp, Artificial Sequence
  ENSG00000110429_98 (sequence is synthesized)
tttatcccgtcttggcttgtttggattttgatcatccagagaagattcctccagactgtccattttgctttttaagggtactgactgacatatattaaacatctacatatatgaatagta

SEQ ID NO: 177926 - DNA, 120 bp, Artificial Sequence
  ENSG00000110429_99 (sequence is synthesized)
aagagtccttgtagactgaggcatttgtattcacttctgtcttctcattggaactttgaacaatgtataagtctctatttgttccatactatggcacattccacgttcatggtgtacttc

SEQ ID NO: 177927 - DNA, 120 bp, Artificial Sequence
  ENSG00000110429_100 (sequence is synthesized)
ataatatcaagatctcactcttacctagtaagttataaaaagcttttaaatgtaggtcctaggtttcagctcactctgactcatgtggtctctggtttctaagttaagcactctctggag

SEQ ID NO: 177928 - DNA, 120 bp, Artificial Sequence
  ENSG00000110429_101 (sequence is synthesized)
gtttttcctgtgctcattgccctcgttgttatttttgcatagcacacactttcagagattaccatagtggctgtggtccagcagtgctactcagtttataaatggaaggcagctgagtgc

SEQ ID NO: 177929 - DNA, 120 bp, Artificial Sequence
  ENSG00000110435_0 (sequence is synthesized)
aggctgtgctgcgggcagccagtgagaaggccgtcaagatggcggcctcctggaggctgggctgtgatccgcggctgctgcgttatcttgtgggcttccccggccgccgaagcgtagggc

SEQ ID NO: 177930 - DNA, 120 bp, Artificial Sequence
  ENSG00000110435_1 (sequence is synthesized)
tggtgaagggggctcttgggtggtctgtaagccgcggagctaattggagatggtttcacagcacgcagtggcttcggggtgatcccattaagatactaatgccatcactgtctcctacaa

SEQ ID NO: 177931 - DNA, 120 bp, Artificial Sequence
  ENSG00000110435_2 (sequence is synthesized)
tggaagaaggaaacattgtgaaatggctgaaaaaggaaggtgaagcggtgagtgctggagatgcattatgtgaaattgagactgacaaagctgtggttaccttagatgcaagtgatgatg

SEQ ID NO: 177932 - DNA, 120 bp, Artificial Sequence
  ENSG00000110435_3 (sequence is synthesized)
gaatcttggccaaaatcgtggttgaagaaggaagtaaaaatatacggctaggttcactaattggtttgatagtagaagaaggagaagattggaaacatgttgaaattcccaaagacgtag

SEQ ID NO: 177933 - DNA, 120 bp, Artificial Sequence
  ENSG00000110435_4 (sequence is synthesized)
gtcctccaccaccagtttcaaaaccttcagagcctcgcccctcaccagaaccacagatttccatccctgtcaagaaggaacacatacccgggacactacggttccgtttaagtccagctg

SEQ ID NO: 177934 - DNA, 120 bp, Artificial Sequence
  ENSG00000110435_5 (sequence is synthesized)
cccgcaatattctggaaaaacactcactggatgctagccagggcacagccactggccctcgggggatattcactaaagaggatgctctcaaacttgtccagttgaaacaaacgggcaaga

SEQ ID NO: 177935 - DNA, 120 bp, Artificial Sequence
  ENSG00000110435_6 (sequence is synthesized)
ttaccgagtccagaccaactccagcccccacagccactcccacagcaccttcgcccctacaggccacagctggaccatcttatccccggcctgtgatcccaccagtatcaactcctggac

SEQ ID NO: 177936 - DNA, 120 bp, Artificial Sequence
  ENSG00000110435_7 (sequence is synthesized)
aacccaatgcagtgggcacattcactgaaatccccgccagcaatattcgaagagttattgccaagagattaactgaatctaaaagtactgtacctcatgcatatgctactgctgactgtg

SEQ ID NO: 177937 - DNA, 120 bp, Artificial Sequence
  ENSG00000110435_8 (sequence is synthesized)
accttggagctgttttaaaagttaggcaagatctggtcaaagatgacattaaagtatcagtaaatgattttatcatcaaggcagcagctgttacccttaaacaaatgccagatgttaatg

SEQ ID NO: 177938 - DNA, 120 bp, Artificial Sequence
  ENSG00000110435_9 (sequence is synthesized)
taagctgggatggagagggcccaaagcaactgccatttattgacatttcagtggctgtggcaacagataaaggcttacttactccaatcataaaagatgctgctgctaaaggtatccagg

SEQ ID NO: 177939 - DNA, 120 bp, Artificial Sequence
  ENSG00000110435_10 (sequence is synthesized)
gatgtttggcatcgacgaatttactgcagtgattaaccctcctcaggcctgcattttggcggttgggaggttccgacctgtgctgaagctcactgaggatgaagagggaaatgccaaact

SEQ ID NO: 177940 - DNA, 120 bp, Artificial Sequence
  ENSG00000110435_11 (sequence is synthesized)
gcagcagcgccagctcataacagtcacaatgtcaagtgacagtcgagtggttgatgacgaactggcaaccaggtttcttaaaagttttaaagcaaacctagagaatcctatccgacttgc

SEQ ID NO: 177941 - DNA, 120 bp, Artificial Sequence
  ENSG00000110435_12 (sequence is synthesized)
ctagtcctcaaagataagaagttggtgttcagcttagttgattcagtagttgttaccaagaaacatatgttataggaaaacaacttggtatttaagtatgaagtggatgaaatgtttatt

SEQ ID NO: 177942 - DNA, 120 bp, Artificial Sequence
  ENSG00000110435_13 (sequence is synthesized)
tatttaaggtgaaagcatttgacccagggtgtcttcatcttcaatttgggtttaatgttatagaaataaatgatgataaactctaactaataaaggaaagagaatatttggttactcaga

SEQ ID NO: 177943 - DNA, 120 bp, Artificial Sequence
  ENSG00000110435_14 (sequence is synthesized)
tccatttttaacctctggtgctgtataaagggaatattaaactagatgtaaatcaaagtatatgtttggctcatttgagcattttggaatatttgagaatgtatgatacatgtaaaatta

SEQ ID NO: 177944 - DNA, 120 bp, Artificial Sequence
  ENSG00000110435_15 (sequence is synthesized)
aaaaaactattagaactgtaccataattatgttgaaggtagaagtgatcttcaaagagatggccattaacttagcagtgggacctcacttttacaagcactgctctagatatacttgaag

SEQ ID NO: 177945 - DNA, 120 bp, Artificial Sequence
  ENSG00000110435_16 (sequence is synthesized)
aatttaataggtacagaagtttattctggataataaataaataaggatcacactgtattaggggttatggcaacattattgaattttttatgtacataaagccatatgtttagggtggtt

SEQ ID NO: 177946 - DNA, 120 bp, Artificial Sequence
  ENSG00000110435_17 (sequence is synthesized)
tctatctgtcttgtttttcacttatataacactgtgaacttctaaagcaagaggataaaagaagcatgaatgaaaagaatgacatttcaaaaaaatggttcaatgaaaaactatagctaa

SEQ ID NO: 177947 - DNA, 120 bp, Artificial Sequence
  ENSG00000110435_18 (sequence is synthesized)
aatatgtaaacctttctaggtaaaccgcttgccttcatcttgagtcggaatatatttaaataaattgtgttatctcttgccaaacattttgttagtgtttatttaaaaacaaaatgttgt

SEQ ID NO: 177948 - DNA, 120 bp, Artificial Sequence
  ENSG00000110435_19 (sequence is synthesized)
ttcttaatgcatttaaatcagttttgtattgtgcagtaaaatgtgagaaaatataaacatttctattgtattttaaatgttaaaacacaaaagttcaataaaccttgaagttgattagta

SEQ ID NO: 177949 - DNA, 120 bp, Artificial Sequence
  ENSG00000110435_20 (sequence is synthesized)
aaacgcccggcccgctaccctgcgcccagctccagccgccgggtcccgcctgggcctctcctcctgggaataccgggcaccggtggccccgcccctacctgcgcgccgcatctccgggaa

SEQ ID NO: 177950 - DNA, 120 bp, Artificial Sequence
  ENSG00000110435_21 (sequence is synthesized)
caacagtctccctcccgagcatcacagccagacatggcccagaccagggacccgcgcggcctccaatctccgcacggctttgcgcgcggcgcttagcctgggatacggcagcgaggccgc

SEQ ID NO: 177951 - DNA, 120 bp, Artificial Sequence
  ENSG00000110435_22 (sequence is synthesized)
aaatgcaatcaggcggcgctgagggcagcccgggggcggggcgaacggggcgggggccggggtctggtaaggccccgccggctgagatatccagcggcgcacctgacttcccgggaggtg

SEQ ID NO: 177952 - DNA, 120 bp, Artificial Sequence
  ENSG00000110435_23 (sequence is synthesized)
ttgatccaggacctcatataatgcaagtttttctaatcatgggaaccttattgactaagcaaacaaaagcttgtaattttttatcattgtttgtcagtacattccataatttacaagttt

SEQ ID NO: 177953 - DNA, 120 bp, Artificial Sequence
  ENSG00000110435_24 (sequence is synthesized)
ttagcatatacttttggataattactttctgataaagttgtgacgtaatctagtcagactgtgatttttgtgtgtgtgaaggggagagttatttcatcaagtgattgtcacatatatata

SEQ ID NO: 177954 - DNA, 90 bp, Artificial Sequence
  ENSG00000110435_25 (sequence is synthesized)
tgctgactctgtaaaggctctatcaaagaaagcaagagatggaaaattgttgcctgaagaataccaaggaggatcttttcaatgcagtgg

SEQ ID NO: 177955 - DNA, 88 bp, Artificial Sequence
  ENSG00000110435_26 (sequence is synthesized)
gactgtgcctgcctcagcctcgcaaataagaatatatttcagtgtcttcttgtttactagctttgtttctattaatggcagttctcca

SEQ ID NO: 177956 - DNA, 120 bp, Artificial Sequence
  ENSG00000110435_27 (sequence is synthesized)
cttgtttactagctttgtttctattaatggcagttctccaaaatcttcaagagctacactttgggaactttccatttattgtatactttaattaaaggtttccaactgattttaaattaa

SEQ ID NO: 177957 - DNA, 120 bp, Artificial Sequence
  ENSG00000110435_28 (sequence is synthesized)
aactggtcgtcagggcgcagaaaagaagcttggggggcgcggtcttcgccccagctccacttcggtgcttcacgattccttctctggcctgccttcctgataaatacccggtgatcccat

SEQ ID NO: 177958 - DNA, 120 bp, Artificial Sequence
  ENSG00000110436_0 (sequence is synthesized)
gggtgatgtcagctctcgacgaaaatagagagggatcgcctgcaaatccccagctccggcggggctaaaccttgcaatccctccctggccggcgccgagccagagcgcagcggcctccac

SEQ ID NO: 177959 - DNA, 120 bp, Artificial Sequence
  ENSG00000110436_1 (sequence is synthesized)
cgcctccccaggcgcgcacacacccgcacacgcgcacgcacgctcaccgtcctctgccaccactctctgctcccgccactcgccgcgcccgcgagccccgcagcaaagcacaggtggcag

SEQ ID NO: 177960 - DNA, 120 bp, Artificial Sequence
  ENSG00000110436_2 (sequence is synthesized)
ggtggcagcggctgcaggggcgcatcgccggcgtgcgccctcctgcagccctgggcgcatcgctctctcggggaagccaccctcggagcccccggagctccccgccaagcgccatccccg

SEQ ID NO: 177961 - DNA, 120 bp, Artificial Sequence
  ENSG00000110436_3 (sequence is synthesized)
ggggagcgcgggtcgcgcgccgtggagagccgggacgcggattagcgcccgcaggagcctcctgcgcccgttgaggcgctaaagggcttaccccggaggcgggtggaagggcgggcagag

SEQ ID NO: 177962 - DNA, 120 bp, Artificial Sequence
  ENSG00000110436_4 (sequence is synthesized)
gctcctcttaaataccgctcccggccgcacttcgcgctcaccccggcgtccgctttctccctcgcccacagctgccggatagtgctgaagaggagggggcgttccccagaccatggcatc

SEQ ID NO: 177963 - DNA, 120 bp, Artificial Sequence
  ENSG00000110436_5 (sequence is synthesized)
tacggaaggtgccaacaatatgcccaagcaggtggaagtgcgaatgcacgacagtcatcttggctcagaggaacccaagcaccggcacctgggcctgcgcctgtgtgacaagctggggaa

SEQ ID NO: 177964 - DNA, 120 bp, Artificial Sequence
  ENSG00000110436_6 (sequence is synthesized)
gaatctgctgctcaccctgacggtgtttggtgtcatcctgggagcagtgtgtggagggcttcttcgcttggcatctcccatccaccctgatgtggttatgttaatagccttcccagggga

SEQ ID NO: 177965 - DNA, 120 bp, Artificial Sequence
  ENSG00000110436_7 (sequence is synthesized)
tatactcatgaggatgctaaaaatgctcattctccctctaatcatctccagcttaatcacagggttgtcaggcctggatgctaaggctagtggccgcttgggcacgagagccatggtgta

SEQ ID NO: 177966 - DNA, 120 bp, Artificial Sequence
  ENSG00000110436_8 (sequence is synthesized)
ttacatgtccacgaccatcattgctgcagtactgggggtcattctggtcttggctatccatccaggcaatcccaagctcaagaagcagctggggcctgggaagaagaatgatgaagtgtc

SEQ ID NO: 177967 - DNA, 120 bp, Artificial Sequence
  ENSG00000110436_9 (sequence is synthesized)
cagcctggatgccttcctggaccttattcgaaatctcttccctgaaaaccttgtccaagcctgctttcaacagattcaaacagtgacgaagaaagtcctggttgcaccaccgccggacga

SEQ ID NO: 177968 - DNA, 120 bp, Artificial Sequence
  ENSG00000110436_10 (sequence is synthesized)
ggaggccaacgcaaccagcgctgttgtctctctgttgaacgagactgtgactgaggtgccggaggagactaagatggttatcaagaagggcctggagttcaaggatgggatgaacgtctt

SEQ ID NO: 177969 - DNA, 120 bp, Artificial Sequence
  ENSG00000110436_11 (sequence is synthesized)
aggtctgatagggtttttcattgcttttggcatcgctatggggaagatgggagatcaggccaagctgatggtggatttcttcaacattttgaatgagattgtaatgaagttagtgatcat

SEQ ID NO: 177970 - DNA, 120 bp, Artificial Sequence
  ENSG00000110436_12 (sequence is synthesized)
gatcatgtggtactctcccctgggtatcgcctgcctgatctgtggaaagatcattgcaatcaaggacttagaagtggttgctaggcaactggggatgtacatggtaacagtgatcatagg

SEQ ID NO: 177971 - DNA, 120 bp, Artificial Sequence
  ENSG00000110436_13 (sequence is synthesized)
cctcatcatccacgggggcatctttctccccttgatttactttgtagtgaccaggaaaaaccccttctccttttttgctggcattttccaagcttggatcactgccctgggcaccgcttc

SEQ ID NO: 177972 - DNA, 120 bp, Artificial Sequence
  ENSG00000110436_14 (sequence is synthesized)
cagtgctggaactttgcctgtcacctttcgttgcctggaagaaaatctggggattgataagcgtgtgactagattcgtccttcctgttggagcaaccattaacatggatggtacagccct

SEQ ID NO: 177973 - DNA, 120 bp, Artificial Sequence
  ENSG00000110436_15 (sequence is synthesized)
ttatgaagcggtagccgccatctttatagcccaaatgaatggtgttgtcctggatggaggacagattgtgactgtaagcctcacagccaccctggcaagcgtcggcgcggccagtatccc

SEQ ID NO: 177974 - DNA, 120 bp, Artificial Sequence
  ENSG00000110436_16 (sequence is synthesized)
cagtgccgggctggtcaccatgctcctcattctgacagccgtgggcctgccaacagaggacatcagcctgctggtggctgtggactggctgctggacaggatgagaacttcagtcaatgt

SEQ ID NO: 177975 - DNA, 120 bp, Artificial Sequence
  ENSG00000110436_17 (sequence is synthesized)
tgtgggtgactcttttggggctgggatagtctatcacctctccaagtctgagctggataccattgactcccagcatcgagtgcatgaagatattgaaatgaccaagactcaatccattta

SEQ ID NO: 177976 - DNA, 120 bp, Artificial Sequence
  ENSG00000110436_18 (sequence is synthesized)
tgatgacatgaagaaccacagggaaagcaactctaatcaatgtgtctatgctgcacacaactctgtcatagtagatgaatgcaaggtaactctggcagccaatggaaagtcagccgactg

SEQ ID NO: 177977 - DNA, 120 bp, Artificial Sequence
  ENSG00000110436_19 (sequence is synthesized)
cagtgttgaggaagaaccttggaaacgtgagaaataaggatatgagtctcagcaaattcttgaataaactccccagcgtatcctatggtaactgatgatataaacaagctttctttaaaa

SEQ ID NO: 177978 - DNA, 120 bp, Artificial Sequence
  ENSG00000110436_20 (sequence is synthesized)
aggaaaaaaatgcgtatatttctatgtttacttaatctgttagccgaggcttagaggagctcttgtgagtcagtgatgacaggcacggtgctgtgtctttgccaaataatgctttataac

SEQ ID NO: 177979 - DNA, 120 bp, Artificial Sequence
  ENSG00000110436_21 (sequence is synthesized)
cgtctaattttctcacttgtattattatttgaatggatgctgctggaggaatcagttggaattgaagacacgttcttgccagcttcccttttctcccaagatgcagaaatgtggatgctc

SEQ ID NO: 177980 - DNA, 120 bp, Artificial Sequence
  ENSG00000110436_22 (sequence is synthesized)
ttttcccaggggacatgagtaaagcagtgtggtacactccagggacttgggaaaatgagcaaacacacagcgtgttattccttaaagtgttctccatgtctcgccttgttatgcacaaga

SEQ ID NO: 177981 - DNA, 120 bp, Artificial Sequence
  ENSG00000110436_23 (sequence is synthesized)
gattctattaaaagcctctagaagtaactccccttaaaatgtctagtaaagcttgcacatggattgattaaaagcaaatacctgtcttagggaattctgacaatttatcttccatatgct

SEQ ID NO: 177982 - DNA, 120 bp, Artificial Sequence
  ENSG00000110436_24 (sequence is synthesized)
ctttaagtaaaatgtttcaaagacagttttaaagggagccatgctcttaaaggcagttgattaaagaacctgttacatctctgccttaccctgtgtaatctgtgagaacaatggttgaaa

SEQ ID NO: 177983 - DNA, 120 bp, Artificial Sequence
  ENSG00000110436_25 (sequence is synthesized)
tttcaaagtatgtttcattattctttctaaatttgataattgattaggaagtattttatatataaccactgtagatattgacaaaagtaagagagcacagtcaacataaagtttaaccag

SEQ ID NO: 177984 - DNA, 120 bp, Artificial Sequence
  ENSG00000110436_26 (sequence is synthesized)
agttaaatattcaaatttatttatgttcggtttgccttcacctggtgtagtaaaatcaaatgagattatttggtatgtgttttgctttgtttaacccaaaagattattttttggttccta

SEQ ID NO: 177985 - DNA, 120 bp, Artificial Sequence
  ENSG00000110436_27 (sequence is synthesized)
aagaaaaagatatttttaatctgtcaattatttcagtcatcatctcatcgtcctagaaagcctggtcattttactgtcctcacacatggaagacacttgtgttggctgtgcctcttttaa

SEQ ID NO: 177986 - DNA, 120 bp, Artificial Sequence
  ENSG00000110436_28 (sequence is synthesized)
tgtcatctcttgatgaaacaaaaatactggtatttatccaatatgttgaaagcgttttgttatcttctatcaaagcacataaaaccagttataggacacagttggaagcagagccagtct

SEQ ID NO: 177987 - DNA, 120 bp, Artificial Sequence
  ENSG00000110436_29 (sequence is synthesized)
tcctcctcagtcttctcagtagaaaggaacagaaaacaaacatctgtgcaaaaccctataaaagtgatattcctatggcagagtccaggcagccttgaacaatgacatggcaacaaagga

SEQ ID NO: 177988 - DNA, 120 bp, Artificial Sequence
  ENSG00000110436_30 (sequence is synthesized)
tggctctgtacaacttcacagatggaatcttgtttaaggctgtgaagttttaaggaataaataatataattggtgtagcacagtgccttgcatgcagtaggcagccaacaaatccttaat

SEQ ID NO: 177989 - DNA, 120 bp, Artificial Sequence
  ENSG00000110436_31 (sequence is synthesized)
gattggtaatgcaagctaaaatttttaatgtctctactatccttttttattgaataacgcacagtattttcctaaggttgctgggtttgggagtaagcttgggacttgaatcattgagaa

SEQ ID NO: 177990 - DNA, 120 bp, Artificial Sequence
  ENSG00000110436_32 (sequence is synthesized)
ataaagcacatttgactctaagaagtatgtagaaccttgtttataggtgagaataggctgtattatatgaaaccagcggagggatgctgagacagtcatggtttatagaatccaaattct

SEQ ID NO: 177991 - DNA, 120 bp, Artificial Sequence
  ENSG00000110436_33 (sequence is synthesized)
ctgagatgagggtgcttatggacctcaaatagcctttcttatctgctccttgtgacttctctcttttaaatcagatacctttgaaacatacaagagacatgagattccagttgtttttgt

SEQ ID NO: 177992 - DNA, 120 bp, Artificial Sequence
  ENSG00000110436_34 (sequence is synthesized)
ctcctaaaccctagtgatttttggataaggatcactactgaacagtattaggcaacttttcatttttgcttttcaaatgacattggtctttatttccagtagatgggcagtaaacagggt

SEQ ID NO: 177993 - DNA, 87 bp, Artificial Sequence
  ENSG00000110436_35 (sequence is synthesized)
cattggtctttatttccagtagatgggcagtaaacagggtcagggtggtcaagggatatgattaagtgtagtagtagaaaatgcatt

SEQ ID NO: 177994 - DNA, 120 bp, Artificial Sequence
  ENSG00000110436_36 (sequence is synthesized)
attctttacagcaaatgttataggttaaggagacagttcctgggtttagctgtgaaactgtttaggattttctttaagtggtgttcccaagagcttttttctggtaagttggaggctata

SEQ ID NO: 177995 - DNA, 120 bp, Artificial Sequence
  ENSG00000110436_37 (sequence is synthesized)
ggcaaagcgtctaggagcttgttgttttttgctatggaaggccagctttgggatctatatacatgggcatgtttctcaatggagtggtcacaggattctcttctcagaactctgcctgaa

SEQ ID NO: 177996 - DNA, 120 bp, Artificial Sequence
  ENSG00000110436_38 (sequence is synthesized)
acctttccggtgtgttttgtcttcaactttttcctagctatcctattagcctgtaaatatgtcagcagacaatgtgtttggaagaaacaaggtgtacaacttcacaaagcaagttttttc

SEQ ID NO: 177997 - DNA, 120 bp, Artificial Sequence
  ENSG00000110436_39 (sequence is synthesized)
tggtctgagacttactgtgtgcaggaagtctcgtgagaatatacttagaaaatcacacttatctggaaattcaataagtcatattaaaaatatacaatttcttgaactcaggactagcct

SEQ ID NO: 177998 - DNA, 120 bp, Artificial Sequence
  ENSG00000110436_40 (sequence is synthesized)
gaaaatccaaaatgcatgtagagttgacatgttgacatatgtctatgtcctctgtttttatttaagcctcatttatttctcccttgccatgcccatttgggattttctttgcccagcata

SEQ ID NO: 177999 - DNA, 120 bp, Artificial Sequence
  ENSG00000110436_41 (sequence is synthesized)
tgtgccataaacagaacaaatggatccagggtatacctctaataacctttatctaaatagaatacatttaacctgtcaattatatgtatagatttatcctaattggttcaacatatatat

SEQ ID NO: 178000 - DNA, 120 bp, Artificial Sequence
  ENSG00000110436_42 (sequence is synthesized)
gaatgcttgtaatagtctgttactatttgataatgcataaatgttatatttatatacagttacagcaggccagaaacatacatacactgcatcctgtaaggtctgtaaatcagggcttcg

SEQ ID NO: 178001 - DNA, 120 bp, Artificial Sequence
  ENSG00000110436_43 (sequence is synthesized)
gcaatgccattttgctatagactcattcatgttttttaggaatcagaatcatttcaggagaaaaccaactaagtagactttaattcttctctttctcattcttgccctttgagaaaccca

SEQ ID NO: 178002 - DNA, 120 bp, Artificial Sequence
  ENSG00000110436_44 (sequence is synthesized)
agtggaatcatcacttaattacttactcaaattcaatgaatcaaatccaatccaatcagtgagaagaatagcttatctttcaaggtaatactttaccttagatctttgagggcatgcttc

SEQ ID NO: 178003 - DNA, 120 bp, Artificial Sequence
  ENSG00000110436_45 (sequence is synthesized)
ccatacaaagagcatcagaaaatcagggcaatcatctagatctcacagatcttcaacataggactctaggttatgagagctgaaccacatagctatcagtttcagtttttacttcctatt

SEQ ID NO: 178004 - DNA, 120 bp, Artificial Sequence
  ENSG00000110436_46 (sequence is synthesized)
gagtgtgtagaaacacagcctatggttttgctgtctgcggaagttaccataccctgtaaaagacaaatatttctttctcctctcgaaccactagtcagcctggatattcatgaaagctga

SEQ ID NO: 178005 - DNA, 120 bp, Artificial Sequence
  ENSG00000110436_47 (sequence is synthesized)
aagaaggggtgccaaaatgcctagctcctggatttagactcatggaatatgagaaaggcttagggaaaattcaagtcatggggagattcctgctaggtgatgccaggaatctcaatgacc

SEQ ID NO: 178006 - DNA, 120 bp, Artificial Sequence
  ENSG00000110436_48 (sequence is synthesized)
ttagagggtctctggtcatttccacttgtgtgtggagaaatacatcatttgcatatgtatctagtcaagaagcccttttggagcaaagtggttgggaaactcatttactgggtccaccaa

SEQ ID NO: 178007 - DNA, 120 bp, Artificial Sequence
  ENSG00000110436_49 (sequence is synthesized)
aggaaacccaattctgccatgtttttgcaaatactacacgtccctttgctctcaatagcaaaagtgatgttatagttttttttacttttgtcagaatcaaggcttcggccacctgtgcaa

SEQ ID NO: 178008 - DNA, 120 bp, Artificial Sequence
  ENSG00000110436_50 (sequence is synthesized)
tattttcccatggaatgcagcagtaaatccaagtaggtatatccgtgctcagagagaattctccatagttctgactcctgaaaaacaagtctcattagctctcatctagtttgatgacta

SEQ ID NO: 178009 - DNA, 120 bp, Artificial Sequence
  ENSG00000110436_51 (sequence is synthesized)
aaagtgcacagcagttataccccagtggaagtgatttttctcacctagctgctctctaactcttacggctatctagttgtctgagctgctggtttgttttacttattctccaactgaact

SEQ ID NO: 178010 - DNA, 120 bp, Artificial Sequence
  ENSG00000110436_52 (sequence is synthesized)
cattccaaaccaagaaaaaggaccaaatgaaattttcagttattatcatacttgctccttgaataagaatgctagagtctggaggcagaagaagactaagttaaaaaaaaaacagcctga

SEQ ID NO: 178011 - DNA, 120 bp, Artificial Sequence
  ENSG00000110436_53 (sequence is synthesized)
aggaattctggagtgagttttgtaagtctaattgtcaaagaagataaatggtctcagtatctgtagtaatttctggttaagcctagagggatcactgagtgccaatccaagcaggtggca

SEQ ID NO: 178012 - DNA, 120 bp, Artificial Sequence
  ENSG00000110436_54 (sequence is synthesized)
ctagaggcagattgttctcctagcatagagtgagtttccagctgctcatgacacattttcttatgattttccctaaaagaaaaccaaattttctactccacctcttcctttcctatcatt

SEQ ID NO: 178013 - DNA, 120 bp, Artificial Sequence
  ENSG00000110436_55 (sequence is synthesized)
ccacttattgttgctgctttgctaacagccagcttagtaagccatcacacaagttagtgtgaggcttggttttaaaatagataacagagaatcttgattaaatagtatccaactttgtag

SEQ ID NO: 178014 - DNA, 120 bp, Artificial Sequence
  ENSG00000110436_56 (sequence is synthesized)
cataacacagctaattcaggcaatgacatagagatgataagaaacaacatggtttggtagagggaacatttgatttagactctgcccatttttagctgtatgacttacataagtcatttt

SEQ ID NO: 178015 - DNA, 120 bp, Artificial Sequence
  ENSG00000110436_57 (sequence is synthesized)
gtgtccaagcctcattttctcccatatgaaaagtgaaggggttggattaaatgactaaaatccccttccagccctatgagcccaatgtattatgatctctgctttgtttccttcttaaga

SEQ ID NO: 178016 - DNA, 120 bp, Artificial Sequence
  ENSG00000110436_58 (sequence is synthesized)
ggcttcctactataaaatgtgacctatttacattttaagttgaagtagcccacaataatgaataatcaatttagatttttctcatctcctttgggagaaattaaattcaagcctctattc

SEQ ID NO: 178017 - DNA, 120 bp, Artificial Sequence
  ENSG00000110436_59 (sequence is synthesized)
atttgatgttttacaacaagcttcaaagttggccatgttcattcacagtttgatattttgagacaccaataaaagttttttaataaaagttcccttgacttaaactcaccttcctaatag

SEQ ID NO: 178018 - DNA, 120 bp, Artificial Sequence
  ENSG00000110436_60 (sequence is synthesized)
aagtagtgatttggctcacggaaaaatgtttccagagtcaacatgagaggactggatgaacctacagcctcactcaagctgttgcatcattgctgctgtagcaacagagccctctctgaa

SEQ ID NO: 178019 - DNA, 120 bp, Artificial Sequence
  ENSG00000110436_61 (sequence is synthesized)
tacccaaaacacacaattttctccaacaattctaattgcccacccagtatgggaatttgagagcctttggtgaataaccttgatcactcttttgaaatttggtacaacacttgcacaatc

SEQ ID NO: 178020 - DNA, 120 bp, Artificial Sequence
  ENSG00000110436_62 (sequence is synthesized)
acggcaactgtttgtaaatatcttttcttctccgccagtatgtagacatgcacacccattcacaagtaagcccgcaaattcattttcacattttcctcttggtttgtttttatcatgggt

SEQ ID NO: 178021 - DNA, 120 bp, Artificial Sequence
  ENSG00000110436_63 (sequence is synthesized)
atcacattgcaggaagagatgctctaacttacaagaatggaattttctgactatcattgccctcttcaaggcctgattagtttgtagggtggatgggatacaatgcatggtctacaaggt

SEQ ID NO: 178022 - DNA, 120 bp, Artificial Sequence
  ENSG00000110436_64 (sequence is synthesized)
ccatgtcaccagccatgatctttaaacaacctcttgcactttctggcactgctgcaatggcccatggtggacacctctgctgtttgtccaaacttctgctaaatagagtagtgttggtat

SEQ ID NO: 178023 - DNA, 120 bp, Artificial Sequence
  ENSG00000110436_65 (sequence is synthesized)
ttgttgtgttgtgaactcctttgttgtcagagaagacttcagctcttcaggtttgcaagggcaagatgtaaagctaggactgaaaggattgggttttgtttttcggccggcttttttcca

SEQ ID NO: 178024 - DNA, 120 bp, Artificial Sequence
  ENSG00000110436_66 (sequence is synthesized)
ttagtgcaaaaaacctgatgcaagggcagcaagataaacacaatttcttcattgacccagataagaacctgtagaaaagtgagagatgcccctaagttcctatttcatttatcctaaata

SEQ ID NO: 178025 - DNA, 120 bp, Artificial Sequence
  ENSG00000110436_67 (sequence is synthesized)
atatcctgaataactactgatcagtttttttctatgtccagccttgcttcactttccaacctccaggccaaatattcattttgatattttacaaaatccttctggtttttacacagggcc

SEQ ID NO: 178026 - DNA, 120 bp, Artificial Sequence
  ENSG00000110436_68 (sequence is synthesized)
cttttgtgctgagaataaaaccagctattggaacagacctcactgctttgtagagtcagaagttgacctagagaatgggtagcaacaggtcctcagtttctctggagacacccccaatcc

SEQ ID NO: 178027 - DNA, 120 bp, Artificial Sequence
  ENSG00000110436_69 (sequence is synthesized)
ttgggtgagtgttgaaacctgacaactgactgttagccttgtcatcatcctcactggagatggagatgttgcagtcggagcctcactccttctggggcactgtttcttctcatggcaacc

SEQ ID NO: 178028 - DNA, 120 bp, Artificial Sequence
  ENSG00000110436_70 (sequence is synthesized)
attttgcctgcctggaaacagcctgttgcctttgctagggggcaaatacacacactagccaaggaagttggtccagcacatctctgaggtttctcccccatggacccatggagcgaattc

SEQ ID NO: 178029 - DNA, 120 bp, Artificial Sequence
  ENSG00000110436_71 (sequence is synthesized)
cctgagataaatgatcagaaagttggctgtctggtggtttaatactccataagagttacttcccttatagaaagtcatcctttggcatctagatttttctacaaatcaccttaactccct

SEQ ID NO: 178030 - DNA, 120 bp, Artificial Sequence
  ENSG00000110436_72 (sequence is synthesized)
ccctttctctttctcctggaaaacctcagcattgcatctccatgttgcacaacacagatcagattatctggtcactatagagatttgtatataaaaaaactacttttttgaggattttgt

SEQ ID NO: 178031 - DNA, 120 bp, Artificial Sequence
  ENSG00000110436_73 (sequence is synthesized)
atattgtttttctatttgttttctacagcttgaggaaagagctggcaaactgtgaatctaacttgatcttgttgccagcagatatattttggcttcctggtaagagtctgtgttaccagg

SEQ ID NO: 178032 - DNA, 120 bp, Artificial Sequence
  ENSG00000110436_74 (sequence is synthesized)
gacaatatattgccctctgatcagtattgcaccctaaatccacaaattcctccagcccagtcttacatttttttaaacaaatcccctagcttgtttgctattatttataaagagcattag

SEQ ID NO: 178033 - DNA, 120 bp, Artificial Sequence
  ENSG00000110436_75 (sequence is synthesized)
aaaatgtatttatagacctggatgttatatgtttaatattaatttagcctttaataatgttataggtttgtaactattcttcagaaattataaagaactcagtgtagactgaattaatct

SEQ ID NO: 178034 - DNA, 120 bp, Artificial Sequence
  ENSG00000110436_76 (sequence is synthesized)
atttagtatctgtaattttgcagacatattttcttacagtattttctatgtaaccacacatgtagaattataactaattagagcacaagaagtttcttcagcaatttagagctaccaatt

SEQ ID NO: 178035 - DNA, 120 bp, Artificial Sequence
  ENSG00000110436_77 (sequence is synthesized)
gtttcttgactatatagtcacatttgacaaatttaagaacccagtctttagtgatgcaataaacaaaatgaaccattaagaacaaggaattgcttaaatcccttagctggtgaggatata

SEQ ID NO: 178036 - DNA, 120 bp, Artificial Sequence
  ENSG00000110436_78 (sequence is synthesized)
catctaaataattcatctttctaactcaaggaatggtgctgattttttaaatgtttgacaccaggccttgtttttccagctgagcattctcattttgcttttctctaagactatcaaaga

SEQ ID NO: 178037 - DNA, 120 bp, Artificial Sequence
  ENSG00000110436_79 (sequence is synthesized)
caaggtattaatagtaggattattcctagatcagaatgtttcatacattcctaaaggtttatgtggaaattggcttaggaaaactttgagtagcagagactgaggatgagtgctagagat

SEQ ID NO: 178038 - DNA, 120 bp, Artificial Sequence
  ENSG00000110436_80 (sequence is synthesized)
gaaatcaggacagatttgttgcagttaattcttgccaagcaaattagtggtaaatgtcacattgttatgtgaattgagcacatatttttaaagaaagtttacaaaaaatttttagaacca

SEQ ID NO: 178039 - DNA, 120 bp, Artificial Sequence
  ENSG00000110436_81 (sequence is synthesized)
actatgaggcaatactgtatcactgggggctgggagtgggggcttagaatcatactgaaattgtttaaaagcagcccaggtagtttctgtcctcaggtgaataacagactatataacttc

SEQ ID NO: 178040 - DNA, 120 bp, Artificial Sequence
  ENSG00000110436_82 (sequence is synthesized)
cccgaaaggtaaaacgatagccactgcagagacgaggtgtcttccttccaccaaatactttctgagatggtggtaggagtagtatttttaccgtggtttaaaaagtagtcagttacatag

SEQ ID NO: 178041 - DNA, 120 bp, Artificial Sequence
  ENSG00000110436_83 (sequence is synthesized)
aaagtgtattggtatgtatttgaacctgctcttcattaaacaaacagattagatgtaccctcgactggcaataattgtatctattttcaagtacagctagctgtcaaagcatgaagctct

SEQ ID NO: 178042 - DNA, 120 bp, Artificial Sequence
  ENSG00000110436_84 (sequence is synthesized)
tgtgtatacacactgacacttggttcacgcatgaagaacagtgcctatgcactttgtgtagctataatgtaggtatctaggtgtaatttcagtgaaatggtgtatagatgtattgtaatt

SEQ ID NO: 178043 - DNA, 120 bp, Artificial Sequence
  ENSG00000110436_85 (sequence is synthesized)
taaatgtatatgttatttttggctattcatctaaatgcagtagacatgttgatcggtgttttgcaaacatttctttttccttcttagataactagtcgtgaatcatttctcctctttctc

SEQ ID NO: 178044 - DNA, 120 bp, Artificial Sequence
  ENSG00000110436_86 (sequence is synthesized)
agtgtggcttgggaatatatatgagtgaagaatttatctgtgaatcctttgtactgatgattgtttgaaagtctgtgtgtgtccagcacctttgtaaatacacaattcagagcagggatg

SEQ ID NO: 178045 - DNA, 120 bp, Artificial Sequence
  ENSG00000110436_87 (sequence is synthesized)
ggctgggtgtgtgtcctggttcttagtgaaaggtcatctcatgtctgtttaatacatggtgaatgcaactgtggaacttttgattacctagacttaggtaggtttagaatgagaacatcc

SEQ ID NO: 178046 - DNA, 120 bp, Artificial Sequence
  ENSG00000110436_88 (sequence is synthesized)
atctacagtcctcctttgcttggtggattgggctcagaggaacaaaaagttagtctgactctgtgcatattagcatcatgtctttagagaaaggtcagcctctctggttgccaaatactc

SEQ ID NO: 178047 - DNA, 120 bp, Artificial Sequence
  ENSG00000110436_89 (sequence is synthesized)
atcatgatgctcatgacttaaaggttctgaggagccttgtctcccttggatttttgagtcagggtacaggaaaaaacattgctgactaactaactgcaaatgcatctgcaggtgaaaccc

SEQ ID NO: 178048 - DNA, 120 bp, Artificial Sequence
  ENSG00000110436_90 (sequence is synthesized)
tacgaaagcacagttctggctataaacttcagagttctctgtaaaaaacttagagcactagaagcacaggaatagtgagtgtacagcttatgcggttgtagaggggcaactgatgaacac

SEQ ID NO: 178049 - DNA, 120 bp, Artificial Sequence
  ENSG00000110436_91 (sequence is synthesized)
aggtcccacatatatgagggagtatgacgttctctacctaatatgttctgtgtgcatgttttgaatgattgaagatgggattaactaatgcaagtttacagttgcctcctaaaacacaca

SEQ ID NO: 178050 - DNA, 120 bp, Artificial Sequence
  ENSG00000110436_92 (sequence is synthesized)
ttctgtataattatcgctaaatacaatgctgtgaggtctatagttcctgtaacccctttctcctccccaaggacagagaagaactagccatgtgctatagggaaccctgagtgccctact

SEQ ID NO: 178051 - DNA, 120 bp, Artificial Sequence
  ENSG00000110436_93 (sequence is synthesized)
cttttcccaagaagggtaaagcctacaatatcatcagggggcatgaagcacattaatttgcagtggctgcttcatatgaggagatatggtggacaggctaatttttccttgaaaatgtgg

SEQ ID NO: 178052 - DNA, 120 bp, Artificial Sequence
  ENSG00000110436_94 (sequence is synthesized)
cttcttcaactcctttcaaatttaggatggaatacttcctgaaataaaactgggctttatgcaggattctctttgaaaattcttgtatgtccagaacaaaagataaaactaattgtattc

SEQ ID NO: 178053 - DNA, 120 bp, Artificial Sequence
  ENSG00000110436_95 (sequence is synthesized)
ctcacattcacaatccccattggtctgaagtcacgtagcacagagcatctatagcacatagtgtttaaagactaatgaatgcaaaaagataaaatcttcaactaatttttgaattgtttc

SEQ ID NO: 178054 - DNA, 120 bp, Artificial Sequence
  ENSG00000110436_96 (sequence is synthesized)
tcatatatgctactagaaaatgccttgttgatgaagcacattttgggtagttgaggtcttttgttttcgcctttagctttctaagctttcttacaatgtggactgattactgtaacattt

SEQ ID NO: 178055 - DNA, 120 bp, Artificial Sequence
  ENSG00000110436_97 (sequence is synthesized)
cacgtgtaaaataactggatattctttatatactggaaataacctgtgaatccaatatttcactaagtgttttaacttttgtgtatatatctctcatcaataaatgtggatttcaattta

SEQ ID NO: 178056 - DNA, 120 bp, Artificial Sequence
  ENSG00000110436_98 (sequence is synthesized)
agagatttattcgagcttcggcgggggagggagcgcagctgggccgcgtttaggctgcaccacccgcgtgtttcagccgctcgactccgctggacctgggacccccagacgtgggaggat

SEQ ID NO: 178057 - DNA, 120 bp, Artificial Sequence
  ENSG00000110436_99 (sequence is synthesized)
aggggattgggcatagtgtgagcagacaccggggtagcagcgcctggagcgcggcgccccaggcccgaggcgggcttgcaggtggtgccggctcggaaggaatgagccaagacagggccc

SEQ ID NO: 178058 - DNA, 120 bp, Artificial Sequence
  ENSG00000110436_100 (sequence is synthesized)
cagccgctcgactccgctggacctgggacccccagacgtgggaggatgggggtgacctagtgtcttccagtagggcaatctctggacatctttatctccccagtacctctccagatcctg

SEQ ID NO: 178059 - DNA, 120 bp, Artificial Sequence
  ENSG00000110436_101 (sequence is synthesized)
tcaccccggcgtccgctttctccctcgcccacagctgccggatagtgctgaagaggagggggcgttccccagaccatggcatctacggaaggacctgaactaagatgtatcgagagatca

SEQ ID NO: 178060 - DNA, 120 bp, Artificial Sequence
  ENSG00000110436_102 (sequence is synthesized)
tagctgggatttaaaataaaactctttaacaagagatcacctagaataactcgcacatatgcatccatgaagaggcccaaggaccacatttggagaaggttagtgctcacaatgaccagg

SEQ ID NO: 178061 - DNA, 120 bp, Artificial Sequence
  ENSG00000110436_103 (sequence is synthesized)
aagggaccgtggatgtgttaaggtaattcactcccaacactgacattcttcactcaacatcagaagcaggctggaaaactaagtggaactagatgaagtttgagattcataaccagggca

SEQ ID NO: 178062 - DNA, 120 bp, Artificial Sequence
  ENSG00000110436_104 (sequence is synthesized)
aaaaaaaaaaccgtaaagccctgcatgtattattgtcacatttattttcctaaagaatcatgtaacccaagcttctgtgagtcccagatcatctaattctgtgtctaacatggcaggaaa

SEQ ID NO: 178063 - DNA, 120 bp, Artificial Sequence
  ENSG00000110436_105 (sequence is synthesized)
tcaacaagtctgatggagaaagagtcaatcagttgcttatttcgtccatgtgatgtgaaacaaccattcgggttcccctatctaccccatttaactaatttgaccagttgtcttgaatat

SEQ ID NO: 178064 - DNA, 64 bp, Artificial Sequence
  ENSG00000110436_106 (sequence is synthesized)
tctaccccatttaactaatttgaccagttgtcttgaatatttcgcccaagaatttgtggttact

SEQ ID NO: 178065 - DNA, 120 bp, Artificial Sequence
  ENSG00000110436_107 (sequence is synthesized)
ggaggccaaggctacacctgggacaactggctgaggttgaaagtgagttgacagcagttgccattcaccagcgggtcctgggtcctcgtcctcatccttgtctttgtcctcttggcttcc

SEQ ID NO: 178066 - DNA, 120 bp, Artificial Sequence
  ENSG00000110436_108 (sequence is synthesized)
gctggcagctggcactcttggtgcccagatggagatttccagctgagcctggctctagaaggagcccaaactgaggcagcctgtgatacccctgtccagtggggaccaggtagaggggaa

SEQ ID NO: 178067 - DNA, 120 bp, Artificial Sequence
  ENSG00000110436_109 (sequence is synthesized)
aacaggtggatcatgagttgctgatctgacccctgccaaggcttcctattcttaaccagatccagggcccatcacaactggaaggaccatcacaactggaaggaccatctaactgggtct

SEQ ID NO: 178068 - DNA, 120 bp, Artificial Sequence
  ENSG00000110436_110 (sequence is synthesized)
ctttaggaacgagtgggatagctgataactccaagatttcagatcaagaagatgctcctcactatttcatgaaccatatttaacagacctggcttgttcagatcattgttttacggtgct

SEQ ID NO: 178069 - DNA, 120 bp, Artificial Sequence
  ENSG00000110436_111 (sequence is synthesized)
tttaaaacacagaaaggatgctagtgaaataacatcatgttctcttttatgattgtactgaaccctcagcttctcaggcaatgctagatttctggatatttctgttgtatgaagatttgg

SEQ ID NO: 178070 - DNA, 60 bp, Artificial Sequence
  ENSG00000110436_112 (sequence is synthesized)
atgctagatttctggatatttctgttgtatgaagatttgggaatatggtggtgttgtaaa

SEQ ID NO: 178071 - DNA, 60 bp, Artificial Sequence
  ENSG00000110436_113 (sequence is synthesized)
gtcttgaattcctgaccttaaatgtaaaacatattttttaagtccttcagattcatctga

SEQ ID NO: 178072 - DNA, 120 bp, Artificial Sequence
  ENSG00000110436_114 (sequence is synthesized)
tttctagcagattacgcatctttacgccaaacatgcagcccgtatttctgtaatatgatgccaataacatgggcaatgtatgtgtccttcctatgtccataccaatgtgatttccactaa

SEQ ID NO: 178073 - DNA, 120 bp, Artificial Sequence
  ENSG00000110436_115 (sequence is synthesized)
acccttgcaggaaagggaatcttctaggacatcagatgagtctgtgggatgaagtgtagcctcccttctccccagagatggagggtggtggtatgaattaagaagtttcccattcactga

SEQ ID NO: 178074 - DNA, 120 bp, Artificial Sequence
  ENSG00000110436_116 (sequence is synthesized)
aaccagaactcctaaatacttattatcatcttgggaggtaaaaagtggttgtgaggcaggaataagaccttagaatgatttctgacagctgtttggttacctcatctaggctcatagtca

SEQ ID NO: 178075 - DNA, 120 bp, Artificial Sequence
  ENSG00000110436_117 (sequence is synthesized)
ggacaatgtcacatgacatgagatgccaattctacacatttctttaattctttcactgcctcgtcagcatcagtatttgctaatgatgtgtgtaaaaaggttctggataaaacagtcaac

SEQ ID NO: 178076 - DNA, 120 bp, Artificial Sequence
  ENSG00000110436_118 (sequence is synthesized)
tactctttaactgacccctcaaagcttaaaaaaatcagaattcttttgtattcttttctatgtagcagttataatagtaataatagcagaatgtaacattgaaaagattataataattct

SEQ ID NO: 178077 - DNA, 120 bp, Artificial Sequence
  ENSG00000110436_119 (sequence is synthesized)
ttttattattaaattataaattagaattactaacttcttgctgtatgctcagtactatttcggttacagtacaggtactaacccatttattactgaggaaacaattattattaaataact

SEQ ID NO: 178078 - DNA, 120 bp, Artificial Sequence
  ENSG00000110436_120 (sequence is synthesized)
taaatttaccaaattcctgctaaatacttaatattattccaattgttttacatgcattagctcatttattcttcacaatagtactgaacaaaaataggtgcttttgttaacccatttacc

SEQ ID NO: 178079 - DNA, 120 bp, Artificial Sequence
  ENSG00000110436_121 (sequence is synthesized)
aaatgagaaaactaagcacagaggttgacttgcccagtgttatggagctgtacggaagtgatacctacatcaatttctttttgacttcagactggattgaatccaggatcctcctattgc

SEQ ID NO: 178080 - DNA, 120 bp, Artificial Sequence
  ENSG00000110436_122 (sequence is synthesized)
aagttgtgtgactttaggcaatttagacactctaagccccgatattctggtgtgtaaaatgggataattctagaatccaggccataggttgctgtgagaattaaggctgtgaccaacagt

SEQ ID NO: 178081 - DNA, 120 bp, Artificial Sequence
  ENSG00000110436_123 (sequence is synthesized)
catgaagcaccttctttgtgctgggaactgtctaagcactttacatggattagtattatagtaatagctgtttgctgttaccaatattatcatcaattcaatccatatcctttgtatctc

SEQ ID NO: 178082 - DNA, 120 bp, Artificial Sequence
  ENSG00000110436_124 (sequence is synthesized)
gctggcagctggcactcttggtgcccagatggagatttccagctgagcctggctctagaaggagcccaaactgaggcagcctgtgatacccctgtccagtggggaccagattcaaacagt

SEQ ID NO: 178083 - DNA, 120 bp, Artificial Sequence
  ENSG00000110436_125 (sequence is synthesized)
attgtgactgtaaggtgagaagggtggggtaaaacacaaaacaacctctaccctgtttcccctccacactaactccatgtgacagaggccacttgaatttcatttctgctggtggaagac

SEQ ID NO: 178084 - DNA, 120 bp, Artificial Sequence
  ENSG00000110436_126 (sequence is synthesized)
aatgaaggtaataaaaaaagagaaactattggcagccttcaaaaggaaaagattgtgacaagaaagaagactcttattaatacctcctgtttgtattgcacatgtcaacttgctttagaa

SEQ ID NO: 178085 - DNA, 120 bp, Artificial Sequence
  ENSG00000110436_127 (sequence is synthesized)
attggatattatttgatttttagcaatcctgtgatggaagcagggtaatttctttgcccatttaatagacaaagaaactcaggcaccaagaggcatggtagtttgtccatggctacagca

SEQ ID NO: 178086 - DNA, 120 bp, Artificial Sequence
  ENSG00000110436_128 (sequence is synthesized)
tggctgtaagtgaggccaacatcagtaatgatttggcaggactgtaactgaggccaacatcagctgactctggatccaatttttgtttcactgaaatatgctcccttcaatattccatca

SEQ ID NO: 178087 - DNA, 120 bp, Artificial Sequence
  ENSG00000110436_129 (sequence is synthesized)
ccagagggtaatggcagaaattacaaaatactggaagagattcctcaatatgacatataagattttattacaaataaatagcacatagttttgtttttactaaagctatttttatttaaa

SEQ ID NO: 178088 - DNA, 120 bp, Artificial Sequence
  ENSG00000110436_130 (sequence is synthesized)
tgtattcatcattttaaaaattcagaaagaacattttcctaagagattgttaaaaatgcattgcctcaccataaacttaaagatcacacctactagccaagccaacactctgtttcttgc

SEQ ID NO: 178089 - DNA, 120 bp, Artificial Sequence
  ENSG00000110436_131 (sequence is synthesized)
gagctgaagcgggtgctccggggagtgaggagggagcgccaggggctgctccagggaggcggagacggaggggcatcccgggtctccgcgcggtcgcctgcgcttcaccccgcacgggct

SEQ ID NO: 178090 - DNA, 120 bp, Artificial Sequence
  ENSG00000110436_132 (sequence is synthesized)
cactaccccacccccagccccctcttctctgggactctcctggctctgtggggcagctggtctcagcagccagcccttccaccagaaaggaagccacgtggtttgcctagggccctgtct

SEQ ID NO: 178091 - DNA, 120 bp, Artificial Sequence
  ENSG00000110436_133 (sequence is synthesized)
gcccaggcttcagtgatataattttcctccttacctcctctagccattcattctcctttggattctagtagttcttaaattttttgcaaataaatatcttgtgagagtgttggcatgtgg

SEQ ID NO: 178092 - DNA, 120 bp, Artificial Sequence
  ENSG00000110436_134 (sequence is synthesized)
attcctatacttatggagactttgctttgggccacctgaaatgaggtcctgcaatctacatattagcaaacctaggtggttccaaagcattggtccatggaccacatttagagaaccgcc

SEQ ID NO: 178093 - DNA, 120 bp, Artificial Sequence
  ENSG00000110436_135 (sequence is synthesized)
tgcatcaagataagcacaagtattgcacaaaaccccactaaaatggctcccaaggtctgagcttcttcagacacatcattaatttaggtaatttgggcacattagctaatgaggtcagtg

SEQ ID NO: 178094 - DNA, 120 bp, Artificial Sequence
  ENSG00000110436_136 (sequence is synthesized)
tggaagatgtttgccccaatgccttgatctgctccagctccatcttgcaagtcctcttcctcctctgcttcaggcctcacccaggcgatggttgttctcaggctattgatacaatcttgg

SEQ ID NO: 178095 - DNA, 120 bp, Artificial Sequence
  ENSG00000110436_137 (sequence is synthesized)
tcttaagattcccgtgagggtttattgaaaatggggcaatatacagtttcttgtaatgacaaccacaccatttcctttctcaatccctcccttgttctgcagctctcacttaggtttcac

SEQ ID NO: 178096 - DNA, 120 bp, Artificial Sequence
  ENSG00000110436_138 (sequence is synthesized)
agagaagcagtgaacaacttgtccttcccacccacccacctgcacacacctacctgaacccctccattccatggcctttcctttgagacagatgccttggttgccagtggcccaggatca

SEQ ID NO: 178097 - DNA, 120 bp, Artificial Sequence
  ENSG00000110436_139 (sequence is synthesized)
ggactgggagctcgccacagctaagttcacttaataagaaaccacaggcatggttaggttttccaaaggttacccgccatgtaaccacatctaattcatcacaggacttgaagaagttgg

SEQ ID NO: 178098 - DNA, 120 bp, Artificial Sequence
  ENSG00000110436_140 (sequence is synthesized)
ggaactccatccctcccttatggccagtggtactatgacccaacttgtggtttctgaaagggtcattcatgttggccacccatttgcagagatataaaatttttcttctgggaactttga

SEQ ID NO: 178099 - DNA, 120 bp, Artificial Sequence
  ENSG00000110436_141 (sequence is synthesized)
gtctgtaaagtgaaagatccctgccagcatctctgcctaaattgtttcctccaaaattatatatcttagagtccattcttgagctcccataagatcagcaatctaaaagctatgtaaaag

SEQ ID NO: 178100 - DNA, 120 bp, Artificial Sequence
  ENSG00000110436_142 (sequence is synthesized)
gacatagaagtcaaggacaagccttgagagtgagccatgaggaaattattggaagccaaagaaaatagatgggaagaaaaaaatagaattcacactagcttggtcaattaaatgttcatt

SEQ ID NO: 178101 - DNA, 120 bp, Artificial Sequence
  ENSG00000110436_143 (sequence is synthesized)
ttatcttgcctccagttacaatgagaagacacacattaaatgccatgccatgtggccaagcttgagctgggcaaggaggcaatatctgtccttgtgggttctttctttcttttttctttt

SEQ ID NO: 178102 - DNA, 120 bp, Artificial Sequence
  ENSG00000110436_144 (sequence is synthesized)
cctcccaaagtgctgggattataggcacaagccactgtgcccagccccttatagtttatttctataaacaatttctggctccaagtagacaaatagcctcaaataagttggagtcaagtt

SEQ ID NO: 178103 - DNA, 120 bp, Artificial Sequence
  ENSG00000110436_145 (sequence is synthesized)
acaaatagcctcaaataagttggagtcaagttgccagtgtgcactttcataaagccttgagttctccttgactctttgggtgctgactttttaagaatagttggaggtatagaaagttct

SEQ ID NO: 178104 - DNA, 120 bp, Artificial Sequence
  ENSG00000110436_146 (sequence is synthesized)
cttgctagtcatcaaaatcagcttcacttatctaatgttgtttttgttacacattgttcatcatttaatactgcagaagcatgagaaaggtcaatgttgctgaaataagtgtctagagta

SEQ ID NO: 178105 - DNA, 120 bp, Artificial Sequence
  ENSG00000110436_147 (sequence is synthesized)
ggttctgctgggactgtgagtactgcctcctagggatgcacaggtggcaaggttgcaaccaagatcttagctaatccccatggcaactccctcactcttccttcctccttcccgctcaca

SEQ ID NO: 178106 - DNA, 120 bp, Artificial Sequence
  ENSG00000110436_148 (sequence is synthesized)
tttactgaggacctatttgagaaccaaagaagaaaaagatgaaatatttgaaggcgtcacagtctagtggaggaatcagagagattatgacacaaggttaaaagtacagtaataaggaac

SEQ ID NO: 178107 - DNA, 120 bp, Artificial Sequence
  ENSG00000110436_149 (sequence is synthesized)
cagctactgatgcattcaaagaatctcagaacattatattgaatgaatagagccagaaacaaaggagtatgtactgtatgattccatttatatgaagctctaagaaaagacgatgtacca

SEQ ID NO: 178108 - DNA, 76 bp, Artificial Sequence
  ENSG00000110436_150 (sequence is synthesized)
attccatttatatgaagctctaagaaaagacgatgtaccacatatcaatagaaagagatcagtggaggccgaggca

SEQ ID NO: 178109 - DNA, 120 bp, Artificial Sequence
  ENSG00000110436_151 (sequence is synthesized)
gaaagaccctgattttcctctgtatctggactggttgacggtcaggtgggctgattggttctccctgctacagtggtagaattcagcgctgtacctaggtaagaagggttttggagggtg

SEQ ID NO: 178110 - DNA, 120 bp, Artificial Sequence
  ENSG00000110436_152 (sequence is synthesized)
tatgggaaggtacacacagggtagagatgatagcacaggctttgtggtcagactggcaatggttcaaatcccagctctgtgacttcttgcccaggtgggtggcctcaggcaaattactta

SEQ ID NO: 178111 - DNA, 120 bp, Artificial Sequence
  ENSG00000110436_153 (sequence is synthesized)
atcgcccagagcctcattggtaaaacagggtcataaaactctcacagaattgtgactggcagattataagcacccaatgctcttttaggggttcacaaagtttttctgcaaagagccaga

SEQ ID NO: 178112 - DNA, 120 bp, Artificial Sequence
  ENSG00000110436_154 (sequence is synthesized)
caataaaagtttatttacaaaaatagatggcaagctggatttgacctgtggaccatggttgactgaccctgctcgtgatcatccccatccaacagaaatatagcagaggccacagataga

SEQ ID NO: 178113 - DNA, 120 bp, Artificial Sequence
  ENSG00000110436_155 (sequence is synthesized)
atactagattttcttgtagccacactataaaaggaaagagaaacaggtgaaattagttttaagaatagattttatgcccgggcgtggtggctcacacctgtaagctcagcaccatcggag

SEQ ID NO: 178114 - DNA, 120 bp, Artificial Sequence
  ENSG00000110436_156 (sequence is synthesized)
agaatttgtggctactgattttcaaatattttattcctcaaattaaacatcaagagaaatccccagcatcatctgatgtacctagcacaagtagtcctccttgctatatatcatatattg

SEQ ID NO: 178115 - DNA, 120 bp, Artificial Sequence
  ENSG00000110436_157 (sequence is synthesized)
atttctcatttctcaaaaccctcccatcacaaagttcaataagaacacttggcacacattactaagatcttttggaaaaggcgaatgatttgaatttttgtctccttctaggaacttctg

SEQ ID NO: 178116 - DNA, 120 bp, Artificial Sequence
  ENSG00000110436_158 (sequence is synthesized)
agccttctggtgaacatttttgctggtttgcaactatattggaaatacgatctcacattaaatttttcagataaatgcatgctatttgtttgcatgcctaatttgccacttaaatcatta

SEQ ID NO: 178117 - DNA, 120 bp, Artificial Sequence
  ENSG00000110436_159 (sequence is synthesized)
gtttagttttagatgttttctaaagggagtgtaacaggatatttttcaataaacatttcacctgtgatttggaaaatgctatcacaaaatattactctttgaagattttggtaaatacat

SEQ ID NO: 178118 - DNA, 120 bp, Artificial Sequence
  ENSG00000110436_160 (sequence is synthesized)
tttcaaaagtaggagaagcagcttttacaaagtaaatggtatgttaggtgagactttttctaacaaaattcggccaagtctttgacctcgacacgaacctctaatggattatttttcccc

SEQ ID NO: 178119 - DNA, 120 bp, Artificial Sequence
  ENSG00000110436_161 (sequence is synthesized)
agagttaacttggcattgatgaagaatcagttccccctttgttacttagttccagtacctagaaagccaaagaggaccccagagatatgtagagaaaaatcattttttggactatcatct

SEQ ID NO: 178120 - DNA, 120 bp, Artificial Sequence
  ENSG00000110436_162 (sequence is synthesized)
ttttggactatcatcttggactgaatctaacaaaaacaaaccaaaaaatgaacaagaagaaatacataagaaacgtcttacaattaggctgggcgcagtagctcatgcttgtaatcccag

SEQ ID NO: 178121 - DNA, 120 bp, Artificial Sequence
  ENSG00000110436_163 (sequence is synthesized)
atagtgctgaagaggagggggcgttccccagaccatggcatctacggaaggcagccgtcctggaattagaacacagacttcctgacttccagtcctatcctggcccaataccatcatgat

SEQ ID NO: 178122 - DNA, 120 bp, Artificial Sequence
  ENSG00000110436_164 (sequence is synthesized)
tcaggatagctatacactgtattctttaaccagcccctcgaatggactggaagaagctatagaaaagaggtttgtgaagtctggagtgcctcaccagcaggaccagaaagtaattctgtg

SEQ ID NO: 178123 - DNA, 120 bp, Artificial Sequence
  ENSG00000110436_165 (sequence is synthesized)
atttagcaaatgaacgctgtgaagacacaatgaatagaagaagggactgaaggagactttggaggctgtcaccctttaagtttcatttgcaggatctgtgacaacacggtatctgtcaga

SEQ ID NO: 178124 - DNA, 120 bp, Artificial Sequence
  ENSG00000110436_166 (sequence is synthesized)
gagagactgacatcttggttggtaaacatctttgacacagttaaggcaggtcttacaggatctaggaagggtggagggatttgcaggctgttggaaatgccagaaagtcttagagtttca

SEQ ID NO: 178125 - DNA, 120 bp, Artificial Sequence
  ENSG00000110436_167 (sequence is synthesized)
ggcccttttaaagcaggggtggcattcttcaaggagctgggggaaaccctggatgtgggacaatcaaagctgaaatctctgcttcctggttcttggtgctcgagctgatgcaacagggtg

SEQ ID NO: 178126 - DNA, 120 bp, Artificial Sequence
  ENSG00000110436_168 (sequence is synthesized)
tccacttgggtaagaagaaagtcagatttctttcaaacattactgcgtttgtcacgtctccatattctaatgctttcataaatccagtctctccattatgtggaatatcagtcgtgggtt

SEQ ID NO: 178127 - DNA, 120 bp, Artificial Sequence
  ENSG00000110436_169 (sequence is synthesized)
tctgtcatagtagatgaatgcaagccaatggaaagtcagccgactgcagtgttgaggaagaaccttggaaacgtgagaaataaggatatgagtctcagcaaattcttgaataaactcccc

SEQ ID NO: 178128 - DNA, 120 bp, Artificial Sequence
  ENSG00000110436_170 (sequence is synthesized)
cctgggagtcatcagcggggttcgaacaagatttgctggttccggagcttggatggaaagagctgaatatcccctctattttgagtaggaatagatgattgaatactccgcatacaaatg

SEQ ID NO: 178129 - DNA, 120 bp, Artificial Sequence
  ENSG00000110436_171 (sequence is synthesized)
ggaaaccacccatcaagaggcaattgcacaagtttattaattgactcagtgaaaatgattcaaattattagaaattcagatgtacctagaggacatgatgcattctcatggaaagctggt

SEQ ID NO: 178130 - DNA, 120 bp, Artificial Sequence
  ENSG00000110436_172 (sequence is synthesized)
cccccagacgtgggaggatggggtgggtgtgcctgcctactggttgacggtcaggtgggctgattggttctccctgctacagtggtagaattcagcgctgtacctagtgccaacaatatg

SEQ ID NO: 178131 - DNA, 120 bp, Artificial Sequence
  ENSG00000110442_0 (sequence is synthesized)
gacttcggcaagatggctgccctgacagcggagcattttgcagcactccagagcctgctcaaggcctcctcgaaagatgttgtcagacagctgtgtcaagaaagcttttccagttcagcc

SEQ ID NO: 178132 - DNA, 120 bp, Artificial Sequence
  ENSG00000110442_1 (sequence is synthesized)
cttggcttgaaaaaactcttggatgttacatgttccagcttgtctgtgacccaggaggaggcagaggaactgctccaggctctgcaccgcctcactaggctggtggcattccgtgacctg

SEQ ID NO: 178133 - DNA, 120 bp, Artificial Sequence
  ENSG00000110442_2 (sequence is synthesized)
tcctctgccgaggcaattctggctctctttccagaaaatttccaccaaaacctcaaaaacctgctgacaaagatcatcctagaacatgtgtctacttggagaaccgaagcccaggcaaat

SEQ ID NO: 178134 - DNA, 120 bp, Artificial Sequence
  ENSG00000110442_3 (sequence is synthesized)
cagatctctctgccacgcctggtcgatctggactggagagtggatatcaaaacctcctcagacagcatcagccgcatggccgtccccacctgcctgctccagatgaagatccaagaagat

SEQ ID NO: 178135 - DNA, 120 bp, Artificial Sequence
  ENSG00000110442_4 (sequence is synthesized)
cccagcctatgcggagacaaaccctccatctcagctgtcaccgtggagctgagcaaagaaacactggacaccatgttagatggcctgggccgcatccgagaccaactctctgccgtggcc

SEQ ID NO: 178136 - DNA, 120 bp, Artificial Sequence
  ENSG00000110442_5 (sequence is synthesized)
agtaaatgatccagccagctgccagggccactgccatgacccagctgctcatgagtgataaatgtctccccatatgcaggctgcccttgcagctgcagctgacaacaggcaggatggtgg

SEQ ID NO: 178137 - DNA, 120 bp, Artificial Sequence
  ENSG00000110442_6 (sequence is synthesized)
ggacagcagggggctactgccatccagaagttacagttggattgggaagaagcagccagatcccccgctgttctcactcatcttctttctctttctgaagctggagagcagaagccccca

SEQ ID NO: 178138 - DNA, 120 bp, Artificial Sequence
  ENSG00000110442_7 (sequence is synthesized)
tctttgaaaagctcctgagtgcaacttaattaccaccatggcagggtgagggaacatttgcatcgtcagctgcctctgcatagctgtttgagaaattcaggcccaaatcatgcagcctat

SEQ ID NO: 178139 - DNA, 120 bp, Artificial Sequence
  ENSG00000110442_8 (sequence is synthesized)
ccaataagtaagtttatttccaacattagctctaattagttcatttccaatcccagaacacatggagggaatcggacaggtgatgccagcagttcctgctcctctgtcagggaagccagg

SEQ ID NO: 178140 - DNA, 120 bp, Artificial Sequence
  ENSG00000110442_9 (sequence is synthesized)
cagagcccacagagcatggtccatccagagtgttccctgagccccctccaccatactggaacccctcttcagtgtaggaagtctgaaatgggtgctaattcccttcttcatgaaaccagg

SEQ ID NO: 178141 - DNA, 120 bp, Artificial Sequence
  ENSG00000110442_10 (sequence is synthesized)
gccctcttccttcatctaatgcagccactcctaggtgaagaagtgggaataattggaactaaacaacagttctaaaacttccatgatttttgtagcttcttttgtccccaagttgaagct

SEQ ID NO: 178142 - DNA, 120 bp, Artificial Sequence
  ENSG00000110442_11 (sequence is synthesized)
tttggccagtaccttctctagtttttaaagatgatcccaacttcctaattcccagctaagcccttgacccatggtgtgacatgaaatcaggcaattgaatcgcaccactttctgtgtttt

SEQ ID NO: 178143 - DNA, 62 bp, Artificial Sequence
  ENSG00000110442_12 (sequence is synthesized)
aaggactcgtctcaaaaaataaaaataaataaaaaggaagcaaggctaatcatcagtatgtg

SEQ ID NO: 178144 - DNA, 120 bp, Artificial Sequence
  ENSG00000110442_13 (sequence is synthesized)
aaataaataaaaaggaagcaaggctaatcatcagtatgtgcttgttacaagagctatgatgaaggcactccttcgagtttaaccaaatgagatcatctctgtcatgtgcctcacgcctca

SEQ ID NO: 178145 - DNA, 120 bp, Artificial Sequence
  ENSG00000110442_14 (sequence is synthesized)
cagggactccatgtgtgaagattcccccttcactcaccagatcatctccatggcaacagcttgcagcctgctcttggagtgctttgttttggcagcttctctgctagtttgtgtatggag

SEQ ID NO: 178146 - DNA, 120 bp, Artificial Sequence
  ENSG00000110442_15 (sequence is synthesized)
tgaatggaggaggtaaatccacagattaagaatatgctgtcaggagtcaggcagccaaggtcagaagccagctctgcttctcagtggtaaggtgcttgacttctacatctcaattttcac

SEQ ID NO: 178147 - DNA, 120 bp, Artificial Sequence
  ENSG00000110442_16 (sequence is synthesized)
ccactttgtacttttttcctaaattaaatgagtataatagtagtacctacttgataggacttttgtgaaaattaaatgatataatgcacctaaaaacagtactgttacaactaataggaa

SEQ ID NO: 178148 - DNA, 120 bp, Artificial Sequence
  ENSG00000110442_17 (sequence is synthesized)
aggctttgattattaatggatgagagtagaaagcttggtgcatttattgtctcatctactataacagagttggtgtgagaattagtattatcatcctccctttattgaccaggaaaccag

SEQ ID NO: 178149 - DNA, 120 bp, Artificial Sequence
  ENSG00000110442_18 (sequence is synthesized)
ctcattgagattgagtcatctgctggtaaatggtctcattaagaggtggacccatatttctctagctttctctttacaacacaggactttgcaaggaacatataattctgtgactagcgc

SEQ ID NO: 178150 - DNA, 120 bp, Artificial Sequence
  ENSG00000110442_19 (sequence is synthesized)
catttggaaaatgttgaaactgaagtagagatgagagatcttacgtctgcctacccagtgagatacgaggaaggtcaagggaaaaaaaattccaagctcttctttatctgctataggaaa

SEQ ID NO: 178151 - DNA, 120 bp, Artificial Sequence
  ENSG00000110442_20 (sequence is synthesized)
tgaacattcaattttttgcatgcaacgacaagaggtcaaggaccccagaagccagcccgctacttccaagttgagagcccctggtcataccctccagttgagctcagatttgtcacaaat

SEQ ID NO: 178152 - DNA, 120 bp, Artificial Sequence
  ENSG00000110442_21 (sequence is synthesized)
ttacccctctcctttccttccattccccatgacctgcagagagagatgtcagataccttcctcttggcctcccatgggcatccataagaaacttacttgaagcaagaagcccagtatagg

SEQ ID NO: 178153 - DNA, 120 bp, Artificial Sequence
  ENSG00000110442_22 (sequence is synthesized)
tgtctgggcagttggacatttcctctagccagatctgtccgaatagagccatctgggtacatgacgcagagggcatttgataaataactggaaaagtcaataaatctttgctacccttca

SEQ ID NO: 178154 - DNA, 120 bp, Artificial Sequence
  ENSG00000110442_23 (sequence is synthesized)
tacatttcttattatttttattctcattctagaagtagtaatatgctcattgttgaaaacttaggaagcccggataagcaaaaagaaaataagacacctgtaattccaccagccagatgt

SEQ ID NO: 178155 - DNA, 120 bp, Artificial Sequence
  ENSG00000110442_24 (sequence is synthesized)
tagtggtagtcttttcttaatggaaagccttttaaaacatgttttttttttcctctttacacctctgtaagaggttgatgttttgtttttgtttttacaaaatggatcatgctgttttgt

SEQ ID NO: 178156 - DNA, 120 bp, Artificial Sequence
  ENSG00000110442_25 (sequence is synthesized)
tgggtaaggcacatgactcgctgtgggtctcgggctttgtttatctgtctttctcagagacttgctgcatagaccaatgcattgcatgtgtgcagtcctcagagccgcctgtcgtacaat

SEQ ID NO: 178157 - DNA, 120 bp, Artificial Sequence
  ENSG00000110442_26 (sequence is synthesized)
tccctaattctactttttaacttttttctgattataaacattattatataggcatgttgttaaaaaacagaaatatccaaagcagaaagtgaagtacttaaaataatggtatttcaattg

SEQ ID NO: 178158 - DNA, 120 bp, Artificial Sequence
  ENSG00000110442_27 (sequence is synthesized)
tgaaaaaaattaacaataatcaaaaatagtttgaaaggctgaatgaaagtccatgtttaataaatggtcattacagtaactctgagccagccacagtgctggagcagttaatctgctcaa

SEQ ID NO: 178159 - DNA, 120 bp, Artificial Sequence
  ENSG00000110442_28 (sequence is synthesized)
gtcatttagtcctcccttcagccctgtgagctaggctgatgagcaaacagaagctcagaggttagataagtggtagcacctgtattcaagtcaagtccatttatctctaaaacaagagct

SEQ ID NO: 178160 - DNA, 120 bp, Artificial Sequence
  ENSG00000110442_29 (sequence is synthesized)
cttaccactattgctgaagctacacatttcctaaggctcaggccatgatttcttctctgctttatgtcacttctcattctgccctaacatctggagggctgggtgttcaggtagaagcct

SEQ ID NO: 178161 - DNA, 120 bp, Artificial Sequence
  ENSG00000110442_30 (sequence is synthesized)
agatggcctgggccgcatccgagaccaactctctgccgtggccactggagagcagaagcccccatctttgaaaagctcctgagtgcaacttaattaccaccatggcaggaacacatggag

SEQ ID NO: 178162 - DNA, 120 bp, Artificial Sequence
  ENSG00000110442_31 (sequence is synthesized)
accgaaagctcatctgcagtcggagaggccatctagaccccagaggttgggaagaagatgagaaaatcttggtacctgatgccattcccactcttcctccttatgtattcatcaggacgg

SEQ ID NO: 178163 - DNA, 120 bp, Artificial Sequence
  ENSG00000110442_32 (sequence is synthesized)
accaggcttgtgttaaggtgtacccgggatttgttttaatcaggaatggcaagactcacaggcacagaggtgattgtcatgaggaagaagtctgtgctcacagaaccctagaaacaggag

SEQ ID NO: 178164 - DNA, 120 bp, Artificial Sequence
  ENSG00000110442_33 (sequence is synthesized)
gcatggcatgccacgtagggccacatggggaaggaccatctctctggggcttttggggaagttggaaacaggtgctctttttccttcccgttgatcattaaacattgagtccctcgtctc

SEQ ID NO: 178165 - DNA, 120 bp, Artificial Sequence
  ENSG00000110442_34 (sequence is synthesized)
tagggaggggacttcttatttacccctgggttgggaaataaatcatgacagcagcaatcagacaacagcagagaagtgtgtgatctgaacatctgtgggatgccgtgatccctggaggag

SEQ ID NO: 178166 - DNA, 120 bp, Artificial Sequence
  ENSG00000110442_35 (sequence is synthesized)
cccttcacactgatcccatgaatggccctcaacacatgcacgagcaaggagcaagcgttccgacaagtgctctcgcagtactccaaggaagaggctgaaatttgactcagcaaagcccag

SEQ ID NO: 178167 - DNA, 120 bp, Artificial Sequence
  ENSG00000110442_36 (sequence is synthesized)
agggaaaagggaaagtggtttatgagtgtcctcaggagctatcacatcctagacactaggcactttcatctaaatgactctgatgaccccagtgttgtcagtgctcctcagtcagtggat

SEQ ID NO: 178168 - DNA, 120 bp, Artificial Sequence
  ENSG00000110442_37 (sequence is synthesized)
cagacttgcccttggcatgaggaggatagtcagtcactcctggtccccttcagagggaccttttgagaaaaaaatatagccaattacttatgtaaccccaggcactctgtcctgaatcct

SEQ ID NO: 178169 - DNA, 120 bp, Artificial Sequence
  ENSG00000110442_38 (sequence is synthesized)
gggcattccaccaccgtggagaaataggttagtcccagacacatgacaccagcctatgaggcagctccgggactcagctgctcgaacgagcgtcgcaatttcaagttgggaattaacggc

SEQ ID NO: 178170 - DNA, 120 bp, Artificial Sequence
  ENSG00000110442_39 (sequence is synthesized)
aacacctgacaacacaacacaatgcagtagccatcaagcaggaagcccgagcactccactctcagctgtaccttgccaagcagtggctgctgtctgtcgggagcaggtagcaagtcaaga

SEQ ID NO: 178171 - DNA, 120 bp, Artificial Sequence
  ENSG00000110442_40 (sequence is synthesized)
aaggcacacagacgtggaaatgattatcatgaaggaagaagtttgtgctcatagagctctagaagcaggaggtgtggcacacggggccacatggttcggaaggataagtgttggtcagga

SEQ ID NO: 178172 - DNA, 120 bp, Artificial Sequence
  ENSG00000110442_41 (sequence is synthesized)
ggcagggagaggggagagcatggccccaagcctttattggggttttcataggaaggaatggttaagacaaggtacatatgctggctaagtttagggttggatagtttgaataatttggat

SEQ ID NO: 178173 - DNA, 120 bp, Artificial Sequence
  ENSG00000110442_42 (sequence is synthesized)
gggttcagggccatagggatggtcccgagttgtctgaccctagggtgacttagggcagagagaatattggcttggtgtgtgagagtttggttttaaaaagaagaagatggttgggagtgt

SEQ ID NO: 178174 - DNA, 120 bp, Artificial Sequence
  ENSG00000110442_43 (sequence is synthesized)
gggctccagattagctggtttgtacatcaaaggcacgctcccaggagaattgtttgccaccccgcccccgacccgtgtgtctctctctctctctctctctctctctaggaatttgctagc

SEQ ID NO: 178175 - DNA, 120 bp, Artificial Sequence
  ENSG00000110442_44 (sequence is synthesized)
cctgaatggggtgacctctttggatcaaggacccaaatgttagcgcatgaagaatacagaaaataagaacatatactcaatacaaggttatgctgcagtaacaaacaatcccaaggttgt

SEQ ID NO: 178176 - DNA, 120 bp, Artificial Sequence
  ENSG00000110442_45 (sequence is synthesized)
agtggctttttacacaactaaagtttctttgccaatgctgcacattcactgcaggttggaggaggagggcgggtagtctgctcactgtaatcactaagggcccaggatgatggaagcttc

SEQ ID NO: 178177 - DNA, 120 bp, Artificial Sequence
  ENSG00000110442_46 (sequence is synthesized)
atctcaacacatgcctccacaatcaccaaggcagggaaagggactatggcaaattgcacctgtgatcttaaagctcctgcccagaagtaacagtcaaatcatatgggcacacctaaccat

SEQ ID NO: 178178 - DNA, 120 bp, Artificial Sequence
  ENSG00000110442_47 (sequence is synthesized)
gaaagggcagagaagctgaatcctaccatgtgccaggatggaagagaagtgggatatttgtgattagttctgatgactactgacacctgtcattggaaccaaaagattcctcttttgctt

SEQ ID NO: 178179 - DNA, 120 bp, Artificial Sequence
  ENSG00000110442_48 (sequence is synthesized)
gtcattggaaccaaaagattcctcttttgcttaagcaaaaggaagaagaattgttcaaaagaattgtggccaggtgcagtggcttgcgcctgcaatcctagcactttgggaggccaaggc

SEQ ID NO: 178180 - DNA, 120 bp, Artificial Sequence
  ENSG00000110442_49 (sequence is synthesized)
cacttgaggccaagcgtttgagactggcctgggcaagatggtgaaactctgtcgctacataaaatacaaatatcagctgggcatgctggtgtatgcctgtagtcccagctattcaggagg

SEQ ID NO: 178181 - DNA, 120 bp, Artificial Sequence
  ENSG00000110442_50 (sequence is synthesized)
gcttccctgggtgccacggtcatgtgacttcggcaagatggctgccctgacagcggagcattttgcagcactccagagcctgctcaagctgctccaggctctgcaccgcctcactaggct

SEQ ID NO: 178182 - DNA, 120 bp, Artificial Sequence
  ENSG00000110446_0 (sequence is synthesized)
agagtttctcaagaagccgagagagggacagaggctgagcctggggggagggctgcaggggactgagaggggagtgtaggcagtgggggtgagggggacagggaggaggtggagaagacg

SEQ ID NO: 178183 - DNA, 120 bp, Artificial Sequence
  ENSG00000110446_1 (sequence is synthesized)
gcaaggggcagcagggtgactggggcagagggagcccccaccccacgcccagggcaggccaggagtcataaggagaggggacaacaggaaggggcgacaaacggggaggggaaagggagg

SEQ ID NO: 178184 - DNA, 120 bp, Artificial Sequence
  ENSG00000110446_2 (sequence is synthesized)
cggaggggcagcgaagtgaagcagggagggtcgcagtgtgaacaagagtgcgaggaagggtcaaggtggagggaggagaggggagagttagggagaaacagctgcaggagaggcgcgggg

SEQ ID NO: 178185 - DNA, 120 bp, Artificial Sequence
  ENSG00000110446_3 (sequence is synthesized)
aggaagccttaggggtgggggaagggagaggggagttgagaattagggaggaggtggtagagtccgggtagtgagcggagggacaggaagggtagggcaagaaagggagaggggacagga

SEQ ID NO: 178186 - DNA, 120 bp, Artificial Sequence
  ENSG00000110446_4 (sequence is synthesized)
gggaagggtgggccaaagcggtgagaaaggagggccagccagttgggtgggggagagggccgaggcccgggggcaggagtgcagggctctgaggcggggagaggagaggagagaagagcc

SEQ ID NO: 178187 - DNA, 80 bp, Artificial Sequence
  ENSG00000110446_5 (sequence is synthesized)
gaggagaggagagaagagccgcggggggcccagcccggagccaggatgcccgcgccgcgcgcccgggagcagccccgcgt

SEQ ID NO: 178188 - DNA, 120 bp, Artificial Sequence
  ENSG00000110446_6 (sequence is synthesized)
ggcggcgggcgcggccgtgctgctggtggagatgctggagcgcgccgccttcttcggcgtcaccgccaacctcgtgctgtacctcaacagcaccaacttcaactggaccggcgagcaggc

SEQ ID NO: 178189 - DNA, 120 bp, Artificial Sequence
  ENSG00000110446_7 (sequence is synthesized)
gacgcgcgccgcgctggtattcctgggcgcctcctacctgctggcgcccgtgggcggctggctggccgacgtgtacctgggccgctaccgcgcggtcgcgctcagcctgctgctctacct

SEQ ID NO: 178190 - DNA, 120 bp, Artificial Sequence
  ENSG00000110446_8 (sequence is synthesized)
ctctacctggccgcctcgggcctgctgcccgccaccgccttccccgacggccgcagctccttctgcggagagatgcccgcgtcgccgctgggacctgcctgcccctcggccggctgcccg

SEQ ID NO: 178191 - DNA, 120 bp, Artificial Sequence
  ENSG00000110446_9 (sequence is synthesized)
gcccagcccctactgcgcgcccgtcctctacgcgggcctgctgctactcggcctggccgccagctccgtccggagcaacctcacctccttcggtgccgaccaggtgatggatctcggccg

SEQ ID NO: 178192 - DNA, 120 bp, Artificial Sequence
  ENSG00000110446_10 (sequence is synthesized)
ctgggctacagcatccctgtgggctgtgtgggcctggcatttttcatcttcctctttgccacccccgtcttcatcaccaagcccccgatgggcagccaagtgtcctctatgcttaagctc

SEQ ID NO: 178193 - DNA, 120 bp, Artificial Sequence
  ENSG00000110446_11 (sequence is synthesized)
gctctccaaaactgctgcccccagctgtggcaacgacactcggccagagaccgtcaatgtgcccgcgtgctggccgacgagaggtctccccagccaggggcttccccgcaagaggacatc

SEQ ID NO: 178194 - DNA, 120 bp, Artificial Sequence
  ENSG00000110446_12 (sequence is synthesized)
gccaacttccaggtgctggtgaagatcttgcccgtcatggtgaccctggtgccctactggatggtctacttccagatgcagtccacctatgtcctgcagggtcttcacctccacatccca

SEQ ID NO: 178195 - DNA, 120 bp, Artificial Sequence
  ENSG00000110446_13 (sequence is synthesized)
aacattttcccagccaacccggccaacatctctgtggccctgagagcccagggcagcagctacacgatcccggaagcctggctcctcctggccaatgttgtggtggtgctgattctggtc

SEQ ID NO: 178196 - DNA, 120 bp, Artificial Sequence
  ENSG00000110446_14 (sequence is synthesized)
cctctgaaggaccgcttgatcgaccctttactgctgcggtgcaagctgcttccctctgctctgcagaagatggcgctggggatgttctttggttttacctccgtcattgtggcaggagtc

SEQ ID NO: 178197 - DNA, 120 bp, Artificial Sequence
  ENSG00000110446_15 (sequence is synthesized)
ctggagatggagcgcttacactacatccaccacaacgagaccgtgtcccagcagattggggaggtcctgtacaacgcggcaccactgtccatctggtggcagatccctcagtacctgctc

SEQ ID NO: 178198 - DNA, 120 bp, Artificial Sequence
  ENSG00000110446_16 (sequence is synthesized)
attgggatcagtgagatctttgccagcatcccaggcctggagtttgcctactcagaggccccgcgctccatgcagggcgccatcatgggcatcttcttctgcctgtcgggggtgggctca

SEQ ID NO: 178199 - DNA, 120 bp, Artificial Sequence
  ENSG00000110446_17 (sequence is synthesized)
ctgttgggctccagcctagtggcactgctgtccttgcccgggggctggctgcactgccccaaggactttgggaacatcaacaattgccggatggacctctacttcttcctgctggctggc

SEQ ID NO: 178200 - DNA, 120 bp, Artificial Sequence
  ENSG00000110446_18 (sequence is synthesized)
attcaggccgtcacggctctcctatttgtctggatcgctggacgctatgagagggcgtcccagggcccagcctcccacagccgtttcagcagggacaggggctgaacaggccctattcca

SEQ ID NO: 178201 - DNA, 120 bp, Artificial Sequence
  ENSG00000110446_19 (sequence is synthesized)
gcccccttgcttcactctaccggacagacggcagcagtcccagctctggtttccttctcggtttattctgttagaatgaaatggttcccataaataaggggcatgagcccttcctcacga

SEQ ID NO: 178202 - DNA, 120 bp, Artificial Sequence
  ENSG00000110446_20 (sequence is synthesized)
tttctcatcacagaggcccagggcatgtggaaagggggaaagtctgggaataaagtgaggtgctgccccgtaccagctagcatggggcctggcacaaagccgtctcagcaatccaactcc

SEQ ID NO: 178203 - DNA, 120 bp, Artificial Sequence
  ENSG00000110446_21 (sequence is synthesized)
atcacagaggcccagggcatgtggaaagggggaaagtctgggaataaagtgaggtgctgccccgtaccagctagcatggggcctggcacaaagccgtctcagcaatccaactccctcggt

SEQ ID NO: 178204 - DNA, 120 bp, Artificial Sequence
  ENSG00000110446_22 (sequence is synthesized)
ggtacggcaagaggaactctggagacagcttcctcctgctatacctcctgcgggagttgaattactgggatggctttgtgccaggctaggtccttgaataagtcacctcatctctctggg

SEQ ID NO: 178205 - DNA, 120 bp, Artificial Sequence
  ENSG00000110446_23 (sequence is synthesized)
cctgtttcctcatgtgtacaatgggtggcttaaacgagaggcttttccagctctgctgcattcagattgtccgacttggtagctgaggcctagagagggtgtgtcagttgcccaaggccc

SEQ ID NO: 178206 - DNA, 120 bp, Artificial Sequence
  ENSG00000110446_24 (sequence is synthesized)
cacggcaggcaggtcaggggcaagctcacaaaagtgagtactttgcaacagtggttccccagcctggctgtgcttcagaatcaccggcagagcttttaaaaatatgctgttttaaaaaca

SEQ ID NO: 178207 - DNA, 120 bp, Artificial Sequence
  ENSG00000110446_25 (sequence is synthesized)
gattccaagtccaaccacaggctattgaatcagaattgctggggaagtttctagtttaagaaacttttcagatgatacagatactcagagttgagaactattgtcttccactcaccatat

SEQ ID NO: 178208 - DNA, 75 bp, Artificial Sequence
  ENSG00000110446_26 (sequence is synthesized)
gagggtgggcagcagcttaatgctagcccccaggccataaggtcattgccttccatacccccttcacaggaacat

SEQ ID NO: 178209 - DNA, 120 bp, Artificial Sequence
  ENSG00000110446_27 (sequence is synthesized)
cataaggtcattgccttccatacccccttcacaggaacatttgttggagctcccagcctgctacttaggggcacacagtatttctatgatgagatggcggcatgtggtgggagggtgtcc

SEQ ID NO: 178210 - DNA, 120 bp, Artificial Sequence
  ENSG00000110446_28 (sequence is synthesized)
atggctgattctcagtcataccaatcagatactgacttccttccataccagttggtaaatggctgctgccctgagcagtccacatgctctcccctgccccagcccttcctgtgggagtct

SEQ ID NO: 178211 - DNA, 120 bp, Artificial Sequence
  ENSG00000110446_29 (sequence is synthesized)
cctggatcctactccattatatagcaactaaaggggcagtgcgtggtattggaggtggcccctgggccctgctcctgcagctgtgtccagagccattctggcaagtccatgtctatgcag

SEQ ID NO: 178212 - DNA, 120 bp, Artificial Sequence
  ENSG00000110446_30 (sequence is synthesized)
tgcttgtgtcaacctgtggactcagcttggcttcagtgtcagatgagaactccctgtgggggcagccattatctttcccatttcagcaaacatttatccatgcttaccctgtgctgggcc

SEQ ID NO: 178213 - DNA, 120 bp, Artificial Sequence
  ENSG00000110446_31 (sequence is synthesized)
ctggggacacaaatactagtcagaccagctgtgcctgggctctgggataaggctgcacgcactgcctacaggcctgagagcagagcacaggaagctccctgcccagcccagctacctagg

SEQ ID NO: 178214 - DNA, 120 bp, Artificial Sequence
  ENSG00000110446_32 (sequence is synthesized)
agaaaggagggtgggaaggtgactatctccctgagactgggagaggggacagctgcccagctgtcctgtggtacggcgctgaggaatgccacctaggagttgggagggggcatggccgtt

SEQ ID NO: 178215 - DNA, 120 bp, Artificial Sequence
  ENSG00000110446_33 (sequence is synthesized)
tctgttccagcctcacccctgtctctcttggcagatgcagtccacctatgtcctgcagggtcttcacctccacatcccaaacattttcccagccaacccggccaacatctctgtggccct

SEQ ID NO: 178216 - DNA, 120 bp, Artificial Sequence
  ENSG00000110446_34 (sequence is synthesized)
gagagcccagggcagcagctacacggtgagagataaagcatgtgttcggcacccagttcagccaggtagcggcttcctctgagaagaggaggaaatgaaactgccttcacactccccttt

SEQ ID NO: 178217 - DNA, 120 bp, Artificial Sequence
  ENSG00000110446_35 (sequence is synthesized)
cctgcctgcaaggcaacctcaggatacaggaaaagcacctggagggtgggaggacttgtgtcacagcgcagggatcctgccaagatgctcaactgcttgaaggaattcaggccagctgca

SEQ ID NO: 178218 - DNA, 120 bp, Artificial Sequence
  ENSG00000110446_36 (sequence is synthesized)
cacccccatgctgctgctctgaagcaggtctcgctgcctaatttgcaccctcagatcaagcatacttaggtcccttttcaactcttccttgtcccctctttctctgggacccttagatac

SEQ ID NO: 178219 - DNA, 120 bp, Artificial Sequence
  ENSG00000110446_37 (sequence is synthesized)
ctagatctctgcctttcccagaactttctaaaccagttccttggcatttcagactcatgaaatgaatgatctgcagagctggcagatatatgagaaatttgccattgtagtccatttcct

SEQ ID NO: 178220 - DNA, 120 bp, Artificial Sequence
  ENSG00000110446_38 (sequence is synthesized)
tgcccatggcagacatcactagtcaatcatgactttttttatgctgagcccataaatgttccataatcagccactaccaattgataaaagttagaatacaagaggaacctatttgccatc

SEQ ID NO: 178221 - DNA, 120 bp, Artificial Sequence
  ENSG00000110446_39 (sequence is synthesized)
tctacataatcccactccctggttacacagctgaggagcatgaactccagagagggaaaggagctggaccccagggtcacccagggccagtctagagtccaggtctcctgactgcagcca

SEQ ID NO: 178222 - DNA, 120 bp, Artificial Sequence
  ENSG00000110446_40 (sequence is synthesized)
tggggaagtctgcttccaccatgggctgatgctgaagtggtagcctggaccaagttcagcctctcccagtgggcgtcagtgttggcttcccagaggtgcaagctgaaagagaccctccta

SEQ ID NO: 178223 - DNA, 120 bp, Artificial Sequence
  ENSG00000110446_41 (sequence is synthesized)
tctaatccagctgcccctcattttgacagaagaagaaactcaggccgagagaggaacaaatattttcccccagtgaattatcagctccttgaaggcagagatagtttttctttttttatt

SEQ ID NO: 178224 - DNA, 120 bp, Artificial Sequence
  ENSG00000110446_42 (sequence is synthesized)
cactgctatgaacatgcacgtgggccctccataaatgtgttgaatgaattttccacttagtggcaaatgaagacttaaaaaaaaattatcttccttcttccatttcaaaaggatctgaag

SEQ ID NO: 178225 - DNA, 120 bp, Artificial Sequence
  ENSG00000110446_43 (sequence is synthesized)
ccatttgttacaaagtgggggttggtgggggcagtgggggggatcagctaaagaagtctttcacactgttgcacaaacctgaaccctttttacttagtaactttatgaccctgaagttcc

SEQ ID NO: 178226 - DNA, 120 bp, Artificial Sequence
  ENSG00000110446_44 (sequence is synthesized)
ttagagtctctgagctatgtctttaaaatggggacaggtgtcattcggaccctgagcagggctctgcccttgtggaactcagtctgatggggggtgttgtgaggattacagcagatgaag

SEQ ID NO: 178227 - DNA, 120 bp, Artificial Sequence
  ENSG00000110446_45 (sequence is synthesized)
tctgtaaagcactcagtagtgtgcctggatcacaagtatgagctggagaaatgaaagctccataaacggtattgtgttgaaagtgtgaaaacccaactagattttattccagctatatcc

SEQ ID NO: 178228 - DNA, 120 bp, Artificial Sequence
  ENSG00000110446_46 (sequence is synthesized)
ttaaagcagtttgtcctattttatcctcacaataatcctgggaatgttattcctgcttcttgagtaagggaactgagtctagagaggttaagtgatttgcccaaggtcacacagctagcc

SEQ ID NO: 178229 - DNA, 120 bp, Artificial Sequence
  ENSG00000110446_47 (sequence is synthesized)
aggctgggaacccaggtcccccaactccatgtccaatgttcattccactagagcacagctatctcccaagcaacacaggagaaggagataacatagttaaacttgaaagccaggttagaa

SEQ ID NO: 178230 - DNA, 120 bp, Artificial Sequence
  ENSG00000110446_48 (sequence is synthesized)
acactacagcaatacttgacgttgcagtagagaagtcatgtgatatcatggaaagtaggccagctttgaaaccagacataccagagctcaaatccagccctgactacttatcagctgtgt

SEQ ID NO: 178231 - DNA, 120 bp, Artificial Sequence
  ENSG00000110446_49 (sequence is synthesized)
gactgtgggctagttgcttaactttctagttaagcacttgaaagtgctagttatttcactttcttccgcagcaaggatgcatggtaaatgcctagcacataacaggttctccattaatga

SEQ ID NO: 178232 - DNA, 120 bp, Artificial Sequence
  ENSG00000110446_50 (sequence is synthesized)
gagttgttagtgttattgagtgcaaaactcagcttggagcttctagcagccaagaccaaaagggaggagttggtcacatcttggccccctcctccaccccccagtccagcattcttttcc

SEQ ID NO: 178233 - DNA, 120 bp, Artificial Sequence
  ENSG00000110446_51 (sequence is synthesized)
ttgcctgctgctcaatctttggctgcttcatgagtaccccatccccaccatgtacaagctcttctgtgggctaagctgcctggggtgggcctgactataatccccctctgctcctccacc

SEQ ID NO: 178234 - DNA, 120 bp, Artificial Sequence
  ENSG00000110446_52 (sequence is synthesized)
agccaggggcttccccgcaagaggacatcgccaacttccaggtgctggtgaagatcttgcccgtcatggtgaccctggtgccctactggatggtctacttccagatcccggaagcctggc

SEQ ID NO: 178235 - DNA, 120 bp, Artificial Sequence
  ENSG00000110446_53 (sequence is synthesized)
tggagggtggcttggtgggggcagggtcaggggcagcaagcaggggcctgggcctgttctctgcgcctgcaccagcccctgagatcgtctctgctccccctctgcaggcctggagtttgc

SEQ ID NO: 178236 - DNA, 120 bp, Artificial Sequence
  ENSG00000110446_54 (sequence is synthesized)
ggcgccatcatgggcatcttcttctgcctgtcgggggtgggctcactgttgggctccagcctagtggcactgctgtccttgcccgggggctggctgcactgccccaaggactttgctgaa

SEQ ID NO: 178237 - DNA, 120 bp, Artificial Sequence
  ENSG00000110446_55 (sequence is synthesized)
gaaggggcctggggcctggctgttgctgattgatccaaattctgggtgatggatctcggccgcgacgccacccgccgcttcttcaactggttttactggagcatcaacctgggtgctgtg

SEQ ID NO: 178238 - DNA, 120 bp, Artificial Sequence
  ENSG00000110448_0 (sequence is synthesized)
gagatacccggccagacaccctcacctgcggtgcccagctgcccaggctgaggcaagagaaggccagaaaccatgcccatggggtctctgcaaccgctggccaccttgtacctgctgggg

SEQ ID NO: 178239 - DNA, 120 bp, Artificial Sequence
  ENSG00000110448_1 (sequence is synthesized)
atgctggtcgcttcctgcctcggacggctcagctggtatgacccagatttccaggcaaggctcacccgttccaactcgaagtgccagggccagctggaggtctacctcaaggacggatgg

SEQ ID NO: 178240 - DNA, 120 bp, Artificial Sequence
  ENSG00000110448_2 (sequence is synthesized)
cacatggtttgcagccagagctggggccggagctccaagcagtgggaggaccccagtcaagcgtcaaaagtctgccagcggctgaactgtggggtgcccttaagccttggccccttcctt

SEQ ID NO: 178241 - DNA, 120 bp, Artificial Sequence
  ENSG00000110448_3 (sequence is synthesized)
gtcacctacacacctcagagctcaatcatctgctacggacaactgggctccttctccaactgcagccacagcagaaatgacatgtgtcactctctgggcctgacctgcttagaaccccag

SEQ ID NO: 178242 - DNA, 120 bp, Artificial Sequence
  ENSG00000110448_4 (sequence is synthesized)
aagacaacacctccaacgacaaggcccccgcccaccacaactccagagcccacagctcctcccaggctgcagctggtggcacagtctggcggccagcactgtgccggcgtggtggagttc

SEQ ID NO: 178243 - DNA, 120 bp, Artificial Sequence
  ENSG00000110448_5 (sequence is synthesized)
tacagcggcagcctggggggtaccatcagctatgaggcccaggacaagacccaggacctggagaacttcctctgcaacaacctccagtgtggctccttcttgaagcatctgccagagact

SEQ ID NO: 178244 - DNA, 120 bp, Artificial Sequence
  ENSG00000110448_6 (sequence is synthesized)
gaggcaggcagagcccaagacccaggggagccacgggaacaccagcccttgccaatccaatggaagatccagaactcaagctgtacctccctggagcattgcttcaggaaaatcaagccc

SEQ ID NO: 178245 - DNA, 120 bp, Artificial Sequence
  ENSG00000110448_7 (sequence is synthesized)
cagaaaagtggccgagttcttgccctcctttgctcaggtttccagcccaaggtgcagagccgtctggtggggggcagcagcatctgtgaaggcaccgtggaggtgcgccagggggctcag

SEQ ID NO: 178246 - DNA, 120 bp, Artificial Sequence
  ENSG00000110448_8 (sequence is synthesized)
tgggcagccctgtgtgacagctcttcagccaggagctcgctgcggtgggaggaggtgtgccgggagcagcagtgtggcagcgtcaactcctatcgagtgctggacgctggtgacccaaca

SEQ ID NO: 178247 - DNA, 120 bp, Artificial Sequence
  ENSG00000110448_9 (sequence is synthesized)
tcccgggggctcttctgtccccatcagaagctgtcccagtgccacgaactttgggagagaaattcctactgcaagaaggtgtttgtcacatgccaggatccaaaccccgcaggcctggcc

SEQ ID NO: 178248 - DNA, 120 bp, Artificial Sequence
  ENSG00000110448_10 (sequence is synthesized)
gcaggcacggtggcaagcatcatcctggccctggtgctcctggtggtgctgctggtcgtgtgcggcccccttgcctacaagaagctagtgaagaaattccgccagaagaagcagcgccag

SEQ ID NO: 178249 - DNA, 120 bp, Artificial Sequence
  ENSG00000110448_11 (sequence is synthesized)
tggattggcccaacgggaatgaaccaaaacatgtctttccatcgcaaccacacggcaaccgtccgatcccatgctgagaaccccacagcctcccacgtggataacgaatacagccaacct

SEQ ID NO: 178250 - DNA, 120 bp, Artificial Sequence
  ENSG00000110448_12 (sequence is synthesized)
cccaggaactcccacctgtcagcttatccagctctggaaggggctctgcatcgctcctccatgcagcctgacaactcctccgacagtgactatgatctgcatggggctcagaggctgtaa

SEQ ID NO: 178251 - DNA, 120 bp, Artificial Sequence
  ENSG00000110448_13 (sequence is synthesized)
ggatccatgagcaaaaagccgagagccagacctgtttgtcctgagaaaactgtccgctcttcacttgaaatcatgtccctatttctaccccggccagaacatggacagaggccagaagcc

SEQ ID NO: 178252 - DNA, 120 bp, Artificial Sequence
  ENSG00000110448_14 (sequence is synthesized)
ttccggacaggcgctgctgccccgagtggcaggccagctcacactctgctgcacaacagctcggccgcccctccacttgtggaagctgtggtgggcagagccccaaaacaagcagccttc

SEQ ID NO: 178253 - DNA, 120 bp, Artificial Sequence
  ENSG00000110448_15 (sequence is synthesized)
caactagagactcgggggtgtctgaagggggccccctttccctgcccgctggggagcggcgtctcagtgaaatcggctttctcctcagactctgtccctggtaaggagtgacaaggaagc

SEQ ID NO: 178254 - DNA, 120 bp, Artificial Sequence
  ENSG00000110448_16 (sequence is synthesized)
tcacagctgggcgagtgcattttgaatagttttttgtaagtagtgcttttcctccttcctgacaaatcgagcgctttggcctcttctgtgcagcatccacccctgcggatccctctgggg

SEQ ID NO: 178255 - DNA, 120 bp, Artificial Sequence
  ENSG00000110448_17 (sequence is synthesized)
aggacaggaaggggactcccggagacctctgcagccgtggtggtcagaggctgctcacctgagcacaaagacagctctgcacattcaccgcagctgccagccaggggtctgggtgggcac

SEQ ID NO: 178256 - DNA, 120 bp, Artificial Sequence
  ENSG00000110448_18 (sequence is synthesized)
caccctgacccacagcgtcaccccactccctctgtcttatgactcccctccccaaccccctcatctaaagacaccttcctttccactggctgtcaagcccacagggcaccagtgccaccc

SEQ ID NO: 178257 - DNA, 120 bp, Artificial Sequence
  ENSG00000110448_19 (sequence is synthesized)
agggcccggcacaaaggggcgcctagtaaaccttaaccaacttggttttttgcttcacccagcaattaaaagtcccaagctgaggtagtttcagtccatcacagttcatcttctaaccca

SEQ ID NO: 178258 - DNA, 120 bp, Artificial Sequence
  ENSG00000110448_20 (sequence is synthesized)
agagtcagagatggggctggtcatgttcctttggtttgaataactcccttgacgaaaacagactcctctagtacttggagatcttggacgtacacctaatcccatggggcctcggcttcc

SEQ ID NO: 178259 - DNA, 120 bp, Artificial Sequence
  ENSG00000110448_21 (sequence is synthesized)
ttaactgcaagtgagaagaggaggtctacccaggagcctcgggtctgatcaagggagaggccaggcgcagctcactgcggcggctccctaagaaggtgaagcaacatgggaacacatcct

SEQ ID NO: 178260 - DNA, 120 bp, Artificial Sequence
  ENSG00000110448_22 (sequence is synthesized)
aagacaggtcctttctccacgccatttgatgctgtatctcctgggagcacaggcatcaatggtccaagccgcataataagtctggaagagcaaaagggagttactaggatatggggtggg

SEQ ID NO: 178261 - DNA, 120 bp, Artificial Sequence
  ENSG00000110448_23 (sequence is synthesized)
ctgctcccagaatctgctcagctttctgcccccaccaacaccctccaaccaggccttgccttctgagagcccccgtggccaagcccaggtcacagatcttcccccgaccatgctgggaat

SEQ ID NO: 178262 - DNA, 120 bp, Artificial Sequence
  ENSG00000110448_24 (sequence is synthesized)
ccagaaacagggaccccatttgtcttcccatatctggtggaggtgagggggctcctcaaaagggaactgagaggctgctcttagggagggcaaaggttcgggggcagccagtgtctccca

SEQ ID NO: 178263 - DNA, 120 bp, Artificial Sequence
  ENSG00000110448_25 (sequence is synthesized)
tcagtgccttttttaataaaagctctttcatctatagtttggccaccatacagtggcctcaaagcaaccatggcctacttaaaaaccaaaccaaaaataaagagtttagttgaggagaaa

SEQ ID NO: 178264 - DNA, 120 bp, Artificial Sequence
  ENSG00000110455_0 (sequence is synthesized)
acacgtgatgggcgcccaccgagtgccagcaccgcctcctccagctccgccaagtaggtgggatccactactttgcagaggaggaagccgttcaggcctccctctgtgcactttgcaaaa

SEQ ID NO: 178265 - DNA, 120 bp, Artificial Sequence
  ENSG00000110455_1 (sequence is synthesized)
gcctctgcccttccatctcgaatcccttggcgccgatcacacttcctctgcctggaaacctggagccgtctctcgcgagacgtcctccgccctgtagaaggccgtttcggttcttcgtgc

SEQ ID NO: 178266 - DNA, 120 bp, Artificial Sequence
  ENSG00000110455_2 (sequence is synthesized)
gcggtagccgccccacttgcgggattccaaggcctcatcgagtgcgggtatctggctgtggattcgccgccgtcctgctggacgcctggaggctcgaaccccgccgcccccctaccccag

SEQ ID NO: 178267 - DNA, 120 bp, Artificial Sequence
  ENSG00000110455_3 (sequence is synthesized)
gctttactcccaccccggcttccgcccactgtgctgcccttcctcggacctgggctgtcgggagagctggagatgttcacccttcctcaaaaggacttcagggctcccaccacctgtctg

SEQ ID NO: 178268 - DNA, 120 bp, Artificial Sequence
  ENSG00000110455_4 (sequence is synthesized)
ggccccacctgcatgcaggacctgggcagtagccatggggaagatctggaaggagaatgctccagaaaactggaccagaagctgccagagctccgtggagtgggtgatcctgccatgatc

SEQ ID NO: 178269 - DNA, 120 bp, Artificial Sequence
  ENSG00000110455_5 (sequence is synthesized)
tcctctgatacctcctacctgtcctctagaggaagaatgattaaatggttctgggattcagctgaggagggctacaggacctaccacatggatgagtatgatgaggacaagaaccccagt

SEQ ID NO: 178270 - DNA, 120 bp, Artificial Sequence
  ENSG00000110455_6 (sequence is synthesized)
ggcatcattaacttgggcaccagtgagaacaaactctgctttgacctgctgtcctggcggctgagtcagcgcgacatgcagagggtggagccatccctgctgcagtatgctgactggagg

SEQ ID NO: 178271 - DNA, 120 bp, Artificial Sequence
  ENSG00000110455_7 (sequence is synthesized)
ggacatctgttcctccgggaggaagtggccaagttcctgtctttctactgcaagagcccagtacccctcagaccagagaatgtggttgtcctgaatggtggtgcctcgctcttctctgct

SEQ ID NO: 178272 - DNA, 120 bp, Artificial Sequence
  ENSG00000110455_8 (sequence is synthesized)
ctggccacggtgctgtgtgaggccggggaggctttcctgatccccaccccttactatggcgctatcacacagcacgtgtgtctctatggcaacatccggctggcctatgtctacctggac

SEQ ID NO: 178273 - DNA, 120 bp, Artificial Sequence
  ENSG00000110455_9 (sequence is synthesized)
tcatcctcatcagcccccagaaccctctgggtgatgtatactcccctgaagagctacaggagtacctggtatttgccaagaggcacaggctgcatgtgattgtggatgaggtctacatgc

SEQ ID NO: 178274 - DNA, 120 bp, Artificial Sequence
  ENSG00000110455_10 (sequence is synthesized)
tgtccgtgtttgagaagtctgttgggtaccgcagtgtcctaagcctggaaaggctccctgacccccagaggacccatgtgatgtgggcaaccagcaaggacttcgggatgtctgggctcc

SEQ ID NO: 178275 - DNA, 120 bp, Artificial Sequence
  ENSG00000110455_11 (sequence is synthesized)
gctttggcacgctgtacacagaaaaccaggatgtggccactgccgtggcttccctctgccgctaccacggcctcagtggcttggtccagtaccagatggcacagctgctccgggaccgtg

SEQ ID NO: 178276 - DNA, 120 bp, Artificial Sequence
  ENSG00000110455_12 (sequence is synthesized)
actggatcaaccaggtgtacctgccggaaaaccatgcccggctcaaggctgcccacacctatgtctcagaagagcttagggcattggggatccccttcttgagtcgtggggctggcttct

SEQ ID NO: 178277 - DNA, 120 bp, Artificial Sequence
  ENSG00000110455_13 (sequence is synthesized)
tcatctgggttgacttgagaaagtacctgcccaagggcacctttgaggaggaaatgctgctctggcgccgctttttggacaacaaggtgctgctgtcctttggcaaggccttcgagtgta

SEQ ID NO: 178278 - DNA, 120 bp, Artificial Sequence
  ENSG00000110455_14 (sequence is synthesized)
aagagcctggttggtttcgctttgtcttctcagaccaggtccaccggctttgcctggggatgcagagggtccagcaggtgcttgcaggcaaatcccaagtggcagaagacccccgtccct

SEQ ID NO: 178279 - DNA, 120 bp, Artificial Sequence
  ENSG00000110455_15 (sequence is synthesized)
ctcagagccaggagccaagtgaccaacgcaggtgagctggtcattgtctcgtggccagagggcccagcagccactgtggacctggggcgttctggggctgcagaagactgactgtggatg

SEQ ID NO: 178280 - DNA, 120 bp, Artificial Sequence
  ENSG00000110455_16 (sequence is synthesized)
tgccatttgccaggaaggtatctaacttggctttgtgcctgaagaactgtttcttgtctttcgctgtagcagtgggaaactccttaagctgtggttcagcctgggccctccctctctcct

SEQ ID NO: 178281 - DNA, 120 bp, Artificial Sequence
  ENSG00000110455_17 (sequence is synthesized)
attaaacaaaactaggagagtccatatgtctccattgtgagttatttagaatggaggagtcgtgactgcttctaaccagagcctcagcccccctgaggatgtgaaaagaaaacaaacaac

SEQ ID NO: 178282 - DNA, 120 bp, Artificial Sequence
  ENSG00000110455_18 (sequence is synthesized)
ttgtaccttctttctgatatcaccgtcattcctctttctttgtcaccaaggaaacgagtcaaaggaacagcacatacaggagagtttgtagaaaaataaaaaaaagtgataacttccaaa

SEQ ID NO: 178283 - DNA, 120 bp, Artificial Sequence
  ENSG00000110455_19 (sequence is synthesized)
ctgctttgacctgctgtcctggcggtttctctgatgagcagaacaagcgttcagctttacctgccctgtgctgtggatgctggtagcagtgctggccctcagccgtgctcttccctctct

SEQ ID NO: 178284 - DNA, 120 bp, Artificial Sequence
  ENSG00000110455_20 (sequence is synthesized)
cgcactgtgagcctcattgtgcttgcagggttcccagttgcctggcctcaagggctgcaatagtatgctttcgggcacaatagaatatactagactgcagggggcttgaataagtggctt

SEQ ID NO: 178285 - DNA, 120 bp, Artificial Sequence
  ENSG00000110455_21 (sequence is synthesized)
gacaaagcacccgggggtcagcagttccaggggaggttagtttgatgtcagggtcctgggctttctctctgccatgaccttggctgcttcatgctcataaggtggctgtcgcgtcctcac

SEQ ID NO: 178286 - DNA, 120 bp, Artificial Sequence
  ENSG00000110455_22 (sequence is synthesized)
agtctcctagtccgggcgcgctgagcgcaggggggcgctgtcctcacccacgcgtaagtcgccgcagggcgtttccgggcggagaaaacctacacgtgatgggcgcccaccgagtgccag

SEQ ID NO: 178287 - DNA, 120 bp, Artificial Sequence
  ENSG00000110455_23 (sequence is synthesized)
actgtgctaagtgctggagatacaacagtgaacaagaaagacatagacccttcttgtgtagaactttaatttctagccagaaaaaccattttagcggctaaatgcacatccagccattgg

SEQ ID NO: 178288 - DNA, 120 bp, Artificial Sequence
  ENSG00000110455_24 (sequence is synthesized)
attatggccatcatgaatgctaaaagggagagtccagggagctgtgagaggatctgtttagggtacctgattggcctggtcccagggggagtggttagggaaagtctctttgatgagtga

SEQ ID NO: 178289 - DNA, 120 bp, Artificial Sequence
  ENSG00000110455_25 (sequence is synthesized)
catttgagctaggctctagatcatggctgtgttctcattaaactttatttacaagaaacaggcagcaggctatgtttggcccgcgggctgtcatttgctaacccctgctctaaaggatgc

SEQ ID NO: 178290 - DNA, 120 bp, Artificial Sequence
  ENSG00000110455_26 (sequence is synthesized)
cttcatttgttcaaccaaacacatgtgggtttccatagttctgtgttgcctctgttcccatgctgtgctctctgcaggctccctgacccccagaggacccatgtgatgtgggcaaccagc

SEQ ID NO: 178291 - DNA, 120 bp, Artificial Sequence
  ENSG00000110455_27 (sequence is synthesized)
aaggtgagttcctggctggccttgggggtgtcagaagggtgggagggcagagaggtgggtggaaccagcttcctccatggagggctggccaccgcctagggtgcttcttcctgcaggact

SEQ ID NO: 178292 - DNA, 120 bp, Artificial Sequence
  ENSG00000110455_28 (sequence is synthesized)
gagtcttgacttcctaggtggaacctgggcctgcctgtggtcaagagtttcctgggtctgaatttgagggtggtccatgctgagggctctggggttgtgatgagtagggaatggagcctt

SEQ ID NO: 178293 - DNA, 120 bp, Artificial Sequence
  ENSG00000110455_29 (sequence is synthesized)
ctgttgctgcatggctgcctgtgcctgggttccccagtggctccaaagttccagtctctgagatccctggggttgatgtagaagccaagagccagacccagaaacagcaaggtaggaaca

SEQ ID NO: 178294 - DNA, 120 bp, Artificial Sequence
  ENSG00000110455_30 (sequence is synthesized)
gagcagggtagacctaagcatgacacccaagagtgatgagggggtctctgaagtgatgggttgggggtggatggcagtaagagggagggaccccacctgcttttccagagactcttctga

SEQ ID NO: 178295 - DNA, 120 bp, Artificial Sequence
  ENSG00000110455_31 (sequence is synthesized)
ggaggctggggattacaggggaggagaggcctgagagttcatatgtattttggggggcaatggtcactgaatgtggctggtggctctgatgggtctttttccaggtcactgggctagaca

SEQ ID NO: 178296 - DNA, 120 bp, Artificial Sequence
  ENSG00000110455_32 (sequence is synthesized)
cacgccccttccagctcacagtggagaagctggagatggccctgagagaagctcactctgaggtctggggatcaaatcaaacctgaggctgggtgtgggtgggtctgagcagggtctgga

SEQ ID NO: 178297 - DNA, 120 bp, Artificial Sequence
  ENSG00000110455_33 (sequence is synthesized)
cccctcttcttgtgactgatctcctcccgggagtagggttgatacccggtgattgggacagacaggtagggtggtagcacagaattattctgggagtcaggcagaaccctgcccagggag

SEQ ID NO: 178298 - DNA, 120 bp, Artificial Sequence
  ENSG00000110455_34 (sequence is synthesized)
ggtcttccctttcaaaacagactctcagacctcagttcacagagaatcaaccagggagcatcactaaagatacccccatccctgatccatctgattatgattcagtgggtcaagtatgga

SEQ ID NO: 178299 - DNA, 120 bp, Artificial Sequence
  ENSG00000110455_35 (sequence is synthesized)
gtacaggagtctgtggttttacaagtctccctggtagtttgagggggcaaccttgctcactgtggggggagctgaggactcccaaaggagagcagagaccagtattccagtggttccttt

SEQ ID NO: 178300 - DNA, 120 bp, Artificial Sequence
  ENSG00000110455_36 (sequence is synthesized)
ccagcctacttttcaaaaatctacttaatttttttttacttctgtcatgaaagctatacatactcactgtaggaattttgaaagtgcaaaaggccaacccaaaattctaccaacaaaggt

SEQ ID NO: 178301 - DNA, 120 bp, Artificial Sequence
  ENSG00000110455_37 (sequence is synthesized)
aacctactggtatttgggtatattttttctctgggccttgtcctccgcctttatctgatgctgcagatgtaattctgtgttccgcttgtttgcttcatgttgtgttatgaacatgtcccc

SEQ ID NO: 178302 - DNA, 120 bp, Artificial Sequence
  ENSG00000110455_38 (sequence is synthesized)
ctcaaatctccctgggagccttccagcgatcagccccctttgactgtgtggctctggccttggggaagagctgagggtctcctgccctaacggatggtttcagggtgtgaaggtcaaagg

SEQ ID NO: 178303 - DNA, 120 bp, Artificial Sequence
  ENSG00000110455_39 (sequence is synthesized)
ggcagcctggggttccaatgcgggtttggtgcaggtttttctactctcttgaccccactgtgggctgctacttgcttgggcccttccttggcagtggagcggggaagcagggatttgtgg

SEQ ID NO: 178304 - DNA, 120 bp, Artificial Sequence
  ENSG00000110455_40 (sequence is synthesized)
ctttatctttcactctttataacaatagctatcaattagcgcacactctaggggccaggcaccatgctaagcactttatgtgcctcatacaatcctcacaacaatgctatcatacaatcc

SEQ ID NO: 178305 - DNA, 120 bp, Artificial Sequence
  ENSG00000110455_41 (sequence is synthesized)
tcacaacaaccctttatgtgcctcatacaatcctcacaacaaccctcatacaatccttacaacaatccttacaacaatcctcacaacaaccctactgatgctgttatcacatccagctca

SEQ ID NO: 178306 - DNA, 120 bp, Artificial Sequence
  ENSG00000110455_42 (sequence is synthesized)
ctgagccttagagtggtcaagtgaggggtggatccagacttgaacctgggtctctccgactcgagcccttgtgcatgaccttgcccctccatggaggtgcccgggagatccttttctccc

SEQ ID NO: 178307 - DNA, 120 bp, Artificial Sequence
  ENSG00000110455_43 (sequence is synthesized)
ctgcagtgcttcaaaagctcctctgtcacctgctctgtatgtgtggctttctgtttgaaaaaaacagaagaaagaatggtgttcttggaaaaacaagtttggtaaccccgggctagaccc

SEQ ID NO: 178308 - DNA, 120 bp, Artificial Sequence
  ENSG00000110455_44 (sequence is synthesized)
cggcccctctggatttctgatgtattacctccccaccctgtgggacgcatctgccctacacactaagtctctcctccccacccctgcctcactccaggcacaggctgcatgtgattgtgg

SEQ ID NO: 178309 - DNA, 120 bp, Artificial Sequence
  ENSG00000110455_45 (sequence is synthesized)
ctgcacttgtggaggttcccattcctcccttccctcagttcctacccgccatctgcctcagaacaccacataatctcatcctaccctttacaccacaagacccccaggactcccaggcaa

SEQ ID NO: 178310 - DNA, 120 bp, Artificial Sequence
  ENSG00000110455_46 (sequence is synthesized)
aagttttaaaaatagtgacaacatcaagtgttgacaaagataaggagcagctggaagtctcatacactgctggtaggagtactggatcaaccaggtgtacctgccggaaaaccatgcccg

SEQ ID NO: 178311 - DNA, 120 bp, Artificial Sequence
  ENSG00000110455_47 (sequence is synthesized)
aaactggagaaccaaggccaggaggcagaaggaggtggcagacccggcccggcggcggcccagcacgcgcaggccacccagagtggagatgttcacccttcctcaaaaggacttcagggc

SEQ ID NO: 178312 - DNA, 120 bp, Artificial Sequence
  ENSG00000110484_0 (sequence is synthesized)
acagcggcttccttgatccttgccacccgcgactgaacaccgacagcagcagcctcaccatgaagttgctgatggtcctcatgctggcggccctctcccagcactgctacgcaggctctg

SEQ ID NO: 178313 - DNA, 120 bp, Artificial Sequence
  ENSG00000110484_1 (sequence is synthesized)
gctgccccttattggagaatgtgatttccaagacaatcaatccacaagtgtctaagactgaatacaaagaacttcttcaagagttcatagacgacaatgccactacaaatgccatagatg

SEQ ID NO: 178314 - DNA, 120 bp, Artificial Sequence
  ENSG00000110484_2 (sequence is synthesized)
acggatgaaactctgagcaatgttgaggtgtttatgcaattaatatatgacagcagtctttgtgatttattttaactttctgcaagacctttggctcacagaactgcagggtatggtgag

SEQ ID NO: 178315 - DNA, 120 bp, Artificial Sequence
  ENSG00000110484_3 (sequence is synthesized)
aaaccaactacggattgctgcaaaccacaccttctctttcttatgtctttttactacaaactacaagacaattgttgaaacctgctatacatgtttattttaataaattgatggcaaaaa

SEQ ID NO: 178316 - DNA, 120 bp, Artificial Sequence
  ENSG00000110484_4 (sequence is synthesized)
aattgaaggaatgttttcttaaccaaacggatgaaactctgagcaatgttgaggtgtttatggtaatttcattttcttcctataagctttttaaatcccctgaccagggacaagtgggct

SEQ ID NO: 178317 - DNA, 120 bp, Artificial Sequence
  ENSG00000110484_5 (sequence is synthesized)
cttcatttctcactgacaatgccaaagccactagtgaacaagccttttcttacattggttaatttagttgaatggttagtctaatgactttgccatcaagaaaaacatccagtgtccctg

SEQ ID NO: 178318 - DNA, 120 bp, Artificial Sequence
  ENSG00000110484_6 (sequence is synthesized)
tgttgtcactctacccagagaatcctcagtggatgataaatgaatagggcaagagaggaaaaggaaaggtcggtagaagtcttacctatccccagagctctctaattcatgctcacaaac

SEQ ID NO: 178319 - DNA, 120 bp, Artificial Sequence
  ENSG00000110484_7 (sequence is synthesized)
cacaaacatagacagacaggcaaagacacagacacagacacagacacaatcacaccagcacacaatcatccagacacaaacacaaacacacagacagaaccacacaaccacagaaacaca

SEQ ID NO: 178320 - DNA, 120 bp, Artificial Sequence
  ENSG00000110484_8 (sequence is synthesized)
gagacacacacaaacacactcagacacacacatacaaacatatgttcactctctacagaaaaaacaattttccagaagacccgcacctatagaccaatctgcagagaaaacttctcttct

SEQ ID NO: 178321 - DNA, 120 bp, Artificial Sequence
  ENSG00000110484_9 (sequence is synthesized)
tcaaaaaaaagtaaaagtgttctttcttaaaaaatgccctatttttcaacagtttggaaaataccatttgagcaagattctatacatctcaaataaaaagaatttaaaatgcacttccag

SEQ ID NO: 178322 - DNA, 120 bp, Artificial Sequence
  ENSG00000110484_10 (sequence is synthesized)
gcaatcataatttgctagcataaatgatgagaaaccttggactatccaataggcaactgtagatcatgggtatgaaaccaccatggaggaagaattgcctcaaacaaaaaccaatagttt

SEQ ID NO: 178323 - DNA, 120 bp, Artificial Sequence
  ENSG00000110484_11 (sequence is synthesized)
gttttgtatttctttctaactatacatgtatattgttgagggttttctttagcatttattccctatgttaaattcttctttaatccttccctggtaaaaaaaaaaaaaaaaaaaaagtta

SEQ ID NO: 178324 - DNA, 120 bp, Artificial Sequence
  ENSG00000110492_0 (sequence is synthesized)
gtgctcccggaaaggcactgggcgaccgcacccgtggctttctctgggcgaccgggtcccagactccccccagcacagcagagcgcttccctgcccacccgcggaaaccgccccaggtgg

SEQ ID NO: 178325 - DNA, 120 bp, Artificial Sequence
  ENSG00000110492_1 (sequence is synthesized)
gccgcgccccctccccagcagccagcagggcgccagggctgagccggccgtggaggggagcgggtcccgcgggttatacaggcgccggggctccgcggcaggatgcagcaccgaggcttc

SEQ ID NO: 178326 - DNA, 120 bp, Artificial Sequence
  ENSG00000110492_2 (sequence is synthesized)
ctcctcctcaccctcctcgccctgctggcgctcacctccgcggtcgccaaaaagaaagataaggtgaagaagggcggcccggggagcgagtgcgctgagtgggcctgggggccctgcacc

SEQ ID NO: 178327 - DNA, 120 bp, Artificial Sequence
  ENSG00000110492_3 (sequence is synthesized)
cccagcagcaaggattgcggcgtgggtttccgcgagggcacctgcggggcccagacccagcgcatccggtgcagggtgccctgcaactggaagaaggagtttggagccgactgcaagtac

SEQ ID NO: 178328 - DNA, 120 bp, Artificial Sequence
  ENSG00000110492_4 (sequence is synthesized)
atgggggcacaggcaccaaagtccgccaaggcaccctgaagaaggcgcgctacaatgctcagtgccaggagaccatccgcgtcaccaagccctgcacccccaagaccaaagcaaaggcca

SEQ ID NO: 178329 - DNA, 120 bp, Artificial Sequence
  ENSG00000110492_5 (sequence is synthesized)
aagccaagaaagggaagggaaaggactagacgccaagcctggatgccaaggagcccctggtgtcacatggggcctggcccacgccctccctctcccaggcccgagatgtgacccaccagt

SEQ ID NO: 178330 - DNA, 120 bp, Artificial Sequence
  ENSG00000110492_6 (sequence is synthesized)
gccttctgtctgctcgttagctttaatcaatcatgccctgccttgtccctctcactccccagccccacccctaagtgcccaaagtggggagggacaagggattctgggaagcttgagcct

SEQ ID NO: 178331 - DNA, 120 bp, Artificial Sequence
  ENSG00000110492_7 (sequence is synthesized)
cccccaaagcaatgtgagtcccagagcccgcttttgttcttccccacaattccattactaagaaacacatcaaataaactgactttttccccccaataaaagctcttcttttttaatata

SEQ ID NO: 178332 - DNA, 80 bp, Artificial Sequence
  ENSG00000110492_8 (sequence is synthesized)
cgcgggagggagcgaagcagcgcgggcagcgagcgagtgagcgcgcggcggcccctggtccgcccggccgcggccgatct

SEQ ID NO: 178333 - DNA, 120 bp, Artificial Sequence
  ENSG00000110492_9 (sequence is synthesized)
cggcttcccgcttcccgcggagaacaacaatgaaagtgaaagaggggtggggcgggggcgagcccgggttctgtggcccatttgccctgtggccttgagcaagcccctcccccaggcctc

SEQ ID NO: 178334 - DNA, 120 bp, Artificial Sequence
  ENSG00000110492_10 (sequence is synthesized)
gggggctctcccggtttgggggaaccgggcgaggcaatgccacaggcccagggttagagggggtgggcacttgcagctgccgatgtggctggatctggaacttctcagacggctcctgtc

SEQ ID NO: 178335 - DNA, 120 bp, Artificial Sequence
  ENSG00000110492_11 (sequence is synthesized)
tcgcctcttagcggtgcgtccgggctagcggcgaggggccgccccaagtcttcccaccgccgccaccttagcagcccgacttggggcctggaaagtggagcacgcggaggtgggagggcc

SEQ ID NO: 178336 - DNA, 120 bp, Artificial Sequence
  ENSG00000110492_12 (sequence is synthesized)
catgtgaccggctcagaccggttctggagacaaaaggggccgcggcggccggagcgggacgggcccggcgcgggagggagcgaagcagcgcgggcagcgagcgagatgcagcaccgaggc

SEQ ID NO: 178337 - DNA, 120 bp, Artificial Sequence
  ENSG00000110492_13 (sequence is synthesized)
cggcggccggagcgggacgggcccggcgcgggagggagcgaagcagcgcgggcagcgagcgaataaggtgaagaagggcggcccggggagcgagtgcgctgagtgggcctgggggccctg

SEQ ID NO: 178338 - DNA, 120 bp, Artificial Sequence
  ENSG00000110492_14 (sequence is synthesized)
gaggggacaattccaagttaaaccttaagttttgagtcctggccagtggcttcctgacatcgcctcacttggcttccctgcctggaaaagtctgaagatgggcactacaagagaggccgc

SEQ ID NO: 178339 - DNA, 120 bp, Artificial Sequence
  ENSG00000110492_15 (sequence is synthesized)
aggtgatgctggggacataaatcctccctggcccaaatagggaccaactcaaactactccattggagcatctggcttaggacccagggagagtgtcctggaacggcttgcctttgtcagc

SEQ ID NO: 178340 - DNA, 120 bp, Artificial Sequence
  ENSG00000110492_16 (sequence is synthesized)
tctccagccacgggcagcatttggtcagctctgccctttctagtgttgggaggaggtcaaggcccaccctgggcctctcagctcactcgtgactcagcccagcgaggccagcagggcagg

SEQ ID NO: 178341 - DNA, 120 bp, Artificial Sequence
  ENSG00000110497_0 (sequence is synthesized)
aggggattaatgaagagccaccagactatctttatggagaatctagattgggaagttaagctaagaatgtgcatttttgaaaaagtttttatggtagaagagaatgtatatcagaggaaa

SEQ ID NO: 178342 - DNA, 120 bp, Artificial Sequence
  ENSG00000110497_1 (sequence is synthesized)
gaatgtagagaagaaagcaacattgtccactgggaattgataagttctgcgtagaatttagagttataaggactatctcattggctcctaatgaatgctaaataacaaatggaaattgct

SEQ ID NO: 178343 - DNA, 120 bp, Artificial Sequence
  ENSG00000110497_2 (sequence is synthesized)
atttccatgaggacaacttacaaggacctgtatggcctcattttagctgcttcagtgtgttggagctgttacttgctccttcatttcctgggcctggtgtgacagtggctactgagcgcc

SEQ ID NO: 178344 - DNA, 120 bp, Artificial Sequence
  ENSG00000110497_3 (sequence is synthesized)
atgaaggttgtcccagaaaagaatgctgtccggatactctgggggcgagaacggggtgctcgggccatgggagctcagcggcttctgcaggagctggtagaagataaaacccggtggatg

SEQ ID NO: 178345 - DNA, 120 bp, Artificial Sequence
  ENSG00000110497_4 (sequence is synthesized)
aaatgggagggcaagagagtagaactgccggatagtccacgctctaccttcttattggccttcagcccagacaggactctcttagcctccacccatgtgaaccataatatctatattacg

SEQ ID NO: 178346 - DNA, 120 bp, Artificial Sequence
  ENSG00000110497_5 (sequence is synthesized)
gaggtgaagactggcaagtgtgttcattccctgattggacaccgccgtactccatggtgtgtcacttttcatcccaccatctcaggccttattgcttctggctgcctagatggggaggtt

SEQ ID NO: 178347 - DNA, 120 bp, Artificial Sequence
  ENSG00000110497_6 (sequence is synthesized)
aggatttgggatttacacggtggcagtgaaagctggttcacagatagcaacaatgccattgcctccctggctttccaccctacggctcagctcctgctgattgccactgccaatgagatc

SEQ ID NO: 178348 - DNA, 120 bp, Artificial Sequence
  ENSG00000110497_7 (sequence is synthesized)
cacttctgggactggagtcgacgggaaccctttgctgtggtgaagacagctagtgagatggaacgggtccgtctggtgagatttgatccacttggacactacttactcacagcaattgtt

SEQ ID NO: 178349 - DNA, 120 bp, Artificial Sequence
  ENSG00000110497_8 (sequence is synthesized)
aacccctctaatcaacagggtgatgacgaaccagagatccccatagatggaacagaattatcccactaccgtcagcgtgccctcctgcaatcacagccagttcgccggacgcctctcctc

SEQ ID NO: 178350 - DNA, 120 bp, Artificial Sequence
  ENSG00000110497_9 (sequence is synthesized)
cacaatttcctgcacatgctgtcctcccgctcttctggcatccagaccgagcccttccatcccccggagcaggcctcgtcaacgcagcaggaccagggcctcctgaaccggccgtctgcc

SEQ ID NO: 178351 - DNA, 120 bp, Artificial Sequence
  ENSG00000110497_10 (sequence is synthesized)
ttcagtacagtccagagcagcactgccggcaacacgctccgcaacctcagtctgggtcctacccgccgctctttgggagggcctctgtctagccacccttctaggtatcaccgagaaata

SEQ ID NO: 178352 - DNA, 120 bp, Artificial Sequence
  ENSG00000110497_11 (sequence is synthesized)
gctcctgggttgacaggatctgagtggacccggacagtactcagtctgaactcccgctctgaggcggaatccatgcccccgcccagaaccagtgcctcttcggtgagtttgctgtctgtg

SEQ ID NO: 178353 - DNA, 120 bp, Artificial Sequence
  ENSG00000110497_12 (sequence is synthesized)
ctgagacagcaggaaggtggctctcaggcatctgtgtacacttcagccacagaagggaggggttttccggcatcagggttggcaactgagtcagatggagggaatggctccagccaaaac

SEQ ID NO: 178354 - DNA, 120 bp, Artificial Sequence
  ENSG00000110497_13 (sequence is synthesized)
aactcgggcagcattcgccatgagcttcagtgtgacctgagacgcttctttctggagtatgaccggcttcaggagctggatcagagcctgagtggggaagctccccagacccaacaggcc

SEQ ID NO: 178355 - DNA, 120 bp, Artificial Sequence
  ENSG00000110497_14 (sequence is synthesized)
caggaaatgctcaacaataacattgaatctgagaggccaggcccttcccaccagcccaccccacacagcagtgagaacaactccaacctgtcccgtggccacctgaatcgctgtcgtgct

SEQ ID NO: 178356 - DNA, 120 bp, Artificial Sequence
  ENSG00000110497_15 (sequence is synthesized)
tgccacaatctcctgaccttcaacaacgataccctgcgctgggaaagaaccacacctaactactcctctggcgaggctagttcctcttggcaggtccccagctcctttgagagtgtgcca

SEQ ID NO: 178357 - DNA, 120 bp, Artificial Sequence
  ENSG00000110497_16 (sequence is synthesized)
tcaagtggcagccagttgccacctctcgagcggactgagggccaaacgcccagctccagcaggctggagttgagcagctctgctagtccgcaggaggagaggactgtgggggtggccttt

SEQ ID NO: 178358 - DNA, 120 bp, Artificial Sequence
  ENSG00000110497_17 (sequence is synthesized)
aaccaggagacaggccactgggaaagaatttacacccagtccagcagatctggaactgtgtcacaggaggccttacatcaggatatgcctgaggagagctctgaggaggattcactcagg

SEQ ID NO: 178359 - DNA, 120 bp, Artificial Sequence
  ENSG00000110497_18 (sequence is synthesized)
aggaggctgctggaatcttccctcatttcattatcccgttatgatggagcaggatccagagagcacccaatttacccagacccagcgagattatctcctgctgcatactacgcccagagg

SEQ ID NO: 178360 - DNA, 120 bp, Artificial Sequence
  ENSG00000110497_19 (sequence is synthesized)
atgatccagtatctctcacggagagacagtattcgccagcgctccatgcgctaccaacagaaccgtctccgttcttccacctcctcctcttcctcagacaaccagggtccatcagtagag

SEQ ID NO: 178361 - DNA, 120 bp, Artificial Sequence
  ENSG00000110497_20 (sequence is synthesized)
tcccaaggcgtttcttgctgcctgagtacttgccttatgctgggatttttcatgaacgtggacagcctggcttggctactcactcttctgttaacagggtcctggcaggggcagtgatcg

SEQ ID NO: 178362 - DNA, 120 bp, Artificial Sequence
  ENSG00000110497_21 (sequence is synthesized)
gtgatggacagtctgctgtggccagtaacattgccaatactacctaccggctccagtggtgggacttcactaagtttgacctccctgaaatcagtaatgcttccgtgaatgtgctggtgc

SEQ ID NO: 178363 - DNA, 120 bp, Artificial Sequence
  ENSG00000110497_22 (sequence is synthesized)
agaactgcaagatctacaatgatgccagctgtgacatttctgcagatggccagctcctggcagctttcatccccagcagccagaggggctttcctgatgaaggcatcctggcagtgtact

SEQ ID NO: 178364 - DNA, 120 bp, Artificial Sequence
  ENSG00000110497_23 (sequence is synthesized)
ccctggccccccataacctgggcgaaatgctctacaccaagcgatttggtcccaatgccatttcggtgagcctgtccccaatgggcagatatgtaatggtgggcttggcctcacgaagga

SEQ ID NO: 178365 - DNA, 120 bp, Artificial Sequence
  ENSG00000110497_24 (sequence is synthesized)
tcctgctgcacccctccacagagcacatggtggcccaggtcttcaggctgcaacaggcccatggtggagagacctccatgaggagagttttcaacgtcctttatcccatgcctgccgacc

SEQ ID NO: 178366 - DNA, 120 bp, Artificial Sequence
  ENSG00000110497_25 (sequence is synthesized)
agcggagacatgtcagtatcaactctgcccgttggctgcctgagccagggcttggcttggcctatggtactaacaaaggagacctggtgatctgccgaccagaggccttaaactctggtg

SEQ ID NO: 178367 - DNA, 120 bp, Artificial Sequence
  ENSG00000110497_26 (sequence is synthesized)
ttgagtactactgggaccagctgaacgagacggtcttcactgtccattccaacagcaggagcagcgagcggcctggaaccagcagagccacatggaggacagacagagacatggggctga

SEQ ID NO: 178368 - DNA, 120 bp, Artificial Sequence
  ENSG00000110497_27 (sequence is synthesized)
tgaatgccattgggcttcagccccggaaccctgccacctcagtgacatctcagggcacccagactctggcccttcagctgcagaatgccgaaacacagactgagagggaggtgccggagc

SEQ ID NO: 178369 - DNA, 120 bp, Artificial Sequence
  ENSG00000110497_28 (sequence is synthesized)
cagggacagccgcctcaggtcctggtgaaggtgagggttcagagtatggtgccagtggagaagatgcgctcagcaggatccagaggctgatggcggagggcggcatgacagccgtggtgc

SEQ ID NO: 178370 - DNA, 120 bp, Artificial Sequence
  ENSG00000110497_29 (sequence is synthesized)
agcgggagcagagcaccaccatggcctccatgggcggcttcggcaacaacatcatcgtcagccaccgcattcaccgcagctctcagacgggcactgaacctggtgccgcccacacctcct

SEQ ID NO: 178371 - DNA, 120 bp, Artificial Sequence
  ENSG00000110497_30 (sequence is synthesized)
caccccagccctccacctctcggggactgctcccagaggccgggcaactggcagagcgaggcctaagcccccggacagcttcctgggaccagcctggtacccctgggcgggagccaaccc

SEQ ID NO: 178372 - DNA, 120 bp, Artificial Sequence
  ENSG00000110497_31 (sequence is synthesized)
agccaaccctgccctcttcctcccctgtccccattcctgtttcccttcccagcgctgagggaccaaccctccactgcgagttgaccaataacaaccaccttctggatggtggcagcagca

SEQ ID NO: 178373 - DNA, 120 bp, Artificial Sequence
  ENSG00000110497_32 (sequence is synthesized)
ggggggacgctgcaggccctaggggagaaccacggaacaggtagagacaaacgttgcactggtgcctcccctcgaaccgccaagcagaaaccggacctcacagctgactgggaactggac

SEQ ID NO: 178374 - DNA, 120 bp, Artificial Sequence
  ENSG00000110497_33 (sequence is synthesized)
atgtggaagagctgctggctgcatcagggaacaggaggaggaagagggtcagggtggagaggaagatcagtcagtgggcacaagacagtcaaatgggcaaggcctgcctcggggaactag

SEQ ID NO: 178375 - DNA, 120 bp, Artificial Sequence
  ENSG00000110497_34 (sequence is synthesized)
aaccttccaggatctggagcccgggagagccacactgtgggcttaatgtgaatagaggaacaagtgggtatctctgccaggcaccccactttctcctagtaacatgggctcaggggactc

SEQ ID NO: 178376 - DNA, 120 bp, Artificial Sequence
  ENSG00000110497_35 (sequence is synthesized)
agccctggacagagagcctccagagagtgaacagtcttccagatctgggccaatcatcctggacagaggcccgcgaggcagctttgccctgtccacctgttgggtgggcagagccaccag

SEQ ID NO: 178377 - DNA, 120 bp, Artificial Sequence
  ENSG00000110497_36 (sequence is synthesized)
gaacccagacaccacctccaactctgagccttccagagcttcagcctctcttcgtcgtcttaccccactgaaaccaacagggatcgggccaggctcccagattcttgaggacagggactt

SEQ ID NO: 178378 - DNA, 120 bp, Artificial Sequence
  ENSG00000110497_37 (sequence is synthesized)
cggcatttactaatgggggactactgtggggtaagggggcgcctgcttgcctgatacaggatggggtcaagggacagtgggcaggtcctcactcaggagtggggggtgtaggctggccag

SEQ ID NO: 178379 - DNA, 120 bp, Artificial Sequence
  ENSG00000110497_38 (sequence is synthesized)
cccccagggcttgtccaccagtcttctccccgcaaggccctcagagcagcgcctgtgggtgtcagtattacctgagcctaggccaaagctagcccaaggctggggaaggggaggagactc

SEQ ID NO: 178380 - DNA, 120 bp, Artificial Sequence
  ENSG00000110497_39 (sequence is synthesized)
caggtcagaatgtgaggtctcagtctgtgatttaaggtgttgcatgtggactcttaactgtacgtgtagtttctagtggagaaatcaaggctctgatcattttgtttttagtatgaaaat

SEQ ID NO: 178381 - DNA, 120 bp, Artificial Sequence
  ENSG00000110497_40 (sequence is synthesized)
gtgatttcctttctgtttgtaactcatcatagaaacattgtggtgggaggagaggggatagtctacagctaatgagggaaacaccaaagatcacatcattaaaatgatgacatgcccctc

SEQ ID NO: 178382 - DNA, 120 bp, Artificial Sequence
  ENSG00000110497_41 (sequence is synthesized)
cagtgcaagattctgctaccccctcacccccaccgcctccccctcagccctccacggagcgccccaggacttccgcttacatcaggctccgacagcgggtcagttaccccacagctgagt

SEQ ID NO: 178383 - DNA, 120 bp, Artificial Sequence
  ENSG00000110497_42 (sequence is synthesized)
gctgccagcaccttgggatcctgtgcctttgcagccgctgctctggcactcgagttccttccctcttgccacaccaggacagtgtcccccctgcttctgccagagctactaccccttcct

SEQ ID NO: 178384 - DNA, 120 bp, Artificial Sequence
  ENSG00000110497_43 (sequence is synthesized)
attcggtgatcttttgcgccgtcttcttgcttgatgtctcctgagcggcggcggcgccgggtcgagggctgagttgtccgcgaggccccgcgctcaagccgccttctcctgccggtcggt

SEQ ID NO: 178385 - DNA, 120 bp, Artificial Sequence
  ENSG00000110497_44 (sequence is synthesized)
agaacggaccccttcctttattcctgtctcctctttctttttccctgtggctcagcccgttcgctggactgcaaaccgagctcccgtctgccttgcagctgcttcagtgtgttggagctg

SEQ ID NO: 178386 - DNA, 120 bp, Artificial Sequence
  ENSG00000110497_45 (sequence is synthesized)
aaagcttagtttctttcatgttgggattggcaggtagcatcaatattctatgtcgtccaaagttgataagattggttacccttccacatgcttctgaattcagttctactctttgatttt

SEQ ID NO: 178387 - DNA, 81 bp, Artificial Sequence
  ENSG00000110497_46 (sequence is synthesized)
ctggctgcctagatggggaggttaggatttgggatttacacgtgagtatttccttaagatacccttttcttttggtgttag

SEQ ID NO: 178388 - DNA, 120 bp, Artificial Sequence
  ENSG00000110497_47 (sequence is synthesized)
gcagggtccttgtgtttatcaaactgcacaaacaggacatccagaaacctgctgtcagcaggtctctcctgaagctctcagcagctgcctttgcataaagatgttcataagcagggtaaa

SEQ ID NO: 178389 - DNA, 120 bp, Artificial Sequence
  ENSG00000110497_48 (sequence is synthesized)
aactctgcccgttggctgcctgagccagggcttggcttggcctatggtactaacaaaggagacctggtgatctgccgaccagaaaccagcagagccacatggaggacagacagagacatg

SEQ ID NO: 178390 - DNA, 120 bp, Artificial Sequence
  ENSG00000110497_49 (sequence is synthesized)
gctttctcttttgggaaaataaaaaccaaatactttcaatggatcagcttccaatatccctggtattgatttgtcatttaatgctcggcagccaattctaccaagatataaaaaccatca

SEQ ID NO: 178391 - DNA, 120 bp, Artificial Sequence
  ENSG00000110497_50 (sequence is synthesized)
tagacttttgtttctggcttgtgaagttcccagtggtccacttaaaagccaagtgttgccttaacttcggtttcagggccagtttgaagattatctcattgatttgaagataatccaaag

SEQ ID NO: 178392 - DNA, 120 bp, Artificial Sequence
  ENSG00000110497_51 (sequence is synthesized)
ggagaattcagaaaatatcccaaatcaagctctcaaaggttcatttattttgtggagttggttaagccgctcattaactgctctgtccagccagtgccctttggcttattattcttttga

SEQ ID NO: 178393 - DNA, 120 bp, Artificial Sequence
  ENSG00000110497_52 (sequence is synthesized)
tgtactggaaactaaaacatgtgaagctcctttcctcttctcttgtaggaagcagtgaaatgtagtggaaagatctaggacttcaaagtccaatcttccttgaatcctgccttaaccact

SEQ ID NO: 178394 - DNA, 120 bp, Artificial Sequence
  ENSG00000110497_53 (sequence is synthesized)
tactagttatgtgaccatggtatttacctctctggtctttcgtccgcttctctgtaaaatagtaataatacttcgtggcctagccagaagaattaaatgggataacatatcaataacctt

SEQ ID NO: 178395 - DNA, 120 bp, Artificial Sequence
  ENSG00000110497_54 (sequence is synthesized)
tgtattggaacctagcagatacttaataaatggcagttactactattgcatggactgttaacagtccataaagaaaacacccagactttgtattcaaatgacctaacataggattacgtt

SEQ ID NO: 178396 - DNA, 120 bp, Artificial Sequence
  ENSG00000110497_55 (sequence is synthesized)
tccacatggaagacctaaacagatttcatttgaagataaccatttgccaaatgaaattggtgggggaatttttcttcctttaagacctcctcccacagcaggcgtctggataacaagtaa

SEQ ID NO: 178397 - DNA, 120 bp, Artificial Sequence
  ENSG00000110497_56 (sequence is synthesized)
actgaatcccagagggctaacttgcccagagtaatgcagctaagaagtagaagaatggagccagtagtctctaaaccaccttcccgatccgcctcctcgtagttgttttaaaggacaaaa

SEQ ID NO: 178398 - DNA, 120 bp, Artificial Sequence
  ENSG00000110497_57 (sequence is synthesized)
cattaaaatgtcattctttttcttaggactttataagagggagagagctcccagggaacttcagtgtttttcttgtttgttttaattattctatttaaatggttcctagacataggtttt

SEQ ID NO: 178399 - DNA, 120 bp, Artificial Sequence
  ENSG00000110497_58 (sequence is synthesized)
tatgatccagtggtgcttgctgaggaaaatcttattatgtaaccgcccttttcctgagccttcttgccctcctggatacagatgttttgctttttattaaacttacttgtgatcatgtaa

SEQ ID NO: 178400 - DNA, 120 bp, Artificial Sequence
  ENSG00000110497_59 (sequence is synthesized)
ttagaaggaagggcagaaaaagatagatacaaatctgcggaaggaccaatcttgggagattttatttctttctgggcatctgtggattcagtgggtcccttagcccagatttttcagtgt

SEQ ID NO: 178401 - DNA, 120 bp, Artificial Sequence
  ENSG00000110497_60 (sequence is synthesized)
gatagtccacgctctaccttcttattggccttcagcccagacagggtggcagtgaaagctggttcacagatagcaacaatgccattgcctccctggctttccaccctacggctcagctcc

SEQ ID NO: 178402 - DNA, 120 bp, Artificial Sequence
  ENSG00000110514_0 (sequence is synthesized)
cccgctgcccaggattggtaggctccaccgctcggcagccggcttccctgctcggacgccgagcaccgccaaagcgcacttcgattttcagaattcctcctgggaatgctgactccttgc

SEQ ID NO: 178403 - DNA, 120 bp, Artificial Sequence
  ENSG00000110514_1 (sequence is synthesized)
ttggtgccctgatgcttctctgagataaactgatgaattggaaccatggtgcaaaagaagaagttctgtcctcggttacttgactatctagtgatcgtaggggccaggcacccgagcagt

SEQ ID NO: 178404 - DNA, 120 bp, Artificial Sequence
  ENSG00000110514_2 (sequence is synthesized)
gatagcgtggcccagactcctgaattgctacggcgataccccttggaggatcacactgagtttcccctgcccccagatgtagtgttcttctgccagcccgagggctgcctgagcgtgcgg

SEQ ID NO: 178405 - DNA, 120 bp, Artificial Sequence
  ENSG00000110514_3 (sequence is synthesized)
cagcggcgcatgagccttcgggatgatacctcttttgtcttcaccctcactgacaaggacactggagtcacgcgatatggcatctgtgttaacttctaccgctccttccaaaagcgaatc

SEQ ID NO: 178406 - DNA, 120 bp, Artificial Sequence
  ENSG00000110514_4 (sequence is synthesized)
tctaaggagaagggggaaggtggggcagggtcccgtgggaaggaaggaacccatgccacctgtgcctcagaagagggtggcactgagagctcagagagtggctcatccctgcagcctctc

SEQ ID NO: 178407 - DNA, 120 bp, Artificial Sequence
  ENSG00000110514_5 (sequence is synthesized)
agtgctgactctacccctgatgtgaaccagtctcctcggggcaaacgccgggccaaggcggggagccgctcccgcaacagtactctcacgtccctgtgcgtgctcagccactaccctttc

SEQ ID NO: 178408 - DNA, 120 bp, Artificial Sequence
  ENSG00000110514_6 (sequence is synthesized)
ttctccaccttccgagagtgtttgtatactctcaagcgcctggtggactgctgtagtgagcgccttctgggcaagaaactgggcatccctcgaggcgtacaaagggacaccatgtggcgg

SEQ ID NO: 178409 - DNA, 120 bp, Artificial Sequence
  ENSG00000110514_7 (sequence is synthesized)
atctttactggatcgctgctggtagaggagaagtcaagtgcccttctgcatgaccttcgagagattgaggcctggatctatcgattgctgcgctccccagtacccgtctctgggcagaag

SEQ ID NO: 178410 - DNA, 120 bp, Artificial Sequence
  ENSG00000110514_8 (sequence is synthesized)
cgagtagacatcgaggtcctaccccaagagctccagccagctctgacctttgctcttccagacccatctcgattcaccctagtggatttcccactgcaccttcccttggaacttctaggt

SEQ ID NO: 178411 - DNA, 120 bp, Artificial Sequence
  ENSG00000110514_9 (sequence is synthesized)
gtggacgcctgtctccaggtgctaacctgcattctgttagagcacaaggtggtgctacagtcccgagactacaatgcactctccatgtctgtgatggcattcgtggcaatgatctaccca

SEQ ID NO: 178412 - DNA, 120 bp, Artificial Sequence
  ENSG00000110514_10 (sequence is synthesized)
ctggagtatatgtttcctgtcatcccgctgctacccacctgcatggcatcagcagagcagctgctgttggctccaaccccgtacatcattggggttcctgccagcttcttcctctacaaa

SEQ ID NO: 178413 - DNA, 120 bp, Artificial Sequence
  ENSG00000110514_11 (sequence is synthesized)
ctggacttcaaaatgcctgatgatgtatggctagtggatctggacagcaatagggtgattgcccccaccaatgcagaagtgctgcctatcctgccagaaccagaatcactagagctgaaa

SEQ ID NO: 178414 - DNA, 120 bp, Artificial Sequence
  ENSG00000110514_12 (sequence is synthesized)
aagcatttaaagcaggccttggccagcatgagtctcaacacccagcccatcctcaatctggagaaatttcatgagggccaggagatcccccttctcttgggaaggccttctaatgacctg

SEQ ID NO: 178415 - DNA, 120 bp, Artificial Sequence
  ENSG00000110514_13 (sequence is synthesized)
cagtccacaccgtccactgaattcaacccactcatctatggcaatgatgtggattctgtggatgttgcaaccagggttgccatggtacggttcttcaattccgccaacgtgctgcaggga

SEQ ID NO: 178416 - DNA, 120 bp, Artificial Sequence
  ENSG00000110514_14 (sequence is synthesized)
tttcagatgcacacgcgtaccctgcgcctctttcctcggcctgtggtagcttttcaagctggctcctttctagcctcacgtccccggcagactccttttgccgagaaattggccaggact

SEQ ID NO: 178417 - DNA, 120 bp, Artificial Sequence
  ENSG00000110514_15 (sequence is synthesized)
caggctgtggagtactttggggaatggatccttaaccccaccaactatgcctttcagcgaattcacaacaatatgtttgatccagccctgattggtgacaagccaaagtggtatgctcat

SEQ ID NO: 178418 - DNA, 120 bp, Artificial Sequence
  ENSG00000110514_16 (sequence is synthesized)
cagctgcagcctatccactatcgcgtctatgacagcaattcccagctggctgaggccctgagtgtaccaccagagcgggactctgactccgaacctactgatgatagtggcagtgatagt

SEQ ID NO: 178419 - DNA, 120 bp, Artificial Sequence
  ENSG00000110514_17 (sequence is synthesized)
atggattatgacgattcaagctcttcttactcctcccttggtgactttgtcagtgaaatgatgaaatgtgacattaatggtgatactcccaatgtggaccctctgacacatgcagcactg

SEQ ID NO: 178420 - DNA, 120 bp, Artificial Sequence
  ENSG00000110514_18 (sequence is synthesized)
ggggatgccagcgaggtggagattgacgagctgcagaatcagaaggaagcagaagagcctggcccagacagtgagaactctcaggaaaaccccccactgcgctccagctctagcaccaca

SEQ ID NO: 178421 - DNA, 120 bp, Artificial Sequence
  ENSG00000110514_19 (sequence is synthesized)
gccagcagcagccccagcactgtcatccacggagccaactctgaacctgctgactctacggagatggatgataaggcagcagtaggcgtctccaagcccctcccttccgtgcctcccagc

SEQ ID NO: 178422 - DNA, 120 bp, Artificial Sequence
  ENSG00000110514_20 (sequence is synthesized)
attggcaaatcgaacgtggacagacgtcaggcagaaattggagaggggtcagtgcgccggcgaatctatgacaatccatacttcgagccccaatatggctttccccctgaggaagatgag

SEQ ID NO: 178423 - DNA, 120 bp, Artificial Sequence
  ENSG00000110514_21 (sequence is synthesized)
gatgagcagggggaaagttacactccccgattcagccaacatgtcagtggcaatcgggctcaaaagctgctgcggcccaacagcttgagactggcaagtgactcagatgcagagtcagac

SEQ ID NO: 178424 - DNA, 120 bp, Artificial Sequence
  ENSG00000110514_22 (sequence is synthesized)
tctcgggcaagctctcccaactccaccgtctccaacaccagcaccgagggcttcgggggcatcatgtcttttgccagcagcctctatcggaaccacagtaccagcttcagtctttcaaac

SEQ ID NO: 178425 - DNA, 120 bp, Artificial Sequence
  ENSG00000110514_23 (sequence is synthesized)
ctcacactgcccaccaaaggtgcccgagagaaggccacgcccttccccagtctgaaagtatttgggctaaatactctaatggagattgttactgaagccggccccgggagtggtgaagga

SEQ ID NO: 178426 - DNA, 120 bp, Artificial Sequence
  ENSG00000110514_24 (sequence is synthesized)
gcagttcctgaaggaggtggtgcacagcgtgctggacggccagggagttggctggctcaacatgaaaaaggtgcgccggctgctggagagcgagcagctgcgagtctttgtcctgagcaa

SEQ ID NO: 178427 - DNA, 120 bp, Artificial Sequence
  ENSG00000110514_25 (sequence is synthesized)
gctgaaccgcatggtgcagtcagaggacgatgcccggcaggacatcatcccggatgtggagatcagtcggaaggtgtacaagggaatgttagacctcctcaagtgtacagtcctcagctt

SEQ ID NO: 178428 - DNA, 120 bp, Artificial Sequence
  ENSG00000110514_26 (sequence is synthesized)
ggagcagtcctatgcccacgcgggtctgggtggcatggccagcatctttgggcttttggagattgcccagacccactactatagtaaagaaccagacaagcggaagagaagtccaacaga

SEQ ID NO: 178429 - DNA, 120 bp, Artificial Sequence
  ENSG00000110514_27 (sequence is synthesized)
aagtgtaaataccccagttggcaaggatcctggcctagctgggcggggggacccaaaggctatggcacaactgagagttccacaactgggacctcgggcaccaagtgccacaggaaaggg

SEQ ID NO: 178430 - DNA, 120 bp, Artificial Sequence
  ENSG00000110514_28 (sequence is synthesized)
tcctaaggaactggacaccagaagtttaaaggaagaaaattttatagcatctattgaattgtggaacaagcaccaggaagtgaaaaagcaaaaagctttggaaaaacagaggcctgaagt

SEQ ID NO: 178431 - DNA, 120 bp, Artificial Sequence
  ENSG00000110514_29 (sequence is synthesized)
aatcaaacctgtctttgaccttggtgagacagaggagaaaaagtcccagatcagcgcagacagtggtgtgagcctgacgtctagttcccagaggactgatcaagactctgtcatcggcgt

SEQ ID NO: 178432 - DNA, 120 bp, Artificial Sequence
  ENSG00000110514_30 (sequence is synthesized)
gagtccagctgttatgatccgcagctcaagtcaggattctgaagttagcaccgtggtgagtaatagctctggagagacccttggagctgacagtgacttgagcagcaatgcaggtgatgg

SEQ ID NO: 178433 - DNA, 120 bp, Artificial Sequence
  ENSG00000110514_31 (sequence is synthesized)
accaggtggcgagggcagtgttcacctggcaagctctcggggcactttgtctgatagtgaaattgagaccaactctgccacaagcaccatctttggtaaagcccacagcttgaagccaag

SEQ ID NO: 178434 - DNA, 120 bp, Artificial Sequence
  ENSG00000110514_32 (sequence is synthesized)
cataaaggagaagctggcaggcagccccattcgtacttctgaagatgtgagccagcgagtctatctctatgagggactcctaggaagggacaaaggatccatgtgggaccagttagagga

SEQ ID NO: 178435 - DNA, 120 bp, Artificial Sequence
  ENSG00000110514_33 (sequence is synthesized)
tgcagctatggagaccttttctataagcaaagagcgttctactttatgggaccaaatgcaattctgggaagatgccttcttagatgctgtgatgttggagagagaagggatgggtatgga

SEQ ID NO: 178436 - DNA, 120 bp, Artificial Sequence
  ENSG00000110514_34 (sequence is synthesized)
ccagggtccccaggaaatgatcgacaggtacctgtcccttggagaacatgaccggaagcgcctggaagatgatgaagatcgcttgttggccacacttctgcacaacctcatctcctacat

SEQ ID NO: 178437 - DNA, 120 bp, Artificial Sequence
  ENSG00000110514_35 (sequence is synthesized)
gctgctgatgaaggtaaataagaatgacatccgcaagaaggtgaggcgcctaatgggaaagtcgcacattgggcttgtgtacagccagcaaatcaatgaggtgcttgatcagctggcgaa

SEQ ID NO: 178438 - DNA, 120 bp, Artificial Sequence
  ENSG00000110514_36 (sequence is synthesized)
cctgaatggacgcgatctctctatctggtccagtggcagccggcacatgaagaagcagacatttgtggtacatgcagggacagatacaaacggagatatctttttcatggaggtgtgcga

SEQ ID NO: 178439 - DNA, 120 bp, Artificial Sequence
  ENSG00000110514_37 (sequence is synthesized)
tgactgtgtggtgttgcgtagtaacatcggaacagtgtatgagcgctggtggtacgagaagctcatcaacatgacctactgtcccaagacgaaggtgttgtgcttgtggcgtagaaatgg

SEQ ID NO: 178440 - DNA, 120 bp, Artificial Sequence
  ENSG00000110514_38 (sequence is synthesized)
ctctgagacccagctcaacaagttctatactaaaaagtgtcgggagctgtactactgtgtgaaggacagcatggagcgcgctgccgcccgacagcaaagcatcaaacccggacctgaatt

SEQ ID NO: 178441 - DNA, 120 bp, Artificial Sequence
  ENSG00000110514_39 (sequence is synthesized)
gggtggcgagttccctgtgcaggacctgaagactggtgagggtggcctgctgcaggtgaccctggaagggatcaacctcaaattcatgcacaatcaggttttcatagagctgaatcacat

SEQ ID NO: 178442 - DNA, 120 bp, Artificial Sequence
  ENSG00000110514_40 (sequence is synthesized)
taaaaagtgcaatacagttcgaggcgtctttgtcctggaggaatttgttcctgaaattaaagaagtggtgagccacaagtacaagacaccaatggcccacgaaatctgctactccgtatt

SEQ ID NO: 178443 - DNA, 120 bp, Artificial Sequence
  ENSG00000110514_41 (sequence is synthesized)
atgtctcttctcgtacgtggctgcagttcatagcagtgaggaagatctcagaaccccgccccggcctgtctctagctgatggagaggggctacgcagctgccccagcccagggcacgccc

SEQ ID NO: 178444 - DNA, 120 bp, Artificial Sequence
  ENSG00000110514_42 (sequence is synthesized)
ctggccccttgctgttcccaagtgcacgatgctgctgtgactgaggagtggatgatgctcgtgtgtcctctgcaagccccctgctgtggcttggttggttaccggttatgtgtccctctg

SEQ ID NO: 178445 - DNA, 120 bp, Artificial Sequence
  ENSG00000110514_43 (sequence is synthesized)
agtgtgtcttgagcgtgtccaccttctccctctccactcccagaagaccaaactgccttcccctcagggctcaagaatgtgtacagtctgtggggccggtgtgaacccactattttgtgt

SEQ ID NO: 178446 - DNA, 120 bp, Artificial Sequence
  ENSG00000110514_44 (sequence is synthesized)
ccttgagacatttgtgttgtggttccttgtccttgtccctggcgttataactgtccactgcaagagtctggctctcccttctctgtgacccggcatgactgggcgcctggagcagtttca

SEQ ID NO: 178447 - DNA, 120 bp, Artificial Sequence
  ENSG00000110514_45 (sequence is synthesized)
ctctgtgaggagtgagggaaccctggggctcaccctctcagaggaagggcacagagaggaagggaagaattggggggcagccggagtgagtggcagcctccctgcttccttctgcattcc

SEQ ID NO: 178448 - DNA, 120 bp, Artificial Sequence
  ENSG00000110514_46 (sequence is synthesized)
caagccggcagctactgcccagggcccgcagtgttggctgctgcctgccacagcctctgtgactgcagtggagcggcgaattccctgtggcctgccatgccttcggcatcagaggatgga

SEQ ID NO: 178449 - DNA, 120 bp, Artificial Sequence
  ENSG00000110514_47 (sequence is synthesized)
gtggtcgaggctagtggagtcccagggaccgctggctgctctgcctgagcatcagggagggggcaggaaagaccaagctgggtttgcacatctgtctgcaggctgtctctccaggcacgg

SEQ ID NO: 178450 - DNA, 120 bp, Artificial Sequence
  ENSG00000110514_48 (sequence is synthesized)
ggtgtcaggagggagagacagcctgggtatgggcaagaaatgactgtaaatatttcagccccacattatttatagaaaatgtacagttgtgtgaatgtgaaataaatgtcctcaactccc

SEQ ID NO: 178451 - DNA, 120 bp, Artificial Sequence
  ENSG00000110514_49 (sequence is synthesized)
gatttcagcgctaaggcgtcggcggtgcacctcacgtgcatgtgtagcatgccttggtttttcctttggcatctgaaaaaggcacaacctgaaagacctagaacccagtgtcggtcccca

SEQ ID NO: 178452 - DNA, 120 bp, Artificial Sequence
  ENSG00000110514_50 (sequence is synthesized)
ggccctttgggacaggaagagaagagccgtgtggccgcggggaggatgtcctgaggcggggctgtcctcgcggactgactggactccatctcccagcgggcgccgcggcgcggccacgcc

SEQ ID NO: 178453 - DNA, 120 bp, Artificial Sequence
  ENSG00000110514_51 (sequence is synthesized)
ctggcgcccgctcggagcggcgccgcgctggggagcgactgacgccccgctgccgggggacgtcgggctgggcctggccagtcccccagagcttgggagacttcgattttcagaattcct

SEQ ID NO: 178454 - DNA, 120 bp, Artificial Sequence
  ENSG00000110514_52 (sequence is synthesized)
cccaccaaaggtgcccgagagaaggccacgcccttccccagtctgaaaggaaacaggagggcgttagtggatcagaagtcatctgtcattaaacacagcccaacagtgaaaagagaacct

SEQ ID NO: 178455 - DNA, 120 bp, Artificial Sequence
  ENSG00000110514_53 (sequence is synthesized)
cttaggtctggactcacatggcagtaactcaaacctcggagctccagaggagggtctaggggcagggagaagaagaacctctgtagagaagtcaggaggagcaggagtgacaaggaagaa

SEQ ID NO: 178456 - DNA, 120 bp, Artificial Sequence
  ENSG00000110514_54 (sequence is synthesized)
aagggacccctgagatgagagccgggatgtggaagggaaagatagataatggatcgcagaagagcaaatggggcctcaggtgggtttcgagtttagaggtggtcctgaagcagctcagtg

SEQ ID NO: 178457 - DNA, 120 bp, Artificial Sequence
  ENSG00000110514_55 (sequence is synthesized)
aagtagcaccacctccccgtgctgggccagccagtggtcagaaagtttgggacacagcagactggcgacccccaagctccactatgtccatgtcacctgctgcaatctctctagcagccc

SEQ ID NO: 178458 - DNA, 120 bp, Artificial Sequence
  ENSG00000110514_56 (sequence is synthesized)
ttcatccagcctcaagaccctctgtgtagggggctgggaataacgggaactgtgtttaacatgacccaattttcaggctggtgacgagttcacgggtgtctcagcaaagttggacacaag

SEQ ID NO: 178459 - DNA, 120 bp, Artificial Sequence
  ENSG00000110514_57 (sequence is synthesized)
ctagagagagctctctcctcccagccaaaacctgggaattccccactgcagctcctcaggggccctggacagtagctgtgaccaggctggtgaaaggcccgtccctcccatccagggctt

SEQ ID NO: 178460 - DNA, 120 bp, Artificial Sequence
  ENSG00000110514_58 (sequence is synthesized)
tcaaagaagtgggtagaatcacggccatcaagtaaacgccactgcggatgacagaggcctagctgaggaggctagggccatgtcctcccagctggcagagtctggacagagcctctggtg

SEQ ID NO: 178461 - DNA, 120 bp, Artificial Sequence
  ENSG00000110514_59 (sequence is synthesized)
ccctctggagctagagggagaactggagcagctggacccaggaaagaaaccccaggggagggcacagtgacgttggcgaccacctggcgctgtgaaggtgcaccagggagcccgtggggg

SEQ ID NO: 178462 - DNA, 120 bp, Artificial Sequence
  ENSG00000110514_60 (sequence is synthesized)
aggctgggcaggagcgaggccaggtggccacgctgccccatccgttggactccacacagtgtgagtgggagcgtctcacttggcccttcccctgcagtgtctctgccttcctctattccc

SEQ ID NO: 178463 - DNA, 120 bp, Artificial Sequence
  ENSG00000110514_61 (sequence is synthesized)
aggatatgcttctgcttggtggttttgctttgagagtctagactggccgatctccttgtgtctttctggtgtgcgtgcagcttgcgtgtgcgtgcgtgcgtgcctgcgtgcttgtgtgta

SEQ ID NO: 178464 - DNA, 120 bp, Artificial Sequence
  ENSG00000110514_62 (sequence is synthesized)
gaaagtctgagaagtctgaatgctctcgtggtcctgccatccccagaggatggtgttctgatccaggggcttaggaattacgggaagggagtggcaactgtagtatagcataattatggc

SEQ ID NO: 178465 - DNA, 120 bp, Artificial Sequence
  ENSG00000110514_63 (sequence is synthesized)
tatagagataaaactgaatcctattacctgcaggtcctctactgggagcaagggaaaggagaaagcagtattttgaggatttgagagacttcgattttcagaattcctcctgggaatgct

SEQ ID NO: 178466 - DNA, 120 bp, Artificial Sequence
  ENSG00000110514_64 (sequence is synthesized)
aggctccaccgctcggcagccggcttccctgctcggacgccgagcaccgccaaagcgcgtgagtggggggtggggactgggggatggggagcccgtcaggaagtctcaggggccgattat

SEQ ID NO: 178467 - DNA, 120 bp, Artificial Sequence
  ENSG00000110514_65 (sequence is synthesized)
cttgggaagtgactttcagaggaatccccatgtcgtcgaaacgggcgctatgaccccgtcgggtgagagtctctctgagcaacccaaacagaagacttcgattttcagaattcctcctgg

SEQ ID NO: 178468 - DNA, 120 bp, Artificial Sequence
  ENSG00000110514_66 (sequence is synthesized)
aatagaggaggaagcctgcgatctttaggatccgcctccaggcccagaggagggagagtcacaaatgacagccttggccgtgagagggggcctcttcttactaacccccactgcgccata

SEQ ID NO: 178469 - DNA, 120 bp, Artificial Sequence
  ENSG00000110536_0 (sequence is synthesized)
gggtcgccgctgcgccgggccgggatggcggccaccgcgctgctggaggccggcctggcgcgggtgctcttctacccgacgctgctctacaccctgttccgcgggaaggtgccgggtcgg

SEQ ID NO: 178470 - DNA, 120 bp, Artificial Sequence
  ENSG00000110536_1 (sequence is synthesized)
gcgcaccgggactggtaccaccgcatcgaccccaccgtgctgctgggcgcgctgccgttgcggagcttgacgcgccagctggtacaggacgagaacgtgcgcggggtgatcaccatgaac

SEQ ID NO: 178471 - DNA, 120 bp, Artificial Sequence
  ENSG00000110536_2 (sequence is synthesized)
gaggagtacgagacgaggttcctgtgcaactcttcacaggagtggaagagactaggagtcgagcagctgcggctcagcacagtagacatgactgggatccccaccttggacaacctccag

SEQ ID NO: 178472 - DNA, 120 bp, Artificial Sequence
  ENSG00000110536_3 (sequence is synthesized)
aagggagtccaatttgctctcaagtaccagtcgctgggccagtgtgtttacgtgcattgtaaggctgggcgctccaggagtgccactatggtggcagcatacctgattcaggtgcacaaa

SEQ ID NO: 178473 - DNA, 120 bp, Artificial Sequence
  ENSG00000110536_4 (sequence is synthesized)
tggagtccagaggaggctgtaagagccatcgccaagatccggtcatacatccacatcaggcctggccagctggatgttcttaaagagttccacaagcagattactgcacgggcaacaaag

SEQ ID NO: 178474 - DNA, 120 bp, Artificial Sequence
  ENSG00000110536_5 (sequence is synthesized)
gatgggacttttgtcatttcaaagacatgatgtatggggattagaaagaactcaagacactcctgcttgatacagaacaaaaagagcttaacaggaccaacagggcttaagcccagactt

SEQ ID NO: 178475 - DNA, 120 bp, Artificial Sequence
  ENSG00000110536_6 (sequence is synthesized)
gacgtaacagaaatgtgccaataggtaataggtaatttttctttctctgacttgttttgttttcttgaaataacactgttgtgtggctagaaaggaaaagatttagtgtggcttgtattc

SEQ ID NO: 178476 - DNA, 120 bp, Artificial Sequence
  ENSG00000110536_7 (sequence is synthesized)
atgggatacaggacagggatggggctatcatcttttcttgaatagggctaaagaagtattttaacaaaaatctattatgtacctaatattgtgcctaataatatttagcaccacaactca

SEQ ID NO: 178477 - DNA, 120 bp, Artificial Sequence
  ENSG00000110536_8 (sequence is synthesized)
aaaaacatttagcacttgaaaaaaggagactcacctctggctctttgccactgtcagaatctgaatctcactggccctgtggagtagggatcctatctggagaagtgggagcatgggctg

SEQ ID NO: 178478 - DNA, 120 bp, Artificial Sequence
  ENSG00000110536_9 (sequence is synthesized)
cagtcaggactgctgcagactgagccatgtgatggtacgtaatgagttcccctgagggaatgaaacaccctcaccccttcaaagtcacccctttggaattcaacacagacacacatatcc

SEQ ID NO: 178479 - DNA, 120 bp, Artificial Sequence
  ENSG00000110536_10 (sequence is synthesized)
agagcagacaccttatatatttgagattgaaaaagtttctgctattaatcagaaataatcatttctattttctggcttaccccttggaataagccaaaaataaaaccaaagttacatttc

SEQ ID NO: 178480 - DNA, 120 bp, Artificial Sequence
  ENSG00000110536_11 (sequence is synthesized)
ctgacagatggataagaaaacaatagaaggaacatcctgaattctagagttgactcttgctggtgaagtacaccttcagcttagtccattctcctaagtaaagcctgaaggaaaactctt

SEQ ID NO: 178481 - DNA, 120 bp, Artificial Sequence
  ENSG00000110536_12 (sequence is synthesized)
aacacctaattctttgtggaaaaatgatcaactagccatttcacaggctatagaacaaaagtacaattgggcatctttccttatgtcctgggatcaggggtgcttacatttaacattgat

SEQ ID NO: 178482 - DNA, 120 bp, Artificial Sequence
  ENSG00000110536_13 (sequence is synthesized)
caggtaaagaggagaggctgtgcctaaggtctgagaaaaggcttgctctaagcaagctgtggtgaggcacaggatgactagggaatggcagagaacaggctggcctactgtcagttcaag

SEQ ID NO: 178483 - DNA, 120 bp, Artificial Sequence
  ENSG00000110536_14 (sequence is synthesized)
caaccagctgagcagcagcagtctaaaaagccccaaacagaacacctccatggattcagggaagggctgaggcactgcctttctagtatgtgccaaaaaaaacataactctgaattgggg

SEQ ID NO: 178484 - DNA, 120 bp, Artificial Sequence
  ENSG00000110536_15 (sequence is synthesized)
cccaggggactttgagtttgtatggggagggaaaaggagtgagcagttctcctcccctccccacagccttaggccaacacaaactgcaaattggtaagcagcaccttaatacctcttgtg

SEQ ID NO: 178485 - DNA, 120 bp, Artificial Sequence
  ENSG00000110536_16 (sequence is synthesized)
acagttacggctgaagtggcagggtcaagcttgtaggtgttggcatccccctttttatatcggtcccggaagacatagatgctcccgttacagctggcaatcttccagagggatggggca

SEQ ID NO: 178486 - DNA, 120 bp, Artificial Sequence
  ENSG00000110536_17 (sequence is synthesized)
gagctccaggcctcaggaaggcaaagccgggtgaagctgtctagcaagggattgtagcacaccagggagtccccttcagccacgatgaacaccagatctttatgcacagctgcgtgcatg

SEQ ID NO: 178487 - DNA, 120 bp, Artificial Sequence
  ENSG00000110536_18 (sequence is synthesized)
cggcctgcaaagggcagcacatagggcttcacatggcatttgtctgtctctgtgtcaaagcactggatgagtcgggaaggtttggtaaagaagtccagatcattctcctccccccctagt

SEQ ID NO: 178488 - DNA, 120 bp, Artificial Sequence
  ENSG00000110536_19 (sequence is synthesized)
aagtagatgatcccgttgaggttggcaccagcagcccctgacacagccacctctagctgagttgtctctgtccacacattatcacctacgcgataataaatgactgcgttggagagggta

SEQ ID NO: 178489 - DNA, 120 bp, Artificial Sequence
  ENSG00000110536_20 (sequence is synthesized)
gtcccgccagtcccccagagtccaggccagtccccgccgtcacccggtgcgagcccgcgagaggcctagtgcagctggcagccccgccccggcacccgcctgctcttctcgcgggtccgg

SEQ ID NO: 178490 - DNA, 120 bp, Artificial Sequence
  ENSG00000110536_21 (sequence is synthesized)
gggcccctgccccgtccccgccgctccgtccctgtcgggccgctggggtctccaccgtctttgctgagccacctctttgcctcggcagctggtacaggacgagaacgtgcgcggggtgat

SEQ ID NO: 178491 - DNA, 120 bp, Artificial Sequence
  ENSG00000110583_0 (sequence is synthesized)
gtccgctctgctgccgccgctgttgcagccaccgccgttgccgcctccctgccggcaagtgtgtgaagaagaagctgagcgttgtcgccgccgctatggggagaaagtcaagcaaagcca

SEQ ID NO: 178492 - DNA, 120 bp, Artificial Sequence
  ENSG00000110583_1 (sequence is synthesized)
aggagaagaagcagaagcggttggaggagcgagcagccatggatgccgtttgtgccaaagtggacgctgccaacaggcttggagaccctctggaggctttcccagtgttcaagaaatatg

SEQ ID NO: 178493 - DNA, 120 bp, Artificial Sequence
  ENSG00000110583_2 (sequence is synthesized)
atagaaacgggttgaatgtctccattgaatgtaagcgagtgtctggactggagccagccaccgtggattgggccttcgacctgaccaaaacgaatatgcaaaccatgtatgagcagagcg

SEQ ID NO: 178494 - DNA, 120 bp, Artificial Sequence
  ENSG00000110583_3 (sequence is synthesized)
agtggggctggaaggaccgagagaaacgggaggaaatgacagatgaccgagcctggtacctcatcgcgtgggaaaacagctccgtccctgttgccttttctcacttccggtttgacgtgg

SEQ ID NO: 178495 - DNA, 120 bp, Artificial Sequence
  ENSG00000110583_4 (sequence is synthesized)
agtgtggggatgaagtcctgtactgctatgaagtgcagttggaaagcaaggtgcggcggaaaggcctggggaagttcctcatacagatcctgcagctcatggccaacagcacacagatga

SEQ ID NO: 178496 - DNA, 120 bp, Artificial Sequence
  ENSG00000110583_5 (sequence is synthesized)
agaaggttatgttaacagtatttaaacacaatcatggtgcctaccagttcttcagagaagcgttgcaatttgaaattgatgactcttcccccagcatgtccggttgctgtggggaggatt

SEQ ID NO: 178497 - DNA, 120 bp, Artificial Sequence
  ENSG00000110583_6 (sequence is synthesized)
gctcctatgagatcctgagccggaggaccaagtttggggacagccatcactcccacgcgggtgggcactgtggtggctgctgccactgaactctcagagccactttcaagtcacaatgct

SEQ ID NO: 178498 - DNA, 120 bp, Artificial Sequence
  ENSG00000110583_7 (sequence is synthesized)
ctctcctaaggcctttcctctttcctggtctcactgttcaccgggtgtcctcagagctgtggcctccccagccctgcacgtgccaggctgcgccctgagagcacagaaccctggggagaa

SEQ ID NO: 178499 - DNA, 120 bp, Artificial Sequence
  ENSG00000110583_8 (sequence is synthesized)
gtggtatcagctgctcctcctctcctaggagaccagagtgctagaagggaatgaaagggagagggaagagtaggtggggccgggcagtgaagctcatcctccacagtggctgcctcctca

SEQ ID NO: 178500 - DNA, 120 bp, Artificial Sequence
  ENSG00000110583_9 (sequence is synthesized)
tttggctcctggggcctgcagtggaggttctcgcacctctgcagcccctagattcctggcaacctcccctcccctgacacatacacacttggacaaatggaatgtttatgtccaccttta

SEQ ID NO: 178501 - DNA, 120 bp, Artificial Sequence
  ENSG00000110583_10 (sequence is synthesized)
tgaaagttctggagtcctgggtctggggtttgctggtccccaaagaggaacacactgggtgtaagatctgggtgtagagggcggcttcagagagactcacgcttgcgcagttggaattgc

SEQ ID NO: 178502 - DNA, 120 bp, Artificial Sequence
  ENSG00000110583_11 (sequence is synthesized)
tgttaacggagactgggaagatcttttgtgccaagatgcagggaaatgaagaaagctctttccagctgtttttatggattcatggagtgggctcatgttgggaccagctgactctgggag

SEQ ID NO: 178503 - DNA, 120 bp, Artificial Sequence
  ENSG00000110583_12 (sequence is synthesized)
gaagactgcctctccatcgctgtcagagagcctgaaaggaccaacaatgaggtgttcttgggacccgccatggggatgattgcttctctaggctcctggatgttgctgcattctaagctt

SEQ ID NO: 178504 - DNA, 120 bp, Artificial Sequence
  ENSG00000110583_13 (sequence is synthesized)
aacctcctggtctcatggcagtgacttgagcttttgattcatagaagaaagccagaggttctgcttgttcttgtctgccagccctcgtcgttctttctcctctgcctctcacctctaccc

SEQ ID NO: 178505 - DNA, 120 bp, Artificial Sequence
  ENSG00000110583_14 (sequence is synthesized)
caaatacctctgttcttagtctcaaggggagaataacatcagggagcccctcatcttccccagaaggacttctcgttcctcatgtagttaactccattgattttcctatcttggtgctga

SEQ ID NO: 178506 - DNA, 120 bp, Artificial Sequence
  ENSG00000110583_15 (sequence is synthesized)
agagagcccccagccagcagcaggcccctctgcctgcactcctcaggcttgcccctcgctgcctcagtgaggcactagtgccactgccgtggcccagccgggccatagctcaggctgcag

SEQ ID NO: 178507 - DNA, 120 bp, Artificial Sequence
  ENSG00000110583_16 (sequence is synthesized)
cagaaatgcctctcagtggccaacagttgcttttctctctggtgtcaccctgtggcaacaggctggagcaggggaaggagaaagccttcctcttctctcataggatagaaaggcaggctc

SEQ ID NO: 178508 - DNA, 120 bp, Artificial Sequence
  ENSG00000110583_17 (sequence is synthesized)
agaactaatgctcatcctgatctctaggccttgttcctcttccagggaagaaaagccaaatccttatcaaggaaaaagcacctaacagctccctttggatatccctgagctctgctgtgg

SEQ ID NO: 178509 - DNA, 120 bp, Artificial Sequence
  ENSG00000110583_18 (sequence is synthesized)
ggagtatcataaaggttctagccttcgtgaagttgttctcgtggaggtctgttggtccctctgacctcagcatctgctcacatcccaccctctgcccaactctggcagtctctcctggca

SEQ ID NO: 178510 - DNA, 120 bp, Artificial Sequence
  ENSG00000110583_19 (sequence is synthesized)
gatctccccagagtggtccttgcttctcacctggattcctgcttgtgcaggagcctgtgtacacagggcctccctcacccagcctggcccctctgctgagcactttgcgctgctcttgat

SEQ ID NO: 178511 - DNA, 120 bp, Artificial Sequence
  ENSG00000110583_20 (sequence is synthesized)
gggcagcagtgggactgggaactccttagagagggccttgcagctttacactggaataagtctgcctctgcctctgcctcaccctgctggctcctggtgggtttcatcccaggcagagtt

SEQ ID NO: 178512 - DNA, 120 bp, Artificial Sequence
  ENSG00000110583_21 (sequence is synthesized)
gacattgctggaggggtttggtggactcctaagaatcatgaaaccacaggagcatgtttaggaagagatttgtctctggtccctgtctctgaaaggacacagatgctaaatatttattgt

SEQ ID NO: 178513 - DNA, 120 bp, Artificial Sequence
  ENSG00000110583_22 (sequence is synthesized)
cttagatcatggattcctgatacctctcactcaaggggaccaaaagggacccccccgtgttcatcccttgtaaggtgagttcagtctacgttgtctctttccagtcactggatacgtggc

SEQ ID NO: 178514 - DNA, 120 bp, Artificial Sequence
  ENSG00000110583_23 (sequence is synthesized)
accaactggtcaatgggtgcttggtgccataccctgctcaccctagtctctgcaggccatgtcctgaagggttcctcaggaggtcgggactagggtgggagaggcactatctgagacctg

SEQ ID NO: 178515 - DNA, 120 bp, Artificial Sequence
  ENSG00000110583_24 (sequence is synthesized)
caatcactcttgttggtcttgagcccattcatttccaaaacatccatctttctccacttcccccaggtcttggttttgagaaacagcaggcatggctgagtgcggtggcttacacctgta

SEQ ID NO: 178516 - DNA, 72 bp, Artificial Sequence
  ENSG00000110583_25 (sequence is synthesized)
gcccatctctactaaaaaatacaaaaatcagccaggcgtggttgtggcctgtaatcccagctactcgggagg

SEQ ID NO: 178517 - DNA, 120 bp, Artificial Sequence
  ENSG00000110583_26 (sequence is synthesized)
ctccatctcaaaaaaaaaaaaaagagaaacatagcaggccttttttaccaggctttttgtgttttgtttgtttgtttggagcatgttaagatttttttaagatttttaaaattttagtta

SEQ ID NO: 178518 - DNA, 120 bp, Artificial Sequence
  ENSG00000110583_27 (sequence is synthesized)
gttatatccaccctatttcaggttatttttgttggtgtcaagtatgtataggacatgtgaatggttctttttaatttttttttaagaggaaatttggaagataaactccttgatatatat

SEQ ID NO: 178519 - DNA, 120 bp, Artificial Sequence
  ENSG00000110583_28 (sequence is synthesized)
atatatatatatatttttttttttctttagcagcttgttatcactggaatcaaagggaaaaagtgatctcttcttgcattggttgtatttgtatgtcacaaataaaagacactttggtca

SEQ ID NO: 178520 - DNA, 120 bp, Artificial Sequence
  ENSG00000110583_29 (sequence is synthesized)
attctaagggtccctacgctaggcctagcccgggaatcctctggagagcccctggtccggggccccaccccctcggcgcccccagcgtcacgcccgccccttcctgcttcgcggacccgt

SEQ ID NO: 178521 - DNA, 120 bp, Artificial Sequence
  ENSG00000110583_30 (sequence is synthesized)
tactggcctccccaccaccgtcccccgcggggaccctggggttagcttcccgctcccccagggtcactcatcacctggctgtcaccagcttcgtcgcttttcacatccgaggtcaaccct

SEQ ID NO: 178522 - DNA, 120 bp, Artificial Sequence
  ENSG00000110583_31 (sequence is synthesized)
gtgattctccctttcttcccagtccctgcctcctgggacttcagcttggtttataatttgacttattttgtctccaccctgtggcagaattgtgacactacccacccacaccgcctctgc

SEQ ID NO: 178523 - DNA, 120 bp, Artificial Sequence
  ENSG00000110583_32 (sequence is synthesized)
ctccttgctgtgcagggaactgagctcatacctgtgtgttggaagttggcgccagcagttggcccaggtgtttgggaaaacgtggattccagtgaagtggctgcctccctgtggatcttc

SEQ ID NO: 178524 - DNA, 87 bp, Artificial Sequence
  ENSG00000110583_33 (sequence is synthesized)
cgtggattccagtgaagtggctgcctccctgtggatcttcttccttatgaatagaggaggatctagataatttttttttcttttgtg

SEQ ID NO: 178525 - DNA, 120 bp, Artificial Sequence
  ENSG00000110583_34 (sequence is synthesized)
ggcccaagtgatcctcccacctcagcctctcaattagctgggactataggtgcccaccaccacacccgggtaatttttgtagagacggggtttggccttgttgcccaggatggtcttgaa

SEQ ID NO: 178526 - DNA, 70 bp, Artificial Sequence
  ENSG00000110583_35 (sequence is synthesized)
ctgcctccatttagtatcccattttttggtcattcttttaacccactcatagtaaacactcatttataag

SEQ ID NO: 178527 - DNA, 120 bp, Artificial Sequence
  ENSG00000110583_36 (sequence is synthesized)
cattcttttaacccactcatagtaaacactcatttataaggatgtggctcaggggcttgattttccatttggagttgtaaccaggtaaagtcagtgtgcagcagatcaggtagcctcttc

SEQ ID NO: 178528 - DNA, 120 bp, Artificial Sequence
  ENSG00000110583_37 (sequence is synthesized)
tttgggttagctgtgctgtgagcaggttgtatgcccacaggctaatgaggtctcctcttgccctgtcaggtgatgccaaacttaactctcctgggcctttccaccaaagccttcctcgca

SEQ ID NO: 178529 - DNA, 120 bp, Artificial Sequence
  ENSG00000110583_38 (sequence is synthesized)
catgtgacttcagagctaggcaaatggtgggttttgggaggctgctcctggttctgaagttagtctcccgttgtgggtccccacagcatcccactccaagacaacagctcttgggatagg

SEQ ID NO: 178530 - DNA, 120 bp, Artificial Sequence
  ENSG00000110583_39 (sequence is synthesized)
cgatgttccaggcactccagccaggtgacaaagcccctggacctacctaggtctatgagctgccaaggactgcaagctcctctgccagaccttacagcctcttcatgtcccatcctgcac

SEQ ID NO: 178531 - DNA, 120 bp, Artificial Sequence
  ENSG00000110619_0 (sequence is synthesized)
gactactcccagcacggccactgaacgcttggccgcgcgatgctccggagcgcgggtcgccattgggttgaactacagctcccagcatgctccgggccggcgacatccggagcccctggt

SEQ ID NO: 178532 - DNA, 120 bp, Artificial Sequence
  ENSG00000110619_1 (sequence is synthesized)
agttgcctagcgaccgggcgtgtcccggaagacgggcccggcgtggggcgcgacttccggggcggcggttgcatcagattctaggaagtgtctgtagccgcagctgcgggtccgggattc

SEQ ID NO: 178533 - DNA, 120 bp, Artificial Sequence
  ENSG00000110619_2 (sequence is synthesized)
ccagccatggcagattcctccgggcagcagggcaaaggccggcgtgtgcagccccagtggtcccctcctgctgggacccagccatgcagactccacctttacaacagcctcaccaggaac

SEQ ID NO: 178534 - DNA, 120 bp, Artificial Sequence
  ENSG00000110619_3 (sequence is synthesized)
aaggaagtgttcatacctcaagatgggaaaaaggtgacgtggtattgctgtgggccaaccgtctatgacgcatctcacatggggcacgccaggtcctacatctcttttgatatcttgaga

SEQ ID NO: 178535 - DNA, 120 bp, Artificial Sequence
  ENSG00000110619_4 (sequence is synthesized)
agagtgttgaaggattacttcaaatttgatgtcttttattgcatgaacattacggatattgatgacaagatcatcaagagggcccggcagaaccacctgttcgagcagtatcgggagaag

SEQ ID NO: 178536 - DNA, 120 bp, Artificial Sequence
  ENSG00000110619_5 (sequence is synthesized)
aggcctgaagcggcacagctcttggaggatgttcaggccgccctgaagccattttcagtaaaattaaatgagaccacggatcccgataaaaagcagatgctcgaacggattcagcacgca

SEQ ID NO: 178537 - DNA, 120 bp, Artificial Sequence
  ENSG00000110619_6 (sequence is synthesized)
gtgcagcttgccacagagccacttgagaaagctgtgcagtccagactcacgggagaggaagtcaacagctgtgtggaggtgttgctggaagaagccaaggatttgctctctgactggctg

SEQ ID NO: 178538 - DNA, 120 bp, Artificial Sequence
  ENSG00000110619_7 (sequence is synthesized)
gattctacacttggctgtgatgtcactgacaattccatcttctccaagctgcccaagttctgggagggggacttccacagagacatggaagctctgaatgttctccctccagatgtctta

SEQ ID NO: 178539 - DNA, 120 bp, Artificial Sequence
  ENSG00000110619_8 (sequence is synthesized)
acccgggttagtgagtatgtgccagaaattgtgaactttgtccagaagattgtggacaacggttacggctatgtctccaatgggtctgtctactttgatacagcgaagtttgcttctagc

SEQ ID NO: 178540 - DNA, 120 bp, Artificial Sequence
  ENSG00000110619_9 (sequence is synthesized)
gagaagcactcctatgggaagctggtgcctgaggccgttggagatcagaaagcccttcaagaaggggaaggtgacctgagcatctctgcagaccgcctgagtgagaagcgctctcccaac

SEQ ID NO: 178541 - DNA, 120 bp, Artificial Sequence
  ENSG00000110619_10 (sequence is synthesized)
gactttgccttatggaaggcctctaagcccggagaaccgtcctggccgtgcccttggggaaagggtcgtccgggctggcatatcgagtgctcggccatggcaggcaccctcctaggggct

SEQ ID NO: 178542 - DNA, 120 bp, Artificial Sequence
  ENSG00000110619_11 (sequence is synthesized)
catgacaatgagctggcacagtcggaggcctactttgaaaacgactgctgggtcaggtacttcctgcacacaggccacctgaccattgcaggctgcaaaatgtcaaagtcactaaaaaac

SEQ ID NO: 178543 - DNA, 120 bp, Artificial Sequence
  ENSG00000110619_12 (sequence is synthesized)
ttcatcaccattaaagatgccttgaaaaagcactcagcacggcagttgcggctggccttcctcatgcactcgtggaaggacaccctggactactccagcaacaccatggagtcagcgctt

SEQ ID NO: 178544 - DNA, 120 bp, Artificial Sequence
  ENSG00000110619_13 (sequence is synthesized)
caatatgagaagttcttgaatgagtttttcttaaatgtgaaagatatccttcgcgctcctgttgacatcactggtcagtttgagaagtggggagaagaagaagcagaactgaataagaac

SEQ ID NO: 178545 - DNA, 120 bp, Artificial Sequence
  ENSG00000110619_14 (sequence is synthesized)
ttttatgacaagaagacagcaattcacaaagccctctgtgacaatgttgacacccgcaccgtcatggaagagatgcgggccttggtcagtcagtgcaacctctatatggcagcccggaaa

SEQ ID NO: 178546 - DNA, 120 bp, Artificial Sequence
  ENSG00000110619_15 (sequence is synthesized)
gccgtgaggaagaggcccaaccaggctctgctggagaacatcgccctgtacctcacccatatgctgaagatctttggggccgtagaagaggacagctccctgggattcccggtcggaggg

SEQ ID NO: 178547 - DNA, 120 bp, Artificial Sequence
  ENSG00000110619_16 (sequence is synthesized)
cctggaaccagcctcagtctcgaggccacagtcatgccctaccttcaggtgttatcagaattccgagaaggagtgcggaagattgcccgagagcaaaaagtccctgagattctgcagctc

SEQ ID NO: 178548 - DNA, 120 bp, Artificial Sequence
  ENSG00000110619_17 (sequence is synthesized)
agcgatgccctgcgggacaacatcctgcccgagcttggggtgcggtttgaagaccacgaaggactgcccacagtggtgaaactggtagacagaaacaccttattaaaagagagagaagaa

SEQ ID NO: 178549 - DNA, 120 bp, Artificial Sequence
  ENSG00000110619_18 (sequence is synthesized)
aagagacgggttgaagaggagaagaggaagaagaaagaggaggcggcccggaggaaacaggaacaagaagcagcaaagctggccaagatgaagattccccccagtgagatgttcttgtca

SEQ ID NO: 178550 - DNA, 120 bp, Artificial Sequence
  ENSG00000110619_19 (sequence is synthesized)
gaaaccgacaaatactccaagtttgatgaaaatggtctgcccacacatgacatggagggcaaagagctcagcaaagggcaagccaagaagctgaagaagctcttcgaggctcaggagaag

SEQ ID NO: 178551 - DNA, 120 bp, Artificial Sequence
  ENSG00000110619_20 (sequence is synthesized)
ctctacaaggaatatctgcagatggcccagaatggaagcttccagtgagggggcacaggactgactttttaaaccattgtggactagtggctgctgtctgcctcagtgacaatgtcccag

SEQ ID NO: 178552 - DNA, 120 bp, Artificial Sequence
  ENSG00000110619_21 (sequence is synthesized)
cgctcctatcatgtttacagtcacccttgggtcctaaattaagagttgtgttcatgtaggttcgtgtcgtcgttggctctgagacattgataataaatttttctcaacagtgagaccctc

SEQ ID NO: 178553 - DNA, 120 bp, Artificial Sequence
  ENSG00000110619_22 (sequence is synthesized)
ccggggcggcggttgcatcagattctaggaagtgtctgtagccgcagctgcgggtccgggattcccagccatggcagattcctccgggcagcaggctcctgactacaggtccattctgag

SEQ ID NO: 178554 - DNA, 120 bp, Artificial Sequence
  ENSG00000110619_23 (sequence is synthesized)
cattagtgacgaggcagccagggcacaagccctgaacgagcacctcagcacgcgtagctatgtccaggggtactcactgtcccaggcagacgtggacgcgttcaggcagctctcggcccc

SEQ ID NO: 178555 - DNA, 120 bp, Artificial Sequence
  ENSG00000110619_24 (sequence is synthesized)
gcccgctgacccccagctcttccacgtggctcggtggttcaggcacatagaagcgctcctgggtagcccctgtggcaaaggccagccctgcaggctccaagcaagcaaaggccggcgtgt

SEQ ID NO: 178556 - DNA, 120 bp, Artificial Sequence
  ENSG00000110619_25 (sequence is synthesized)
catttacagtgttgtgcagccgccaccgtccatctccagaactcttcccttttcccaaactggaactctgtccccatggaacagcaactccacatcccctccctcagcccctggtgctca

SEQ ID NO: 178557 - DNA, 120 bp, Artificial Sequence
  ENSG00000110619_26 (sequence is synthesized)
ccctctacttctgtctctttggattttactactccagggaccctacatgagtggagtcacacagtgtttgtcctgtgtctggcttatttcgctgatcacggtgtcctcaggtctatccat

SEQ ID NO: 178558 - DNA, 120 bp, Artificial Sequence
  ENSG00000110619_27 (sequence is synthesized)
gttgcagcctgtgtcaggacctcctgcctttttaatggccaaatcatattccatggatggatgggccctgatctgtctattcttccatggaagaattctcatcacctttgcgttatcttt

SEQ ID NO: 178559 - DNA, 120 bp, Artificial Sequence
  ENSG00000110619_28 (sequence is synthesized)
gtagcccacatttctcttcagtaaatccctgatgatgatgtcattgtctgctcctctgccccagctctgctaacagaagccacagaggcttcttcctcagctcctcagaatccagaccca

SEQ ID NO: 178560 - DNA, 120 bp, Artificial Sequence
  ENSG00000110619_29 (sequence is synthesized)
gaggtcggtgtgggcctgaggggtacggcgtgtgtccctttcccccagggagtgtggcccgggaggctttcttggtgcctgctctgatgatcacccatggcgggtgggctggggtgctgg

SEQ ID NO: 178561 - DNA, 120 bp, Artificial Sequence
  ENSG00000110619_30 (sequence is synthesized)
ccttgtggcctcccatgacacccgtgacagtgaccacaggtgctggcttgccttccttctaatgagggtgctatccaggggtggctttcaaagagtgaagggcaggcacctacctcagct

SEQ ID NO: 178562 - DNA, 120 bp, Artificial Sequence
  ENSG00000110619_31 (sequence is synthesized)
catgccccagtcagctgctcctcaggtggctgaggagggcctgttcccaggaatgatactgcagacaaatataaaggccattgttcccctaggtctctgcctggggaggttgaaactccg

SEQ ID NO: 178563 - DNA, 120 bp, Artificial Sequence
  ENSG00000110619_32 (sequence is synthesized)
tcccctaggtctctgcctggggaggttgaaactccggaagctgcccaaagtggctgtgcttatgagcgcggccttgaagcccaaggatatgcaattttttttttttttttttgagatgga

SEQ ID NO: 178564 - DNA, 120 bp, Artificial Sequence
  ENSG00000110619_33 (sequence is synthesized)
gttatgaggacacagcaggaaaaggacagacgagaatggcagcatgtgcatggtcagtgctgcccaaaggcagggcaggcaggaggatggggtgggatggtgggggtcccagcaggctgg

SEQ ID NO: 178565 - DNA, 120 bp, Artificial Sequence
  ENSG00000110619_34 (sequence is synthesized)
ggggcagggcacctgcccgcctagcacagttgggcgcagcaagctgaggggccagaagaaaactaaagggtgtggtgattccagcaaacccaaggtcagatttcagagcagaaagttgtc

SEQ ID NO: 178566 - DNA, 120 bp, Artificial Sequence
  ENSG00000110619_35 (sequence is synthesized)
acttggagagcagcaagcatctgtcctgttgatgtagtctaggagatgctgtcacatcacctgatactctggagtctttctgagataggttggcatcccatttaccctgtaacacccaaa

SEQ ID NO: 178567 - DNA, 120 bp, Artificial Sequence
  ENSG00000110619_36 (sequence is synthesized)
acttcttatgtcctgttctctacctgggcgttgtgcgtgggctgggaacgggaaaactcgggcagagcagagacacagagggggcgcctgctagagactgcgtgaggagcccactaggag

SEQ ID NO: 178568 - DNA, 120 bp, Artificial Sequence
  ENSG00000110619_37 (sequence is synthesized)
aaccgtgggatgccgggcaagtctgcactgctgcgctctgaagtcagccacagacacatgggtttccaagcgaagctccctccccatgtgatggaggtcacagtcgccctccctgtcatg

SEQ ID NO: 178569 - DNA, 120 bp, Artificial Sequence
  ENSG00000110619_38 (sequence is synthesized)
ttgagtagactgaggaggagaagggggggtcttgctgtttcagggatggcagagaaaatcatatataaatgcactcatgcagttcaaacacgtgttgttggaggttaagctatacatatc

SEQ ID NO: 178570 - DNA, 120 bp, Artificial Sequence
  ENSG00000110619_39 (sequence is synthesized)
gggtaagcacaagggccttccctagggagggaagggctgcagaacatcgcacagggaggagctccccagctctgagcctgagtttgggaagcagaggagcaggtgttctggggctgcgta

SEQ ID NO: 178571 - DNA, 120 bp, Artificial Sequence
  ENSG00000110619_40 (sequence is synthesized)
gctagaagtcccagcagacttcctcctacaactctgggcccacccaggggctgaggagcatgggtctgcactgtcctgggggccatggtgagaacctaacccagaatctgctgggaagct

SEQ ID NO: 178572 - DNA, 120 bp, Artificial Sequence
  ENSG00000110619_41 (sequence is synthesized)
cggcagccaagaccatcagtcatggggccccagagctgcataatggtgagtgcgaatactgctgggccttcacagacatcagtgccattgcgtagacattttgagagtgctagtcctggt

SEQ ID NO: 178573 - DNA, 120 bp, Artificial Sequence
  ENSG00000110619_42 (sequence is synthesized)
gtcatatcccgaaggaggatgcatttcatcagcatctatcgcttggctatgattttagtgactttttgttggcaaatccatcatacacttccctggcccgtattgtctcaatctccaaag

SEQ ID NO: 178574 - DNA, 120 bp, Artificial Sequence
  ENSG00000110619_43 (sequence is synthesized)
ctggcccgtattgtctcaatctccaaagtaagcattttcagaaatggccaacaaatggaaatgcagacaggaacccggttatctgtctgtagtgtgtagggaccagccccacagggtcgg

SEQ ID NO: 178575 - DNA, 66 bp, Artificial Sequence
  ENSG00000110619_44 (sequence is synthesized)
tatttattggatacaagacaaaggggtaggttaaggagagtgagccatcttcaatgataggtaagg

SEQ ID NO: 178576 - DNA, 72 bp, Artificial Sequence
  ENSG00000110619_45 (sequence is synthesized)
acgctaccgctagaccacagtccgcttggcaacgggcatcctcccagacgctggcgttaccactagaccaag

SEQ ID NO: 178577 - DNA, 120 bp, Artificial Sequence
  ENSG00000110619_46 (sequence is synthesized)
tccgcttggcaacgggcatcctcccagacgctggcgttaccactagaccaaggaacccttctggtggccgtgtccgggcataacaggaggttcacactcttgtcttctggtcactcctca

SEQ ID NO: 178578 - DNA, 120 bp, Artificial Sequence
  ENSG00000110619_47 (sequence is synthesized)
cagcactgtaccgtgcgcctgctcccagagacccactgtgtccagcctcagattgcttccctcccacaggaaccacacaggctggatgaaagagaaacaagaggttgtgacagtgccagg

SEQ ID NO: 178579 - DNA, 120 bp, Artificial Sequence
  ENSG00000110619_48 (sequence is synthesized)
aacggggcagactcttaagcagtagcgctgcttctctccccacttcacacaaactactgtggggcagcataagagcctgtgccaagccgagaggcatgggcaagccgaagctcagagagg

SEQ ID NO: 178580 - DNA, 120 bp, Artificial Sequence
  ENSG00000110619_49 (sequence is synthesized)
acaggtcattccagactggagtaatctagagtgcttcttggaggccaagagcctcagctaagctaatgggtagagtgtggacattcagggaaaggtgaggccacacaagaatgaggacgg

SEQ ID NO: 178581 - DNA, 120 bp, Artificial Sequence
  ENSG00000110619_50 (sequence is synthesized)
cagcgggatgggccctggtgtcccactcagtccaaacagctgatacggttttcagtggccaccacagagagtagataggccacagatttcgcacttttatagccctgctttattttgtta

SEQ ID NO: 178582 - DNA, 120 bp, Artificial Sequence
  ENSG00000110619_51 (sequence is synthesized)
ctgtcatcctgctgacacactttcgggtctgttagatgcacccacccaattccttttctgttttccagctatgtctccaatgggtctgtctactttgatacagcgaagtttgcttctagc

SEQ ID NO: 178583 - DNA, 120 bp, Artificial Sequence
  ENSG00000110619_52 (sequence is synthesized)
tgcggctggccttcctcatgcactcgtggaaggacaccctggactactccagcaacaccatggagtcagcgcttcaatatgagaagttcttgaatgtgagtccccagccccttcctggag

SEQ ID NO: 178584 - DNA, 120 bp, Artificial Sequence
  ENSG00000110619_53 (sequence is synthesized)
gttggtggagcagcctcccctgcacagtgggcaccttgtgcagtggtgataggtgcaccagcctcccgatgtctctaatggagaccagcacatgggtggaagcacctccatgctagtggg

SEQ ID NO: 178585 - DNA, 120 bp, Artificial Sequence
  ENSG00000110619_54 (sequence is synthesized)
tataacaggctcggggccactcctgaaatggctgacggctcagcagagtggacagaggcctcgtcctcctagtcactgcagtgcacgtccttctgacttgtactttccaccaaatgagca

SEQ ID NO: 178586 - DNA, 120 bp, Artificial Sequence
  ENSG00000110619_55 (sequence is synthesized)
tctgtaaacctaaagcaagagcatgtttctgtcaaagaaatatcttttcctttctttctgaccacttgtgtaattctggtctttcagatttttaccaaaaataaaatcacagcagtagaa

SEQ ID NO: 178587 - DNA, 120 bp, Artificial Sequence
  ENSG00000110619_56 (sequence is synthesized)
agttgtaacagatatttcaggatggaaaagttgcctaaatgctgttaaactgatttttctaacttcaggagtttttcttaaatgtgaaagatatccttcgcgctcctgttgacatcactg

SEQ ID NO: 178588 - DNA, 120 bp, Artificial Sequence
  ENSG00000110619_57 (sequence is synthesized)
gtcagtttgagaagtggggagaagaagaagcagaactgaataagaagtaaggtggtgccatttctttggggtttttgagcatgcccatgttctatgcctagcctcgcatcttggccacca

SEQ ID NO: 178589 - DNA, 120 bp, Artificial Sequence
  ENSG00000110619_58 (sequence is synthesized)
tgtgtcctggactgtcgaggaagggctggggacactgtcgtacgttgtgcagaattaattcaggataggcggctctgctaatgggagctgctctgggtgttgaagtgcatggagaatttc

SEQ ID NO: 178590 - DNA, 65 bp, Artificial Sequence
  ENSG00000110619_59 (sequence is synthesized)
acctggctaatttcagatttttagtagaggtgggggtctctccatgtttgtcaggctggtctcga

SEQ ID NO: 178591 - DNA, 120 bp, Artificial Sequence
  ENSG00000110619_60 (sequence is synthesized)
ataggcgtgagccactgcgcctggccacatggggaatttctatggtgtgttttcaggtctgacttcacattccttcctctttgttgctcagcttttatgacaagaagacagcaattcaca

SEQ ID NO: 178592 - DNA, 120 bp, Artificial Sequence
  ENSG00000110619_61 (sequence is synthesized)
ggaggaaacaggaacaagaagtaatgcattttgtttgggggtgagggctctactgggcaggagtgcaccctgaccccatgccctgtggctctctgtgcctccgtggaccttagccaggcc

SEQ ID NO: 178593 - DNA, 120 bp, Artificial Sequence
  ENSG00000110619_62 (sequence is synthesized)
cctgcagaccctcacagaaggagctccgctttctgcctccaccacccaaggcctgccaggcccttctcacatggggtgcagggaaggcctggccaaggggaaggctgtgccatgtggtca

SEQ ID NO: 178594 - DNA, 120 bp, Artificial Sequence
  ENSG00000110619_63 (sequence is synthesized)
aaataacatctggtttaattttaaattccttgtatgttccctccaccttggctttccccttcccatctttcatagcactctgaatctgagggcttggaagcaagttgagggctggaggta

SEQ ID NO: 178595 - DNA, 120 bp, Artificial Sequence
  ENSG00000110619_64 (sequence is synthesized)
tgagcagatgtcgttcacagtgcggagccccaggtgctgctcgggggcagtgactgtgccgtgttgcgtgttctaggcagcaaagctggccaagatgaagattccccccagtgagatgtt

SEQ ID NO: 178596 - DNA, 120 bp, Artificial Sequence
  ENSG00000110619_65 (sequence is synthesized)
aacattgaacttgagttgaggggcataatgggcttttcgttttatgaattgggaacgtttttatggagcgcgtggttttcagaagggaaaatcccaggacattctcatgtcttgcacagg

SEQ ID NO: 178597 - DNA, 120 bp, Artificial Sequence
  ENSG00000110619_66 (sequence is synthesized)
ctgtagccgcagctgcgggtccgggattcccagccatggcagattcctccgggcagcaggcttttcctttgcggtcttgaaggtgcataggcttggtgcctgtccaagagcctgattatt

SEQ ID NO: 178598 - DNA, 120 bp, Artificial Sequence
  ENSG00000110619_67 (sequence is synthesized)
tcagaaggatgagtttcatttctgaggtttctggggtagatggagcctacctcagggcctttccgcacagacttgggataccacttggtcggctgctcatcaggcaaaggccggcgtgtg

SEQ ID NO: 178599 - DNA, 86 bp, Artificial Sequence
  ENSG00000110619_68 (sequence is synthesized)
tgcccggatatgtgaatattttatctagcagtgaatgaaggtgtggggtgcccagcaaggagctctaggggtctcagttatgagga

SEQ ID NO: 178600 - DNA, 120 bp, Artificial Sequence
  ENSG00000110619_69 (sequence is synthesized)
tcagccctgggagggctgattctcacagagctcgagctccttggtggtcctgggactcagctctcctgggtgccggtcaggacccccatcgcagtcccgtgtgcatttgggaaccaagtc

SEQ ID NO: 178601 - DNA, 120 bp, Artificial Sequence
  ENSG00000110619_70 (sequence is synthesized)
cttggggcttgagtgtaaatggtccttctgtaagaaagctgattctggcaccaacagagaggctgcctcagatgaagagtgttagcacccgaagggacccccaggcctgtcctgaccctc

SEQ ID NO: 178602 - DNA, 120 bp, Artificial Sequence
  ENSG00000110619_71 (sequence is synthesized)
ccacccctgctgtcggcccaacttgtgtccctttcctggaagaactgcttccggcggccagtgtgctatgcttcctcctggctctgccctgcacccccagaacagcccctgggcttacgg

SEQ ID NO: 178603 - DNA, 120 bp, Artificial Sequence
  ENSG00000110619_72 (sequence is synthesized)
gagacactagtctctgggcttctgcagccaatcaagctgctgggccctccctcccaagcactggaggaggtactcgttctgtgggccggggcccctccctcctgagcactggaggaggca

SEQ ID NO: 178604 - DNA, 120 bp, Artificial Sequence
  ENSG00000110619_73 (sequence is synthesized)
cttgttctgtgggccacggcccctccttccccagcactggaggaggcactggttgtgtgggccctggctcctccatgtctgagggaactgctctgcttctcctacagtccctgagattct

SEQ ID NO: 178605 - DNA, 120 bp, Artificial Sequence
  ENSG00000110619_74 (sequence is synthesized)
acttccggggcggcggttgcatcagattctaggaagtgtctgtagccgcagctgcgggtccgggattcccagccatggcagattcctccgggcagcaggtctccaggtgaagaggcgact

SEQ ID NO: 178606 - DNA, 120 bp, Artificial Sequence
  ENSG00000110628_0 (sequence is synthesized)
gacaaaaaaaaaggtctctccgatttcctctgctcaaccagttccctggctacctgaggccctgcttcacctggaggaagacagtggcaaggccaggcgggtgctgcctgggacccagtg

SEQ ID NO: 178607 - DNA, 120 bp, Artificial Sequence
  ENSG00000110628_1 (sequence is synthesized)
actcagcacccctgcccggatcaactggacttttgccccctgctccgccagcctcctgcttggatctctcctgggtctccctgctgcgcctgtccaggatgcagggagctcgggctccca

SEQ ID NO: 178608 - DNA, 120 bp, Artificial Sequence
  ENSG00000110628_2 (sequence is synthesized)
gggaccagggccggtcccccggcaggatgagcgctctaggccggtcctcggtcatcttgcttacctacgtgctggccgccacagaacttacctgcctcttcatgcagttctccatcgtgc

SEQ ID NO: 178609 - DNA, 120 bp, Artificial Sequence
  ENSG00000110628_3 (sequence is synthesized)
catacctgtctcggaaactgggcctggattccattgccttcggctacctgcaaaccaccttcggggtgctgcagctgctgggcgggccggtatttggcaggttcgcagaccagcgcgggg

SEQ ID NO: 178610 - DNA, 120 bp, Artificial Sequence
  ENSG00000110628_4 (sequence is synthesized)
cgcgggcggcgctcacgctctccttcctggctgccttggcgctctacctgctcctggcggccgcctccagcccggccctgcccggggtctacctgctcttcgcctcgcgcctgcccggag

SEQ ID NO: 178611 - DNA, 120 bp, Artificial Sequence
  ENSG00000110628_5 (sequence is synthesized)
cgctcatgcacacgctgccagccgcccagatggtcatcacggacctgtcggcacccgaggagcggcccgcggccctgggccggctgggcctctgcttcggcgtcggagtcatcctcggct

SEQ ID NO: 178612 - DNA, 120 bp, Artificial Sequence
  ENSG00000110628_6 (sequence is synthesized)
tccccgccagcaccaaaggggccaaaactgacgcccaggctccactgccaggcggcccccgggccagtgtgttcgacctgaaggccatcgcctccctgctgcggctgccagacgtcccga

SEQ ID NO: 178613 - DNA, 120 bp, Artificial Sequence
  ENSG00000110628_7 (sequence is synthesized)
ggatcttcctggtgaaggtggcctccaactgccccacagggctcttcatggtcatgttctccatcatctccatggacttcttccagctggaggccgcccaagctggctacctcatgtcct

SEQ ID NO: 178614 - DNA, 120 bp, Artificial Sequence
  ENSG00000110628_8 (sequence is synthesized)
tcttcgggctcctccagatggtgacccagggcctggtcatcgggcagctgagcagccacttctcggaggaggtgctgctccgggccagcgtgctggtcttcatcgtggtgggcctggcca

SEQ ID NO: 178615 - DNA, 120 bp, Artificial Sequence
  ENSG00000110628_9 (sequence is synthesized)
tggcctggatgtccagcgtcttccacttctgcctcctggtgcccggcctggtgttcagcctctgcaccctcaacgtggtcaccgacagcatgctgatcaaggctgtctccacctcggaca

SEQ ID NO: 178616 - DNA, 120 bp, Artificial Sequence
  ENSG00000110628_10 (sequence is synthesized)
cagggaccatgctgggcctctgcgcctctgtacaaccactgctccgaactctgggacccacggtcggcggcctcctgtaccgcagctttggcgtccccgtcttcggccacgtgcaggttg

SEQ ID NO: 178617 - DNA, 120 bp, Artificial Sequence
  ENSG00000110628_11 (sequence is synthesized)
ctatcaatacccttgtcctcctggtcctctggaggaaacctatgccccagaggaaggacaaagtccggtgaccgctgcccagacacagactggcaataaactcctactaaatccctccga

SEQ ID NO: 178618 - DNA, 120 bp, Artificial Sequence
  ENSG00000110628_12 (sequence is synthesized)
gcgcagcgtcgcacctctgcccaatgaggtgcccctgacgtgcctgctgcggctgccctgctccccccagcctccctgcatcccgggatgggggagggcgccaggcgcagctcccggacc

SEQ ID NO: 178619 - DNA, 120 bp, Artificial Sequence
  ENSG00000110628_13 (sequence is synthesized)
ctcaggggtctccccgccctaccccaccagcctgggttcggtacctcggggctcagatgtgcagtcagctgttaatgtggcaaaatttggggaagtcctctgcagccgcaaaatccagtt

SEQ ID NO: 178620 - DNA, 120 bp, Artificial Sequence
  ENSG00000110628_14 (sequence is synthesized)
gggccttctctgcagaggggccctggccaccacaggccagtctggaggtccccagctttgggggctggccacagtccagacgcccctccctcgcctcccccatacccacttctaccctct

SEQ ID NO: 178621 - DNA, 120 bp, Artificial Sequence
  ENSG00000110628_15 (sequence is synthesized)
ctccgcgtacgggtgagtggtgggggccggggcggagtctgtgggtcaggacgcccgcggctgggtcggccccgccccgcctcctcttggcctcggtttcctcttttgctcgtggggcgc

SEQ ID NO: 178622 - DNA, 120 bp, Artificial Sequence
  ENSG00000110628_16 (sequence is synthesized)
cgttggcccagcacgccctgcttagtggaggagctgagatgaccagatagagagcctcgccctggcctgggagcagcctgcggccaagcctgtcccaccgagcccatccccgggagcagc

SEQ ID NO: 178623 - DNA, 120 bp, Artificial Sequence
  ENSG00000110628_17 (sequence is synthesized)
ctgcggccgagcctgtcccaccgagcccatccccgggagcagcctgcggccgagcctgtcccaccgagcccatccccgggagcagcctgcggccgagcctgtcccaccgagcccatcccc

SEQ ID NO: 178624 - DNA, 120 bp, Artificial Sequence
  ENSG00000110628_18 (sequence is synthesized)
gggagcagcctgcggccgagcctgtcccaccgagcccatccccgggagcagcctgcggccgagcctgtcccaccgagcccatccccgggagcagcctgcggccgagcctgtcccaccgag

SEQ ID NO: 178625 - DNA, 120 bp, Artificial Sequence
  ENSG00000110628_19 (sequence is synthesized)
gctgaatgccaggcccacccttgcccacgctggggaggcagcatagccatccccatgacacagcacaggtgcccaggtctcggagagcccctcccagggacatgcacaccaggcttgccc

SEQ ID NO: 178626 - DNA, 120 bp, Artificial Sequence
  ENSG00000110628_20 (sequence is synthesized)
tttggagcctctcctgaccttggccagcgtgggagctgctgttcctgggaggatccgccacctgccccaggcgctcaccagcctggcttccacagctgctacccacaggggctgccgggg

SEQ ID NO: 178627 - DNA, 120 bp, Artificial Sequence
  ENSG00000110628_21 (sequence is synthesized)
cctgcatggcgtggcgagggtcagggatggtgagcgccccacccattccttcatccatcacctaataaatgtgctctgagggtcccagtccccactctttaggccacagactgtggggat

SEQ ID NO: 178628 - DNA, 120 bp, Artificial Sequence
  ENSG00000110628_22 (sequence is synthesized)
gtgggaggtcagatttaagctattttagtgcaaccaaaggtgcaggttgggggatgtggctggggcgcctgggccctgggacccgcaccctgtgcagccgaggctgttgcccgcaggatt

SEQ ID NO: 178629 - DNA, 120 bp, Artificial Sequence
  ENSG00000110628_23 (sequence is synthesized)
aggggtctccagtggggcaggcctctgagagtagaggctcctccccggcggaggctggggagcccttggcctcccatctggcacatgtcagggtccacagggaaccaggcatacaggcca

SEQ ID NO: 178630 - DNA, 120 bp, Artificial Sequence
  ENSG00000110628_24 (sequence is synthesized)
gggagggagagccaactgcagtggtgggcacgctgtgaggacagtggactccggcctctgatgggcagctggctgggatctgtggcagcccacctgcccaccagctgtgtgaccagagca

SEQ ID NO: 178631 - DNA, 120 bp, Artificial Sequence
  ENSG00000110628_25 (sequence is synthesized)
agtctcccaaactctccaaatctgtcccatgaggccaaagtgcccgccttgcagggtccttggcagatgagatgacctaacgtggcaaagtggttagaccagcgtgggcccctttggagg

SEQ ID NO: 178632 - DNA, 120 bp, Artificial Sequence
  ENSG00000110628_26 (sequence is synthesized)
atgcggcaggtgtctgtctgccagccccccagaaccgctcagctcccgggccggggcgagacacctccaccaccagctcctctgggcttctggaccagaccctgggtggtggggacaggt

SEQ ID NO: 178633 - DNA, 120 bp, Artificial Sequence
  ENSG00000110628_27 (sequence is synthesized)
gatgatttgccaccacccaggatggctgcctgacagccagagtgcggggcgggggggctattctgggacccgccagggtgggggtgggggctctcggcctctccggaagcctgtggcatt

SEQ ID NO: 178634 - DNA, 120 bp, Artificial Sequence
  ENSG00000110628_28 (sequence is synthesized)
cctggcacctccaagccatctgctcttcagcctctgggcccaggactagactagtgctaaaatagctgctcctgggaggggctggacccccaccgtgggcagagagggcctctgcttttt

SEQ ID NO: 178635 - DNA, 120 bp, Artificial Sequence
  ENSG00000110628_29 (sequence is synthesized)
ggggcaggaggggccaccctggcagggtaaaaagagataaacagaaaaacaacagcaacaataatagtaacaatccggggttgttgccatggggcctgttctgaacaggctgcgcccagc

SEQ ID NO: 178636 - DNA, 120 bp, Artificial Sequence
  ENSG00000110628_30 (sequence is synthesized)
tcactgcgaggaaggacgcttagccaggccctggctgaagcctgcagctgggctggacacagcagtcattggcctgtgttgtgggggacttgggcctgccatggctgcagtggggaccct

SEQ ID NO: 178637 - DNA, 120 bp, Artificial Sequence
  ENSG00000110628_31 (sequence is synthesized)
gcctgagacagacagagctggggtggtgaccaacaccgtcggggcaccctcgcaggaactgggcctggtgaactgcccagggacggggaaggagcagggtgaggcatggggaccccgaca

SEQ ID NO: 178638 - DNA, 120 bp, Artificial Sequence
  ENSG00000110628_32 (sequence is synthesized)
caggttgagcagcgggagaggaggctgaggaggggaaggagggggcccgcagagtagcccccagaccccaagtccggtcagggacaagcttgttagctccaggttcatgtcacaacctgc

SEQ ID NO: 178639 - DNA, 120 bp, Artificial Sequence
  ENSG00000110628_33 (sequence is synthesized)
agggctcctaagttcaagcttttttaaacttaatgggcaaactgagacgcaacacaaataggcttctgaccttggtgtctgagtcctggatctgaagtccttcacggcactcactgtgag

SEQ ID NO: 178640 - DNA, 120 bp, Artificial Sequence
  ENSG00000110628_34 (sequence is synthesized)
gagtcctggatctgaagtccttcacggcactcactgtgagcccctcttagacgcactgcacgaagtgagcttgccagctcttcctttaagaaacgtgttaggccgggcgcggtggctcac

SEQ ID NO: 178641 - DNA, 120 bp, Artificial Sequence
  ENSG00000110628_35 (sequence is synthesized)
ggcaggcagggaggcccagagaggcaggaaggcccagacagggaaggcgttaggaggggaggcccagacagggaaggcggcccccgggccagtgtgttcgacctgaaggccatcgcctcc

SEQ ID NO: 178642 - DNA, 120 bp, Artificial Sequence
  ENSG00000110628_36 (sequence is synthesized)
aaaagtggaggagggggaccccctgatgtgtcctctaaggtccaggtagcaggagagctccactggggagggggtcctgcagtgctgtcctctcttgcaggcaaggccaggcgggtgctg

SEQ ID NO: 178643 - DNA, 80 bp, Artificial Sequence
  ENSG00000110651_0 (sequence is synthesized)
agcgaggcgcgcgcccggccagagagcgagcgcgcaacggcggcgacggcggcgaccccaccgcgcatcctgccaggcct

SEQ ID NO: 178644 - DNA, 120 bp, Artificial Sequence
  ENSG00000110651_1 (sequence is synthesized)
cgccgcccgcgccgccatgggagtggagggctgcaccaagtgcatcaagtacctgctcttcgtcttcaatttcgtcttctggctggctggaggcgtgatcctgggtgtggccctgtggct

SEQ ID NO: 178645 - DNA, 120 bp, Artificial Sequence
  ENSG00000110651_2 (sequence is synthesized)
ccgccatgacccgcagaccaccaacctcctgtatctggagctgggagacaagcccgcgcccaacaccttctatgtaggcatctacatcctcatcgctgtgggcgctgtcatgatgttcgt

SEQ ID NO: 178646 - DNA, 120 bp, Artificial Sequence
  ENSG00000110651_3 (sequence is synthesized)
tggcttcctgggctgctacggggccatccaggaatcccagtgcctgctggggacgttcttcacctgcctggtcatcctgtttgcctgtgaggtggccgccggcatctggggctttgtcaa

SEQ ID NO: 178647 - DNA, 120 bp, Artificial Sequence
  ENSG00000110651_4 (sequence is synthesized)
caaggaccagatcgccaaggatgtgaagcagttctatgaccaggccctacagcaggccgtggtggatgatgacgccaacaacgccaaggctgtggtgaagaccttccacgagacgcttga

SEQ ID NO: 178648 - DNA, 120 bp, Artificial Sequence
  ENSG00000110651_5 (sequence is synthesized)
tcagcaacctcttcaaggaggactgccaccagaagatcgatgacctcttctccgggaagctgtacctcatcggcattgctgccatcgtggtcgctgtgatcatgatcttcgagatgatcc

SEQ ID NO: 178649 - DNA, 120 bp, Artificial Sequence
  ENSG00000110651_6 (sequence is synthesized)
tgagcatggtgctgtgctgtggcatccggaacagctccgtgtactgaggccccgcagctctggccacagggacctctgcagtgccccctaagtgacccggacacttccgagggggccatc

SEQ ID NO: 178650 - DNA, 120 bp, Artificial Sequence
  ENSG00000110651_7 (sequence is synthesized)
accgcctgtgtatataacgtttccggtattactctgctacacgtagcctttttacttttggggttttgtttttgttctgaactttcctgttaccttttcagggctgacgtcacatgtagg

SEQ ID NO: 178651 - DNA, 120 bp, Artificial Sequence
  ENSG00000110651_8 (sequence is synthesized)
tggcgtgtatgagtggagacgggcctgggtcttggggactggagggcaggggtccttctgccctggggtcccagggtgctctgcctgctcagccaggcctctcctgggagccactcgccc

SEQ ID NO: 178652 - DNA, 120 bp, Artificial Sequence
  ENSG00000110651_9 (sequence is synthesized)
agagactcagcttggccaacttggggggctgtgtccacccagcccgcccgtcctgtgggctgcacagctcaccttgttccctcctgccccggttcgagagccgagtctgtgggcactctc

SEQ ID NO: 178653 - DNA, 120 bp, Artificial Sequence
  ENSG00000110651_10 (sequence is synthesized)
tgccttcatgcacctgtcctttctaacacgtcgccttcaactgtaatcacaacatcctgactccgtcatttaataaagaaggaacatcaggcatgctaccaggcctgtgcagtccctcag

SEQ ID NO: 178654 - DNA, 120 bp, Artificial Sequence
  ENSG00000110651_11 (sequence is synthesized)
aaagaagtattctgttttcatctgagaggcagatttaaccggcgtcccgtgtcttcctggcagtcctgccctggagtcacactccacagctggctggaggcgtgatcctgggtgtggccc

SEQ ID NO: 178655 - DNA, 120 bp, Artificial Sequence
  ENSG00000110651_12 (sequence is synthesized)
tcgtgggctggtggctcccactagcccctcacagacacgcctgctgggcacctgggtgtgtgtccttgggccccgcctacagcctgccctctttcctccctctggccactgcccggctcc

SEQ ID NO: 178656 - DNA, 120 bp, Artificial Sequence
  ENSG00000110651_13 (sequence is synthesized)
gtctgtgcacccgtgccgtggcgtgcccgtcgtctgtgcacccgtgctgtggtgtgcccttcgtctgttccttttattgccgggcagggttgcacccacatgtgcaagccagcgacggac

SEQ ID NO: 178657 - DNA, 120 bp, Artificial Sequence
  ENSG00000110651_14 (sequence is synthesized)
tggcagccagtccactgggtgcgctcggcatgtggctgcagcttgacctgggtttcctggtccctggcaaggtggagcatctcttcatgtgcttttttgctgtgtgtggatcttgcgggg

SEQ ID NO: 178658 - DNA, 120 bp, Artificial Sequence
  ENSG00000110651_15 (sequence is synthesized)
aagggtctgttcctgttttttgcccatctttcaaagattgggttgccagttttcttgctgttgagtttggaaagctctgcatacgttcagggcacaggtcctttaccaggctctgcccca

SEQ ID NO: 178659 - DNA, 120 bp, Artificial Sequence
  ENSG00000110651_16 (sequence is synthesized)
ggtctttcggagagcaggtgtctttcgcattcctgactctggggaacctctagccctgccacatggggtttgttatggggcaggggcacctgtgcctttcccaccacggggcttggggat

SEQ ID NO: 178660 - DNA, 120 bp, Artificial Sequence
  ENSG00000110651_17 (sequence is synthesized)
ttggtgctgccattgccctccctcgtaggtggccctaggggggtccctccgcctccgtttcctcatccagaaaccggcagtgaccatcaccaccattgttgtcacctagctccagctcaa

SEQ ID NO: 178661 - DNA, 120 bp, Artificial Sequence
  ENSG00000110651_18 (sequence is synthesized)
ttcctgctgaggcctcagtggaagtcgtcatcagtgatgctttaggggtctagtgacaccaatgaccgtgatctcagtggaaaagggcacagtgtgtcccaggcatttcgcgtttatgtt

SEQ ID NO: 178662 - DNA, 120 bp, Artificial Sequence
  ENSG00000110651_19 (sequence is synthesized)
aaaacgggtggaagatagcaagccggcagaggccgggccgctgcacccgcctgttccgaggtgggtagggggtggggggctgttcccaggattcccctctacgctttctgtggtgaccac

SEQ ID NO: 178663 - DNA, 120 bp, Artificial Sequence
  ENSG00000110651_20 (sequence is synthesized)
tgtgctctcccaccacgtttggaaagttactgcttccctcttcctcagcccctcgggctcccagttatggaagtggcgtgattcagagaagctggctggaggcgtgatcctgggtgtggc

SEQ ID NO: 178664 - DNA, 120 bp, Artificial Sequence
  ENSG00000110651_21 (sequence is synthesized)
ggaggctgcttggcttggttgctgaaccagggccccaggaggccgaaatagccccacacctgcgccgtcccacctctttgtccagtcaccccagggccaggtgagggccctggccacaca

SEQ ID NO: 178665 - DNA, 120 bp, Artificial Sequence
  ENSG00000110651_22 (sequence is synthesized)
gcgtgcccgttccttcttccccatgccccgctcatgggtcagagggccggtgctggggtccagatggtgtcaacagggatggtccctgtcctccccagagacagaagcctgtggcccacg

SEQ ID NO: 178666 - DNA, 120 bp, Artificial Sequence
  ENSG00000110651_23 (sequence is synthesized)
gagggtttctgggcccagccgatcctagggagggtcccatggccctgcccataggttcctggcctctctcggggccgtggtgccctcacaggtggtgtcaggaaggacgggaaaggctgc

SEQ ID NO: 178667 - DNA, 120 bp, Artificial Sequence
  ENSG00000110651_24 (sequence is synthesized)
ttgtcccaggggctcatgtggagaccaccccctgcacgcagctggggcgctcctgcctgtgtcctcagaagcactcggcttagctttgcccatgtgcctgggctgtgggtggcagagccc

SEQ ID NO: 178668 - DNA, 120 bp, Artificial Sequence
  ENSG00000110651_25 (sequence is synthesized)
ggccagcatcctccgatctccaagggtgcatctctactggaggcccctcctgggcctcttgctccccgcttcccagatcattaggatatttggggtccagaagggcctcccagccatcct

SEQ ID NO: 178669 - DNA, 120 bp, Artificial Sequence
  ENSG00000110651_26 (sequence is synthesized)
gggccttgtcctccggggccaccagtccagccagtgacaaccacagcatccccggcctggaacgaggctgcccccagcacgttcctcgtactcctgtccagggacaggaggggctgcccc

SEQ ID NO: 178670 - DNA, 120 bp, Artificial Sequence
  ENSG00000110651_27 (sequence is synthesized)
tgccaccgagtccccttctccaggacctggggcctgtgggtgtgaggcaggtgttcttggaaggggtcactctccaggcacccggcggccaaggcttgtggctggagcagctcccgctgt

SEQ ID NO: 178671 - DNA, 120 bp, Artificial Sequence
  ENSG00000110651_28 (sequence is synthesized)
ggggtcggcgtcgggccccgtgtggccggagaggagctgaagggtcacttagcttcgggctggggcgaggacaggggacaccccagagaggtatgccaggcctccttcctgcgccccact

SEQ ID NO: 178672 - DNA, 120 bp, Artificial Sequence
  ENSG00000110651_29 (sequence is synthesized)
ctcggcagaagcagaggtcacaggctgtgctgaggccccatggtgctgcccccatgatgccagggtgaggctggcgttggaagcaggtgtctgacctgcatggtgtcaccgtggccacat

SEQ ID NO: 178673 - DNA, 120 bp, Artificial Sequence
  ENSG00000110651_30 (sequence is synthesized)
cagagctccagccccagagccgcccaccctcggtccttggctgtggtttccctgggctggaggagcctgccgttgtgttggccacacgaccacaggacctgccacccccgacgtgggctc

SEQ ID NO: 178674 - DNA, 120 bp, Artificial Sequence
  ENSG00000110651_31 (sequence is synthesized)
tgcctgggcccccactggacagggaccccttggagctcctctggccaccaagtcctcgcccattccagaatcggccttctggagcctcttgctgtccctgatgcgggctgggccttgcca

SEQ ID NO: 178675 - DNA, 120 bp, Artificial Sequence
  ENSG00000110651_32 (sequence is synthesized)
agggctttttttcctgcgccgggaacagggtggatttgctgggctcactcccctcagagacgctgcgggtgcggtgggttaggcccaagggcgttaagagaggaggctggggtggggctg

SEQ ID NO: 178676 - DNA, 120 bp, Artificial Sequence
  ENSG00000110651_33 (sequence is synthesized)
gggcctggcagggggtctggcagccctgggcctcccacctcctgtcaggaccaaaaaaggcaacgcgcctctcctgacctgtaccccggagtgaacccaaccttgcaacccaggagtgtc

SEQ ID NO: 178677 - DNA, 120 bp, Artificial Sequence
  ENSG00000110651_34 (sequence is synthesized)
agggcctgaggggagggagacctggctcctgggtgccgtgcccgtaaggaggtggccacctgcagggcattcctggcagaggcttcatctggccaggtaggaggctgggtggccgagccc

SEQ ID NO: 178678 - DNA, 120 bp, Artificial Sequence
  ENSG00000110651_35 (sequence is synthesized)
caaatctgggtgtgttctctgcctggcggtgggtcctgccccaggcaccttctcctctgggctggctgggcagggacaatgggcctggctgcgaggagggggcctgggctgccttctgca

SEQ ID NO: 178679 - DNA, 120 bp, Artificial Sequence
  ENSG00000110651_36 (sequence is synthesized)
ttgcctcggtgacgggagatggcccctgcctgctgagggataggggagtgggcaggcagtgagagacactgacagctgtcccgcgggtacagggccctgtctgggtggccaggcccatgt

SEQ ID NO: 178680 - DNA, 120 bp, Artificial Sequence
  ENSG00000110651_37 (sequence is synthesized)
ctcgggcccacagtgcgccccccacccttggacggcgccttctccctccccaggtgcatgctgcccagccagggagcgtgggggagttcgggagggctggcctacacgccctggtccagc

SEQ ID NO: 178681 - DNA, 120 bp, Artificial Sequence
  ENSG00000110651_38 (sequence is synthesized)
tgtcccaggtggggtgctgggcttcagccctcagcccagggcctaggaatccaacttgatcctccccacacagcagccaggttcaaatgcaggtcccgtaacggaagtgctgctgtgcag

SEQ ID NO: 178682 - DNA, 120 bp, Artificial Sequence
  ENSG00000110651_39 (sequence is synthesized)
cccagattggggggcaggagccagcagggcccccccaccctcttctcgcaccacactggggaggcagcattggttccagttccggttcctgggctgccctctcaaccccggcctacagtg

SEQ ID NO: 178683 - DNA, 120 bp, Artificial Sequence
  ENSG00000110651_40 (sequence is synthesized)
gggcccaccctgtgccttctgatgccactcccaccccacgccaagtcccagaggctttgggagcgggtgaaggcggtgggtggcgggtggcaggtgcaggcggtgggtggtgggtgtggc

SEQ ID NO: 178684 - DNA, 120 bp, Artificial Sequence
  ENSG00000110651_41 (sequence is synthesized)
aggtggcgggccccaccgcaggtgtcatccctgcgaagcacctgtcgccagcactcagagcgctcatgaggtgcccagtccccatgtggcctccttagtctccgtcctgtgtcatggaag

SEQ ID NO: 178685 - DNA, 120 bp, Artificial Sequence
  ENSG00000110651_42 (sequence is synthesized)
gcaaccctacatcttcccagctgggcggcccgtggtgggttcggcacccaggaccctccggggtcttgggctgtggcgagtgtgtaggcacccacctggtgtctctctccccgcaaggca

SEQ ID NO: 178686 - DNA, 120 bp, Artificial Sequence
  ENSG00000110651_43 (sequence is synthesized)
ggttgggctgactcatggcttgtgggagctctttgggctcttcctgggtcccacttgccaggaggatctccaggggctttatggaggaggcagcattggggctgagcaccaggccagcct

SEQ ID NO: 178687 - DNA, 120 bp, Artificial Sequence
  ENSG00000110651_44 (sequence is synthesized)
cccgtgtcccagcactcccggggcagctgagagtgcagagtccttgtcctctggggtctagcctcgaagccaccctgcccagggagagcctgggaaaagtgcgtccgcctggggcggggc

SEQ ID NO: 178688 - DNA, 120 bp, Artificial Sequence
  ENSG00000110651_45 (sequence is synthesized)
tgcctacgcccagacctcaggagcaggaggtgcccttgggacctccaggacccctggtctcaactggtcctcgggtgggaacctagtgggccagggtggcccagggtgcggaaagctctg

SEQ ID NO: 178689 - DNA, 120 bp, Artificial Sequence
  ENSG00000110651_46 (sequence is synthesized)
agcagcgcagctgaggaggaagaaggctggcccctggatgcattctgcagtggggagcgctgcgtacccctggccacctccccatgggttccctagagccaccgtccccctgggcacatc

SEQ ID NO: 178690 - DNA, 120 bp, Artificial Sequence
  ENSG00000110651_47 (sequence is synthesized)
cagggctgaccttgcacccctgctctctgcagcttgactgctgtggctccagcacactgactgctttgaccacctcagtgctcaagaacaatttgtgtccctcgggcagcaacatcatca

SEQ ID NO: 178691 - DNA, 120 bp, Artificial Sequence
  ENSG00000110651_48 (sequence is synthesized)
gcaacctcttcaaggtgcgcgaggccggtggggccgcgcctgaccccccgcatgtcccgcccctgggtggggtcctaggggtgggcaggtcacacggcagccccacagggagcgaccaca

SEQ ID NO: 178692 - DNA, 120 bp, Artificial Sequence
  ENSG00000110651_49 (sequence is synthesized)
ctgggtggcatggcccctgtcagggctgctctgctgggagggttggggtgggaccgcatctggcccacgaggaaggcaggcgccctgtgctgcgcattccgggtgaagaaggtggaggct

SEQ ID NO: 178693 - DNA, 120 bp, Artificial Sequence
  ENSG00000110651_50 (sequence is synthesized)
agtacccagtagtcatctgtgccagggggttatccaggtacagaacattcccatcgttgcagaaggttctatcagctagcactgggttggacgacacttgccaagacgagctggctagag

SEQ ID NO: 178694 - DNA, 120 bp, Artificial Sequence
  ENSG00000110651_51 (sequence is synthesized)
gatggttctccggacctggtcccacgtggttcccaggttccagccccggagagcaatgtgagcaaagcttgctgtctttgcaaagccaaccactgtggcatcaactccttcaggaagccc

SEQ ID NO: 178695 - DNA, 120 bp, Artificial Sequence
  ENSG00000110651_52 (sequence is synthesized)
gcagcatgtggtgtggttggtctttttcgtggcagccagtccactgggtgcgctcggcatgtggctgcagcttgacctgggtttcctggtccctggcaagctccagctcaaggtccctgc

SEQ ID NO: 178696 - DNA, 120 bp, Artificial Sequence
  ENSG00000110651_53 (sequence is synthesized)
aggaggaggagggccatctcactgtgcagagagcagcacccttcctcctggtgcccctggcagggctggtgctggtggggctctgggagcatttgttgagatgcttctggccttgaaagg

SEQ ID NO: 178697 - DNA, 120 bp, Artificial Sequence
  ENSG00000110651_54 (sequence is synthesized)
aggcccctgggatggctctgttgccctcacaggctgaggggtgggtgaggtgggcagcctgtgtgtccccagtcctcagggcttccctcagccggcaggtgcccccaggcctggagctgc

SEQ ID NO: 178698 - DNA, 120 bp, Artificial Sequence
  ENSG00000110651_55 (sequence is synthesized)
acggaggctgcttggcttggttgctgaaccagggccccaggaggccgaaatagccccacacctgcgccgtcccacctctttgtccagtcaccccagggccaggcatctacatcctcatcg

SEQ ID NO: 178699 - DNA, 120 bp, Artificial Sequence
  ENSG00000110660_0 (sequence is synthesized)
ggagacgcgcaagggcgccgatggaggcagactcgccagcgggccccggcgccccagagcccctcgcggagggagcggcggccgagttctccagcctgctgcgcaggataaaaggcaaac

SEQ ID NO: 178700 - DNA, 120 bp, Artificial Sequence
  ENSG00000110660_1 (sequence is synthesized)
tcttcacctggaatattttgaaaacaattgccctgggtcagatgttgtccttgtgtatatgtgggacagccatcaccagccagtatttggcagaaagatacaaagtgaacacccccatgc

SEQ ID NO: 178701 - DNA, 120 bp, Artificial Sequence
  ENSG00000110660_2 (sequence is synthesized)
ttcagagctttatcaattattgcttgctgttcctaatttatacagtgatgctggcatttcgatcaggcagtgataaccttttagtaatcttgaaaagaaaatggtggaagtacatcctgc

SEQ ID NO: 178702 - DNA, 120 bp, Artificial Sequence
  ENSG00000110660_3 (sequence is synthesized)
tgggactagcagatgtggaagctaattatgtgatcgtcagagcctaccagtacacaactctaaccagtgtccagcttttggattgctttgggattcctgtgttgatggctctgtcatggt

SEQ ID NO: 178703 - DNA, 120 bp, Artificial Sequence
  ENSG00000110660_4 (sequence is synthesized)
ttattcttcatgcaagatacagagtgatccacttcatcgccgtggctgtctgtctgttgggtgtaggaaccatggttggtgcagacatactagcagggagggaagacaattcagggagtg

SEQ ID NO: 178704 - DNA, 120 bp, Artificial Sequence
  ENSG00000110660_5 (sequence is synthesized)
atgtattgattggtgacatcttggtccttcttggggcttccctctatgccatttcaaatgtttgtgaggaatacatcgtgaagaagctgagcagacaggagtttttaggaatggtgggcc

SEQ ID NO: 178705 - DNA, 120 bp, Artificial Sequence
  ENSG00000110660_6 (sequence is synthesized)
tgtttggaacaattatcagtggtatacagctattgattgtggaatataaggatattgccagcattcattgggactggaaaattgccctgctgttcgtggcatttgccctgtgtatgtttt

SEQ ID NO: 178706 - DNA, 120 bp, Artificial Sequence
  ENSG00000110660_7 (sequence is synthesized)
gcctgtacagcttcatgccattggtgattaaagtcactagtgccacttccgtcaacctgggcatcctgacagcggacctctacagcctttttgttggactctttctgtttggctataagt

SEQ ID NO: 178707 - DNA, 120 bp, Artificial Sequence
  ENSG00000110660_8 (sequence is synthesized)
tttcaggactctacatcctgtccttcactgtcatcatggtggggtttatcctgtactgctccacccctactcgcacggccgagccggctgaaagcagcgtgcctccagtcaccagcattg

SEQ ID NO: 178708 - DNA, 120 bp, Artificial Sequence
  ENSG00000110660_9 (sequence is synthesized)
ggattgacaacctggggctgaagctggaggagaacctccaggagacccactctgctgtcttgtagctggagaagatggcgcacccatcccccaccaggataaagcagagcctgctgcctg

SEQ ID NO: 178709 - DNA, 120 bp, Artificial Sequence
  ENSG00000110660_10 (sequence is synthesized)
ctgaggggacacttggggaaatagcagactcagaatggacactctacaaccctgggttggatccagtggttaggttttagaaaggaacactgaacaaagttcaaaagtagaaataccaaa

SEQ ID NO: 178710 - DNA, 120 bp, Artificial Sequence
  ENSG00000110660_11 (sequence is synthesized)
aaaccaagctaagagtgtgtttctgtgtttgaggaccaatatctgttcgtgttgaggagatgaggtgcagactccacactggggtcttagaggcaccagtgggaaagcaggactggggag

SEQ ID NO: 178711 - DNA, 120 bp, Artificial Sequence
  ENSG00000110660_12 (sequence is synthesized)
agatccaggactgagccagcctcaggccagggcgggaaagcaggctgtccaggctgggcttggtggtcaggaacaggggcagctcacggtggctctggagtacgtttcctctgtcagatg

SEQ ID NO: 178712 - DNA, 120 bp, Artificial Sequence
  ENSG00000110660_13 (sequence is synthesized)
cttcaaggtttttttttttttttttttttgctgaggcagttattgtccacaggcctttgggtacagatgaggccttggggctgactgcatgtggcagaaaacgggtgggtcagcccttga

SEQ ID NO: 178713 - DNA, 120 bp, Artificial Sequence
  ENSG00000110660_14 (sequence is synthesized)
aaagtcttgagatataagtgtgagtactatacaagcattaaactggagtgcagtaaacctaggaaccttcccacaattgtttttttgtttgtttgagatgcagagtctagagtgcagtgg

SEQ ID NO: 178714 - DNA, 120 bp, Artificial Sequence
  ENSG00000110660_15 (sequence is synthesized)
gtctagagtgcagtggtgcaagctcagcttactgtaacctctgcctcctggattcaagtgttagtagctgggattacaaaagcatgtggccccacgcccagctaagttttgtatttttag

SEQ ID NO: 178715 - DNA, 75 bp, Artificial Sequence
  ENSG00000110660_16 (sequence is synthesized)
ttcaccatgttgcccaggctggtcttgacctcccgacctcaagtgatctgcctgccaggcctgttttgtttgttt

SEQ ID NO: 178716 - DNA, 120 bp, Artificial Sequence
  ENSG00000110660_17 (sequence is synthesized)
ggggtttcgccatgttgcccaggctaatctcaaattcctgagctaaagcgatctgcccacctcggcctccgaaagtgctaggattacagatgtgaaccactgtgcctggcctgtttgttt

SEQ ID NO: 178717 - DNA, 120 bp, Artificial Sequence
  ENSG00000110660_18 (sequence is synthesized)
gtttgtttgtttgtttaaaacatttctccatcactcattccaggtcccagagcaaactctctctgctctcggagcctgtgacactggctatgtgctccacagtttcagtcccaggtcata

SEQ ID NO: 178718 - DNA, 120 bp, Artificial Sequence
  ENSG00000110660_19 (sequence is synthesized)
ctctccaacagttttcagagctccatatatatgtagatgccatcctttctaaaaacttctcacgacctcctggaatattcctattgatctcattttatttagcatcagctcaagaaacta

SEQ ID NO: 178719 - DNA, 120 bp, Artificial Sequence
  ENSG00000110660_20 (sequence is synthesized)
agtcttagtgcacagtatcacaacaaagaaaaagctttgtttttataactggtaaaaacaagaaaagattctcatcaaaatgaaaatataaaattaatcatttctcaccaaagagtatgc

SEQ ID NO: 178720 - DNA, 120 bp, Artificial Sequence
  ENSG00000110660_21 (sequence is synthesized)
ctgggagcctccagctgttaaaagacaatgctattactacttcttatcaaaaatctgtaatgccctgtgatttttatgatacttcttcaatacaaagtgttaatatgtgtcatcagtata

SEQ ID NO: 178721 - DNA, 120 bp, Artificial Sequence
  ENSG00000110660_22 (sequence is synthesized)
ataacaaccaacaaaatgccactttcagaaaactgtatgtaaattttttgtaacaatgtaaaaaagaaatggggagtaagtgttcacatcattaaaaggctttgaattcatggaaataca

SEQ ID NO: 178722 - DNA, 120 bp, Artificial Sequence
  ENSG00000110660_23 (sequence is synthesized)
aaatcactctccctcaacgctcactgggcgccggcaggaaagtgggcgtggcgggaagacgtgacagcagcaacaaccaaggaaaatgaagcaaggtctcaactccgggagggtcagcca

SEQ ID NO: 178723 - DNA, 120 bp, Artificial Sequence
  ENSG00000110660_24 (sequence is synthesized)
atgaaaactcactgataaccttgttgagccggtcgtaatcctcctcgatgcccacgctgtccaagatcttcttgatgtccttggcgctgggggaggagttacccccgagggcagccagca

SEQ ID NO: 178724 - DNA, 120 bp, Artificial Sequence
  ENSG00000110660_25 (sequence is synthesized)
gcccgtggaagcctcggaaggcgtggccagggcagggcatccaagccgagcgccgggggttggcaccgtctctctccctggcacggcggagacaactgaatactgaaagacaaaaccaac

SEQ ID NO: 178725 - DNA, 120 bp, Artificial Sequence
  ENSG00000110660_26 (sequence is synthesized)
acaccgcgaggaatgagccacgcctccatccacgccacaaagggcttgacagttaatgattggtcgctgaaggagccgagcggaggagcgagagggacgcgagcaagcgagcgagggagg

SEQ ID NO: 178726 - DNA, 120 bp, Artificial Sequence
  ENSG00000110665_0 (sequence is synthesized)
agcccaagacaccagggcatttgctgacatctgaggcccttcccaggaagacatggcctcgttcttggtgtggccactgaggacggcgctgagagggggaaagtcatgggcaggacctgg

SEQ ID NO: 178727 - DNA, 120 bp, Artificial Sequence
  ENSG00000110665_1 (sequence is synthesized)
tgtgggatgtggaggagacggcgcccggggaggaggagaattgtctctctccaaccttgacctccctggagctggtgaggcgggcctggagcaccacccgcttctgggacacctcttcat

SEQ ID NO: 178728 - DNA, 120 bp, Artificial Sequence
  ENSG00000110665_2 (sequence is synthesized)
cagcgctgtgcccaggtggcctcacttgtcatctcaaagtggcgtcgaaccccctgacaggtggacgggaacccccggctggccctccagagaccaggaggcccctggctcaatgatgcc

SEQ ID NO: 178729 - DNA, 120 bp, Artificial Sequence
  ENSG00000110665_3 (sequence is synthesized)
acctgcagctgcccaaccctccgcccatggtgcccttgttccacctgccaccgctcatgaacctgtggatcacccagctctgcactggcttgcctgctgctgctgtctcagtttacctgg

SEQ ID NO: 178730 - DNA, 120 bp, Artificial Sequence
  ENSG00000110665_4 (sequence is synthesized)
gcagttgcccctggctatccggctgggatgggacttggacttagaagcaggcccctcctctggaaagctgtgtcctcgggccaggaggtggcagcctctaccttcctgagacagggaccc

SEQ ID NO: 178731 - DNA, 120 bp, Artificial Sequence
  ENSG00000110665_5 (sequence is synthesized)
cagccatctgtaagccaggaagagagccctcaccaagactggaatcagcagcaccttgatattggacttccagcctccagaactgcaagaaataagcacctgctgtttacatgcccagcc

SEQ ID NO: 178732 - DNA, 120 bp, Artificial Sequence
  ENSG00000110665_6 (sequence is synthesized)
tgcagtgcttccttatggcagattggagctaactgagacagctcccagcactcattcattcattcattcattcactcacctcatgtctactaaacagctctgggctggctctgggaagca

SEQ ID NO: 178733 - DNA, 120 bp, Artificial Sequence
  ENSG00000110665_7 (sequence is synthesized)
gtgagtcacacacactgcccccagcaacgtgtgaaatatgtttagagacagtgggctacagcggaaagggtagatgccctgagaaccccagcggtgctggtcagaagcacaggccttgtt

SEQ ID NO: 178734 - DNA, 120 bp, Artificial Sequence
  ENSG00000110665_8 (sequence is synthesized)
gggctgaggctggcatggggtgaacctggggagcctcgggggcagaggtgatagatgtggggtgtttcaaggcagtgagacaaagaagggagatgggtggtgccccccaatgccaggctt

SEQ ID NO: 178735 - DNA, 120 bp, Artificial Sequence
  ENSG00000110665_9 (sequence is synthesized)
caccagcctcccaacacacgagtgttcacccgcctggatgagacacctctgtggacttgggagtgaaggcagtgaatttgggcaatgctggaggccgtgcaggtgggaggtgggacaggg

SEQ ID NO: 178736 - DNA, 120 bp, Artificial Sequence
  ENSG00000110665_10 (sequence is synthesized)
gcaagaggccggggcccaggcaggagctgacagcccaccagtggtgctcccctgagaagcaacctcagtgggtggcttggggtctgctgggctgtccccacactgacaccctggctgcag

SEQ ID NO: 178737 - DNA, 120 bp, Artificial Sequence
  ENSG00000110665_11 (sequence is synthesized)
aggaggtaggctgcatccgcccctctgtctgtctgtcaacatcgccctaggaccgagctgctgggtgccccggaagaagggcaggcaggaaggggaggggcagtgaggttggctcccccc

SEQ ID NO: 178738 - DNA, 120 bp, Artificial Sequence
  ENSG00000110665_12 (sequence is synthesized)
ttgccagcagtgtcccccctgccttgggcggaggctgaggaccccagggtgggagggaaggtgcggtgggggctcagccaatgctgcccagcctgagggtccctcacatgtgggccgcac

SEQ ID NO: 178739 - DNA, 120 bp, Artificial Sequence
  ENSG00000110665_13 (sequence is synthesized)
ccctgcgtcagccggagtgatctctgcttagggtggtttgaggtgagttctgatatctcaaacaccagcatcagggccagggcagacaaaataagagtgagctggtcaggggtgtcccag

SEQ ID NO: 178740 - DNA, 120 bp, Artificial Sequence
  ENSG00000110665_14 (sequence is synthesized)
ttgggagctcgctcacagtctttaaggaggcagggcacagcccagtgggggtggccacgaggccccgggcctgtggctgagatggcaactggcaccggcagtgattggaacagtccagcc

SEQ ID NO: 178741 - DNA, 120 bp, Artificial Sequence
  ENSG00000110665_15 (sequence is synthesized)
catggagccctgtggccttggccggtggctcacggtgccacgggagctggagcaatgggtggcctcccttgcctggtgcctgagtgaaggaggactgggtgcccctgaggaaggaccttg

SEQ ID NO: 178742 - DNA, 120 bp, Artificial Sequence
  ENSG00000110665_16 (sequence is synthesized)
ccatactcctacaaatttacattattcttctttccccagtctcccctcagggacctgcagccatttgctggggtggctagtggaaagggggatcatcagactcagggggattactggact

SEQ ID NO: 178743 - DNA, 120 bp, Artificial Sequence
  ENSG00000110665_17 (sequence is synthesized)
ctaactctaacctgacacccactcctggggacacaaacacccatcggatctaatagtcagaggaggggcgtatggaggtcagtgggctcacggagttctagctcaggtccaaccctcggt

SEQ ID NO: 178744 - DNA, 120 bp, Artificial Sequence
  ENSG00000110665_18 (sequence is synthesized)
gggtgcagaggtcacttccctagcctcagatgggtgagtaaacagacgtatgtggcagccagcagagcccccacatttgttccctgacctgagggtgggggctactatgctgggaaaggc

SEQ ID NO: 178745 - DNA, 120 bp, Artificial Sequence
  ENSG00000110665_19 (sequence is synthesized)
caggtggaagccattggggtgaactctgcctaggaaaattgtcagtcaaaagcaacctgcagccctggagggactgcaaaggtcagtgccgccatcgaggacttggaagatgcagggtgg

SEQ ID NO: 178746 - DNA, 120 bp, Artificial Sequence
  ENSG00000110665_20 (sequence is synthesized)
tgacccccactgcagcctcgttccactcgtctaattggcttgtgtggaagacaggggggtcccggagaaagaaggacagtgaatcctggtaaacttaaccaggactccaattgcaactgc

SEQ ID NO: 178747 - DNA, 120 bp, Artificial Sequence
  ENSG00000110665_21 (sequence is synthesized)
tgttccagatatgactactgatcactggggcaaatcaaagcatccccggacacctggtctacagccattgatctggtgaaagctttaatttttaatatagattttattttttagagcagt

SEQ ID NO: 178748 - DNA, 120 bp, Artificial Sequence
  ENSG00000110665_22 (sequence is synthesized)
ttcatgtttacagagaaattgagcatatttgagagtcctcatatagcatctctccctacacacagtttcccttattattcatatcttgaattactgtgatacatctttgcaattgatgaa

SEQ ID NO: 178749 - DNA, 120 bp, Artificial Sequence
  ENSG00000110665_23 (sequence is synthesized)
ccaatattgacctagtcattgatcaggttacatgagggttcactcttcttgttgtacatgctgtgagttcgggcaaatgtgtaatggcatatctccactattacagtgtcacacagaatt

SEQ ID NO: 178750 - DNA, 120 bp, Artificial Sequence
  ENSG00000110665_24 (sequence is synthesized)
cccaggaagacatggcctcgttcttggtgtggccactgaggacggcgctgagagggggaaagtcatgggcaggacctggtgtgggatgtggaggagacggcgcccggggaggaggaggtg

SEQ ID NO: 178751 - DNA, 120 bp, Artificial Sequence
  ENSG00000110665_25 (sequence is synthesized)
agctccccgtcctgggagtgagcaagtgtggactgggccttgggggcgtaatccttggaggaatttggatggggtctccttggaacatcattattgaggtgttcttaggaaacacccttt

SEQ ID NO: 178752 - DNA, 120 bp, Artificial Sequence
  ENSG00000110665_26 (sequence is synthesized)
gaaatgtcctgtgacagcttaagttttgagaaggtcgttggttttaatgccttcgtgggcggcactcatggatattttgtcgcagagccttcttggggccacaggggtgggctggggcct

SEQ ID NO: 178753 - DNA, 120 bp, Artificial Sequence
  ENSG00000110665_27 (sequence is synthesized)
cgctcacactcacgtggggcctccagggggaggctttgtaaacctcgaatttgcaattacaccgagccgtgtaattacgtatgggtgggggcagcgctgcggccccagtacaggcagggt

SEQ ID NO: 178754 - DNA, 120 bp, Artificial Sequence
  ENSG00000110665_28 (sequence is synthesized)
ttccgtgggcctctggggcagggtgggcctgaagagggtgaaaatgttccaggtgaatccatcattcagggaccactccgggccctcccaggagtgctaacaggcggctctgctcgcccc

SEQ ID NO: 178755 - DNA, 120 bp, Artificial Sequence
  ENSG00000110665_29 (sequence is synthesized)
tcggtgctggaattgctcctcctgcatttggtcaggacctcatcaagggggagggggccccaagacctgcaggcatggcaaccccagcgtggctgtgggaagagggcccagctgccgccc

SEQ ID NO: 178756 - DNA, 120 bp, Artificial Sequence
  ENSG00000110665_30 (sequence is synthesized)
ccaccgcctccctccctctgcggagggagaaccaggagaaccaggagggacaaccaggacccccgtccagcccagcacccccaggcagcaccctctgcagctctggcccccaggaattcc

SEQ ID NO: 178757 - DNA, 120 bp, Artificial Sequence
  ENSG00000110665_31 (sequence is synthesized)
caccctgagtctgtgggggcttgtggagacctcagatgcctggcacccacagtgtcacttcagctgggggcctaggtgtggctcagactggggcgcaggtatgaatgtaggggtggcaac

SEQ ID NO: 178758 - DNA, 120 bp, Artificial Sequence
  ENSG00000110665_32 (sequence is synthesized)
aagagtgaaggtaccaggtctaggggcaggaggcccccgggctgtgcaagtgggcagcccgtcctctccagggaagatgagctgctcttggctatgtctggttcgcccctagaattgtct

SEQ ID NO: 178759 - DNA, 120 bp, Artificial Sequence
  ENSG00000110665_33 (sequence is synthesized)
attctggctgtgaggcgtccagctgggctcgtgccagccacccttgcacccgaggcccctcccgatgcagccaggcctggacctcacttaccccattggtgcacagcctggtacgggttc

SEQ ID NO: 178760 - DNA, 80 bp, Artificial Sequence
  ENSG00000110675_0 (sequence is synthesized)
ggtcgcctcctcgccgccagccgccccgggtgcatcccggcttgctccgctccacgcgacccagattcctgccccgcccc

SEQ ID NO: 178761 - DNA, 120 bp, Artificial Sequence
  ENSG00000110675_1 (sequence is synthesized)
ctgtccagcctcggcgcccgggaccgagcgcgtcgctcgccgccgcggagcgcgtagccggagcgcctggggaaggcggagatgaagaccacgccgccgcgcgccgggagctgctgagcc

SEQ ID NO: 178762 - DNA, 120 bp, Artificial Sequence
  ENSG00000110675_2 (sequence is synthesized)
agcctaccgccgccagagtccagttgacacttactttgacaaaggcaaatttggaagcaattacttgaggacagttcatatagcatctggacagtcaacacgggcaccatgaagcacttc

SEQ ID NO: 178763 - DNA, 120 bp, Artificial Sequence
  ENSG00000110675_3 (sequence is synthesized)
ctgagaatgttgatccaggtatgcctgtatttttactgtaaatttctgtggcgctgcctgaaatttgtaatgaggaagctaactggaagatgtgaactacaacggatctgttataatacc

SEQ ID NO: 178764 - DNA, 120 bp, Artificial Sequence
  ENSG00000110675_4 (sequence is synthesized)
aagccgggagcttctagaaccatgaaaatcgaaacatcactgagggattctaaaagtaagctgttgcagacttctgtgagtgttcaccccgacgctattgaaaaaactatagaagatatc

SEQ ID NO: 178765 - DNA, 120 bp, Artificial Sequence
  ENSG00000110675_5 (sequence is synthesized)
atggaactgaaaaaaattaatcctgacgtaaatccacagctgggaatctctcttcaggcttgccttctgcaaatcgttgggtacaggaaccttattgcagatgtggaaaaactgcgtaga

SEQ ID NO: 178766 - DNA, 120 bp, Artificial Sequence
  ENSG00000110675_6 (sequence is synthesized)
gaggcctatgattctgataatccccaacatgaagaaatgcttttgaagttatggaaattcttgaagcccaatactccactggaatctcggatttctaagcagtggtgtgaaattggtttc

SEQ ID NO: 178767 - DNA, 120 bp, Artificial Sequence
  ENSG00000110675_7 (sequence is synthesized)
caaggtgatgatcctaaaacagactttcgaggaatgggacttctgggactgtacaatttgcagtatttcgcggaaagggatgccacagcagctcagcaggtcctgtctgactctcttcat

SEQ ID NO: 178768 - DNA, 120 bp, Artificial Sequence
  ENSG00000110675_8 (sequence is synthesized)
ccgaaatgcagggatatcactaaagaagaaataagcaaattcagcaaagcagaatgggagaagaaaaggatggataaggcaattgggtactcatttgcaattgtgggcatcaatataact

SEQ ID NO: 178769 - DNA, 120 bp, Artificial Sequence
  ENSG00000110675_9 (sequence is synthesized)
gacctggcatataatctactggtcagcggagctctaaaaacccatttctacaatatcgccccagaagctccaacattgtctcactttcagcaaacattctgctatttgatgcatgaattt

SEQ ID NO: 178770 - DNA, 120 bp, Artificial Sequence
  ENSG00000110675_10 (sequence is synthesized)
cataagttttggatcgaagaggaccccatggacataatggaatttaatcgtgtgagggagaaattccgcaagaggatcatcaaacagctgcagaacccagacatggcgctgtgcccacat

SEQ ID NO: 178771 - DNA, 120 bp, Artificial Sequence
  ENSG00000110675_11 (sequence is synthesized)
tttgctgcctcggaaggtttaatcaacatgtagttgcccacgccggttttaatggataccctggaacactgcctcattgtcttgttagatctctgcttaggtcgcagctcacgcattgaa

SEQ ID NO: 178772 - DNA, 120 bp, Artificial Sequence
  ENSG00000110675_12 (sequence is synthesized)
taattccgagatccccagagaccactgtttctggagtatctgtcatccagtgactgctcatattgtggcattatgcagtgttacatcttgccttgatacccaggtatggagagagttttc

SEQ ID NO: 178773 - DNA, 120 bp, Artificial Sequence
  ENSG00000110675_13 (sequence is synthesized)
tatttttttagactttttttcctctccctcataattcagcattaaagaattgtatttctctagctgtattttgtatgtaagaggtttagctgaatctcattctgtgaaagccttttaatt

SEQ ID NO: 178774 - DNA, 120 bp, Artificial Sequence
  ENSG00000110675_14 (sequence is synthesized)
tattgaaatgtttcatgactactgctgctagctcttcaagccaggttcatgcttggacctcattctgataaagtataagactttaaaataatacaaaacagggccgggcgcagtggctca

SEQ ID NO: 178775 - DNA, 80 bp, Artificial Sequence
  ENSG00000110675_15 (sequence is synthesized)
aataaataaataaataaataaaatagtacagacagacacatgataagccaaactgttcctgcaaacatagctatgcttca

SEQ ID NO: 178776 - DNA, 120 bp, Artificial Sequence
  ENSG00000110675_16 (sequence is synthesized)
acatagctatgcttcatgaggcttacaagaagtaactttaggtaggagctgtttttgtttgaagtactgcaaaattatattgtaacttcccctcaccccagttgcaattgtgtcatagtc

SEQ ID NO: 178777 - DNA, 120 bp, Artificial Sequence
  ENSG00000110675_17 (sequence is synthesized)
atctgtatatcaaactattttattcccataacttcattggcttggatgcctaagtgtatgatgcttgaagcctcagaaaagaaataagcatatttcaaaagctgcaaaaggtttttcact

SEQ ID NO: 178778 - DNA, 120 bp, Artificial Sequence
  ENSG00000110675_18 (sequence is synthesized)
gcctgcctcttgcggaactgggttacaccctggcactgttctgatccaagcatatttgcttggggaactaagtgctgactagtttgttttctatgtcaaggggcaatattaaaaaacaat

SEQ ID NO: 178779 - DNA, 120 bp, Artificial Sequence
  ENSG00000110675_19 (sequence is synthesized)
ttgcaagaaaatgtgtttcaagagagcaacctaagctaagtcactctgcgatatttcttgaaaataacgaccttgtcttgtatcagtggaagaagtaagttgcttagaaagggaaaagtc

SEQ ID NO: 178780 - DNA, 120 bp, Artificial Sequence
  ENSG00000110675_20 (sequence is synthesized)
aaattgttccagaactgctaaaaatcattttaaaaaccatgatttagtttggaattatgattgtagtctgttgaatagtatttaccatggcatttcatacccatggtattttataccttc

SEQ ID NO: 178781 - DNA, 120 bp, Artificial Sequence
  ENSG00000110675_21 (sequence is synthesized)
tgactatcaattttagtattattagatgtttgtgtaaccacttgcttatttaaatgaattttgagtactgcctaattgtcagttatatgaataaattacatgtcattctactgtaacgta

SEQ ID NO: 178782 - DNA, 120 bp, Artificial Sequence
  ENSG00000110675_22 (sequence is synthesized)
aagatgaaaatggagctgctgtggcttactgacttagcttagcccaaagaaataccatagcacttattgggacagagtttttaaaacctgtaaatgctccctccctccctcccttcctct

SEQ ID NO: 178783 - DNA, 120 bp, Artificial Sequence
  ENSG00000110675_23 (sequence is synthesized)
cttcctccctagcttcctttttttcttcattccttgcttccccccctccccgcctctcctccctctcctcctttccttaccttccttacttccctccctccttcctttcttcttttcttt

SEQ ID NO: 178784 - DNA, 120 bp, Artificial Sequence
  ENSG00000110675_24 (sequence is synthesized)
cttttactaactcaatcatttacttatcgatgaacatttatttggcatctacaatgtaccaggcatcacaaataatataataatattatttattatattattatagtatggtgaatagga

SEQ ID NO: 178785 - DNA, 120 bp, Artificial Sequence
  ENSG00000110675_25 (sequence is synthesized)
actaggtaaaaccaaacaaaatgcagtagggaatcaggagagagtgaggcgacatctagttacctcactaaatgtttcaggaaggaggggtttgatcattaatgatagtgcaaaagaata

SEQ ID NO: 178786 - DNA, 120 bp, Artificial Sequence
  ENSG00000110675_26 (sequence is synthesized)
gcttaatgtttggcctttagggctgtctcccatggctatactaaagtggataggaggtaaatagcatggccttaaataattccatttctgacctccatataaattgtactgtggcttaac

SEQ ID NO: 178787 - DNA, 120 bp, Artificial Sequence
  ENSG00000110675_27 (sequence is synthesized)
atttgttggataattgagctacagacatctctgcatatagttaacagttttaacataagcattaaaagagaacaagtaccaattagaggttaaatctgacttacttacttattcattcat

SEQ ID NO: 178788 - DNA, 120 bp, Artificial Sequence
  ENSG00000110675_28 (sequence is synthesized)
ccattcagcaaattcagcaaagcagaatgggagaagaaaaggatggataaggcaattgggtactcatttgcaattgtgggcatcaatataactgacctggcatataatctactggtcagc

SEQ ID NO: 178789 - DNA, 120 bp, Artificial Sequence
  ENSG00000110675_29 (sequence is synthesized)
cgcagcgagctgggaggagcggtcggctgggctgttgagctgcgcctcctccaactgctgggaaactccgcacttcaatattggagcatctctttcccgggcagttgacacttactttga

SEQ ID NO: 178790 - DNA, 120 bp, Artificial Sequence
  ENSG00000110675_30 (sequence is synthesized)
caaaggcaaatttggaagcaattacttgaggacagttcatatagcatctggacagtcaacacgggcaccatgaagcacttcctgagtccatttccacagatgttggacgattttggcaat

SEQ ID NO: 178791 - DNA, 120 bp, Artificial Sequence
  ENSG00000110675_31 (sequence is synthesized)
tgaatgaatcagatgttaattcctgagctcagcaaatgtattatggagaatgaggagctgacttttcactgggaagaattcagcattatttaaaagcccatgcagtgattaatctgtcaa

SEQ ID NO: 178792 - DNA, 120 bp, Artificial Sequence
  ENSG00000110675_32 (sequence is synthesized)
cttctgagatgttctagaatgaaatgctccatgcacagtcccagaagaaattaggttaaccttagagaaaccaggttgtgggaaaaaatggattttgatctacatttaggatacatgata

SEQ ID NO: 178793 - DNA, 120 bp, Artificial Sequence
  ENSG00000110675_33 (sequence is synthesized)
cccaattgctaccatcagatatattaatggtataaatattcagagcaaaaaggaatagagaaaatattcaatgtatgtcaaaaattacatgaaatataaggaataaatgctatttgatta

SEQ ID NO: 178794 - DNA, 120 bp, Artificial Sequence
  ENSG00000110675_34 (sequence is synthesized)
agacagagccaaaatggaaggcgggacaagggcggcctggctggggcgaggggctggtctgggtccctgggaaccccttgccttgtgggcttcggtctccagggaggagctaggcagccg

SEQ ID NO: 178795 - DNA, 120 bp, Artificial Sequence
  ENSG00000110675_35 (sequence is synthesized)
ggctgcggggccgccggactgtggggtcctccgcgcagcgagctgggaggagcggtcggctgggctgttgagctgcgcctcctccaactgctgggaaactccgcacttcaatattggagc

SEQ ID NO: 178796 - DNA, 120 bp, Artificial Sequence
  ENSG00000110675_36 (sequence is synthesized)
atctctttcccgggcaggaaaatacgctgctaacccccagtgggccgtagattggtactatcaattgagtctgtcatttggagagaccaattttgggcaggcatccaggcattgttctgc

SEQ ID NO: 178797 - DNA, 120 bp, Artificial Sequence
  ENSG00000110675_37 (sequence is synthesized)
atctctgcaatgtatacgttttgtgccggtggcttgacaaccgtccttaactggtgctgccaatatggtggaaagcaggaagaagaaataaatgtcttctctgtaagacatcactgtcaa

SEQ ID NO: 178798 - DNA, 120 bp, Artificial Sequence
  ENSG00000110675_38 (sequence is synthesized)
aagaacccattaacgtagggaacgttgaggactggaacaggttgtagggcgtcttcctacactttgggttataacttccattgcatcaccaccatttaccagtaaaccagcacacacagc

SEQ ID NO: 178799 - DNA, 120 bp, Artificial Sequence
  ENSG00000110675_39 (sequence is synthesized)
aatcagtactcgaaatggttctcttttgcagaaaaagcctgcttttctcccagctttggtgagatagatacgtaatcttcgtaaagacctataaggaattcctctgtggaacaaaatttt

SEQ ID NO: 178800 - DNA, 120 bp, Artificial Sequence
  ENSG00000110675_40 (sequence is synthesized)
aagcctccagtacaggatgctgaaagaagcaactctttaatcttgccagcccatgcacagtgaagctgaagtgcttcaatttacagatgttttacatttagggaaggcttttccaacaaa

SEQ ID NO: 178801 - DNA, 120 bp, Artificial Sequence
  ENSG00000110675_41 (sequence is synthesized)
gacctaccgcagttacatcacaggctccacctccgcctgccaggctgcttctgcaaggctgttagtaaggatactatgtattgctgtgcttgattaatgaagaaaataaatctccaaatc

SEQ ID NO: 178802 - DNA, 120 bp, Artificial Sequence
  ENSG00000110675_42 (sequence is synthesized)
ccagttgacacttactttgacaaaggcaaatttggaagcaattacttgaggacagttcatatagcatctggacagtcaacacgggcaccatgaagcacttcctgaggcaatctcctgtag

SEQ ID NO: 178803 - DNA, 120 bp, Artificial Sequence
  ENSG00000110675_43 (sequence is synthesized)
gtgaccttcccagagcctgcccattgccctcaagctgttgtccgagatcctctgggagctggatcacgtacatcccagctctcccgccccttggctttccctcagcttttcagggccaac

SEQ ID NO: 178804 - DNA, 120 bp, Artificial Sequence
  ENSG00000110675_44 (sequence is synthesized)
tttcattcatttactcattggaattttcacttttgtactgaagtgaggaaagcacgctgattttccaggctgttctgtctgtctctgtgggatggtggagctggctttcctgtccaacct

SEQ ID NO: 178805 - DNA, 120 bp, Artificial Sequence
  ENSG00000110675_45 (sequence is synthesized)
gagaggaacgtactgtctctctctcctctgcctctccaacaccctgggtgttttgcttttatagaattgtcacactgtttttcaactttctgtttttactgtccttttccttgctagact

SEQ ID NO: 178806 - DNA, 120 bp, Artificial Sequence
  ENSG00000110675_46 (sequence is synthesized)
acaagctccttgtggacagggaggtcatatggcttgctgtgaaaataagttcttgactcatgttcactttttccactgccatatctcccactctcatttcttctgtactgcacggtcagt

SEQ ID NO: 178807 - DNA, 120 bp, Artificial Sequence
  ENSG00000110680_0 (sequence is synthesized)
ccgccgctgccaccgcctctgatccaagccacctcccgccaggtgagccccgagatcctggctcagagaggtgtcatgggcttccaaaagttctcccccttcctggctctcagcatcttg

SEQ ID NO: 178808 - DNA, 120 bp, Artificial Sequence
  ENSG00000110680_1 (sequence is synthesized)
gtcctgttgcaggcaggcagcctccatgcagcaccattcaggtctgccctggagagcagcccagcagacccggccacgctcagtgaggacgaagcgcgcctcctgctggctgcactggtg

SEQ ID NO: 178809 - DNA, 120 bp, Artificial Sequence
  ENSG00000110680_2 (sequence is synthesized)
caggactatgtgcagatgaaggccagtgagctggagcaggagcaagagagagagggctccagaatcattgcccagaagagagcctgtgacactgccacctgtgtgactcatcggctggca

SEQ ID NO: 178810 - DNA, 120 bp, Artificial Sequence
  ENSG00000110680_3 (sequence is synthesized)
ggcgccgcagggaccttcaagcctgagcagctgaatgactcaagaaggtcacaataaagctgaactccttttaatgtgtaatgaaagcaatttgtaggaaaggctccatggaagacatac

SEQ ID NO: 178811 - DNA, 120 bp, Artificial Sequence
  ENSG00000110680_4 (sequence is synthesized)
atataggcatccttcttgatactgaaaactatcttctttgtttgaaaggaactattgctaaatgcagaacaagctcattgcagttacctattgtgcatctttttaaatacttgattatgt

SEQ ID NO: 178812 - DNA, 120 bp, Artificial Sequence
  ENSG00000110680_5 (sequence is synthesized)
aaccataaatctgacagcatgtctcattggcttatctggtagcaaatctaggccccgtcagccaccctattgacattggtggctctgctaaacctcagggggacatgaaatcactgcctc

SEQ ID NO: 178813 - DNA, 120 bp, Artificial Sequence
  ENSG00000110680_6 (sequence is synthesized)
ttgggcatctggggacacatggtaatgctgtgccttgacagaagtatttgtttaaagaaatgtcaatgctgtcatttgtgaactctatcaaaattaaaaatgtattttctatacccttca

SEQ ID NO: 178814 - DNA, 120 bp, Artificial Sequence
  ENSG00000110680_7 (sequence is synthesized)
gtacttgcatgctgggcacatacacgcaggacttcaacaagtttcacacgttcccccaaactgcaattggggttggagcacctggaaagaaaagggatatgtccagcgacttggagagag

SEQ ID NO: 178815 - DNA, 120 bp, Artificial Sequence
  ENSG00000110680_8 (sequence is synthesized)
accatcgccctcatgttagcatgccccagaatgccaactaaactcctccctttccttcctaatttcccttcttgcatccttcctataacttgatgcatgtggtttggttcctctctggtg

SEQ ID NO: 178816 - DNA, 120 bp, Artificial Sequence
  ENSG00000110680_9 (sequence is synthesized)
gctctttgggctggtattggtggctttccttgtggcagaggatgtctcaaacttcagatgggaggaaagagagcaggactcacaggttggaagagaatcacctgggaaaataccagaaaa

SEQ ID NO: 178817 - DNA, 120 bp, Artificial Sequence
  ENSG00000110680_10 (sequence is synthesized)
tgagggccgctttgagtcccccagagatgtcatcagagctcctctgtcctgcttctgaatgtgctgatcatttgaggaataaaattatttttccccaaagatctgagctgtggtggtcat

SEQ ID NO: 178818 - DNA, 120 bp, Artificial Sequence
  ENSG00000110680_11 (sequence is synthesized)
tgctctgatctatgtcccaggcttcatagtgtctaagacctatgcttagaaatagccttaaccctaggctagctggacagaggatatggtgggtggtccctttgaccaagctcaagcagg

SEQ ID NO: 178819 - DNA, 120 bp, Artificial Sequence
  ENSG00000110680_12 (sequence is synthesized)
aagaacaggggtcctaaggagcaggtaagcacctctaggacttgatgctgcaaactccgctcctcttccaggtaagactgaggaattttttattttcctaagaaagggtatttggtgccc

SEQ ID NO: 178820 - DNA, 120 bp, Artificial Sequence
  ENSG00000110680_13 (sequence is synthesized)
gggctgggtgtgggaccataattcactccagtgtcataaacctccgctttgatttttagttaatttatacaggaaagattggctgttactgctccacattccatagccagtcatccagag

SEQ ID NO: 178821 - DNA, 120 bp, Artificial Sequence
  ENSG00000110680_14 (sequence is synthesized)
tcaccttgggttttctgacacccctgggaatatctatggggagtgatcatggcattttccctaatggccttgtgattttctgctctgataattgtgtttaggagaaacacttaaagttaa

SEQ ID NO: 178822 - DNA, 120 bp, Artificial Sequence
  ENSG00000110680_15 (sequence is synthesized)
ttggtgcctttcagcacagcaactttaccatgaaggtcccatggggctgacctctctcccagcctctcactcacagatcttctcttctttctccatcctgcaaatcagaatcattgccca

SEQ ID NO: 178823 - DNA, 120 bp, Artificial Sequence
  ENSG00000110680_16 (sequence is synthesized)
ggcatcagagacactgcccagcccaagtgtcgccgccgcttccacagggctctggctggacgccgccgccgccgctgccaccgcctctgatccaagccacctcccgccagagaggtgtca

SEQ ID NO: 178824 - DNA, 120 bp, Artificial Sequence
  ENSG00000110693_0 (sequence is synthesized)
ctgttttttttctgcagaagaatgtcttccaagcaagccacctctccatttgcctgtgcagctgatggagaggatgcaatgacccaggatttaacctcaagggaaaaggaagagggcagt

SEQ ID NO: 178825 - DNA, 120 bp, Artificial Sequence
  ENSG00000110693_1 (sequence is synthesized)
gatcaacatgtggcctcccatctgcctctgcaccccataatgcacaacaaacctcactctgaggagctaccaacacttgtcagtaccattcaacaagatgctgactgggacagcgttctg

SEQ ID NO: 178826 - DNA, 120 bp, Artificial Sequence
  ENSG00000110693_2 (sequence is synthesized)
tcatctcagcaaagaatggaatcagagaataataagttatgttccctatattccttccgaaatacctctacctcaccacataagcctgacgaagggagtcgggaccgtgagataatgacc

SEQ ID NO: 178827 - DNA, 120 bp, Artificial Sequence
  ENSG00000110693_3 (sequence is synthesized)
agtgttacttttggaaccccagagcgccgcaaagggagtcttgccgatgtggtggacacactgaaacagaagaagcttgaggaaatgactcggactgaacaagaggattcctcctgcatg

SEQ ID NO: 178828 - DNA, 120 bp, Artificial Sequence
  ENSG00000110693_4 (sequence is synthesized)
gaaaaactactttcaaaagattggaaggaaaaaatggaaagactaaataccagtgaacttcttggagaaattaaaggtacacctgagagcctggcagaaaaagaacggcagctctccacc

SEQ ID NO: 178829 - DNA, 120 bp, Artificial Sequence
  ENSG00000110693_5 (sequence is synthesized)
atgattacccagctgatcagtttacgggagcagctactggcagcgcatgatgaacagaaaaaactggcagcgtcacaaattgagaaacaacggcagcaaatggaccttgctcgccaacag

SEQ ID NO: 178830 - DNA, 120 bp, Artificial Sequence
  ENSG00000110693_6 (sequence is synthesized)
caagaacagattgcgagacaacagcagcaacttctgcaacagcagcacaaaattaatctcctgcagcaacagatccaggttcagggtcacatgcctccgctcatgatcccaatttttcca

SEQ ID NO: 178831 - DNA, 120 bp, Artificial Sequence
  ENSG00000110693_7 (sequence is synthesized)
catgaccagcggactctggcagcagctgctgctgcccaacagggattcctcttcccccctggaataacatacaaaccaggtgataactaccccgtacagttcattccatcaacaatggca

SEQ ID NO: 178832 - DNA, 120 bp, Artificial Sequence
  ENSG00000110693_8 (sequence is synthesized)
gctgctgctgcttctggactcagccctttacagctccagaagggtcatgtctcccacccacaaattaaccaaaggctaaagggcctaagtgaccgttttggcaggaatttggacaccttt

SEQ ID NO: 178833 - DNA, 120 bp, Artificial Sequence
  ENSG00000110693_9 (sequence is synthesized)
gaacatggtggtggccactcttacaaccacaaacagattgagcagctctatgccgctcagctggccagcatgcaggtgtcacctggagcaaagatgccatcaactccacagccaccaaac

SEQ ID NO: 178834 - DNA, 120 bp, Artificial Sequence
  ENSG00000110693_10 (sequence is synthesized)
acagcagggacggtctcacctactgggataaaaaatgaaaagagagggaccagccctgtaactcaagttaaggatgaagcagcagcacagcctctgaatctctcatcccgacccaagaca

SEQ ID NO: 178835 - DNA, 120 bp, Artificial Sequence
  ENSG00000110693_11 (sequence is synthesized)
gcagagcctgtaaagtccccaacgtctcccacccagaacctcttcccagccagcaaaaccagccctgtcaatctgccaaacaaaagcagcatccctagccccattggaggaagcctggga

SEQ ID NO: 178836 - DNA, 120 bp, Artificial Sequence
  ENSG00000110693_12 (sequence is synthesized)
agaggatcctctttagatatcctatctagtctcaactcccctgccctttttggggatcaggatacagtgatgaaagccattcaggaggcgcggaagatgcgagagcagatccagcgggag

SEQ ID NO: 178837 - DNA, 120 bp, Artificial Sequence
  ENSG00000110693_13 (sequence is synthesized)
caacagcagcaacagccacatggtgttgacgggaaactgtcctccataaataatatggggctgaacagctgcaggaatgaaaaggaaagaacgcgctttgagaatttggggccccagtta

SEQ ID NO: 178838 - DNA, 120 bp, Artificial Sequence
  ENSG00000110693_14 (sequence is synthesized)
acgggaaagtcaaatgaagatggaaaactgggcccaggtgtcatcgaccttactcggccagaagatgcagagggaggtgccactgtggctgaagcacgagtctacagggacgcccgcggc

SEQ ID NO: 178839 - DNA, 120 bp, Artificial Sequence
  ENSG00000110693_15 (sequence is synthesized)
cgtgccagcagcgagccacacattaagcgaccaatgaatgcattcatggtttgggcaaaggatgagaggagaaaaatccttcaggccttccccgacatgcataactccaacattagcaaa

SEQ ID NO: 178840 - DNA, 120 bp, Artificial Sequence
  ENSG00000110693_16 (sequence is synthesized)
atcttaggatctcgctggaaatcaatgtccaaccaggagaagcaaccttattatgaagagcaggcccggctaagcaagatccacttagagaagtacccaaactataaatacaaaccccga

SEQ ID NO: 178841 - DNA, 120 bp, Artificial Sequence
  ENSG00000110693_17 (sequence is synthesized)
ccgaaacgcacctgcattgttgatggcaaaaagcttcggattggggagtataagcaactgatgaggtctcggagacaggagatgaggcagttctttactgtggggcaacagcctcagatt

SEQ ID NO: 178842 - DNA, 120 bp, Artificial Sequence
  ENSG00000110693_18 (sequence is synthesized)
ccaatcaccacaggaacaggtgttgtgtatcctggtgctatcactatggcaactaccacaccatcgcctcagatgacatctgactgctctagcacctcggccagcccggagcccagcctc

SEQ ID NO: 178843 - DNA, 120 bp, Artificial Sequence
  ENSG00000110693_19 (sequence is synthesized)
ccggtcatccagagcacttatggtatgaagacagatggcggaagcctagctggaaatgaaatgatcaatggagaggatgaaatggaaatgtatgatgactatgaagatgaccccaaatca

SEQ ID NO: 178844 - DNA, 120 bp, Artificial Sequence
  ENSG00000110693_20 (sequence is synthesized)
gactatagcagtgaaaatgaagccccggaggctgtcagtgccaactgaggagtttttgtttgctgaattaaagtactctgacatttcacccccctccccaacaaagagttattaaagagc

SEQ ID NO: 178845 - DNA, 120 bp, Artificial Sequence
  ENSG00000110693_21 (sequence is synthesized)
ccgcatgcatttgtggctccacaattacatcagcagaatggtcttaattgtttcgtaaagtgtgagacagattaagttttccctgatttttcatgaacttgagttttttgttgttattgt

SEQ ID NO: 178846 - DNA, 120 bp, Artificial Sequence
  ENSG00000110693_22 (sequence is synthesized)
tattgttgttgttgttgtttttttaatttaggtgaagacatattaaatatgagacaccaggacttgaaacttatctcaacccgtagatgtcttacaagtcttatatttttgtcttacttt

SEQ ID NO: 178847 - DNA, 120 bp, Artificial Sequence
  ENSG00000110693_23 (sequence is synthesized)
ttttttcttttggatgttgataaaggtttaagttactgttttagatggggttaaacattctcactcaggtatgctgtgccggcctacaggttgtgaatgtgtttttattctgaattattt

SEQ ID NO: 178848 - DNA, 120 bp, Artificial Sequence
  ENSG00000110693_24 (sequence is synthesized)
tagaaaacaactgaggatttcatattgtgaaacagaacaagtccacggcgtgtgcagctgcatgtagagcatattcaaaaggcctcggaattccaattttccatttgtagagttaaactt

SEQ ID NO: 178849 - DNA, 120 bp, Artificial Sequence
  ENSG00000110693_25 (sequence is synthesized)
tgaatgtgccaaactttttcgtaacttttgaatcttaatattttgaaagtcttaaaggagacactgcaaagtcttagacaatctttggcatcttaaaataaaatagcaaaccaacatttt

SEQ ID NO: 178850 - DNA, 120 bp, Artificial Sequence
  ENSG00000110693_26 (sequence is synthesized)
tttttccagaaaatggtaaggtactcaggaatctggagacaagatattgtaaggaatgaacaaggttgccacagtgcatggacccaattgtgtttgcctgttgacgtgccatcagtgcgt

SEQ ID NO: 178851 - DNA, 120 bp, Artificial Sequence
  ENSG00000110693_27 (sequence is synthesized)
gatgtggtatgacatacacacaccagagcaaccgccacaccagatatcgacagagtggtcttctctgcctgagaccacctctcactacatccattatccctttgcctttaaccctgacat

SEQ ID NO: 178852 - DNA, 120 bp, Artificial Sequence
  ENSG00000110693_28 (sequence is synthesized)
tcagtcttaacacattttatcttaaataatttattcattccagaatgtcaagggtccacttgctatttattttttttcaattgttggtggcattaatttaataattcttgtttttcacct

SEQ ID NO: 178853 - DNA, 120 bp, Artificial Sequence
  ENSG00000110693_29 (sequence is synthesized)
tccttccccgaagaacttttccgtccttttcacctccttctcctgtgtacatagtgattttatgtccccagaacgcctggaagcatttctgaaaccaagatattattaaaaacctattat

SEQ ID NO: 178854 - DNA, 120 bp, Artificial Sequence
  ENSG00000110693_30 (sequence is synthesized)
tgtttttaatcatgagtatgtatctggctgcagggctgtgtattgggatataggtatatagtcttacacttaaacaggtatgcccctgaggttcactgtgacctcaagtcttttgccaga

SEQ ID NO: 178855 - DNA, 120 bp, Artificial Sequence
  ENSG00000110693_31 (sequence is synthesized)
attttcccctaattcagttcacaagtggtagggtctgcatcagtggcatttccccctgaattccattcagcagcaaggttcaacagtggtgactgccaggcaggagagtcctgcggccaa

SEQ ID NO: 178856 - DNA, 120 bp, Artificial Sequence
  ENSG00000110693_32 (sequence is synthesized)
acctgaagcccaaggctcgtgggccatgcaggaatctcagtgaagctgtcatgggctggcacctttacactgagttgccttgtcccagctggcacatctagggagttcattgcaaaatcc

SEQ ID NO: 178857 - DNA, 120 bp, Artificial Sequence
  ENSG00000110693_33 (sequence is synthesized)
ccaggatgcaaaaagccacatgacagcctcagagcaaagatggtggcaaatagtcatgatacatctagagaatgaaagaaaactgtaagggaggagaaggaggggaatacattccctata

SEQ ID NO: 178858 - DNA, 120 bp, Artificial Sequence
  ENSG00000110693_34 (sequence is synthesized)
tgggatgttcctactgttaactctggggaacagatagctccgggggcagcagatgagttcctctggctgactctatctgtagccacatggggacctgcctacgtgtgaacaaaatgaact

SEQ ID NO: 178859 - DNA, 120 bp, Artificial Sequence
  ENSG00000110693_35 (sequence is synthesized)
gcacttatcacacaaggatttctttgaagacatgctactggggtgggaagcagtgaggttttattccccatctcctaactacagggagctctgccatgtcattttggccttcctgaaact

SEQ ID NO: 178860 - DNA, 120 bp, Artificial Sequence
  ENSG00000110693_36 (sequence is synthesized)
gaatgtcagtgaatgggatagttcacctcatgggacaacccagaatctgatcaccaggacataggaatggccccatcagatttcttgagccattttgtcacttggaagaaaatagtgtac

SEQ ID NO: 178861 - DNA, 120 bp, Artificial Sequence
  ENSG00000110693_37 (sequence is synthesized)
ctttgtatttatttaagagtgctcaaggcctaatagcaataaacaggtctagccaagaaattacaagctattctgttagctgggagtgctctctataagctgattaaggtactgatagga

SEQ ID NO: 178862 - DNA, 120 bp, Artificial Sequence
  ENSG00000110693_38 (sequence is synthesized)
actctttgttattcatgttggttggggattagaaatttgtttttgtacatttatttcaaatgaggaggaggtcattttttctctcaaaaaatgagtatttattattgtcttactgatttc

SEQ ID NO: 178863 - DNA, 120 bp, Artificial Sequence
  ENSG00000110693_39 (sequence is synthesized)
tttgattatatacctctcctcctcagttcactcttgttttttttctttctctttggcttttgcttttgctctctctcacttctttcttattttgttgcattggtagagtgttgtatggct

SEQ ID NO: 178864 - DNA, 120 bp, Artificial Sequence
  ENSG00000110693_40 (sequence is synthesized)
agcattgtattgtatgtaattaattttgcacaaaagcaaacatttagcatagtaggttaattttgtttgtttttatgaccatgccaaaataatattctgggctggtggagaacaaaggac

SEQ ID NO: 178865 - DNA, 120 bp, Artificial Sequence
  ENSG00000110693_41 (sequence is synthesized)
tgttctttaggactgaaacttgattttgctcatagtaagtaaaaaaaaacaaaaaacacacacactcacagatgttgtttcgtaagtgttataagcactggatataaatggtatttttta

SEQ ID NO: 178866 - DNA, 120 bp, Artificial Sequence
  ENSG00000110693_42 (sequence is synthesized)
tcacttctgactaatgtgaaactgttgtacgaaaactacatgaacaaaagtcatctgtttcgactcgtgtgggcttgcctcacagttgccggatttgagtcatttttatgtcttgttatt

SEQ ID NO: 178867 - DNA, 120 bp, Artificial Sequence
  ENSG00000110693_43 (sequence is synthesized)
tcatttatttatgcaaaatacatgtgtgtatgaacactttgttttagctccagctctgcctcagtactggggttcatttacttttagccatgttcttaaaaatgaaaggctattcaggaa

SEQ ID NO: 178868 - DNA, 120 bp, Artificial Sequence
  ENSG00000110693_44 (sequence is synthesized)
tgatctgattgtaaacgtctttttcattggatcaaacagtaatgctgtatttgaatctaaattttgtgtataagcagtttatttattagccaagtttggctctaaatatccatggaaatt

SEQ ID NO: 178869 - DNA, 120 bp, Artificial Sequence
  ENSG00000110693_45 (sequence is synthesized)
aagaatgacaatcatagggatcaattcattttattttcagtggggcttaaacaaagtttatatgactttaccatctcattttagatttttctaattgtgtaaatataacatagaaataga

SEQ ID NO: 178870 - DNA, 120 bp, Artificial Sequence
  ENSG00000110693_46 (sequence is synthesized)
atttatttttggttcatgaatacttagtgagatataagttatgtatttcctttttgttctctatccatagatgttggtccaaactgaaagttgatgagtcactgtgcctctcggggtagt

SEQ ID NO: 178871 - DNA, 120 bp, Artificial Sequence
  ENSG00000110693_47 (sequence is synthesized)
gagttatcagctacagtgagagagcagtgtttggcctgcagctgggacagcaaaacgtttcaccagggttctcatgcagttcagaacccactgtccacagatccagacatttcccttttt

SEQ ID NO: 178872 - DNA, 120 bp, Artificial Sequence
  ENSG00000110693_48 (sequence is synthesized)
tcttacagaaagttgatgattggacatactaaatttccactacagttaggagacagtcagtttgctttgggagtctacataaatcttctaagatagttctgtgaccatttaatagcaaga

SEQ ID NO: 178873 - DNA, 120 bp, Artificial Sequence
  ENSG00000110693_49 (sequence is synthesized)
agcatgaatgccactacaaaggcaaaaatccacctctgagatcggccgttaataaacgtcccgtcatgtcagtttagattcaagaatgttaagcaactttgtttttgcggtgctccctat

SEQ ID NO: 178874 - DNA, 120 bp, Artificial Sequence
  ENSG00000110693_50 (sequence is synthesized)
ttcatagtatcttcaaatcaaaaataaaaattatctccattttgttaaagaacttacagggtcagggttctccttgtcacttagaattgggacactgccaggcaatcctctcccaaaaaa

SEQ ID NO: 178875 - DNA, 120 bp, Artificial Sequence
  ENSG00000110693_51 (sequence is synthesized)
aaaaaaaaaaaaaaatagccatatggaatggaaggaaaaggagaaaagaaggaagaaaggaaaaaagtaggaagggagagagaaaaaaaaggtcgctttgcggatacgagccgctaggct

SEQ ID NO: 178876 - DNA, 120 bp, Artificial Sequence
  ENSG00000110693_52 (sequence is synthesized)
gacaacttttctatttcattggcagatatgaagcagtgtcttttccagtaaggtacggaagctttgttgttttcatgtgtacccagctcagccttttagaagcacctcggtttgcttcat

SEQ ID NO: 178877 - DNA, 120 bp, Artificial Sequence
  ENSG00000110693_53 (sequence is synthesized)
taggtatttgatactctccagccttgtcctcaggcctgatttgatttgccagggtcctgacaccaaagcccaggccaagttctaaattcaggtgtgggctcacagtgctattgagcttgt

SEQ ID NO: 178878 - DNA, 120 bp, Artificial Sequence
  ENSG00000110693_54 (sequence is synthesized)
cgaattctggcctcccctgaacattagccccacgggagcctgagggtgtttgaaaagggcgtgatcactctagggctgaaattaaaggctgctttcttttccttctgaagccaggctgct

SEQ ID NO: 178879 - DNA, 120 bp, Artificial Sequence
  ENSG00000110693_55 (sequence is synthesized)
tcttcggagtacaccctcctgagccaggagcacaagcactagcagaaagcagggattgtttcaggaaagcccatttaccctcagtaggaaggcagcctggtcacttgaacagcacagctg

SEQ ID NO: 178880 - DNA, 120 bp, Artificial Sequence
  ENSG00000110693_56 (sequence is synthesized)
aggctgcttctctcaatttactcattttgcaaagaattgacctctaccaactcattagggagaggaaaaagaatcacttagtaattttaaatcatatgagaagtcctgtaccaagtgcca

SEQ ID NO: 178881 - DNA, 120 bp, Artificial Sequence
  ENSG00000110693_57 (sequence is synthesized)
acaactgcaaagaaatgcagctagaggaatgtattgaaattactactgggtcttcctttttaatgagaaaatgacaaaaatggttgctgtagccctgcctgattttgtacacgtttgtct

SEQ ID NO: 178882 - DNA, 120 bp, Artificial Sequence
  ENSG00000110693_58 (sequence is synthesized)
aagaattgagttggcacttaagctcacttctcaaagtataataatattgtatgacctcatttgtcctttcacaaaagcacttgcatcatttccttaagtcatctgctccctgacatgttt

SEQ ID NO: 178883 - DNA, 120 bp, Artificial Sequence
  ENSG00000110693_59 (sequence is synthesized)
tcttccctaataaacaacttctgtctgttattcctgccaatgatgttctgtttctgatgccatatcctattgagcgtgcccctgtactaatatcattgaaaatattgatatgcaaacaca

SEQ ID NO: 178884 - DNA, 120 bp, Artificial Sequence
  ENSG00000110693_60 (sequence is synthesized)
tttccttttcatccccattctatctttccctttggggacagattgctttccaaaagctcatgaacaaatatttggaatgctggtacctttggggcagaggtaagggtgggcggggtgggg

SEQ ID NO: 178885 - DNA, 120 bp, Artificial Sequence
  ENSG00000110693_61 (sequence is synthesized)
gcagaaaggtaatgcttaatgcagataactcttctaatcagtgtccatggcaatatgaacgcttgaagaaaactcagtgacatatcttgctcagtagtttcttattcctgaagaaccaca

SEQ ID NO: 178886 - DNA, 120 bp, Artificial Sequence
  ENSG00000110693_62 (sequence is synthesized)
agcataaagtgaggcctcagtgctggtgctcttggagtatggggaatgtgcaaatatttaactgttttgtatgctgcacattgcaggtctgctcatgtgcattctccctttgtcttcctt

SEQ ID NO: 178887 - DNA, 120 bp, Artificial Sequence
  ENSG00000110693_63 (sequence is synthesized)
tgtcatatgtgtttttgcttttttgaaagtgcagtctttattgtaccctcctccagcttgtagcaaattagaatgcttagcatttatgttcattcattattgtatttgccatgtaaaatt

SEQ ID NO: 178888 - DNA, 120 bp, Artificial Sequence
  ENSG00000110693_64 (sequence is synthesized)
tttattaccttagacaagcttataagctgttactacataacttatcttactgtaactcttttatttcccccgacgttgtaatttgtttgtgatgtatattgtgaaattgtattctatgtt

SEQ ID NO: 178889 - DNA, 120 bp, Artificial Sequence
  ENSG00000110693_65 (sequence is synthesized)
aatttaatcagcacaattcactgacatgctggactgacatgctggctgctgtttcaaagtgtaaagtttgtgtagggctgttgggacaactgcaactctgttgtcaaggtactgtgcttt

SEQ ID NO: 178890 - DNA, 120 bp, Artificial Sequence
  ENSG00000110693_66 (sequence is synthesized)
ggttcctatagcaacactgggtgtggcccttgaattgctaagggcatttaatacatcctggagcaaattttaactgcagattttctttgtagaaattctatgtataatgcaggtacctac

SEQ ID NO: 178891 - DNA, 120 bp, Artificial Sequence
  ENSG00000110693_67 (sequence is synthesized)
ttggcccatggctggtaactatttgggcaattagaaaaaaagaaaaaaacataaaaactagtgtctattgctgctttgaatatgtttgaaagtctgaaaatgtaaatagtttatcaaaaa

SEQ ID NO: 178892 - DNA, 120 bp, Artificial Sequence
  ENSG00000110693_68 (sequence is synthesized)
aaaatcttgtacagtccagtgtaaagtttttaaatgaccttaagggttgccatcacatctttctcacactctcctcttgataataataataataaaaagtttgctaaggattaaagaaat

SEQ ID NO: 178893 - DNA, 120 bp, Artificial Sequence
  ENSG00000110693_69 (sequence is synthesized)
gggaaaaataaaaaaaatctcttcaaatttacaggaatgaatcattgttcttagctttgttgcatacacaaacttcttggattttgttgtgcagtattgacgtgagataaagctcaacat

SEQ ID NO: 178894 - DNA, 120 bp, Artificial Sequence
  ENSG00000110693_70 (sequence is synthesized)
tgaataatctttcagtggtacttttcaaagtcttcccctcctctgcctcataattaagggaaaagacaaaattgaaagacacactgtctttatctatcctggtgtatgttggcaccttag

SEQ ID NO: 178895 - DNA, 120 bp, Artificial Sequence
  ENSG00000110693_71 (sequence is synthesized)
ctactttttttttttcctttttgcacaaggtgctttcctgatatgttcaacatgccatctttgggtgataatgtatatgccgtgatggggctcaggccccttaggggagtgtctataaga

SEQ ID NO: 178896 - DNA, 120 bp, Artificial Sequence
  ENSG00000110693_72 (sequence is synthesized)
actgcctatttatgctcatttacctcaagactgtcctctctaccctaatctagttgtcatcactccatcttttgtactgctgttgacacttacaaattaaagataaattttgttttatga

SEQ ID NO: 178897 - DNA, 120 bp, Artificial Sequence
  ENSG00000110693_73 (sequence is synthesized)
gggataggaaagatgaaaggtcatggtgagcttcaaggacatgaaaggttgttgtctcatgtaacaatagtagattgttttttttcctaatatttctagccagcccctaagtcaggtgat

SEQ ID NO: 178898 - DNA, 120 bp, Artificial Sequence
  ENSG00000110693_74 (sequence is synthesized)
ccttggggttagttttagtcatatttttatctctataaaacatcaggctgggaggtggtgtgtgcctgtagtctcaactgctagggagcctgaggcaggaagactccttgagcacaggag

SEQ ID NO: 178899 - DNA, 120 bp, Artificial Sequence
  ENSG00000110693_75 (sequence is synthesized)
actctggcagcagctgctgctgcccaacagggattcctcttcccccctggaataacatacaaaccagtgaagtggttcagtcttcctgtgatctctgtaagtcattctaaactacttctt

SEQ ID NO: 178900 - DNA, 120 bp, Artificial Sequence
  ENSG00000110693_76 (sequence is synthesized)
aaaactccccaaagtgtggccatccccttttgactgggtatccttggagttcttaactctgagagttgtgcaccctgagcatccagcagttcgtagatcacagttccaaagttcctaccg

SEQ ID NO: 178901 - DNA, 120 bp, Artificial Sequence
  ENSG00000110693_77 (sequence is synthesized)
gagcaaatccgacagagagaagatatgcatagaagctctggcaggttccctgtcacagctttcctttccctacaggaaagaacgcgctttgagaatttggggccccagttaacgggaaag

SEQ ID NO: 178902 - DNA, 120 bp, Artificial Sequence
  ENSG00000110693_78 (sequence is synthesized)
gtggaggtagaggatgatttcaattagaaataatgacagcaatagacgcttccaatgaagatatcgtggccaccaaaggacaaaggcaagaagttaattcctgaagtcgagaagaatgtc

SEQ ID NO: 178903 - DNA, 120 bp, Artificial Sequence
  ENSG00000110693_79 (sequence is synthesized)
atttctctccgaattcccaacacccggcagtgcagtaaatatttaacgggttactttaagggataaaccgtttgctattaaaacctatgaggtgagggctgaggaagggaacggcatttg

SEQ ID NO: 178904 - DNA, 120 bp, Artificial Sequence
  ENSG00000110693_80 (sequence is synthesized)
atggggagacgagaattgttggcacctggatggtaaatcttcaagttactgtgaaacaagatcacaaacgaaaaagtaacataggaaatactaaagactgggacattttatcagatttta

SEQ ID NO: 178905 - DNA, 120 bp, Artificial Sequence
  ENSG00000110693_81 (sequence is synthesized)
tatactgaggaacaaagggaatgtggaaatgaaagagagagggagagagaggctggcagatgtaatgagacgcggtgaaggtgtacgcagactggcactcccactcctcccttctgctct

SEQ ID NO: 178906 - DNA, 120 bp, Artificial Sequence
  ENSG00000110693_82 (sequence is synthesized)
cactgcagccctgggtaactcgcaggctaacacaaacagcttttctcccgcagcctgccctctgtcactgtcactttcatgaattcaaaggcaatttaccagtgatttctgggtgctggg

SEQ ID NO: 178907 - DNA, 120 bp, Artificial Sequence
  ENSG00000110693_83 (sequence is synthesized)
gattattaatccagctagagaagaaatatgcttttacttagcaagaatgagtatccaaagagctgataatattgttaaggcagcggggtggaatggcagagcttgaagaatgtcttccaa

SEQ ID NO: 178908 - DNA, 120 bp, Artificial Sequence
  ENSG00000110693_84 (sequence is synthesized)
aaagaaagagcaagccccataatggcagcatctttatcttgcacactagtctgtctcttgtgcctgtaacaatgccaggaactttagtaactatttttttttgaattttgacaatcttgg

SEQ ID NO: 178909 - DNA, 120 bp, Artificial Sequence
  ENSG00000110693_85 (sequence is synthesized)
tcgacaagggtaaaaaaggacattccagaagcagaaaaacatgagcaaaagtatggagacatcaaaggtcatggcatatgttcgtttatcatggctggaatgaggggtatgaggaagatg

SEQ ID NO: 178910 - DNA, 120 bp, Artificial Sequence
  ENSG00000110693_86 (sequence is synthesized)
acagtcgtcaccgttgcggcccctcgccgccccggggcactttgggagttgtagttttctgattcattgcatactggcccgaataaaaaagatgtgtccgtgactaaaactacaattccc

SEQ ID NO: 178911 - DNA, 120 bp, Artificial Sequence
  ENSG00000110693_87 (sequence is synthesized)
ttttaaaaagtaactgaaattatcgaacattagcagcattgaatagagtttcctctctgacataacaagaaaatatggacaaaatactctagttctaaagtgtacaacttacatatgaag

SEQ ID NO: 178912 - DNA, 120 bp, Artificial Sequence
  ENSG00000110693_88 (sequence is synthesized)
aaatgctacaggaatttcccttaagatcaggaacaaggccaagctgcccactgtcaccactatattcaacatttttctgaaggagggtaaattcagcctccgtcttggctagaagtgggt

SEQ ID NO: 178913 - DNA, 120 bp, Artificial Sequence
  ENSG00000110693_89 (sequence is synthesized)
aatccaagtaatgcaaattaaaactatattgagatgacaattctagctcattgaattgttgaaaattaaagatgtgaaacacattcttctgtcaaggttgtgaagaaacaggtattctat

SEQ ID NO: 178914 - DNA, 120 bp, Artificial Sequence
  ENSG00000110693_90 (sequence is synthesized)
tttggagggcatggaagttattataagtctttcagaaacaaatttcacagcatctgtcaaaacaacatatacactttcttttgatccagtagtcctcttcttggaatttaccctgaagat

SEQ ID NO: 178915 - DNA, 120 bp, Artificial Sequence
  ENSG00000110693_91 (sequence is synthesized)
acaccttcagtgatatgaaaaaagatatgcaaaaagctgtttgttgacttattatttgtaattgcaaacaacctacatatgcatataggagagtgattaaataaattatgctgcagtccc

SEQ ID NO: 178916 - DNA, 120 bp, Artificial Sequence
  ENSG00000110693_92 (sequence is synthesized)
gggcttcaaacattgttaaaactgaaagtatatgagtgacttctttgatacatgacatctcttgcaacatcccacatctaccttctctactctgtacaagagttcactcaggttcgtgta

SEQ ID NO: 178917 - DNA, 120 bp, Artificial Sequence
  ENSG00000110693_93 (sequence is synthesized)
catcctagaaaacaaatgaaagaagactctccaataatatttttaaacaaagtaaatcaagtctaagtgatggttatactatgttgcacttttggtttttatgtacagattttaggcctt

SEQ ID NO: 178918 - DNA, 120 bp, Artificial Sequence
  ENSG00000110693_94 (sequence is synthesized)
aaaatgtagagtaattaatagttctggatttattactagcattgcaagttaaattgagacttttgttttttactatagacaaattgggatttgatattagggaatttttcatgtaactta

SEQ ID NO: 178919 - DNA, 120 bp, Artificial Sequence
  ENSG00000110693_95 (sequence is synthesized)
attttattcctttgagggctcaaaaacttaaaagattccaattaattttcgtagaagtctttctaaaatatattgcatgcttccctgttttactaatcaggtaatatgacacaaaatgta

SEQ ID NO: 178920 - DNA, 120 bp, Artificial Sequence
  ENSG00000110693_96 (sequence is synthesized)
tatattttttgatgacctagggtcataatacagtagactaggaacttcagtacccttcaaacaattatgtcaccctgggtaaattcttcaatctactcgagccacaaaatttaaaatttg

SEQ ID NO: 178921 - DNA, 120 bp, Artificial Sequence
  ENSG00000110693_97 (sequence is synthesized)
tttggttactgagtttgcaacttaaacattttgaggattaataataataatgaatatgtcttgaattaactgtaaactatatgaatattaactataaacttatacatttggcttattgta

SEQ ID NO: 178922 - DNA, 120 bp, Artificial Sequence
  ENSG00000110693_98 (sequence is synthesized)
taacatatataactgatatattataaatgtcaattattttactgtgctataataatgcccctagtgatcattgagattattagcactttgattttatggttatttttcaattatgaaact

SEQ ID NO: 178923 - DNA, 120 bp, Artificial Sequence
  ENSG00000110693_99 (sequence is synthesized)
atgaaacttaagagtttttgtgtctgcttgatatatatatctttttgtatatatgtatttttttggtgtgtgtgttggtttctccttcaatatcaggttgcaggctattatttcttgctt

SEQ ID NO: 178924 - DNA, 120 bp, Artificial Sequence
  ENSG00000110693_100 (sequence is synthesized)
agttgcaaataatttctaattttctcctatttacctatagattataaaattagataatcaggaaattctggactgtatttgaaatatgaacaagtatgttctggaggtgttgctgagaga

SEQ ID NO: 178925 - DNA, 120 bp, Artificial Sequence
  ENSG00000110693_101 (sequence is synthesized)
ttctgggaaatacatatgatctttagtgcatgaactacatgctgacacttttggcttctgaggctttgttgtccacatttttggctatgttctgaataatggggattgccagataattat

SEQ ID NO: 178926 - DNA, 120 bp, Artificial Sequence
  ENSG00000110693_102 (sequence is synthesized)
ctactgaataagtaagatcactagattacttttaattgtgatccaccaaaagatggtttcagttctataagtaagtggttttcaaaatactttggaggagtctttaatgtaaaaataaag

SEQ ID NO: 178927 - DNA, 120 bp, Artificial Sequence
  ENSG00000110693_103 (sequence is synthesized)
gcattgattgatgatgatttttttcctgaactactagggaattttaaatcattttttccttgcaagtaatggttaattttctcttcgtcctctttgttaccatgtgttacagttgatttt

SEQ ID NO: 178928 - DNA, 120 bp, Artificial Sequence
  ENSG00000110693_104 (sequence is synthesized)
gtataagagagacacttacagaatgagacagtagtcctttaagagtcatttattactgtatttctactagtaatgaatgttttcatactctacagatttttttttgcaatatgtatgttt

SEQ ID NO: 178929 - DNA, 120 bp, Artificial Sequence
  ENSG00000110693_105 (sequence is synthesized)
tagacatcagaaattcaggcatctttagtatatattaatgtatataatataaatatattaaatgcagatattaaatgaccaaaaacatgctcatcaaatttacctatctcacaaatctgg

SEQ ID NO: 178930 - DNA, 120 bp, Artificial Sequence
  ENSG00000110693_106 (sequence is synthesized)
aacagtgaatataacggattaaagaaacaaaacttaaaatgttttgacaaactgaaactatgaacttaaaaataacctaccaagataaaatttaatagatcttattatcaagttcagaag

SEQ ID NO: 178931 - DNA, 120 bp, Artificial Sequence
  ENSG00000110693_107 (sequence is synthesized)
ttgtgacccaaatcccagctgcacaagtaattactgaagaaaattcaaataacagccagatgaatgattaaaaaaaaaaacctatgagttttaagtgacagaaaatgcaatggggtcagc

SEQ ID NO: 178932 - DNA, 120 bp, Artificial Sequence
  ENSG00000110693_108 (sequence is synthesized)
atagtgaatattgccaaaaaaattgccagtgctatttcagtcagcatcactagaagtacagtatgatgcattcaagagttggtagtcccactaaactcactgctcaatagaatgtttgtg

SEQ ID NO: 178933 - DNA, 120 bp, Artificial Sequence
  ENSG00000110693_109 (sequence is synthesized)
aagtattgtgttgagttcagaattaccacactttaagaggaactcaaaggcattgggatattctcagagaacaattggtataatcgcagagatgaaattatataagaagaagaatggttg

SEQ ID NO: 178934 - DNA, 120 bp, Artificial Sequence
  ENSG00000110693_110 (sequence is synthesized)
aaggaattagtaatactaaccccagagaaaagcaaatcaaggatgacatgatggtgtctttaaagattcaagtcacatggaggagggattgggtttatactgtctagcttcctggggata

SEQ ID NO: 178935 - DNA, 120 bp, Artificial Sequence
  ENSG00000110693_111 (sequence is synthesized)
gaatacagatcagtgacaagaagttatgaggaacctgattatggctgataagaccaactagctaacagctgtagctgtctatatggaatattctcccttggaagatagtaactgatctat

SEQ ID NO: 178936 - DNA, 120 bp, Artificial Sequence
  ENSG00000110693_112 (sequence is synthesized)
ccttagagatatgcagcaatctctattgtcattttaatagaggtgttgtagaggacagaagtttgatcttttttccaatgccaagactatgaatttttatgaacattcttataaaatatt

SEQ ID NO: 178937 - DNA, 120 bp, Artificial Sequence
  ENSG00000110693_113 (sequence is synthesized)
ctacagtttatggtatatctttttttttacagcacttttcaaggactacatagtattgtgattatttttctacatattcttcttctgtgaaatgcattttattaaaactcaaggattctt

SEQ ID NO: 178938 - DNA, 120 bp, Artificial Sequence
  ENSG00000110693_114 (sequence is synthesized)
aatttttctttctgtgaatccctttgatagtctagtgaagcctacagatctttttttaaaaattattttaaatgcataaggtaaaatacacagattacagagaaaatgaatcatattaaa

SEQ ID NO: 178939 - DNA, 120 bp, Artificial Sequence
  ENSG00000110693_115 (sequence is synthesized)
gtaaaatacacagattacagagaaaatgaatcatattaaaacagtaaataggccaggcacggtggctcactttgggaggctgaggcgggcagctcacgaggtcaggagatcaagaccatc

SEQ ID NO: 178940 - DNA, 120 bp, Artificial Sequence
  ENSG00000110693_116 (sequence is synthesized)
gtctcaaaacaaacaaacaaacaaacaaccagtaaataatttaaaacatttgtgatatggtagaatatgctattccactaatgcattaagaaaacaagatcttatagagggcctaacagt

SEQ ID NO: 178941 - DNA, 120 bp, Artificial Sequence
  ENSG00000110693_117 (sequence is synthesized)
cagtataataattttgaaatagtgataagcgtaaaagatattttgagatatctccaagtataatgtaatataaaatatcaattgtgatactattggtgacaatgtcataggaaccacaaa

SEQ ID NO: 178942 - DNA, 120 bp, Artificial Sequence
  ENSG00000110693_118 (sequence is synthesized)
tacagtatggtttgttacttgcatccataatttaaggaaatgtaaattttcaatacagtctagtgaaaaataatttttccacaaaagtttacagaccccttgaattctatctatgtctgc

SEQ ID NO: 178943 - DNA, 120 bp, Artificial Sequence
  ENSG00000110693_119 (sequence is synthesized)
tggagtctgtggaccaccagttaagaatccctatgctagatgatatggtacacccataatgaataaaacaatggtctctaacttttaataattcatattccagtaagagatataaggcat

SEQ ID NO: 178944 - DNA, 120 bp, Artificial Sequence
  ENSG00000110693_120 (sequence is synthesized)
ataaaaatgaactctaattcagtttctagtatataataaattccatagagctatatagataaaatattatgggaatttactagatagaaaaattacttctgccttggaagccattggaag

SEQ ID NO: 178945 - DNA, 120 bp, Artificial Sequence
  ENSG00000110693_121 (sequence is synthesized)
gttctgtagggaaatgggtcttagttggtcttggagaatgaaaggatttatatagacagaaattgagaggagaaacatttcaggcagaaagaataggcagaggactttaaaacggccaat

SEQ ID NO: 178946 - DNA, 120 bp, Artificial Sequence
  ENSG00000110693_122 (sequence is synthesized)
agttcaggttctaaattaaaaaaagaagatgcatatgggatataagactgaaaaagtaggttgtgttcagatcatggaggccctttgactcttgcctaaggagtttgaactttatattga

SEQ ID NO: 178947 - DNA, 120 bp, Artificial Sequence
  ENSG00000110693_123 (sequence is synthesized)
aggcaatggaggaaccactgactgttttttagcacaataagttggtggattagagctttctttcaggaaagttaatctggctgcactgtttaggatgaatgggagcagggagagacatta

SEQ ID NO: 178948 - DNA, 120 bp, Artificial Sequence
  ENSG00000110693_124 (sequence is synthesized)
aggaaattgtttcaagctagagataatgagggtctgctgaacgaaggcagcagaaatgaggaaggaagggggatgcatatggaaaagatattaagagatagaattgttaagagttaatgt

SEQ ID NO: 178949 - DNA, 120 bp, Artificial Sequence
  ENSG00000110693_125 (sequence is synthesized)
ttaagtgtagagaccaagacagaagaatggttcaaagagtgctcagaatttttaaactctgggcaaataggaacgtggtaatacaattaaaaaaaaaaaaaaaggaggaacatgttttgg

SEQ ID NO: 178950 - DNA, 120 bp, Artificial Sequence
  ENSG00000110693_126 (sequence is synthesized)
acatgggagcaatgagaatttttttattctgagtttggtatcttgagtttgaatcctaattttgattatctacttggagcatagtatagaatagcataatgggagaacagaaataattat

SEQ ID NO: 178951 - DNA, 120 bp, Artificial Sequence
  ENSG00000110693_127 (sequence is synthesized)
agaaagggtcattaaaaagtttaggatagatttctgcttctcaaataattatattctaggtctaaggaggtataacagctccaccaatatttgcctgacattgatcctttaaagttccag

SEQ ID NO: 178952 - DNA, 120 bp, Artificial Sequence
  ENSG00000110693_128 (sequence is synthesized)
gtccatctcctcatttgggatgtattatctcattggacacctaaaagtcttcaaatgcattacccacctctccctcacatctacttcatggtttgagggccatatttcatgattagctga

SEQ ID NO: 178953 - DNA, 120 bp, Artificial Sequence
  ENSG00000110693_129 (sequence is synthesized)
gagacaagcctgtgtgattgacatgataaatgattacctttcttgcattattcttgttctggagaatatttttactctttatcagactaaatacctctccctcatttgccctcatctaca

SEQ ID NO: 178954 - DNA, 120 bp, Artificial Sequence
  ENSG00000110693_130 (sequence is synthesized)
agaactgatctgtaaaaagttcattatggtccttttaaaaactatatttgcatgatgaaacaaaaactctccaggcagatgctttgatcaaccaaattgtccagtgtttaatctgctatt

SEQ ID NO: 178955 - DNA, 120 bp, Artificial Sequence
  ENSG00000110693_131 (sequence is synthesized)
ccttcaagaaatgccctctcctgagcagtgatttgaccagattgtaaaacattgttgaacaagggtgctacatctgaagtgccccctctgaaactgagacttatgggaagataggcaaag

SEQ ID NO: 178956 - DNA, 120 bp, Artificial Sequence
  ENSG00000110693_132 (sequence is synthesized)
tttctgtcttttgtaaatttaactttgatttagtattatagattggtaaattggtatgtaggtaggtagacagatccatagatggattgaatgattgaatgtcagaaaccaccttttaaa

SEQ ID NO: 178957 - DNA, 120 bp, Artificial Sequence
  ENSG00000110693_133 (sequence is synthesized)
acattggtagatagagtgtacaggaaagctttgattaatagattcaggttaagatgcttccaaggctaaaattcttcagctataataaaatgatgaattttagttatccttgtatcaccc

SEQ ID NO: 178958 - DNA, 120 bp, Artificial Sequence
  ENSG00000110693_134 (sequence is synthesized)
gtcttgttgccaatatagctgggctctaacataagcgacagaaaatgaatactttaaaaaggacttctatatctaaatacatatatttaatcagagagtcctttggcttctgaaaataag

SEQ ID NO: 178959 - DNA, 120 bp, Artificial Sequence
  ENSG00000110693_135 (sequence is synthesized)
ttgtctaatgagaatttcacttgagcagctgtgactgaggaggtcaacaggcactgcctaggagaatatggcccagctggttaaatctggttgttgtcgtgatttaaatggtcaagtgct

SEQ ID NO: 178960 - DNA, 120 bp, Artificial Sequence
  ENSG00000110693_136 (sequence is synthesized)
gcttgtaatccaggaccgtctgtttgtaaagggaagagtgagtgcttcagcataatgtacagctgttttaatctctctttaataatagtgcttcagccactatcatgtcttgtgtatcat

SEQ ID NO: 178961 - DNA, 120 bp, Artificial Sequence
  ENSG00000110693_137 (sequence is synthesized)
actactaagtatatgatcctaggccgagggccctggtttgagtcaggttctggagtcatgtgagattgcaggaaaagggatacaatgataaaactctcaactgtctgacaaaataaaact

SEQ ID NO: 178962 - DNA, 120 bp, Artificial Sequence
  ENSG00000110693_138 (sequence is synthesized)
aaattcctgactctatggctctttttaaaaacttattctttaggtaataattattgtgattaggagagagtgacaaagcttgtagttaggtagaaatattagaataaatgaactctcttt

SEQ ID NO: 178963 - DNA, 120 bp, Artificial Sequence
  ENSG00000110693_139 (sequence is synthesized)
gttagagccataaatgtaatggaaagtatgcaggctttgatacaattccataggacatacattggtcagaaattagagtatttgcccagtggaattgtgtgctttctgctatcatggtaa

SEQ ID NO: 178964 - DNA, 120 bp, Artificial Sequence
  ENSG00000110693_140 (sequence is synthesized)
taaaagtatgtggattcattttactgtgcatgtaagaagggacagcagcatttgagctttgaattcctggtgggacaggctttccaatggattatgcagctgtttcccagcacaagaatg

SEQ ID NO: 178965 - DNA, 120 bp, Artificial Sequence
  ENSG00000110693_141 (sequence is synthesized)
agcatgtgtttatgtgtatatttgatggattattatcattgttcacatctctaaacaatcatttgtatttctacatatattttcactgaaatatatttactttgcttataagttgtgttt

SEQ ID NO: 178966 - DNA, 120 bp, Artificial Sequence
  ENSG00000110693_142 (sequence is synthesized)
tgctcctctgatagactttgctctactaaaagagatatatggtatagtttaaacaatgaggaaattcatttttaaaagtcatgtctttgagctagatctgagtttgaatctaagttttaa

SEQ ID NO: 178967 - DNA, 120 bp, Artificial Sequence
  ENSG00000110693_143 (sequence is synthesized)
tatttagagagacagtatagcctactgagtgtagactctggagctaggttgcctgtgtttgaatttcacttcagcatttcctagatggatgacatagagcatgttacttgatctctctgc

SEQ ID NO: 178968 - DNA, 120 bp, Artificial Sequence
  ENSG00000110693_144 (sequence is synthesized)
ttcagtttctcaaccaaaaaatgagtatctttacagtgttataaggatcaaggttttcatgaagatgaataattagttaaggcaactaaagcatttagaacattgccagctcaaagtagg

SEQ ID NO: 178969 - DNA, 120 bp, Artificial Sequence
  ENSG00000110693_145 (sequence is synthesized)
tgctcaataaatgtagccagcattatttcctggttgtgtgactttggacaaattaatctctttgtgcttcagttccctcatctgtaaatctgtatgaatgatacctgccttgcagggtta

SEQ ID NO: 178970 - DNA, 120 bp, Artificial Sequence
  ENSG00000110693_146 (sequence is synthesized)
cttgcagggttattgtgaggatttgacatattaatatatacaatatttagcttctgtaattataactattactagtattgctattataactactattgctgttattatttgaagaaactt

SEQ ID NO: 178971 - DNA, 120 bp, Artificial Sequence
  ENSG00000110693_147 (sequence is synthesized)
atacgtagacaatatccaacctggacaaaacgggcttcccttgcgagccgacctaaaccgcatcccccaaagaatagagactaaatgcaaagtgagaagaaacagttgaaggactaggaa

SEQ ID NO: 178972 - DNA, 120 bp, Artificial Sequence
  ENSG00000110693_148 (sequence is synthesized)
gaggatcctctagggatgagctggtcactttcatgaattcaaaggcaatttaccagtgatttctgggtgctggggctgatattttttgtgcatatttctcacacagtttgatataaactt

SEQ ID NO: 178973 - DNA, 120 bp, Artificial Sequence
  ENSG00000110693_149 (sequence is synthesized)
aaaaaaaaaaaaagtgggatttcaagggtcagagaagtgcataattgtcactagctaggaaaaagttattcagaggttactatggtgatggcagattttgatccattaggagtgttaaac

SEQ ID NO: 178974 - DNA, 120 bp, Artificial Sequence
  ENSG00000110693_150 (sequence is synthesized)
agatagctccgtttttctaaaactttgtgcattttatttggttcttaagataacaaattaggattttaaactgaccataatcctactctggaaaaaggtaacaagagaattttcctaact

SEQ ID NO: 178975 - DNA, 120 bp, Artificial Sequence
  ENSG00000110693_151 (sequence is synthesized)
gcaactttatttttcattttttctcccctatttccttttggtggatagtatttctttataaaaatgtcaactgtttaaaaagcaaaattaaaaatatttctcttcatttttataaatata

SEQ ID NO: 178976 - DNA, 120 bp, Artificial Sequence
  ENSG00000110693_152 (sequence is synthesized)
gaatacttacgacatggccgctcacactgattgccaagattgacagcactaaccatcgccttcacttgttccagggtgaagcccctagtcaccccgctccgcgcgcacctcctggaaccc

SEQ ID NO: 178977 - DNA, 120 bp, Artificial Sequence
  ENSG00000110693_153 (sequence is synthesized)
cggcggcaaacttctgccgctctgcgctgcccccacccggggcgggacacccccgcagacttgagttaacgggctacgccggccgcggcgctggggggttctgttcccttgctccccgga

SEQ ID NO: 178978 - DNA, 120 bp, Artificial Sequence
  ENSG00000110693_154 (sequence is synthesized)
ccctttttctttaatgccatttactcctgcggcgcagcgcacaaggagccctcccgcgcggtaccatcctggagcccgcccaggtaaccgggacggagcgagcgatctcgagagcgaggg

SEQ ID NO: 178979 - DNA, 120 bp, Artificial Sequence
  ENSG00000110693_155 (sequence is synthesized)
gcccgctgtgagctacctgttggggcgccggagggggcagggggcaggagcccagggccgggccgccgtcccccggcgtcttccgctcctgcccttccgggcactccagggtcactttca

SEQ ID NO: 178980 - DNA, 120 bp, Artificial Sequence
  ENSG00000110693_156 (sequence is synthesized)
gcactccagggtcactttcatgaattcaaaggcaatttaccagtgatttctgggtgctggggctgatattttttgtgcatatttctcacacagtttgatataaacttaagtgaatgaatt

SEQ ID NO: 178981 - DNA, 120 bp, Artificial Sequence
  ENSG00000110696_0 (sequence is synthesized)
agagaaggcccggaggggctctgcgttctgtagtggcgctgcttgggcccttggcggattgtaagctgctggttttgcggctgggaagagcggcgagagggttcggcatttttcgtcggg

SEQ ID NO: 178982 - DNA, 120 bp, Artificial Sequence
  ENSG00000110696_1 (sequence is synthesized)
atccccgcaaggatgagtgctgccagagagtctcacccgcatggggtgaagcgttcagcctccccagacgacgatctgggatctagcaattgggaggcagcagacttgggtaatgaagag

SEQ ID NO: 178983 - DNA, 120 bp, Artificial Sequence
  ENSG00000110696_2 (sequence is synthesized)
agaaaacaaaagttcttgagacttatgggtgcaggaaagaaagaacatactggtcgtcttgttataggagatcacaaatcaacatctcacttccgaaccggggaagaagacaagaaaatt

SEQ ID NO: 178984 - DNA, 120 bp, Artificial Sequence
  ENSG00000110696_3 (sequence is synthesized)
aatgaagaactggagtctcaatatcagcaaagtatggacagtaaattatcaggaagatatcggcgacattgtggacttggcttcagtgaggtagaagaccatgatggagaaggtgatgtg

SEQ ID NO: 178985 - DNA, 120 bp, Artificial Sequence
  ENSG00000110696_4 (sequence is synthesized)
gctggagatgatgatgatgacgatgatgattcacctgatcctgaaagtccagatgattctgaaagcgattcagagtcagagaaagaagaatctgctgaagaactccaagctgctgagcac

SEQ ID NO: 178986 - DNA, 120 bp, Artificial Sequence
  ENSG00000110696_5 (sequence is synthesized)
cctgatgaagtggaggatcccaaaaacaaaaaagatgcaaaaagcaattataaaatgatgtttgttaaatccagtggttcataactcccaaacgcttagtctttgtattaaaagtaagcc

SEQ ID NO: 178987 - DNA, 120 bp, Artificial Sequence
  ENSG00000110696_6 (sequence is synthesized)
ttattgttacaatgcacagtggaggactgcttatagagcacagacctttgtattataatttttaaaaaggcccttttaaataattacaaagagtgtttgctttcaaatgccatgggttac

SEQ ID NO: 178988 - DNA, 120 bp, Artificial Sequence
  ENSG00000110696_7 (sequence is synthesized)
acttttatgggcatgactataaccatttttgtaaagagtaagagttgtataaaataagaaataaatacagtactcaacttcctttcatattagcatcatcaaccctctaattcaccttat

SEQ ID NO: 178989 - DNA, 120 bp, Artificial Sequence
  ENSG00000110696_8 (sequence is synthesized)
gggggaaatgcttctttttgtttgtgatagctattttatcatttccttcatatttttctcttataaaaatgtatttgatactgtgatatgttcacgaaaagtattctttaattattcttt

SEQ ID NO: 178990 - DNA, 120 bp, Artificial Sequence
  ENSG00000110696_9 (sequence is synthesized)
gttatagtagagctgttcattatggatatttctgctgccagtcacaatctaaattaattttggcaaaagattgggtacttagtttcctgttactgagttagctctactcttttggaccaa

SEQ ID NO: 178991 - DNA, 120 bp, Artificial Sequence
  ENSG00000110696_10 (sequence is synthesized)
agcaacatgagagcaagtacttttcacacttgttaagatggagttataactgtcatacatttggaatattatgatcccaagtagtctttttataatttggattgtatcgtatgttagatt

SEQ ID NO: 178992 - DNA, 120 bp, Artificial Sequence
  ENSG00000110696_11 (sequence is synthesized)
tttgataaaatttggccaatttttacagaagaaattctctgatcatttagttctgtctatttagaaatatgtaaaactggatttttttttaagtaatatgtgaccaaagttaattttgtc

SEQ ID NO: 178993 - DNA, 120 bp, Artificial Sequence
  ENSG00000110696_12 (sequence is synthesized)
ccaaaggtctaaataaagagcagtttcccatatttggctgtgatacctttatcctcattatctacaaatgaggaacaggcttactgataagaagctgaaacaagaaattctcttcatttt

SEQ ID NO: 178994 - DNA, 120 bp, Artificial Sequence
  ENSG00000110696_13 (sequence is synthesized)
atcccagtgctattttattgattaattactaaaaagtattactttctaattttattgctgtttctgttggtgtgagattagaatcatctgactgctattaggtggttgatttgtatagct

SEQ ID NO: 178995 - DNA, 120 bp, Artificial Sequence
  ENSG00000110696_14 (sequence is synthesized)
gattaacacaaattgcattatgagctagtaaatggatctttggataatggggtccaaattcttaatgtttataagtaacaagttcaaaggctttagtcacacctgtttgtgagctgagct

SEQ ID NO: 178996 - DNA, 75 bp, Artificial Sequence
  ENSG00000110696_15 (sequence is synthesized)
agttcaaaggctttagtcacacctgtttgtgagctgagctattatacatctacatacttaaaggatgtatttgga

SEQ ID NO: 178997 - DNA, 89 bp, Artificial Sequence
  ENSG00000110696_16 (sequence is synthesized)
gagtgttggaatttttaaaaattattcttatgtcactttgaaatgtagaacgtgttgccatgtgcggtggctcacacctataatcccag

SEQ ID NO: 178998 - DNA, 120 bp, Artificial Sequence
  ENSG00000110696_17 (sequence is synthesized)
tctcaaaaaaaaaaaaaaaaaaaatttagaatgtgttagagaaatttaacaagtagaacaggtgatttctggttgatagactctatcttgcagtatatttatttcatgtatcagacccca

SEQ ID NO: 178999 - DNA, 120 bp, Artificial Sequence
  ENSG00000110696_18 (sequence is synthesized)
cccaaagttgttgccttgttatttttttaatttctcacatttttgaaaaatagatgctatcctctatagtaaaatattgaatcactttatagtagacaatacatatgacatttaacaaat

SEQ ID NO: 179000 - DNA, 120 bp, Artificial Sequence
  ENSG00000110696_19 (sequence is synthesized)
acttggtttgaaaaagtttggctttattcaacaattttagtttgcccactgattttcaaatgtctgtgggattgcttataactaagtagaaagtgaagactgatttttacttaagaatgg

SEQ ID NO: 179001 - DNA, 120 bp, Artificial Sequence
  ENSG00000110696_20 (sequence is synthesized)
gatagagatgagttttatggtttttaaaagtattttcagttcattatttaaatgttgggttgttgatatggtcttgtttctgataaggaaataggagcaacttgttttaaaataactaca

SEQ ID NO: 179002 - DNA, 120 bp, Artificial Sequence
  ENSG00000110696_21 (sequence is synthesized)
ctaaaagactttcttcatctccgtatagagaaatccagatttcaattaattcatttattgggtgctaacaaaattcagggttagagtaaatttaggtctgttggtccatgtggcctggtt

SEQ ID NO: 179003 - DNA, 120 bp, Artificial Sequence
  ENSG00000110696_22 (sequence is synthesized)
tcctagcacccattaaacataatgctatcttttaagcctgaacatgtgggttttttaaatcaaattggaaaaaaattagacaactgatgtcatgctgtcttggtatccatactaaaaaag

SEQ ID NO: 179004 - DNA, 120 bp, Artificial Sequence
  ENSG00000110696_23 (sequence is synthesized)
tatcaggaaaatagattatttttgtgctgtgaaacactattcagtggaaagtttagtggcaacttttccatatcattcatgacttaatacctgaaatgcacttttaaatgtttgccttat

SEQ ID NO: 179005 - DNA, 120 bp, Artificial Sequence
  ENSG00000110696_24 (sequence is synthesized)
atccaagtgtttacttgtatccatgacctaaccgtctattgaaaagaatgtttgcagatgcagattgcaatgttgtttgtattcataggcaaaagtcctcttctctagtataatttttta

SEQ ID NO: 179006 - DNA, 120 bp, Artificial Sequence
  ENSG00000110696_25 (sequence is synthesized)
aatctgagagaattgaaggtacagaaaaaaattctggagtgcctgaaccacagtttgagagcacaaaggtcacattctttcagtaaatttgggggaaataaatttcagctacctggttag

SEQ ID NO: 179007 - DNA, 120 bp, Artificial Sequence
  ENSG00000110696_26 (sequence is synthesized)
cttcagtgactacttacacacagggctttggttccattacttgtttccaccacagccacatcctaaatacttggaatatccgaaaacaacttctaaaatcactcaataaaagtattcact

SEQ ID NO: 179008 - DNA, 120 bp, Artificial Sequence
  ENSG00000110696_27 (sequence is synthesized)
tctaaccaactcctcctcctttatacctgctctgtgttagggcgtagtctgtttccacctctgtaagtcctatctaggcttcctgatctatcaattcagtatcatgattgttaacccaaa

SEQ ID NO: 179009 - DNA, 120 bp, Artificial Sequence
  ENSG00000110696_28 (sequence is synthesized)
cgacttcctggaaaattcccagccctagatgtatccaagccctcctaccctcaccagttatttctggagaaagatcaccaaatgtataaatccgtattagtaaaaattggttttaactga

SEQ ID NO: 179010 - DNA, 120 bp, Artificial Sequence
  ENSG00000110696_29 (sequence is synthesized)
tttgctatgttgcccaggctggtctcaaaactcctgggttcaagcgatctttccgccttccaaagtgctggaactacaggtgtgagccaccatgtccggccagggcacatttttaatagg

SEQ ID NO: 179011 - DNA, 64 bp, Artificial Sequence
  ENSG00000110696_30 (sequence is synthesized)
tgacctcgtgatccacccagattaaattctttgtgaggccaagattgtagctttgatcttcata

SEQ ID NO: 179012 - DNA, 120 bp, Artificial Sequence
  ENSG00000110696_31 (sequence is synthesized)
aattctttgtgaggccaagattgtagctttgatcttcatatggggtgtttagaggtattccattttgtggccacaaagtatatttgtaatcctagccggctatcatgaatattttattgg

SEQ ID NO: 179013 - DNA, 120 bp, Artificial Sequence
  ENSG00000110696_32 (sequence is synthesized)
tcacaggaagaaccagctaagaacatatgaatagatcagtgcaatactgtcatcatcctggaataacttgatgctgttatattaaaatcttgttaatggctgtcagttttgcaacctaaa

SEQ ID NO: 179014 - DNA, 120 bp, Artificial Sequence
  ENSG00000110696_33 (sequence is synthesized)
ctagtaacacactgaattattgatttgcttatgtgttaatggcacataaagcaatgagcattaacacttgaagtttttcggtagtatcatttttgtgtatggagactgtatctgccattt

SEQ ID NO: 179015 - DNA, 120 bp, Artificial Sequence
  ENSG00000110696_34 (sequence is synthesized)
tttcacaataggaaggtttgttactgtatcttcacagatgattggttaagattgctttccaaagtcacatttattctcaccttcacatggtgttttaatgagcacttatgaaactaaata

SEQ ID NO: 179016 - DNA, 120 bp, Artificial Sequence
  ENSG00000110696_35 (sequence is synthesized)
tgaaccataaagagtggattggactgattaaattgagagtaattatgcagtttaatcagttggtaatattgaatcatatgtatttttatgtttagagtacaggattgttttaaattgttc

SEQ ID NO: 179017 - DNA, 120 bp, Artificial Sequence
  ENSG00000110696_36 (sequence is synthesized)
tttttgacaagttgagattagtagtttattgtcaaatagtaaagagatagctaatgattgtgatatactgtaataagatctatcactttatatgatacattataagtttcaattatttca

SEQ ID NO: 179018 - DNA, 120 bp, Artificial Sequence
  ENSG00000110696_37 (sequence is synthesized)
tttttgtcaggctaaatctcatttgctttctctccatgagatatacttgaggcagcagaaagagcaggtgggaagttaaagcaactcatttaactggcctttaggaaagaaaatgtttag

SEQ ID NO: 179019 - DNA, 120 bp, Artificial Sequence
  ENSG00000110696_38 (sequence is synthesized)
attgactcaattttctagttatctattcatcttatttaaaattccaacctgctctactccttactcaggtctgttttgttttaatcacacttagtactttctaacatagtataaatagtg

SEQ ID NO: 179020 - DNA, 120 bp, Artificial Sequence
  ENSG00000110696_39 (sequence is synthesized)
attacgtttgcctgtctcccttccccattcctacccttgctagaatgtaaggtccttaaaggcagagattctaatttaatcttttgtcttcactgtgtcccagaagcctagaatagtttt

SEQ ID NO: 179021 - DNA, 120 bp, Artificial Sequence
  ENSG00000110696_40 (sequence is synthesized)
ttctactttggcatgtaattgtgtaaattattaaaatattataattagagctgggtgcagtggcttaatgcctgtaatcccggttatttgggaggttaaagtgggaggatcacttaagcc

SEQ ID NO: 179022 - DNA, 120 bp, Artificial Sequence
  ENSG00000110696_41 (sequence is synthesized)
gattgcaccactgcattccagcctgggctacagagcaagacctcatctcttaaatttaaaaaaaaaaaggagagaaaaaaatgctgggcaccttggcttatgcttgtaatcccagcattt

SEQ ID NO: 179023 - DNA, 71 bp, Artificial Sequence
  ENSG00000110696_42 (sequence is synthesized)
ttggcttatgcaaatcaccagcctggtcaacatggcaaaaccgtgtctctactaaaaaaaaaaaaaaaaaa

SEQ ID NO: 179024 - DNA, 120 bp, Artificial Sequence
  ENSG00000110696_43 (sequence is synthesized)
atttttaaataaaaactgaaaatgaatttgggtatttggtgtgctgaaaagtgaaatttttgcctatttaaaactgaccctaatcttggacattagtaataaaaggcacatattaataaa

SEQ ID NO: 179025 - DNA, 120 bp, Artificial Sequence
  ENSG00000110696_44 (sequence is synthesized)
agacacattgacctagattatgtttaacaaaactttaagttatttaaattatgctaacacagcatatgtagcacattttagaaattcatagatcttttatttttctagtgttaaacaatt

SEQ ID NO: 179026 - DNA, 120 bp, Artificial Sequence
  ENSG00000110696_45 (sequence is synthesized)
acttcaaattgatttgtattgctacataaggcaaaaaacaattcctgaactttgcagaatggaaaaatatttcaactgccacatttactcttttaaaactgagagctttaaagcaggagc

SEQ ID NO: 179027 - DNA, 120 bp, Artificial Sequence
  ENSG00000110696_46 (sequence is synthesized)
tcccaatccccggtacccatccctggcctgttagaaactggaccacatagcaggaggtgagtggcacgcaagccagagaagctttatcagtatttacagctgctcccaatggcttgtatg

SEQ ID NO: 179028 - DNA, 83 bp, Artificial Sequence
  ENSG00000110696_47 (sequence is synthesized)
gctttatcagtatttacagctgctcccaatggcttgtatggccacctgagctccgcatcctatcagatcattggcagcattaa

SEQ ID NO: 179029 - DNA, 120 bp, Artificial Sequence
  ENSG00000110696_48 (sequence is synthesized)
tgcctgatgatctgaattggagctgaggtggtaatggggagtggctgcaaaaacagattaacattagcagagaggcttgactgcacagagaccgtaatcaatcaactgcttgcagactca

SEQ ID NO: 179030 - DNA, 120 bp, Artificial Sequence
  ENSG00000110696_49 (sequence is synthesized)
tatcaaaaccctctcagtgagtggcaagtaacaagctgcatctagtggcaggttttaagtcagaatctgacatttaatctgcatgtggcctgcccattacttatttaccacttccatcca

SEQ ID NO: 179031 - DNA, 120 bp, Artificial Sequence
  ENSG00000110696_50 (sequence is synthesized)
tgtctctttcctgcactgtgcatttgtctcagtcacagttttggtaagcccacaagctaaccctagccaaaatgagtaaaaaaacaaacgtccttggagagcttctttgaaaagggggaa

SEQ ID NO: 179032 - DNA, 120 bp, Artificial Sequence
  ENSG00000110696_51 (sequence is synthesized)
agacccaatgatgagacagcagaagactctaatactgccaacaaagagaaagtggcatttaaaagaaaatatcaagagtcctacttaaattgtaggttcattgcaataggtgattcacat

SEQ ID NO: 179033 - DNA, 120 bp, Artificial Sequence
  ENSG00000110696_52 (sequence is synthesized)
tctccaaacctgctttgtctaatatgtgatgaccagctatccagaaaagccatgaaacctttaaaagtgcttcaccacatggagaccaaacaccctgcattaaaagacaagcctttggag

SEQ ID NO: 179034 - DNA, 120 bp, Artificial Sequence
  ENSG00000110696_53 (sequence is synthesized)
tttttcaaaagaaaaaatcgtgaacgcaaagaacagaagtaattattgaaggccaccacttcatcaaatgtgtctgcagtgagagcatcattcttagtggctaatcacattgctaaagct

SEQ ID NO: 179035 - DNA, 120 bp, Artificial Sequence
  ENSG00000110696_54 (sequence is synthesized)
aagaaggcctttactactggtgaagagttgatcctgcctgctgctaaggacatctgttgtgaactcttaggagagcctgcagttcaaaaggtggcacatgttcctcttctggctagcacc

SEQ ID NO: 179036 - DNA, 120 bp, Artificial Sequence
  ENSG00000110696_55 (sequence is synthesized)
atagctagatgaattaatagaggatatgaggcacagttgttagaattaatgagtcactgtggtacccaatccaggttaatgagtctaccagtgttgacagcaaggcaacaatgcttgttt

SEQ ID NO: 179037 - DNA, 120 bp, Artificial Sequence
  ENSG00000110696_56 (sequence is synthesized)
ttgtgtgatacatttttcaggaggatgtgcatgaggatatattatgtgcacttttgctttcaaccaacaccacagctgcagaactattcaagtctttaaatacatatcaggaaaactgaa

SEQ ID NO: 179038 - DNA, 120 bp, Artificial Sequence
  ENSG00000110696_57 (sequence is synthesized)
ttggtcattttgtatcgatatatgcagggatggagcagctgccatgactggacggctttctgttttcactactcaggtcaaagagcttgcttctgaatgtgagtctgtgtactgtgtcat

SEQ ID NO: 179039 - DNA, 120 bp, Artificial Sequence
  ENSG00000110696_58 (sequence is synthesized)
ctgtagagatgctggctagttggaaaatgccacctgaacttaccattttgtaggatgtgcttaaaattttcaaccacattaaagtacatgcccttaattcacatctgttcatgtagctct

SEQ ID NO: 179040 - DNA, 120 bp, Artificial Sequence
  ENSG00000110696_59 (sequence is synthesized)
gtgagaagatagacacagagcacacgtcttctcttatacacagaagagagacggcttcctaaaggtagatcactggccactgtttttcagttacaatagctgctccagagatttcatttt

SEQ ID NO: 179041 - DNA, 120 bp, Artificial Sequence
  ENSG00000110696_60 (sequence is synthesized)
gaattgggtcacaaaattgcttacttggccaggcatggtgggtcacgcctgtaattacagcacttttgggaggccaaggcaggcagatcactcaaggccaggagtttgagaccagtctgg

SEQ ID NO: 179042 - DNA, 120 bp, Artificial Sequence
  ENSG00000110696_61 (sequence is synthesized)
ctccagcctgggcaagagagcgagactccctcgaaaaaaaaaaaaaaacttgcttacttgtgtgacatattcaatctgtcacctcaggggagaacaaaactgtgttcaagttggcagata

SEQ ID NO: 179043 - DNA, 120 bp, Artificial Sequence
  ENSG00000110696_62 (sequence is synthesized)
ttcaagttggcagatagagtggctgcattcaaagccagactagtattatgggggccacaagtgaacattgggattttttgacatgtttcaaacattagcagagattttaaaagagactga

SEQ ID NO: 179044 - DNA, 120 bp, Artificial Sequence
  ENSG00000110696_63 (sequence is synthesized)
gccaggaccttttttctcccagctggcacatgatcacctatctcagccttcaaagagtttgagtattattttccagccacgaaagagccccgaactgggaaggaatggattcacaaccca

SEQ ID NO: 179045 - DNA, 120 bp, Artificial Sequence
  ENSG00000110696_64 (sequence is synthesized)
tttgtgaataagccaggtgaatcgactttgttcatgctagaagaggatcagctgcttaagatcacaaatgatgttgcccttaaaagtatgtttgagacaacttcacatctccatacattc

SEQ ID NO: 179046 - DNA, 120 bp, Artificial Sequence
  ENSG00000110696_65 (sequence is synthesized)
tggattaaagacaaagtggaacatcctgagattgccacgaaagcactggaaagcctgcttccatttccaacctcctgtctttgtgaaacagggttttctgtagtgacagcagccaaacaa

SEQ ID NO: 179047 - DNA, 89 bp, Artificial Sequence
  ENSG00000110696_66 (sequence is synthesized)
cgtctagttgcagggaaaacaagctcagggctcccactgcttctacattatggtgagttgtacaattatttcattatatattacgatgt

SEQ ID NO: 179048 - DNA, 120 bp, Artificial Sequence
  ENSG00000110696_67 (sequence is synthesized)
atggtgagttgtacaattatttcattatatattacgatgtgataataataaagtacacaataaatgtaatacacttgaatcatctcaaaaccaccaccacccccctccatggaaaaattg

SEQ ID NO: 179049 - DNA, 120 bp, Artificial Sequence
  ENSG00000110696_68 (sequence is synthesized)
ttttccacaaaaccggtgcctggtgccaaaaaggttggaaactgctgctttaaacttttaagttgctctgataaacttgataagcaaagaaaggcataaagaagagtcagtacatgacca

SEQ ID NO: 179050 - DNA, 120 bp, Artificial Sequence
  ENSG00000110696_69 (sequence is synthesized)
ttttatttagccatttgctgaacagaagtgcctagcttttttcactgtttttgttcaaagatagataattctgtttgttagagagtttttattaggtgactagaaaaaaatctttcagga

SEQ ID NO: 179051 - DNA, 120 bp, Artificial Sequence
  ENSG00000110696_70 (sequence is synthesized)
taacatctacttattataagtaagctaaaacatttaatacccaaagtgcttagtaataaatatttatgctatctcaacatcaggcattttattttctattaggtaaccacctatggcata

SEQ ID NO: 179052 - DNA, 120 bp, Artificial Sequence
  ENSG00000110696_71 (sequence is synthesized)
aattctcaaaagtcatagtaaaattagtcacaattagataaatcagccctgagtataatagcatctgtattatgggtttttgtgtaaattattaatttgactgaaacataactaaagtat

SEQ ID NO: 179053 - DNA, 120 bp, Artificial Sequence
  ENSG00000110696_72 (sequence is synthesized)
agcatcagcaatcatttaagaatttgttgaaattcaaatcctagagctccaccccagacccgctgaatctctggggctgtagccctgcagtctgttttaacaagccctctaggtgacgct

SEQ ID NO: 179054 - DNA, 120 bp, Artificial Sequence
  ENSG00000110696_73 (sequence is synthesized)
gatagaggcaaacttttgagactcagctctggctgtaggagaactaaaggattctgctgtgaggtaatagaaaaggagtaaatttgaatgtgatgaatatgcttaacttcctaagcaaga

SEQ ID NO: 179055 - DNA, 120 bp, Artificial Sequence
  ENSG00000110696_74 (sequence is synthesized)
aaagcgcctacgggaaaaacagctgggatgcagacgggctatggaaatctcagttctaggaaccgtgtcctttcgtcccggagatctgtgtgttggctgtgactctgttgggctctactg

SEQ ID NO: 179056 - DNA, 120 bp, Artificial Sequence
  ENSG00000110696_75 (sequence is synthesized)
gacttggctgggctcagcttcagacttgaggtcatgttcagatgttctccaagtaccttttcattctgggttccaggctgaattaacagcctcacctgggacaaggtgtttttatgacag

SEQ ID NO: 179057 - DNA, 120 bp, Artificial Sequence
  ENSG00000110696_76 (sequence is synthesized)
agagaaaaagcacaagagttcaagacaaatcacacaaacatatttaaagcctctgctcagatgtggcattggatacatccccataaactctactggcaaaacaaagacacacagacttgt

SEQ ID NO: 179058 - DNA, 80 bp, Artificial Sequence
  ENSG00000110697_0 (sequence is synthesized)
aggggcgccggcgggcggatcgagaggaaggtcggggccatgggccggcactgcgcctcgggagggtccggccaccgctg

SEQ ID NO: 179059 - DNA, 120 bp, Artificial Sequence
  ENSG00000110697_1 (sequence is synthesized)
cacgggccggccggccctgcccgggctgggtgaggggcgcccgcctcaagctagaggaggagcggaggccgcgcgcggcccgccgagcgccttcaggatgctcatcaaggaataccacat

SEQ ID NO: 179060 - DNA, 120 bp, Artificial Sequence
  ENSG00000110697_2 (sequence is synthesized)
tctgctgcccatgagcctggacgagtaccaggtggcccagctctacatgatccagaaaaagagccgggaggagtctagtggtgagggcagcggcgtggagatcctggccaaccggcccta

SEQ ID NO: 179061 - DNA, 120 bp, Artificial Sequence
  ENSG00000110697_3 (sequence is synthesized)
cacggatgggcccgggggcagcgggcaatacacacacaaggtgtaccacgtgggctcccacatcccaggctggttccgggcactgctgcccaaggctgccctgcaggtagaagaggaatc

SEQ ID NO: 179062 - DNA, 120 bp, Artificial Sequence
  ENSG00000110697_4 (sequence is synthesized)
ctggaatgcctacccctacacccgaacccggtacacctgccctttcgtggagaaattctccattgaaattgagacctattacctgcctgatggggggcagcagccaaacgtcttcaacct

SEQ ID NO: 179063 - DNA, 120 bp, Artificial Sequence
  ENSG00000110697_5 (sequence is synthesized)
gagcggggccgagaggagacagcgcatcctggacaccatcgacatcgtgcgggatgcagtggccccaggcgagtacaaagcagaagaggacccccggctttatcactcggtcaagacggg

SEQ ID NO: 179064 - DNA, 120 bp, Artificial Sequence
  ENSG00000110697_6 (sequence is synthesized)
ccgagggccactgtctgatgactgggcacggacggcggcacagacggggccccttatgtgtgcctataagctgtgcaaggttgagttccgctactggggcatgcaagccaagatcgagca

SEQ ID NO: 179065 - DNA, 120 bp, Artificial Sequence
  ENSG00000110697_7 (sequence is synthesized)
gttcatccatgatgtaggtctgcgtcgggtgatgctgcgggcccaccgccaggcctggtgctggcaggatgagtggacagagctgagcatggctgacatccgggcactggaagaggagac

SEQ ID NO: 179066 - DNA, 120 bp, Artificial Sequence
  ENSG00000110697_8 (sequence is synthesized)
tgctcgcatgctggcccagcgcatggccaagtgcaacacaggcagtgaggggtccgaggcccagccccccgggaaaccgagcaccgaggcccggtctgcggccagcaacactggcacccc

SEQ ID NO: 179067 - DNA, 120 bp, Artificial Sequence
  ENSG00000110697_9 (sequence is synthesized)
cgatgggcctgaggcccccccaggcccagatgcctcccccgatgccagctttgggaagcagtggtcctcatcctcccgttcctcctactcatcccaacatggaggggctgtgtctcccca

SEQ ID NO: 179068 - DNA, 120 bp, Artificial Sequence
  ENSG00000110697_10 (sequence is synthesized)
gagcttgtctgagtggcgcatgcagaacattgcccgagactctgagaacagctccgaggaagagttctttgatgcccacgaaggcttctcggacagtgaggaggtcttccccaaggagat

SEQ ID NO: 179069 - DNA, 120 bp, Artificial Sequence
  ENSG00000110697_11 (sequence is synthesized)
gaccaagtggaactccaatgacttcattgatgcctttgcctccccagtggaggcagagggaacgccagagcctggagccgaggcagctaaaggcattgaggatggggcccaagcacccag

SEQ ID NO: 179070 - DNA, 120 bp, Artificial Sequence
  ENSG00000110697_12 (sequence is synthesized)
ggactcagagggcctggatggagccggggagctgggggctgaggcatgcgcagtccacgccctcttccttatcctgcacagcggcaacatcctggactcaggccctggagacgccaactc

SEQ ID NO: 179071 - DNA, 120 bp, Artificial Sequence
  ENSG00000110697_13 (sequence is synthesized)
caagcaggcggatgtgcagacgctgagctccgccttcgaggccgtcacccgcatccacttccctgaggccttgggccacgtggcgctgcgactggtgccctgtccacccatctgcgccgc

SEQ ID NO: 179072 - DNA, 120 bp, Artificial Sequence
  ENSG00000110697_14 (sequence is synthesized)
cgcctatgcccttgtctccaacctgagcccttacagccacgatggggacagcctgtctcgctcccaagaccacattccactggctgccctgccactgctggccacctcatcctcccgcta

SEQ ID NO: 179073 - DNA, 120 bp, Artificial Sequence
  ENSG00000110697_15 (sequence is synthesized)
ccagggcgccgtggccaccgtcattgcccgcaccaaccaggcctactcagccttcctgcgctcacctgagggtgccggcttctgtgggcaggtcgcactgattggagatggtgttggtgg

SEQ ID NO: 179074 - DNA, 120 bp, Artificial Sequence
  ENSG00000110697_16 (sequence is synthesized)
catcctgggctttgatgcactctgccacagtgctaacgcgggcaccgggagtcggggcagcagccgccgtgggagcatgaacaatgagctgctctctccggagtttggcccagtgcggga

SEQ ID NO: 179075 - DNA, 120 bp, Artificial Sequence
  ENSG00000110697_17 (sequence is synthesized)
tggaaggcctgggtcggggcagcccagaaccctcggccttgcctccccagcgcatccccagcgacatggccagtcctgagcccgagggctctcagaacagccttcaggcagcccccgcaa

SEQ ID NO: 179076 - DNA, 120 bp, Artificial Sequence
  ENSG00000110697_18 (sequence is synthesized)
ccacctcctcctgggagccccggcgggcaagcacggccttctgcccacccgctgccagttccgaggcacctgacggccccagcagcactgcccgccttgacttcaaggtctctggcttct

SEQ ID NO: 179077 - DNA, 120 bp, Artificial Sequence
  ENSG00000110697_19 (sequence is synthesized)
tcctcttcggctccccactgggcctggtgctggctctgcgcaaaactgtgatgcccgccctggaggcagcccagatgcgcccagcctgtgaacagatctacaacctcttccacgcggctg

SEQ ID NO: 179078 - DNA, 120 bp, Artificial Sequence
  ENSG00000110697_20 (sequence is synthesized)
acccctgcgcctcacgcctcgagcccctgctggccccgaagttccaggccatcgccccactgaccgtgccccgctaccagaagttccccctgggagatggctcatccctgctgctggccg

SEQ ID NO: 179079 - DNA, 120 bp, Artificial Sequence
  ENSG00000110697_21 (sequence is synthesized)
acactctgcagacgcactccagcctctttctggaggagctggagatgctggtgccctcaacacccacctctactagcggtgccttctggaagggcagtgagttggccactgaccccccgg

SEQ ID NO: 179080 - DNA, 120 bp, Artificial Sequence
  ENSG00000110697_22 (sequence is synthesized)
cccagccagccgcccccagcaccaccagtgaggtggttaagatcctggagcgctggtgggggaccaagcggatcgactactcgctgtactgccccgaggcgctcaccgcctttcccaccg

SEQ ID NO: 179081 - DNA, 120 bp, Artificial Sequence
  ENSG00000110697_23 (sequence is synthesized)
tcacgctgccccacctcttccacgccagctactgggagtccgccgacgtggtggcgttcatcctgcgccaggtgatcgagaaggagcggccacagctggcggaatgcgaggagccgtcca

SEQ ID NO: 179082 - DNA, 120 bp, Artificial Sequence
  ENSG00000110697_24 (sequence is synthesized)
tctacagcccggccttccccagggagaagtggcagcgaaaacgcacgcaggtcaagatccggaacgtcacttccaaccaccgggcgagcgacacggtggtgtgcgagggccgcccccagg

SEQ ID NO: 179083 - DNA, 120 bp, Artificial Sequence
  ENSG00000110697_25 (sequence is synthesized)
tgctaagcgggcgcttcatgtacgggcccctggacgtcgtcacgctcactggagagaaggtggatgtctacatcatgacgcagccgctgtcgggcaagtggatccactttggcaccgaag

SEQ ID NO: 179084 - DNA, 120 bp, Artificial Sequence
  ENSG00000110697_26 (sequence is synthesized)
tcaccaatagctcgggccgcctcaccttcccagttcccccagaacgcgcgctgggcattggtgtctaccccgtgcgcatggtggtcaggggcgaccacacctatgccgaatgctgcctga

SEQ ID NO: 179085 - DNA, 120 bp, Artificial Sequence
  ENSG00000110697_27 (sequence is synthesized)
ctgtggtggcccgcggcacggaggctgtggtcttcagcatcgacggctccttcaccgccagcgtctccatcatgggcagcgaccccaaggtgcgagctggcgccgtggacgtggtcaggc

SEQ ID NO: 179086 - DNA, 120 bp, Artificial Sequence
  ENSG00000110697_28 (sequence is synthesized)
actggcaggactccggctacctgatcgtgtatgtcacaggccggccggatatgcagaagcaccgcgtggtggcatggctgtcgcagcacaacttcccccacggcgtcgtctccttctgcg

SEQ ID NO: 179087 - DNA, 120 bp, Artificial Sequence
  ENSG00000110697_29 (sequence is synthesized)
acggcctcacccacgacccactacgccagaaggcaatgtttctgcagagcctggtgcaggaggtagaactgaacatcgtggccggttatgggtctcccaaagatgtggctgtatacgcgg

SEQ ID NO: 179088 - DNA, 120 bp, Artificial Sequence
  ENSG00000110697_30 (sequence is synthesized)
cgctggggctgtccccgagccagacctacatcgtgggccgtgccgtgcggaagctacaggcgcagtgccagttcctgtcagacggctatgtggcccacctgggccagctggaagcgggct

SEQ ID NO: 179089 - DNA, 120 bp, Artificial Sequence
  ENSG00000110697_31 (sequence is synthesized)
cgcactcgcatgcctcctcgggacccccgagagctgccttgggcaagagcagctatggtgtggctgcccccgtggacttcctgcgcaaacagagccagctgcttcgctcgaggggcccca

SEQ ID NO: 179090 - DNA, 120 bp, Artificial Sequence
  ENSG00000110697_32 (sequence is synthesized)
gccaggcggagcgtgagggcccgggaacaccacccaccaccctggcacggggcaaagcacggagcatcagcctgaagctggacagcgaggagtgaggcccacaccagcctggacctgggt

SEQ ID NO: 179091 - DNA, 120 bp, Artificial Sequence
  ENSG00000110697_33 (sequence is synthesized)
tatttattgacacacccaaggggcccgaggggctgcgtgtgggaggctggggacccagacttttggccccagcgctggcccccccagccccacaccctatatctccgtgtgctcctcggt

SEQ ID NO: 179092 - DNA, 120 bp, Artificial Sequence
  ENSG00000110697_34 (sequence is synthesized)
gttacttccctttcatatgaggggacccagcgccggggggagggaggagggcgtgggcatgggcgcagaggcttttccagtgtgtataaatccatgaaaataaacgccacctgcacccca

SEQ ID NO: 179093 - DNA, 120 bp, Artificial Sequence
  ENSG00000110697_35 (sequence is synthesized)
gcggtgctaggctcgcctctgcctccctcgtggcgggcccggacatggggtcccgtggcctgagtccctcggccggcgcgcagggctcggggccgcgcgcagcctccccgcactgactgt

SEQ ID NO: 179094 - DNA, 120 bp, Artificial Sequence
  ENSG00000110697_36 (sequence is synthesized)
cctctccaggcctcatgtcctgtctgcaaaaggacgggaactgtcatccagtcccaagagggtgccaggagcgggggctcaaaggggctggcgctgctcaatgcttgccgaactccctca

SEQ ID NO: 179095 - DNA, 120 bp, Artificial Sequence
  ENSG00000110697_37 (sequence is synthesized)
ctgtccacccatctgcgccgccgcctatgcccttgtctccaagtactagccacgggtggaagggcagggaactcgtaggatcaggccagggagcggggcagggagcggggaaggggtcag

SEQ ID NO: 179096 - DNA, 120 bp, Artificial Sequence
  ENSG00000110697_38 (sequence is synthesized)
gaagccagacacctgggtcggtcactggcatggctggacctgttctggagaatggctccatttcagttgcctcttggggctaacgctccccacagaggacccacagagccagggcctgcc

SEQ ID NO: 179097 - DNA, 120 bp, Artificial Sequence
  ENSG00000110697_39 (sequence is synthesized)
gatgcccgccctggagggtgagtcctaggggctgcgggggcgcctctagtctctgtctgccccttccttccccacctcctctggccttccctctcatccgaggcatgagcaacttcccca

SEQ ID NO: 179098 - DNA, 120 bp, Artificial Sequence
  ENSG00000110697_40 (sequence is synthesized)
ctgtactaattcaaaggcctggctacagaaggggaacctgaggcccagaaagaagggactcgccaagggtgagtctcccaaagccactgggaggagcttcacacccgtgggatgttctgc

SEQ ID NO: 179099 - DNA, 120 bp, Artificial Sequence
  ENSG00000110697_41 (sequence is synthesized)
cactgggaggagcttcacacccgtgggatgttctgcactagaaggggtcaatcagacaccacagcagcaaatcgaagccgctgccctcttctcagcctttttttttttttttgagacaga

SEQ ID NO: 179100 - DNA, 86 bp, Artificial Sequence
  ENSG00000110697_42 (sequence is synthesized)
cagagtctcgctctgtcacccagactagagtgtcagtggcctgatcttgctcactgcaatcccaagtaactgggattacaggcacc

SEQ ID NO: 179101 - DNA, 69 bp, Artificial Sequence
  ENSG00000110697_43 (sequence is synthesized)
tgcctcccacagtgctgggattccaggaatgagccactgaacccagctaatttttgtatttttaatgga

SEQ ID NO: 179102 - DNA, 81 bp, Artificial Sequence
  ENSG00000110697_44 (sequence is synthesized)
ttctgcctcccgcagtactgggattccaggcatgagccacggtgcccagcccctgtctcactttaagcagggccctactga

SEQ ID NO: 179103 - DNA, 120 bp, Artificial Sequence
  ENSG00000110697_45 (sequence is synthesized)
gtgcccagcccctgtctcactttaagcagggccctactgacttcccagggagtgcagtttgggaagtgctggctcggggtcacaccagacatcagggtgctgctcccacaccccctacct

SEQ ID NO: 179104 - DNA, 120 bp, Artificial Sequence
  ENSG00000110697_46 (sequence is synthesized)
agtctggggcgcaggtggacggagcgggtctccagggccatggcccgtgggataccaagtggagccactctggcctcagcctgaggagggctcaccccctgggaagaggacggagtggct

SEQ ID NO: 179105 - DNA, 120 bp, Artificial Sequence
  ENSG00000110697_47 (sequence is synthesized)
gcctaggcgcgtggagagccggcgagggccaggggtccaggaaggatgctgggagggggaggtcgaggacccggctgcccaagaaggcagatctggagggcggaggagattaccggtccc

SEQ ID NO: 179106 - DNA, 120 bp, Artificial Sequence
  ENSG00000110697_48 (sequence is synthesized)
cctttgcctccccagtggaggcagagggaacgccaggtaaagataccgcctaggacaccggcccccagcacccgtgtacagcaggtcatgagtttaatggcatcttaagatgagaggcaa

SEQ ID NO: 179107 - DNA, 120 bp, Artificial Sequence
  ENSG00000110697_49 (sequence is synthesized)
agcccttggcgctgtgggcagcctgggcctggagggcgcttcctctggattggcggtgatgcctggcagcatggaaatgccagttcacgaggagcggaggccgcgcgcggcccgccgagc

SEQ ID NO: 179108 - DNA, 120 bp, Artificial Sequence
  ENSG00000110697_50 (sequence is synthesized)
gagtggggatgtccccgagcagctcctcccaccccatgacacagccccctgtcccctcagaaggcttctcggacagtgaggaggtcttccccaaggagatgaccaagtggaactccaatg

SEQ ID NO: 179109 - DNA, 120 bp, Artificial Sequence
  ENSG00000110700_0 (sequence is synthesized)
cctttcgttgcctgatcgccgccatcatgggtcgcatgcatgctcccgggaagggcctgtcccagtcggctttaccctatcgacgcagcgtccccacttggttgaagttgacatctgacg

SEQ ID NO: 179110 - DNA, 120 bp, Artificial Sequence
  ENSG00000110700_1 (sequence is synthesized)
acgtgaaggagcagatttacaaactggccaagaagggccttactccttcacagatcggtgtaatcctgagagattcacatggtgttgcacaagtacgttttgtgacaggcaataaaattt

SEQ ID NO: 179111 - DNA, 120 bp, Artificial Sequence
  ENSG00000110700_2 (sequence is synthesized)
ctctaccatttaattaagaaagcagttgctgttcgaaagcatcttgagaggaacagaaaggataaggatgctaaattccgtctgattctaatagagagccggattcaccgtttggctcga

SEQ ID NO: 179112 - DNA, 120 bp, Artificial Sequence
  ENSG00000110700_3 (sequence is synthesized)
tattataagaccaagcgagtcctccctcccaattggaaatatgaatcatctacagcctctgccctggtcgcataaatttgtctgtgtactcaagcaataaaatgattgtttaactaaaag

SEQ ID NO: 179113 - DNA, 120 bp, Artificial Sequence
  ENSG00000110700_4 (sequence is synthesized)
attctcctgcctcagcctcccgaataggtgtaatcctgagagattcacatggtgttgcacaagtacgttttgtgacaggcaataaaattttaagaattcttaagtctaagggacttgctc

SEQ ID NO: 179114 - DNA, 120 bp, Artificial Sequence
  ENSG00000110700_5 (sequence is synthesized)
cctttcgttgcctgatcgccgccatcatgggtcgcatgcatgctcccgggtgagctcggggcatcaagccggattgctgggcggggggtgggaggaagacagggagtgtgggcagcgggc

SEQ ID NO: 179115 - DNA, 120 bp, Artificial Sequence
  ENSG00000110700_6 (sequence is synthesized)
gtctcgccaccgtgctagaggcatcattgtaagcacttcacatgtactgatttcgtttaattctgaccacaatactttgaaataaatcttcatggctttcaccccagtttacagttgagg

SEQ ID NO: 179116 - DNA, 120 bp, Artificial Sequence
  ENSG00000110700_7 (sequence is synthesized)
aagcagaggcacactgccgctggatactaaccagccccaaatcacacagctgtcaagtggaggagttggaattggctaagcagagtgcctgacacagttcctcacagttaggtgtggttt

SEQ ID NO: 179117 - DNA, 120 bp, Artificial Sequence
  ENSG00000110700_8 (sequence is synthesized)
gaatctcagctgcgtgtgacttcgtgcaagtggcttcattcagcaaatgtttaccttctatgtgctgaacatggttctggggcctgagaacatactactctccgactcccccgcccaaaa

SEQ ID NO: 179118 - DNA, 120 bp, Artificial Sequence
  ENSG00000110700_9 (sequence is synthesized)
gcagttgctgttcgaaagcatcttgagaggaacagaaaggtaagctaataaataaaacctggtgctaagtaggactgcttgtactaaattttttcggtaaaatgtaatgcatctggtttg

SEQ ID NO: 179119 - DNA, 120 bp, Artificial Sequence
  ENSG00000110700_10 (sequence is synthesized)
aaatatgtcatagattgtaagtagtcagagctcattagaggtttaaaagaaataacgtgtaaagtttttagaagaatatctgaccagagttctcagtaaatgttagctgtggaatctcat

SEQ ID NO: 179120 - DNA, 120 bp, Artificial Sequence
  ENSG00000110700_11 (sequence is synthesized)
taatccctttggtcatctgtattccagcaagctcactgtgatgatggttttccaacattcgcagtttccaccagaaaggttttccttagtgttgggtaaaccttccttggatgtctgagt

SEQ ID NO: 179121 - DNA, 120 bp, Artificial Sequence
  ENSG00000110700_12 (sequence is synthesized)
gagctttatgtgcattctcacgttggtttctgtgatgtataaaagtatacccccatcttacagataggaaactatgccctgatttctgagccttgacatcatcacattctccagtttgtg

SEQ ID NO: 179122 - DNA, 120 bp, Artificial Sequence
  ENSG00000110700_13 (sequence is synthesized)
gtgttgggtggcttcctgcggcgtttccactctcgctctcctttcgttgcctgatcgccgccatcatgggtcgcatgcatgctcccggggcctgtcccagtcggctttaccctatcgacg

SEQ ID NO: 179123 - DNA, 120 bp, Artificial Sequence
  ENSG00000110700_14 (sequence is synthesized)
actctcgctctcctttcgttgcctgatcgccgccatcatgggtcgcatgcatgctcccgggaagggcctgtcccagtcggctttaccctatcgacgcagcgtccccactgtaagtagcgc

SEQ ID NO: 179124 - DNA, 120 bp, Artificial Sequence
  ENSG00000110700_15 (sequence is synthesized)
gctgggaccggggagaatccggggagggggttggcatttgtctcgggtgaagcgacgccagggtgaggaacttgcgtgtatgaggagcgcggttttgcggaaggagagaccgctgttctg

SEQ ID NO: 179125 - DNA, 120 bp, Artificial Sequence
  ENSG00000110700_16 (sequence is synthesized)
agaagggccttactccttcacagatcggtgagtgtttgtgtctaacatagcctatttcgcctgtcctcgtgtgacttgtaggatctagtaggtggtaaagttattttaaaaatagccaaa

SEQ ID NO: 179126 - DNA, 120 bp, Artificial Sequence
  ENSG00000110711_0 (sequence is synthesized)
cccttttggcttctgccctcaaccaaaatggcgctagctcggaagctgccgaggtgctaggagttgccgaagcaagtccggaagctaccgagcgagtccggaagttgccgaaagggagca

SEQ ID NO: 179127 - DNA, 120 bp, Artificial Sequence
  ENSG00000110711_1 (sequence is synthesized)
gcggggaaggaggatggcggatatcatcgcaagactccgggaggacgggatccaaaaacgtgtgatacaggaaggccgaggagagctcccggactttcaagatgggaccaaggccacgtt

SEQ ID NO: 179128 - DNA, 120 bp, Artificial Sequence
  ENSG00000110711_2 (sequence is synthesized)
ccactaccggacgctgcacagtgacgacgagggcaccgtgctggacgacagccgggctcgtggcaagcccatggagctcatcattggcaagaagttcaagctgcctgtgtgggagaccat

SEQ ID NO: 179129 - DNA, 120 bp, Artificial Sequence
  ENSG00000110711_3 (sequence is synthesized)
cgtgtgcaccatgcgagaaggggagattgcccagttcctctgtgacatcaagcatgtggtcctgtacccgctggtggccaagagtctccgcaacatcgcggtgggcaaggaccccctgga

SEQ ID NO: 179130 - DNA, 120 bp, Artificial Sequence
  ENSG00000110711_4 (sequence is synthesized)
gggccagcggcactgctgcggtgttgcacagatgcgtgaacacagctccctgggccatgctgacctggacgccctgcagcagaacccccagcccctcatcttccacatggagatgctgaa

SEQ ID NO: 179131 - DNA, 120 bp, Artificial Sequence
  ENSG00000110711_5 (sequence is synthesized)
ggccatgacagacgaagagaaggcaaaggcagtgccacttatccaccaggagggcaaccggttgtaccgcgaggggcatgtgaaggaggctgctgccaagtactacgatgccattgcctg

SEQ ID NO: 179132 - DNA, 120 bp, Artificial Sequence
  ENSG00000110711_6 (sequence is synthesized)
cctcaagaacctgcagatgaaggaacagcctgggtcccctgaatggatccagctggaccagcagatcacgccgctgctgctcaactactgccagtgcaagctggtggtcgaggagtacta

SEQ ID NO: 179133 - DNA, 120 bp, Artificial Sequence
  ENSG00000110711_7 (sequence is synthesized)
cgaggtgctggaccactgctcttccatcctcaacaagtacgacgacaacgtcaaggcctacttcaagcggggcaaggcccacgcggccgtgtggaatgcccaggaggcccaggctgactt

SEQ ID NO: 179134 - DNA, 120 bp, Artificial Sequence
  ENSG00000110711_8 (sequence is synthesized)
tgccaaagtgctggagctggacccagccctggcgcctgtggtgagccgagagctgcgggccctggaggcacggatccggcagaaggacgaagaggacaaagcccggttccgggggatctt

SEQ ID NO: 179135 - DNA, 120 bp, Artificial Sequence
  ENSG00000110711_9 (sequence is synthesized)
ctcccattgacaggagcacttggccctgccttacctgccaagcccactgctgcagctgccagcccccctgcccgtgctgcgtcatgcttctgtgtatataaaggcctttatttatctctc

SEQ ID NO: 179136 - DNA, 120 bp, Artificial Sequence
  ENSG00000110711_10 (sequence is synthesized)
gggggagcggacagagacaagaaaacctgtgcaggacccttggcagtaccctgggtctcctttcctcctccttcacatctcaaatgtcacctcctccaggaaaccggccctgcccacccg

SEQ ID NO: 179137 - DNA, 120 bp, Artificial Sequence
  ENSG00000110711_11 (sequence is synthesized)
cgaggtgctggaccactgctcttccatcctcaacaagtacgacggtgagcaccgggccctgggctgccgggggctgcgagtggtcagagagtggcctttctcctgtcactgctggggtca

SEQ ID NO: 179138 - DNA, 120 bp, Artificial Sequence
  ENSG00000110711_12 (sequence is synthesized)
agacctagcctttcacaacccccattctgagctcccacgggggcctgactaaatgcctctactcggcagggctgtgggccccattgtgccaatgaagcatgaatggtgtattgggggtgg

SEQ ID NO: 179139 - DNA, 120 bp, Artificial Sequence
  ENSG00000110713_0 (sequence is synthesized)
gccctctgcgcgctgcgcccgaagcggcggtcggtggcaggggtggtagcggcggcggcgacggtttcgtgggggccgcgcgctgctctgtgagcggcgggtggcagcaggggactcctg

SEQ ID NO: 179140 - DNA, 120 bp, Artificial Sequence
  ENSG00000110713_1 (sequence is synthesized)
gactcctgacacttccccttccccaccgaaccgcgctttctgaaacaaagactcattttgaagatgtttaacaaatcatttggaacaccctttgggggtggcacaggtggctttggcaca

SEQ ID NO: 179141 - DNA, 120 bp, Artificial Sequence
  ENSG00000110713_2 (sequence is synthesized)
acttcaacatttggacagaatactggctttggcactactagtggaggggcatttggaacatctgcatttggttctagcaacaatactggaggcctctttggaaattcacagactaaacca

SEQ ID NO: 179142 - DNA, 120 bp, Artificial Sequence
  ENSG00000110713_3 (sequence is synthesized)
ggaggattgtttggaaccagttcatttagccagccagctacctccacaagcactggctttgggtttggtacgtcaacaggaacagcaaataccttgtttggaactgcaagcacagggacc

SEQ ID NO: 179143 - DNA, 120 bp, Artificial Sequence
  ENSG00000110713_4 (sequence is synthesized)
agtctcttctcatcccaaaacaatgcctttgcacaaaataaaccaactggctttggcaattttggaaccagtactagcagtggaggactctttggaaccacaaataccacctctaatcct

SEQ ID NO: 179144 - DNA, 120 bp, Artificial Sequence
  ENSG00000110713_5 (sequence is synthesized)
tttggcagcacatctggctccctctttgggccaagtagttttacagctgctcctactgggactactattaaatttaaccctccaactggtacagatactatggtcaaagctggagttagc

SEQ ID NO: 179145 - DNA, 120 bp, Artificial Sequence
  ENSG00000110713_6 (sequence is synthesized)
actaacataagtaccaagcaccagtgtattactgctatgaaagaatatgaaagcaagtcactagaggaacttcgtttagaggattatcaggctaacaggaagggcccacagaaccaggtg

SEQ ID NO: 179146 - DNA, 120 bp, Artificial Sequence
  ENSG00000110713_7 (sequence is synthesized)
ggagcaggtaccacaactggcttgtttgggtcttctccagccacttccagcgcaacaggactcttcagctcctccaccactaattcaggctttgcatatggtcagaacaaaactgccttt

SEQ ID NO: 179147 - DNA, 120 bp, Artificial Sequence
  ENSG00000110713_8 (sequence is synthesized)
ggaactagtacaactggatttggaacaaatccaggtggtctctttggccaacagaatcagcagactaccagcctcttcagcaaaccatttggccaggctacaaccacccagaacactggc

SEQ ID NO: 179148 - DNA, 120 bp, Artificial Sequence
  ENSG00000110713_9 (sequence is synthesized)
ttttcctttggtaataccagcaccataggacagccaagcaccaacaccatgggattatttggagtaacccaagcctcacagcctggaggtctttttgggacagctacaaacaccagcact

SEQ ID NO: 179149 - DNA, 120 bp, Artificial Sequence
  ENSG00000110713_10 (sequence is synthesized)
gggacagcatttggaacaggaacaggtctctttgggcagaccaatactggatttggtgctgttggttcgaccctgtttggcaataacaagcttactacatttggaagcagcacaaccagt

SEQ ID NO: 179150 - DNA, 120 bp, Artificial Sequence
  ENSG00000110713_11 (sequence is synthesized)
gcaccttcatttggtacaaccagtggcgggctctttggttttggcacaaataccagtgggaatagtatttttggaagtaaaccagcacctgggactcttggaactgggcttggtgcagga

SEQ ID NO: 179151 - DNA, 120 bp, Artificial Sequence
  ENSG00000110713_12 (sequence is synthesized)
tttggaacagctcttggtgctggacaggcatctttgtttgggaacaaccaacctaagattggagggcctcttggtacaggagcctttggggcccctggatttaatactacgacagccact

SEQ ID NO: 179152 - DNA, 120 bp, Artificial Sequence
  ENSG00000110713_13 (sequence is synthesized)
ttgggctttggagccccccaggccccagtagctttgacagatccaaatgcttctgctgcccagcaggctgttctccagcagcacatcaatagtctaacatactcaccttttggagactct

SEQ ID NO: 179153 - DNA, 120 bp, Artificial Sequence
  ENSG00000110713_14 (sequence is synthesized)
cctctcttccggaatccgatgtcagaccctaagaagaaggaagagagattgaaaccaacaaatccagcagcccagaaggctcttactacacctactcattataaactgacaccccgccct

SEQ ID NO: 179154 - DNA, 120 bp, Artificial Sequence
  ENSG00000110713_15 (sequence is synthesized)
gccactagagtccggccaaaggctttacaaacaacaggcacagccaagtcacatctctttgatgggctggatgacgatgaaccatccctagccaatggagcattcatgcccaagaagagc

SEQ ID NO: 179155 - DNA, 120 bp, Artificial Sequence
  ENSG00000110713_16 (sequence is synthesized)
attaagaagttggttttgaagaaccttaataatagcaatctcttttctcctgttaatcgtgattcagaaaatctagcttcaccatctgaatatccagaaaatggagagagatttagtttc

SEQ ID NO: 179156 - DNA, 120 bp, Artificial Sequence
  ENSG00000110713_17 (sequence is synthesized)
ctaagcaaacctgttgatgagaatcaccagcaggatggagatgaagattcccttgtttcacatttttatactaaccctattgccaaacctattcctcaaaccccagaaagtgctggaaat

SEQ ID NO: 179157 - DNA, 120 bp, Artificial Sequence
  ENSG00000110713_18 (sequence is synthesized)
aaacacagcaacagcaacagtgtggatgataccattgttgcattaaacatgcgtgctgctttgcgaaatgggctggaaggaagcagtgaagaaacgtcttttcatgatgagtcacttcag

SEQ ID NO: 179158 - DNA, 120 bp, Artificial Sequence
  ENSG00000110713_19 (sequence is synthesized)
gatgaccgagaagaaatagaaaataattcttaccatatgcacccagcaggtattattctcactaaggttggttactatactattccatctatggatgaccttgctaaaattaccaatgaa

SEQ ID NO: 179159 - DNA, 120 bp, Artificial Sequence
  ENSG00000110713_20 (sequence is synthesized)
aaaggagagtgcattgtctctgatttcactattggtcggaaaggttatggttcaatctattttgaaggagatgtgaatttgacaaatctaaatttggatgatattgtgcatatccggagg

SEQ ID NO: 179160 - DNA, 120 bp, Artificial Sequence
  ENSG00000110713_21 (sequence is synthesized)
aaagaagtagttgtctacttagatgataaccaaaaaccacctgtgggtgaagggctaaataggaaggctgaagttacattggatggagtttggccaacagataaaacatctcgttgttta

SEQ ID NO: 179161 - DNA, 120 bp, Artificial Sequence
  ENSG00000110713_22 (sequence is synthesized)
ataaagagcccagatcgccttgctgatatcaactatgaaggaagattggaagcagtttcaaggaaacagggagctcaattcaaagaataccggcctgaaactggttcttgggtgtttaag

SEQ ID NO: 179162 - DNA, 120 bp, Artificial Sequence
  ENSG00000110713_23 (sequence is synthesized)
gtctcccatttttctaagtatggccttcaggattctgatgaagaggaggaggagcatccgtctaaaactagtacaaagaagttgaagactgctcctttgcctcctgcaagccagactacg

SEQ ID NO: 179163 - DNA, 120 bp, Artificial Sequence
  ENSG00000110713_24 (sequence is synthesized)
cccttgcagatggctcttaatggcaaacctgcacctccacctcagagccagagcccagaggtggagcagttagggagggttgtggaactggacagtgacatggtagatatcacccaggag

SEQ ID NO: 179164 - DNA, 120 bp, Artificial Sequence
  ENSG00000110713_25 (sequence is synthesized)
ccagttttggataccatgttagaagagagcatgcctgaggatcaggaacctgtgtctgcctcaacacatattgcatcttcactgggaattaatccacatgtcttacagatcatgaaagca

SEQ ID NO: 179165 - DNA, 120 bp, Artificial Sequence
  ENSG00000110713_26 (sequence is synthesized)
tcattgcttactgatgaagaagatgtagatatggcactggatcaacgcttcagtcgcctgccttccaaagcagatacttctcaagaaatctgttctcccagactccccatttcagcatcc

SEQ ID NO: 179166 - DNA, 120 bp, Artificial Sequence
  ENSG00000110713_27 (sequence is synthesized)
cactcgtcgaaaactcgttcactagttggtgggttactacaatcaaaatttacaagtggagcttttctttcaccaagtgtctctgtgcaagaatgtcgtactcccagagcagcatcttta

SEQ ID NO: 179167 - DNA, 120 bp, Artificial Sequence
  ENSG00000110713_28 (sequence is synthesized)
atcccatccacatcctcttggtctgtccctccacccctgacttctgtgttcacaatgcccagcccagcccctgaggttccgttgaaaacagtgggtacacgtaggcaactaggcctagtc

SEQ ID NO: 179168 - DNA, 120 bp, Artificial Sequence
  ENSG00000110713_29 (sequence is synthesized)
cctcgtgaaaagtctgtcacctatggcaagggaaaactcttgatggacatggccctattcatgggacgctcatttcgtgttggttggggccccaactggactcttgctaatagtggagaa

SEQ ID NO: 179169 - DNA, 120 bp, Artificial Sequence
  ENSG00000110713_30 (sequence is synthesized)
cagctgaatggctctcatgaactagaaaatcatcagattgccgattccatggagtttggattcctgcccaatccagtagctgttaaacccctaactgagtccccattcaaagttcactta

SEQ ID NO: 179170 - DNA, 120 bp, Artificial Sequence
  ENSG00000110713_31 (sequence is synthesized)
gaaaaactcagtttgagacaaagaaagccagatgaagacatgaaattatatcagacacctctggagctcaaattaaaacacagcactgtccatgtggatgaactgtgtcctctcattgtc

SEQ ID NO: 179171 - DNA, 120 bp, Artificial Sequence
  ENSG00000110713_32 (sequence is synthesized)
cccaatctgggagttgctgtcattcatgactatgcagattgggttaaagaagcatcaggagacttaccagaagcacaaattgtgaagcactggagcctgacatggacactatgtgaagcc

SEQ ID NO: 179172 - DNA, 120 bp, Artificial Sequence
  ENSG00000110713_33 (sequence is synthesized)
ctatggggccacctgaaggagcttgacagccagctaaatgaaccccgtgaatacattcaaattctggagcgaagaagagctttctcccgctggctatcctgtactgccacacctcagatt

SEQ ID NO: 179173 - DNA, 120 bp, Artificial Sequence
  ENSG00000110713_34 (sequence is synthesized)
gaagaggaagtctccttaacccaaaaaaacagccctgtggaggctgtattcagctacctcacaggcaaaaggatcagtgaggcctgctctctggcccagcagtcaggggatcatcgtctt

SEQ ID NO: 179174 - DNA, 120 bp, Artificial Sequence
  ENSG00000110713_35 (sequence is synthesized)
gctcttcttttatctcagtttgtgggtagccagtcagtccgggagctgctcaccatgcagttggtggactggcatcagctccaagcagactccttcatccaggatgagagactgcgcatc

SEQ ID NO: 179175 - DNA, 120 bp, Artificial Sequence
  ENSG00000110713_36 (sequence is synthesized)
tttgctctgttggctggaaaaccggtgtggcagctctcagaaaagaagcaaataaacgtgtgctcccagttggattggaaacgctccctggctatccatctttggtatttgcttccacca

SEQ ID NO: 179176 - DNA, 120 bp, Artificial Sequence
  ENSG00000110713_37 (sequence is synthesized)
acagcctccatttctagggcgctcagcatgtatgaagaagcatttcagaatacctctgacagtgacagatatgcctgctccccacttccttcgtatctggagggttctggctgtgtgata

SEQ ID NO: 179177 - DNA, 120 bp, Artificial Sequence
  ENSG00000110713_38 (sequence is synthesized)
gcggaggagcaaaactcacagacaccacttcgagatgtctgctttcaccttctaaaactctacagtgacagacattatgatctcaaccagctgctggagcctcgaagcataacagcagat

SEQ ID NO: 179178 - DNA, 120 bp, Artificial Sequence
  ENSG00000110713_39 (sequence is synthesized)
cctttggactaccgcctaagctggcacttgtgggaagtgctgagggctcttaactacacccatctctcagcgcagtgtgaaggtgtgctacaggccagttacgctggccagcttgaaagt

SEQ ID NO: 179179 - DNA, 120 bp, Artificial Sequence
  ENSG00000110713_40 (sequence is synthesized)
gaggggctctgggagtgggccatctttgtcctcctgcacattgacaactcaggcatacgtgagaaggctgttcgagagctgcttacccggcactgccagctgttggagacccctgaatct

SEQ ID NO: 179180 - DNA, 120 bp, Artificial Sequence
  ENSG00000110713_41 (sequence is synthesized)
tgggctaaagagactttccttacccagaagctccgtgtacctgccaaatggatccacgaggccaaagctgtgcgagcacacatggaatctgacaagcacttagaggccctttgcttattt

SEQ ID NO: 179181 - DNA, 120 bp, Artificial Sequence
  ENSG00000110713_42 (sequence is synthesized)
aaggctgagcactggaaccgctgccacaagctcatcatccgacacttagcttctgatgccatcattaatgagaactatgactacctgaaggggttcttggaagacctggcacctccagag

SEQ ID NO: 179182 - DNA, 120 bp, Artificial Sequence
  ENSG00000110713_43 (sequence is synthesized)
cgcagcagcctaattcaggattgggaaacatctgggcttgtttacctggactatattagagtcattgaaatgctccgccatatacagcaggtggattgctcaggtaatgacctggagcag

SEQ ID NO: 179183 - DNA, 120 bp, Artificial Sequence
  ENSG00000110713_44 (sequence is synthesized)
ttacacatcaaagtgacttcactgtgcagtcggatagagcagattcagtgttacagtgctaaagatcgcctggctcagtcagacatggccaaacgtgtagccaacctgctgcgcgtggtg

SEQ ID NO: 179184 - DNA, 120 bp, Artificial Sequence
  ENSG00000110713_45 (sequence is synthesized)
ctgagtctgcatcatcctcctgatagaacctccgactcaacaccagaccctcagcgagtccctttgcgcctcttggctccccacattggccggcttcccatgcctgaggactatgccatg

SEQ ID NO: 179185 - DNA, 120 bp, Artificial Sequence
  ENSG00000110713_46 (sequence is synthesized)
gacgaactgcgcagccttacccagtcctatctgcgagaactggctgttgggagcctgtgagccccaggcactttgcatcacagtcacatgcccattcacaccacacagaggttccctgcc

SEQ ID NO: 179186 - DNA, 120 bp, Artificial Sequence
  ENSG00000110713_47 (sequence is synthesized)
ttgtttggattggcactgtttgccattctctgggttggctgtggcatctaccctccctccctgctgccagaagcagcatcctccacttgttcagggcttttcttaatactgaacgtagca

SEQ ID NO: 179187 - DNA, 120 bp, Artificial Sequence
  ENSG00000110713_48 (sequence is synthesized)
taagggcttctggaacccagaagaggagacagtttaccatcctcaagatcattcagtgtttttcctttaaaaaaatggtcaataaagctcctttggcagaatcccccaaagaaccagggt

SEQ ID NO: 179188 - DNA, 120 bp, Artificial Sequence
  ENSG00000110713_49 (sequence is synthesized)
attctttttccatccctagccattctggatcttgtgaccctccatgccaaccagcttccctactcctaccctggcccttttatactaggactccttaggaggagtgagacaggtgataat

SEQ ID NO: 179189 - DNA, 120 bp, Artificial Sequence
  ENSG00000110713_50 (sequence is synthesized)
ggatccttaacagatgaactatccacagaaggaagagggatccgtctcttaagtaattggttagttaacactgaattttggaggcaaaggagggttggcctgagttaggaaacaaaatgg

SEQ ID NO: 179190 - DNA, 120 bp, Artificial Sequence
  ENSG00000110713_51 (sequence is synthesized)
gatctttctgacacacttagggcagaagtgaatgcctgtcacggagggattgatcttcagggctgtttttgttcctgcctttagagttccatgaacaccatacctttgctactactatgt

SEQ ID NO: 179191 - DNA, 120 bp, Artificial Sequence
  ENSG00000110713_52 (sequence is synthesized)
gcaggaacccttggtcacatgtgacatgtctgtgggaagctcccagagtttggtttggtccctggttttcagtcttgctgagactctgtctggatttgcctgcagagtttggataaaaaa

SEQ ID NO: 179192 - DNA, 120 bp, Artificial Sequence
  ENSG00000110713_53 (sequence is synthesized)
tggcaggttgggtaaccctccctgttcatcccatgttagctccaaagcatttcccaccctccatctaccccttccagaagcaaaaacaaaccatgactgaggcaggcatggagttgggcg

SEQ ID NO: 179193 - DNA, 120 bp, Artificial Sequence
  ENSG00000110713_54 (sequence is synthesized)
ttaggggcaggcagagggcctttgctacactgctgacagctatagggagccccaggtaatggcatgagatagctggtgttagggctatctcaggcaatatggccacacctgggtctttat

SEQ ID NO: 179194 - DNA, 120 bp, Artificial Sequence
  ENSG00000110713_55 (sequence is synthesized)
acacctgggtctttatgcatgaagataatgtaaaggtttttattaaaaaatatatatatgtataaataaatgatctagatattttcctctttttctgaagctactttcttaaaaaataaa

SEQ ID NO: 179195 - DNA, 120 bp, Artificial Sequence
  ENSG00000110713_56 (sequence is synthesized)
gttgtttcaaggttttgtgtagagtctataggtgggattggagtgataggaactccccttggattaattggcttctctgcttctttgtaggtggattgctcaggtaatgacctggagcag

SEQ ID NO: 179196 - DNA, 120 bp, Artificial Sequence
  ENSG00000110713_57 (sequence is synthesized)
tgtcagaccctaagaagaaggaagagattgaaaccaacaaatccagcagcccagaaggctcttactacacctactcattataaactgacaccccgccctgccactagagtccggccaaag

SEQ ID NO: 179197 - DNA, 90 bp, Artificial Sequence
  ENSG00000110713_58 (sequence is synthesized)
gcaaaaggatcagtgaggcctgctctctggcccagcagtcagtctcgctctgtaccccaggaacaacgtttgcctcctgggttcaagcga

SEQ ID NO: 179198 - DNA, 88 bp, Artificial Sequence
  ENSG00000110713_59 (sequence is synthesized)
cccttctcctaggaatcatgtttggtagaaaagtagtttggaaaattcttcattctgatatattttctctttatatgatgatttagtt

SEQ ID NO: 179199 - DNA, 67 bp, Artificial Sequence
  ENSG00000110713_60 (sequence is synthesized)
aggctggtctcaaactcctggcgtcaagcagtccagcctccgtctggtactatttatggtctttgtg

SEQ ID NO: 179200 - DNA, 120 bp, Artificial Sequence
  ENSG00000110713_61 (sequence is synthesized)
cacatccagcctccgtctggtactatttatggtctttgtgcatttgtacagtgagaatttatctttgggattgatcttgtatgaacttattatgaatcattaaaaaaaggttatgctcac

SEQ ID NO: 179201 - DNA, 120 bp, Artificial Sequence
  ENSG00000110713_62 (sequence is synthesized)
ttggtacaaccagtggcgggctctttggtaacaaaccaaccctgactttaggaaccaatacaaacacttctaattttggtacatataaaaagcaggtttggctctcttaaagttacactg

SEQ ID NO: 179202 - DNA, 120 bp, Artificial Sequence
  ENSG00000110713_63 (sequence is synthesized)
gtagcttgatgtgaagtaccagagggaaaggtttaaagtcctggatatggcttgagataattagtaggcatgtaaattgcctttcatttactttggattacttcagcaatagctgagaaa

SEQ ID NO: 179203 - DNA, 120 bp, Artificial Sequence
  ENSG00000110713_64 (sequence is synthesized)
ccataaaggaaacacatttggttaagtaacacattgtatgaggccaggtttcaaacctgtggtagcatacagaagataattggttattcttatttttgtcgttgttggtttgttgtgttg

SEQ ID NO: 179204 - DNA, 120 bp, Artificial Sequence
  ENSG00000110713_65 (sequence is synthesized)
tgccagggccatggggctccggagccaccacctcagcctgggccttctgcttctgtttctactccctgcaggtatgaagctcagtacaccagccctggcctctcctggtggtgctactat

SEQ ID NO: 179205 - DNA, 120 bp, Artificial Sequence
  ENSG00000110713_66 (sequence is synthesized)
tcctgttctcccaaaatccctttccatgtagtctctcttgtgtttctcctcagtacctgttctgagaacaagctctctatttggggagtgtggaggagaggggtgctgaagtgcgtgaga

SEQ ID NO: 179206 - DNA, 120 bp, Artificial Sequence
  ENSG00000110713_67 (sequence is synthesized)
aaaggacagtgaatttgaatggaatccgtgataccgaagttgaaagcaagtcattcagctaatacaaagctgttttatgacccttggaactttgaagagtacaaacattggcaatcacgt

SEQ ID NO: 179207 - DNA, 120 bp, Artificial Sequence
  ENSG00000110713_68 (sequence is synthesized)
tgaaacaagtgcaagggagggcgtgaggtcttgcaggcatctgtctttttactggagagatttaaagaattctcttgctgtttggattattcctctacagattgtcatttttaaaccctt

SEQ ID NO: 179208 - DNA, 120 bp, Artificial Sequence
  ENSG00000110713_69 (sequence is synthesized)
tgttctctctcatttggacttgctgaattctctgctcagtgattaacttaagatttgctcatgtgggttcatgcacagtaaattctgcctttattgactacctgatgtgcagtttaatct

SEQ ID NO: 179209 - DNA, 120 bp, Artificial Sequence
  ENSG00000110713_70 (sequence is synthesized)
ttttctttacctccatggttttttaaaagttaaattagctttctgaaagggtttttaatctccatttttttaaagttgtttgcttatacttcgggtaaccttgatatttgtattttaata

SEQ ID NO: 179210 - DNA, 120 bp, Artificial Sequence
  ENSG00000110713_71 (sequence is synthesized)
gtacataatctttatgaaaaatagtttgggaatgtaaatgaattattatttggcttggggagattagggcctacattgtttatcgcaattacttgtatcattgatacgggatttctttgt

SEQ ID NO: 179211 - DNA, 120 bp, Artificial Sequence
  ENSG00000110713_72 (sequence is synthesized)
aaagcatcctctacctctcagctgctgaaagctagacctttggtattttccatgctataattcttatggctgctgaaatgtgtggtttttatgatttattaaataatctcttaggaggca

SEQ ID NO: 179212 - DNA, 120 bp, Artificial Sequence
  ENSG00000110713_73 (sequence is synthesized)
gaggggagggtatgataaatgtgggaaactggaaatatattgacttttatgtttataatcttggtagcatttagaatgcccctaagaaatctccattgacaaatgaaatgctatagactt

SEQ ID NO: 179213 - DNA, 120 bp, Artificial Sequence
  ENSG00000110713_74 (sequence is synthesized)
ggttttccagttatccatattcattttgtctgtcatatgctttgtatcatctccttctttcctaattttttataaccttatatatatatttattataaatatatgtatttctgagggaaa

SEQ ID NO: 179214 - DNA, 120 bp, Artificial Sequence
  ENSG00000110713_75 (sequence is synthesized)
aaattgaagcggagccaggaaatctgatgggaaactatcctttactccttcctctggacaaggctacttccccaagtgtctgtttttattttattaaatatcatgagattccacagttga

SEQ ID NO: 179215 - DNA, 120 bp, Artificial Sequence
  ENSG00000110713_76 (sequence is synthesized)
aaccgcggcggcgaggggcgggactccacggccctctcaccgctcctaccctgtgcctccccgaactccttctgcccctcctcttccctctcgccccttcccccttcagttcggtttcaa

SEQ ID NO: 179216 - DNA, 120 bp, Artificial Sequence
  ENSG00000110717_0 (sequence is synthesized)
gcctcccgattgactggcctgcttggcaaggcaagtagcggcggcgcttcaagatgcgctgcctgaccacgcctatgctgctgcgggccctggcccaggctgcacgtgcaggacctcctg

SEQ ID NO: 179217 - DNA, 120 bp, Artificial Sequence
  ENSG00000110717_1 (sequence is synthesized)
gtggccggagcctccacagcagtgcagtggcagccacctacaagtatgtgaacatgcaggatcccgagatggacatgaagtcagtgactgaccgggcagcccgcaccctgctgtggactg

SEQ ID NO: 179218 - DNA, 120 bp, Artificial Sequence
  ENSG00000110717_2 (sequence is synthesized)
agctcttccgaggcctgggcatgaccctgagctacctgttccgggaaccggccaccatcaactacccgttcgagaagggcccgctgagccctcgcttccgtggggagcatgcgctgcgcc

SEQ ID NO: 179219 - DNA, 120 bp, Artificial Sequence
  ENSG00000110717_3 (sequence is synthesized)
gagcgttgcattgcctgcaagctctgcgaggccatctgccccgcccaggccatcaccatcgaggctgagccaagagctgatggcagccgccggaccacccgctatgacatcgacatgacc

SEQ ID NO: 179220 - DNA, 120 bp, Artificial Sequence
  ENSG00000110717_4 (sequence is synthesized)
aagtgcatctactgcggcttctgccaggaggcctgtcccgtggatgccatcgtcgagggccccaactttgagttctccacggagacccatgaggagctgctgtacaacaaggagaagttg

SEQ ID NO: 179221 - DNA, 120 bp, Artificial Sequence
  ENSG00000110717_5 (sequence is synthesized)
ctcaacaacggggacaagtgggaggccgagatcgccgccaacatccaggctgactacttgtatcggtgacgccccaccggcccgcagcccctgctgcccaataaaaccactccgacccca

SEQ ID NO: 179222 - DNA, 120 bp, Artificial Sequence
  ENSG00000110717_6 (sequence is synthesized)
cacgttttggccgtgaaagtcgggcttgggcagcgtggcgtcgggggcgagtgtggtgtccccgttggcgccgccagctctgcgcctgggcttcccctcggctcactcaggatccgcggc

SEQ ID NO: 179223 - DNA, 120 bp, Artificial Sequence
  ENSG00000110717_7 (sequence is synthesized)
gccacctacagtgagtacctgggtggcctctagcctcaggtgttcctgactggtcctgctggagtaggggaagagacctgagttccagtcctggctttgtcaggggcgttcttctctgag

SEQ ID NO: 179224 - DNA, 120 bp, Artificial Sequence
  ENSG00000110717_8 (sequence is synthesized)
cctgtttccacttttaaaatgattatggtgatggagactgactctgattcacaggggcagggtccatcattgccgaggttagcatgtgtgatctcagagctccctgggtgtgatggggag

SEQ ID NO: 179225 - DNA, 120 bp, Artificial Sequence
  ENSG00000110717_9 (sequence is synthesized)
ggggttgccaggtgtgagccatgggtacctgtgcctattgccagtccctggtgaaggcaaaggctcaagccccccacctaccccccttgattcctctttcaagccctgttgggcagggaa

SEQ ID NO: 179226 - DNA, 120 bp, Artificial Sequence
  ENSG00000110717_10 (sequence is synthesized)
gtgcgtctgggctccaatggccacccaagcacagggagaggtaggcacggacgggctcaggccagaggcggcctccagggtccttgctgaggctggggagaggtgtggtgagtgtacagc

SEQ ID NO: 179227 - DNA, 120 bp, Artificial Sequence
  ENSG00000110717_11 (sequence is synthesized)
ccctttgtagcccagcagttgcacctggaagtgagggccaggctgctctccctgaggctccagggagacagtgtgtgaggcctcttgccatggcctccctgcccgcctctctgcagagta

SEQ ID NO: 179228 - DNA, 120 bp, Artificial Sequence
  ENSG00000110717_12 (sequence is synthesized)
tgtgaacatgcaggatcccgagatggacatgaagtcagtgactgaccgggcagcccgcaccctgctgtggactgagctcttccgaggtgcgtcctgggcatgaggggacagggaaggtgc

SEQ ID NO: 179229 - DNA, 120 bp, Artificial Sequence
  ENSG00000110717_13 (sequence is synthesized)
agcccctgccccaaccggccaccacgccagcccctgccactgggagagggaggccaggcagccctaggcccaaaccctagcccctgcttgatgtgcgtccccaggaagtccctttccccc

SEQ ID NO: 179230 - DNA, 120 bp, Artificial Sequence
  ENSG00000110717_14 (sequence is synthesized)
tctgagccacttccctcgtgaatgggaatgatgagggcttgttaccagagcacagagtcagtgagttggcagagtgaagcttccagccctgggcaggcgcctgacacacagaggttcccc

SEQ ID NO: 179231 - DNA, 120 bp, Artificial Sequence
  ENSG00000110717_15 (sequence is synthesized)
cttggggtctggccaagggtgtgacccctgggcctctgagccatggggtgacacctgaggccatccacgcctccctggatgtagccaccgtttccggagtcctgcttgtgtgcctgttgc

SEQ ID NO: 179232 - DNA, 120 bp, Artificial Sequence
  ENSG00000110717_16 (sequence is synthesized)
gtgggggccaggcctgccagcacgggaacaatatgactcggtcagagctctggtcagacccctgtgtgtgcctggcaggagccccggcagccgccgccgctactttctgtgtgcacagca

SEQ ID NO: 179233 - DNA, 120 bp, Artificial Sequence
  ENSG00000110717_17 (sequence is synthesized)
acccctcccagtgttctgtgactcgggtggctcctgtccagatcctagtttgtcctctggagcactcccaggtcctccaggccatgagctgcggccctgatgtctctactccagccacgg

SEQ ID NO: 179234 - DNA, 120 bp, Artificial Sequence
  ENSG00000110717_18 (sequence is synthesized)
actgagagtgcataggagtgtccccaaacagcagtcacgatggtcacaaccttggcttccagacagtgagtgctgtccacagacagacccggtgctgtgccatgtgtgtgactcacagcc

SEQ ID NO: 179235 - DNA, 120 bp, Artificial Sequence
  ENSG00000110717_19 (sequence is synthesized)
tctcctgtaatctccacaacccctcgaggaggtcgaggttattgtctccatctttataagcactaaaggatgagcctgccagccacaggtcccactgtgagttgtggacactacatttct

SEQ ID NO: 179236 - DNA, 120 bp, Artificial Sequence
  ENSG00000110717_20 (sequence is synthesized)
gggatgggggcatatgagagtccttgccaagcacatttgaaggttttcccagccagcccctcccccagcgggctacccaggaactgagagttaggacgtgcccttgagtttgggctgtgc

SEQ ID NO: 179237 - DNA, 120 bp, Artificial Sequence
  ENSG00000110717_21 (sequence is synthesized)
ccccacttgctgtgtagctttggggagcccctcaacctctcggaaccttgtttttctcatccatcaaatggagagaagtagatttaaggcacaggattgcacccaacagtgtaggcattc

SEQ ID NO: 179238 - DNA, 120 bp, Artificial Sequence
  ENSG00000110717_22 (sequence is synthesized)
ttggcgatgttgcaggttcggctccagaccatcggggtaaactgagtcacacagctgttttggttttccagtgcatttaaaagttagatttagaccgggcacagtggctcatgcctgtaa

SEQ ID NO: 179239 - DNA, 120 bp, Artificial Sequence
  ENSG00000110717_23 (sequence is synthesized)
tggcaggtccctgtaatctcagctacttgctaggctgaggcacgataatcacttgaaccgggaggtgggggttgcagtgagccaaaattgaaaaaaaaaaaaaaaattagggccggttgc

SEQ ID NO: 179240 - DNA, 120 bp, Artificial Sequence
  ENSG00000110717_24 (sequence is synthesized)
caagacttcgtctcaaaaaaaaaaaaaggatttacactgtactgtaggctgcgaagtgtctaaaacacaatgtatataccttaattaaaaatactttaggggccaggcacagtggctcac

SEQ ID NO: 179241 - DNA, 86 bp, Artificial Sequence
  ENSG00000110717_25 (sequence is synthesized)
acacaatgtatataccttaattaaaaatactttaagtgctttgggaggtcaaggtgaggggattacttgagcccaggagtttgaga

SEQ ID NO: 179242 - DNA, 80 bp, Artificial Sequence
  ENSG00000110717_26 (sequence is synthesized)
ctacagtgtagcctccgcctcccgattgactggcctgcttggcaaggcaagtagcggcggcgcttcaagggacggggttc

SEQ ID NO: 179243 - DNA, 120 bp, Artificial Sequence
  ENSG00000110717_27 (sequence is synthesized)
aggcgtgagccaccacacccagccctagcgagtcactcaacaaactgagtcccagcgccttatttgtgcctccctcgtggagtccttatgcgctgcctgaccacgcctatgctgctgcgg

SEQ ID NO: 179244 - DNA, 120 bp, Artificial Sequence
  ENSG00000110717_28 (sequence is synthesized)
ggaaggtgctgggttgggtccctggaactgcagtcagtgatccaaaggagtgggcctgttagggggttcacaggtcgtgggatgagctcttatgagcgccggctaagtgccgggctctgg

SEQ ID NO: 179245 - DNA, 120 bp, Artificial Sequence
  ENSG00000110717_29 (sequence is synthesized)
ctccgtgtccttcaggtgcagcggggagccggctctcagggcgcatgcgccgcccgctctgcgccaccggcctagttagggtcggagatcactgggaagatgcgctgcctgaccacgcct

SEQ ID NO: 179246 - DNA, 120 bp, Artificial Sequence
  ENSG00000110717_30 (sequence is synthesized)
aaaaaaaaaaaaaaccagcaaggcagggacgccagcagggcacgtgctgaggagacaggcgcgagcaccagaggtgcagggcggcctcttagccggagtccaggaggcctttgaggggag

SEQ ID NO: 179247 - DNA, 120 bp, Artificial Sequence
  ENSG00000110717_31 (sequence is synthesized)
agggcttctggcagaccccaggggtggggatgagcagtgacaggggccctgggggctgggatgtgacagggcagcgtggcagtgtctggtggcccctcccgcaggccatcaccatcgagg

SEQ ID NO: 179248 - DNA, 120 bp, Artificial Sequence
  ENSG00000110717_32 (sequence is synthesized)
gcgaggccatctgccccgcccagggtgagacccttagggcagcgggtgctacactgaacaaagcggtgaacagccccctcgtgagagggggttcttggcagatgacgccagcagctgaca

SEQ ID NO: 179249 - DNA, 120 bp, Artificial Sequence
  ENSG00000110719_0 (sequence is synthesized)
agtcccgggctggcgggagtgcagttctgagtcccgcccggcgtgcgcggagcggggcagccagcagcggaggcgcggcgcgcagcacacccggggaccatgggctccatgttccggagc

SEQ ID NO: 179250 - DNA, 120 bp, Artificial Sequence
  ENSG00000110719_1 (sequence is synthesized)
gaggaggtggccctggtccagctctttctgcccacagcggctgcctacacctgcgtgagtcggctgggcgagctgggcctcgtggagttcagagacctcaacgcctcggtgagcgccttc

SEQ ID NO: 179251 - DNA, 120 bp, Artificial Sequence
  ENSG00000110719_2 (sequence is synthesized)
cagagacgctttgtggttgatgttcggcgctgtgaggagctggagaagaccttcaccttcctgcaggaggaggtgcggcgggctgggctggtcctgcccccgccaaaggggaggctgccg

SEQ ID NO: 179252 - DNA, 120 bp, Artificial Sequence
  ENSG00000110719_3 (sequence is synthesized)
gcacccccaccccgggacctgctgcgcatccaggaggagacggagcgcctggcccaggagctgcgggatgtgcggggcaaccagcaggccctgcgggcccagctgcaccagctgcagctc

SEQ ID NO: 179253 - DNA, 120 bp, Artificial Sequence
  ENSG00000110719_4 (sequence is synthesized)
cacgccgccgtgctacgccagggccatgaacctcagctggcagccgcccacacagatggggcctcagagaggacgcccctgctccaggcccccggggggccgcaccaggacctgagggtc

SEQ ID NO: 179254 - DNA, 120 bp, Artificial Sequence
  ENSG00000110719_5 (sequence is synthesized)
aactttgtggcaggtgccgtggagccccacaaggcccctgccctagagcgcctgctctggagggcctgccgcggcttcctcattgccagcttcagggagctggagcagccgctggagcac

SEQ ID NO: 179255 - DNA, 120 bp, Artificial Sequence
  ENSG00000110719_6 (sequence is synthesized)
cccgtgacgggcgagccagccacgtggatgaccttcctcatctcctactggggtgagcagatcggacagaagatccgcaagatcacggactgcttccactgccacgtcttcccgtttctg

SEQ ID NO: 179256 - DNA, 120 bp, Artificial Sequence
  ENSG00000110719_7 (sequence is synthesized)
cagcaggaggaggcccgcctcggggccctgcagcagctgcaacagcagagccaggagctgcaggaggtcctcggggagacagagcggttcctgagccaggtgctaggccgggtgctgcag

SEQ ID NO: 179257 - DNA, 120 bp, Artificial Sequence
  ENSG00000110719_8 (sequence is synthesized)
ctgctgccgccagggcaggtgcaggtccacaagatgaaggccgtgtacctggccctgaaccagtgcagcgtgagcaccacgcacaagtgcctcattgccgaggcctggtgctctgtgcga

SEQ ID NO: 179258 - DNA, 120 bp, Artificial Sequence
  ENSG00000110719_9 (sequence is synthesized)
gacctgcccgccctgcaggaggccctgcgggacagctcgatggaggagggagtgagtgccgtggctcaccgcatcccctgccgggacatgccccccacactcatccgcaccaaccgcttc

SEQ ID NO: 179259 - DNA, 120 bp, Artificial Sequence
  ENSG00000110719_10 (sequence is synthesized)
acggccagcttccagggcatcgtggatgcctacggcgtgggccgctaccaggaggtcaaccccgctccctacaccatcatcaccttccccttcctgtttgctgtgatgttcggggatgtg

SEQ ID NO: 179260 - DNA, 120 bp, Artificial Sequence
  ENSG00000110719_11 (sequence is synthesized)
ccctggccatggtccttgcggagaaccgaccggctgtgaaggccgcgcagaacgagatctggcagactttcttcaggggccgctacctgctcctgcttatgggcctgttctccatctaca

SEQ ID NO: 179261 - DNA, 120 bp, Artificial Sequence
  ENSG00000110719_12 (sequence is synthesized)
ccggcttcatctacaacgagtgcttcagtcgcgccaccagcatcttcccctcgggctggagtgtggccgccatggccaaccagtctggctggagtgatgcattcctggcccagcacacga

SEQ ID NO: 179262 - DNA, 120 bp, Artificial Sequence
  ENSG00000110719_13 (sequence is synthesized)
tgcttaccctggatcccaacgtcaccggtgtcttcctgggaccctacccctttggcatcgatcctatttggagcctggctgccaaccacttgagcttcctcaactccttcaagatgaaga

SEQ ID NO: 179263 - DNA, 120 bp, Artificial Sequence
  ENSG00000110719_14 (sequence is synthesized)
tgtccgtcatcctgggcgtcgtgcacatggcctttggggtggtcctcggagtcttcaaccacgtgcactttggccagaggcaccggctgctgctggagacgctgccggagctcaccttcc

SEQ ID NO: 179264 - DNA, 120 bp, Artificial Sequence
  ENSG00000110719_15 (sequence is synthesized)
tgctgggactcttcggttacctcgtgttcctagtcatctacaagtggctgtgtgtctgggctgccagggccgcctcggcccccagcatcctcatccacttcatcaacatgttcctcttct

SEQ ID NO: 179265 - DNA, 120 bp, Artificial Sequence
  ENSG00000110719_16 (sequence is synthesized)
cccacagccccagcaacaggctgctctacccccggcaggaggtggtccaggccacgctggtggtcctggccttggccatggtgcccatcctgctgcttggcacacccctgcacctgctgc

SEQ ID NO: 179266 - DNA, 120 bp, Artificial Sequence
  ENSG00000110719_17 (sequence is synthesized)
accgccaccgccgccgcctgcggaggaggcccgctgaccgacaggaggaaaacaaggccgggttgctggacctgcctgacgcatctgtgaatggctggagctccgatgaggaaaaggcag

SEQ ID NO: 179267 - DNA, 120 bp, Artificial Sequence
  ENSG00000110719_18 (sequence is synthesized)
ggggcctggatgatgaagaggaggccgagctcgtcccctccgaggtgctcatgcaccaggccatccacaccatcgagttctgcctgggctgcgtctccaacaccgcctcctacctgcgcc

SEQ ID NO: 179268 - DNA, 120 bp, Artificial Sequence
  ENSG00000110719_19 (sequence is synthesized)
tgtgggccctgagcctggcccacgcccagctgtccgaggttctgtgggccatggtgatgcgcataggcctgggcctgggccgggaggtgggcgtggcggctgtggtgctggtccccatct

SEQ ID NO: 179269 - DNA, 120 bp, Artificial Sequence
  ENSG00000110719_20 (sequence is synthesized)
ttgccgcctttgccgtgatgaccgtggctatcctgctggtgatggagggactctcagccttcctgcacgccctgcggctgcactgggtggaattccagaacaagttctactcaggcacgg

SEQ ID NO: 179270 - DNA, 120 bp, Artificial Sequence
  ENSG00000110719_21 (sequence is synthesized)
gctacaagctgagtcccttcaccttcgctgccacagatgactagggcccactgcaggtcctgccagacctccttcctgacctctgaggcaggagaggaataaagacggtccgccctggca

SEQ ID NO: 179271 - DNA, 120 bp, Artificial Sequence
  ENSG00000110719_22 (sequence is synthesized)
ccaaccagtctggctggaggtgaggcccgggccccagcccggctgggggccccgcagcacccgcagccctgaccgccctcccctgcgttgccgcagtgatgcattcctggcccagcacac

SEQ ID NO: 179272 - DNA, 120 bp, Artificial Sequence
  ENSG00000110719_23 (sequence is synthesized)
tggcccacgcccgtgagtgacctggccaccgacggctggccccagctcctggcttctcacataccgctgctggctgggcgggttgcttctctctgggcctcagtttcccctctgtaaagt

SEQ ID NO: 179273 - DNA, 120 bp, Artificial Sequence
  ENSG00000110719_24 (sequence is synthesized)
aggaggtcaaccccgatggggaaatggaggctcagagaggtgaagtggctgggccaaggtcacacagctcctaagtgctccctacaccatcatcaccttccccttcctgtttgctgtgat

SEQ ID NO: 179274 - DNA, 120 bp, Artificial Sequence
  ENSG00000110719_25 (sequence is synthesized)
agcaacaggctgctctacccccggcaggtgggctgcggctggtgggggccgggctcacacggcctcatggggaccccgcggtcacagggccactgggagctgcaagatcctcgtccgaga

SEQ ID NO: 179275 - DNA, 120 bp, Artificial Sequence
  ENSG00000110719_26 (sequence is synthesized)
aacggggatgcaggccccgggccgtgcagacagggccgtcagaggtgatggtgtgcatctttagcaggtggcacaactggcactgggaaccgggggtcccttccctcaggagtccttatg

SEQ ID NO: 179276 - DNA, 120 bp, Artificial Sequence
  ENSG00000110719_27 (sequence is synthesized)
caggctgagctccgactccttgtccagtgctctccccaggctggccccgcctcctccttcaggcccggaacttcccacagtcccaagccctagccctagggggttctcctcttctggtcc

SEQ ID NO: 179277 - DNA, 120 bp, Artificial Sequence
  ENSG00000110719_28 (sequence is synthesized)
tgcccgggaggcctcctgccttcccctgtgggcagggccagtgtgcccaattgcccgattgcccgtgctgggcagggtcctgcccggggggcctggtgggggaggcagggcaggaggttg

SEQ ID NO: 179278 - DNA, 120 bp, Artificial Sequence
  ENSG00000110719_29 (sequence is synthesized)
gtgagtcctgggatggagtgtccgtgggtggtgaaggcagctgggagtgggggctggggctcccctcggttcagccgtcctgcagcgctgtcgctgagcactcctgtgtgccaggccctt

SEQ ID NO: 179279 - DNA, 120 bp, Artificial Sequence
  ENSG00000110719_30 (sequence is synthesized)
tcctcagcacaagaggcagacaagcctcctgccctgcggagcctgcatcacagtcccctgagtgtgcggaggcaaagcgagaccagccaggaaccagtctcctgagtgtgcagaggcaaa

SEQ ID NO: 179280 - DNA, 120 bp, Artificial Sequence
  ENSG00000110719_31 (sequence is synthesized)
gcgagactggacaggaaccagcctgcagcttgcactgtgccaagcactgttcccaaccctctgtggaagtgattttcttttttcttttttttatttttggatatagagtctcattctgtt

SEQ ID NO: 179281 - DNA, 120 bp, Artificial Sequence
  ENSG00000110719_32 (sequence is synthesized)
gctggccccccgtgcagggagggcttcaggctgcggcagggtggaattccagaacaagttctactcaggcacgggctacaagctgagtcccttcaccttcgctgccacagatgactaggg

SEQ ID NO: 179282 - DNA, 120 bp, Artificial Sequence
  ENSG00000110719_33 (sequence is synthesized)
cagccagcagcggaggcgcggcgcgcagcacacccggggaccatgggctccatgttccggagcgaggaggtggccctggtccagctctttctgcccacagcggctgcctacacctgcctc

SEQ ID NO: 179283 - DNA, 120 bp, Artificial Sequence
  ENSG00000110719_34 (sequence is synthesized)
gcagcacacccggggttgttcccccaccccctgggaagtgctggaaggagcccggccctcgagccctcggcatagtggctgtgggagccctgatggccctgagccaggggtgacccctcc

SEQ ID NO: 179284 - DNA, 80 bp, Artificial Sequence
  ENSG00000110721_0 (sequence is synthesized)
agaggagcgagtgcagcggccagcagcacatccccgctccacagtcgccgcagtcgccgcagccgccgccgccgccccgc

SEQ ID NO: 179285 - DNA, 120 bp, Artificial Sequence
  ENSG00000110721_1 (sequence is synthesized)
gtgagagagcggcgagggggcgcccggccggactctgagcctagtcctctcgcgctgcggccgcccgcgcctcctcggccgcctgtcgggcatgaaaaccaaattctgcaccgggggcga

SEQ ID NO: 179286 - DNA, 120 bp, Artificial Sequence
  ENSG00000110721_2 (sequence is synthesized)
tgaaaaccaaattctgcaccgggggcgaggcggagccctcgccgctcgggctgctgctgagctgcggtagcggcagcgcggccccggcgcccggcgtggggcagcagcgcgacgccgcca

SEQ ID NO: 179287 - DNA, 80 bp, Artificial Sequence
  ENSG00000110721_3 (sequence is synthesized)
ccgctgccccagcccccgccgccgcagccgcccgcagacgagcagccggagccccggacgcggcgcagggcctatctgtg

SEQ ID NO: 179288 - DNA, 120 bp, Artificial Sequence
  ENSG00000110721_4 (sequence is synthesized)
ggcctatctgtggtgcaaggagttcctgcccggcgcctggcggggcctccgcgaggacgagttccacatcagtgtcatcagaggcggccttagcaacatgctgttccagtgctccctacc

SEQ ID NO: 179289 - DNA, 120 bp, Artificial Sequence
  ENSG00000110721_5 (sequence is synthesized)
tgacaccacagccacccttggtgatgagcctcggaaagtgctcctgcggctgtatggagcgattttgcagatgaggtcctgtaataaagagggatccgaacaagctcagaaagaaaatga

SEQ ID NO: 179290 - DNA, 120 bp, Artificial Sequence
  ENSG00000110721_6 (sequence is synthesized)
atttcaaggggctgaggccatggttctggagagcgttatgtttgccattctcgcagagaggtcacttgggccaaaactctatggcatctttccccaaggccgactggagcagttcatccc

SEQ ID NO: 179291 - DNA, 120 bp, Artificial Sequence
  ENSG00000110721_7 (sequence is synthesized)
gagccggcgattagatactgaagaattaagtttgccagatatttctgcagaaatcgccgagaaaatggctacatttcatggtatgaaaatgccattcaataaggaaccaaaatggctttt

SEQ ID NO: 179292 - DNA, 120 bp, Artificial Sequence
  ENSG00000110721_8 (sequence is synthesized)
tggcacaatggaaaagtatctaaaggaagtgctgagaattaaatttactgaggaatccagaattaaaaagctccacaaattgctcagttacaatctgcccttggaactggaaaacctgag

SEQ ID NO: 179293 - DNA, 120 bp, Artificial Sequence
  ENSG00000110721_9 (sequence is synthesized)
atcattgcttgaatctactccatctccagttgtattttgtcataatgactgtcaagaaggtaatatcttgttgctggaaggccgagagaattctgaaaaacagaaactgatgctcattga

SEQ ID NO: 179294 - DNA, 120 bp, Artificial Sequence
  ENSG00000110721_10 (sequence is synthesized)
tttcgaatacagcagttacaattacaggggattcgacattggaaatcacttctgtgagtggatgtatgattatagctatgaaaaatacccttttttcagagcaaacatccggaagtatcc

SEQ ID NO: 179295 - DNA, 120 bp, Artificial Sequence
  ENSG00000110721_11 (sequence is synthesized)
ctgaagaaaaatccattataaaagaagaaatgttgcttgaagttaataggtttgcccttgcatctcatttcctctggggactgtggtccattgtacaagccaagatttcatctattgaat

SEQ ID NO: 179296 - DNA, 120 bp, Artificial Sequence
  ENSG00000110721_12 (sequence is synthesized)
ttgggtacatggactacgcccaagcaaggtttgatgcctatttccaccagaagaggaagcttggggtgtgactgtggggaggactccatccacctcatcactggactgcatggggaggca

SEQ ID NO: 179297 - DNA, 120 bp, Artificial Sequence
  ENSG00000110721_13 (sequence is synthesized)
gcagagcggggtcccctctgtgcttcgactactgctcctgtggcaggaggctttgggtggctcactactgaacacatgtgtatgatactaaagacggtattaaaatggagcgacgtttat

SEQ ID NO: 179298 - DNA, 120 bp, Artificial Sequence
  ENSG00000110721_14 (sequence is synthesized)
ttcatctcttgtttacgatttcactaggactcagaaacgagatcgggaagcagaaatatagtgcaatagtgcaacatctctgaatccttttaatctagagaaggcatttcatatttgggg

SEQ ID NO: 179299 - DNA, 120 bp, Artificial Sequence
  ENSG00000110721_15 (sequence is synthesized)
gctaaggtttccagtcagatgaggcaaacagcaagagtaagcagtgttacttgcaggtactttggttaatgttgatttaaattttcatgaatgtgctggtgaacactgtgaccaggcttt

SEQ ID NO: 179300 - DNA, 120 bp, Artificial Sequence
  ENSG00000110721_16 (sequence is synthesized)
tgtagatggcgatgtgttatagacggtgctcactcccaagggacagcaagtgagcagagatgtactgcaaagtcgccagtcactgctgcaaggtggcctctgcctggggcctccagaagc

SEQ ID NO: 179301 - DNA, 120 bp, Artificial Sequence
  ENSG00000110721_17 (sequence is synthesized)
tgctcctttaccctcttggtcccatggctgaagctggagcagcggattgctctggagcagccaaggccgccagcgtgtggagcagagctctcccctcctgctgggcgtgtgtgacactga

SEQ ID NO: 179302 - DNA, 120 bp, Artificial Sequence
  ENSG00000110721_18 (sequence is synthesized)
tgagtttcactgtactgcatgtgacttctcccctgcccttcctcctgatggagtgtgcagacagccatgcgtggccacgggggcagtgtgaggacctccctgtctcccggctcccctccc

SEQ ID NO: 179303 - DNA, 120 bp, Artificial Sequence
  ENSG00000110721_19 (sequence is synthesized)
aggggagccagctgcttgacctagctctttgggcctctcctgccctctgctctgcctggagtgtcggatcctgtgagtaggctgggcctcccctgggcagggttctccaagggcccggtt

SEQ ID NO: 179304 - DNA, 120 bp, Artificial Sequence
  ENSG00000110721_20 (sequence is synthesized)
tcccggcccttacctttcctgatgcccctgacatcatcattcttgtgggagacagcagcctgtatgtggtgtggggcgtggatcgagtgtagctgtgaaatccatatatatgaaatgtcc

SEQ ID NO: 179305 - DNA, 120 bp, Artificial Sequence
  ENSG00000110721_21 (sequence is synthesized)
tgcgggatacagtcttagctgacttttttttactctgaactcttatttgaattgttttttgtgcatatatttctgctaccacagagattgtactatacaaataaaaaaataaaaacccaa

SEQ ID NO: 179306 - DNA, 120 bp, Artificial Sequence
  ENSG00000110721_22 (sequence is synthesized)
gacagtgtggctcagcccaggaagccgggggagaagccgctgtcactgatgctgtggttgcctttggaggttgccctcacttccaggccagctgaccttgcctcccctgcttcagagaag

SEQ ID NO: 179307 - DNA, 120 bp, Artificial Sequence
  ENSG00000110721_23 (sequence is synthesized)
tgcctgcaatcctgatggggaatgtaggcatctgcaccctcgaagtccagctctgacctcagtcccttctgacacgggacagtaagtgaagaagagtgggtggctcctgcctgtgctgtg

SEQ ID NO: 179308 - DNA, 120 bp, Artificial Sequence
  ENSG00000110721_24 (sequence is synthesized)
gcttgtccatgcgatcgtgcctggagcactctggtttccaggtgacagacacgattcacggtatttttgataaagctgtggaatggaaagaggtcctgtaataaagagggatccgaacaa

SEQ ID NO: 179309 - DNA, 120 bp, Artificial Sequence
  ENSG00000110721_25 (sequence is synthesized)
actcagcctgaccgcttgtctttagaaggcctgattggaagagtgcactctattgactttcctctaacaatgaaattgtgaaaggtacatggggcggctgtgagacgtgcagctatcggg

SEQ ID NO: 179310 - DNA, 120 bp, Artificial Sequence
  ENSG00000110721_26 (sequence is synthesized)
tctcaccggcacatcccttttctcgtaaagcaatgaagcactttctaaggtgttggtactagtgctggaggctgctggtgcattagatgctgcccgtcacatcggtgggctgagaaacct

SEQ ID NO: 179311 - DNA, 120 bp, Artificial Sequence
  ENSG00000110721_27 (sequence is synthesized)
tccttaaagacctgtgatgttttgtaaaccctgactgttctggtggttgcaaagttagtgtctgtttagtgttccccatctcaccagaagtgtttcctttttctcattcatagaggtcct

SEQ ID NO: 179312 - DNA, 120 bp, Artificial Sequence
  ENSG00000110721_28 (sequence is synthesized)
attaatatatgaaataattttagagactttattaaatacacacagtcctctttatggtagaggaacagttcagcttgagctggtgaccggctgaactagaggggttactctgggaaagtg

SEQ ID NO: 179313 - DNA, 120 bp, Artificial Sequence
  ENSG00000110721_29 (sequence is synthesized)
gcgagtcggcagggcatgtctgcacagattttgtgccaggtttcctgcctgcacagcgctttcttctctgtccaagttctgtgctgaccacagctgtccacaggcatgtttacactccct

SEQ ID NO: 179314 - DNA, 120 bp, Artificial Sequence
  ENSG00000110723_0 (sequence is synthesized)
cactttgcatctcggttggacaggttgagagaaacatgtcattaaggtattgtcaatatgagcccttcaggtgtgggcgttccctaggtttgtggttttagactttcaaaggggcggact

SEQ ID NO: 179315 - DNA, 120 bp, Artificial Sequence
  ENSG00000110723_1 (sequence is synthesized)
tattattggctgtgggatcaagttcgtgaaactggtcttgtacaggttgaaaaatgccttcctaacaggaggcgccaaggagcttaagtgtaactcacacacagtaaagaaaatgacgaa

SEQ ID NO: 179316 - DNA, 120 bp, Artificial Sequence
  ENSG00000110723_2 (sequence is synthesized)
agttcctccggcgtttgatttcagtttcttaaatgacgaagaggccaggaagatccttcaggtgctggaaaggaatgaggagttacagagggccgagaaggacaggatcagcaaacttca

SEQ ID NO: 179317 - DNA, 120 bp, Artificial Sequence
  ENSG00000110723_3 (sequence is synthesized)
gaagacaaagagggatatcagatggcttcagggagtgactggtgaatggtttgaagaaattcaaagaaaaaagttttgcaatgaaacagatgttagccaaatgttaaaacaaccacttac

SEQ ID NO: 179318 - DNA, 120 bp, Artificial Sequence
  ENSG00000110723_4 (sequence is synthesized)
atacaggctaagtaaggagatggcaaaaaatgatccgatagaattacctacatcaagatctaaaaatgtaactaatcaaaaaaagccgacacctttttcttcccggatgagcttcagatc

SEQ ID NO: 179319 - DNA, 120 bp, Artificial Sequence
  ENSG00000110723_5 (sequence is synthesized)
gtcatttgcttccctgttctcattcaggaaatctggaaaggagacttcaaagcttccatcactgggacagaaaggatgtgatggccatgcaggacctcctatgcctgtgaggggagctgc

SEQ ID NO: 179320 - DNA, 120 bp, Artificial Sequence
  ENSG00000110723_6 (sequence is synthesized)
tgtgcaggcaaaaatatacaattcacctctggaaaatcatctagttgacagtacatttgtcccaaagccagcagtcatgagggaggagagtggcatgcctccaccgtgggatgcttcact

SEQ ID NO: 179321 - DNA, 120 bp, Artificial Sequence
  ENSG00000110723_7 (sequence is synthesized)
gctggagaatgagtttttccaagttttagatgacttggatagcaaattggctcaggaacagtctgcaagctcagtgaataccagaacacccctcaactatggatcaagaacacagttcgg

SEQ ID NO: 179322 - DNA, 120 bp, Artificial Sequence
  ENSG00000110723_8 (sequence is synthesized)
tcacttttattccagtggtaacagacatggtaatatcacagaaaggcacaaaaaacactataatgaaacttccaatatgtctatctatgacatcctaagaccaggaactcctagggaagg

SEQ ID NO: 179323 - DNA, 120 bp, Artificial Sequence
  ENSG00000110723_9 (sequence is synthesized)
ttttaaaaccttttctcctaggacaagcacaatttatgatatgtataggacaagggagcccagagtctttaaagaagattatgtgcaaaagaatacttttggcagtacttcgctgtgttt

SEQ ID NO: 179324 - DNA, 120 bp, Artificial Sequence
  ENSG00000110723_10 (sequence is synthesized)
tgacagcaggcaacggtcggccttaccagccacagggcatttcacagcaagaagcttacattttccagccacaactcagagcaagagtgggtttataccaccaaggcaccagcagagtcc

SEQ ID NO: 179325 - DNA, 120 bp, Artificial Sequence
  ENSG00000110723_11 (sequence is synthesized)
aaagagaactcctttatcatccatcatatggaacagatcagattcctctagagacagggagaaccaggaagagttcctgagggcaccatcaccaatggaaattgatcccgctgacaagta

SEQ ID NO: 179326 - DNA, 120 bp, Artificial Sequence
  ENSG00000110723_12 (sequence is synthesized)
tgtgtatcccaggggttttcaggagaataagagatatgaatcgtaccattcacagaatgtttaccaacgtgttagtttaaatgctcccatggagaatgcaatgagtcccgacacttttga

SEQ ID NO: 179327 - DNA, 120 bp, Artificial Sequence
  ENSG00000110723_13 (sequence is synthesized)
gaactcagagaacatgccattctaccatcaaagcaacacatttaccagatctttcttcagcaatacctttggacgaagcggagaacagaggagatttggacaaggtcctttttggggcca

SEQ ID NO: 179328 - DNA, 120 bp, Artificial Sequence
  ENSG00000110723_14 (sequence is synthesized)
agagaaaggacattctttctggtctgactttcatcgaagcaggaaatcattcagttcttctgacagagactttgaaatgatttccatggaagcaaatagtgtatcagccattcatggcca

SEQ ID NO: 179329 - DNA, 120 bp, Artificial Sequence
  ENSG00000110723_15 (sequence is synthesized)
taatgtttcttctgaacactgggaatcattttcttctggttatggaacagatgtttccagaggccaagaagagccacatccttggcagtttgattttcagagatccacactggatagcat

SEQ ID NO: 179330 - DNA, 120 bp, Artificial Sequence
  ENSG00000110723_16 (sequence is synthesized)
ggtggtatcacatggtaatgagacccagttgactcctcattttggcacaccaaatgtttgctccatgactggttcaagctatcacgtcaaatctagtgagttggtaagtcaacaggacag

SEQ ID NO: 179331 - DNA, 120 bp, Artificial Sequence
  ENSG00000110723_17 (sequence is synthesized)
ttctcctgtagaagtacatataaacaaagaagcttcctcatttggaattgctcagactctagcatcctcattcaaaacttccttttcccagatttctgatgacagaaggaatcctcagag

SEQ ID NO: 179332 - DNA, 120 bp, Artificial Sequence
  ENSG00000110723_18 (sequence is synthesized)
tcccaacttgcagaatcccacagtcactttgcagaaaatttttccaaataagcctgcctctcatccaatgagaagccatacagaagtcactgtgaccagcagcaattcagttgactctct

SEQ ID NO: 179333 - DNA, 120 bp, Artificial Sequence
  ENSG00000110723_19 (sequence is synthesized)
gcctcttgccaaaagccagcccaatatcttggtcacagaagtaaataatgagaaagacttaaatgaatctatttcagaagaagacaaacagctaagcaagatggaccagacaaacaaggc

SEQ ID NO: 179334 - DNA, 120 bp, Artificial Sequence
  ENSG00000110723_20 (sequence is synthesized)
aggtgaaataccccaacctgtttcacagacagggatctcaaactctttacctgattttcaaaatcccttatcccaggactcagccaagagcaacgggtttggttttaatgcatctaccat

SEQ ID NO: 179335 - DNA, 120 bp, Artificial Sequence
  ENSG00000110723_21 (sequence is synthesized)
aataagttcaaaaaagtcacccagagtcttttccaggaaagatacctccaaaatgtatataccgcacacagataaatccaatgacattaaacaagataagaggtttactgaaaacagaaa

SEQ ID NO: 179336 - DNA, 120 bp, Artificial Sequence
  ENSG00000110723_22 (sequence is synthesized)
acttggctcaacagcttcccttcctttcattcaggaacacagaacaccaccatctttccccaggacagaccaaggttgtcaccaggaattaactgtaaataatgaagatatttcaagaat

SEQ ID NO: 179337 - DNA, 120 bp, Artificial Sequence
  ENSG00000110723_23 (sequence is synthesized)
tattacaaataaccactggagctctgcactgactgatactcaaaatgcacaatactcaaaatgcaagttaactcctggccacaagacctcgtgtgattctttagatctgtcatcagctgc

SEQ ID NO: 179338 - DNA, 120 bp, Artificial Sequence
  ENSG00000110723_24 (sequence is synthesized)
actaccagattcctcaccatcaaagaattcttcccttgatgctcctgtggttccatctactacagtgttctccaggagaagtccttcagacaaagatccatcgctaggagaaagagaaga

SEQ ID NO: 179339 - DNA, 120 bp, Artificial Sequence
  ENSG00000110723_25 (sequence is synthesized)
aaaagacaatgctgggaagaaccaaaagaatcagtttattgtaagccactcagaaaaccaagagagaaatgatagtcctgtgcctacacatgatgaagtggttgatgtcaaatgccattc

SEQ ID NO: 179340 - DNA, 120 bp, Artificial Sequence
  ENSG00000110723_26 (sequence is synthesized)
acactctccttttaggaatgaaagaggaaaaggaaaaataaggcatcatatatcctgtattgaaaagttaagcaaaacagaaagtatatcagtacccaccagtgatcacaggagcctcat

SEQ ID NO: 179341 - DNA, 120 bp, Artificial Sequence
  ENSG00000110723_27 (sequence is synthesized)
tgaagcaaatcaaagcaattccaaagtttctgaacttgacacaatttattgtaccttgccaagaaaatcaagcagttttctcatacatggcaggcagtcaggaagtaaaataatggctgc

SEQ ID NO: 179342 - DNA, 120 bp, Artificial Sequence
  ENSG00000110723_28 (sequence is synthesized)
ttcattgaggaatgggccacctcccttccaaatcaaaaataatgtggaagatgcaatggggaactatatgttaaacaaatttagtcccagttctcctgagtcagcgaatgaatgttccaa

SEQ ID NO: 179343 - DNA, 120 bp, Artificial Sequence
  ENSG00000110723_29 (sequence is synthesized)
agtcctttcagactcagccctggaagcacctgaagccacagagagaatgacaaatgtaaaaagcagtggatctacttccgttagaaaaggaccacttccattcctcatcaacagggctat

SEQ ID NO: 179344 - DNA, 120 bp, Artificial Sequence
  ENSG00000110723_30 (sequence is synthesized)
gtcatgtccctcaggggagccacatgcctcaactggaagagaaggaagaaaaaagccattgacctcaggcatggatgcttctgagctaacaccaagggcttgggagagaatcattagccc

SEQ ID NO: 179345 - DNA, 120 bp, Artificial Sequence
  ENSG00000110723_31 (sequence is synthesized)
tgtggaaagtgactcatctgttagagattgttctttaaccaaaagacaacaccaaaaggaaaacttccaagaatacactgagaaagagggtaaaatggctgcctccaggagaagtgtatt

SEQ ID NO: 179346 - DNA, 120 bp, Artificial Sequence
  ENSG00000110723_32 (sequence is synthesized)
tgctctttcaaatgaagaccctttacctttttgctcagacttgtcaggaaaagaacgtgggaaaacattacataaagttaagacgactagtacgttttctgtttctggtgatgaagataa

SEQ ID NO: 179347 - DNA, 120 bp, Artificial Sequence
  ENSG00000110723_33 (sequence is synthesized)
tgtaaaatgtctggaggtggtctcaatatattacactctaccgaggaaacccagcaaaaaattctgtaacctccttcaacagtatacacaaaatactaatttacttatagaatcacctca

SEQ ID NO: 179348 - DNA, 120 bp, Artificial Sequence
  ENSG00000110723_34 (sequence is synthesized)
agtggagactgaaacatttcctaacgctttagaaaaagacaaacagaattattctacacgagagcagtcaggaacaccttcatgtgaaaatctaaagatgtccgtcaactctgatcagac

SEQ ID NO: 179349 - DNA, 120 bp, Artificial Sequence
  ENSG00000110723_35 (sequence is synthesized)
gctcaccactgaaaatatgactgccttccgattatcaaatagggggcccctagctcctacattacaggaaatggcttctgttgaggcagctgtttctcttcctgaagaggaatctaaagc

SEQ ID NO: 179350 - DNA, 120 bp, Artificial Sequence
  ENSG00000110723_36 (sequence is synthesized)
tagagagattttttcagataatttagctaaaacacctctaggtgattcagaaaacaagaaggaaagaggcaaaaagttgcaaagtgaaaccctgcatacttcattgatgcttcagagaaa

SEQ ID NO: 179351 - DNA, 120 bp, Artificial Sequence
  ENSG00000110723_37 (sequence is synthesized)
aaatgtatccgaagaaaaatctgaaaattgtcaacaatccattaattcaagtaacagtggtccctctagtcttccagctctttcagaagttaatattggaaattcccaaactagaagaag

SEQ ID NO: 179352 - DNA, 120 bp, Artificial Sequence
  ENSG00000110723_38 (sequence is synthesized)
ttcttgggagtgtacagggagtggtagagccattccatttactggaagtggcaagtgtccccagaaagatcacacatccacagctgtaggtgatggctccagtggatcacagcctaggga

SEQ ID NO: 179353 - DNA, 120 bp, Artificial Sequence
  ENSG00000110723_39 (sequence is synthesized)
aggcagaggggacattggaaccaactgccaaaaaatgactaataaaacactttctcactcagagagtcaagtctttgcccttactccagcattgcataaactacagcttggtgaggagac

SEQ ID NO: 179354 - DNA, 120 bp, Artificial Sequence
  ENSG00000110723_40 (sequence is synthesized)
tcagtcagatgaaccaaacttagagagtctgcagtctgaaccaagagaattacctcaaagaagtcaggaggcaaatatgacagagagcaggaaggctgaagatgaaatgcagaagtcagc

SEQ ID NO: 179355 - DNA, 120 bp, Artificial Sequence
  ENSG00000110723_41 (sequence is synthesized)
ttgggatcaaccttcacttcctgaaggaaacaaaaataaaaccaacttggatgacctagtaaagggggaaaatagatcttcagttaaacacagattggcagccatgtctaaagccagcag

SEQ ID NO: 179356 - DNA, 120 bp, Artificial Sequence
  ENSG00000110723_42 (sequence is synthesized)
agtgcaacccactgttccctgagcctactccaaaatctgcagagtccattggcgaaagcaggttgagtgagaacggaaagcatgtgaagaaatccgagaaccttctccccattactgtac

SEQ ID NO: 179357 - DNA, 120 bp, Artificial Sequence
  ENSG00000110723_43 (sequence is synthesized)
tacccaacagagaaccttctacacacgtcagcaaccagaagtctaacagcatttcacaacgacatcagaatgagtttaaaaacgtctcagaatcaccatcaaagcatgagaattctaaag

SEQ ID NO: 179358 - DNA, 120 bp, Artificial Sequence
  ENSG00000110723_44 (sequence is synthesized)
acgtcacagcagctcagaatttagtaagagaatcaggagccccatcacccatcacattcaccagcctcagggaagcagaattctctgacaatcagaggaggctgagccctccttttccac

SEQ ID NO: 179359 - DNA, 120 bp, Artificial Sequence
  ENSG00000110723_45 (sequence is synthesized)
tggagcctgcacagaaatctagagtaagcagtccactggccagttttctgcagcaacaaaggagtgcttcatctctggagtgggaacctgagccacacctctatcgttcaaagagtttaa

SEQ ID NO: 179360 - DNA, 120 bp, Artificial Sequence
  ENSG00000110723_46 (sequence is synthesized)
aaagcattaatgttcatggcgatctactacgaaaaagccatcctccaaaagtcagggagcgccatttttctgaaagcacttctattgacaatgccctgagtcgactgacccttgggaatg

SEQ ID NO: 179361 - DNA, 120 bp, Artificial Sequence
  ENSG00000110723_47 (sequence is synthesized)
aattctctgtcaacaatgggtacagtcgaagattcagatctttttctgaactcccctcctgtgatggaaatgaaagttgggcttatcgcagcgggacaaaaacaggtcccaggtctgcaa

SEQ ID NO: 179362 - DNA, 120 bp, Artificial Sequence
  ENSG00000110723_48 (sequence is synthesized)
tatctatatacagacctatcgactatgggatctttgggaaagaacaacagttagctttcttagaaaatgtaaagaggtcacttacacaaggaagattatggaaaccaagttttcttaaga

SEQ ID NO: 179363 - DNA, 120 bp, Artificial Sequence
  ENSG00000110723_49 (sequence is synthesized)
accctggcttcctaaaagatgatttgaggaaccctcccaacccctcagagtcattaagctcaaattctcccagtagtcaggtgccagaagatggcttatctccaagtgaaccgcttaata

SEQ ID NO: 179364 - DNA, 120 bp, Artificial Sequence
  ENSG00000110723_50 (sequence is synthesized)
tctatgaggatgacccagtggactcagattgtgacacagacacaaccacagatgatgaatactacctggatgaaaatgacaaagagtcagaactgtgaggctttttcaataaaatgcttt

SEQ ID NO: 179365 - DNA, 120 bp, Artificial Sequence
  ENSG00000110723_51 (sequence is synthesized)
acttttttcaccaaaagcttataatggaactaaggtgtacatgtgcatgtgcatggaaggataaaagatctagtctgggcagtgtctgctctgaaatgtcccacatctccttttttttcc

SEQ ID NO: 179366 - DNA, 120 bp, Artificial Sequence
  ENSG00000110723_52 (sequence is synthesized)
tccacaccctatatagacacttcctgaatgctagaacaatgaattcttgttttgagagagtctctgctattttctatctctgtaaatgttcttagcctgcctttccaccactcccactta

SEQ ID NO: 179367 - DNA, 120 bp, Artificial Sequence
  ENSG00000110723_53 (sequence is synthesized)
atccctgattcactgtctgatttgggctttctgctttacttccctcctaacatttttcatctttaattgtgatttacaaccctaatatcccaggcacatacaaaacttatgaattaccca

SEQ ID NO: 179368 - DNA, 120 bp, Artificial Sequence
  ENSG00000110723_54 (sequence is synthesized)
gcacaactgtgaaactctgtattgcttcttccggtccacaccctatactcatgacattaaataaaaggtagggatgataacagtggggtaaatattatcatcctgtttgactcatgaaca

SEQ ID NO: 179369 - DNA, 120 bp, Artificial Sequence
  ENSG00000110723_55 (sequence is synthesized)
tttaggaagtttaaggtggtgatcttctctttcaaacaaagataaaggaatttattttttaacctgagaaactgattgcaaaaaggaaaaaaaaaagataaaggaattttgtaagtactt

SEQ ID NO: 179370 - DNA, 120 bp, Artificial Sequence
  ENSG00000110723_56 (sequence is synthesized)
cctgttatatccgtagtggagcctgggaggcacatggtcaaagcacatgttgaggttatagattaggacctgaatccctagtaagccaatagaaggttagcagtcctagaaattcctctg

SEQ ID NO: 179371 - DNA, 120 bp, Artificial Sequence
  ENSG00000110723_57 (sequence is synthesized)
aaaccgtgggggactggctggattattaagggcttttagtcaagccaaggacttaggccaggcaacctgaccatacagaaagttgcctggtcacagaatttctgcttatgaagagaacat

SEQ ID NO: 179372 - DNA, 120 bp, Artificial Sequence
  ENSG00000110723_58 (sequence is synthesized)
agctgaggagcagaggtaggaagtaggtatcccttcatgggaccgacttacctttactgcagttctctcagcaactggcttttcccatttcctcagaactatccattttcacattttctt

SEQ ID NO: 179373 - DNA, 61 bp, Artificial Sequence
  ENSG00000110723_59 (sequence is synthesized)
gcacccaggcgcacgctgccacgcccagctaatatttttgtattttagtagagacggggtt

SEQ ID NO: 179374 - DNA, 89 bp, Artificial Sequence
  ENSG00000110723_60 (sequence is synthesized)
ttttgtttttgttttgaggtggagtcttgttcttgttgcttactgcaacctcctcctcccaagttcaggcaattctcctgcctcagcct

SEQ ID NO: 179375 - DNA, 77 bp, Artificial Sequence
  ENSG00000110723_61 (sequence is synthesized)
ttttctttaattgcaaggtagaacgcttcttttcaggtggggcattttagtcccaaatatcaagtgggaaccttggc

SEQ ID NO: 179376 - DNA, 120 bp, Artificial Sequence
  ENSG00000110723_62 (sequence is synthesized)
tggggcattttagtcccaaatatcaagtgggaaccttggccaagtccctaaaatgccatcaagtcagatctgacaccctggaattcattctttgctgcaggatcatctacgaaacccttg

SEQ ID NO: 179377 - DNA, 120 bp, Artificial Sequence
  ENSG00000110723_63 (sequence is synthesized)
ggaaattctaaggcagagctcctaagggcttgtcactatgattcagtgatttatctagagtaaatcacttatgatacccactgatattttggctttcctaactctttatttgccatgcag

SEQ ID NO: 179378 - DNA, 120 bp, Artificial Sequence
  ENSG00000110723_64 (sequence is synthesized)
aacctcgggggatttctctcctaattcaggataaagaccaatagatggcagtgaagataatctgctttaactacagacagcatggattcctggatctcaatactatgatagtcaacatga

SEQ ID NO: 179379 - DNA, 120 bp, Artificial Sequence
  ENSG00000110723_65 (sequence is synthesized)
gtggattttatcttgcttggtttatatttgcttcgcgacctaatctaattttccattttttatacctagtctgtttcatcattataaactaagaataatgatagatgttggtgaagtgta

SEQ ID NO: 179380 - DNA, 120 bp, Artificial Sequence
  ENSG00000110723_66 (sequence is synthesized)
tagagatctggaactgatagagagttaagaaagaactatgttgttgttatccttctaatcattcccttacatagacgcaaaatgcgtgggttactttacatggttcccatgcaactcaaa

SEQ ID NO: 179381 - DNA, 120 bp, Artificial Sequence
  ENSG00000110723_67 (sequence is synthesized)
gctaatgaacatgcggtaactaacatgaaagctattccctaaatctgtcaactattttaaacttcaagctctgaccaatcctgagctcagaaagctcaaaaatcaaatattgtgaacttt

SEQ ID NO: 179382 - DNA, 120 bp, Artificial Sequence
  ENSG00000110723_68 (sequence is synthesized)
tgaacttttcaatgcaaatttgtatggtaaagaataaataacactatttcttggttaatatatgtttgtaaattctgcctttcctctttttctatttatctgattattattattattatt

SEQ ID NO: 179383 - DNA, 120 bp, Artificial Sequence
  ENSG00000110723_69 (sequence is synthesized)
ctgggattataggcatgagccacctcgccagccctatttatctgattatttaagtaaaactttaataaaccatgacctacattttctatgcaattttaagatactcagagttaatatttt

SEQ ID NO: 179384 - DNA, 120 bp, Artificial Sequence
  ENSG00000110723_70 (sequence is synthesized)
agttaatattttaatattgaggttcttgatttttttaatgatcagctttcaaattatatttcagtatatactctgagtctacgtgtatgctacaaaaggtgaaatgaagttagcttattt

SEQ ID NO: 179385 - DNA, 120 bp, Artificial Sequence
  ENSG00000110723_71 (sequence is synthesized)
ttcagtgagtttaggctatattaagagttaggtaagttaggtaagggtgaaactgctttggggcccagactgcgctggaatgtactgtttaaattcaaaggtaattgatggccagtgttc

SEQ ID NO: 179386 - DNA, 120 bp, Artificial Sequence
  ENSG00000110723_72 (sequence is synthesized)
agttgctctatttgtaacgtttgcatgttggtctggctgaagtatcaggaaaacacaaaattcatgaaaatagcaccttttataattttatacttttataaagcacttgttaaagaagta

SEQ ID NO: 179387 - DNA, 120 bp, Artificial Sequence
  ENSG00000110723_73 (sequence is synthesized)
tagcaaatttctatgtattttaacatacaagtcgctgcattttaatgttcatttttggtatagctatggtaacttataatagtcatttttatattcataacttgttttctgaaagatata

SEQ ID NO: 179388 - DNA, 120 bp, Artificial Sequence
  ENSG00000110723_74 (sequence is synthesized)
ataaacattcatgtaaatggagtaaatcataggggaatcaatcgtaataaataccttataaattataaacttgtttagatactagatttctataaccataaattttatactgtaaagtct

SEQ ID NO: 179389 - DNA, 120 bp, Artificial Sequence
  ENSG00000110723_75 (sequence is synthesized)
actgtaaagtctgtttaaaatagggtttaatgaagttattttaatttttagagactcccctctaaataatttactcctacattgtaaatacattgatgccaacaaaattccaactgctac

SEQ ID NO: 179390 - DNA, 120 bp, Artificial Sequence
  ENSG00000110723_76 (sequence is synthesized)
taacaaaggtttggttggtgataagctaataacagctactttgtgtaggaggtaaatatgtgtactggagggggtaaaaatccatttaggttatggcaaagatgggaatcaaactgtaaa

SEQ ID NO: 179391 - DNA, 120 bp, Artificial Sequence
  ENSG00000110723_77 (sequence is synthesized)
actcatagccccataaaattaatattctttgttaagtgccagagggtttaagagaacttcttgcttagagtttattgataataataatgcttcagaatatcccatttaaatgtacagtgt

SEQ ID NO: 179392 - DNA, 120 bp, Artificial Sequence
  ENSG00000110723_78 (sequence is synthesized)
aaatatgtaaaatattttacttcccaggcaagtttgtggctgtattgccacttagtggctctttgtgactggcagttctgtatatctgaaacaaataagctgtaagcacttttgttaaaa

SEQ ID NO: 179393 - DNA, 120 bp, Artificial Sequence
  ENSG00000110723_79 (sequence is synthesized)
ctttgtcaaataatccttttatgtacttgttctcagacctgttctctggttatgaaatgtgttaaagacaaggtgcaaatttaaaacaatgcctgtattgaaataaatgacttaaacaga

SEQ ID NO: 179394 - DNA, 120 bp, Artificial Sequence
  ENSG00000110723_80 (sequence is synthesized)
agtaacaagctggctttcaccggcaccctcccctttggtacggggtcagcagaagggtgttttgtcttcagcgagtcggaaaccccctgtcttcagtgtattctgcccaccaggataggg

SEQ ID NO: 179395 - DNA, 120 bp, Artificial Sequence
  ENSG00000110723_81 (sequence is synthesized)
cactgtcgctgagaaacaagaggcagcaagcagctggtgggttgtgtgatgaggctgctggatttaacagaccactgtcctcccctcttgggtgaatggagggtttttcacttccagctt

SEQ ID NO: 179396 - DNA, 120 bp, Artificial Sequence
  ENSG00000110723_82 (sequence is synthesized)
tcacccgaggctgtttttgtctgatgaaagaaagagcagaccacaatgtagatttatgtgactgtagctaccagagtcactagcaaggaaatactcttcaaatagatgtgatggccatgc

SEQ ID NO: 179397 - DNA, 120 bp, Artificial Sequence
  ENSG00000110723_83 (sequence is synthesized)
gataaagctactggtgcagccactgaaccacagggctttctcttccttcactctgcctctttctgattgggaacacacaacagttgttttaaagctttccctggagggtgagtgataaga

SEQ ID NO: 179398 - DNA, 120 bp, Artificial Sequence
  ENSG00000110756_0 (sequence is synthesized)
cgcgaggggagactgaagttcacgttccgctcttagtgcgcggtgagttccccggcgctaagccgggagacaagatccgatctactgagagctgcgaggtactgccctggatgtggtgga

SEQ ID NO: 179399 - DNA, 120 bp, Artificial Sequence
  ENSG00000110756_1 (sequence is synthesized)
gctgggctgggacctccgggctgctggtctgtgagcctggctttgaaaattggttactgggtctcctctcaagaaatctcaagatattaaagttactgctgttaaaaaggtgaggaatac

SEQ ID NO: 179400 - DNA, 120 bp, Artificial Sequence
  ENSG00000110756_2 (sequence is synthesized)
tgtatctatcattcaacaagtttcagctttctggctaaatggcttttgtgccagtgataccagagtcctacagccatgttcttgcagagtttgaatctctggatccattactctcagccc

SEQ ID NO: 179401 - DNA, 120 bp, Artificial Sequence
  ENSG00000110756_3 (sequence is synthesized)
tgcggctggactccagtcgtctaaagtgcacgagcatagctgtgtctcggaaatggttggctttgggcagttcaggaggaggactccatctcattcagaaagaaggctggaagcacaggc

SEQ ID NO: 179402 - DNA, 120 bp, Artificial Sequence
  ENSG00000110756_4 (sequence is synthesized)
tttttctttcacacagggaaggtgcaatttctcaagtcgcctgttgtttacatgatgatgattatgttgctgtagctaccagtcaaggtcttgtggttgtttgggaattaaatcaagagc

SEQ ID NO: 179403 - DNA, 120 bp, Artificial Sequence
  ENSG00000110756_5 (sequence is synthesized)
gtcgtgggaaaccggaacaaatgtatgtgtcttcagaacacaaaggccgaagagtcacagctctctgctgggatacagctattcttagagtttttgtaggtgatcatgctgggaaggttt

SEQ ID NO: 179404 - DNA, 120 bp, Artificial Sequence
  ENSG00000110756_6 (sequence is synthesized)
ctgctatcaaactcaatacttctaaacaagcaaaggcagctgctgcttttgtgatgtttcctgttcagacaatcacaactgttgactcctgtgttgtacagttagattatttggatggaa

SEQ ID NO: 179405 - DNA, 120 bp, Artificial Sequence
  ENSG00000110756_7 (sequence is synthesized)
ggctacttatatcttcacttactcgatccttcttgtgtgacactgagagagaaaagttttggaaaattggaaacaaggaaagagatggagaatatggagcttgtttctttcctggaagat

SEQ ID NO: 179406 - DNA, 120 bp, Artificial Sequence
  ENSG00000110756_8 (sequence is synthesized)
gttctgggggccagcaacctctgatatattgtgctcgcccaggctctaggatgtgggaagtgaactttgatggagaagttataagtacacatcagttcaagaaactcctctcgttgccac

SEQ ID NO: 179407 - DNA, 120 bp, Artificial Sequence
  ENSG00000110756_9 (sequence is synthesized)
ctctccctgtgattactctcagatcagaacctcagtatgatcatacagctggatcctcccagtctttgtctttccccaaactcttacatcttagtgagcattgtgtgctgacttggacag

SEQ ID NO: 179408 - DNA, 120 bp, Artificial Sequence
  ENSG00000110756_10 (sequence is synthesized)
aaagaggaatttatattttcattcctcagaatgttcaagttcttctttggagtgaagtcaaagatattcaggatgtggctgtctgtaggaatgaattgttctgtttgcacctaaatggga

SEQ ID NO: 179409 - DNA, 120 bp, Artificial Sequence
  ENSG00000110756_11 (sequence is synthesized)
aagtctcacatctctccctgatatctgtggagcgctgtgtggaacgcctgctaagaagaggcctatggaacttggctgctcgtacatgctgtcttttccaaaattctgtcattgccagca

SEQ ID NO: 179410 - DNA, 120 bp, Artificial Sequence
  ENSG00000110756_12 (sequence is synthesized)
gagcaagaaaaactttgactgcagataaattggagcatttgaaatctcagctggaccatggcacctacaatgatctaatttctcaactggaagaattgatcttaaaatttgaacctttgg

SEQ ID NO: 179411 - DNA, 120 bp, Artificial Sequence
  ENSG00000110756_13 (sequence is synthesized)
attcagcttgtagcagtagaagaagctccatttcatcacatgaaagtttcagcatcttggactctggtatttatcgtatcattagtagtagaagaggcagtcagtcagatgaagactctt

SEQ ID NO: 179412 - DNA, 120 bp, Artificial Sequence
  ENSG00000110756_14 (sequence is synthesized)
gctcccttcacagccaaaccctctcagaagatgagagatttaaagaattcacctcacagcaggaagaggacctgccagatcagtgttgtggctcacacggaaatgaagacaatgtttctc

SEQ ID NO: 179413 - DNA, 120 bp, Artificial Sequence
  ENSG00000110756_15 (sequence is synthesized)
atgctccagtgatgtttgagacagataagaatgaaacttttctcccgttcggcattccattaccatttcgttctccatctcctcttgtgtctcttcaggctgtcaaagaaagtgtttcta

SEQ ID NO: 179414 - DNA, 120 bp, Artificial Sequence
  ENSG00000110756_16 (sequence is synthesized)
gctttgtgcgtaaaactactgagaagattggcacccttcacacgagccctgatctgaaagtgagaccagagctcaggggtgatgagcaatcatgtgaagaggatgtgagttcagatacct

SEQ ID NO: 179415 - DNA, 120 bp, Artificial Sequence
  ENSG00000110756_17 (sequence is synthesized)
gcccaaaggaggaagacactgaggaggaaaaagaggtaactagtccacctccagaagaagacaggttccaggagcttaaagtagcaacagcagaagcaatgaccaagctacaggaccctc

SEQ ID NO: 179416 - DNA, 120 bp, Artificial Sequence
  ENSG00000110756_18 (sequence is synthesized)
cacatttagaaaaaacatttgccatgaaggacttttcaggtgtttcagatactgacaactcatccatgaaattgaaccaggatgtgctattagttaatgaatcaaaaaagggaatattag

SEQ ID NO: 179417 - DNA, 120 bp, Artificial Sequence
  ENSG00000110756_19 (sequence is synthesized)
atgaagataatgaaaaagaaaaaagggactctttaggcaatgaagaatctgttgataaaacagcatgtgaatgtgtaaggagtccaagggagtctttggatgacctgtttcaaatatgtt

SEQ ID NO: 179418 - DNA, 120 bp, Artificial Sequence
  ENSG00000110756_20 (sequence is synthesized)
ctccatgcgccattgcaagtggtcttcggaacgacctggctgaattgacaacattatgtttggagttgaatgtattgaattctaagatcaaaagcaccagtggacatgtggaccacactt

SEQ ID NO: 179419 - DNA, 120 bp, Artificial Sequence
  ENSG00000110756_21 (sequence is synthesized)
tgcaacagtactctcctgaaattctggcttgccagttcctgaagaagtacttttttctcctgaacttgaaaagagcgaaggagagtatcaagcttagttacagtaatagcccttctgttt

SEQ ID NO: 179420 - DNA, 120 bp, Artificial Sequence
  ENSG00000110756_22 (sequence is synthesized)
gggatacttttattgaaggattgaaagaaatggcaagttccaatcctgtgtatatggagatggaaaaaggagatctaccaacaaggttaaagttactagatgacgaggttccttttgata

SEQ ID NO: 179421 - DNA, 120 bp, Artificial Sequence
  ENSG00000110756_23 (sequence is synthesized)
gtccgttgttggttgtttatgctacccggttgtatgaaaagtttggggagtctgctcttcgatccttaatcaagttctttccatccattttgccatcggatatcatacaactttgtcatc

SEQ ID NO: 179422 - DNA, 120 bp, Artificial Sequence
  ENSG00000110756_24 (sequence is synthesized)
atcatcctgctgagtttttggcctatttagacagtctggtgaaatcaaggcctgaagatcagcggtcatcttttcttgagtcccttctgcaaccagagtctttaaggttggattggctgc

SEQ ID NO: 179423 - DNA, 120 bp, Artificial Sequence
  ENSG00000110756_25 (sequence is synthesized)
ttttggcagtgtcccttgatgctccaccaagcaccagcacaatggatgatgaaggttatcccaggcctcattcacacttgctttcctggggttacagtcagctgatccttcatctaatta

SEQ ID NO: 179424 - DNA, 120 bp, Artificial Sequence
  ENSG00000110756_26 (sequence is synthesized)
aacttcctgcagattttataaccaaagagaaaatgacagacatctgcaggtcttgtggtttctggcctggatatctaattctctgtttggagctggagagaagaagagaggccttcacca

SEQ ID NO: 179425 - DNA, 120 bp, Artificial Sequence
  ENSG00000110756_27 (sequence is synthesized)
atattgtgtatctgaatgatatgagcctgatggaaggggacaatggttggatcccagagaccgtggaggaatggaagcttctccttcatctcatacagagcaagagcacgaggccagccc

SEQ ID NO: 179426 - DNA, 120 bp, Artificial Sequence
  ENSG00000110756_28 (sequence is synthesized)
cccaggagtcactaaatgggagcctcagtgatgggccttcccccatcaatgtggagaatgtggcacttctgttagctaaggccatgggcccagatcgggcttggtcactgctacaggaat

SEQ ID NO: 179427 - DNA, 120 bp, Artificial Sequence
  ENSG00000110756_29 (sequence is synthesized)
gtggtctggcccttgagttgtcagagaagtttaccagaacctgcgatatcctgaggattgctgagaaaaggcagagggccttgatacaaagcatgcttgaaaaatgcgatcggtttctct

SEQ ID NO: 179428 - DNA, 120 bp, Artificial Sequence
  ENSG00000110756_30 (sequence is synthesized)
ggtcccagcaggcctagtgggagaagattcagcaggatgtcatgacattttgagaaaaactaaatcatgctcctgaaccttctgaacgcatttgttattgaaggaaagacaccaccccca

SEQ ID NO: 179429 - DNA, 120 bp, Artificial Sequence
  ENSG00000110756_31 (sequence is synthesized)
aatcctgccatcttattggggctacttttgtcagtgtctgtacccttggcatcggcatctgtgactctttatccatgacctcagtgtttcttaaccaaagttgtactcagcatttcttaa

SEQ ID NO: 179430 - DNA, 120 bp, Artificial Sequence
  ENSG00000110756_32 (sequence is synthesized)
ccaaagttgaattttgaaaagagtcagtccttgtttgctggaattagaatgttaatgtcctagtattattccgaactacagtattaactgcttgttgctagtggattagacagattcttt

SEQ ID NO: 179431 - DNA, 120 bp, Artificial Sequence
  ENSG00000110756_33 (sequence is synthesized)
tcttactgtggcttccatgttgggagcagaagcttttcatcctggtcacatgaagacagatggtattattgactggagttgaattatttttatatcttgtctggcacaatatggaaatta

SEQ ID NO: 179432 - DNA, 120 bp, Artificial Sequence
  ENSG00000110756_34 (sequence is synthesized)
ggaaattactgaaataagacggtgtataatggaattaacacccaaaataagtagaacactgaagatttgaatttgatatttaagtaaaatgggactgggtgcagtggctcaggcctgtaa

SEQ ID NO: 179433 - DNA, 88 bp, Artificial Sequence
  ENSG00000110756_35 (sequence is synthesized)
tgcatctctacaaaaaataaaaaaaattagctaggcatagtacctgaggccaggaggtccaggccgcaatgagatgtgtttgtgccat

SEQ ID NO: 179434 - DNA, 120 bp, Artificial Sequence
  ENSG00000110756_36 (sequence is synthesized)
gccaggaggtccaggccgcaatgagatgtgtttgtgccattgcacaccagtctgggtgacagagaaagaccctgtctcaaaaacaaattaaataaaatatcttcatatataaattaagct

SEQ ID NO: 179435 - DNA, 120 bp, Artificial Sequence
  ENSG00000110756_37 (sequence is synthesized)
atattttctaatctgaacccatatacagctgactaattcattcttagaaatgtgttatctgtaatctttcctaaacagagtagcccacaagaatcatgcactttttaaaattatttctaa

SEQ ID NO: 179436 - DNA, 120 bp, Artificial Sequence
  ENSG00000110756_38 (sequence is synthesized)
gaagccataacaaagctgtgtactaataaagactgcagcaagcacttgtgttatttaaattatgtaagtagattgtcatttgtcaggctcctgtacatttacatagcatgttatattaat

SEQ ID NO: 179437 - DNA, 120 bp, Artificial Sequence
  ENSG00000110756_39 (sequence is synthesized)
aataaatgtaaaatatgactaaagttttcattggaacacaatgtagacaggaggtttattatgagcattttgcagaaaggtgtggagtaagtaaagtgttggatgcactgaacaattcaa

SEQ ID NO: 179438 - DNA, 89 bp, Artificial Sequence
  ENSG00000110756_40 (sequence is synthesized)
cagagaggctaggattacagtgcacgagcatagctgtgtctcggaaatggttggctttgggcagttcaggaggaggactccatctcatt

SEQ ID NO: 179439 - DNA, 120 bp, Artificial Sequence
  ENSG00000110756_41 (sequence is synthesized)
ttttcttttttggccctttgacattttctttgttatcttggagcttggtcaccagcatttctagacattttgtagcagaagagttttcaagttatttcttcttctatattcatctcttaa

SEQ ID NO: 179440 - DNA, 120 bp, Artificial Sequence
  ENSG00000110756_42 (sequence is synthesized)
tcaggttttcttcacactccccacattttatgcttcctttcttagcatgaagattggtgacttttttccccaactttctcttaggtcatcttttcttgagtcccttctgcaaccagagtc

SEQ ID NO: 179441 - DNA, 120 bp, Artificial Sequence
  ENSG00000110756_43 (sequence is synthesized)
gattgctgagaaaaggcagagacacttgaattgcttccactttctggctattgtgaataacgctgctatgaatatgagtatacaaatatgtcttccagacactgctttcagttctttcgg

SEQ ID NO: 179442 - DNA, 120 bp, Artificial Sequence
  ENSG00000110756_44 (sequence is synthesized)
gacgtcagcaaggaaggggaggaacgcgaggggagactgaagttcacgttccgctcttagtgcgcggtgagttccccggcgctaagccgggagacaagatccgatctactgagagctgcg

SEQ ID NO: 179443 - DNA, 120 bp, Artificial Sequence
  ENSG00000110756_45 (sequence is synthesized)
gccattattttccacgagctcctgttaccaggattatcttgtgcacggaatttctctgaagtgttaataatttttaacatgttgatagaactttccatccagatctacagatctgccccc

SEQ ID NO: 179444 - DNA, 120 bp, Artificial Sequence
  ENSG00000110756_46 (sequence is synthesized)
tactagaagagttggtttatgtttagtattttttcccctcacgtttggactaacattagggcctgtttttgatcatgcatcaaaatgctggaaaggttatgaaagaaaggtcattaacca

SEQ ID NO: 179445 - DNA, 120 bp, Artificial Sequence
  ENSG00000110756_47 (sequence is synthesized)
aaagagtgggaagattttattctgactaaccaaattatttttcatcaggattgaaaaattactgcagtttttgggggtcattgccttcctttttcgatgtgcgagtattcctgtggctga

SEQ ID NO: 179446 - DNA, 120 bp, Artificial Sequence
  ENSG00000110756_48 (sequence is synthesized)
actagtgagaagagaataatagagatcctaaactccctttttgacttatggggactcagggttagtaggcaaatgaaggtacctgcctcggtgttttatgtggaccatcccatgcatttt

SEQ ID NO: 179447 - DNA, 120 bp, Artificial Sequence
  ENSG00000110756_49 (sequence is synthesized)
gtaaacctgtgttccactcatttgtttctgggtcagttgtgattttggtattgaatccttcatttctttcggtttattcatttcagaatttttttaaagattaaaacaactcccacgtga

SEQ ID NO: 179448 - DNA, 120 bp, Artificial Sequence
  ENSG00000110756_50 (sequence is synthesized)
tctgtcatacaccatttggagtctctttcataaatgcaaatttctccaatataaataatcatttggaataaaagaatgtagaacttggcttggtgcggtgtctcacgcctgtaatcccag

SEQ ID NO: 179449 - DNA, 120 bp, Artificial Sequence
  ENSG00000110768_0 (sequence is synthesized)
agactcctcgcagccagcgatggaggcgagaccccctagtaacagaggcggtggctactgctgcggccactgggtttcggcctcttcccagcagcggctctaagaagcgcagcggaactc

SEQ ID NO: 179450 - DNA, 120 bp, Artificial Sequence
  ENSG00000110768_1 (sequence is synthesized)
gaccggatccaacccagttagttacttcctgtctagagttgtagcttccacctgcaccttctagccaccatggcaacctcatctgaagaagttttgctgattgtaaagaaagtgcgtcaa

SEQ ID NO: 179451 - DNA, 120 bp, Artificial Sequence
  ENSG00000110768_2 (sequence is synthesized)
aagaagcaggatggagctctgtacctcatggcagaaagaattgcttgggcacctgaaggcaaagatagatttacaatcagccatatgtatgcagatattaaatgccagaaaattagtcca

SEQ ID NO: 179452 - DNA, 120 bp, Artificial Sequence
  ENSG00000110768_3 (sequence is synthesized)
gaaggaaaagctaaaattcagcttcagctggtcctacatgcaggggacacaactaacttccatttttccaatgaaagcacagcagtgaaagagcgagatgcagtaaaagaccttcttcag

SEQ ID NO: 179453 - DNA, 120 bp, Artificial Sequence
  ENSG00000110768_4 (sequence is synthesized)
cagctgctgcccaaattcaagaggaaagcaaataaagaactggaagagaagaacagaatgctgcaagaagatcctgttttgtttcagctttataaagaccttgttgtgagtcaagtgatc

SEQ ID NO: 179454 - DNA, 120 bp, Artificial Sequence
  ENSG00000110768_5 (sequence is synthesized)
agtgctgaggaattctgggccaatcgtttaaatgtgaatgcaacagatagttcttccacatccaatcataagcaggatgttggcatttctgctgcatttctggctgatgtccggccccaa

SEQ ID NO: 179455 - DNA, 120 bp, Artificial Sequence
  ENSG00000110768_6 (sequence is synthesized)
actgatggctgtaacggtctaagatataatttaacttctgatatcattgagtccatatttaggacctatccagcagtaaaaatgaaatatgcagaaaatgttccccacaacatgacagag

SEQ ID NO: 179456 - DNA, 120 bp, Artificial Sequence
  ENSG00000110768_7 (sequence is synthesized)
aaggaattctggacacgttttttccagtcccattattttcacagggatcggctgaatacagggtcaaaggatctctttgcagaatgtgccaaaatagatgaaaaaggcctaaaaacaatg

SEQ ID NO: 179457 - DNA, 120 bp, Artificial Sequence
  ENSG00000110768_8 (sequence is synthesized)
gtttcattaggagtgaaaaacccactactagatttaacagctttggaagataaaccattagatgagggctatggcatttcctctgtgccatctgcttccaattctaaatccataaaagag

SEQ ID NO: 179458 - DNA, 120 bp, Artificial Sequence
  ENSG00000110768_9 (sequence is synthesized)
aatagtaatgctgccatcatcaagagatttaaccatcacagtgccatggtcctggcagctggactcagaaaacaagaagcacaaaatgaacaaactagtgagcccagcaacatggatgga

SEQ ID NO: 179459 - DNA, 120 bp, Artificial Sequence
  ENSG00000110768_10 (sequence is synthesized)
aattccggagatgcagactgctttcagccagcagtcaaaagggcgaaattacaagagtccattgaatatgaagacttggggaaaaataattctgtaaaaacgattgcactaaacctcaag

SEQ ID NO: 179460 - DNA, 120 bp, Artificial Sequence
  ENSG00000110768_11 (sequence is synthesized)
aagtcagataggtattatcatggtccaactccaatccagtcactacagtatgcaacaagtcaggacattattaattcttttcaaagtattagacaagaaatggaagcttatacacccaag

SEQ ID NO: 179461 - DNA, 120 bp, Artificial Sequence
  ENSG00000110768_12 (sequence is synthesized)
ctctcaagtagtgctgccagtagtaccatcacagcactgtcacctggaggggcacttatgcagggaggaacacagcaagccataaaccagatggtgccaaatgatattcaatctgaattg

SEQ ID NO: 179462 - DNA, 120 bp, Artificial Sequence
  ENSG00000110768_13 (sequence is synthesized)
aaacacttatatgtagctgttggagaacttctacgacatttctggtcctgctttcctgttaatacgccattcctagaagaaaaggtagtgaaaatgaaaagtaatttggaacgattccaa

SEQ ID NO: 179463 - DNA, 120 bp, Artificial Sequence
  ENSG00000110768_14 (sequence is synthesized)
gttacgaagctctgtccattccaagaaaagattcggagacagtatttaagcacaaatttggtaagtcacatagaagagatgctccagacagcctacaacaagctccacacatggcagtca

SEQ ID NO: 179464 - DNA, 120 bp, Artificial Sequence
  ENSG00000110768_15 (sequence is synthesized)
cggcgtctgatgaagaaaacgtgaggtggccatgatgcttacaggttttgtgagattgagagaactatgacctgcagcaactctggaaacctggcctgacagacaagcagatgacctcac

SEQ ID NO: 179465 - DNA, 120 bp, Artificial Sequence
  ENSG00000110768_16 (sequence is synthesized)
aggagtgataagaaacatctgctccacgccaactcccagagctgatgctattgtacttgcacattggagactgaaaggaaagaagggactaaatgctggggaggtaaattaagacagaac

SEQ ID NO: 179466 - DNA, 120 bp, Artificial Sequence
  ENSG00000110768_17 (sequence is synthesized)
tatatatatatacacacacacacatatatgtacatgtgtatgtacatatatattttaaaagactgtttactgcagttgctcaggaactgcttttgattcacattaagctgctttcagaaa

SEQ ID NO: 179467 - DNA, 120 bp, Artificial Sequence
  ENSG00000110768_18 (sequence is synthesized)
cattaagctgctttcagaaattaaaaaaacactttttaaagggtgcattgataaaatctgaggttttttggttgtcgtttttttctgtgtacatttttttcctaagtttatggcacaggg

SEQ ID NO: 179468 - DNA, 120 bp, Artificial Sequence
  ENSG00000110768_19 (sequence is synthesized)
tagaccttaagtattcctcctccatccttcattcttcaccctccattggatcctcaagttttaatgaattccaattataccttacatcagcaagttaaaaaaagtactttaaaataaagc

SEQ ID NO: 179469 - DNA, 120 bp, Artificial Sequence
  ENSG00000110768_20 (sequence is synthesized)
aaagggagactgttgctcaaccatcaggaaacagttgtcagaagacatcattggttctgtgtttcctacggaaataagaaacgataaatattgcactgaatgtttgtggtttggagtccc

SEQ ID NO: 179470 - DNA, 120 bp, Artificial Sequence
  ENSG00000110768_21 (sequence is synthesized)
tgaataataaagagggaatatatttgcagaaagtcgcatagggttttttaatgcagaattttgtcagaagacaatggcgctgcatgtttttctttgagtgcaaatgtacattgctaagat

SEQ ID NO: 179471 - DNA, 120 bp, Artificial Sequence
  ENSG00000110768_22 (sequence is synthesized)
ttttttaagatggcatgtgctttgaaaagaagatattgcatttttaagagtttaaaaatcttatgagtgagaaatattaaaaaaatcttattttcacctctttagaagaaataaaagatg

SEQ ID NO: 179472 - DNA, 120 bp, Artificial Sequence
  ENSG00000110768_23 (sequence is synthesized)
tttctcctatctccttttctctagtatttgactgttactgtccttggcgaatcgataatcattgcatagtgactgaaaagcctaagtgcaaaaaaaaaaaaaaaagatgttcttgtttct

SEQ ID NO: 179473 - DNA, 120 bp, Artificial Sequence
  ENSG00000110768_24 (sequence is synthesized)
gaacttcgtgccatattttgttcctgatgggatcaacttaatgtttaagactttagatgtcttgtattaaaaattacacaaaaaaagtaaaactttttatacttacccttttaactctaa

SEQ ID NO: 179474 - DNA, 120 bp, Artificial Sequence
  ENSG00000110768_25 (sequence is synthesized)
aggccgcggtcgcgattacgctctctacggcctgcgaccgcagggccgttgcgggctggagacacggcgccgactggaaccggaggagctctaggccaaatggttgggccagccaggatc

SEQ ID NO: 179475 - DNA, 120 bp, Artificial Sequence
  ENSG00000110768_26 (sequence is synthesized)
ccaggacccttcgccgctcgagaccggagagaggaaacgaaacaggcgggaacccgtgggggagggagggaactagcggaaggtgtcatggcggccgcgctcttgagtcacgtgcccagg

SEQ ID NO: 179476 - DNA, 120 bp, Artificial Sequence
  ENSG00000110768_27 (sequence is synthesized)
aatacactcaagaaaaacctggaaatcacagaaggcattgtaagatagctacagtgattctgttaaacctcctgaaattggtccttgaacaattaagaggtgctacagatgaccaggaaa

SEQ ID NO: 179477 - DNA, 120 bp, Artificial Sequence
  ENSG00000110768_28 (sequence is synthesized)
atgggcaaaaaaatatgaaccatttggggctcaagtttctccaaatactttatgtgactgcaagtactgtatacgcttatttcctgtgactcagttcttctaactaagatgttaagcatt

SEQ ID NO: 179478 - DNA, 120 bp, Artificial Sequence
  ENSG00000110768_29 (sequence is synthesized)
gttttttgtttgtttgtttgtttgttttcctcacatgtacacatacatacagattgttcttatatgtgattttgttctctgggaataaaatcttcattcaacagaggcaatatgacagaa

SEQ ID NO: 179479 - DNA, 120 bp, Artificial Sequence
  ENSG00000110768_30 (sequence is synthesized)
ttcaacagaggcaatatgacagaaaaaccgaagtttcatgtatatgatttttcaaagaaagtgaattggccctcatgttaaacctagcatttcagagctgaaagtgtcttctcattaaat

SEQ ID NO: 179480 - DNA, 120 bp, Artificial Sequence
  ENSG00000110768_31 (sequence is synthesized)
attgaagaaatcatttgagggtgtggagaaggatggacagaattagctgcttgtgtatttattcttctcctgcaactttgccacgctattttgtacctcccttcctaattatgataaagc

SEQ ID NO: 179481 - DNA, 120 bp, Artificial Sequence
  ENSG00000110768_32 (sequence is synthesized)
tttcttagagagcagtcaggcaatgtgtattaaatgtttaaagctttacacccttagttctacttgtggacatttatttcttaagaaagatgtatactaagatttagatagaaatattca

SEQ ID NO: 179482 - DNA, 120 bp, Artificial Sequence
  ENSG00000110768_33 (sequence is synthesized)
ttacagtatcataataaagacagtagcaaggattctgttatctgtgttgcattaatacaatagagattgatgcaactgttcattattttgaaagcattaatgataatattgcatcaaaga

SEQ ID NO: 179483 - DNA, 120 bp, Artificial Sequence
  ENSG00000110768_34 (sequence is synthesized)
gttcactgaacagattgtacagtacagttttacacacaaaaaaaatagtttgtgagctttaaaagggccttcaaatgaatatgctaaacggttatctttcaataaagagagtatgggtaa

SEQ ID NO: 179484 - DNA, 88 bp, Artificial Sequence
  ENSG00000110768_35 (sequence is synthesized)
tgcaggaggcgaaggttgcactccagcctgagcaacagagcgggactccatctcaaaaacagagagaaattcagtttaagatgtattt

SEQ ID NO: 179485 - DNA, 120 bp, Artificial Sequence
  ENSG00000110768_36 (sequence is synthesized)
catctcaaaaacagagagaaattcagtttaagatgtattttgtaatgctaaaacgagttagtgctatttgttaatcttttatgtgcataatgtcacttgtttttaaatgtttgttcataa

SEQ ID NO: 179486 - DNA, 120 bp, Artificial Sequence
  ENSG00000110768_37 (sequence is synthesized)
atatttaatgttcgtgagaagtaataaaagtcccatcatccagcaaattttttcagctaagcgtgtcttataataagaaaagcagaacctttttaaaaaatttttaatctattatttctc

SEQ ID NO: 179487 - DNA, 120 bp, Artificial Sequence
  ENSG00000110768_38 (sequence is synthesized)
tgcagatattaaatgtaagtcagctatactaagttctgatgtatttgtatgtcatagttgctagtaattttgtaaagagattatataaatctttattttatatcaaaaaatcaactatgt

SEQ ID NO: 179488 - DNA, 120 bp, Artificial Sequence
  ENSG00000110768_39 (sequence is synthesized)
agaaataattacaaaatggggtcactgaatatatactgttttataacctgaccttttcacttaataacagaacaggtacaggtttacatataatatgtaaatctacctgacatatagatc

SEQ ID NO: 179489 - DNA, 120 bp, Artificial Sequence
  ENSG00000110768_40 (sequence is synthesized)
tttaggcttctcaggaagcaaaaatgatcaaacccatgacaataaatgtggatctttctgctgttgctttcttattgcccttatgggaattaaattattttattgaaatctctttactta

SEQ ID NO: 179490 - DNA, 120 bp, Artificial Sequence
  ENSG00000110768_41 (sequence is synthesized)
agttagttacttcctgtctagagttgtagcttccacctgagacggggtttcaccatgttgaccaggccattcagccgacttgtagcagtgcaacagattgcaccttctagccaccatggc

SEQ ID NO: 179491 - DNA, 120 bp, Artificial Sequence
  ENSG00000110768_42 (sequence is synthesized)
aatgaatatacaatcatgtatttaaccagccctctgtggttggacacttaggaagtttccagaatttttttattgcagtgtttgcactaatatcatttcaaggttgtatgtgtaggatac

SEQ ID NO: 179492 - DNA, 120 bp, Artificial Sequence
  ENSG00000110768_43 (sequence is synthesized)
atagtggagagcataacagatcattcatttggggaaaaaataataaaatgtaaactttcacctaccagattggcaaaagtaaaaagttcaataatacttcatgtggtcagagtgtaagaa

SEQ ID NO: 179493 - DNA, 120 bp, Artificial Sequence
  ENSG00000110768_44 (sequence is synthesized)
aactagtattcttaagtagttgttgagaaaattggttcagccatttgtaggacagtcatctctaggaagagaagctcatggtgggaagacttcattttttaccctctgtacagttttgtt

SEQ ID NO: 179494 - DNA, 120 bp, Artificial Sequence
  ENSG00000110768_45 (sequence is synthesized)
gttacgaagctctgtccattccaagaaaagattcggagacagtatttaagcacaaatgtaaggcagcaatctgatttttgcctgatcttctttctctttgtagtaaaatgatgaaattga

SEQ ID NO: 179495 - DNA, 120 bp, Artificial Sequence
  ENSG00000110768_46 (sequence is synthesized)
gactttagtttcaattgaaacaaatttgaactaaataataaatatgactgtaattctacagttttacaattgtaaatatagactatatgaaagactacacattttcaaattgtgtgtgta

SEQ ID NO: 179496 - DNA, 120 bp, Artificial Sequence
  ENSG00000110768_47 (sequence is synthesized)
taagaatataactgaggaaaataaattaataatactcattagcatataagtattgtataaatttacacctgtggtatgagcaaaatgaaatttaattgtagaggaatgatgccgtgcaac

SEQ ID NO: 179497 - DNA, 120 bp, Artificial Sequence
  ENSG00000110768_48 (sequence is synthesized)
tttatcttcaactttgaatgagaaaagagactttcttcttccccgttaatttcctacagtttagattttatatttgaaagggactctagaagtcaacaaattcaaccctaattgatgtgt

SEQ ID NO: 179498 - DNA, 120 bp, Artificial Sequence
  ENSG00000110768_49 (sequence is synthesized)
aggtaactgtttatctctgatagacactggtatttaacttgccaccctctagacattataagtgttaatttctgagacagataagacatgctgaactttttattttgttgattttctagg

SEQ ID NO: 179499 - DNA, 120 bp, Artificial Sequence
  ENSG00000110768_50 (sequence is synthesized)
cctaaaaacaatggtttcattaggagtgaaaaacccactactagatttaacagctttggaagataaaccattagatgaggtaagaagcaataaaagaagttttgagagaaaagagtcttt

SEQ ID NO: 179500 - DNA, 120 bp, Artificial Sequence
  ENSG00000110768_51 (sequence is synthesized)
actgttacttgaagtgatttatcggaagtgctttgaaatagcgttgtttgccattaaaattgcctagaagaaatgaaattcctgtgtgagttgctaaaaccttttaaaaataaatttcta

SEQ ID NO: 179501 - DNA, 120 bp, Artificial Sequence
  ENSG00000110768_52 (sequence is synthesized)
gctccctcatccgcagttctctagtaataataaaggcttaatgtgatgagttcagctttatgctctagctaacatttaatctaaagaaatatggataaattaataaataaggaagataac

SEQ ID NO: 179502 - DNA, 120 bp, Artificial Sequence
  ENSG00000110777_0 (sequence is synthesized)
aagcggtggctccactggaggaaaacacaccccggtctcacattaaagaagccaaactgtcggcttcaaagagaaaaggcaacatcctgtcacaggccatgctctggcaaaaacccacag

SEQ ID NO: 179503 - DNA, 120 bp, Artificial Sequence
  ENSG00000110777_1 (sequence is synthesized)
ctccggagcaagccccagccccggcccggccataccagggcgtccgtgtgaaggagccagtgaaggaactgctgaggaggaagcgaggccacgccagcagtggggcagcacctgcaccta

SEQ ID NO: 179504 - DNA, 120 bp, Artificial Sequence
  ENSG00000110777_2 (sequence is synthesized)
cggcggtggtgctgccccatcagcccctggcgacctacaccacagtgggtccttcctgcctggacatggaaggttctgtgtctgcagtgacagaggaggctgccctgtgtgccggctggc

SEQ ID NO: 179505 - DNA, 120 bp, Artificial Sequence
  ENSG00000110777_3 (sequence is synthesized)
tctcccagcccaccccggccaccctgcagcccctggccccatggacaccttacaccgagtatgtgccccatgaagctgtcagctgcccctactcagctgacatgtatgtgcagcccgtgt

SEQ ID NO: 179506 - DNA, 120 bp, Artificial Sequence
  ENSG00000110777_4 (sequence is synthesized)
gccccagctacacggtggtggggccctcctcagtgttgacctatgcctctccgccactcatcaccaatgtcacgacaagaagctccgccacgcccgcagtggggcccccgctggagggcc

SEQ ID NO: 179507 - DNA, 120 bp, Artificial Sequence
  ENSG00000110777_5 (sequence is synthesized)
cagagcaccaggcacccctcacctatttcccgtggcctcagcccctttccacactacccacctccaccctgcagtaccagcctccggccccagccctacctgggccccagtttgtccagc

SEQ ID NO: 179508 - DNA, 120 bp, Artificial Sequence
  ENSG00000110777_6 (sequence is synthesized)
tccccatctctatcccagagccagtccttcaggacatggaagaccccagaagagccgccagctcgttgaccatcgacaagctgcttttggaggaagaggatagcgacgcctatgcgctta

SEQ ID NO: 179509 - DNA, 120 bp, Artificial Sequence
  ENSG00000110777_7 (sequence is synthesized)
accacactctctctgtggaaggcttttaggcgtggctcccacctgagtcctgttccctgaaactgggattttaaaatgagcctggaattgagccccaggttcatgcttgtttggagtagt

SEQ ID NO: 179510 - DNA, 120 bp, Artificial Sequence
  ENSG00000110777_8 (sequence is synthesized)
catttcatgactacactttctacgcacagctagaattgtagacctgtaaaccttccttcccttcttccttcccctccctccctcacttcctccctctcccccatccttccattcttcccc

SEQ ID NO: 179511 - DNA, 120 bp, Artificial Sequence
  ENSG00000110777_9 (sequence is synthesized)
tccctcccttcttcctttccaaccccttccttccttttcctccctcccttccttccctccttcccttctccctttccaaccccttccttccttttcctccctcccttccttccctccttc

SEQ ID NO: 179512 - DNA, 120 bp, Artificial Sequence
  ENSG00000110777_10 (sequence is synthesized)
ccttctccctttccttctttacctccctccctccctcgcttcttctctctttcttacttcttttttcaattctgttccattttgggaggtaattatagggattttagcaataacatttta

SEQ ID NO: 179513 - DNA, 120 bp, Artificial Sequence
  ENSG00000110777_11 (sequence is synthesized)
ctctgtaattttaagatgtatgtggtggccggcgggaagaccagccccgacagcacctcctgagaaagtcagccaagggcctaccctgatgccagagtccttgagctgtcagttcccaca

SEQ ID NO: 179514 - DNA, 120 bp, Artificial Sequence
  ENSG00000110777_12 (sequence is synthesized)
gttgctcctttgtttgctcttctcagcctcggccagatttacagtccaggcagcaaaatctcaaggcctggggctcagagtagtaaggggtgggaagtgggtggcagggagaaaagaaca

SEQ ID NO: 179515 - DNA, 120 bp, Artificial Sequence
  ENSG00000110777_13 (sequence is synthesized)
tcagggtgggtggggacaggccagtgacgaagagagggacagaggagggatgggaacaggctgtgcatcttagttggagagaggggtgtgggaggaagcttgagtttgatgcagggagga

SEQ ID NO: 179516 - DNA, 120 bp, Artificial Sequence
  ENSG00000110777_14 (sequence is synthesized)
ggaaggctgaggaatgacttggctccagattacttggttattaagaagaacaataaactaaaggaaagcattgcttgaagagatggttttgctgctctccttgaggatacgtgcaaggga

SEQ ID NO: 179517 - DNA, 120 bp, Artificial Sequence
  ENSG00000110777_15 (sequence is synthesized)
agttgggctgttgtaaacagggtgaagggtgtgtttggtcggccatttctgtctcacctctaggccctctgctggtgctgtggaggccaagaccccattaagcctaaaggtgatgggtcc

SEQ ID NO: 179518 - DNA, 73 bp, Artificial Sequence
  ENSG00000110777_16 (sequence is synthesized)
tggaggccaagaccccattaagcctaaaggtgatgggtcctcgcctaggcttagtgctaccatgtgggttttg

SEQ ID NO: 179519 - DNA, 63 bp, Artificial Sequence
  ENSG00000110777_17 (sequence is synthesized)
ccttccttccttccttcctctctctttctttcttttttttggttttttttgggaccctctgtc

SEQ ID NO: 179520 - DNA, 86 bp, Artificial Sequence
  ENSG00000110777_18 (sequence is synthesized)
cagagccttttaccatgtgggtttctttagtgtcttaaaagcgtccataagccaccattctgtggaaccaaggccccctccacgca

SEQ ID NO: 179521 - DNA, 120 bp, Artificial Sequence
  ENSG00000110777_19 (sequence is synthesized)
ataagccaccattctgtggaaccaaggccccctccacgcaaacaccctccctcctggggacctctggagcctcagccagaagtaccattaggtttaattttaatttgttttgctggagaa

SEQ ID NO: 179522 - DNA, 120 bp, Artificial Sequence
  ENSG00000110777_20 (sequence is synthesized)
acatcaggtttgtaggagactgagttgttagcaggtgtgcttagctcttgatagtgaacgtgtaccttgggaactggctcacccacctgctaatagcaccatcgtcactattaagcagac

SEQ ID NO: 179523 - DNA, 120 bp, Artificial Sequence
  ENSG00000110777_21 (sequence is synthesized)
atttcagttggtagaatccatgtagaagtcatggacttttctgggaaatgacttttctgggaaatgacagtttctttgacatattttctttgcccactttaaataaaaactctggagaaa

SEQ ID NO: 179524 - DNA, 120 bp, Artificial Sequence
  ENSG00000110777_22 (sequence is synthesized)
aagcggtggctccactggaggaaaacacaccccggtctcacattaaagaagccaaactgtcggcttcaaagagaaaaggcaacatcctgtcacaggccatgctctggcaaaaacgcgatg

SEQ ID NO: 179525 - DNA, 120 bp, Artificial Sequence
  ENSG00000110777_23 (sequence is synthesized)
tgagagcagccacagctccggagcaagccccagccccggcccggccataccagggcgtccgtgtgaaggagccagtgaaggaactgctgaggaggaagcgaggccacgccagcagtgggg

SEQ ID NO: 179526 - DNA, 120 bp, Artificial Sequence
  ENSG00000110777_24 (sequence is synthesized)
agatccacacttttctgggttctgcccagccggagaggatttctctgacctggagcccatctgtgctttcaactgctgctgaacctccctcagcgtcgagcagaaagaggcccactgctc

SEQ ID NO: 179527 - DNA, 120 bp, Artificial Sequence
  ENSG00000110777_25 (sequence is synthesized)
ctgcctcccgaggaggttttggcgaaggagcttgagttggtgacgaaggctggctgcgtactcgcctgccaggtgcctcctccggctggccttctcttctgcagcccaggcagctgcctc

SEQ ID NO: 179528 - DNA, 120 bp, Artificial Sequence
  ENSG00000110777_26 (sequence is synthesized)
agacaaccctgcctgctcacctgcaggcgctacagccaccagggacagcaagctcggggacaccccactcaccttgggaactccagagttattctggacaggcatggcagcagcggcaaa

SEQ ID NO: 179529 - DNA, 120 bp, Artificial Sequence
  ENSG00000110777_27 (sequence is synthesized)
ggggatgagaaattcccagagatggtgggaactgtagggaaacaattccaagaaaaaggacattcttcacccagcagctcctgccatattcactgagatgtgtttttgtattttcctatg

SEQ ID NO: 179530 - DNA, 120 bp, Artificial Sequence
  ENSG00000110777_28 (sequence is synthesized)
ataggcatgtcctgcatgctccctctttggaggcagaagtcacaggccctggctctgcatgagggaaacaattccaagaaaaaggacattcttcacccagcagctcctgccatattcact

SEQ ID NO: 179531 - DNA, 120 bp, Artificial Sequence
  ENSG00000110777_29 (sequence is synthesized)
aagcggtggctccactggaggaaaacacaccccggtctcacattaaagaagccaaactgtcggcttcaaagagaaaaggcaacatcctgtcacaggccatgctctggcaaaaacgttggt

SEQ ID NO: 179532 - DNA, 120 bp, Artificial Sequence
  ENSG00000110777_30 (sequence is synthesized)
gtgaaaggtaccaactgcaagtttcaacttgcaaaaacacttggccgttgggctcctttggaatcgtcttgaagcttcagattctgatatttcatgagcactttgcaaagtcactatgag

SEQ ID NO: 179533 - DNA, 120 bp, Artificial Sequence
  ENSG00000110777_31 (sequence is synthesized)
ctgtgggagtcctgcaacgtcaataggaagaggtggggacttagagattgccccacatatggtctgttgtgccagggcacacctgttgacactgagttccaaggaagtccagacattaga

SEQ ID NO: 179534 - DNA, 120 bp, Artificial Sequence
  ENSG00000110777_32 (sequence is synthesized)
gggtgatactctctgtccacagcacctccaccaagcgctctttgttcatcgacttagaaacagtaggaggcgggaagccctctcttgacaagatcctggaagtggccagctggtcccttt

SEQ ID NO: 179535 - DNA, 120 bp, Artificial Sequence
  ENSG00000110777_33 (sequence is synthesized)
ccagtcaggaacagcctatgaaatcattcattatctctctttagtgtcctctgctcttcttggccgcagctggggatcctacaggaagcagagccaaaggtaatgaaagcctccaaggaa

SEQ ID NO: 179536 - DNA, 120 bp, Artificial Sequence
  ENSG00000110777_34 (sequence is synthesized)
gtggctacaattgtggcttcaagggcacctcctgcatggggcttccacagattgggcaacccacgtggtgacgtgagtaaagtgatcccaaagcatcacttgaagtgtagtgtctttatg

SEQ ID NO: 179537 - DNA, 120 bp, Artificial Sequence
  ENSG00000110777_35 (sequence is synthesized)
gcctgaaaacaccgtaaataagaaagatttcctgaacgttctgctgaaatgtggtgatatttcaattctagtcaataagcactattcttagtattgggatacatcaatgaacaagagaca

SEQ ID NO: 179538 - DNA, 120 bp, Artificial Sequence
  ENSG00000110777_36 (sequence is synthesized)
aaacaaatcagcgagaagatactgccccttacccccgcttaaagaggagacacagatgccctgtgaacacctaccagttggctgacacctggggctcagataagtcctctctggccctag

SEQ ID NO: 179539 - DNA, 120 bp, Artificial Sequence
  ENSG00000110777_37 (sequence is synthesized)
tttcatttctttgaatgaaacagctctatgagagctctcttcagagtttatatgttctcgacactgttcctagccagtggcaatgaataaatcaacctatactaattgaaaattagctgt

SEQ ID NO: 179540 - DNA, 120 bp, Artificial Sequence
  ENSG00000110777_38 (sequence is synthesized)
gggcaaaccacagtatgaaacactcctgggcaccatggaggattccagaaaggcttggtccttgcctgtaagaaactaacaatcgaataatgaaaataaacagaaactcttaactcttaa

SEQ ID NO: 179541 - DNA, 120 bp, Artificial Sequence
  ENSG00000110777_39 (sequence is synthesized)
aaatgtccacatgcagccagggtgctgactgaggtgaccagtttgcttgagttttcatactctgcactctccagtggaacagcagctgcaggactcttatttttgtgatgtggagcatgt

SEQ ID NO: 179542 - DNA, 120 bp, Artificial Sequence
  ENSG00000110777_40 (sequence is synthesized)
ctgggtgtgtggcagggggaactgaaatagtctctgctgactttttgtacctacagattttgtttcattgctcattttggaaaagggaagcccttataggggccaaattaatggtttttc

SEQ ID NO: 179543 - DNA, 120 bp, Artificial Sequence
  ENSG00000110777_41 (sequence is synthesized)
ggtgaacttctcagcccgaaaaaggagatctccaatcagggccgagaggctcatgctaaggtggaaagattttcctccgtgatggactcttggatacctacgggagacttaaaaggccct

SEQ ID NO: 179544 - DNA, 120 bp, Artificial Sequence
  ENSG00000110777_42 (sequence is synthesized)
cagaccacaggattaatgccacagctccggagcaagccccagccccggcccggccataccagggcgtccgtgtgaaggagccagtgaaggaactgctgaggaggaagcgaggccacgcca

SEQ ID NO: 179545 - DNA, 120 bp, Artificial Sequence
  ENSG00000110777_43 (sequence is synthesized)
gaccacaggattaatggttggtgtgaaaggtaccaactgcaagtttcaacttgcaaaaacacttggccgttgggctcctttggaatcgtcttgaagcttcagattctgatatttcatgag

SEQ ID NO: 179546 - DNA, 120 bp, Artificial Sequence
  ENSG00000110777_44 (sequence is synthesized)
acaagccacagactacaagtgagagtggtagacagggcagaagcagaggataaggttgtggtaggggaagttaatgattttatttaagagaaattacactgaattagagatcatggaact

SEQ ID NO: 179547 - DNA, 120 bp, Artificial Sequence
  ENSG00000110777_45 (sequence is synthesized)
gtagaatgtggaaattactcaggctgcaggggtcaggcaggagggttgcatttgtcttgtgtcagcaagaatcaagaggttggaagaagtgagagggaattctgaccacggaaaacctca

SEQ ID NO: 179548 - DNA, 120 bp, Artificial Sequence
  ENSG00000110777_46 (sequence is synthesized)
agtgctgggccggcccttccgagttgtgtcttgctggagagtcccagggccagggaaacaattccaagaaaaaggacattcttcacccagcagctcctgccatattcactgagatgtgtt

SEQ ID NO: 179549 - DNA, 90 bp, Artificial Sequence
  ENSG00000110777_47 (sequence is synthesized)
cttggcacaattacatgatgctggaatgcagtggcacgattacagctcaccttgacctcctgggctccagcaatcctccaacctccacct

SEQ ID NO: 179550 - DNA, 74 bp, Artificial Sequence
  ENSG00000110777_48 (sequence is synthesized)
ccatgcctggctaatttttaaatttttttgtggaaatggggtctcactatgttgtctaggctggtcttgaactt

SEQ ID NO: 179551 - DNA, 120 bp, Artificial Sequence
  ENSG00000110777_49 (sequence is synthesized)
ttaaagggaatttgtttacaatttccctattatgtataacatcactctagatttttggcatataaactttatcaagttaaggaagtttccttctagtcctaagtttctaagagttatttt

SEQ ID NO: 179552 - DNA, 120 bp, Artificial Sequence
  ENSG00000110777_50 (sequence is synthesized)
agatactttaataatttttctcctaaagtttatcaatgtggtgaattatattgataggttttctaagaataaaccatccttgcattcctgggataaatcttacatattataatatattat

SEQ ID NO: 179553 - DNA, 120 bp, Artificial Sequence
  ENSG00000110777_51 (sequence is synthesized)
tattatatcatgatgtattagtccttaatatactattgaattcagcaagcaaatattttgttcaggatttttgaatcgatgttcacaaattagatggcctataattttcttttcttatat

SEQ ID NO: 179554 - DNA, 120 bp, Artificial Sequence
  ENSG00000110777_52 (sequence is synthesized)
tgaccttatttagttttagaatcaagtttacatgattggctctttaaagtaatttaaattaaatgcagaaatctgtcttttaattggtgagtttaatcttcttaaattcattatcattac

SEQ ID NO: 179555 - DNA, 120 bp, Artificial Sequence
  ENSG00000110777_53 (sequence is synthesized)
tgagctagttgaacctatcctgccaacttattcctgttttccattcattgtaatttttaaatacatccttcctgtttttcacagaaagattcagtttctctcagaatgctcaaaagttaa

SEQ ID NO: 179556 - DNA, 120 bp, Artificial Sequence
  ENSG00000110777_54 (sequence is synthesized)
ctcaaaagttaaatgtttaaaatttaaaagctaaactttgaaacattaaaagttaaacagaatgtttaacacatcatttatgaaaaagttaaacagaatgtttaaaagtttaacttttgt

SEQ ID NO: 179557 - DNA, 120 bp, Artificial Sequence
  ENSG00000110777_55 (sequence is synthesized)
tataaaaaaatttttttttgtaataagaacaaaagtggcagttgcctcctacttcagatccacttttatgtttatttgtccttcagatccacttttatgtttatttgtccctattgattt

SEQ ID NO: 179558 - DNA, 120 bp, Artificial Sequence
  ENSG00000110777_56 (sequence is synthesized)
cttaaatttattgatagctatattttctccttagaaaacgaaagcattagtgcattttgatttctctttgatctccttaagggccacattttggaaaattaaatataatataaatggtgt

SEQ ID NO: 179559 - DNA, 120 bp, Artificial Sequence
  ENSG00000110777_57 (sequence is synthesized)
tctctggacttgtgtaatcatgttattttaaagatattttgttttgtgttgttatggatgaattttctccttttcccagctttaagaaaattcctataataaactttacccagtatttga

SEQ ID NO: 179560 - DNA, 120 bp, Artificial Sequence
  ENSG00000110786_0 (sequence is synthesized)
catacacactggcacagacacaagcagggacacacgcagacacacgcacactcgcgcgcgcatcctcccgccagcctgcccgcctgctcgccggcgcccggagcccgctctggccggagt

SEQ ID NO: 179561 - DNA, 120 bp, Artificial Sequence
  ENSG00000110786_1 (sequence is synthesized)
gagagagagaaccacgctgctgatgactccgagggaggggccctggacatgtgctgcagtgagaggctaccgggtctcccccagccgatagtgatggaggcactggacgaggctgaaggg

SEQ ID NO: 179562 - DNA, 120 bp, Artificial Sequence
  ENSG00000110786_2 (sequence is synthesized)
ctccaggactcacagagagagatgccgccaccccctcctccctcgccgccctcagatccagctcagaagccaccacctcgaggcgctgggagccactccctcactgtcaggagcagcctg

SEQ ID NO: 179563 - DNA, 120 bp, Artificial Sequence
  ENSG00000110786_3 (sequence is synthesized)
tgcctgttcgctgcctcacagttcctgcttgcctgtggggtgctctggttcagcggttatggccacatctggtcacagaacgccacaaacctcgtctcctctttgctgacgctcctgaaa

SEQ ID NO: 179564 - DNA, 120 bp, Artificial Sequence
  ENSG00000110786_4 (sequence is synthesized)
cagctggaacccacggcctggcttgactctgggacgtggggagtccccagtctgctgctggtctttctgtccgtgggcctggtcctcgttaccaccctggtgtggcacctcctgaggaca

SEQ ID NO: 179565 - DNA, 120 bp, Artificial Sequence
  ENSG00000110786_5 (sequence is synthesized)
cccccagagccacccaccccactgccccctgaggacaggcgccagtcagtgagccgccagccctccttcacctactcagagtggatggaggagaagatcgaggatgacttcctggacctc

SEQ ID NO: 179566 - DNA, 120 bp, Artificial Sequence
  ENSG00000110786_6 (sequence is synthesized)
gacccggtgcccgagactcctgtgtttgattgtgtgatggacatcaagcctgaggctgaccccacctcactcaccgtcaagtccatgggtctgcaggagaggaggggttccaatgtctcc

SEQ ID NO: 179567 - DNA, 120 bp, Artificial Sequence
  ENSG00000110786_7 (sequence is synthesized)
ctgaccctggacatgtgcactccgggctgcaacgaggagggctttggctatctcatgtccccacgtgaggagtccgcccgcgagtacctgctcagcgcctcccgtgtcctccaagcagaa

SEQ ID NO: 179568 - DNA, 120 bp, Artificial Sequence
  ENSG00000110786_8 (sequence is synthesized)
gagcttcatgaaaaggccctggaccctttcctgctgcaggcggaattctttgaaatccccatgaactttgtggatccgaaagagtacgacatccctgggctggtgcggaagaaccggtac

SEQ ID NO: 179569 - DNA, 120 bp, Artificial Sequence
  ENSG00000110786_9 (sequence is synthesized)
aaaaccatacttcccaaccctcacagcagagtgtgtctgacctcaccagaccctgacgaccctctgagttcctacatcaatgccaactacatccggggctatggtggggaggagaaggtg

SEQ ID NO: 179570 - DNA, 120 bp, Artificial Sequence
  ENSG00000110786_10 (sequence is synthesized)
tacatcgccactcagggacccatcgtcagcacggtcgccgacttctggcgcatggtgtggcaggagcacacgcccatcattgtcatgatcaccaacatcgaggagatgaacgagaaatgc

SEQ ID NO: 179571 - DNA, 120 bp, Artificial Sequence
  ENSG00000110786_11 (sequence is synthesized)
ggtgttgagatcactgtgcagaaagtcattcacacggaggattaccggctgcgactcatctccctcaagagtgggactgaggagcgaggcctgaagcattactggttcacatcctggccc

SEQ ID NO: 179572 - DNA, 120 bp, Artificial Sequence
  ENSG00000110786_12 (sequence is synthesized)
gaccagaagaccccagaccgggcccccccactcctgcacctggtgcgggaggtggaggaggcagcccagcaggaggggccccactgtgcccccatcatcgtccactgcagtgcagggatt

SEQ ID NO: 179573 - DNA, 120 bp, Artificial Sequence
  ENSG00000110786_13 (sequence is synthesized)
gggaggaccggctgcttcattgccaccagcatctgctgccagcagctgcggcaggagggtgtggtggacatcctgaagaccacgtgccagctccgtcaggacaggggcggcatgatccag

SEQ ID NO: 179574 - DNA, 120 bp, Artificial Sequence
  ENSG00000110786_14 (sequence is synthesized)
acatgcgagcagtaccagtttgtgcaccacgtcatgagcctctacgaaaagcagctgtcccaccagtccccagaatgactgcgcttctcctacaaggttctctgggcactgcccagcctg

SEQ ID NO: 179575 - DNA, 120 bp, Artificial Sequence
  ENSG00000110786_15 (sequence is synthesized)
agtctcggccctcacccagggccctgcctcgggtcctgggcctgctccccgcttcctccccttcagtcagctccctctgtcctctgtcagcctggcctgacccctaccctccagcattgc

SEQ ID NO: 179576 - DNA, 120 bp, Artificial Sequence
  ENSG00000110786_16 (sequence is synthesized)
tcttcctactgtacatattggggagtggggggcagggtcgggaagggacatgccaggccaggcctggggccccggggcctgacccacaccacgcagaccccgggctccagtttttaacga

SEQ ID NO: 179577 - DNA, 120 bp, Artificial Sequence
  ENSG00000110786_17 (sequence is synthesized)
tggttccatcaatacctgatccagaatgtttccgtgctacactttgtgtcctgctgcaatgtgttctgtctgtccatccatctctgccctctgtaccggacactgtgtctcctcagccag

SEQ ID NO: 179578 - DNA, 120 bp, Artificial Sequence
  ENSG00000110786_18 (sequence is synthesized)
gaaggggtaatgagctccagcccctaagcaaccggacttgcctgcctcggcctcacccgcacttctcccaaaaggcagatgacggggagttaggcatggggagctccagaaggtcaccag

SEQ ID NO: 179579 - DNA, 120 bp, Artificial Sequence
  ENSG00000110786_19 (sequence is synthesized)
agagctttcagctgagggagagttctctaggttggagtgggcatcacagccagggtggcctctgggtgtcagatgctctcaggagggtgcccagcctgtgaggcactggcaaggtagggg

SEQ ID NO: 179580 - DNA, 120 bp, Artificial Sequence
  ENSG00000110786_20 (sequence is synthesized)
gcagatggggcatggagaacccagaggatctaggccctgttggggaggggaggggagctcaaggtttgggtggggactcagcccagatctacgtgagacatttttctgtgtcactgtggg

SEQ ID NO: 179581 - DNA, 120 bp, Artificial Sequence
  ENSG00000110786_21 (sequence is synthesized)
aaagccttcccagaagtctcactgcgtgttgctctgcgtgtgttcccatgtccatgcgtgtgttgagagcccatcaggagggcatgcatgactctttggcaacatgtattatcttggagc

SEQ ID NO: 179582 - DNA, 120 bp, Artificial Sequence
  ENSG00000110786_22 (sequence is synthesized)
cacgtgtttttattgctgactttaaatatttatcccacggcagacagagacatttggtgtctttttataattcgctcgtggtcattgaatagagcaataaacggagcattttgagcaaaa

SEQ ID NO: 179583 - DNA, 120 bp, Artificial Sequence
  ENSG00000110786_23 (sequence is synthesized)
gctaatcgagggtgactgctggaagtggagccacgctgactgatcccagattgagaggcagccacagccaccccaaaaggggtggcagagccctgcctgtggacagggccggagtcatcg

SEQ ID NO: 179584 - DNA, 120 bp, Artificial Sequence
  ENSG00000110786_24 (sequence is synthesized)
ggaattctgagctaccgcaccagcatctgagacctcacaccctgcctccctaacctaagaatccagaacacagggcctccccgacccctgagctcccagccgtacagggttctcctgaga

SEQ ID NO: 179585 - DNA, 120 bp, Artificial Sequence
  ENSG00000110786_25 (sequence is synthesized)
actcctgtctgtggaggcctttctaggagactactcttttgatgtacatatttgtgaggtcctctctggaaagggctttctcttggttcccttcagtcagcttttctccaaggagagtcc

SEQ ID NO: 179586 - DNA, 120 bp, Artificial Sequence
  ENSG00000110786_26 (sequence is synthesized)
tgaggcctccccgggcacgcagcaccggggccctgctctcagctgcccggtctggaccttagaggttcaggagcctccatgcagggccaggttgaggctgcaggtgagctctgctggggg

SEQ ID NO: 179587 - DNA, 84 bp, Artificial Sequence
  ENSG00000110786_27 (sequence is synthesized)
tgtggtctgctcaggctgctataacaaaataccatagaccaggtagcttgtaagcaacaggtttattttcaccgtgaccctggt

SEQ ID NO: 179588 - DNA, 120 bp, Artificial Sequence
  ENSG00000110786_28 (sequence is synthesized)
gaggacccacttccagggtcatgtcctcacgtggcagaaggagtgaaagctccttttgtaagagcactgatcccattcgtgagggctccgttctcatgacttcatcacctcgcaaaggcc

SEQ ID NO: 179589 - DNA, 120 bp, Artificial Sequence
  ENSG00000110786_29 (sequence is synthesized)
ctcccttcaaataccaccatgttgggatttggtttcaacatgtgaacttaaggggacacacacattcagtccaaagccacaggttttcagcaggagagcagcatgtccagatgtgtgttg

SEQ ID NO: 179590 - DNA, 120 bp, Artificial Sequence
  ENSG00000110786_30 (sequence is synthesized)
tacacagactattttgactctgtggatctgagacagttggggatgaggcagaaatctcccacactcgagcaatgataaaggtcaaggtggcagtgaagcggggagtgtgaagaggtggta

SEQ ID NO: 179591 - DNA, 120 bp, Artificial Sequence
  ENSG00000110786_31 (sequence is synthesized)
aaacttgcagcactaattgcagcactaagatagaggcgagtcacgcaggcgcaggcgaggcacagcaagaggcgaagaagagtcccggggctgggttatgtgacaaagggatgactgggg

SEQ ID NO: 179592 - DNA, 120 bp, Artificial Sequence
  ENSG00000110786_32 (sequence is synthesized)
gaccatttgttaagataaggaaccctggagatagtaataaattggagaaggggctcttggcccctcttggatgatcctgaagttgttggggcaggaccaaaggcaagatccatgccaacg

SEQ ID NO: 179593 - DNA, 120 bp, Artificial Sequence
  ENSG00000110786_33 (sequence is synthesized)
ctgctgaccaacccccaaaaccaagctggctttgggtctgtgtctggtgccactgggcaatgtggcctagatggaagggtgaaggggtcccactctcagtgttcttcctgtgttcttcct

SEQ ID NO: 179594 - DNA, 120 bp, Artificial Sequence
  ENSG00000110786_34 (sequence is synthesized)
ccttccatctcatctctatctctgggctggtttgtgagctgaaagagttcacacatacctggggtgggcctctgtctcctcgacagagtgggactgaggagcgaggcctgaagcattact

SEQ ID NO: 179595 - DNA, 120 bp, Artificial Sequence
  ENSG00000110786_35 (sequence is synthesized)
gactctgcagctgaagcgcatttggtgaggcggtcgggcgagggagcgcgcacggagcgcgggacggagcgccaggcggacggaccgaaggacggaggcaccgaaggacggacgcccccg

SEQ ID NO: 179596 - DNA, 120 bp, Artificial Sequence
  ENSG00000110786_36 (sequence is synthesized)
cacacgcagacgcacagagctcggcgcggcccccgtcgcatacacactggcacagacacaagcagggacacacgcagacacacgcacactcgcgcgcgcatcctcccgccagcctgcccg

SEQ ID NO: 179597 - DNA, 120 bp, Artificial Sequence
  ENSG00000110786_37 (sequence is synthesized)
cctgctcgccggcgcccggagcccgctctggccgctggatgatctgaagctgccctctctccttcatttatatcaccagcttgctttttgctgagaaagcttcctgccctggaagatggc

SEQ ID NO: 179598 - DNA, 120 bp, Artificial Sequence
  ENSG00000110786_38 (sequence is synthesized)
agctacgtggtggctcgcctctgattccccgtgtaaaaaatggagtttaggatccctgccctgtgtgcagcccacagcctcaagcccccatggggatggaatgccggaaacctctggcca

SEQ ID NO: 179599 - DNA, 120 bp, Artificial Sequence
  ENSG00000110786_39 (sequence is synthesized)
gcgcactagcagcctggagaatacggaagattgtggcaggattgtggggcacatgggcagctccctgctcgtccgggcccctggtgcccacgagaaaaccaaaacaggtgcgtgccccgc

SEQ ID NO: 179600 - DNA, 120 bp, Artificial Sequence
  ENSG00000110786_40 (sequence is synthesized)
gccgcacgtcaggagggcaagactcagtggagggaggggctgtccactcgctctagctccccagaggctgaacagggagaactgggaaaaaggacgcctcctcagcgtcctagaacgagt

SEQ ID NO: 179601 - DNA, 120 bp, Artificial Sequence
  ENSG00000110786_41 (sequence is synthesized)
cctcggcacctggtattgcatgcgccctagtatggggccgctccacttgcgcaggtgttggcaacatgcggggagcgccacggcatgcccccaatgagccgactccctcccccaactctg

SEQ ID NO: 179602 - DNA, 120 bp, Artificial Sequence
  ENSG00000110786_42 (sequence is synthesized)
ccccctttgtctcgctggcccctactccttctgtctgcctgtctgtcccgtcccaggttcagcgcgcacggccctgccggggtccctctggcagttgccgtagccgcgcggcccgacccg

SEQ ID NO: 179603 - DNA, 120 bp, Artificial Sequence
  ENSG00000110786_43 (sequence is synthesized)
gggctcccaagaggagaaaaaatcatgaatgaaatggatgcgctgctcccactcctccgccctccttgtccaagcaaccttggcatgggggcgacgactgcggagactccgcgcagagtt

SEQ ID NO: 179604 - DNA, 120 bp, Artificial Sequence
  ENSG00000110786_44 (sequence is synthesized)
gctcgggagagggaggcacctgagatgaggtcaggggttaagggtctgtgatccggcccccttcgtgccccgggagcaggccgctctcccggtcccccgccccgccagccctgcgcaatt

SEQ ID NO: 179605 - DNA, 120 bp, Artificial Sequence
  ENSG00000110799_0 (sequence is synthesized)
gtggcagctcacagctattgtggtgggaaagggagggtggttggtggatgtcacagcttgggctttatctcccccagcagtggggactccacagcccctgggctacataacagcaagaca

SEQ ID NO: 179606 - DNA, 120 bp, Artificial Sequence
  ENSG00000110799_1 (sequence is synthesized)
gtccggagctgtagcagacctgattgagcctttgcagcagctgagagcatggcctagggtgggcggcaccattgtccagcagctgagtttcccagggaccttggagatagccgcagccct

SEQ ID NO: 179607 - DNA, 120 bp, Artificial Sequence
  ENSG00000110799_2 (sequence is synthesized)
catttgcaggggaagatgattcctgccagatttgccggggtgctgcttgctctggccctcattttgccagggaccctttgtgcagaaggaactcgcggcaggtcatccacggcccgatgc

SEQ ID NO: 179608 - DNA, 120 bp, Artificial Sequence
  ENSG00000110799_3 (sequence is synthesized)
agccttttcggaagtgacttcgtcaacacctttgatgggagcatgtacagctttgcgggatactgcagttacctcctggcagggggctgccagaaacgctccttctcgattattggggac

SEQ ID NO: 179609 - DNA, 120 bp, Artificial Sequence
  ENSG00000110799_4 (sequence is synthesized)
ttccagaatggcaagagagtgagcctctccgtgtatcttggggaattttttgacatccatttgtttgtcaatggtaccgtgacacagggggaccaaagagtctccatgccctatgcctcc

SEQ ID NO: 179610 - DNA, 120 bp, Artificial Sequence
  ENSG00000110799_5 (sequence is synthesized)
aaagggctgtatctagaaactgaggctgggtactacaagctgtccggtgaggcctatggctttgtggccaggatcgatggcagcggcaactttcaagtcctgctgtcagacagatacttc

SEQ ID NO: 179611 - DNA, 120 bp, Artificial Sequence
  ENSG00000110799_6 (sequence is synthesized)
aacaagacctgcgggctgtgtggcaactttaacatctttgctgaagatgactttatgacccaagaagggaccttgacctcggacccttatgactttgccaactcatgggctctgagcagt

SEQ ID NO: 179612 - DNA, 120 bp, Artificial Sequence
  ENSG00000110799_7 (sequence is synthesized)
ggagaacagtggtgtgaacgggcatctcctcccagcagctcatgcaacatctcctctggggaaatgcagaagggcctgtgggagcagtgccagcttctgaagagcacctcggtgtttgcc

SEQ ID NO: 179613 - DNA, 120 bp, Artificial Sequence
  ENSG00000110799_8 (sequence is synthesized)
cgctgccaccctctggtggaccccgagccttttgtggccctgtgtgagaagactttgtgtgagtgtgctggggggctggagtgcgcctgccctgccctcctggagtacgcccggacctgt

SEQ ID NO: 179614 - DNA, 120 bp, Artificial Sequence
  ENSG00000110799_9 (sequence is synthesized)
gcccaggagggaatggtgctgtacggctggaccgaccacagcgcgtgcagcccagtgtgccctgctggtatggagtataggcagtgtgtgtccccttgcgccaggacctgccagagcctg

SEQ ID NO: 179615 - DNA, 120 bp, Artificial Sequence
  ENSG00000110799_10 (sequence is synthesized)
cacatcaatgaaatgtgtcaggagcgatgcgtggatggctgcagctgccctgagggacagctcctggatgaaggcctctgcgtggagagcaccgagtgtccctgcgtgcattccggaaag

SEQ ID NO: 179616 - DNA, 120 bp, Artificial Sequence
  ENSG00000110799_11 (sequence is synthesized)
cgctaccctcccggcacctccctctctcgagactgcaacacctgcatttgccgaaacagccagtggatctgcagcaatgaagaatgtccaggggagtgccttgtcacaggtcaatcacac

SEQ ID NO: 179617 - DNA, 120 bp, Artificial Sequence
  ENSG00000110799_12 (sequence is synthesized)
ttcaagagctttgacaacagatacttcaccttcagtgggatctgccagtacctgctggcccgggattgccaggaccactccttctccattgtcattgagactgtccagtgtgctgatgac

SEQ ID NO: 179618 - DNA, 120 bp, Artificial Sequence
  ENSG00000110799_13 (sequence is synthesized)
cgcgacgctgtgtgcacccgctccgtcaccgtccggctgcctggcctgcacaacagccttgtgaaactgaagcatggggcaggagttgccatggatggccaggacgtccagctccccctc

SEQ ID NO: 179619 - DNA, 120 bp, Artificial Sequence
  ENSG00000110799_14 (sequence is synthesized)
ctgaaaggtgacctccgcatccagcatacagtgacggcctccgtgcgcctcagctacggggaggacctgcagatggactgggatggccgcgggaggctgctggtgaagctgtcccccgtc

SEQ ID NO: 179620 - DNA, 120 bp, Artificial Sequence
  ENSG00000110799_15 (sequence is synthesized)
tatgccgggaagacctgcggcctgtgtgggaattacaatggcaaccagggcgacgacttccttaccccctctgggctggcggagccccgggtggaggacttcgggaacgcctggaagctg

SEQ ID NO: 179621 - DNA, 120 bp, Artificial Sequence
  ENSG00000110799_16 (sequence is synthesized)
cacggggactgccaggacctgcagaagcagcacagcgatccctgcgccctcaacccgcgcatgaccaggttctccgaggaggcgtgcgcggtcctgacgtcccccacattcgaggcctgc

SEQ ID NO: 179622 - DNA, 120 bp, Artificial Sequence
  ENSG00000110799_17 (sequence is synthesized)
catcgtgccgtcagcccgctgccctacctgcggaactgccgctacgacgtgtgctcctgctcggacggccgcgagtgcctgtgcggcgccctggccagctatgccgcggcctgcgcgggg

SEQ ID NO: 179623 - DNA, 120 bp, Artificial Sequence
  ENSG00000110799_18 (sequence is synthesized)
agaggcgtgcgcgtcgcgtggcgcgagccaggccgctgtgagctgaactgcccgaaaggccaggtgtacctgcagtgcgggaccccctgcaacctgacctgccgctctctctcttacccg

SEQ ID NO: 179624 - DNA, 120 bp, Artificial Sequence
  ENSG00000110799_19 (sequence is synthesized)
gatgaggaatgcaatgaggcctgcctggagggctgcttctgccccccagggctctacatggatgagaggggggactgcgtgcccaaggcccagtgcccctgttactatgacggtgagatc

SEQ ID NO: 179625 - DNA, 120 bp, Artificial Sequence
  ENSG00000110799_20 (sequence is synthesized)
ttccagccagaagacatcttctcagaccatcacaccatgtgctactgtgaggatggcttcatgcactgtaccatgagtggagtccccggaagcttgctgcctgacgctgtcctcagcagt

SEQ ID NO: 179626 - DNA, 120 bp, Artificial Sequence
  ENSG00000110799_21 (sequence is synthesized)
cccctgtctcatcgcagcaaaaggagcctatcctgtcggccccccatggtcaagctggtgtgtcccgctgacaacctgcgggctgaagggctcgagtgtaccaaaacgtgccagaactat

SEQ ID NO: 179627 - DNA, 120 bp, Artificial Sequence
  ENSG00000110799_22 (sequence is synthesized)
gacctggagtgcatgagcatgggctgtgtctctggctgcctctgccccccgggcatggtccggcatgagaacagatgtgtggccctggaaaggtgtccctgcttccatcagggcaaggag

SEQ ID NO: 179628 - DNA, 120 bp, Artificial Sequence
  ENSG00000110799_23 (sequence is synthesized)
tatgcccctggagaaacagtgaagattggctgcaacacttgtgtctgtcaggaccggaagtggaactgcacagaccatgtgtgtgatgccacgtgctccacgatcggcatggcccactac

SEQ ID NO: 179629 - DNA, 120 bp, Artificial Sequence
  ENSG00000110799_24 (sequence is synthesized)
ctcaccttcgacgggctcaaatacctgttccccggggagtgccagtacgttctggtgcaggattactgcggcagtaaccctgggacctttcggatcctagtggggaataagggatgcagc

SEQ ID NO: 179630 - DNA, 120 bp, Artificial Sequence
  ENSG00000110799_25 (sequence is synthesized)
cacccctcagtgaaatgcaagaaacgggtcaccatcctggtggagggaggagagattgagctgtttgacggggaggtgaatgtgaagaggcccatgaaggatgagactcactttgaggtg

SEQ ID NO: 179631 - DNA, 120 bp, Artificial Sequence
  ENSG00000110799_26 (sequence is synthesized)
gtggagtctggccggtacatcattctgctgctgggcaaagccctctccgtggtctgggaccgccacctgagcatctccgtggtcctgaagcagacataccaggagaaagtgtgtggcctg

SEQ ID NO: 179632 - DNA, 120 bp, Artificial Sequence
  ENSG00000110799_27 (sequence is synthesized)
tgtgggaattttgatggcatccagaacaatgacctcaccagcagcaacctccaagtggaggaagaccctgtggactttgggaactcctggaaagtgagctcgcagtgtgctgacaccaga

SEQ ID NO: 179633 - DNA, 120 bp, Artificial Sequence
  ENSG00000110799_28 (sequence is synthesized)
aaagtgcctctggactcatcccctgccacctgccataacaacatcatgaagcagacgatggtggattcctcctgtagaatccttaccagtgacgtcttccaggactgcaacaagctggtg

SEQ ID NO: 179634 - DNA, 120 bp, Artificial Sequence
  ENSG00000110799_29 (sequence is synthesized)
gaccccgagccatatctggatgtctgcatttacgacacctgctcctgtgagtccattggggactgcgcctgcttctgcgacaccattgctgcctatgcccacgtgtgtgcccagcatggc

SEQ ID NO: 179635 - DNA, 120 bp, Artificial Sequence
  ENSG00000110799_30 (sequence is synthesized)
aaggtggtgacctggaggacggccacattgtgcccccagagctgcgaggagaggaatctccgggagaacgggtatgagtgtgagtggcgctataacagctgtgcacctgcctgtcaagtc

SEQ ID NO: 179636 - DNA, 120 bp, Artificial Sequence
  ENSG00000110799_31 (sequence is synthesized)
acgtgtcagcaccctgagccactggcctgccctgtgcagtgtgtggagggctgccatgcccactgccctccagggaaaatcctggatgagcttttgcagacctgcgttgaccctgaagac

SEQ ID NO: 179637 - DNA, 120 bp, Artificial Sequence
  ENSG00000110799_32 (sequence is synthesized)
tgtccagtgtgtgaggtggctggccggcgttttgcctcaggaaagaaagtcaccttgaatcccagtgaccctgagcactgccagatttgccactgtgatgttgtcaacctcacctgtgaa

SEQ ID NO: 179638 - DNA, 120 bp, Artificial Sequence
  ENSG00000110799_33 (sequence is synthesized)
gcctgccaggagccgggaggcctggtggtgcctcccacagatgccccggtgagccccaccactctgtatgtggaggacatctcggaaccgccgttgcacgatttctactgcagcaggcta

SEQ ID NO: 179639 - DNA, 120 bp, Artificial Sequence
  ENSG00000110799_34 (sequence is synthesized)
ctggacctggtcttcctgctggatggctcctccaggctgtccgaggctgagtttgaagtgctgaaggcctttgtggtggacatgatggagcggctgcgcatctcccagaagtgggtccgc

SEQ ID NO: 179640 - DNA, 120 bp, Artificial Sequence
  ENSG00000110799_35 (sequence is synthesized)
gtggccgtggtggagtaccacgacggctcccacgcctacatcgggctcaaggaccggaagcgaccgtcagagctgcggcgcattgccagccaggtgaagtatgcgggcagccaggtggcc

SEQ ID NO: 179641 - DNA, 120 bp, Artificial Sequence
  ENSG00000110799_36 (sequence is synthesized)
ctgctcctgatggccagccaggagccccaacggatgtcccggaactttgtccgctacgtccagggcctgaagaagaagaaggtcattgtgatcccggtgggcattgggccccatgccaac

SEQ ID NO: 179642 - DNA, 120 bp, Artificial Sequence
  ENSG00000110799_37 (sequence is synthesized)
ctcaagcagatccgcctcatcgagaagcaggcccctgagaacaaggccttcgtgctgagcagtgtggatgagctggagcagcaaagggacgagatcgttagctacctctgtgaccttgcc

SEQ ID NO: 179643 - DNA, 120 bp, Artificial Sequence
  ENSG00000110799_38 (sequence is synthesized)
cctgaagcccctcctcctactctgccccccgacatggcacaagtcactgtgggcccggggctcttgggggtttcgaccctggggcccaagaggaactccatggttctggatgtggcgttc

SEQ ID NO: 179644 - DNA, 120 bp, Artificial Sequence
  ENSG00000110799_39 (sequence is synthesized)
gtcctggaaggatcggacaaaattggtgaagccgacttcaacaggagcaaggagttcatggaggaggtgattcagcggatggatgtgggccaggacagcatccacgtcacggtgctgcag

SEQ ID NO: 179645 - DNA, 120 bp, Artificial Sequence
  ENSG00000110799_40 (sequence is synthesized)
tactcctacatggtgactgtggagtaccccttcagcgaggcacagtccaaaggggacatcctgcagcgggtgcgagagatccgctaccagggcggcaacaggaccaacactgggctggcc

SEQ ID NO: 179646 - DNA, 120 bp, Artificial Sequence
  ENSG00000110799_41 (sequence is synthesized)
ctgcggtacctctctgaccacagcttcttggtcagccagggtgaccgggagcaggcgcccaacctggtctacatggtcaccggaaatcctgcctctgatgagatcaagaggctgcctgga

SEQ ID NO: 179647 - DNA, 120 bp, Artificial Sequence
  ENSG00000110799_42 (sequence is synthesized)
gacatccaggtggtgcccattggagtgggccctaatgccaacgtgcaggagctggagaggattggctggcccaatgcccctatcctcatccaggactttgagacgctcccccgagaggct

SEQ ID NO: 179648 - DNA, 120 bp, Artificial Sequence
  ENSG00000110799_43 (sequence is synthesized)
cctgacctggtgctgcagaggtgctgctccggagaggggctgcagatccccaccctctcccctgcacctgactgcagccagcccctggacgtgatccttctcctggatggctcctccagt

SEQ ID NO: 179649 - DNA, 120 bp, Artificial Sequence
  ENSG00000110799_44 (sequence is synthesized)
ttcccagcttcttattttgatgaaatgaagagtttcgccaaggctttcatttcaaaagccaatatagggcctcgtctcactcaggtgtcagtgctgcagtatggaagcatcaccaccatt

SEQ ID NO: 179650 - DNA, 120 bp, Artificial Sequence
  ENSG00000110799_45 (sequence is synthesized)
gacgtgccatggaacgtggtcccggagaaagcccatttgctgagccttgtggacgtcatgcagcgggagggaggccccagccaaatcggggatgccttgggctttgctgtgcgatacttg

SEQ ID NO: 179651 - DNA, 120 bp, Artificial Sequence
  ENSG00000110799_46 (sequence is synthesized)
acttcagaaatgcatggtgccaggccgggagcctcaaaggcggtggtcatcctggtcacggacgtctctgtggattcagtggatgcagcagctgatgccgccaggtccaacagagtgaca

SEQ ID NO: 179652 - DNA, 120 bp, Artificial Sequence
  ENSG00000110799_47 (sequence is synthesized)
gtgttccctattggaattggagatcgctacgatgcagcccagctacggatcttggcaggcccagcaggcgactccaacgtggtgaagctccagcgaatcgaagacctccctaccatggtc

SEQ ID NO: 179653 - DNA, 120 bp, Artificial Sequence
  ENSG00000110799_48 (sequence is synthesized)
accttgggcaattccttcctccacaaactgtgctctggatttgttaggatttgcatggatgaggatgggaatgagaagaggcccggggacgtctggaccttgccagaccagtgccacacc

SEQ ID NO: 179654 - DNA, 120 bp, Artificial Sequence
  ENSG00000110799_49 (sequence is synthesized)
gtgacttgccagccagatggccagaccttgctgaagagtcatcgggtcaactgtgaccgggggctgaggccttcgtgccctaacagccagtcccctgttaaagtggaagagacctgtggc

SEQ ID NO: 179655 - DNA, 120 bp, Artificial Sequence
  ENSG00000110799_50 (sequence is synthesized)
tgccgctggacctgcccctgcgtgtgcacaggcagctccactcggcacatcgtgacctttgatgggcagaatttcaagctgactggcagctgttcttatgtcctatttcaaaacaaggag

SEQ ID NO: 179656 - DNA, 120 bp, Artificial Sequence
  ENSG00000110799_51 (sequence is synthesized)
caggacctggaggtgattctccataatggtgcctgcagccctggagcaaggcagggctgcatgaaatccatcgaggtgaagcacagtgccctctccgtcgagctgcacagtgacatggag

SEQ ID NO: 179657 - DNA, 120 bp, Artificial Sequence
  ENSG00000110799_52 (sequence is synthesized)
gtgacggtgaatgggagactggtctctgttccttacgtgggtgggaacatggaagtcaacgtttatggtgccatcatgcatgaggtcagattcaatcaccttggtcacatcttcacattc

SEQ ID NO: 179658 - DNA, 120 bp, Artificial Sequence
  ENSG00000110799_53 (sequence is synthesized)
actccacaaaacaatgagttccaactgcagctcagccccaagacttttgcttcaaagacgtatggtctgtgtgggatctgtgatgagaacggagccaatgacttcatgctgagggatggc

SEQ ID NO: 179659 - DNA, 120 bp, Artificial Sequence
  ENSG00000110799_54 (sequence is synthesized)
acagtcaccacagactggaaaacacttgttcaggaatggactgtgcagcggccagggcagacgtgccagcccatcctggaggagcagtgtcttgtccccgacagctcccactgccaggtc

SEQ ID NO: 179660 - DNA, 120 bp, Artificial Sequence
  ENSG00000110799_55 (sequence is synthesized)
ctcctcttaccactgtttgctgaatgccacaaggtcctggctccagccacattctatgccatctgccagcaggacagttgccaccaggagcaagtgtgtgaggtgatcgcctcttatgcc

SEQ ID NO: 179661 - DNA, 120 bp, Artificial Sequence
  ENSG00000110799_56 (sequence is synthesized)
cacctctgtcggaccaacggggtctgcgttgactggaggacacctgatttctgtgctatgtcatgcccaccatctctggtctacaaccactgtgagcatggctgtccccggcactgtgat

SEQ ID NO: 179662 - DNA, 120 bp, Artificial Sequence
  ENSG00000110799_57 (sequence is synthesized)
ggcaacgtgagctcctgtggggaccatccctccgaaggctgtttctgccctccagataaagtcatgttggaaggcagctgtgtccctgaagaggcctgcactcagtgcattggtgaggat

SEQ ID NO: 179663 - DNA, 120 bp, Artificial Sequence
  ENSG00000110799_58 (sequence is synthesized)
ggagtccagcaccagttcctggaagcctgggtcccggaccaccagccctgtcagatctgcacatgcctcagcgggcggaaggtcaactgcacaacgcagccctgccccacggccaaagct

SEQ ID NO: 179664 - DNA, 120 bp, Artificial Sequence
  ENSG00000110799_59 (sequence is synthesized)
cccacgtgtggcctgtgtgaagtagcccgcctccgccagaatgcagaccagtgctgccccgagtatgagtgtgtgtgtgacccagtgagctgtgacctgcccccagtgcctcactgtgaa

SEQ ID NO: 179665 - DNA, 120 bp, Artificial Sequence
  ENSG00000110799_60 (sequence is synthesized)
cgtggcctccagcccacactgaccaaccctggcgagtgcagacccaacttcacctgcgcctgcaggaaggaggagtgcaaaagagtgtccccaccctcctgccccccgcaccgtttgccc

SEQ ID NO: 179666 - DNA, 120 bp, Artificial Sequence
  ENSG00000110799_61 (sequence is synthesized)
acccttcggaagacccagtgctgtgatgagtatgagtgtgcctgcaactgtgtcaactccacagtgagctgtccccttgggtacttggcctcaactgccaccaatgactgtggctgtacc

SEQ ID NO: 179667 - DNA, 120 bp, Artificial Sequence
  ENSG00000110799_62 (sequence is synthesized)
acaaccacctgccttcccgacaaggtgtgtgtccaccgaagcaccatctaccctgtgggccagttctgggaggagggctgcgatgtgtgcacctgcaccgacatggaggatgccgtgatg

SEQ ID NO: 179668 - DNA, 120 bp, Artificial Sequence
  ENSG00000110799_63 (sequence is synthesized)
ggcctccgcgtggcccagtgctcccagaagccctgtgaggacagctgtcggtcgggcttcacttacgttctgcatgaaggcgagtgctgtggaaggtgcctgccatctgcctgtgaggtg

SEQ ID NO: 179669 - DNA, 120 bp, Artificial Sequence
  ENSG00000110799_64 (sequence is synthesized)
gtgactggctcaccgcggggggactcccagtcttcctggaagagtgtcggctcccagtgggcctccccggagaacccctgcctcatcaatgagtgtgtccgagtgaaggaggaggtcttt

SEQ ID NO: 179670 - DNA, 120 bp, Artificial Sequence
  ENSG00000110799_65 (sequence is synthesized)
atacaacaaaggaacgtctcctgcccccagctggaggtccctgtctgcccctcgggctttcagctgagctgtaagacctcagcgtgctgcccaagctgtcgctgtgagcgcatggaggcc

SEQ ID NO: 179671 - DNA, 120 bp, Artificial Sequence
  ENSG00000110799_66 (sequence is synthesized)
tgcatgctcaatggcactgtcattgggcccgggaagactgtgatgatcgatgtgtgcacgacctgccgctgcatggtgcaggtgggggtcatctctggattcaagctggagtgcaggaag

SEQ ID NO: 179672 - DNA, 120 bp, Artificial Sequence
  ENSG00000110799_67 (sequence is synthesized)
accacctgcaacccctgccccctgggttacaaggaagaaaataacacaggtgaatgttgtgggagatgtttgcctacggcttgcaccattcagctaagaggaggacagatcatgacactg

SEQ ID NO: 179673 - DNA, 120 bp, Artificial Sequence
  ENSG00000110799_68 (sequence is synthesized)
aagcgtgatgagacgctccaggatggctgtgatactcacttctgcaaggtcaatgagagaggagagtacttctgggagaagagggtcacaggctgcccaccctttgatgaacacaagtgt

SEQ ID NO: 179674 - DNA, 120 bp, Artificial Sequence
  ENSG00000110799_69 (sequence is synthesized)
ctggctgagggaggtaaaattatgaaaattccaggcacctgctgtgacacatgtgaggagcctgagtgcaacgacatcactgccaggctgcagtatgtcaaggtgggaagctgtaagtct

SEQ ID NO: 179675 - DNA, 120 bp, Artificial Sequence
  ENSG00000110799_70 (sequence is synthesized)
gaagtagaggtggatatccactactgccagggcaaatgtgccagcaaagccatgtactccattgacatcaacgatgtgcaggaccagtgctcctgctgctctccgacacggacggagccc

SEQ ID NO: 179676 - DNA, 120 bp, Artificial Sequence
  ENSG00000110799_71 (sequence is synthesized)
atgcaggtggccctgcactgcaccaatggctctgttgtgtaccatgaggttctcaatgccatggagtgcaaatgctcccccaggaagtgcagcaagtgaggctgctgcagctgcatgggt

SEQ ID NO: 179677 - DNA, 120 bp, Artificial Sequence
  ENSG00000110799_72 (sequence is synthesized)
gcctgctgctgcctgccttggcctgatggccaggccagagtgctgccagtcctctgcatgttctgctcttgtgcccttctgagcccacaataaaggctgagctcttatcttgcaaaaggc

SEQ ID NO: 179678 - DNA, 120 bp, Artificial Sequence
  ENSG00000110799_73 (sequence is synthesized)
ccaggtgcctgcaaatgccatctcctgttggggaattaagaagcataaaggtggcacagaactgtcctatattatgggggcacaggatgaggaggaaggaatccaagacttggatggatt

SEQ ID NO: 179679 - DNA, 120 bp, Artificial Sequence
  ENSG00000110799_74 (sequence is synthesized)
attagttttcgataagattgtggaggtcaccttgttgaacctcccatggtacaatgaagagactgagggtcagagaggagaaatgactgctccaaagtctcctagagccaaaatcagagg

SEQ ID NO: 179680 - DNA, 120 bp, Artificial Sequence
  ENSG00000110799_75 (sequence is synthesized)
cagtgaccctgagcactgccagatttggtcatgactagtctgagcacaggtgtccatatactggaggtggggactcaggagaggaaagtgagatggaacccagggccctcaggtaacatg

SEQ ID NO: 179681 - DNA, 120 bp, Artificial Sequence
  ENSG00000110799_76 (sequence is synthesized)
aacgtcgtgggggccatagtcaaggtggcagggtgtggctgtcataatggggagggaaggtgctcgttgctctcaccctggcttctcactggacttgcctctgggaaactggcctttggg

SEQ ID NO: 179682 - DNA, 120 bp, Artificial Sequence
  ENSG00000110799_77 (sequence is synthesized)
caacaccactccctgacactaatcaagccttctgggagcttaaacttgagaacgtaaattcgctggggaggggctatggtcacagctgctagagtcagatcctgccgccaccatctgtac

SEQ ID NO: 179683 - DNA, 120 bp, Artificial Sequence
  ENSG00000110799_78 (sequence is synthesized)
acagaaggactcagtctcatatccttccatctgggggaggaatggacttacgcagggccatttcctccaaaactaactgtggctagagtctaattctaatacatctcgagcctgaagctc

SEQ ID NO: 179684 - DNA, 120 bp, Artificial Sequence
  ENSG00000110799_79 (sequence is synthesized)
caatagaataattgtccagtaaacaattgaatttgtaagtctgaagctcagggaaaaggtctcatttaataggactggctgctacaacttgagtgagatgtgcacatgcagagtgaagga

SEQ ID NO: 179685 - DNA, 120 bp, Artificial Sequence
  ENSG00000110799_80 (sequence is synthesized)
atgctacctaggggactgagaactgacaaaagctggttggagttggatgttgactttccgaattctaggtgaaactactggatgagagagatgagaggccagcaaaatcagcctacttac

SEQ ID NO: 179686 - DNA, 120 bp, Artificial Sequence
  ENSG00000110799_81 (sequence is synthesized)
agtactcattctgctttcctctttactgtctcaatctctaagaacaagattcttctgaatagtgtgcatcccagctccggcataatttctcagtgtctgaggcacatctctggcctagtt

SEQ ID NO: 179687 - DNA, 120 bp, Artificial Sequence
  ENSG00000110801_0 (sequence is synthesized)
acggtcgactggggcgtcgtccctagcccgggagccgggtctctggagtcgcggcccggggttcacgatgtccgacgaggaagcgaggcagagcggaggctcctcgcaggccggcgtcgt

SEQ ID NO: 179688 - DNA, 120 bp, Artificial Sequence
  ENSG00000110801_1 (sequence is synthesized)
gactgtcagcgacgtccaggagctgatgcggcgcaaggaggagatagaagcgcagatcaaggccaactatgacgtgctggaaagccaaaaaggcattgggatgaacgagccgctggtgga

SEQ ID NO: 179689 - DNA, 120 bp, Artificial Sequence
  ENSG00000110801_2 (sequence is synthesized)
ctgtgagggctacccccggtcagacgtggacctgtaccaagtccgcaccgccaggcacaacatcatatgcctgcagaatgatcacaaggcagtgatgaagcaggtggaggaggccctgca

SEQ ID NO: 179690 - DNA, 120 bp, Artificial Sequence
  ENSG00000110801_3 (sequence is synthesized)
ccagctgcacgctcgcgacaaggagaagcaggcccgggacatggctgaggcccacaaagaggccatgagccgcaaactgggtcagagtgagagccagggccctccacgggccttcgccaa

SEQ ID NO: 179691 - DNA, 120 bp, Artificial Sequence
  ENSG00000110801_4 (sequence is synthesized)
agtgaacagcatcagccccggctccccagccagcatcgcgggtctgcaagtggatgatgagattgtggagttcggctctgtgaacacccagaacttccagtcactgcataacattggcag

SEQ ID NO: 179692 - DNA, 120 bp, Artificial Sequence
  ENSG00000110801_5 (sequence is synthesized)
tgtggtgcagcacagtgaggggaagcccctgaatgtgacagtgatccgcaggggggaaaaacaccagcttagacttgttccaacacgctgggcaggaaaaggactgctgggctgcaacat

SEQ ID NO: 179693 - DNA, 120 bp, Artificial Sequence
  ENSG00000110801_6 (sequence is synthesized)
tattcctctgcaaagatgattgtccctggggaacagtaacaggaaagcatcttcccttgccctggacttgggtctagggatttccaacttgtcttctctccctgaagcataaggatctgg

SEQ ID NO: 179694 - DNA, 120 bp, Artificial Sequence
  ENSG00000110801_7 (sequence is synthesized)
aagaggcttgtaacctgaacttctgtgtggtggcagtactgtggcccaccagtgtaatctccctggattaaggcattcttaaaaacttaggcttggcctctttcacaaattaggccacgg

SEQ ID NO: 179695 - DNA, 120 bp, Artificial Sequence
  ENSG00000110801_8 (sequence is synthesized)
ccctaaataggaattccctggattgtgggcaagtgggcggaagttattctggcaggtactggtgtgattattattattatttttaataaagagttttacagtgctgatatgaccctgttg

SEQ ID NO: 179696 - DNA, 120 bp, Artificial Sequence
  ENSG00000110801_9 (sequence is synthesized)
tcaccccagctgaatttcttatgaccctcccaaaccaaagctcagatggggtcagaagagcttcatagaaagttgggcaaaacaggctagcaattgcaaagtcaggctttgaccaacata

SEQ ID NO: 179697 - DNA, 120 bp, Artificial Sequence
  ENSG00000110801_10 (sequence is synthesized)
tttctttgcactgaggccttgctgctgtggatacggaaatggttaagtactgtgcttcctcagcagctgggctgtcagggccatagtagctccctttggagaacagggaaagcctggagg

SEQ ID NO: 179698 - DNA, 82 bp, Artificial Sequence
  ENSG00000110801_11 (sequence is synthesized)
gaacccaccagagggcagcaagctcctttcacttcgctagtaagaacccctccgtttttgtgtgtttttgtttttgttttct

SEQ ID NO: 179699 - DNA, 120 bp, Artificial Sequence
  ENSG00000110801_12 (sequence is synthesized)
gcactgcctcagccgcccaagtatctgggaccacaggcgtgcaccaccatgcatagctaatttattttttgtagagacagggtctccctgtgttgaccaggttggtctcgaactcctggg

SEQ ID NO: 179700 - DNA, 120 bp, Artificial Sequence
  ENSG00000110801_13 (sequence is synthesized)
atcacaggcgtgagccactgcgcccagcccactgctagtttgactttttataattgaacctcctggctatgccctgagatcagcgctattttgtaaaccgctgaggtatggataggaacg

SEQ ID NO: 179701 - DNA, 120 bp, Artificial Sequence
  ENSG00000110801_14 (sequence is synthesized)
cagcgctattttgtaaaccgctgaggtatggataggaacgagtagatcagacctcttgaaaatgcttattcttcctcccttttattttttgtctcttttaagatggtaaaatggttctca

SEQ ID NO: 179702 - DNA, 120 bp, Artificial Sequence
  ENSG00000110801_15 (sequence is synthesized)
gggattcctgccaatactttgaattattttttcctctccatggtatcagtgttcatttccccagttcttgcacaccgctttctgttttggcagttctgccaggcaagccctgtgttcctt

SEQ ID NO: 179703 - DNA, 120 bp, Artificial Sequence
  ENSG00000110801_16 (sequence is synthesized)
gggactggttttgctgtggttggatacagataccagcttgccttgatgggattggtattgctgtgtgcttccagccacaggttctcacactcaattccaaagccttcctattgggcgaat

SEQ ID NO: 179704 - DNA, 120 bp, Artificial Sequence
  ENSG00000110801_17 (sequence is synthesized)
tccctcaaactctatttgacctgacagccatacgtattcccctctggtagccacagacatgctgtgtttaccaatgtttgctgtttaaattgcatgttctaattccacgtattttccagt

SEQ ID NO: 179705 - DNA, 120 bp, Artificial Sequence
  ENSG00000110801_18 (sequence is synthesized)
ctcttttataaagtctcagactataataaacacagcttgcccagtttatcctttcttttttattttaagatgtatgcatattaatcaatttaccatcactggggcatggcagtgtgggcg

SEQ ID NO: 179706 - DNA, 120 bp, Artificial Sequence
  ENSG00000110801_19 (sequence is synthesized)
gggagaattattcacattctcctaaaatgacagcagcagagagccttctgcctcagtggctctggctggtttcctgcaggggtcccagtggaaacccgtgtggccacctgttgccgtctt

SEQ ID NO: 179707 - DNA, 120 bp, Artificial Sequence
  ENSG00000110801_20 (sequence is synthesized)
ccatgagatgttagtggagagccactttgacgtggaatgatcctaatagatatagccagaccggttttgcggaaacgctttgtgctgagaaccgcaagctggtgcaccctgtgtcatatc

SEQ ID NO: 179708 - DNA, 120 bp, Artificial Sequence
  ENSG00000110801_21 (sequence is synthesized)
tgcccccagccagctggaattgtctgcaacacgcggtgcccggtgaggaggcaggcaggacggttgtgtgctgcatccatgagacctggaaattcagtttgcttttggaaaagagcattg

SEQ ID NO: 179709 - DNA, 69 bp, Artificial Sequence
  ENSG00000110801_22 (sequence is synthesized)
gacaggcgtgagccaccatgcctggcctaattttttagtagtatttttttagtagagacgggatttcac

SEQ ID NO: 179710 - DNA, 69 bp, Artificial Sequence; identical to SEQ ID NO: 179709
  ENSG00000110801_23 (sequence is synthesized)

SEQ ID NO: 179711 - DNA, 81 bp, Artificial Sequence
  ENSG00000110801_24 (sequence is synthesized)
cagcttatgttaatatggtacgtttgttataattgcaaatttgttttttgaaatacactgcagaaacattttgtactgaaa

SEQ ID NO: 179712 - DNA, 120 bp, Artificial Sequence
  ENSG00000110801_25 (sequence is synthesized)
tgttttttgaaatacactgcagaaacattttgtactgaaaaaaaccctttcaacattttgattagaattgtaatatgttgtaaatagtcgttcgttccattccccaacagctgtgtattg

SEQ ID NO: 179713 - DNA, 120 bp, Artificial Sequence
  ENSG00000110801_26 (sequence is synthesized)
agcacttccctgtgccaggcattgcagagtctagggatgctgtggacctcactgggggagggcttttctagtgaaagtgaccatgtattatgtaagtctgcctcccaagtgcatgtctcc

SEQ ID NO: 179714 - DNA, 120 bp, Artificial Sequence
  ENSG00000110801_27 (sequence is synthesized)
acttgttcagatctgggttcttttcccacatctgctcctgtgggttgagaacttgaatcccttcatgactgagggtcttgcctttgctccaaagtgacagtggcagaggaggcaggtcag

SEQ ID NO: 179715 - DNA, 120 bp, Artificial Sequence
  ENSG00000110801_28 (sequence is synthesized)
gtagtaccgcaatcccactgacaggcacaaggtatcaaaataccagctgctgtgctggcgtggcctgcagattgccatggtggttcacaacattttgaattagctatctgtactgaaaaa

SEQ ID NO: 179716 - DNA, 120 bp, Artificial Sequence
  ENSG00000110801_29 (sequence is synthesized)
tcagagaatttcacttcaaagatcccaattttcagcttttctggaaaaatcaaagattttgtagcattgggtcttcctcccaaacccagccaattggcaagagccctgtagcaggggtgc

SEQ ID NO: 179717 - DNA, 120 bp, Artificial Sequence
  ENSG00000110801_30 (sequence is synthesized)
cctttggccacctccctgtggactccctctcctggactgaatgtctccaggattactaggcttatgcagcactttttttttttttttttgagacgaattcttgctttgtcgccaggctgg

SEQ ID NO: 179718 - DNA, 77 bp, Artificial Sequence
  ENSG00000110801_31 (sequence is synthesized)
ccaccttgacttcccaaagttctgggattacaggcctgagccaccacgctcggcctaatttttgtattttttagtag

SEQ ID NO: 179719 - DNA, 70 bp, Artificial Sequence
  ENSG00000110801_32 (sequence is synthesized)
cggccaccttgacttcccaaagttctgggattacaggcctgagccaccacgctcggctggtcgcgatctc

SEQ ID NO: 179720 - DNA, 120 bp, Artificial Sequence
  ENSG00000110801_33 (sequence is synthesized)
gggattacaggcgtgagcctctgtgcccggcttatgcagcatttttccttctagaggatttcagagaaaagtgaaatcttgattacacccagcctgagtcattcattcacatgatcacag

SEQ ID NO: 179721 - DNA, 120 bp, Artificial Sequence
  ENSG00000110801_34 (sequence is synthesized)
cgctggcccctcatacatatgcctttgagttcatggctgtggattcagctggttgttaccttccttctgctcacctctcagggctcacccgagacagcactgccttcaggaagccttccc

SEQ ID NO: 179722 - DNA, 120 bp, Artificial Sequence
  ENSG00000110801_35 (sequence is synthesized)
tcatatcctagactagcgagggcagactttgctgctggccaggcctccctgcagtcatcagatgttattgtaattacttattctggagctgctccttgcaggactgaatgctccatgagg

SEQ ID NO: 179723 - DNA, 120 bp, Artificial Sequence
  ENSG00000110801_36 (sequence is synthesized)
gaatgtcctctgtcttggtcagagactccttctcacctctagctccacatctggcatgtaataagcacttgttaactcttcagtgaataaatgtaggagtcttgtgtcctccactgtctt

SEQ ID NO: 179724 - DNA, 120 bp, Artificial Sequence
  ENSG00000110801_37 (sequence is synthesized)
ggttctgggggttagctcgtggttatctgtttttgggggccgctcttcaacccactatgctgtgtatgcgcgtggcatgtgctaagtactctgcaggtcagctcgttagttcttgcagca

SEQ ID NO: 179725 - DNA, 120 bp, Artificial Sequence
  ENSG00000110801_38 (sequence is synthesized)
ggtagggagggaggcgagtgctcctattcccattttataattgaggaagctgaggcttagagaggagaaggtctcagctaaggatgcccagcttgtacatggcagagttgagattcaaat

SEQ ID NO: 179726 - DNA, 120 bp, Artificial Sequence
  ENSG00000110801_39 (sequence is synthesized)
taaagtctaaccaattgcaaagcccctcccctgaaccatgtgactggtttcactgcttttgtgtactctcctctgactcatgttaaaaaaaaaaaaagtgttgttttgaataaagaatac

SEQ ID NO: 179727 - DNA, 120 bp, Artificial Sequence
  ENSG00000110801_40 (sequence is synthesized)
attcccataggcaaaattcaaaacctacagaggggtataaaatggactgtctctctccctgccctgtcacctagccacccagttcttctccccggaggcagctggtgctatcagtttcct

SEQ ID NO: 179728 - DNA, 120 bp, Artificial Sequence
  ENSG00000110801_41 (sequence is synthesized)
tcttcagatctttttattttcagaagaatcaaagccctgccacagctgggtgctgtctgggcttttcactcccctctagcttccagggccagcagccaggtgtcagccacctgtgggaag

SEQ ID NO: 179729 - DNA, 120 bp, Artificial Sequence
  ENSG00000110801_42 (sequence is synthesized)
gagggtgtgaaggagtggaggaagaggctggccttggggatgatgctcaaaggagtctttggttttatcggcactgttttaacttcaaaaaagaatggattcatgcattacttgcgtcgt

SEQ ID NO: 179730 - DNA, 120 bp, Artificial Sequence
  ENSG00000110801_43 (sequence is synthesized)
taaaaataaaaaatgaaaaacacagtgcccaccccagggtagttgtgagggcatgagtagagcccctggtgtaagtgatcagtatgtggcagttttcattactgtcacctttattatgac

SEQ ID NO: 179731 - DNA, 120 bp, Artificial Sequence
  ENSG00000110801_44 (sequence is synthesized)
gtcagttaatggacatttgaattgttaccactttttggctattacgaagcatgttgctgcgaacattcttgtacagtttttttgtggagatgtagttaaatttaattccacagccacttc

SEQ ID NO: 179732 - DNA, 120 bp, Artificial Sequence
  ENSG00000110801_45 (sequence is synthesized)
tgggataggtcctaatctttactcatttcatcctcgaggaaaagccttgcagacctgaagtaacttatgtcaggacacatagttcctgccaggtggaatggggtcctaaaccctggtcag

SEQ ID NO: 179733 - DNA, 120 bp, Artificial Sequence
  ENSG00000110801_46 (sequence is synthesized)
gacacatagttcctgccaggtggaatggggtcctaaaccctggtcaggacacatagttcctgccaggtggaatggggtcctaaaccctggtcctaccagtcttctttaatggtcacaagt

SEQ ID NO: 179734 - DNA, 120 bp, Artificial Sequence
  ENSG00000110801_47 (sequence is synthesized)
ctgtaagttacacagaagctccctatcattcactaccccatctactgcatctaacccagtgccagttggcccacaacaaatacttgttacaggggtgaatgagtggtggtctgtcttctt

SEQ ID NO: 179735 - DNA, 120 bp, Artificial Sequence
  ENSG00000110801_48 (sequence is synthesized)
aggacctagaacaagagcgtcactctagtcttggatgcgccctgtgcctgtggctgcttgtctgggggcttctagggcaagtgtcttgtctaaatgttgatcactgaataaaatgggccc

SEQ ID NO: 179736 - DNA, 120 bp, Artificial Sequence
  ENSG00000110801_49 (sequence is synthesized)
agcctggcttgccttctcttacccttgaacctgggttaggaccgcagagagcagcatttggcctttcccatgctcctcaaggccttcacagtgtctggtaactgccagctctcagacatt

SEQ ID NO: 179737 - DNA, 120 bp, Artificial Sequence
  ENSG00000110801_50 (sequence is synthesized)
accccaggaggaggtggccccgttacccactgccccttcctgcatgaggtgtctacatccctgacctctttgttctgagcctaccctgtagaaaacaagctcgtgaccttggcattaaat

SEQ ID NO: 179738 - DNA, 120 bp, Artificial Sequence
  ENSG00000110801_51 (sequence is synthesized)
cgagattgtgccactgtactccagcctgcgcgacagagaacccatctcaaaaaaaagaaagtaatacatacatgccaggtgtggtggcacatgcccaaaatcccagcactttgggatgct

SEQ ID NO: 179739 - DNA, 120 bp, Artificial Sequence
  ENSG00000110801_52 (sequence is synthesized)
acagagcaagactctgtctcagaaaaataaagcaatacatacgcatggttaaaaaattaatgatatggaaatatataaaagtaaacatcttctttttccaaaggactagtcctctctgga

SEQ ID NO: 179740 - DNA, 120 bp, Artificial Sequence
  ENSG00000110801_53 (sequence is synthesized)
actagtcctctctggaagtaaccactcttaacaagtttttccatgttcttccagaaaacttcgcacactagagcaacacaggtgtccttttagaaaatattatcggccgggcacggtggc

SEQ ID NO: 179741 - DNA, 120 bp, Artificial Sequence
  ENSG00000110801_54 (sequence is synthesized)
aaaatattatcaaataggttcatactttggtggggttttggtttgttttgactaaaacccttcattctctgtactgtatttgaacaatacctattgatggacatttctggtgttttcagt

SEQ ID NO: 179742 - DNA, 120 bp, Artificial Sequence
  ENSG00000110801_55 (sequence is synthesized)
ttttgaatttctacacagtcctggaatgaacatttcatttgtatgtctcgctaatttttatactttttgtagagtgctgggattacaggcatttgtatgtcttgtaatttgtatgtcatc

SEQ ID NO: 179743 - DNA, 120 bp, Artificial Sequence
  ENSG00000110801_56 (sequence is synthesized)
ttgcaattgtgtactatgtaccttggatgtaccttttaaagatcgttggtggtgggacacgtgttttttgaggaagatggtactgaggtcagcaccctggctgccctgagagtgcagtgc

SEQ ID NO: 179744 - DNA, 120 bp, Artificial Sequence
  ENSG00000110801_57 (sequence is synthesized)
cacgttccccaccctctcgccaaccacaggattatgctgcaaatgtaaatctttaccaatttgataggcaaaaaatgggatctcagcattttagcctgcatctctgagtactaacgaggc

SEQ ID NO: 179745 - DNA, 120 bp, Artificial Sequence
  ENSG00000110811_0 (sequence is synthesized)
gcatttcccctcggctgccggcggctccgacatcatgctccggctcctccggccgctgctgctactgctgctgctgcctcccccggggtcccctgagccccccggcctgacccagctgtc

SEQ ID NO: 179746 - DNA, 80 bp, Artificial Sequence
  ENSG00000110811_1 (sequence is synthesized)
tgtccccgggggcgcccccgcaggcccccgacttgctctacgctgacgggctgcgcgcctacgcggccggggcttgggcg

SEQ ID NO: 179747 - DNA, 80 bp, Artificial Sequence
  ENSG00000110811_2 (sequence is synthesized)
gctgggccgggtgcggctggattgcggggcgagctgcgcggccgatccgggcgccgcgctccccgccgtgcttctcgggg

SEQ ID NO: 179748 - DNA, 120 bp, Artificial Sequence
  ENSG00000110811_3 (sequence is synthesized)
ctgggagcgacagcttctccgtgcagcgctccgccgcgcagactgcctgacccagtgcgcagcacggaggctgggccccgggggcgcggcgcggcttcgcgtggggagcgcgctccggga

SEQ ID NO: 179749 - DNA, 120 bp, Artificial Sequence
  ENSG00000110811_4 (sequence is synthesized)
cgccttccgccgtcgggagccctacaactacctgcagagggcctattaccagttgaagaagctggatctggcagctgcggcagcacacaccttctttgtagcaaaccccatgcacctgca

SEQ ID NO: 179750 - DNA, 120 bp, Artificial Sequence
  ENSG00000110811_5 (sequence is synthesized)
gatgcgggaggacatggctaagtacagacgaatgtcgggagttcggccccagagcttccgggacctggagacgcccccacactgggcagcctatgacactggcctggagctactggggcg

SEQ ID NO: 179751 - DNA, 120 bp, Artificial Sequence
  ENSG00000110811_6 (sequence is synthesized)
ccaggaggcaggactggcactgcccaggctagaggaggctcttcaggggagcctggcccagatggagagctgccgtgctgactgtgaggggcctgaggagcagcagggggctgaagaaga

SEQ ID NO: 179752 - DNA, 120 bp, Artificial Sequence
  ENSG00000110811_7 (sequence is synthesized)
ggaggatggggctgcgagccaggggggcctctatgaggccattgcaggacactggattcaggtcctgcagtgccggcaacgctgtgtgggggaaacagccacacgccctggtcgcagctt

SEQ ID NO: 179753 - DNA, 120 bp, Artificial Sequence
  ENSG00000110811_8 (sequence is synthesized)
ccctgtcccagacttccttcccaaccagctgaggcggctacatgaggcccatgctcaggtgggcaatctgtcccaggctatagaaaatgtcctgagtgtcctgctcttctacccggagga

SEQ ID NO: 179754 - DNA, 120 bp, Artificial Sequence
  ENSG00000110811_9 (sequence is synthesized)
tgaggctgccaagagggctctgaaccagtaccaggcccagctgggagagccgagacctggcctcggacccagagaggacatccagcgcttcatcctccgatccctgggggagaagaggca

SEQ ID NO: 179755 - DNA, 120 bp, Artificial Sequence
  ENSG00000110811_10 (sequence is synthesized)
gaagaggccttgggaccatgagcccgtgaagccaaagcccttgacctactggaaggatgtccttctcctggagggtgtgaccttgacccaggattccaggcagctgaatgggtcggagcg

SEQ ID NO: 179756 - DNA, 120 bp, Artificial Sequence
  ENSG00000110811_11 (sequence is synthesized)
ggcggtgttggatgggctgctcaccccagccgagtgtggggtgctgctgcagctggctaaggatgcagctggggctggagccaggtctggctatcgtggtcgccgctcccctcacacccc

SEQ ID NO: 179757 - DNA, 120 bp, Artificial Sequence
  ENSG00000110811_12 (sequence is synthesized)
ccatgaacgcttcgaggggctcacggtgcttaaggctgcgcagctggcccgggctgggacagtgggcagtcagggtgctaagctgcttctggaggtgagcgagcgggtgcggaccttgac

SEQ ID NO: 179758 - DNA, 120 bp, Artificial Sequence
  ENSG00000110811_13 (sequence is synthesized)
ccaggcctacttctccccggaacggcccctgcatctgtccttcacccacctggtgtgccgcagcgccatagaaggagagcaagagcagcgcatggacctgagtcacccagtgcacgcaga

SEQ ID NO: 179759 - DNA, 120 bp, Artificial Sequence
  ENSG00000110811_14 (sequence is synthesized)
caactgcgtcctggaccctgacacgggagagtgctggcgggagcccccagcctacacctatcgggactacagcggactcctctacctcaacgatgacttccagggtggggacctgttctt

SEQ ID NO: 179760 - DNA, 120 bp, Artificial Sequence
  ENSG00000110811_15 (sequence is synthesized)
cacggagcccaacgccctcactgtcacggctcgggtgcgtcctcgctgtgggcgccttgtggccttcagctccggtgtcgagaatccccatggggtgtgggccgtgactcggggacggcg

SEQ ID NO: 179761 - DNA, 120 bp, Artificial Sequence
  ENSG00000110811_16 (sequence is synthesized)
ctgtgccctggcactgtggcacacgtgggcacctgagcacagggagcaggagtggatagaagccaaagaactgctgcaggagtcacaggaggaggaggaagaggaagaggaagaaatgcc

SEQ ID NO: 179762 - DNA, 120 bp, Artificial Sequence
  ENSG00000110811_17 (sequence is synthesized)
cagcaaagacccttccccagagccccctagccgcaggcaccagagggtccaagacaagactggaagggcacctcgggttcgggaggagctgtgagtggctgagccagctccttgaggatg

SEQ ID NO: 179763 - DNA, 120 bp, Artificial Sequence
  ENSG00000110811_18 (sequence is synthesized)
tggccacttgacttgtggaaggccatcttgatgccaggacacacaggaagcccctgtgtgacatcaggagcagaacagcaagctctctgtccctgcacccccaccatcttggggacctac

SEQ ID NO: 179764 - DNA, 120 bp, Artificial Sequence
  ENSG00000110811_19 (sequence is synthesized)
aagggcctggactcagaggacagtgcacaggctagcctggagctcaccaggcctggggagctgggacggggccccgctgccggacctgcagccctggacagatggggaacactgtgcctc

SEQ ID NO: 179765 - DNA, 120 bp, Artificial Sequence
  ENSG00000110811_20 (sequence is synthesized)
cctgaacagaaatggcaggggaggaggctgatgctttaaatgaagaggatggtggggttgggaggtataaccctgctcctctctcccagtctgtgcaataaaggtcgtgaagatctctca

SEQ ID NO: 179766 - DNA, 120 bp, Artificial Sequence
  ENSG00000110811_21 (sequence is synthesized)
aggacatccagcgcttcatcctccgatccctgggggagaagaggcagctctactatgccatggagcacctggggaccagcttcaaggatccttttgatccactgcccagggctcctgaca

SEQ ID NO: 179767 - DNA, 120 bp, Artificial Sequence
  ENSG00000110811_22 (sequence is synthesized)
ttgagtcccgggcttttcctacctccgtcttcctctctggaaacagaagaaacttaatgagatatttcagctctaatgtcagggattccaggggctgaccttggtgggtgatgatgcttt

SEQ ID NO: 179768 - DNA, 120 bp, Artificial Sequence
  ENSG00000110811_23 (sequence is synthesized)
gccttgggaccatgagcccgtgaagccaaagcccttgacctactggaagggtgagttcctgggagggagaaggcaggagcctggagggtctgggggctgccagctactgctctgcctgcc

SEQ ID NO: 179769 - DNA, 120 bp, Artificial Sequence
  ENSG00000110811_24 (sequence is synthesized)
taatgtcagggattccaggggctgaccttggtgggtgatgatgcttttctggactgtcgcaggacccctggacccctgcagctctcatccctgaggcacttagagaaaagctcagagagg

SEQ ID NO: 179770 - DNA, 120 bp, Artificial Sequence
  ENSG00000110811_25 (sequence is synthesized)
gctgttgcccgggccccgcacggggctggggagcgtaccgcgggcctctgcgtaggagctggctaagcgaccgcgaggacctcttgagatcgcagaggagcagccgagggggagtgcgag

SEQ ID NO: 179771 - DNA, 120 bp, Artificial Sequence
  ENSG00000110811_26 (sequence is synthesized)
cagaatgggaatggggcggggaggtcgtgaggtgggacgggagcagatcgaagatggagggacagggccgcctcttcctaggaatgaagcggaggcggtgggggcgaaaccggctctcgg

SEQ ID NO: 179772 - DNA, 120 bp, Artificial Sequence
  ENSG00000110811_27 (sequence is synthesized)
acgggaagtgtgcgtgggtgtgtgtgtgtgtcgggggtggtggtgagtgtgaaccttcgcttggggcaggaggtagcttcggaaaggaaggagcagacggaggcaaggttggggtcctcc

SEQ ID NO: 179773 - DNA, 120 bp, Artificial Sequence
  ENSG00000110811_28 (sequence is synthesized)
gaggccagacctctgcgggcggggaggggacagcacgccgcagccgccggtaccgcagcagttgcctacgtggctggggaagcggggcgccggttgtactcacctcagctcagggtccta

SEQ ID NO: 179774 - DNA, 120 bp, Artificial Sequence
  ENSG00000110811_29 (sequence is synthesized)
gagacctgcgggttttgctggtcgctgaggtctcccccacttccccacctcacttaagccatcacttccacctggtctcccaaattgaggtcctgaagtcctgagacccatgtcccaccc

SEQ ID NO: 179775 - DNA, 120 bp, Artificial Sequence
  ENSG00000110811_30 (sequence is synthesized)
aactccgacgtctttagatcccctttccctcggtgccagccttctgagagtcccaacgttctggcctctaggggatctgcagttcgggcggtgggcggttctgattggccagtcttccat

SEQ ID NO: 179776 - DNA, 120 bp, Artificial Sequence
  ENSG00000110811_31 (sequence is synthesized)
gaggctctggggcacccagagtgtgtgtctggggtagggtggggaggctggccagggggcagaggtctgccccccgtcccagggctctgatgccctcctcccttcgcctcctcagttgaa

SEQ ID NO: 179777 - DNA, 120 bp, Artificial Sequence
  ENSG00000110811_32 (sequence is synthesized)
ggtttcactgtcagggctgcatgggaaccatcacttcacaaggactctaatttgccctcctttggcgcctgtgacaagctcaggagatgggcttccttctgccttgctgcttctcacctt

SEQ ID NO: 179778 - DNA, 120 bp, Artificial Sequence
  ENSG00000110811_33 (sequence is synthesized)
cgggcggtgttggatgggctgctcaccccagccgagtgtggggtgctgctgcagctggctaaggtactcgggaggctgaggcaggagaagcgcctgaacccgggaggcggaggttgtggt

SEQ ID NO: 179779 - DNA, 120 bp, Artificial Sequence
  ENSG00000110811_34 (sequence is synthesized)
ctccatctcaaaaaaaaaaaaaaaaagatgcagctggggctggagccaggtctggctatcgtggtcgccgctcccctcacaccccccatgaacgcttcgaggggctcacggtgcttaagg

SEQ ID NO: 179780 - DNA, 120 bp, Artificial Sequence
  ENSG00000110811_35 (sequence is synthesized)
ggtgagcacaggaggcacccgggcccgtctgatgcccagacctggaggagaggctgtgcaggaagccgggccccagggcctgggcttttgtgaaggagctttcttgggaccgagactacc

SEQ ID NO: 179781 - DNA, 120 bp, Artificial Sequence
  ENSG00000110811_36 (sequence is synthesized)
tgataggacccagcgtggagaaaagggatgttctgagagctggggccggggttgttgtcatggagagagaaggagcagtttgggctgatggacagagctggatgctgacagactccaaac

SEQ ID NO: 179782 - DNA, 120 bp, Artificial Sequence
  ENSG00000110811_37 (sequence is synthesized)
ccatgggtggagagcggcagagttgggcaggggctagggccgagaccaccctccccttgccttcctccttttctgccctgcctttcactgcctgcagctggcccgggctgggacagtggg

SEQ ID NO: 179783 - DNA, 120 bp, Artificial Sequence
  ENSG00000110811_38 (sequence is synthesized)
catagaaggtacgacagggaccccccactgctcttctccaacctcaggccctgcccccaggacactgcccccaagagccccggggtggacgtgcacggcctgagcccacagggtggcaga

SEQ ID NO: 179784 - DNA, 120 bp, Artificial Sequence
  ENSG00000110811_39 (sequence is synthesized)
catccctgaggcacttagagaaaagctcaggtaggatatgccccatggtgggaggggcttggcccgagctgggaggctgggtctggactgtcctgggcacccactgagcgcatctctcac

SEQ ID NO: 179785 - DNA, 120 bp, Artificial Sequence
  ENSG00000110841_0 (sequence is synthesized)
ggattcctgacatggtgtagtgcaggcagggtggggaaaggacggggaaggactcgtgtgctgcgagctggcggccgggccggagtgctggggctttgaactccgagaggaggtggacca

SEQ ID NO: 179786 - DNA, 120 bp, Artificial Sequence
  ENSG00000110841_1 (sequence is synthesized)
gaacttttggaactagtgccggcggctctccaccccccagtataaaagaacgtgtggatcactttgctgagtacatccaagatttgaagaactgaaataaatcagctttaaacctgcttt

SEQ ID NO: 179787 - DNA, 120 bp, Artificial Sequence
  ENSG00000110841_2 (sequence is synthesized)
ttaaaaatatctgggttggaatttgcccctgacaaataataaaatgatgagtgatgcaagtgacatgttggctgcagcgttggagcagatggatggtatcatagcaggttctaaggctct

SEQ ID NO: 179788 - DNA, 120 bp, Artificial Sequence
  ENSG00000110841_3 (sequence is synthesized)
ggaatattccaatgggatttttgattgccaatctcccacctctccattcatgggaagtttgcgagctctgcaccttgtggaagacctgcgtggattgttagagatgatggaaacagatga

SEQ ID NO: 179789 - DNA, 120 bp, Artificial Sequence
  ENSG00000110841_4 (sequence is synthesized)
gaaagaaggcttgagatgccagatcccagattcaacagcagaaacgcttgttgaatggcttcagagtcaaatgacaaatggacacctaccagggaacggagatgtgtatcaagaaaggct

SEQ ID NO: 179790 - DNA, 120 bp, Artificial Sequence
  ENSG00000110841_5 (sequence is synthesized)
ggcacgtttagaaaatgataaagaatccctcgttcttcaggtaagtgtgttaacagaccaggtggaggctcagggagagaagattcgagatttggagttttgtcttgaagagcacagaga

SEQ ID NO: 179791 - DNA, 120 bp, Artificial Sequence
  ENSG00000110841_6 (sequence is synthesized)
gaaggtgaatgccacagaagaaatgctgcagcaggagcttctaagtaggacatccttagaaactcagaagttggatctgatggctgaaatatctaacttgaagttgaaactgacagctgt

SEQ ID NO: 179792 - DNA, 120 bp, Artificial Sequence
  ENSG00000110841_7 (sequence is synthesized)
agagaaggacagattggattatgaagataagttcagagacacagaggggctgattcaggagatcaatgatttgaggttaaaagttagtgaaatggacagtgagagacttcagtatgaaaa

SEQ ID NO: 179793 - DNA, 120 bp, Artificial Sequence
  ENSG00000110841_8 (sequence is synthesized)
aaagcttaaatcaaccaaagatgaactggcatctttaaaagaacaactagaagaaaaggaatctgaagtaaaaaggctacaagaaaaattggtttgcaagatgaaaggagaaggggttga

SEQ ID NO: 179794 - DNA, 120 bp, Artificial Sequence
  ENSG00000110841_9 (sequence is synthesized)
aattgttgatagagatgaaaattttaaaaagaagctcaaagaaaaaaacatcgaagtacaaaaaatgaaaaaagctgtggagtccttgatggcagcaaatgaagaaaaggatcggaaaat

SEQ ID NO: 179795 - DNA, 120 bp, Artificial Sequence
  ENSG00000110841_10 (sequence is synthesized)
agaagatcttcgacagtgcctgaacaggtacaagaaaatgcaagacacggtggtactggcccaaggtaaaaaaggcaaagatggagaatatgaagagctgctcaattccagttccatctc

SEQ ID NO: 179796 - DNA, 120 bp, Artificial Sequence
  ENSG00000110841_11 (sequence is synthesized)
ctctttgctggatgcacagggtttcagtgatctggagaaaagtccatcacccactccagtaatgggatctcccagttgtgacccatttaacacaagtgttcccgaagagttccatactac

SEQ ID NO: 179797 - DNA, 120 bp, Artificial Sequence
  ENSG00000110841_12 (sequence is synthesized)
catcttgcaagtttccatcccttcattattgccagcaactgtaagcatggaaacttctgaaaaatcaaagttgactcctaagccagagacttcatttgaagaaaatgatggaaacataat

SEQ ID NO: 179798 - DNA, 120 bp, Artificial Sequence
  ENSG00000110841_13 (sequence is synthesized)
ccttggtgccactgttgatacccaactgtgtgataaacttttaacttcaagtctgcagaagtccagcagcctgggcaatctgaagaaagagacatctgatggggaaaaggaaactattca

SEQ ID NO: 179799 - DNA, 120 bp, Artificial Sequence
  ENSG00000110841_14 (sequence is synthesized)
gaagacttcagaggacagagctccggcagaaagcaggccatttgggacccttcctcccaggcccccagggcaggacacctccatggatgacaaccccttcggcactcgaaaagtcagatc

SEQ ID NO: 179800 - DNA, 120 bp, Artificial Sequence
  ENSG00000110841_15 (sequence is synthesized)
ttcctttggccggggcttttttaaaatcaaaagtaacaagagaacagcaagtgcaccaaacttagatcgtaaacgaagtgccagtgcacccaccctagctgaaacagaaaaagagacagc

SEQ ID NO: 179801 - DNA, 120 bp, Artificial Sequence
  ENSG00000110841_16 (sequence is synthesized)
agagcacctagatctggctggtgcttcttctcggccaaaagattcacagaggaacagtcccttccagataccgcctccatctccagattccaaaaagaaatccagaggtatcatgaaact

SEQ ID NO: 179802 - DNA, 120 bp, Artificial Sequence
  ENSG00000110841_17 (sequence is synthesized)
ctttggaaaacttaggagaagtcaatcaactacattcaacccagatgacatgtctgagcctgaattcaaaagaggagggacaagggcaaccgcggggccccgattaggttggtctcgaga

SEQ ID NO: 179803 - DNA, 120 bp, Artificial Sequence
  ENSG00000110841_18 (sequence is synthesized)
cttgggacagtctaacagtgacttggatatgccatttgccaagtggaccaaggagcaggtttgcaattggctgatggaacagggcttgggctcgtacctgaattctggcaagcactggat

SEQ ID NO: 179804 - DNA, 120 bp, Artificial Sequence
  ENSG00000110841_19 (sequence is synthesized)
tgcatctggccaaacgcttttgcaggcttctcaacaagatctagagaaggaacttggaatcaagcattcacttcatcgaaagaaactccagctagcactccaagccctgggatctgaaga

SEQ ID NO: 179805 - DNA, 120 bp, Artificial Sequence
  ENSG00000110841_20 (sequence is synthesized)
agaaaccaatcatgggaagctggatttcaactgggtcactagatggttggatgacattggcctccctcaatataagacccagtttgatgaaggacgggttgatggtcgaatgctacatta

SEQ ID NO: 179806 - DNA, 120 bp, Artificial Sequence
  ENSG00000110841_21 (sequence is synthesized)
catgactgttgatgacttactgtctctgaaggttgtaagtgtgctacaccatctcagtatcaaaagggccatccaggtcctgaggatcaataactttgaaccaaactgtctacggaggcg

SEQ ID NO: 179807 - DNA, 120 bp, Artificial Sequence
  ENSG00000110841_22 (sequence is synthesized)
gccatctgatgagaataccatcgccccatcagaagttcagaagtggactaaccatcgagtgatggagtggctgcgctccgtggacttggcagaatatgcgcccaatctcagaggcagtgg

SEQ ID NO: 179808 - DNA, 120 bp, Artificial Sequence
  ENSG00000110841_23 (sequence is synthesized)
tgtccatggtgggctcatggttctagagcctcgttttaacgtagaaacaatggctcagttattgaacatcccacccaataagactttgctgcgaagacatttggccactcatttcaacct

SEQ ID NO: 179809 - DNA, 120 bp, Artificial Sequence
  ENSG00000110841_24 (sequence is synthesized)
tttagcaattttgggaatttgagaaagaagaaacaggaagatggtgaagaatatgtttgtccaatggaattgggacaggcatcaggaagtgcatctaagaaaggatttaaacctggtttg

SEQ ID NO: 179810 - DNA, 120 bp, Artificial Sequence
  ENSG00000110841_25 (sequence is synthesized)
gatatgcgcctgtatgaggaagatgatttggaccggttagagcagatggaagattcagaagggacagtgagacagataggtgcattctctgaaggcatcaacaatctgacgcacatgtta

SEQ ID NO: 179811 - DNA, 120 bp, Artificial Sequence
  ENSG00000110841_26 (sequence is synthesized)
aaagaagatgacatgtttaaagattttgctgcccgttcccccagtgccagcattacagatgaagactcaaacgtttgaccgtagcacctggatgaacattaggagtgcttagtctttttt

SEQ ID NO: 179812 - DNA, 120 bp, Artificial Sequence
  ENSG00000110841_27 (sequence is synthesized)
ctacttgcttttccaaacactcacagtatatacaacaggcagcggattgtctattgtttgttgttccaacttctgctgtcgagaagtttaaacagaaagcaggagtaatgtgccgattct

SEQ ID NO: 179813 - DNA, 120 bp, Artificial Sequence
  ENSG00000110841_28 (sequence is synthesized)
gaagttgccacaaaaaataagacactggtgaatgagagtataattgtttttcttctatttaatgtaaaaatctgtgatatattatatttaaagtgttgcatttaagatgagtattttacc

SEQ ID NO: 179814 - DNA, 120 bp, Artificial Sequence
  ENSG00000110841_29 (sequence is synthesized)
agagtgtttccattcatatccgcggtatggaggatttgaggaacagtaaccaggatgtgaatgattttgttacatcagtgttcactgtagccacctaagtaggacattatatgatttcag

SEQ ID NO: 179815 - DNA, 120 bp, Artificial Sequence
  ENSG00000110841_30 (sequence is synthesized)
aatcaatatgtggaacttctttaagcattcagtgtgcccactaaatgccagccacacctccacttgcctcttattgtcttatttttatatatttttctaaatatatgtatatatacagta

SEQ ID NO: 179816 - DNA, 120 bp, Artificial Sequence
  ENSG00000110841_31 (sequence is synthesized)
catagaaaatagaacttttattttgtgacctaaggacgatggtgaaaagatcacgttttcaaaacaatctggtgatcagaatgttcatataccagctggtttctgaagaggtcagaatga

SEQ ID NO: 179817 - DNA, 120 bp, Artificial Sequence
  ENSG00000110841_32 (sequence is synthesized)
tctttctccatactgacttttaacaatgttgatcattgaggctaaattaatatatatgaaatattcctttttgatgacaccacaaaattgttgaacagtttaagaatttcaaccttaatc

SEQ ID NO: 179818 - DNA, 88 bp, Artificial Sequence
  ENSG00000110841_33 (sequence is synthesized)
cacaaaattgttgaacagtttaagaatttcaaccttaatcttggatccctttacctcatatggaagaacttgagggacattagtatac

SEQ ID NO: 179819 - DNA, 77 bp, Artificial Sequence
  ENSG00000110841_34 (sequence is synthesized)
caggttggagtgcaagccattctgcttcagccccaagtaggtgggactccaggcatgcaccaccatgcctggctaat

SEQ ID NO: 179820 - DNA, 68 bp, Artificial Sequence
  ENSG00000110841_35 (sequence is synthesized)
gttatttttttattattattgtttttttttagtgacagagtctcattctgttgcccatgctggagtgc

SEQ ID NO: 179821 - DNA, 87 bp, Artificial Sequence
  ENSG00000110841_36 (sequence is synthesized)
ttcctaggctccagtgatcctctcacctcagcttccctaatagctaggattacaggtgtgtggcctcccaccccaccccacccttca

SEQ ID NO: 179822 - DNA, 120 bp, Artificial Sequence
  ENSG00000110841_37 (sequence is synthesized)
gattacaggtgtgtggcctcccaccccaccccacccttcacacctggctgatttttcaaaaagtttttttgtagaaacagggtctcaccatgttgtccagcctggtctcaaactcctgtc

SEQ ID NO: 179823 - DNA, 120 bp, Artificial Sequence
  ENSG00000110841_38 (sequence is synthesized)
gtgctggaattacaggtgtgagccactctgcctggcctaccactaacttgaatacattcagaatcacctcctctccccaaaatttgtagaaatagtttttgaggaagccaaaagcaaagc

SEQ ID NO: 179824 - DNA, 120 bp, Artificial Sequence
  ENSG00000110841_39 (sequence is synthesized)
gaaatagtttttgaggaagccaaaagcaaagcagaaacctttacagtattgtttcttttctctttgttaactgtgtcattacagcaaaatactagcagtctgcctaaacatgttcattgt

SEQ ID NO: 179825 - DNA, 120 bp, Artificial Sequence
  ENSG00000110841_40 (sequence is synthesized)
acatttctcaggctatcaatgaatggaggtttttaaaaagttgaatatttgtctgaacattttatttcaaagttcaaaaaaacagaggctgcaaaattcattttataatggctattttgt

SEQ ID NO: 179826 - DNA, 120 bp, Artificial Sequence
  ENSG00000110841_41 (sequence is synthesized)
gacgataagatgtagttcatgtttttctgtagcactgggcccaaatattctttgtaaagaaaatcgctgcagcaaaaactgttactgtgtttattatatttgtagaagtattagaaaaat

SEQ ID NO: 179827 - DNA, 120 bp, Artificial Sequence
  ENSG00000110841_42 (sequence is synthesized)
attctattttttattcagtgctgcgtaattacccatggtagccaaccctacaaaagacaggttttcacaaattgaggtggaggtgggcggttcagtatctgccactggacttgattataa

SEQ ID NO: 179828 - DNA, 120 bp, Artificial Sequence
  ENSG00000110841_43 (sequence is synthesized)
actgtatttgaatatcagtggtattatcttttaagttgtcagcaagttaccaaggtattcattaaagaacttgtaatatcaaattactatttattcataacaattgatttgatgctaata

SEQ ID NO: 179829 - DNA, 120 bp, Artificial Sequence
  ENSG00000110841_44 (sequence is synthesized)
ataattttctttaaactctaccattcattatgtggtaactgtattgaacttactttatttggattttattttaatgtgactagatgtcaccacttcaaaaaatcaatttgttcttagaac

SEQ ID NO: 179830 - DNA, 74 bp, Artificial Sequence
  ENSG00000110841_45 (sequence is synthesized)
tagatgtcaccacttcaaaaaatcaatttgttcttagaacctggttgaaaataccaggaaactgttacagacgc

SEQ ID NO: 179831 - DNA, 64 bp, Artificial Sequence
  ENSG00000110841_46 (sequence is synthesized)
tcgcccctattttttattcaggatggtataacctaactgataataggtaataaggttaaatttt

SEQ ID NO: 179832 - DNA, 120 bp, Artificial Sequence
  ENSG00000110841_47 (sequence is synthesized)
taacctaactgataataggtaataaggttaaatttttttatgacgtattttatttacaaatatcatacactgctggtgttaccatatgaaaggaaataaagtcaattgataattgcctca

SEQ ID NO: 179833 - DNA, 120 bp, Artificial Sequence
  ENSG00000110841_48 (sequence is synthesized)
tttgtaactcaggcctgaaggaagctgacctcacacactggtttcgtccttgaggcacggcctcattacctcaggaacaccaggcagcgcttccacactgtgcttggagccattttaaac

SEQ ID NO: 179834 - DNA, 120 bp, Artificial Sequence
  ENSG00000110841_49 (sequence is synthesized)
agcacaagggttgatcgacaagtacaaacgtgtgaaaaatgtggcacagaatagaccatgaaaaggacactttatggcaggagggctgaactgatgcaggaaagtggagcatcgtcttgt

SEQ ID NO: 179835 - DNA, 120 bp, Artificial Sequence
  ENSG00000110841_50 (sequence is synthesized)
aaagcttaaatcaaccaaatctttaatggccaaactttctagcatgaaaatcaaggtgggtcagatgcagtatgaaaagcagcggatggaacaaaaatgggagtcactgaaggatgaact

SEQ ID NO: 179836 - DNA, 120 bp, Artificial Sequence
  ENSG00000110841_51 (sequence is synthesized)
ccggctccaatccctggatggctttaagtccagcaaacctttctgtttttcctatcgctcttctctttgcttaacctctcctctttcctccagacccacttaaaagcagttcatcaggaa

SEQ ID NO: 179837 - DNA, 120 bp, Artificial Sequence
  ENSG00000110841_52 (sequence is synthesized)
gcactctgtgaaatagcatagagtcatttttaggatagaaatatctgacaaataatagatattacactacctttcttaatcaaaattatactcaccttttattttcataagcccatcact

SEQ ID NO: 179838 - DNA, 120 bp, Artificial Sequence
  ENSG00000110841_53 (sequence is synthesized)
ttagggcagacgcattggggatttaaaggaatgttttaaatggaaagatgccttcgttcttaaggaggtacatttatttccatttgtctcatctgattcatacaactttaaccctaggag

SEQ ID NO: 179839 - DNA, 120 bp, Artificial Sequence
  ENSG00000110841_54 (sequence is synthesized)
ctggtgacttcttaagatttccaagctgctattttataggtataggtaactgtgttaccactttcctaatgtactttcttgtttcttcttggacaggggctgattcaggagatcaatgat

SEQ ID NO: 179840 - DNA, 120 bp, Artificial Sequence
  ENSG00000110841_55 (sequence is synthesized)
tttgttaaagtcctccaaaatctgtaaaggaaaccaatgaaaatcaatgtgtagttttagcatcaaagaaagagcagcagaatccagccaggaccagaaccacaggggattctccaagac

SEQ ID NO: 179841 - DNA, 120 bp, Artificial Sequence
  ENSG00000110841_56 (sequence is synthesized)
tctttactgtgactgggaatccattaatttcctcttcagcagctggaaaaggggaattctgtactttatttggtgtttaagattgctagactgtaaattctcatcacaaggatggacttg

SEQ ID NO: 179842 - DNA, 120 bp, Artificial Sequence
  ENSG00000110841_57 (sequence is synthesized)
tctcaattgcgatgcaagggaatttgtgccaaaggagttaaaaagaaccatccctgtgtcccgggatcgttgccctcagaactgaaattagataaagtaagggacttagaaactgttctg

SEQ ID NO: 179843 - DNA, 120 bp, Artificial Sequence
  ENSG00000110841_58 (sequence is synthesized)
agaaccaagatgggatttccctgctgaactatgtgagatgctgcatttctatgttgtgtttgctctgatgcagcagtaagtttcttgattcatttagaccagcacattaaaaaaaaaaaa

SEQ ID NO: 179844 - DNA, 120 bp, Artificial Sequence
  ENSG00000110841_59 (sequence is synthesized)
agactggcacttacactatcagccctcctgcttatcaagccttcagactcagactggagctatacccttgggttttctgggtctccagcttgcagttagcagatcttgggacttctcagc

SEQ ID NO: 179845 - DNA, 120 bp, Artificial Sequence
  ENSG00000110841_60 (sequence is synthesized)
ggtagggtctgcctgttccaaattctgttataaatcctttgttgcttattccaaaatttagaacatagaatagctgattagaacaagaaaagtttagggcaacacatgtgctccgatttt

SEQ ID NO: 179846 - DNA, 120 bp, Artificial Sequence
  ENSG00000110841_61 (sequence is synthesized)
attacttaagatatcttaattttcttttgactctaaggataactttttaaaaagtgctattagtgtacattttgtaaataccaacaacaggtcacctgattctgcccataaaaacagact

SEQ ID NO: 179847 - DNA, 120 bp, Artificial Sequence
  ENSG00000110841_62 (sequence is synthesized)
ggcttttagattgtgcctgaatgacctactgtggcttaaatcaaatagtcctgtaagggaaagaatcttgcacatgatagatgatttctcagtcatattgggttattcaccataaaggat

SEQ ID NO: 179848 - DNA, 120 bp, Artificial Sequence
  ENSG00000110841_63 (sequence is synthesized)
ccaatagcaattctaaatggaaagcatgatgaaagactttcaaaaagcaacaggatttacagcagtatttgaccggaagtgccatctagtggtttatggcaatcatttcagttccagttc

SEQ ID NO: 179849 - DNA, 82 bp, Artificial Sequence
  ENSG00000110841_64 (sequence is synthesized)
gccatctagtggtttatggcaatcatttcagttccagttcccgaattaaattgtggagttgggcctttaacccatttatgcg

SEQ ID NO: 179850 - DNA, 120 bp, Artificial Sequence
  ENSG00000110841_65 (sequence is synthesized)
aaaaaaaaaaatcacaacctccagcataaatgggttaatggtgttactcactgaacaatgaggccgctttctaggcatccttctcaaaaattgaagatgtggcagagctaccctttgtct

SEQ ID NO: 179851 - DNA, 120 bp, Artificial Sequence
  ENSG00000110841_66 (sequence is synthesized)
aaaatctaaagaatgtcacaaaaacagattcagtggaggacagaggaaaggagatattttgtgcttaaaggatattcaattttcagtaagatgcactcatatgcttatgagttaactgtg

SEQ ID NO: 179852 - DNA, 120 bp, Artificial Sequence
  ENSG00000110841_67 (sequence is synthesized)
ttgatataaaagctaataagaattgtatgaaagaatcgtgatctactttatgatctgtggtagacatgaaaaccgcttgctttgggaaccttaagagtacatcctacagctaaaacattt

SEQ ID NO: 179853 - DNA, 120 bp, Artificial Sequence
  ENSG00000110841_68 (sequence is synthesized)
tcatatgatgtgacacaaatattagagctcccagccagtcctgtgctgaatactctgtgttcccacctggtttacctctgcgtttctgagagcgaatagtacaatctatcctttagtggg

SEQ ID NO: 179854 - DNA, 120 bp, Artificial Sequence
  ENSG00000110841_69 (sequence is synthesized)
ggtgcagctacacaaactggagttattttacttgttaaaacacataatgccttactattatactttctatttgctctacagatttctcctccagagacttaagggtccaggtttgctgat

SEQ ID NO: 179855 - DNA, 120 bp, Artificial Sequence
  ENSG00000110841_70 (sequence is synthesized)
ttctttggggattgcttcatgctctgtacttggtgtttcctgacatattccttagtctatttcaatgtcctatctcaccccttctttactccatgttcttctgaccatttagcatgcagt

SEQ ID NO: 179856 - DNA, 120 bp, Artificial Sequence
  ENSG00000110841_71 (sequence is synthesized)
gaaaaaggaatttactattgttagaagaacgtatttctatcccacacccagaggccaccaatggcaatagtagccgaagcgtacctgtagttcagcttttgacatgtgtctaaaacatgt

SEQ ID NO: 179857 - DNA, 120 bp, Artificial Sequence
  ENSG00000110841_72 (sequence is synthesized)
ccattaacatgtgcttaatctgttctgtgaaagtattttcagaaatgataaaaagtaatgatggttacatctgaatataagttagatcatgacactcactccttttttcagaaactacca

SEQ ID NO: 179858 - DNA, 120 bp, Artificial Sequence
  ENSG00000110841_73 (sequence is synthesized)
gtggcatcacatcttactcagagtaaaaaccacagtgcttactgtgggctgcaaggcctcgtaggatttgccccccatgactttctgacttcatctcttgtcacacatctccttattcgc

SEQ ID NO: 179859 - DNA, 120 bp, Artificial Sequence
  ENSG00000110841_74 (sequence is synthesized)
tccacgccaagcacagtggctttttcactgattcttaaacatgccaggtacactggcctcagagcctttgcactggcttttccaggcactggcttttcactctgcctggaaagctctttc

SEQ ID NO: 179860 - DNA, 120 bp, Artificial Sequence
  ENSG00000110841_75 (sequence is synthesized)
gccagatatttgcatggctagctccctcacattctcctggtgtttactcaaaagtcatgctctcagtgaggccttgtatcaccaccctaactaaaattatacccatttattccttgtctt

SEQ ID NO: 179861 - DNA, 120 bp, Artificial Sequence
  ENSG00000110841_76 (sequence is synthesized)
acatctccctgcttattttgttcttagcattcaccattttcttatgtgcaatgtgtttgtgatgtttatatcatttattttctgtctttccaattggaatgtaagcatcaggaatcagat

SEQ ID NO: 179862 - DNA, 120 bp, Artificial Sequence
  ENSG00000110841_77 (sequence is synthesized)
ttttgcccttattttaaaaaaattactgtatccctggtgcttagaagaatgcctggctcagtagttatatttgtaatgaatgatgctccatgaatgataaagtggattgcatgtttgaat

SEQ ID NO: 179863 - DNA, 120 bp, Artificial Sequence
  ENSG00000110841_78 (sequence is synthesized)
tttaaatttaaatgtctatgttaacaacacaaagaggattagttccagtaggtgcactagttaaaaatgttctgattaacaagtctaaggcctcctcaggtctaatactggccatgtgtg

SEQ ID NO: 179864 - DNA, 120 bp, Artificial Sequence
  ENSG00000110841_79 (sequence is synthesized)
tgtgtgcattgaaacagcagccttaaggtctttaaacggggaaatacatttttcttgcttcagagattcaattttacttgcccgagaagcttgtgtggtgtgattttcatcgctaaaagc

SEQ ID NO: 179865 - DNA, 120 bp, Artificial Sequence
  ENSG00000110841_80 (sequence is synthesized)
aacagcagccacatggctgacaacaccaccacttaacaattcaaagctcggtcaccgttttcaggagtctcttccaaatctttctgaagtgcttttgaagttctacattccccgtctaag

SEQ ID NO: 179866 - DNA, 120 bp, Artificial Sequence
  ENSG00000110841_81 (sequence is synthesized)
ggcttttttaaaatcaaaagtaacaagagaacagcaagtgcaccaaacttaggtacgtatgaccaaaatgcctttgccctaattcttccacaaggaggaaaagagcagtgtcttcccttc

SEQ ID NO: 179867 - DNA, 120 bp, Artificial Sequence
  ENSG00000110841_82 (sequence is synthesized)
ccttactctttcattcattgattcatttctctttctcagaaacgaaggtgaatgacttaggggaatttagcaaaaaatgcctccgtggatttaatttagtgttgtgaagatatatagact

SEQ ID NO: 179868 - DNA, 120 bp, Artificial Sequence
  ENSG00000110841_83 (sequence is synthesized)
ctcaccctgctctctcctgtggtataaacttagcggaaagacctaaaatcatgattccctttgacttcatcatggagtttcccatctgttgtgatagtggataaattaacattgacgttg

SEQ ID NO: 179869 - DNA, 120 bp, Artificial Sequence
  ENSG00000110841_84 (sequence is synthesized)
agcctgtgtgtaacatcagaagcactgtgtgccgcatgcctctcctccacggtgtgtatttggcgaggaggagtctgatctgcatttcattttgtcatctctgtgttctctccattgggc

SEQ ID NO: 179870 - DNA, 120 bp, Artificial Sequence
  ENSG00000110841_85 (sequence is synthesized)
tgcgtgtgattgtgtgcgttgttgggatatctgaagatcgtaaacgaagtgccagtgcacccaccctaggtattgtacccctgcatgccagccttcaccagcactgtgctccaaaccaat

SEQ ID NO: 179871 - DNA, 120 bp, Artificial Sequence
  ENSG00000110841_86 (sequence is synthesized)
ccctgctcttggcatctgtgatctctagaaagcgatctgacagcaatcagaaaatgtagttctctattccggagtgttctttccaccttctgctaaaaaggactctgtagaggctttgct

SEQ ID NO: 179872 - DNA, 120 bp, Artificial Sequence
  ENSG00000110841_87 (sequence is synthesized)
tccaagcctaaatgctgttttaaccaatactagtaacactcactgtgtgaatagctttgagaggacctagacgtgtgcagcatccctcagagtgcagggcaggaatgtcctggcattgta

SEQ ID NO: 179873 - DNA, 120 bp, Artificial Sequence
  ENSG00000110841_88 (sequence is synthesized)
cattgcagctctttcagccttgaagtgcatattaccacacactaactcccaggtccttgcagtccgttctccatgcttacatttcccccagcctccaaaaagaaatttttttggccatat

SEQ ID NO: 179874 - DNA, 120 bp, Artificial Sequence
  ENSG00000110841_89 (sequence is synthesized)
agggaggtttatagaagacattgaatattatagttttaggcttacttctcttaggggaacattcttctgacgttttattactttgaagatggagataatatttagtgatgacagaagcaa

SEQ ID NO: 179875 - DNA, 120 bp, Artificial Sequence
  ENSG00000110841_90 (sequence is synthesized)
ctttacttgatatctgaggcgttaccccccaaagtgattttagaagaggggcagctcagttttcctctttgtaaggcaggggacaaatggggaaaaaagttctcaaaataaaaaagagaa

SEQ ID NO: 179876 - DNA, 120 bp, Artificial Sequence
  ENSG00000110841_91 (sequence is synthesized)
atatggtagttttaagatgaggataagctaggcagcattttcaggggcacctgtagccatcgtggttgaaggatttgaattgggaaagttcctttgggtttttccaaaaggtgctgttac

SEQ ID NO: 179877 - DNA, 120 bp, Artificial Sequence
  ENSG00000110841_92 (sequence is synthesized)
cttgtatagatatccacctatctattcacatggaccagcaaacgggacttctctctctatcgatataaatgtctagaatgaacactggatgcataaaataaactgatctgttcagacaac

SEQ ID NO: 179878 - DNA, 120 bp, Artificial Sequence
  ENSG00000110844_0 (sequence is synthesized)
ccggccacgaaggggtgcgaccccccgccggccccgccctcccggctgcggcctggccaatcagagcggctcttactggcgggtgggctgagccggcccagctgctcggaggctctggca

SEQ ID NO: 179879 - DNA, 120 bp, Artificial Sequence
  ENSG00000110844_1 (sequence is synthesized)
gggctgagccggcccagctgctcggaggctctggcatgtcggttcccgattctggtccccggcccccagcagcgcctgcccccttcccaccggggccccccatgatgccaccacccttca

SEQ ID NO: 179880 - DNA, 120 bp, Artificial Sequence
  ENSG00000110844_2 (sequence is synthesized)
tgccccctccagggatccccccaccctttcctccgatggggctaccccccatgagtcagagaccaccagctatcccccccatgccacctggcatcctgcccccaatgcttccaccaatgg

SEQ ID NO: 179881 - DNA, 120 bp, Artificial Sequence
  ENSG00000110844_3 (sequence is synthesized)
gggcgccaccaccactcacacagataccaggaatggtacctccgatgatgccaggaatgctgatgccagcggtgcctgtcaccgcagcgacggctccgggtgcggacaccgccagctctg

SEQ ID NO: 179882 - DNA, 120 bp, Artificial Sequence
  ENSG00000110844_4 (sequence is synthesized)
ctgtggctgggacaggccctccgagggccctatggagtgagcatgtggccccagatgggcgcatctactactacaatgctgacgacaagcagtccgtgtgggagaagcccagcgtgctca

SEQ ID NO: 179883 - DNA, 120 bp, Artificial Sequence
  ENSG00000110844_5 (sequence is synthesized)
agtccaaggcagagctgctcctgtcccaatgtccctggaaagagtacaagtcggacacaggcaaaccttattactataacaaccagagtaaagagtcccgctggacccggcccaaggatc

SEQ ID NO: 179884 - DNA, 120 bp, Artificial Sequence
  ENSG00000110844_6 (sequence is synthesized)
tggatgacctagaggttctagtcaaacaagaggctgcagggaaacagcagcagcagctgccacagacacttcagccacagccacctcagccacagcctgaccccccacctgtgcctcctg

SEQ ID NO: 179885 - DNA, 120 bp, Artificial Sequence
  ENSG00000110844_7 (sequence is synthesized)
gccccaccccagtgcccacaggcctcctggaacctgagccaggtgggagtgaagattgtgatgtgttggaggccacccagcccctggaacaggggttcctgcagcagctggaggagggcc

SEQ ID NO: 179886 - DNA, 120 bp, Artificial Sequence
  ENSG00000110844_8 (sequence is synthesized)
ccagcagttctggacagcatcagccacagcaggaggaggaggaatcaaagccagaaccagagaggtctggcctcagttggagcaaccgggagaaggcaaagcaggcattcaaggaactgc

SEQ ID NO: 179887 - DNA, 120 bp, Artificial Sequence
  ENSG00000110844_9 (sequence is synthesized)
tgagggacaaggctgtcccctccaatgcctcatgggaacaggccatgaagatggtggtcaccgacccccgttacagtgccttgcctaaactgagtgagaaaaagcaggcattcaatgcct

SEQ ID NO: 179888 - DNA, 120 bp, Artificial Sequence
  ENSG00000110844_10 (sequence is synthesized)
acaaggcgcagcgggagaaggaggagaaggaggaggcccggctaagggccaaagaggccaagcagaccctgcagcatttcctggagcagcatgaacgcatgacctccaccacccgctacc

SEQ ID NO: 179889 - DNA, 120 bp, Artificial Sequence
  ENSG00000110844_11 (sequence is synthesized)
ggcgggcagaacagacctttggggagctggaggtctgggctgtggtccctgagagggatcgaaaagaggtttatgatgatgtcctcttcttcctggccaagaaggagaaggaacaggcca

SEQ ID NO: 179890 - DNA, 120 bp, Artificial Sequence
  ENSG00000110844_12 (sequence is synthesized)
agcagctccggcgccgcaatatccaggccctaaagagcatcctggatgggatgagtagtgtcaacttccaaaccacgtggtcccaggcccagcagtacctcatggataaccccagctttg

SEQ ID NO: 179891 - DNA, 120 bp, Artificial Sequence
  ENSG00000110844_13 (sequence is synthesized)
agctttggagagggaagaggaggaggaacgggagcgggcccggcttcgggagcgacgccaacaacgcaagaatcgggaggccttccagaccttcctggacgagctgcatgagacagggca

SEQ ID NO: 179892 - DNA, 120 bp, Artificial Sequence
  ENSG00000110844_14 (sequence is synthesized)
gctgcactctatgtccacctggatggagctatatccagcagtcagcactgatgtccgctttgccaacatgctgggccagccgggctccacccctctggacttattcaagttctatgtgga

SEQ ID NO: 179893 - DNA, 120 bp, Artificial Sequence
  ENSG00000110844_15 (sequence is synthesized)
ggagttgaaggcacgattccatgatgaaaagaagatcattaaggacatccttaaggaccggggcttctgcgtggaggtgaacacggcctttgaggacttcgcccacgtcataagctttga

SEQ ID NO: 179894 - DNA, 120 bp, Artificial Sequence
  ENSG00000110844_16 (sequence is synthesized)
caagagggctgccgcactggacgcaggcaacatcaagctgaccttcaatagtctgctggagaaagcagaggcacgggagagggagcgggagaaggaggaggcacgcaggatgcggcgcag

SEQ ID NO: 179895 - DNA, 120 bp, Artificial Sequence
  ENSG00000110844_17 (sequence is synthesized)
ggaagctgcctttcgaagcatgctgaggcaggctgtgcctgctctggagctaggcactgcctgggaagaggtccgtgagcgttttgtgtgtgactcagcctttgagcagatcaccctgga

SEQ ID NO: 179896 - DNA, 120 bp, Artificial Sequence
  ENSG00000110844_18 (sequence is synthesized)
gtcggagcggatccggctcttccgggagttcctacaggtgctggagactgaatgccagcacctccacaccaaaggccgaaagcatggcaggaaaggcaagaagcaccatcacaagcgttc

SEQ ID NO: 179897 - DNA, 120 bp, Artificial Sequence
  ENSG00000110844_19 (sequence is synthesized)
ccactcaccctcaggctctgagtcagaagaagaggagctgcccccaccatctctccggccccccaagcggaggaggcggaacccctcagagtcaggctctgagccctcttcctcacttga

SEQ ID NO: 179898 - DNA, 120 bp, Artificial Sequence
  ENSG00000110844_20 (sequence is synthesized)
ttcagttgaaagtgggggtgctgcccttggaggacggggctccccttcctcccatcttcttggagcagatcatggccttcggaaagccaagaaaccaaaaaagaaaactaagaagagaag

SEQ ID NO: 179899 - DNA, 120 bp, Artificial Sequence
  ENSG00000110844_21 (sequence is synthesized)
acacaagtcgaatagtcctgagagtgagacagaccctgaggagaaagctggcaaggagagcgatgagaaagaacaagaacaggacaaggacagggagctccaacaggcagagctccctaa

SEQ ID NO: 179900 - DNA, 120 bp, Artificial Sequence
  ENSG00000110844_22 (sequence is synthesized)
ccgttccccaggctttggaatcaagaaggagaagacaggctgggacacgtcagaaagtgagctgagtgagggtgagctggagaggcggcggcggacactcctacagcagctggatgatca

SEQ ID NO: 179901 - DNA, 120 bp, Artificial Sequence
  ENSG00000110844_23 (sequence is synthesized)
ccagtgacccaatgagctgttctctgcctcgggtctgtgtgaggccatggctcctgggccaccctcaccgtctgcctcagacttcttccttagtctggtctgtgtccactttttctaaag

SEQ ID NO: 179902 - DNA, 120 bp, Artificial Sequence
  ENSG00000110844_24 (sequence is synthesized)
taaccccacccccagcacaccattgttggcacctctcaaggttgctcttggtgttcaagggtcccctactccctggactagtgcagtccttgccctcagccccagaccagagatgggtgg

SEQ ID NO: 179903 - DNA, 120 bp, Artificial Sequence
  ENSG00000110844_25 (sequence is synthesized)
tatatgccatgtggggtgggtgatgccagtagataaaagtgtgagagaaggggtctccagggaagagtcacaggctgttggacgcagcctgggtggcagagggcagggtcatcaccctct

SEQ ID NO: 179904 - DNA, 120 bp, Artificial Sequence
  ENSG00000110844_26 (sequence is synthesized)
agcatcagtgcctgctcctgcctgccctggccctgaggctccaccacttcttcctccacccaggacctaatgtacgtgtgttttgttttttgttttttaaataacaatatttataacatg

SEQ ID NO: 179905 - DNA, 120 bp, Artificial Sequence
  ENSG00000110844_27 (sequence is synthesized)
gtggccgatggggcggggaggccgctggggatagctgggaccccggggagggcgagggaggccaagggtgagggaagagagcccgggaggggggatgggggcggggactgggggcgaagg

SEQ ID NO: 179906 - DNA, 120 bp, Artificial Sequence
  ENSG00000110844_28 (sequence is synthesized)
gcccgggaggggggatgggggcggggactgggggcgaaggggcgggggaggccatgatggagcctggccgggggcgaaaggtgcgagagtggcgggactgggtgaagagtgggattggga

SEQ ID NO: 179907 - DNA, 120 bp, Artificial Sequence
  ENSG00000110844_29 (sequence is synthesized)
gaggtgggggtgggttcgcggagaaagatcgggaaagaagagagagggcggagatgaggggactgaggggaccaggggacaggtggggaccagtttcccctcctgggatatttggtgtgc

SEQ ID NO: 179908 - DNA, 120 bp, Artificial Sequence
  ENSG00000110844_30 (sequence is synthesized)
gacatgcccttcccccagccccagcgcccgttccctttggaagcctgggtgctcctcagaccacttggggactccctgcttcaccttcctgcatttgcaagagcttgtctcctgaggtgg

SEQ ID NO: 179909 - DNA, 120 bp, Artificial Sequence
  ENSG00000110844_31 (sequence is synthesized)
caaggagtctgggatattgatgggaccaggggactatttactggggctggaatacgggaggcataggtgggaataagatggaggtcggagcaaggacttagtatgtatcctttggctttt

SEQ ID NO: 179910 - DNA, 120 bp, Artificial Sequence
  ENSG00000110844_32 (sequence is synthesized)
tcaccctccctggaaatgcctccataggatctcaagaagtccaccttccccagtttgaaccaggccaggtggtagctaaaggttcctgtgtcctctactcactaggtccccttagctccc

SEQ ID NO: 179911 - DNA, 120 bp, Artificial Sequence
  ENSG00000110844_33 (sequence is synthesized)
gcacctggagtgtggaagtagactctgtcgccatgatctctacactgtgggaggaagagccagctctgtctccttgtggagtcatcccctctggccccagtccttcccaggatagagaaa

SEQ ID NO: 179912 - DNA, 120 bp, Artificial Sequence
  ENSG00000110844_34 (sequence is synthesized)
cgctttgccaacatgctgggccagccgggtaaggcagccaggctcccccttctctggcctggcttcctgccctgccagcctctctgcaccccctactaccggctcctgtcctcggcccag

SEQ ID NO: 179913 - DNA, 120 bp, Artificial Sequence
  ENSG00000110844_35 (sequence is synthesized)
actaggggccagcaggtagcaggctctgccctgcagtcccgtgagtctgacttggaatgcaggactatgacctccattctttccctcttctcatcgcatccacccaggtccccggcagca

SEQ ID NO: 179914 - DNA, 120 bp, Artificial Sequence
  ENSG00000110844_36 (sequence is synthesized)
ctccccacactcaaatccttctcgccagccatgtactcagctcttctagtttcccactcatccccaaaggcatatacattctcttgttactcacgtgccttgtccagctcccttaaggag

SEQ ID NO: 179915 - DNA, 120 bp, Artificial Sequence
  ENSG00000110844_37 (sequence is synthesized)
cacacttatcctcacagagccacacactgtggacacatgaatatagttcttcacatcctctttgtccccagaagagtcagtagcacctggggatcttgctgtgccttcttatgctatcgc

SEQ ID NO: 179916 - DNA, 120 bp, Artificial Sequence
  ENSG00000110844_38 (sequence is synthesized)
tcagtgtagcagagtctgggtaggatatagaatttggcatccactgtgaaggaatgagcctcgggagttgtctcaacaaaatactctcacttgaggagaacgaagaatggagctgctatg

SEQ ID NO: 179917 - DNA, 120 bp, Artificial Sequence
  ENSG00000110844_39 (sequence is synthesized)
cgattctcccttgggatcccagagctatggccctgaagggtgggggaagcctgttagggagcagagatctctaggagcaggacacatggattctggcctggcctgcttctccatccccca

SEQ ID NO: 179918 - DNA, 120 bp, Artificial Sequence
  ENSG00000110844_40 (sequence is synthesized)
tggcctgggtcctgggggccactgggcttggccccaacccttccccctcctctttcttcggcagacggctccgggtgcggacaccgccagctgtgagtcttctgggggcctgctcccccc

SEQ ID NO: 179919 - DNA, 120 bp, Artificial Sequence
  ENSG00000110844_41 (sequence is synthesized)
gtggtcaccgacccccgttacaggtaggcctgggcagagggagccaggccctgttcatgagagcagctgtgctagggactccctaaaaaaccccagctcaacactcagccctaagggaac

SEQ ID NO: 179920 - DNA, 120 bp, Artificial Sequence
  ENSG00000110844_42 (sequence is synthesized)
cagagtcaggacagtgatagattgggttggggtgcaaggggaagaaaagctggagggcctccaggagaaggaaaggaaaggtatctgacacaacacgttcaataaatgcttcctgaattg

SEQ ID NO: 179921 - DNA, 120 bp, Artificial Sequence
  ENSG00000110844_43 (sequence is synthesized)
ggcatcctcgcgatatcttaagctgcgactcagaaaacaaatcctactcctggcatcatccacagaaccagctgttcacaccccacatcctcctcagctttctggagtctcagccttagg

SEQ ID NO: 179922 - DNA, 120 bp, Artificial Sequence
  ENSG00000110844_44 (sequence is synthesized)
ctggaagcaaggatgggcgccattcctgaggaagagaaccgctggacatgggttctctgaggatggggagcatggaggtgatgtgctgtgacacgagtggtggaatgcttcactggagaa

SEQ ID NO: 179923 - DNA, 120 bp, Artificial Sequence
  ENSG00000110844_45 (sequence is synthesized)
ggggatgtgtcctgtgctgtccctgtgctcgccacccacactcccctcccagaggaggcacggtgcccagcctgcaaactcaccccagtcacccagccagcggagaatgtcatacaggtg

SEQ ID NO: 179924 - DNA, 120 bp, Artificial Sequence
  ENSG00000110844_46 (sequence is synthesized)
ttggagaaggaggcaattttttccagcaagatgaatctcttcttgccctttggatctctctgctgagatttggcattttcttttaaatcatatcctaattcttcctggaagcggttgatg

SEQ ID NO: 179925 - DNA, 120 bp, Artificial Sequence
  ENSG00000110844_47 (sequence is synthesized)
acacaattgacattgtccaaaatgtctgagagctgggtagaaatatcctatagagaagcagcagattgtagtgttagggctgtggacttgagccagaagccacatgctagcagcgtgacc

SEQ ID NO: 179926 - DNA, 120 bp, Artificial Sequence
  ENSG00000110844_48 (sequence is synthesized)
ttggacaagtcgcttagcctctttgggtctcagttttcttatatttaaagtgggaatcattatagtacctatgtcacagggtttctgtaaggattaaatgaattaaatattttaaagtgc

SEQ ID NO: 179927 - DNA, 120 bp, Artificial Sequence
  ENSG00000110844_49 (sequence is synthesized)
caccctcagtgagtaagcgtgtagaagggacatggggtgaagctgggttgttttggggaaataaacactttgttttccccttacaatatctcccttggagggaagtttgaggattccttt

SEQ ID NO: 179928 - DNA, 120 bp, Artificial Sequence
  ENSG00000110844_50 (sequence is synthesized)
gatgccctccacaagccccagctcctttgagggtagactggattgggagggctgcacctgtggaagtagaaagaacttcctctacctgcccaagcaagaagctggagaaggaaaactgga

SEQ ID NO: 179929 - DNA, 120 bp, Artificial Sequence
  ENSG00000110844_51 (sequence is synthesized)
cttagacttcctcagagcatgaggttcctgcctgtgaagaatgaacagaggggctagaacaaagaaaaagagcctgtctttctcctgttgggacttagtagggatttttctatctctaga

SEQ ID NO: 179930 - DNA, 120 bp, Artificial Sequence
  ENSG00000110844_52 (sequence is synthesized)
tcatggccttcggaaagccaagaaaccaaaaaagaaaactaagaagagaagacacaagtcggtgagtgaaggaacttctacctaagcccctgctattttgtgagttctgttctacctgcc

SEQ ID NO: 179931 - DNA, 120 bp, Artificial Sequence
  ENSG00000110844_53 (sequence is synthesized)
agggcaggctgctgggtactaggagacatgggcaagtgtggcctcctgctttggtgagcagattgggtccggcttggggcaggcactaatgatagctctgccttctccaagtccctccat

SEQ ID NO: 179932 - DNA, 120 bp, Artificial Sequence
  ENSG00000110844_54 (sequence is synthesized)
cgactggtgggtgtgaagatcctcctctccacatcctcccctagctgctctggctctctccgtgggctctcctgctccttttctagctggacccatctccgctgttgctccctggccagg

SEQ ID NO: 179933 - DNA, 120 bp, Artificial Sequence
  ENSG00000110844_55 (sequence is synthesized)
tcttccagattccactgccgcagcttctcctgatgctcctgctccagcagggcccacttcttctgccgctgctgccacatctcctcctcctccagccacagctgcctccgcatctcccgg

SEQ ID NO: 179934 - DNA, 120 bp, Artificial Sequence
  ENSG00000110844_56 (sequence is synthesized)
ccgaattcctcctcccagggctcctcttggctctcagaggtcacctgcctggagctctctagagacagctgcttgctacagtggaacttaatttggagtcctcccttctggaagtagtcc

SEQ ID NO: 179935 - DNA, 120 bp, Artificial Sequence
  ENSG00000110844_57 (sequence is synthesized)
tcctggtctttgtctttgtggcctaagctttctgccaccggtctttcccatttcttaggaaacctgcgatctactaagggtaaaagcacaggctcaaggctctcagtgtccttgctgccg

SEQ ID NO: 179936 - DNA, 120 bp, Artificial Sequence
  ENSG00000110844_58 (sequence is synthesized)
aacacatctgcgaccctcgagcgcacagtcatggtggaaagtggctggtgccctgcagctatagcaccactgtcccgtatcatggccatgggacttgggggaagtggcgagaacaactgc

SEQ ID NO: 179937 - DNA, 120 bp, Artificial Sequence
  ENSG00000110844_59 (sequence is synthesized)
tcctccttcatcggttcctgttggctttcctccatgactgtttctttccttgggagggtctctctctcagagggacctggggagtcaacagaaacctcagccaggtcttctgcctgacct

SEQ ID NO: 179938 - DNA, 120 bp, Artificial Sequence
  ENSG00000110844_60 (sequence is synthesized)
ggtaccttccccctaagatctctacctgcttcagcagagcatccctcctgctctcaaggacctccatgaactgctggaagtgcagcctctggctgctgagctctttggtcgcctgcattt

SEQ ID NO: 179939 - DNA, 120 bp, Artificial Sequence
  ENSG00000110844_61 (sequence is synthesized)
gcaggtgcctgtatttggtctccaggctcctgttctccttgtgttggaggatcaaggccttgttgaggttctccaccacagtggccatgtacctgatggccctgacctcccccttgctga

SEQ ID NO: 179940 - DNA, 120 bp, Artificial Sequence
  ENSG00000110844_62 (sequence is synthesized)
acatggtagagtccaggagctcctgcagcatggacgtcacctccgaggccttcgtgttcatggtatgctggtcctggagcatctgttctgggcttagtggctgaggatgggatggagatg

SEQ ID NO: 179941 - DNA, 120 bp, Artificial Sequence
  ENSG00000110844_63 (sequence is synthesized)
caatagcggaaagtaaaggctttcctagttgggacagcatatagggaaacgttaaggattataggcaccggagaggtaacccggcttgaggggttggttaaagggaaaggcgagacttag

SEQ ID NO: 179942 - DNA, 120 bp, Artificial Sequence
  ENSG00000110844_64 (sequence is synthesized)
ggcgagaccgagcggggctaattgaggcgacccggggaggggcgggaccgcggactggatttcgacttccaaattcccacgaggtataggagtctgagggttgcacaggaccttatgcat

SEQ ID NO: 179943 - DNA, 120 bp, Artificial Sequence
  ENSG00000110844_65 (sequence is synthesized)
tgtttgactcctccagagcctttagagaaacttctatcaggcccgcctgctaggcactagtcggggagataatgtagccagggagatgtggcggacagaaagggcagagaggctctctga

SEQ ID NO: 179944 - DNA, 120 bp, Artificial Sequence
  ENSG00000110844_66 (sequence is synthesized)
gacttggtcccgtcagccggaccccacctggacggctggggccacttgtggtcgccgggaggtgtcacctctaactcttcgtgtcaggagtttttctacctctccggagttctttggctc

SEQ ID NO: 179945 - DNA, 120 bp, Artificial Sequence
  ENSG00000110844_67 (sequence is synthesized)
tcaggaacctagcacggcatcacgcgagtcccggctcagtcggttcccgattctggtccccggcccccagcagcgcctgcccccttcccaccggggccccccatgatgccaccacccttc

SEQ ID NO: 179946 - DNA, 120 bp, Artificial Sequence
  ENSG00000110844_68 (sequence is synthesized)
ttcaccactgagggcccaccccagtcacgtcacagccctgggccagctccagttcccttcctttctctgccccagccctgccctgtgctcatggcggtgtccaggccaggctgagtgggg

SEQ ID NO: 179947 - DNA, 120 bp, Artificial Sequence
  ENSG00000110844_69 (sequence is synthesized)
accctctgagatatcaaccccctagcttggcccgtgcaggctttctttgcctttaagaagatgaaattgttaccaaagcaggagaagaatgtcagacactctgcatgcttgccagagagc

SEQ ID NO: 179948 - DNA, 120 bp, Artificial Sequence
  ENSG00000110844_70 (sequence is synthesized)
tcgctagaggacgtgcagaaggtcaaagtcctccatcaccagagcaagttcagccaccaggccccttaagcacagtgccaagagcctgtgaaaacatgaaacctttgaaaatatgggtgc

SEQ ID NO: 179949 - DNA, 120 bp, Artificial Sequence
  ENSG00000110844_71 (sequence is synthesized)
atgggtgccaaaatataaaaacaaagaatgtatgaatagtatgaaatctttataaaacataatattgtcagtttcattcactgtcaaatttaatattcaaaatagtctcattacatttat

SEQ ID NO: 179950 - DNA, 120 bp, Artificial Sequence
  ENSG00000110848_0 (sequence is synthesized)
agactcaacaagagctccagcaaagactttcactgtagcttgacttgacctgagattaactagggaatcttgagaataaagatgagctctgaaaattgtttcgtagcagagaacagctct

SEQ ID NO: 179951 - DNA, 120 bp, Artificial Sequence
  ENSG00000110848_1 (sequence is synthesized)
ttgcatccggagagtggacaagaaaatgatgccaccagtccccatttctcaacacgtcatgaagggtccttccaagttcctgtcctgtgtgctgtaatgaatgtggtcttcatcaccatt

SEQ ID NO: 179952 - DNA, 120 bp, Artificial Sequence
  ENSG00000110848_2 (sequence is synthesized)
ttaatcatagctctcattgccttatcagtgggccaatacaattgtccaggccaatacacattctcaatgccatcagacagccatgtttcttcatgctctgaggactgggttggctaccag

SEQ ID NO: 179953 - DNA, 120 bp, Artificial Sequence
  ENSG00000110848_3 (sequence is synthesized)
aggaaatgctactttatttctactgtgaagaggagctggacttcagcccaaaatgcttgttctgaacatggtgctactcttgctgtcattgattctgaaaaggacatgaactttctaaaa

SEQ ID NO: 179954 - DNA, 120 bp, Artificial Sequence
  ENSG00000110848_4 (sequence is synthesized)
cgatacgcaggtagagaggaacactgggttggactgaaaaaggaacctggtcacccatggaagtggtcaaatggcaaagaatttaacaactggttcaacgttacagggtctgacaagtgt

SEQ ID NO: 179955 - DNA, 120 bp, Artificial Sequence
  ENSG00000110848_5 (sequence is synthesized)
gtttttctgaaaaacacagaggtcagcagcatggaatgtgagaagaatttatactggatatgtaacaaaccttacaaataataaggaaacatgttcacttattgactattatagaatgga

SEQ ID NO: 179956 - DNA, 120 bp, Artificial Sequence
  ENSG00000110848_6 (sequence is synthesized)
aaaaaaggaagaaattccaggaaaatctgcactgtgggcttttattgccatgagctagaagcatcacaggttgaccaataaccatgcccaagaatgagaagaatgactatgcaacctttg

SEQ ID NO: 179957 - DNA, 120 bp, Artificial Sequence
  ENSG00000110848_7 (sequence is synthesized)
gatgcactttatattattttgaatccagaaataatgaaataactaggcgtggacttactatttattgctgaatgactaccaacagtgagagcccttcatgcatttgcactattggaagga

SEQ ID NO: 179958 - DNA, 120 bp, Artificial Sequence
  ENSG00000110848_8 (sequence is synthesized)
gttagatgttggtactagatactgaatgtaaacaaaggaattatggctggtaacataggtttttagtctaattgaatcccttaaactcagggagcatttataaatggacaaatgcttatg

SEQ ID NO: 179959 - DNA, 120 bp, Artificial Sequence
  ENSG00000110848_9 (sequence is synthesized)
aaactaagatttgtaatatttctctctttttagagaaatttgccaatttactttgttatttttccccaaaaagaatgggatgatcatgtatttatttttttacttcctcagctgtagaca

SEQ ID NO: 179960 - DNA, 120 bp, Artificial Sequence
  ENSG00000110848_10 (sequence is synthesized)
ggtccttttcgatggtacatatttctttgcctttataatcttttatacagtgtcttacagagaaaagacataagcaaagactatgaggaatatttgcaagacatagaatagtgttggaaa

SEQ ID NO: 179961 - DNA, 120 bp, Artificial Sequence
  ENSG00000110848_11 (sequence is synthesized)
atgtgcaatatgtgatgtggcaaatctctattaggaaatattctgtaatcttcagacctagaataatactagtcttataataggtttgtgactttcctaaatcaattctattacgtgcaa

SEQ ID NO: 179962 - DNA, 120 bp, Artificial Sequence
  ENSG00000110848_12 (sequence is synthesized)
acgtgcaatacttcaatacttcatttaaaatatttttatgtgcaataaaatgtatttgtttgtattttgtgttcagtacaattataagctgtttttatatatgtgaaataaaagtagaat

SEQ ID NO: 179963 - DNA, 120 bp, Artificial Sequence
  ENSG00000110848_13 (sequence is synthesized)
aagataaaatactactattttaattcatatggctaatcagtgctttccttccgtttctaagtggagaaaacaaacaaacaaacaaacattgtacctatttcagatgtaggaaaatgtcat

SEQ ID NO: 179964 - DNA, 120 bp, Artificial Sequence
  ENSG00000110848_14 (sequence is synthesized)
cccagagaaccatatgatcagcctgaggtcaaaatgagatttaatttaatcttttaaatttgatttgattgcttagcttcaaagaccagaaatccaaatatgctgatcctatatagaatg

SEQ ID NO: 179965 - DNA, 120 bp, Artificial Sequence
  ENSG00000110848_15 (sequence is synthesized)
agtacatggtcagataagctgtcatgcctcaagttgcagcttttgagaaacaggatttactatctacttccccagaagggtgtttaatgtaacaaactcctttgtgctttctttaagaac

SEQ ID NO: 179966 - DNA, 120 bp, Artificial Sequence
  ENSG00000110848_16 (sequence is synthesized)
aaaggctgagctcttcaagagctctaacaatctcttctgaatgcgtatactctggaattctttaataacaggctttattattattctttttctttatccacacttataatacataaaata

SEQ ID NO: 179967 - DNA, 120 bp, Artificial Sequence
  ENSG00000110848_17 (sequence is synthesized)
aatgcttatagtaatttttctcagcaaactctaatgtgagtagtagatctggttaatttggaaatatttcaataataattatgatgatgcaacaaaaacccattttcaatgtcacattta

SEQ ID NO: 179968 - DNA, 120 bp, Artificial Sequence
  ENSG00000110848_18 (sequence is synthesized)
gtctttactaataagacagttgctggaaaataaatccttcttactatttctcagttttcatctccacagaataaagaatagtttcaatgcctaattatgagtttctatacacctgaaaga

SEQ ID NO: 179969 - DNA, 120 bp, Artificial Sequence
  ENSG00000110848_19 (sequence is synthesized)
catagctctcattgccttatcaggtgggtctacacttcatcaattctttcaaagcctcctagctgtaagcattcatgcccagctgaaatcaatattagtttagtctagttaatcagaaac

SEQ ID NO: 179970 - DNA, 120 bp, Artificial Sequence
  ENSG00000110848_20 (sequence is synthesized)
tagctaattcagaatcatcccatgtaccatatatggccaatttcctaatcaatactaaacataattccacaatccttgaataattaatgtaatacttttataagtattaaaagtatctat

SEQ ID NO: 179971 - DNA, 120 bp, Artificial Sequence
  ENSG00000110848_21 (sequence is synthesized)
gatttatatattactgtagaataaaattgcatttgaaaagatgtttacatctagaatgaagggagctgatttgaattctgaataaatacctatttagctagaaaaaaatgtgaacttcac

SEQ ID NO: 179972 - DNA, 120 bp, Artificial Sequence
  ENSG00000110851_0 (sequence is synthesized)
gaggccgcgggccgggaagggccgggcgggacgggaaacgttagggcagcggcccccggggtgagggggccgagcggacgggcagggccccgaggcgaactctgcccggatgaggaacaa

SEQ ID NO: 179973 - DNA, 120 bp, Artificial Sequence
  ENSG00000110851_1 (sequence is synthesized)
tctgcccggatgaggaacaaagcagtggggcaggcgcgtgcgcccccagcgcagctggcaggttgggcagcccccttcccgaagcttctggacggaaggccccaggtgttccccgagatg

SEQ ID NO: 179974 - DNA, 120 bp, Artificial Sequence
  ENSG00000110851_2 (sequence is synthesized)
ccccaacccgtggcggggtgcacggccaccggccctcgggagaagttgggcggccccgggcgaccccggggacgagtggccgcgtcggtgcagcggttgtgagcaagatgtggtagcacg

SEQ ID NO: 179975 - DNA, 120 bp, Artificial Sequence
  ENSG00000110851_3 (sequence is synthesized)
tgaccctggaacgcaaaccctgatgcctgttccccaccacccgagcgctcctttctctgatatttggccccaagccgatgcatcacaggatgaatgaaatgaacctgagtccagtgggga

SEQ ID NO: 179976 - DNA, 120 bp, Artificial Sequence
  ENSG00000110851_4 (sequence is synthesized)
tggagcagctgacttcatcctctgtgagcaatgccttgccagtctcaggaagtcacctgggattggctgcctcacccactcacagtgccatccctgccccaggcctcccagtggcaattc

SEQ ID NO: 179977 - DNA, 120 bp, Artificial Sequence
  ENSG00000110851_5 (sequence is synthesized)
caaacctgggtccctccctgagctctctgccttctgctctgtctttaatgctaccaatgggtattggggatcgaggggtgatgtgtgggttacctgaaagaaactacaccctacctccac

SEQ ID NO: 179978 - DNA, 120 bp, Artificial Sequence
  ENSG00000110851_6 (sequence is synthesized)
caccttaccctcacctggagagcagttatttcagaaccattctacctggcattttatcttatttagctgacagaccacctccacagtacatccaccctaactctataaatgttgatggta

SEQ ID NO: 179979 - DNA, 120 bp, Artificial Sequence
  ENSG00000110851_7 (sequence is synthesized)
atacagcattatctatcaccaataacccttcagcactagatccctatcagtccaatggaaatgttggattagaaccaggcattgtttcaatagactctcgctctgtgaacacacatggtg

SEQ ID NO: 179980 - DNA, 120 bp, Artificial Sequence
  ENSG00000110851_8 (sequence is synthesized)
cccaaagtcttcatcccagtgatggccatgaggtggccttggacacagcaatcactatggagaacgtttctagggttaccagcccaatttcgacagatggaatggcagaggagcttacga

SEQ ID NO: 179981 - DNA, 120 bp, Artificial Sequence
  ENSG00000110851_9 (sequence is synthesized)
tggacggtgttgcaggcgagcattcccaaatcccaaatggctccagaagtcatgaacctctgtctgtggattctgtgagcaacaaccttgcagcagacgctgtaggacatggtggtgtga

SEQ ID NO: 179982 - DNA, 120 bp, Artificial Sequence
  ENSG00000110851_10 (sequence is synthesized)
tacccatgcatgggaatggcctggagctccctgtggtcatggagacagaccacattgcaagtcgggtcaatggcatgtctgacagtgccctcagtgactccattcacactgtggccatga

SEQ ID NO: 179983 - DNA, 120 bp, Artificial Sequence
  ENSG00000110851_11 (sequence is synthesized)
gcaccaactctgtaagcgtggcactctctacctcacacaaccttgcctccctagaatctgtttccctccatgaagttggcctcagcctagaacctgtggctgtctcctccatcacccagg

SEQ ID NO: 179984 - DNA, 120 bp, Artificial Sequence
  ENSG00000110851_12 (sequence is synthesized)
aggttgctatggggacaggtcatgtagatgtatcttcagacagtctttcttttgtatcaccttcactgcaaatggaagactccaattcaaacaaggagaacatggcaaccttgtttacaa

SEQ ID NO: 179985 - DNA, 120 bp, Artificial Sequence
  ENSG00000110851_13 (sequence is synthesized)
tttggtgtactctgtgtgaccgcgcctatccctcggactgtcccgaacatggaccagtgacttttgttcctgacactccaatagagagcagagcaaggctttctctcccaaagcagcttg

SEQ ID NO: 179986 - DNA, 120 bp, Artificial Sequence
  ENSG00000110851_14 (sequence is synthesized)
ttctccgtcagtcaattgtgggagcagaagttggtgtatggactggagaaaccattcctgtgcggacttgctttggacctctaattggccagcagagtcactccatggaagtagcagaat

SEQ ID NO: 179987 - DNA, 120 bp, Artificial Sequence
  ENSG00000110851_15 (sequence is synthesized)
ggacagacaaggcagttaaccatatctggaagatataccacaatggtgtcctagaattctgcatcattacaactgatgaaaatgaatgtaattggatgatgtttgtgcgcaaagccagga

SEQ ID NO: 179988 - DNA, 120 bp, Artificial Sequence
  ENSG00000110851_16 (sequence is synthesized)
accgggaagagcagaatttggtggcttatcctcatgatggaaaaatctttttctgcacctcacaagatatccctcctgaaaatgaactgcttttttattatagccgagattatgctcaac

SEQ ID NO: 179989 - DNA, 120 bp, Artificial Sequence
  ENSG00000110851_17 (sequence is synthesized)
accatcttcctacccagggacatagcggcagccatgggccaagtcacagcaaagaaaggaagtggaagtgctcaatgtgcccccaagcttttatctctccttccaaacttcatgtccact

SEQ ID NO: 179990 - DNA, 120 bp, Artificial Sequence
  ENSG00000110851_18 (sequence is synthesized)
ttatgggtcacatgggtatgaagccccacaagtgtgatttctgtagcaaggcttttagtgatcccagcaacctgcggacccacctcaagatacatacaggtcagaagaactacaggtgta

SEQ ID NO: 179991 - DNA, 120 bp, Artificial Sequence
  ENSG00000110851_19 (sequence is synthesized)
ccttgtgtgacaagtctttcacccagaaggctcacctggagtcccacatggttatccacactggggagaagaatcttaagtgtgattactgtgacaagttgtttatgcggaggcaggacc

SEQ ID NO: 179992 - DNA, 120 bp, Artificial Sequence
  ENSG00000110851_20 (sequence is synthesized)
tcaagcagcacgtgctcatccacactcaagaacgccagatcaagtgtcccaagtgtgataagctgttcttgagaacaaatcacttaaagaagcatctcaattctcatgaaggaaaacggg

SEQ ID NO: 179993 - DNA, 120 bp, Artificial Sequence
  ENSG00000110851_21 (sequence is synthesized)
attatgtctgtgaaaaatgtacaaaggcttatctaaccaaataccatctcacccgccacctgaaaacctgcaaagggcccacctccagttcgtcagcaccagaggaggaagaagaggatg

SEQ ID NO: 179994 - DNA, 120 bp, Artificial Sequence
  ENSG00000110851_22 (sequence is synthesized)
actcagaagaggaagatctagcagactctgtggggacagaagactgtaggattaacagtgctgtgtattcagcggatgagtctctttctgcacataaataaaaggaaaagaaacaagcaa

SEQ ID NO: 179995 - DNA, 120 bp, Artificial Sequence
  ENSG00000110851_23 (sequence is synthesized)
ttttggatgaaaatgcaaatggaaaaatacacataaccagttatctactataatggtttttatataaaatggttcctgatttattttcagccagtaatcaaaacagactgggaatgaata

SEQ ID NO: 179996 - DNA, 120 bp, Artificial Sequence
  ENSG00000110851_24 (sequence is synthesized)
aagcacttacagaagagtatcctaatgaaaacactttaaaacagattgggaaaactgagcatgtgtcctgttttaagtggtggactgggagggaagtgtcaacttctgaggtctttattt

SEQ ID NO: 179997 - DNA, 120 bp, Artificial Sequence
  ENSG00000110851_25 (sequence is synthesized)
acatgataatctgggagatgcatttatgcctgaatcaaagctgccttctgctcaaacaaatcagatttatttcacattcttccattattccattttcctgctggtcctgtgacttggtaa

SEQ ID NO: 179998 - DNA, 120 bp, Artificial Sequence
  ENSG00000110851_26 (sequence is synthesized)
cattctaaacggtccttgccccatagccatcctgattgctgatagtgttttatgcagactcttgtgacttatactcaccacagaatggattgggacacagcagcataagtgtgctacttg

SEQ ID NO: 179999 - DNA, 120 bp, Artificial Sequence
  ENSG00000110851_27 (sequence is synthesized)
gcagctagtaagtttaaagcaggacctgccttaactgctcctggccacttggaagtttagggtagatcttgttttccaaagtttcggcaggtgcctggagggcaaataaaaaagcagcag

SEQ ID NO: 180000 - DNA, 120 bp, Artificial Sequence
  ENSG00000110851_28 (sequence is synthesized)
tcagtcagtagtcagtgatggagagaacaagaggagagatgcctggcctctgcccaagaaattagctttgatggaagcctgagcaagtcacctggttattgtaacgtggagatctttgta

SEQ ID NO: 180001 - DNA, 120 bp, Artificial Sequence
  ENSG00000110851_29 (sequence is synthesized)
ggtttagacatggctccctgtctccagtaaacatccagccattcagacaaagggggcctggagatacagagagcccaaataatgcctgctggattgtctcctgatgagtacatgtggact

SEQ ID NO: 180002 - DNA, 120 bp, Artificial Sequence
  ENSG00000110851_30 (sequence is synthesized)
cacctgaggaagggaaggaagggaataatcttttatgtttcatttaccttatgaaaagtgttaaaacattgccaactcaaaataacattatttaatgcatgtgcaaagttaggtcttccc

SEQ ID NO: 180003 - DNA, 120 bp, Artificial Sequence
  ENSG00000110851_31 (sequence is synthesized)
agttgtctcagtgctgaggaacctcatcagagaagcatggaagatgccaaaggatttttggaaggtaaagaaggctgaatagtgaccacatgggcctgttttcagggtcccagcttagtt

SEQ ID NO: 180004 - DNA, 120 bp, Artificial Sequence
  ENSG00000110851_32 (sequence is synthesized)
aagtcacccatgcacctggtcattgtgtctcccatgcacatccagcgtttctcagaagcagacccacccttaagttgacaggattgatggaacatgctctcctgctcaaggcacaacctc

SEQ ID NO: 180005 - DNA, 120 bp, Artificial Sequence
  ENSG00000110851_33 (sequence is synthesized)
tgggctggagtagaggactctggtgggaaggttttgctgctaatgtatttatggaatgaatgtatttcattcaaatctgtattcctctaggaaggattaaaattaaacttttttaaaata

SEQ ID NO: 180006 - DNA, 120 bp, Artificial Sequence
  ENSG00000110851_34 (sequence is synthesized)
tgcttccaataacagactgtagtgtttttgactacaaaaggtcatcagctaatatgttgaagtaagaattctgtttctctacaactgccttctcatagataggacgggaaattacaaaaa

SEQ ID NO: 180007 - DNA, 120 bp, Artificial Sequence
  ENSG00000110851_35 (sequence is synthesized)
cattccagaggaaatagtaaatagttctgcctaagctttcatataggattttgcaatgggggaatgttgtacttagtatgcatttcaaaattaatgtgcttgatctattaaatgtgataa

SEQ ID NO: 180008 - DNA, 120 bp, Artificial Sequence
  ENSG00000110851_36 (sequence is synthesized)
cggggcgcggcggcccggcctgcgggccgcgggcgggctaatccacagcccttgggtggcggtgtcggcagcgcctggggctttcgggtagctgggatgggggctgcgaccttgttgtgg

SEQ ID NO: 180009 - DNA, 80 bp, Artificial Sequence
  ENSG00000110851_37 (sequence is synthesized)
gggcgccgcttgcgggccgcggcggggagggcgcacgcacgaggggcggagcggcgggcgctgagagtggctgaggatcc

SEQ ID NO: 180010 - DNA, 120 bp, Artificial Sequence
  ENSG00000110851_38 (sequence is synthesized)
ccaggtagaaatgaaatattctcaccatataaaatggcctcccagtggcaattccaaacctgggtccctccctgagctctctgccttctgctctgtctttaatgctaccaatgggtattg

SEQ ID NO: 180011 - DNA, 120 bp, Artificial Sequence
  ENSG00000110852_0 (sequence is synthesized)
ttttcctcttcaagtttctctctcagaacaaatgcagtgttaatcccgaagccgcttgcgggacactggcttcttctcctcagtttcctccctaatatatttgttgaggggtaatacaaa

SEQ ID NO: 180012 - DNA, 120 bp, Artificial Sequence
  ENSG00000110852_1 (sequence is synthesized)
atcactgggaaactgattagagcagatttgaagacaaaattgtggcctggtaacttagcaaaagcataatggtgtcatcttgtatgctgatgataacgttctgggcactttgttactttc

SEQ ID NO: 180013 - DNA, 120 bp, Artificial Sequence
  ENSG00000110852_2 (sequence is synthesized)
gttttcttttttccctctgtgtgtctttgtgtgtgtttgtgtgtgtgctcacacccacacgtgtgactttgcacgcatttgtctttgagagagagataatagtttttgtttttctttcag

SEQ ID NO: 180014 - DNA, 120 bp, Artificial Sequence
  ENSG00000110852_3 (sequence is synthesized)
tagccaaagtttaaaccattgctttttctttgattctatcgcttttaaggtgatctttcttaacacaggataagaaagcagtaatgtcctaaagaatgctgttgaattaattagtatcag

SEQ ID NO: 180015 - DNA, 120 bp, Artificial Sequence
  ENSG00000110852_4 (sequence is synthesized)
cctctcctacagttctggaaggatacgtggttaagtaccactcctggatgaatcagaaaaacagccacttgagcaatttcgtgttctgtggttcagatgagaatcccagttgagaaagta

SEQ ID NO: 180016 - DNA, 120 bp, Artificial Sequence
  ENSG00000110852_5 (sequence is synthesized)
agaaaatatgtgtttattcttcagctttaaattgttatatcacaaacttccttcctccttggcaagctttcttttttgacgagaagaaaattgtaataaacaacagtatgactaatagat

SEQ ID NO: 180017 - DNA, 120 bp, Artificial Sequence
  ENSG00000110852_6 (sequence is synthesized)
agtcacatggttacttccagtttgcaaaatgctatttatactttgagttactcttcaaaagtggtatacctctagtttggagctgtgctgtaaaaacaagagtaacatttttatattaaa

SEQ ID NO: 180018 - DNA, 120 bp, Artificial Sequence
  ENSG00000110852_7 (sequence is synthesized)
tgaagagagtttctgcaagacatgacacaaagctgctagcagaaaatcaaaacgctgattaaaagaagcacggtatgatgaccaaacataaaaagtgttttataattgttggtgttttaa

SEQ ID NO: 180019 - DNA, 120 bp, Artificial Sequence
  ENSG00000110852_8 (sequence is synthesized)
taacaactaatattattactctgatagttaaactaactcgagattctcagagtttatgcccctatgattggattggtttccaaaacaaatgctattatttctctaaagaagaaggagatt

SEQ ID NO: 180020 - DNA, 120 bp, Artificial Sequence
  ENSG00000110852_9 (sequence is synthesized)
ggaattcaagtaaatacaactgttccactcaacatgccgacctaactataattgacaacatagaagaaatgaattttcttaggcggtataaatgcagttctgatcactggattggactga

SEQ ID NO: 180021 - DNA, 120 bp, Artificial Sequence
  ENSG00000110852_10 (sequence is synthesized)
agatggcaaaaaatcgaacaggacaatgggtagatggagctacatttaccaaatcgtttggcatgagagggagtgaaggatgtgcctacctcagcgatgatggtgcagcaacagctagat

SEQ ID NO: 180022 - DNA, 120 bp, Artificial Sequence
  ENSG00000110852_11 (sequence is synthesized)
gttacaccgaaagaaaatggatttgcaggaaaagaatacactaagttaatgtctaagataatggggaaaatagaaaataacattattaagtgtaaaaccagcaaagtacttttttaatta

SEQ ID NO: 180023 - DNA, 120 bp, Artificial Sequence
  ENSG00000110852_12 (sequence is synthesized)
aacaaagttcgagttttgtacctgtctggttaattctgcttacgtgtcaggctacacataaaagccacttcaaagattggcaaaaaatggttacaggtattctgctgagtttttttcttt

SEQ ID NO: 180024 - DNA, 70 bp, Artificial Sequence
  ENSG00000110852_13 (sequence is synthesized)
aactgtaaaccagaaaacaattgtggggatcaaggacagacatagcacttagacaggactttcatgaccc

SEQ ID NO: 180025 - DNA, 120 bp, Artificial Sequence
  ENSG00000110852_14 (sequence is synthesized)
atgcctatctatgcagaaaattgaagatgttcagagtatgccatgtgacataaaggtgaaacacctagtgatgctttgtttgaagaatgtaagactaacatcaagtagtagacttaatac

SEQ ID NO: 180026 - DNA, 120 bp, Artificial Sequence
  ENSG00000110852_15 (sequence is synthesized)
ctatctttatattttaaagagtgtacacagaagagcttgataatgtttgaaaacgttttaagagccaatactccaccaagaaaggagaattgtctgaggaaggaggggattctgcattct

SEQ ID NO: 180027 - DNA, 120 bp, Artificial Sequence
  ENSG00000110852_16 (sequence is synthesized)
acttcctgagagaaactttgctctgacttctccattttgttttgctgcctgtctctgaggtcccgtggcagcttccattagaacactctctaccagtaatgcaatagagaggaaaatcaa

SEQ ID NO: 180028 - DNA, 120 bp, Artificial Sequence
  ENSG00000110852_17 (sequence is synthesized)
aatttcctcctagaccggagtgtaagttttcagtgagcagataccatgtcttctgtgaaattttatccttagcattatgcacaaagcaggtacaaatgaaaagtctaatggatccttgtt

SEQ ID NO: 180029 - DNA, 120 bp, Artificial Sequence
  ENSG00000110852_18 (sequence is synthesized)
ggaagtggacaaatagtgtaataaatatgtggtaattggaaatgctgtgcgagagctcaatttcaaacttgtctttctaggagcttacagtttgaaaattgtgaaggaatagatattcaa

SEQ ID NO: 180030 - DNA, 120 bp, Artificial Sequence
  ENSG00000110852_19 (sequence is synthesized)
attgaacatttatcaatttggaatcatatctaaagaaaatgtatctaacatatttgtttcacaaaaaaaactgaaggtcagaggaaaaataaagtactttttcaaaactccatagctatt

SEQ ID NO: 180031 - DNA, 120 bp, Artificial Sequence
  ENSG00000110852_20 (sequence is synthesized)
ttctagtgaggccaggagttgaacaattgttgccttgcacttcacaacctacgaaacaagaggtacacagtaggttgtcataaaaattggcatgtatgattttgaaattaattttgtctc

SEQ ID NO: 180032 - DNA, 120 bp, Artificial Sequence
  ENSG00000110871_0 (sequence is synthesized)
gtcactcgactaccaagatggcggcccccgggagctgtgctctatggagctattgcggccgtgggtggtcgcgggcgatgcggggctgccagctcctcgggcttcgtagctcttggcccg

SEQ ID NO: 180033 - DNA, 120 bp, Artificial Sequence
  ENSG00000110871_1 (sequence is synthesized)
gggacctactaagtgctcggctcttgtcccaagagaagcgggcagcggaaacgcactttgggtttgagactgtgtcggaagaggagaaggggggcaaagtctatcaggtgtttgaaagtg

SEQ ID NO: 180034 - DNA, 120 bp, Artificial Sequence
  ENSG00000110871_2 (sequence is synthesized)
tggctaagaagtatgatgtgatgaatgatatgatgagtcttggtatccatcgtgtttggaaggatttgctgctctggaagatgcacccgcttcctgggacccagctgcttgatgttgctg

SEQ ID NO: 180035 - DNA, 120 bp, Artificial Sequence
  ENSG00000110871_3 (sequence is synthesized)
gaggcacaggtgacattgcattccggttccttaattatgttcagtcccagcatcagagaaaacagaagaggcagttaagggcccaacaaaatttatcctgggaagaaattgccaaagagt

SEQ ID NO: 180036 - DNA, 120 bp, Artificial Sequence
  ENSG00000110871_4 (sequence is synthesized)
accagaatgaagaagattccttgggcgggtctcgtgtcgtggtgtgtgacatcaacaaggagatgctaaaggttggaaagcagaaagccttggctcaaggatacagagctggacttgcat

SEQ ID NO: 180037 - DNA, 120 bp, Artificial Sequence
  ENSG00000110871_5 (sequence is synthesized)
gggtattaggagatgctgaagaactgccctttgatgatgacaagtttgatatttacaccattgcctttgggatccggaatgtcacacacattgatcaggcactccaggaagctcatcggg

SEQ ID NO: 180038 - DNA, 120 bp, Artificial Sequence
  ENSG00000110871_6 (sequence is synthesized)
ggctttatgatctatatagcttccaggtcatccctgtcctgggagaggtcatcgctggagactggaagtcctatcagtaccttgtagagagtatccgaaggtttccgtctcaggaagagt

SEQ ID NO: 180039 - DNA, 120 bp, Artificial Sequence
  ENSG00000110871_7 (sequence is synthesized)
tcaaggacatgatagaagatgcaggctttcacaaggtgacttacgaaagtctaacatcaggcattgtggccattcattctggcttcaaactttaattcctttcctatcatggagcatgaa

SEQ ID NO: 180040 - DNA, 120 bp, Artificial Sequence
  ENSG00000110871_8 (sequence is synthesized)
ccagtcatatcctgttgaaagcctggaactgaaggataatctggcaaatgagacagcagcagagcatctcctcttaaggatacgtgccttggactcatgtttgaatcgaacagtctcaaa

SEQ ID NO: 180041 - DNA, 120 bp, Artificial Sequence
  ENSG00000110871_9 (sequence is synthesized)
gtggaagaacaaattcttgtcacttttttacagctttctttggagctgcttcagtccatctcccagaggcatttggtctgtatctttgctcaactgctaatttctcttggctgtagggtg

SEQ ID NO: 180042 - DNA, 120 bp, Artificial Sequence
  ENSG00000110871_10 (sequence is synthesized)
tgtggttaaggtacaaccacccctaaagctcagttttgaagtgagtgtatttatagcttctctgctggtgctgccttctagagggatgatagatcatttgaacccaatgacaatttttaa

SEQ ID NO: 180043 - DNA, 120 bp, Artificial Sequence
  ENSG00000110871_11 (sequence is synthesized)
ccagaaaatttaattgtacctgaatcaacctttcagcctaggacgaagtctaggcccaagtcagagtattaatgatcatgagaattgtgtgctgaaccagtaaacgagtttaccttttga

SEQ ID NO: 180044 - DNA, 90 bp, Artificial Sequence
  ENSG00000110871_12 (sequence is synthesized)
actaaaaatacaaaaaaaattagccaagcatggtgacgcacgcctgtaatcacagctaattaggaggctgaggcaggcaaattttctgag

SEQ ID NO: 180045 - DNA, 120 bp, Artificial Sequence
  ENSG00000110871_13 (sequence is synthesized)
ggcgacacagtgagactgtctcaaaaacaaagaaaaaaaattctaataaaaaattagaaaccttgagaattaaattcttttatttccttgtaaaaaaattgccaagagtaggctgggcgc

SEQ ID NO: 180046 - DNA, 120 bp, Artificial Sequence
  ENSG00000110871_14 (sequence is synthesized)
gtctccgacacagcaacggatactcgcccctgggccgaggccgacctgctccgggaatggcgacgagtcgccaaacagcatctcaaagaacccggatggactgtatatatagtggagagg

SEQ ID NO: 180047 - DNA, 120 bp, Artificial Sequence
  ENSG00000110871_15 (sequence is synthesized)
tcagcttgtatgactctcaggaaattacctctgttgtagagctacagtgagtgaggaaagaaggagagttttgttttttgagatggggtcttggtatgttgcccaggctagtctcaaact

SEQ ID NO: 180048 - DNA, 120 bp, Artificial Sequence
  ENSG00000110876_0 (sequence is synthesized)
aaacaatggggtgtgggctgtcacatggccctgcctaagtaaccacattctcgcttcctccttccacacacagccattgggggttgctcggatccgggactgccgcagggggtgccacag

SEQ ID NO: 180049 - DNA, 120 bp, Artificial Sequence
  ENSG00000110876_1 (sequence is synthesized)
cagtgcctggcagcgtgggctgggaccttgtcactaaagcagagaagccacttcttctgggcccacgaggcagctgtcccatgctctgctgagcacggtggtgccatgcctctgcaactc

SEQ ID NO: 180050 - DNA, 120 bp, Artificial Sequence
  ENSG00000110876_2 (sequence is synthesized)
ctcctgttgctgatcctactgggccctggcaacagcttgcagctgtgggacacctgggcagatgaagccgagaaagccttgggtcccctgcttgcccgggaccggagacaggccaccgaa

SEQ ID NO: 180051 - DNA, 120 bp, Artificial Sequence
  ENSG00000110876_3 (sequence is synthesized)
tatgagtacctagattatgatttcctgccagaaacggagcctccagaaatgctgaggaacagcactgacaccactcctctgactgggcctggaacccctgagtctaccactgtggagcct

SEQ ID NO: 180052 - DNA, 120 bp, Artificial Sequence
  ENSG00000110876_4 (sequence is synthesized)
gctgcaaggcgttctactggcctggatgcaggaggggcagtcacagagctgaccacggagctggccaacatggggaacctgtccacggattcagcagctatggagatacagaccactcaa

SEQ ID NO: 180053 - DNA, 120 bp, Artificial Sequence
  ENSG00000110876_5 (sequence is synthesized)
ccagcagccacggaggcacagaccactcaaccagtgcccacggaggcacagaccactccactggcagccacagaggcacagacaactcgactgacggccacggaggcacagaccactcca

SEQ ID NO: 180054 - DNA, 120 bp, Artificial Sequence
  ENSG00000110876_6 (sequence is synthesized)
ctggcagccacagaggcacagaccactccaccagcagccacggaagcacagaccactcaacccacaggcctggaggcacagaccactgcaccagcagccatggaggcacagaccactgca

SEQ ID NO: 180055 - DNA, 120 bp, Artificial Sequence
  ENSG00000110876_7 (sequence is synthesized)
ccagcagccatggaagcacagaccactccaccagcagccatggaggcacagaccactcaaaccacagccatggaggcacagaccactgcaccagaagccacggaggcacagaccactcaa

SEQ ID NO: 180056 - DNA, 120 bp, Artificial Sequence
  ENSG00000110876_8 (sequence is synthesized)
cccacagccacggaggcacagaccactccactggcagccatggaggccctgtccacagaacccagtgccacagaggccctgtccatggaacctactaccaaaagaggtctgttcataccc

SEQ ID NO: 180057 - DNA, 120 bp, Artificial Sequence
  ENSG00000110876_9 (sequence is synthesized)
aagcagtgcctgctggccatcctaatcttggcgctggtggccactatcttcttcgtgtgcactgtggtgctggcggtccgcctctcccgcaagggccacatgtaccccgtgcgtaattac

SEQ ID NO: 180058 - DNA, 120 bp, Artificial Sequence
  ENSG00000110876_10 (sequence is synthesized)
tcccccaccgagatggtctgcatctcatccctgttgcctgatgggggtgaggggccctctgccacagccaatgggggcctgtccaaggccaagagcccgggcctgacgccagagcccagg

SEQ ID NO: 180059 - DNA, 120 bp, Artificial Sequence
  ENSG00000110876_11 (sequence is synthesized)
gaggaccgtgagggggatgacctcaccctgcacagcttcctcccttagctcactctgccatctgttttggcaagaccccacctccacgggctctcctgggccacccctgagtgcccagac

SEQ ID NO: 180060 - DNA, 120 bp, Artificial Sequence
  ENSG00000110876_12 (sequence is synthesized)
cccattccacagctctgggcttcctcggagacccctggggatggggatcttcagggaaggaactctggccacccaaacaggacaagagcagcctggggccaagcagacgggcaagtggag

SEQ ID NO: 180061 - DNA, 120 bp, Artificial Sequence
  ENSG00000110876_13 (sequence is synthesized)
ccacctctttcctccctccgcggatgaagcccagccacatttcagccgaggtccaaggcaggaggccatttacttgagacagattctctcctttttcctgtcccccatcttctctgggtc

SEQ ID NO: 180062 - DNA, 120 bp, Artificial Sequence
  ENSG00000110876_14 (sequence is synthesized)
cctctaacatctcccatggctctccccgcttctcctggtcactggagtctcctccccatgtacccaaggaagatggagctcccccatcccacacgcactgcactgccattgtcttttggt

SEQ ID NO: 180063 - DNA, 120 bp, Artificial Sequence
  ENSG00000110876_15 (sequence is synthesized)
tgccatggtcaccaaacaggaagtggacattctaagggaggagtactgaagagtgacggacttctgaggctgtttcctgctgctcctctgacttggggcagcttgggtcttcttgggcac

SEQ ID NO: 180064 - DNA, 120 bp, Artificial Sequence
  ENSG00000110876_16 (sequence is synthesized)
ctctctgggaaaacccagggtgaggttcagcctgtgagggctgggatgggtttcgtgggcccaagggcagacctttctttgggactgtgtggaccaaggagcttccatctagtgacaagt

SEQ ID NO: 180065 - DNA, 120 bp, Artificial Sequence
  ENSG00000110876_17 (sequence is synthesized)
gacccccagctatcgcctcttgccttcccctgtggccactttccagggtggactctgtcttgttcactgcagtatcccaactgcaggtccagtgcaggcaataaatatgtgatggacaaa

SEQ ID NO: 180066 - DNA, 120 bp, Artificial Sequence
  ENSG00000110876_18 (sequence is synthesized)
aatcatccgagaaccttggagggtggacagtgccccttttacagatgagaaaactgaggcttgaaggggagaagcagctgcctctggcggcatggcttctggctgcaggatgcccatgga

SEQ ID NO: 180067 - DNA, 120 bp, Artificial Sequence
  ENSG00000110876_19 (sequence is synthesized)
gttcgtggtgaccctaggcctgtgtctcggcttcctttgctgaacttgaacaggaagatggcagtgggggccagtggtctagaaggagataagatggctggtgccatgcctctgcaactc

SEQ ID NO: 180068 - DNA, 80 bp, Artificial Sequence
  ENSG00000110880_0 (sequence is synthesized)
ggtggcggctgcccgcgcccctcccccgcacggcgctcagtgccaggctggaggcggcagcggttggaggcttcgcccgg

SEQ ID NO: 180069 - DNA, 120 bp, Artificial Sequence
  ENSG00000110880_1 (sequence is synthesized)
ctttgcagcggggacttcggcggcggcgcctcaggcacctcggcccggacacgatgaggcgagtggtacgacagagcaagtttcggcatgtatttgggcaagcggtgaaaaatgaccagt

SEQ ID NO: 180070 - DNA, 120 bp, Artificial Sequence
  ENSG00000110880_2 (sequence is synthesized)
gctatgatgacatccgggtttctcgtgtgacctgggatagttccttttgtgctgtcaatcccagatttgttgccataatcatagaggcaagtgggggaggagcgttccttgtcctccctc

SEQ ID NO: 180071 - DNA, 120 bp, Artificial Sequence
  ENSG00000110880_3 (sequence is synthesized)
tgcacaagactggtcgaattgacaaatcttaccctacagtatgtggccacacaggaccagtgctggacatagactggtgcccacataacgatcaggtcattgccagcggttcagaggact

SEQ ID NO: 180072 - DNA, 120 bp, Artificial Sequence
  ENSG00000110880_4 (sequence is synthesized)
gcacggtcatggtatggcagatcccagaaaatggactcaccctttccctgactgaacctgtggtgattttggaaggccactcaaagagagtcggcatcgtggcttggcatccaacggccc

SEQ ID NO: 180073 - DNA, 120 bp, Artificial Sequence
  ENSG00000110880_5 (sequence is synthesized)
gcaatgtgcttcttagtgcaggctgtgataatgccattatcatctggaatgtgggaacaggggaagcccttataaacttggacgatatgcattcagacatgatttacaatgtgagctgga

SEQ ID NO: 180074 - DNA, 120 bp, Artificial Sequence
  ENSG00000110880_6 (sequence is synthesized)
accggaatggcagtctgatctgcacagcttccaaagacaagaaagtgagagtcattgatcccaggaaacaagagattgttgctgagaaggagaaagcacatgaaggagcaagacccatga

SEQ ID NO: 180075 - DNA, 120 bp, Artificial Sequence
  ENSG00000110880_7 (sequence is synthesized)
gagccatcttcctggccgatggcaatgtcttcaccactgggttcagccgcatgagcgagcggcagctggctctctggaatccgaaaaatatgcaggaaccaattgctcttcatgagatgg

SEQ ID NO: 180076 - DNA, 120 bp, Artificial Sequence
  ENSG00000110880_8 (sequence is synthesized)
acactagcaatggggtgttgctgcctttctatgaccctgacaccagcatcatttacttatgtggaaagggtgacagcagtattcgctattttgagatcacggatgaatccccgtacgtcc

SEQ ID NO: 180077 - DNA, 120 bp, Artificial Sequence
  ENSG00000110880_9 (sequence is synthesized)
actacctcaacacattcagcagcaaggagcctcagagagggatgggttacatgcccaagaggggacttgatgttaacaaatgtgagattgccagattcttcaaacttcatgagagaaagt

SEQ ID NO: 180078 - DNA, 120 bp, Artificial Sequence
  ENSG00000110880_10 (sequence is synthesized)
gtgaacctattattatgactgttcccaggaagtctgaccttttccaagatgacctgtatcctgacacagcggggccagaggccgcgctggaggcagaagagtggttcgaaggcaagaatg

SEQ ID NO: 180079 - DNA, 120 bp, Artificial Sequence
  ENSG00000110880_11 (sequence is synthesized)
cagacccaatcctcatctccttgaagcacgggtacattccaggcaaaaacagggatctcaaggtggtcaagaagaacattctggatagcaagcccactgcaaacaagaagtgcgacctga

SEQ ID NO: 180080 - DNA, 120 bp, Artificial Sequence
  ENSG00000110880_12 (sequence is synthesized)
tcagcatccccaagaaaaccacagacacggccagtgtgcaaaatgaagccaagttggatgagattttaaaagagatcaaatctataaaagacacaatctgcaatcaagatgagcgtattt

SEQ ID NO: 180081 - DNA, 120 bp, Artificial Sequence
  ENSG00000110880_13 (sequence is synthesized)
ccaagttagaacagcagatggcaaagatagcagcctgaaggtcccacccccacccctacagaaaaaatgggagcaagaacttgtgcttgggagctggttattggtgtggtcctagggagg

SEQ ID NO: 180082 - DNA, 120 bp, Artificial Sequence
  ENSG00000110880_14 (sequence is synthesized)
gcggaaagggaggcactgccatttggagacattccatttcagatttgtcaaccagcgataggccacattccagtaagaactcaatttgtctcccaaatttgcagaaacaaaacgtgattt

SEQ ID NO: 180083 - DNA, 120 bp, Artificial Sequence
  ENSG00000110880_15 (sequence is synthesized)
aaaagctgagctttttatcagaaagcttttttgatgttttaagtgttatgtgacttgttgaactttttaaaaagtgctacttttaaaatcccagatactctgaattttagaaaacaaact

SEQ ID NO: 180084 - DNA, 120 bp, Artificial Sequence
  ENSG00000110880_16 (sequence is synthesized)
caatgccacattgctttttatatttctttcttttttaatgttgccaaaaccaaaagtagctttgttttcctttgtattttgctactttgcagtatttgtgtgtgtggttttttttcctta

SEQ ID NO: 180085 - DNA, 120 bp, Artificial Sequence
  ENSG00000110880_17 (sequence is synthesized)
atttgaaagggacagcactgtgtatgtttataaactaaatgaagataagatattattttgtataaacattcatctgagaacaatcaaagcagtagccacatggtgctggctcctttgcag

SEQ ID NO: 180086 - DNA, 120 bp, Artificial Sequence
  ENSG00000110880_18 (sequence is synthesized)
cacaaacctggtcattttgatgactgtacaacaggaagacttgaaaaatcacgtggattcatattaccaccgctctcatttcatggagtcttctgatcaaaaaagctcacgtcgtatttc

SEQ ID NO: 180087 - DNA, 120 bp, Artificial Sequence
  ENSG00000110880_19 (sequence is synthesized)
ttcttttcctttctcttttctagaaattgggtgtttgtaccagaatggaattttgcttctcggttatcctgtgcttcagatgattataatctaacccaaactagcatgtgtttctgcagt

SEQ ID NO: 180088 - DNA, 120 bp, Artificial Sequence
  ENSG00000110880_20 (sequence is synthesized)
ttgttacacacctaggatcatattgcattcatcactttaaacatcatgtttcaggttttggtcaatacttgacaagggtgcccaggacaggaagacgtgtactgctgagtgttccttctt

SEQ ID NO: 180089 - DNA, 120 bp, Artificial Sequence
  ENSG00000110880_21 (sequence is synthesized)
gcccttttcagcagcttgcccagctcttgagtacagtggtggggactaaaaatgtgggcatgtggagaggggtatttgccctgggtgatcctgtttccctgtgctgtccccatgctgtgt

SEQ ID NO: 180090 - DNA, 120 bp, Artificial Sequence
  ENSG00000110880_22 (sequence is synthesized)
tggaggaggaagtggctctccttccaccaacaaagctcctgctctaccctcttcctcacatgtgctgcgacctctctcagggctcccccagccattccttctttccttcctgccttttag

SEQ ID NO: 180091 - DNA, 120 bp, Artificial Sequence
  ENSG00000110880_23 (sequence is synthesized)
ctctaaccacattaagctaagacaaggccagagggtgcgattgaatgagtattgagactgaggagaatgatagagagtgaagcagaaacaggagcacagacctctgctgtagctttaatg

SEQ ID NO: 180092 - DNA, 120 bp, Artificial Sequence
  ENSG00000110880_24 (sequence is synthesized)
catacaaacatgtccctccgcacaactaacctgccctgcctctccatctctcaccaaggctgcgtcaaagcacagaggctccccggactcggagggggccagagactgagctctggtcac

SEQ ID NO: 180093 - DNA, 120 bp, Artificial Sequence
  ENSG00000110880_25 (sequence is synthesized)
ctgttcattcctcggttagctggaactttgccccgtttccagtttcttatagtgcatgcttgggaaacaagatttaaggagcctctgttttggaagggctgtctgtgattgaacgtgaaa

SEQ ID NO: 180094 - DNA, 120 bp, Artificial Sequence
  ENSG00000110880_26 (sequence is synthesized)
tgtgtagtgccattgggaccacgaagggaattcttgcacatgctcgtgctggtgtgggcatgggactggctggaaacgtctgtatgcagggagccagggtgagggcagagtgtggtgaca

SEQ ID NO: 180095 - DNA, 120 bp, Artificial Sequence
  ENSG00000110880_27 (sequence is synthesized)
gccgaacttggagtaatgtccgtgtagaaaaaggaccatgttcttatccagccaatactgggagtgctgtctccacaatttcagggcatctgaatgtttgatgtggttttgtgtgtgtgt

SEQ ID NO: 180096 - DNA, 120 bp, Artificial Sequence
  ENSG00000110880_28 (sequence is synthesized)
atgtatgtgtttaatattgaagtggatcatgagatgtaaagaaaacaataatggcaatgacttatattcaaatctgtatttgtttctttatcaatgtaatctgctgaggaccttttgtct

SEQ ID NO: 180097 - DNA, 120 bp, Artificial Sequence
  ENSG00000110880_29 (sequence is synthesized)
aagattcagtagtgttttaaggttctgatatcgaattaatgaagtaaagttgttgatggtggtgaaacaccgtagggcatgtggttcaaagagaagcaggagggcaagggaaagttaccc

SEQ ID NO: 180098 - DNA, 120 bp, Artificial Sequence
  ENSG00000110880_30 (sequence is synthesized)
agttaccctgatcttagtttgtagcttatgacttatttaatgaatggatgcccagccaagctcagagtaggcgcccaaagcattgtggattattttcctgttttgtcttttttttttttt

SEQ ID NO: 180099 - DNA, 120 bp, Artificial Sequence
  ENSG00000110880_31 (sequence is synthesized)
gccatgacatcccagaagaggacagtgaattactcctaggtcggctcttatagagtggccatagtgttctgtcaaaacacttgcttccattttcagagataaaaatcattgattacaaaa

SEQ ID NO: 180100 - DNA, 120 bp, Artificial Sequence
  ENSG00000110880_32 (sequence is synthesized)
gcgagaccagctctgggccctgcagatctcggttgggggtcaggcggggcggggcagagctggagctggagtaatgtgggtgggggcggcttgggaagaggctgagcccggccaagggag

SEQ ID NO: 180101 - DNA, 120 bp, Artificial Sequence
  ENSG00000110880_33 (sequence is synthesized)
cagagggctgggactggctgggggttgggaggggaggaacgaagcaggaaggctgtcggatcgggggcccagggtgtccgagtgaactgggtgattcagagacacgatgaggcgagtggt

SEQ ID NO: 180102 - DNA, 120 bp, Artificial Sequence
  ENSG00000110880_34 (sequence is synthesized)
gctgcgccgaaatgactgaggatgaggtcagacgtggagggtgggaatgcagaaaccgagctctcccgcctgtccccaccggcgcacgctccccagctctccgtctctcaaatgatttga

SEQ ID NO: 180103 - DNA, 120 bp, Artificial Sequence
  ENSG00000110880_35 (sequence is synthesized)
atgtgttgggggaagtggcaggctgcggtgagagctgagaagaaaggggcttcctcttggagggaggcgctggccctggcatccttttttgggagtgttcaaaggattttgaacgctgga

SEQ ID NO: 180104 - DNA, 120 bp, Artificial Sequence
  ENSG00000110880_36 (sequence is synthesized)
aaaggaatcgtaggctttactgcatcacgatttagaaacacatcctatatttggccgtaatgtaggctgcccttgttttgtggtgtctaaagtgcttgctctacatgttgcaaacgtggg

SEQ ID NO: 180105 - DNA, 120 bp, Artificial Sequence
  ENSG00000110880_37 (sequence is synthesized)
agtgccaggctggaggcggcagcggttggaggcttcgcccggctttgcagcggggacttcggcggcggcgcctcaggcacctcggcccggacacgatgaggcgagtggaagtctgacctt

SEQ ID NO: 180106 - DNA, 120 bp, Artificial Sequence
  ENSG00000110880_38 (sequence is synthesized)
aggaccctggccacgaatcatttgccatctcctctaccaaagactcaaaatgtatggccctggtagtcagctgggaaagtctggcaataacagctgggctaaggaacgtggatgctcaat

SEQ ID NO: 180107 - DNA, 120 bp, Artificial Sequence
  ENSG00000110880_39 (sequence is synthesized)
tgcctgccaagggtctcttacttcagcccggctacatgcccccagcattggagagaggccactttcacacatgcgttggaaggacacgatgaggcgagtggtacgacagagcaagtttcg

SEQ ID NO: 180108 - DNA, 120 bp, Artificial Sequence
  ENSG00000110880_40 (sequence is synthesized)
gtcggatcgggggcccagggtgtccgagtgaactgggtgattcagaggtgtgtttccctaatagcggggcagctggcgagggacgcagtaaaaaggagcgaggtgcagacacgatgaggc

SEQ ID NO: 180109 - DNA, 120 bp, Artificial Sequence
  ENSG00000110880_41 (sequence is synthesized)
agaaggcttttgaagtcaagggtgatggctgtgtcttttgaattcctcccatagctattcttgttgaaacactctggggaatagacacaattctcagacagcagagtgttgatgtctagg

SEQ ID NO: 180110 - DNA, 120 bp, Artificial Sequence
  ENSG00000110880_42 (sequence is synthesized)
gaaaatgtttacaatctgaaaaattaccttggcaggctgaggacaaagccacaaaatcgtaacttgtttttcggctttcttcagcctcacctctaccagagaatttcactttggagtttt

SEQ ID NO: 180111 - DNA, 120 bp, Artificial Sequence
  ENSG00000110880_43 (sequence is synthesized)
cttatctgtaaaaggggaagggttgaagtacattatctgtcagctcccacccaaccctgaaaggctaattttctttaattctttcccttaatctttccattgaaattaaaactgatgagc

SEQ ID NO: 180112 - DNA, 120 bp, Artificial Sequence
  ENSG00000110880_44 (sequence is synthesized)
aggatacaaataaaaatgttatacctttcttccccattacagagctctttgctcccttcttccagtattacagtgcaagtggctttacattctctttccacattttggatagtttcacat

SEQ ID NO: 180113 - DNA, 120 bp, Artificial Sequence
  ENSG00000110880_45 (sequence is synthesized)
ttttcttgagtgtcatgtacgatgtggtttgctaggatgagaaaatcataatcctaggattgttttcttttgctttctaaaagtcatatttatacttatatgttcaaccacctcaagctg

SEQ ID NO: 180114 - DNA, 120 bp, Artificial Sequence
  ENSG00000110880_46 (sequence is synthesized)
gcagaagaccttgtacccgcgttgtagatacaatctaacagatgtgtgttctctcctgtaggttgacatggtaattttttcataagtgagtcagtttcagtgttgctattatttccacca

SEQ ID NO: 180115 - DNA, 120 bp, Artificial Sequence
  ENSG00000110880_47 (sequence is synthesized)
tcatcatcatacgtagacctctactcatggttcttgtctccagtctgccagttcctagcatagtgactctcagcttccgttctctcatctgtcaaccgggaacactaaattctgcctatt

SEQ ID NO: 180116 - DNA, 120 bp, Artificial Sequence
  ENSG00000110880_48 (sequence is synthesized)
cccggggtggatcagatgtggggatgggtaaagaagcacttgacatttcagacagcattgtagaaaactaattattcatcctgttagtcagcctcatatttcacttaatgcaactttgcc

SEQ ID NO: 180117 - DNA, 120 bp, Artificial Sequence
  ENSG00000110880_49 (sequence is synthesized)
agattgacagttcactaagaattgtatttgtgaaaccattagactctgatgtaattgaagttaagttccacacgccttactaaccacatcagtttttctctaacagagaatcattaaata

SEQ ID NO: 180118 - DNA, 120 bp, Artificial Sequence
  ENSG00000110880_50 (sequence is synthesized)
gtgagattgccaggtaaagaatcgagattgtcaagtattctaggttggtgtaactgtgtgacaattatttgtacttggactagcatatacttcagatctcaaaaatatctgaccattctg

SEQ ID NO: 180119 - DNA, 120 bp, Artificial Sequence
  ENSG00000110880_51 (sequence is synthesized)
ctgaccattctgagcaagaaagtagtagaattgtacacattgccatgagatggcactttctaaggatatcactaaaactgagtttcttcattagaaaaaaatctcaaaaaaaaaaaaaaa

SEQ ID NO: 180120 - DNA, 120 bp, Artificial Sequence
  ENSG00000110881_0 (sequence is synthesized)
ccatgagcccctccgcgactcggcgctgagcccgccaccggtccagcgccccaggacccgccgccggctgccggcttgccgaagccccctcaggatcccctcaacaaggatggaactgaa

SEQ ID NO: 180121 - DNA, 120 bp, Artificial Sequence
  ENSG00000110881_1 (sequence is synthesized)
ggccgaggaggaggaggtgggtggcgtccagccggtgagcatccaggccttcgccagcagctccacactgcacggcctggcccacatcttctcctacgagcggctgtctctgaagcgggc

SEQ ID NO: 180122 - DNA, 120 bp, Artificial Sequence
  ENSG00000110881_2 (sequence is synthesized)
actgtgggccctgtgcttcctgggctccctggctgtgctgctgtgtgtgtgcacggagcgtgtgcagtactacttccactaccaccatgtcaccaagctcgacgaggtggctgcctctca

SEQ ID NO: 180123 - DNA, 120 bp, Artificial Sequence
  ENSG00000110881_3 (sequence is synthesized)
gcttaccttccctgctgtcacgctgtgcaacctcaacgagttccgctttagccaagtctccaagaatgacctgtatcatgctggggagctgctggccctgctcaacaacaggtatgagat

SEQ ID NO: 180124 - DNA, 120 bp, Artificial Sequence
  ENSG00000110881_4 (sequence is synthesized)
accagacacacagatggcagatgaaaagcagctggagatactgcaggacaaagccaacttccgcagcttcaaacccaaacccttcaacatgcgtgagttctacgaccgagctgggcacga

SEQ ID NO: 180125 - DNA, 120 bp, Artificial Sequence
  ENSG00000110881_5 (sequence is synthesized)
cattcgagacatgctgctctcctgccacttccggggggaggtctgcagcgctgaagacttcaaggtggtcttcacacgctatggaaagtgctacacgttcaactcgggccgagatgggcg

SEQ ID NO: 180126 - DNA, 120 bp, Artificial Sequence
  ENSG00000110881_6 (sequence is synthesized)
gccgcggctgaagaccatgaagggtgggacgggcaatgggctggaaatcatgctggacatccagcaggacgagtacctgcctgtgtggggggagactgacgagacgtccttcgaagcagg

SEQ ID NO: 180127 - DNA, 120 bp, Artificial Sequence
  ENSG00000110881_7 (sequence is synthesized)
catcaaagtgcagatccatagtcaggatgaacctcctttcatcgaccagctgggctttggcgtggccccaggcttccagacctttgtggcctgccaggagcagcggctcatctacctgcc

SEQ ID NO: 180128 - DNA, 120 bp, Artificial Sequence
  ENSG00000110881_8 (sequence is synthesized)
cccaccctggggcacctgcaaagctgttaccatggactcggatttggatttcttcgactcctacagcatcactgcctgccgcatcgactgtgagacgcgctacctggtggagaactgcaa

SEQ ID NO: 180129 - DNA, 120 bp, Artificial Sequence
  ENSG00000110881_9 (sequence is synthesized)
ctgccgcatggtgcacatgccaggggatgccccatactgtactccagagcagtacaaggagtgtgcagatcctgctctggacttcctggtggagaaggaccaggagtactgcgtgtgtga

SEQ ID NO: 180130 - DNA, 120 bp, Artificial Sequence
  ENSG00000110881_10 (sequence is synthesized)
aatgccttgcaacctgacccgctatggcaaagagctgtccatggtcaagatccccagcaaagcctcagccaagtacctggccaagaagttcaacaaatctgagcaatacataggggagaa

SEQ ID NO: 180131 - DNA, 120 bp, Artificial Sequence
  ENSG00000110881_11 (sequence is synthesized)
catcctggtgctggacattttctttgaagtcctcaactatgagaccattgaacagaagaaggcctatgagattgcagggctcctgggtgacatcgggggccagatggggctgttcatcgg

SEQ ID NO: 180132 - DNA, 120 bp, Artificial Sequence
  ENSG00000110881_12 (sequence is synthesized)
ggccagcatcctcacggtgctggagctctttgactacgcctacgaggtcattaagcacaagctgtgccgacgaggaaaatgccagaaggaggccaaaaggagcagtgcggacaagggcgt

SEQ ID NO: 180133 - DNA, 120 bp, Artificial Sequence
  ENSG00000110881_13 (sequence is synthesized)
ggccctcagcctggacgacgtcaaaagacacaacccgtgcgagagccttcggggccaccctgccgggatgacatacgctgccaacatcctacctcaccatccggcccgaggcacgttcga

SEQ ID NO: 180134 - DNA, 120 bp, Artificial Sequence
  ENSG00000110881_14 (sequence is synthesized)
aggagagcgagggggcccccagctgcctcctcacatctgccctggggactccccacactccggggcagatctttcctcttgtctgtggtaaggaaggagtcttgaccatagagtcctctc

SEQ ID NO: 180135 - DNA, 120 bp, Artificial Sequence
  ENSG00000110881_15 (sequence is synthesized)
tctgcctctatcccattctttttacatttaacaaaactaatctaaaaaagaactaaaaagggagaacggggcaagggacctcaggctgcccctctctcctccatgctgcctcccctagct

SEQ ID NO: 180136 - DNA, 120 bp, Artificial Sequence
  ENSG00000110881_16 (sequence is synthesized)
cccagcctgaattctgtctatctagctgtctgccatctgagtgtccatctacattctgctgccaccagtcaccaaaggcccttcccagtgaggggtggaagggatctctggggtctggaa

SEQ ID NO: 180137 - DNA, 120 bp, Artificial Sequence
  ENSG00000110881_17 (sequence is synthesized)
tttggccccaaaccagagaatgtaccttaagggggagggctagtgtgggggagggaggcttccccagccttaagagaccctctcagcccagtgactgtccccaaacccaagtctcctggc

SEQ ID NO: 180138 - DNA, 120 bp, Artificial Sequence
  ENSG00000110881_18 (sequence is synthesized)
aggaactaaaacctcagccccactctctcacaccatgtggaatctcgtgggggtcggggatccccttaagaagtggtaatggggacaagatgcggccctggtgctgtaggctacatcctg

SEQ ID NO: 180139 - DNA, 120 bp, Artificial Sequence
  ENSG00000110881_19 (sequence is synthesized)
atacctataagttcacccccaccccacagctgctggagagaaatcccaagaggcagcccttcctcaccatcccattaaagaccgggctggttagcgtccagctcagggagaagggcgcta

SEQ ID NO: 180140 - DNA, 120 bp, Artificial Sequence
  ENSG00000110881_20 (sequence is synthesized)
gtgcctaacctcactggtccctctcccggaggcccttgtagagggccacgtccataaattttcttatggaactctcccacatcctcttccccaacttcatttgcttctctcaacaacctc

SEQ ID NO: 180141 - DNA, 120 bp, Artificial Sequence
  ENSG00000110881_21 (sequence is synthesized)
atctgcattttctatttctatatgatacagactctatattgctatatctctgtatatactttcccagccctgtctgtctccaccccatcccctcttgtctctgagaaccattctcccacc

SEQ ID NO: 180142 - DNA, 120 bp, Artificial Sequence
  ENSG00000110881_22 (sequence is synthesized)
ccaagttccaccttctatgtttctactccctccctggtctctgaatgccttcgcctgtataaagagttggactctctcccctggtgtctgtactgtgtacacacatccctctgagaagca

SEQ ID NO: 180143 - DNA, 120 bp, Artificial Sequence
  ENSG00000110881_23 (sequence is synthesized)
caaggagacgacacgcgcattgtaacctttgcactgtctcagtggcgacaaaggaagctgtgaatcacaagctctgcctctttctggcctcaccctctcccccaacccgggcaccctcgg

SEQ ID NO: 180144 - DNA, 120 bp, Artificial Sequence
  ENSG00000110881_24 (sequence is synthesized)
ccctccctgcagccttaacattctcttcccctgctcctcctatcccattgccctctgcccagctgacagtggcatccccagggaaggggttgctgtagagatagcccccacccaggggat

SEQ ID NO: 180145 - DNA, 120 bp, Artificial Sequence
  ENSG00000110881_25 (sequence is synthesized)
ggaggtctaccctggacactaagccaagtgtgtcagagacagaagggagctggggattggcgactcctgaagttggggcagtgggatgctgacaggcagaagctgaggtcctcagtcagt

SEQ ID NO: 180146 - DNA, 120 bp, Artificial Sequence
  ENSG00000110881_26 (sequence is synthesized)
ggcctttcctccttctgggtgcccagccccctttcctcacctgatacccaagcccaccacttttattttctggtgaggtgggtttgggaggaaagagaggcctagaggaggagttgaaag

SEQ ID NO: 180147 - DNA, 120 bp, Artificial Sequence
  ENSG00000110881_27 (sequence is synthesized)
ctctgctgttgtctcaccctatcttaatgagagacaagtgaggtggagggcctgccccccctccctccaccagacactccttccaggcctgagccccaacccctcttcaggccttccttc

SEQ ID NO: 180148 - DNA, 120 bp, Artificial Sequence
  ENSG00000110881_28 (sequence is synthesized)
cctagctgtgtcttggtcttcaatcccagaacaggacctgtgagcagctgcattggcctggagctggagagtaaggctgtaggatctttggaatctcttggttcctaagagtttcctcag

SEQ ID NO: 180149 - DNA, 120 bp, Artificial Sequence
  ENSG00000110881_29 (sequence is synthesized)
agatcatacctccccagagggaagcaggaatgaggccaaaaagtgtgcattggataggggaacagcaggcagggctctgggtgacgcatgcctctggtctaataaactgggtttcaacca

SEQ ID NO: 180150 - DNA, 120 bp, Artificial Sequence
  ENSG00000110881_30 (sequence is synthesized)
tctgcagcgctgaagacttcaaggtgaagcccatgcaggtggcaaaggagctcaggcgatgcaccctaccaggaacagttttccagggcacacagagggcaagaaagggtcttcacacgc

SEQ ID NO: 180151 - DNA, 120 bp, Artificial Sequence
  ENSG00000110881_31 (sequence is synthesized)
cctggagaaaatgcccatccagatcttctgctccatgtcattctcctctggagaggaagccccagggcccttgggagatatttggggtccccaccaccatcagcagcagcaggacatctc

SEQ ID NO: 180152 - DNA, 120 bp, Artificial Sequence
  ENSG00000110881_32 (sequence is synthesized)
agaatcggaagaggaggaagaagagaaggaaaaggaggcagtgaggaaggaggccagtgaggggcattcacccatggacttggtggcctttgccaacagctgcaccctccatggcaccaa

SEQ ID NO: 180153 - DNA, 120 bp, Artificial Sequence
  ENSG00000110881_33 (sequence is synthesized)
ccacatttttgtggaggggggtccagggccaaggcaggtgctgtgggcggtggcctttgtcctggcactgggtgccttcctgtgccaggtaggggaccgcgttgcttattacctcagcta

SEQ ID NO: 180154 - DNA, 120 bp, Artificial Sequence
  ENSG00000110881_34 (sequence is synthesized)
cccacacgtgacccttctaaacgaagtggccaccacggagctggccttcccggcagtcaccctctgcaacactaatgctgtgcggctgtcccagctcagctaccctgacttgctttattt

SEQ ID NO: 180155 - DNA, 120 bp, Artificial Sequence
  ENSG00000110881_35 (sequence is synthesized)
ggcccccatgctgggactggatgaaagtgatgaccccggggtgcccctcgctccaccgggccctgaggccttctctggggagccctttaacctgcaccgcttctacaatcgctcctgcca

SEQ ID NO: 180156 - DNA, 120 bp, Artificial Sequence
  ENSG00000110881_36 (sequence is synthesized)
ccggctggaggacatgctgctctattgctcctaccaagggggaccctgcggccctcacaacttctcagtggtcttcacacgctatggaaagtgctacacgttcaactcgggccgagatgg

SEQ ID NO: 180157 - DNA, 120 bp, Artificial Sequence
  ENSG00000110881_37 (sequence is synthesized)
agtgagcagtactaggaaatcgttatcacttctaggctgaagaagcacaaaagaagacagtgctctgtagggagccctggcaggatctgtaatcatggagggcctaaggcactactagag

SEQ ID NO: 180158 - DNA, 120 bp, Artificial Sequence
  ENSG00000110881_38 (sequence is synthesized)
agacagcctcgcagacactcgtaggcgcgcacgcgcaccctctcccctccccctcccctcccgccgcctcccggccggacgatggatccctgcagatcccagggctgagagcaccgcgca

SEQ ID NO: 180159 - DNA, 120 bp, Artificial Sequence
  ENSG00000110881_39 (sequence is synthesized)
cagatcccagggctgagagcaccgcgcaccgcgccgagcccgggcagaccgagccgaggcgagcgagccagcgagccagcgcgcgcgggcgggcggacagatcggagccgagcggggccg

SEQ ID NO: 180160 - DNA, 120 bp, Artificial Sequence
  ENSG00000110881_40 (sequence is synthesized)
gggtgagctgctgatgacacctgtccccttctcatgccatgggcatggcgtggctccctatcatccaaaagcagggtgctcacttctgtcccatgagggtcctccaccccagaggccctt

SEQ ID NO: 180161 - DNA, 120 bp, Artificial Sequence
  ENSG00000110881_41 (sequence is synthesized)
taccatggactcggatttggatttcttcgactcctacagcatcactgcctgccgcatcgactgtgagacgcgctacctggtggagaactgcaactgccgcatggtgcacatgccaggtca

SEQ ID NO: 180162 - DNA, 120 bp, Artificial Sequence
  ENSG00000110881_42 (sequence is synthesized)
ggcctggggctccgagcatactcctggggtccctgggcctttgctgcccttcactagctccccatccatatcaatctcccaaccccagttccagcccaccccatcccacacccacctggc

SEQ ID NO: 180163 - DNA, 120 bp, Artificial Sequence
  ENSG00000110881_43 (sequence is synthesized)
gtcacttctggggcagcatgggggcctgccagtcctcccttcccatcttctcccagcttacaccttctaggcctttggtactaccaccatcaccagaccccttgaattcccatcctgcat

SEQ ID NO: 180164 - DNA, 120 bp, Artificial Sequence
  ENSG00000110881_44 (sequence is synthesized)
cattgtcttttctcctctgtaggggatgccccatactgtactccagagcagtacaaggagtgtgcagatcctgctctggacttcctggtggagaaggaccaggagtactgcgtgtgtgaa

SEQ ID NO: 180165 - DNA, 120 bp, Artificial Sequence
  ENSG00000110881_45 (sequence is synthesized)
aagtctggaagtcctctctgaagcacttcctggggaatgcaaaggaggaggcccctgccctctgagagctcaagatctggcaggcaggaaaaagatacacacaggacaggacacacaggt

SEQ ID NO: 180166 - DNA, 120 bp, Artificial Sequence
  ENSG00000110881_46 (sequence is synthesized)
ttgccaaggtcacctggttagtaagagatagagatatgacttgaacctaggtctcctcccccaatccctgtgcagggagaacatcctggtgctggacattttctttgaagtcctcaacta

SEQ ID NO: 180167 - DNA, 120 bp, Artificial Sequence
  ENSG00000110881_47 (sequence is synthesized)
ctttcctcttgtctgtgagttggactctctcccctggtgtctgtactgtgtacacacatccctctgagaagcacaaggagacgacacgcgcattgtaacctttgcactgtctcagtggcg

SEQ ID NO: 180168 - DNA, 120 bp, Artificial Sequence
  ENSG00000110887_0 (sequence is synthesized)
gcactccagtccgggctggcggacagagggctggaaacaagacgctccagaatcaggagcttcccctcaggaaatagcatcctgtgtccccgcactgcagttgtctggtctctccagcag

SEQ ID NO: 180169 - DNA, 120 bp, Artificial Sequence
  ENSG00000110887_1 (sequence is synthesized)
tttggtacttccggctgctgcaatgcgtgtggtggtgattggagcaggagtcatcgggctgtccaccgccctctgcatccatgagcgctaccactcagtcctgcagccactggacataaa

SEQ ID NO: 180170 - DNA, 120 bp, Artificial Sequence
  ENSG00000110887_2 (sequence is synthesized)
ggtctacgcggaccgcttcaccccactcaccaccaccgacgtggctgccggcctctggcagccctacctttctgaccccaacaacccacaggaggcggactggagccaacagacctttga

SEQ ID NO: 180171 - DNA, 120 bp, Artificial Sequence
  ENSG00000110887_3 (sequence is synthesized)
ctatctcctgagccatgtccattctcccaacgctgaaaacctgggcctgttcctaatctcgggctacaacctcttccatgaagccattccggacccttcctggaaggacacagttctggg

SEQ ID NO: 180172 - DNA, 120 bp, Artificial Sequence
  ENSG00000110887_4 (sequence is synthesized)
atttcggaagctgacccccagagagctggatatgttcccagattacggctatggctggttccacacaagcctaattctggagggaaagaactatctacagtggctgactgaaaggttaac

SEQ ID NO: 180173 - DNA, 120 bp, Artificial Sequence
  ENSG00000110887_5 (sequence is synthesized)
tgagaggggagtgaagttcttccagcggaaagtggagtcttttgaggaggtggcaagagaaggcgcagacgtgattgtcaactgcactggggtatgggctggggcgctacaacgagaccc

SEQ ID NO: 180174 - DNA, 120 bp, Artificial Sequence
  ENSG00000110887_6 (sequence is synthesized)
cctgctgcagccaggccgggggcagatcatgaaggtggacgccccttggatgaagcacttcattctcacccatgacccagagagaggcatctacaattccccgtacatcatcccagggac

SEQ ID NO: 180175 - DNA, 120 bp, Artificial Sequence
  ENSG00000110887_7 (sequence is synthesized)
ttggaggcatcttccagttgggaaactggagtgaactaaacaatatccaggaccacaacaccatttgggaaggctgctgcagactggagcccacactgaagaatgcaagaattattggtg

SEQ ID NO: 180176 - DNA, 120 bp, Artificial Sequence
  ENSG00000110887_8 (sequence is synthesized)
aacgaactggcttccggccagtacgcccccagattcggctagaaagagaacagcttcgcactggaccttcaaacacagaggtcatccacaactatggccatggaggctacgggctcacca

SEQ ID NO: 180177 - DNA, 120 bp, Artificial Sequence
  ENSG00000110887_9 (sequence is synthesized)
tccactggggatgtgccctggaggcagccaagctctttgggagaatcctggaagaaaagaaattgtccagaatgccaccatcccacctctgaagactccagtgactgctgcctcccccca

SEQ ID NO: 180178 - DNA, 120 bp, Artificial Sequence
  ENSG00000110887_10 (sequence is synthesized)
caagaactcccttctcccctcagccaatgaatcaatgtgctccttcataagccattgcttctccctcacttctttcctcaaagaagcatgaggtgagagaaagccacaaagtcagtgcct

SEQ ID NO: 180179 - DNA, 120 bp, Artificial Sequence
  ENSG00000110887_11 (sequence is synthesized)
ggagaagggttcagcccaacatggggcccctctcatcactgaaatccctctaccttctctgggtctggcattataaagaacagctgaggctgtcattccatgagtcttcagaagaaagga

SEQ ID NO: 180180 - DNA, 120 bp, Artificial Sequence
  ENSG00000110887_12 (sequence is synthesized)
cagctcagaaaatcaaagaggccaactgcccagagccacagaaaatggaggataattgaggctaagtaacctgattacaagttgtactaacatattaaaggttctgaaaagtcctgcagc

SEQ ID NO: 180181 - DNA, 120 bp, Artificial Sequence
  ENSG00000110887_13 (sequence is synthesized)
aaagacaactatctgatgttgtttaacccagtgcttgctaaacctatctggctatggaactcttttgcccagagcacccatgaatgccatgacacaaatctgagaaaatgctggaacaga

SEQ ID NO: 180182 - DNA, 120 bp, Artificial Sequence
  ENSG00000110887_14 (sequence is synthesized)
ggcggacagagggctggaaacaagacgctccagaatcaggagcttcccctcaggaaatagcatcctgtgtccccgcactgcagttgtctggtctctccagcagtttggtacttccggacc

SEQ ID NO: 180183 - DNA, 120 bp, Artificial Sequence
  ENSG00000110887_15 (sequence is synthesized)
gcaaagacaatgttgttgatggagatgacaacattgatggaagtggtgatggaagagttcgttgttggtgttgatggtgatgacagtggcaattgaggtagtgatggtggtggtgttagc

SEQ ID NO: 180184 - DNA, 120 bp, Artificial Sequence
  ENSG00000110887_16 (sequence is synthesized)
tcttccactcctcagatggctctggcattttcagggaacagtcatgtctgatctcaagttccacacaggctccatagcaggcaggggcagtggtggctaatatcccctcctctataaatg

SEQ ID NO: 180185 - DNA, 120 bp, Artificial Sequence
  ENSG00000110887_17 (sequence is synthesized)
tgtgactgggagtggggatggtagctggtgctgatggaaatgacactatcaagtatgttagtaccacagcagaggtgacgatctcaaaggcagtgttaacatggctgcactaactgtctc

SEQ ID NO: 180186 - DNA, 120 bp, Artificial Sequence
  ENSG00000110887_18 (sequence is synthesized)
attggcaatattaatcgtgtggcagagatgacagtatcaatggcagtgttaatgatggtggtgaaatggtgaatggggttggttttctaaagtctgtggtcaaataacaggaaaatgtgt

SEQ ID NO: 180187 - DNA, 120 bp, Artificial Sequence
  ENSG00000110887_19 (sequence is synthesized)
acttactggatgtgtacttcgtgtcagacacagcagcaagtccattacatgaatgaccttattaaatctcctctggagctctttgggatagggacagttctccctatgcttcggatgagg

SEQ ID NO: 180188 - DNA, 120 bp, Artificial Sequence
  ENSG00000110887_20 (sequence is synthesized)
aaactggggtgaattaagaggtgaagtcacttgcccaagtcagaccactggtggaaggcagggctgggatgtgatttgaatttgactccaaggctatttccagatatccattttgtggct

SEQ ID NO: 180189 - DNA, 120 bp, Artificial Sequence
  ENSG00000110887_21 (sequence is synthesized)
gccccatcatctcttgcaactgttccagggggtccccaccattccaccccggtgccaagagaagctcaggtggcatctggctttgcccaggactcttcgggaggctcctgagtcttccag

SEQ ID NO: 180190 - DNA, 120 bp, Artificial Sequence
  ENSG00000110887_22 (sequence is synthesized)
gaaacccacgcagcctcctggattcttccccgtccctccctctgtcctggggctgtgacctcctccatgttattcacagggtctcagcacgattcatctcaaagcagcgaaacaagcact

SEQ ID NO: 180191 - DNA, 120 bp, Artificial Sequence
  ENSG00000110887_23 (sequence is synthesized)
ggcctcagaagaagcaatattaaaacagttacaactcatctagcacacagacacccaactgacaccctgttcctccagtcataacaacaactacagctttgattgaacaagagactgagt

SEQ ID NO: 180192 - DNA, 120 bp, Artificial Sequence
  ENSG00000110887_24 (sequence is synthesized)
ttggtaactttctcctaataaaaagatcactgactatggactgcttctggtggggttacgaaaccgcaacctcatgtgcctgcatttcctgaaaagacattttgatgtaggaagggcctg

SEQ ID NO: 180193 - DNA, 120 bp, Artificial Sequence
  ENSG00000110887_25 (sequence is synthesized)
gagtcctgctgcttgcgtctctgggatacgggagcaaagagccacgcatcctcatggcccacacaggcgtcacctccagtctctccttggcctcatctccccagcgtcctggaatggcat

SEQ ID NO: 180194 - DNA, 120 bp, Artificial Sequence
  ENSG00000110887_26 (sequence is synthesized)
cccccaccgcaggccaggcctacagtgccccatggaacgtcctgaccctcccccagggtggcagcaggaagaaggaagaaaggggatcctctccagctggccagagagacagaccttctt

SEQ ID NO: 180195 - DNA, 120 bp, Artificial Sequence
  ENSG00000110887_27 (sequence is synthesized)
gtgctcatcaaccctccaagaatgcctgccctccctccttcccccaaggcctgtccacaggggcttgagatcagccagaaaagtcaggcaacttttcagggactgggagcgaggtctccc

SEQ ID NO: 180196 - DNA, 120 bp, Artificial Sequence
  ENSG00000110887_28 (sequence is synthesized)
tccagaggcaaagtatgggggaagagggaagagagaagaccaagggtccctgagaggggctgtcccctaagccccagtatccaagctcgggctcgaagctggaaggagaattgcctagag

SEQ ID NO: 180197 - DNA, 120 bp, Artificial Sequence
  ENSG00000110888_0 (sequence is synthesized)
gtcggtgcctgcagggctctccgtggccgctcgggagaggtgctcttcgctcaggctcccccggagacttgagggggtgcgcgctggcgtgcatggggcctgttctgtccttggtttggg

SEQ ID NO: 180198 - DNA, 120 bp, Artificial Sequence
  ENSG00000110888_1 (sequence is synthesized)
gatgctcctaaggggggagaaagggatacctcgggtgcttggaggtcgagagacggatacgtaagtgcgcaagggccactgattagggcacgggaagggctcgctagaatgagctcttaa

SEQ ID NO: 180199 - DNA, 120 bp, Artificial Sequence
  ENSG00000110888_2 (sequence is synthesized)
actggttgggtgtaagcggttttgggctagtctaaaccaaacaactgagaataaacgcggggttcctgcaggttgagagagtacctgtctgcaaatgtccagtagtgatggattgccttg

SEQ ID NO: 180200 - DNA, 120 bp, Artificial Sequence
  ENSG00000110888_3 (sequence is synthesized)
taggccccagagcaatcggggaagttagcattcttgttcaagaagctgctggttcacttagagctataaaagaatgttgtgagtttggattttcttccaaacgttcaggattgaggttag

SEQ ID NO: 180201 - DNA, 120 bp, Artificial Sequence
  ENSG00000110888_4 (sequence is synthesized)
ggctggtggtgagggatcatgtaaagaggtttgagtggctcagccttaggtcccggtgtggaaagcttattcttttggtgtcatcacgtggccatgggaattatttagaatgtgatctgc

SEQ ID NO: 180202 - DNA, 120 bp, Artificial Sequence
  ENSG00000110888_5 (sequence is synthesized)
cctcatgagaagaaaggagctctgaagccgttgcagttcttcctccctatgtggaaaatcgaatttctggaaacatcctccgtattgggagattttgcctatgtaaaggctatccttatt

SEQ ID NO: 180203 - DNA, 120 bp, Artificial Sequence
  ENSG00000110888_6 (sequence is synthesized)
ggctagcggcactaattactttaaaagtaggatggaagtacaagtatctcaagcatcattgggtttcgagctcacttctgtggaaaagagtttaagggagtggtctagactttccaggga

SEQ ID NO: 180204 - DNA, 120 bp, Artificial Sequence
  ENSG00000110888_7 (sequence is synthesized)
agttattgcctggctgtgtccctctagtcctaattttatacttaactttcccccacctccttcagcctcatctgtttcaatggtgcaactcttttcatccccttttggttaccagtcacc

SEQ ID NO: 180205 - DNA, 120 bp, Artificial Sequence
  ENSG00000110888_8 (sequence is synthesized)
ttcaggccattcagaggaggaaagagaggggaatatgaagtcagccaagccccaagtgaaccacagtcagcatggggaaagccagcgggccttgagccccctgcagtctactctgagttc

SEQ ID NO: 180206 - DNA, 120 bp, Artificial Sequence
  ENSG00000110888_9 (sequence is synthesized)
tgctgcatctccttcccaagcgtatgagacctatattgaaaatggactcatatgccttaaacacaaaattagaaacatcgagaaaaagaagctcaaactggaggattataaggatcgcct

SEQ ID NO: 180207 - DNA, 120 bp, Artificial Sequence
  ENSG00000110888_10 (sequence is synthesized)
gaaaagtggagagcatcttaatccagaccagttggaagctgtagagaaatatgaagaagtgctacataatttggaatttgccaaggagcttcaaaaaaccttttctgggttgagcctaga

SEQ ID NO: 180208 - DNA, 120 bp, Artificial Sequence
  ENSG00000110888_11 (sequence is synthesized)
tctactaaaagcgcaaaagaaggcccagagaagggagcacatgctaaaacttgaggctgagaagaaaaagcttcgaactatacttcaagttcagtatgtattgcagaacttgacacagga

SEQ ID NO: 180209 - DNA, 120 bp, Artificial Sequence
  ENSG00000110888_12 (sequence is synthesized)
gcacgtacaaaaagacttcaaagggggtttgaatggtgcagtgtatttgccttcaaaagaacttgactacctcattaagttttcaaaactgacctgccctgaaagaaatgaaagtctgag

SEQ ID NO: 180210 - DNA, 120 bp, Artificial Sequence
  ENSG00000110888_13 (sequence is synthesized)
tgttgaagaccagatggagcagtcatccttgtacttttgggaccttttggaaggtagtgagaaagcagtggtaggaacgacatacaaacacttgaaggatctactgtctaaattgctgaa

SEQ ID NO: 180211 - DNA, 120 bp, Artificial Sequence
  ENSG00000110888_14 (sequence is synthesized)
ctcaggctattttgaaagtatcccagttcccaaaaatgccaaggaaaaggaagtaccactggaggaagaaatgctaatacaatcagagaaaaaaacacaattatcgaagactgaatctgt

SEQ ID NO: 180212 - DNA, 120 bp, Artificial Sequence
  ENSG00000110888_15 (sequence is synthesized)
caaagagtcagagtctctaatggaatttgcccagccagagatacaaccacaagagtttcttaacagacgctatatgacagaagtagattattcaaacaaacaaggcgaagagcaaccttg

SEQ ID NO: 180213 - DNA, 120 bp, Artificial Sequence
  ENSG00000110888_16 (sequence is synthesized)
ggaagcagattatgctagaaaaccaaatctcccaaaacgttgggatatgcttactgaaccagatggtcaagagaagaaacaggagtcctttaagtcctgggaggcttctggtaagcacca

SEQ ID NO: 180214 - DNA, 120 bp, Artificial Sequence
  ENSG00000110888_17 (sequence is synthesized)
ggaggtatccaagcctgcagtttccttagaacagaggaaacaagacacctcaaaactcaggtctactctgccggaagagcagaagaagcaggagatctccaaatccaagccatctcctag

SEQ ID NO: 180215 - DNA, 120 bp, Artificial Sequence
  ENSG00000110888_18 (sequence is synthesized)
atacacctaaatccaaagcagggtatgttcaagaggaacaaaagaaacaggagacaccaaagctgtggccagttcagctgcagaaagaacaagatccaaagaagcaaactccaaagtctt

SEQ ID NO: 180216 - DNA, 120 bp, Artificial Sequence
  ENSG00000110888_19 (sequence is synthesized)
ggacaccttccatgcagagcgaacagaacaccaccaagtcatggaccactcccatgtgtgaagaacaggattcaaaacagccagagactccaaaatcctgggaaaacaatgttgagagtc

SEQ ID NO: 180217 - DNA, 120 bp, Artificial Sequence
  ENSG00000110888_20 (sequence is synthesized)
aaaaacactctttaacatcacagtcacagatttctccaaagtcctggggagtagctacagcaagcctcataccaaatgaccagctgctgcccaggaagttgaacacagaacccaaagatg

SEQ ID NO: 180218 - DNA, 120 bp, Artificial Sequence
  ENSG00000110888_21 (sequence is synthesized)
tgcctaagcctgtgcatcagcctgtaggttcttcctctacccttccgaaggatccagtattgaggaaagaaaaactgcaggatctgatgactcagattcaaggaacttgtaactttatgc

SEQ ID NO: 180219 - DNA, 120 bp, Artificial Sequence
  ENSG00000110888_22 (sequence is synthesized)
aagagtctgttcttgactttgacaaaccttcaagtgcaattccaacgtcacaaccgccttcagctactccaggtagccccgtagcatctaaagaacaaaatctgtccagtcaaagtgatt

SEQ ID NO: 180220 - DNA, 120 bp, Artificial Sequence
  ENSG00000110888_23 (sequence is synthesized)
ttcttcaagagccgttacaggctacttcttctccagttacttgtagctcaaatgcttgcttggttactaccgatcaggcttcttctggatctgaaacagagtttatgacctcagagactc

SEQ ID NO: 180221 - DNA, 120 bp, Artificial Sequence
  ENSG00000110888_24 (sequence is synthesized)
ctgaggtatttaacgttaatgcacctctgcctccacgaaaagaacaagaaataaaagaatccccttattcacctggctacaatcaaagttttaccacagcaagtacacaaacaccacccc

SEQ ID NO: 180222 - DNA, 120 bp, Artificial Sequence
  ENSG00000110888_25 (sequence is synthesized)
agtgccaactgccatctatacatgtagaacaaactgtccattctcaagagactgcaaattatcatcctgatggaactattcaagtaagcaatggtagccttgccttttacccagcacaga

SEQ ID NO: 180223 - DNA, 120 bp, Artificial Sequence
  ENSG00000110888_26 (sequence is synthesized)
cgaatgtgtttcccagacctactcagccatttgtcaatagccggggatctgttagaggatgtactcgtggtgggagattaataaccaattcctatcggtcccctggtggttataaaggtt

SEQ ID NO: 180224 - DNA, 120 bp, Artificial Sequence
  ENSG00000110888_27 (sequence is synthesized)
ttgatacttatagaggactcccttcaatttccaatggaaattatagccagctgcagttccaagctagagagtattctggagcaccttattcccaaagggataatttccagcagtgttata

SEQ ID NO: 180225 - DNA, 120 bp, Artificial Sequence
  ENSG00000110888_28 (sequence is synthesized)
agcgaggagggacatctggtggtccacgagcaaattcgagagcagggtggagtgattcttctcaggtgagcagcccagaaagagacaacgaaacctttaacagtggtgactctggacaag

SEQ ID NO: 180226 - DNA, 120 bp, Artificial Sequence
  ENSG00000110888_29 (sequence is synthesized)
gagactcccgtagcatgacccctgtggatgtgccagtgacaaatccagcagccaccatactgccagtacacgtctaccctctgcctcagcagatgcgagttgccttctcagcagccagaa

SEQ ID NO: 180227 - DNA, 120 bp, Artificial Sequence
  ENSG00000110888_30 (sequence is synthesized)
cctctaatctggcccctggaactttagaccaacctattgtgtttgatcttcttctgaacaacttaggagaaacttttgatcttcagcttggtagatttaattgcccagtgaatggcactt

SEQ ID NO: 180228 - DNA, 120 bp, Artificial Sequence
  ENSG00000110888_31 (sequence is synthesized)
acgttttcatttttcacatgctaaagctggcagtgaatgtgccactgtatgtcaacctcatgaagaatgaagaggtcttggtatcagcctatgccaatgatggtgctccagaccatgaaa

SEQ ID NO: 180229 - DNA, 120 bp, Artificial Sequence
  ENSG00000110888_32 (sequence is synthesized)
ctgctagcaatcatgcaattcttcagctcttccagggagaccagatatggttacgtctgcacaggggagcaatttatggaagtagctggaaatattctacgttttcaggctatcttcttt

SEQ ID NO: 180230 - DNA, 120 bp, Artificial Sequence
  ENSG00000110888_33 (sequence is synthesized)
atcaagattgaaagtcagtacagtattgacaataaaaggatggtgttctaattagtgggattgaaggaaaagtagtctttgccctcatgactgattggtttaggaaaatgtttttgttcc

SEQ ID NO: 180231 - DNA, 120 bp, Artificial Sequence
  ENSG00000110888_34 (sequence is synthesized)
tagagggaggaggtccttacttttttgttttccttcctgaggtgaaaaatcaagctgaatgacaattagcactaatctggcactttataaattgtgatgtagcctcgctagtcaagctgt

SEQ ID NO: 180232 - DNA, 120 bp, Artificial Sequence
  ENSG00000110888_35 (sequence is synthesized)
gaatgtatattgtttgcacttaatccttaactgtattaacgttcagcttactaaactgactgcctcaagtccaggcaagttacaatgccttgttgtgcctcaataaaaaagttacatgca

SEQ ID NO: 180233 - DNA, 120 bp, Artificial Sequence
  ENSG00000110888_36 (sequence is synthesized)
cgtcttcactagcttctccaaatcctcccatggcaaagggctctgaacagggcttccagtcacctccagcaagtagtagttcagtaaccattaacacagcaccctttcaagccatgcaga

SEQ ID NO: 180234 - DNA, 120 bp, Artificial Sequence
  ENSG00000110888_37 (sequence is synthesized)
tatcattctgcttctgtaagtgtaggcataaataaggtgtcgtggtaatgactttttagttctcttttttttttttttttgagatggagaaacactctgttacccaggctggagtgcagt

SEQ ID NO: 180235 - DNA, 120 bp, Artificial Sequence
  ENSG00000110888_38 (sequence is synthesized)
agacgcgagtgcggggtggcgccggtccacctccgcagcgctcctgcctcccccaggctttggaaggcgggcccgggctgcggcagcggcggcctcggctgcctggggaggtgaagtcgg

SEQ ID NO: 180236 - DNA, 120 bp, Artificial Sequence
  ENSG00000110888_39 (sequence is synthesized)
ttcatgttgtagcatgggtcaaaattttcttccttttttaggctgaataatattccattatatatatgaattacgtatttgagtcatgtagatgaattatatacatgaatatatgtatct

SEQ ID NO: 180237 - DNA, 120 bp, Artificial Sequence
  ENSG00000110888_40 (sequence is synthesized)
agcgctcctgcctcccccaggctttggaaggcgggcccgggctgcggcagcggcggcctcggctgcctggggaggtgaagtcgggctgcggcggcctcgctcaaactggaggattataag

SEQ ID NO: 180238 - DNA, 120 bp, Artificial Sequence
  ENSG00000110888_41 (sequence is synthesized)
atgattagttgaatgatgtaacatttatactttattaatgtattgctttctatagatattgtgatcttggaacttttacaggtaactttattgtagctttgccatataaatagatttaat

SEQ ID NO: 180239 - DNA, 120 bp, Artificial Sequence
  ENSG00000110888_42 (sequence is synthesized)
atggtattgccttatctagtgcaataaatgtccatttttaatctaaaaaaatgaaaagtgtaggtagcattaagtcaagttttccactatatttacactgaaggacttttaggagaaaag

SEQ ID NO: 180240 - DNA, 120 bp, Artificial Sequence
  ENSG00000110888_43 (sequence is synthesized)
tctcttatttgtataaatgaaagctcaataactttattttattaatattagcacttattgagttggaatgagttacaatcttgttttggctaactttgtcaaaaatattttcggtcagat

SEQ ID NO: 180241 - DNA, 85 bp, Artificial Sequence
  ENSG00000110888_44 (sequence is synthesized)
attagctgggtgtggtggctcatgcctctagtcccaggtactcaggaggccgaggacaagattgtgccactgcacttcagcctgg

SEQ ID NO: 180242 - DNA, 120 bp, Artificial Sequence
  ENSG00000110888_45 (sequence is synthesized)
ctgggtgacaaagtgatacttcatctcaaaaaaaataaataaataaaaacattttaacagtattatgtttgtgctttcaatttcaattctaagttacagtttttactaagtttgagtaaa

SEQ ID NO: 180243 - DNA, 120 bp, Artificial Sequence
  ENSG00000110888_46 (sequence is synthesized)
tccttgagatggacatagtaggatgaattttgaggagtaatttagcaactatcaggtattttttgttaactgttatagaagaatatgtattcattatagaatataagaaaatatagataa

SEQ ID NO: 180244 - DNA, 120 bp, Artificial Sequence
  ENSG00000110888_47 (sequence is synthesized)
tccttagtttttatggtgctggcttgatctgaatttaaattatctcattcctcattttaagaagaggaagaagtgattgttaccaagtaactcacagctgtctgcttcacaatctagttg

SEQ ID NO: 180245 - DNA, 120 bp, Artificial Sequence
  ENSG00000110888_48 (sequence is synthesized)
agattggtttttggtattttttttaagcctttggatttataatctgttatgtcaagaacttgtggcttccttaggtaaggattacttaaattggatcggagttgttttctgttttaggta

SEQ ID NO: 180246 - DNA, 120 bp, Artificial Sequence
  ENSG00000110888_49 (sequence is synthesized)
gctgacttagaaacctactaactaataagtctttaaaatagagaaaaattaacactaaacaactaatccaagttttttcttaaatccaattctgatgtataaattttgaataatattagg

SEQ ID NO: 180247 - DNA, 120 bp, Artificial Sequence
  ENSG00000110888_50 (sequence is synthesized)
ccctcatctgttagactgattattggtaagactctttcacttagtcagcaagctgtgcaaagcaaatactggtatgcatcctcagcaattgagatttgaaattgtaagcaaaagctattc

SEQ ID NO: 180248 - DNA, 120 bp, Artificial Sequence
  ENSG00000110888_51 (sequence is synthesized)
ttttgcattcctgtgtccaaatgtcatcctaaagaacttgctgacttatgccagtttgggttttagagtaagttaactgcttgttatatggcaggtgattggctgatgctgcatttctcc

SEQ ID NO: 180249 - DNA, 120 bp, Artificial Sequence
  ENSG00000110888_52 (sequence is synthesized)
ggacagccaattgaatggacagcaagtctaggaagtctgtagtgacactttagaagtattttcctgaccagtaagcattatttctttacatgttcctccagtgttgagaaaaacctaatg

SEQ ID NO: 180250 - DNA, 120 bp, Artificial Sequence
  ENSG00000110888_53 (sequence is synthesized)
cccttttttgtgttaagtttacctattaattttaatttttgtagagatagaacttagatgacggatttaaccttgaagtaggtttgtatttttaaatctatttgctttgattaccacaga

SEQ ID NO: 180251 - DNA, 120 bp, Artificial Sequence
  ENSG00000110888_54 (sequence is synthesized)
cagtgattgaggtagatgggcactatctggctgcttatatgaaggttttgaaaccattctgttaatccttttaacaaatggttatctgtccttttctatcttataataaaagattgaaga

SEQ ID NO: 180252 - DNA, 120 bp, Artificial Sequence
  ENSG00000110888_55 (sequence is synthesized)
tatgacttagtatgctcattgtactgtttgcttagagatgggaggctattttgatttttcatgctgttctaaatcatgaaagaataggtaactttgtactcatttcttaatttaaattta

SEQ ID NO: 180253 - DNA, 120 bp, Artificial Sequence
  ENSG00000110888_56 (sequence is synthesized)
agaagcacttgtagattttttgtattggtatttcagatccctattgagttttttaactgaagtcggagcaaatgaattgagcattctgagtacttggctaatcaagtgatgaagaggtag

SEQ ID NO: 180254 - DNA, 120 bp, Artificial Sequence
  ENSG00000110888_57 (sequence is synthesized)
taatatgaattctgggacctaggcatagatgacctgattctgttctcccctctactgttgaaagacagggcaggtgacttacgtaagggatatttttgtcaggtgccttctcagatatta

SEQ ID NO: 180255 - DNA, 120 bp, Artificial Sequence
  ENSG00000110888_58 (sequence is synthesized)
attagaatccattttcttttactccctcatctggagtatttagcctgctttttaaaaattgtcgtaaagtatacataacataaaaattaccattttaatcatttttaactatatagttct

SEQ ID NO: 180256 - DNA, 120 bp, Artificial Sequence
  ENSG00000110888_59 (sequence is synthesized)
gtggcattaagtacaaccaaactgttgtgtaattattaccactgtccacctccagaacttttcatctccccccaactgaaactttgtaatcatttaatactaactcctcctcctcctctc

SEQ ID NO: 180257 - DNA, 120 bp, Artificial Sequence
  ENSG00000110888_60 (sequence is synthesized)
ccctggcaaccaccattctactttctgattctgaaaatgactgctctaggtacctcatataagtggtatacaatatttgtgcttttgaaactagcttattttacttggcatgtcttaagg

SEQ ID NO: 180258 - DNA, 120 bp, Artificial Sequence
  ENSG00000110888_61 (sequence is synthesized)
gaggggagagggaggagacaggaggaggagacgcgagtgcggggtggcgccggtccacctccgcagcgctcctgcctcccccaggctttggaaggcgggcccgggctgcggcagcggcgg

SEQ ID NO: 180259 - DNA, 120 bp, Artificial Sequence
  ENSG00000110888_62 (sequence is synthesized)
cactgacattttgtacaggataattcttcgttgtaaagggctgtcctgtgcattttaagatgtttggcagcatccctggcctctaaccacaagataccggtagcactcttcacctccctt

SEQ ID NO: 180260 - DNA, 120 bp, Artificial Sequence
  ENSG00000110888_63 (sequence is synthesized)
ccccctcccaagttgtgataaccaaaaatatccctagatattgccaggtatctttgggggacaaaattgttccctgttgagaagctactgtgttggggacacatgatttagtagctcaaa

SEQ ID NO: 180261 - DNA, 120 bp, Artificial Sequence
  ENSG00000110900_0 (sequence is synthesized)
agtggaggaggcaggaatgcctgggacactcgcggggcatgtgagcaggcccagaagccatggcccactataagactgagcaggacgactggctgatcatctacttgaagtatttactct

SEQ ID NO: 180262 - DNA, 120 bp, Artificial Sequence
  ENSG00000110900_1 (sequence is synthesized)
ttgtcttcaacttcttcttctgggtcgggggagcagccgtcctggctgtgggcatctggaccctggtggagaagagtggctacctcagcgtcctggcctccagcacctttgccgcctccg

SEQ ID NO: 180263 - DNA, 120 bp, Artificial Sequence
  ENSG00000110900_2 (sequence is synthesized)
cctacatcctcatctttgcgggcgtacttgtcatggtgaccggcttcctgggcttcggtgccatcctctgggagcggaagggctgcctctccacgtatttctgcctgttgctcgtcatct

SEQ ID NO: 180264 - DNA, 120 bp, Artificial Sequence
  ENSG00000110900_3 (sequence is synthesized)
tcctggttgagctggtggcgggagtcctggcccatgtgtattaccagaggctgagtgatgaactgaagcagcacttgaaccggactctggctgagaactacgggcagcccggagccacgc

SEQ ID NO: 180265 - DNA, 120 bp, Artificial Sequence
  ENSG00000110900_4 (sequence is synthesized)
agatcaccgcctcagtggaccgactccagcaggatttcaagtgctgtggaagcaacagctcagccgactggcagcacagcacgtacatcctgttgcgggaggccgagggccgccaggtgc

SEQ ID NO: 180266 - DNA, 120 bp, Artificial Sequence
  ENSG00000110900_5 (sequence is synthesized)
ccgacagctgctgcaagacagtggtggtgcgctgcggccagcgggcccacccctccaacatctataaggtggagggaggctgcctcaccaagctggagcagttcctggccgaccacctgc

SEQ ID NO: 180267 - DNA, 120 bp, Artificial Sequence
  ENSG00000110900_6 (sequence is synthesized)
tgcttatgggggcagtgggcatcggggtggcctgcctgcagatctgcgggatggttctcacctgctgcttgcaccagaggctccagcggcatttttactaatggccaaccacctcctctt

SEQ ID NO: 180268 - DNA, 120 bp, Artificial Sequence
  ENSG00000110900_7 (sequence is synthesized)
ccaactgcccctcaagacaacatgtggccacatgccatctgcaaggcctgcagagttagcaccagctccactagggccatagatgccccctcctttgtgcctagctcctgcgaatccacc

SEQ ID NO: 180269 - DNA, 120 bp, Artificial Sequence
  ENSG00000110900_8 (sequence is synthesized)
gagtgcctgagaccatagcttctgtgcccacccaggcagagaccctcggccccctctcctccatttctgagcccccatggccagatcctgggcagggaaatgatcctttcaggagacaac

SEQ ID NO: 180270 - DNA, 120 bp, Artificial Sequence
  ENSG00000110900_9 (sequence is synthesized)
cagagcccctcaccaggaacgggggcacccgtggactacgggagggtggcggttgggttctctgctccctcccagctcctgaacctggaacaatcggcagaaaacccaggaaccccggca

SEQ ID NO: 180271 - DNA, 120 bp, Artificial Sequence
  ENSG00000110900_10 (sequence is synthesized)
ctcctgcattcagcacgggattcccccacccatgcccagaagccctgaccttgctgtttctggaaaaagcatggggtggggcagggagggctggcatttcccccagaagaccttgccctt

SEQ ID NO: 180272 - DNA, 120 bp, Artificial Sequence
  ENSG00000110900_11 (sequence is synthesized)
tgacctgcccactctccacactgcctcacctggaaagccatgtcctgctggcctcattccttcctgaagggcctaggagtggggaggcctgggtagggcagccacaggctgggtagagcc

SEQ ID NO: 180273 - DNA, 120 bp, Artificial Sequence
  ENSG00000110900_12 (sequence is synthesized)
gccctggcaggaagcagggggtaaggtggccataccagcacatgctgcactaggagcagagccctgcacctgcctagctgccttcctgggagaaacctccctgggagaccatggccccaa

SEQ ID NO: 180274 - DNA, 120 bp, Artificial Sequence
  ENSG00000110900_13 (sequence is synthesized)
gccctggcctctagtgatacgcccctcgggaatctcctgttccggggcctgattctcaggaacaccaggtttcagaccatcttcagcacctaatgttgatgggtgtcaaacatctcctgg

SEQ ID NO: 180275 - DNA, 120 bp, Artificial Sequence
  ENSG00000110900_14 (sequence is synthesized)
agtggaccaactcgcaaccctgcaaagtcggagctgctgagaaggggcagctctgaatagaggggcatctgcctgaacctcacttttcctggggccctctccttgaccccgtagccacca

SEQ ID NO: 180276 - DNA, 120 bp, Artificial Sequence
  ENSG00000110900_15 (sequence is synthesized)
ccacactgcttccagggggtccagctctgcttcccttcccacctgtcctagagtggacagagctttttccttgggttctctcttgcatcactaagttcagcagggaatttgcggaatttt

SEQ ID NO: 180277 - DNA, 120 bp, Artificial Sequence
  ENSG00000110900_16 (sequence is synthesized)
caggaagaactttccccagtaataagggagaacagaaagaaaatcctagaaaatacagagtatccatgctggcagctttttgtacaacacccatagggacccccccaaatggctattaca

SEQ ID NO: 180278 - DNA, 120 bp, Artificial Sequence
  ENSG00000110900_17 (sequence is synthesized)
aaggggcagcccattcactacacaagaaccccacacctggcttccaccctccccagctcctgcacttctccccagagcgggaccctcttacttccccccatgaaggggggcaccttgtgc

SEQ ID NO: 180279 - DNA, 120 bp, Artificial Sequence
  ENSG00000110900_18 (sequence is synthesized)
taaggccaaggctgagcgaggtcccagctcacctccctgcttgatccagattgcactgtgatgagcacattgctgacctaggccagtcctggggcaggcgtgctctctctcccatacata

SEQ ID NO: 180280 - DNA, 120 bp, Artificial Sequence
  ENSG00000110900_19 (sequence is synthesized)
ggagtggcctcaaggccacccagtgctgaccccaacagagccctgaactgtccagaaactgcatcctcagcacaggaagtacccacatggacagagggaagcccagcctcggggccggtt

SEQ ID NO: 180281 - DNA, 120 bp, Artificial Sequence
  ENSG00000110900_20 (sequence is synthesized)
gcctcctcttctctgggtgttctccagtggcttcttggagcctaggctggtttatctcccctgcctaaaaggccctggggttgccaatgcaaattcattaaaacgaagaccagatatccc

SEQ ID NO: 180282 - DNA, 120 bp, Artificial Sequence
  ENSG00000110900_21 (sequence is synthesized)
agactgcacagaggccgagagaaatggtatagtgcgtgattagcattgctgccctccaacctcctgggattcatgcagataatcaaaaactgactatgactcccaagttctctgaaggat

SEQ ID NO: 180283 - DNA, 120 bp, Artificial Sequence
  ENSG00000110900_22 (sequence is synthesized)
agtgggcagggggtgctggggccttacctgtctgccctggtggggatgaaagacaggtgacaggcaggtgccctgtgcacagccttatcattgaaggcaggcccaggacagcctgcccca

SEQ ID NO: 180284 - DNA, 120 bp, Artificial Sequence
  ENSG00000110900_23 (sequence is synthesized)
tctgccccagccccatgggatggttggtccagcctgactggggcaggattagctgcaattcctgccctgtgtgtcgtccagccagactgcctcttgaaagatggcttgtccaagcggcag

SEQ ID NO: 180285 - DNA, 120 bp, Artificial Sequence
  ENSG00000110900_24 (sequence is synthesized)
acagtggtagaacaacccagggcttggaaatctgacctccttgtccatgccaacagcctgggagatgagacagggttagaggaaacagaggcccaggatacggcaggttctgcctgggag

SEQ ID NO: 180286 - DNA, 120 bp, Artificial Sequence
  ENSG00000110900_25 (sequence is synthesized)
tgtacaatggttggagtccagagccaacgatgtggtccccagcggggtgtgcccctcctgctgacgagggtacagatccatacccaggtcaattcctcccgggcccctgtttggaggctg

SEQ ID NO: 180287 - DNA, 120 bp, Artificial Sequence
  ENSG00000110900_26 (sequence is synthesized)
ctacagccttgagttccttggagagagaggacacgcctgtggaatgtcaccttcagtcccgtgcaggcaaaaggcccctgcacaccagggccctaggaaagcagcatcaggtgctgggat

SEQ ID NO: 180288 - DNA, 120 bp, Artificial Sequence
  ENSG00000110900_27 (sequence is synthesized)
cccacccagctggcacgggcacgttcttgccctgcacactccatgctgcccttccctgagctcgcaggggcagacaccaagagaagggcgcgtccccgagtcccctgggtgacctgtgtc

SEQ ID NO: 180289 - DNA, 120 bp, Artificial Sequence
  ENSG00000110900_28 (sequence is synthesized)
aggacagcaggcaagaatgaaacgtggccttggctgacgggttggaatatttgtgaccgttcttgtctttctccctcctgcttccccggcaccctagccccatctccaggagcccctcag

SEQ ID NO: 180290 - DNA, 120 bp, Artificial Sequence
  ENSG00000110900_29 (sequence is synthesized)
gcagagtaagtggggagtgtgtccagggatttttttgtgtttaccaaggtcctgctgtgcacttagaatctgtcaccataaatacttatctcgcagttaccccagcaagagggtgttatt

SEQ ID NO: 180291 - DNA, 120 bp, Artificial Sequence
  ENSG00000110900_30 (sequence is synthesized)
tcccccattttataaaaggaaattaaggctgggcaaagttaagacttgcttgtcagtggtcatggctgttgtcttgccacccccagctggggagaaggaagaaaactgggccgggaaccc

SEQ ID NO: 180292 - DNA, 120 bp, Artificial Sequence
  ENSG00000110900_31 (sequence is synthesized)
ctcccctcagtgtcccccagttctccatctccataaggagccatcaggctgtcattaaggaacagagtgtcactcagggggcactgtcacaaagcagcacccatggcacatgggccgggg

SEQ ID NO: 180293 - DNA, 120 bp, Artificial Sequence
  ENSG00000110900_32 (sequence is synthesized)
gtgcagaagcctggcttatttcaggctgacagctggaccctctgggtgcaggggctcaggcagtggccaagagcccaaagggctaaggcccgtgacgaccacccagcccgtcaccccagg

SEQ ID NO: 180294 - DNA, 120 bp, Artificial Sequence
  ENSG00000110900_33 (sequence is synthesized)
tacaaacactgaccccaaagcaagagcagggactgtccctcagccctcagggccttcatgcagggtgcagaatctcatgtccacatggaggtcacccctcaggtcacacccactcccaga

SEQ ID NO: 180295 - DNA, 120 bp, Artificial Sequence
  ENSG00000110900_34 (sequence is synthesized)
gcaaccctgggcagggaggggcaccctggggttgtgttgaccacctccccttcaggtgaggcccttttctgccttctttctagccccctgcatggggcacctgctattgctggggctctg

SEQ ID NO: 180296 - DNA, 120 bp, Artificial Sequence
  ENSG00000110900_35 (sequence is synthesized)
gggtggaccctgtgtgatttctgtcagggagcttgtgctgtgcatggccagaggtgtttacatccagaagggcccagcacggccctgtggggtgtggggggaatatggtagatcattgtg

SEQ ID NO: 180297 - DNA, 120 bp, Artificial Sequence
  ENSG00000110900_36 (sequence is synthesized)
atgtgcctcggggccctcttgccttggagccagctttgtttcagaatctgctacttgggccctcttcagggttttgaggctggagaagtgagttgggacagtcactgtcatcaccaccca

SEQ ID NO: 180298 - DNA, 120 bp, Artificial Sequence
  ENSG00000110900_37 (sequence is synthesized)
ccctgtcacccacctggaaaacattcttgatatactggccatgctgggccgggctcacatccactgagggtatagtgaccaagcgtctaaaccagtcgttctcaaacttcggtgagtatc

SEQ ID NO: 180299 - DNA, 120 bp, Artificial Sequence
  ENSG00000110900_38 (sequence is synthesized)
agaatcacctggaagggcttttacaaacagattgctggccccaccccccagaatttctcatcaggagtgggcaagaccaatcatttgcatttctgacaagttcccaggagctgcagctgc

SEQ ID NO: 180300 - DNA, 120 bp, Artificial Sequence
  ENSG00000110900_39 (sequence is synthesized)
tggccctggaaccacactttgagaaccactgctttagaccaaacaccaaaggaagatgcagccaccctcctttacatgtcacaacgctcagggtccatgagtacctcaggctgtccagct

SEQ ID NO: 180301 - DNA, 120 bp, Artificial Sequence
  ENSG00000110900_40 (sequence is synthesized)
gagctccacctgcagcagccgagattcccgactcgctccaccattgggggctaggagtgaagcgtgtcaccatggtcagctcatggccagccaggaaagcctctctgctgtgcgtctgtg

SEQ ID NO: 180302 - DNA, 120 bp, Artificial Sequence
  ENSG00000110900_41 (sequence is synthesized)
cagttcttgttcttccctggaggactcttggatcgcctgtgatcttggccaggagaccaggtgcctgggtcccttcctggaaggggacaagttacacaccccagccccattttcccacca

SEQ ID NO: 180303 - DNA, 120 bp, Artificial Sequence
  ENSG00000110900_42 (sequence is synthesized)
acttctacatgccttgggagaacctgctacatgttggctgcccccttcccctatttcagcagtgcccagtcctgcttataaacctgaggcctgctccccataccctgccctgtgcaagtg

SEQ ID NO: 180304 - DNA, 120 bp, Artificial Sequence
  ENSG00000110900_43 (sequence is synthesized)
ccagccgttattccaggcagcccaatgttgttgaggccagatggattcctggaagcagctggcccatggatgtgagtcatcacagtattctagaaacagagaagaggtcttaacctaatg

SEQ ID NO: 180305 - DNA, 120 bp, Artificial Sequence
  ENSG00000110900_44 (sequence is synthesized)
cgcatagagaaattgttctcattgtaaacatacccctgtccttagctgatctaggtggaagcccagcttcatgtgctagggggcatgataatgataataaaggaattgtatctaggacta

SEQ ID NO: 180306 - DNA, 120 bp, Artificial Sequence
  ENSG00000110900_45 (sequence is synthesized)
agactgtcccgagcttcccccgggcgggcagagggaagccggctggggatgaggagtggaggaggcaggaatgcctgggacactcgcggggcatgtgagcaggtcgggggagcagccgtc

SEQ ID NO: 180307 - DNA, 120 bp, Artificial Sequence
  ENSG00000110900_46 (sequence is synthesized)
cggcaaccgcacagctgcctcggactctgacttaattccctccgcgtgctctgaatcgcagagaggcaaacccccaaacaaagagccggcagctcgcgtgcggggctcccgggcgcgtcc

SEQ ID NO: 180308 - DNA, 120 bp, Artificial Sequence
  ENSG00000110900_47 (sequence is synthesized)
ccgagcgctgggcaggcggggactagagggccggcaggaagcctcagtgggcgcaggggcgcgggccgggctgcccacacgctgaccttcccgggctgggagggaggagcgctggctgcg

SEQ ID NO: 180309 - DNA, 120 bp, Artificial Sequence
  ENSG00000110900_48 (sequence is synthesized)
gctgaccttcccgggctgggagggaggagcgctggctgcgggcggtgggcggctgggcggccccgggagccgccgctctcagtctctctaggcgcagctcccttcgccgcttccggagcc

SEQ ID NO: 180310 - DNA, 120 bp, Artificial Sequence
  ENSG00000110900_49 (sequence is synthesized)
cacacatcctcttccccgagcactgaatgagtcaagccaccttttgtttttttgtgtcaccactttgaggttgatatcttccaaatcaaagatcaacgatcaaccatgggtgaattcttc

SEQ ID NO: 180311 - DNA, 120 bp, Artificial Sequence
  ENSG00000110900_50 (sequence is synthesized)
ccactttaaagcaaatatgtacatttgctactgagaaagaagaaaagaattgggtctgcaggttggcatggagtttgtaccacatggcatctgaatagaggcacaaacataacaataggc

SEQ ID NO: 180312 - DNA, 120 bp, Artificial Sequence
  ENSG00000110900_51 (sequence is synthesized)
tgaaataataacttgttttccactgaaatccattcacctttcatggttaacattctccaggcccagggcagagaaacagaagtcctggaggctccaactactgctgcctgtgatgaaaat

SEQ ID NO: 180313 - DNA, 120 bp, Artificial Sequence
  ENSG00000110900_52 (sequence is synthesized)
aatctctatggcaactctcctcaggagcctgcctgggtgaggtcttccagaggagtgtagtctgtccacttgaagcaatcatctgggtaattgggagcagaataccatcagttcccaaaa

SEQ ID NO: 180314 - DNA, 120 bp, Artificial Sequence
  ENSG00000110900_53 (sequence is synthesized)
atagacactggaatatatatatttgttattacagtctcactaaatttgagaaggtagaagagtgacaagagtgcaggctttgcaggcagctgtacccatgctctgctgactactaatggt

SEQ ID NO: 180315 - DNA, 120 bp, Artificial Sequence
  ENSG00000110900_54 (sequence is synthesized)
ggagccttgggcaacttacctaacttcaaggaatctgcttccccagctgcaattcaatgataatttctagcctgttggggttgcattcagtaaatgcagtattttgaatatattagatgt

SEQ ID NO: 180316 - DNA, 120 bp, Artificial Sequence
  ENSG00000110900_55 (sequence is synthesized)
caaatgcctgaaaataccaccaaatcaacccatgataaggcatagctgggcttcctgctaccatggtgagggagaagacacttgacagagtcttagaagcatctcagaaaggcaaatgca

SEQ ID NO: 180317 - DNA, 120 bp, Artificial Sequence
  ENSG00000110900_56 (sequence is synthesized)
gaagtgggggacatgtctgagttttcagggtctttcttgcaggggcttgcttaagattgggaaagaccatgatgtgagagtttaggatgggtagacatggcaaggcaagagttttgaaga

SEQ ID NO: 180318 - DNA, 120 bp, Artificial Sequence
  ENSG00000110900_57 (sequence is synthesized)
gtcttggagaataaaccagtcattagatgctatctgttaaaaagttgtgcgatctgctatttgtttaaatgttgtttgcaaagttcctgaaaggaataataaaataatttgtcactttta

SEQ ID NO: 180319 - DNA, 120 bp, Artificial Sequence
  ENSG00000110906_0 (sequence is synthesized)
agtccgggtttggagactcctgcgtcctccgacttttcatggaagagatgtcaggagaaagtgtggtgagctcagcggtgccagcggctgctacccgcaccacttccttcaagggcacga

SEQ ID NO: 180320 - DNA, 120 bp, Artificial Sequence
  ENSG00000110906_1 (sequence is synthesized)
gccccagctccaaatacgtgaagctgaatgtgggtggagccctctactataccaccatgcagacgctgaccaagcaggacaccatgctgaaggccatgttcagcgggcgcatggaagtgc

SEQ ID NO: 180321 - DNA, 120 bp, Artificial Sequence
  ENSG00000110906_2 (sequence is synthesized)
tcaccgacagtgaaggctggatcctcattgaccgctgtgggaagcactttggtacgatactcaactaccttcgagacggggcggtgcctttacccgagagccgccgggagatcgaggagc

SEQ ID NO: 180322 - DNA, 120 bp, Artificial Sequence
  ENSG00000110906_3 (sequence is synthesized)
tgctagcagaagccaagtactacctagtccaaggcctggtggaagagtgccaggcggccctacaaaacaaagatacttatgagcctttctgcaaggtccctgtgatcacctcatccaagg

SEQ ID NO: 180323 - DNA, 120 bp, Artificial Sequence
  ENSG00000110906_4 (sequence is synthesized)
aagaacaaaaacttatagcgacttcaaataagccagccgtgaagttgctctacaacagaagtaacaacaaatactcatataccagcaattctgacgacaatatgttgaaaaacattgaac

SEQ ID NO: 180324 - DNA, 120 bp, Artificial Sequence
  ENSG00000110906_5 (sequence is synthesized)
tgtttgataagctgtctctgcgctttaacggaagggtcctgttcataaaggatgttattggggatgaaatctgctgctggtccttttatggtcagggccggaagattgctgaagtctgtt

SEQ ID NO: 180325 - DNA, 120 bp, Artificial Sequence
  ENSG00000110906_6 (sequence is synthesized)
gtacctccatcgtctatgccactgagaagaaacagaccaaggtggagtttcccgaagcccggatttatgaggagaccctgaacattttgctgtatgaggcccaggatggccggggacctg

SEQ ID NO: 180326 - DNA, 120 bp, Artificial Sequence
  ENSG00000110906_7 (sequence is synthesized)
acaatgcgctcctggaggccacaggcggggcggcggggcgctcccaccacctggacgaggacgaggagcgggagcggatcgagcgcgtgcggaggatccacatcaagcgccctgatgacc

SEQ ID NO: 180327 - DNA, 120 bp, Artificial Sequence
  ENSG00000110906_8 (sequence is synthesized)
gggcccacctccaccagtgagcaggcaagagaccgagccgccctcctctcaccgcccccactccctgccgtgctacacccagatcctgtgcaggctgccgggccccttctgcttcccttg

SEQ ID NO: 180328 - DNA, 120 bp, Artificial Sequence
  ENSG00000110906_9 (sequence is synthesized)
gagcctggagatacttttgtaacaagccagatgattattttggtattgcttgacaaggcaaattgattgtcttgacccaggcgtatgacccctgtcgttgaacaagctgtgtctaagatc

SEQ ID NO: 180329 - DNA, 120 bp, Artificial Sequence
  ENSG00000110906_10 (sequence is synthesized)
tctacttttcatgagaatctgagactctttggagccaggctttctcggttctcagaggaaaagtatgaatgagtgtgaagtgtatgtgagaacttttgtttgcaatatttatttttgtgg

SEQ ID NO: 180330 - DNA, 120 bp, Artificial Sequence
  ENSG00000110906_11 (sequence is synthesized)
gtgtcgacttcctatgtgggctttttgggtgacactcccttaagggttcagtttgacaattctgagagttgtcctgcagttggaggccaccagaggtatctgagctccctgcttcctatt

SEQ ID NO: 180331 - DNA, 120 bp, Artificial Sequence
  ENSG00000110906_12 (sequence is synthesized)
tcataatcctccagccccagcaggtccactcctggttcctgtgtgtttggcccgggcacaatccccactgctttgctagacgtgctttctgccatgtggctttgggcctagagcttgttg

SEQ ID NO: 180332 - DNA, 120 bp, Artificial Sequence
  ENSG00000110906_13 (sequence is synthesized)
ataattgcagcttgtggcagtggaaatatggctgaatgagcgtctaaatcgttgagaccagtgcaactttgggtgcaaggctttgtttagggatcaagccttttgccaccttgggctggt

SEQ ID NO: 180333 - DNA, 120 bp, Artificial Sequence
  ENSG00000110906_14 (sequence is synthesized)
ctttggcctggtgctcactgggaccccatatgtctgcgtaggagcagaactttccatggcagtaagtgtccagctctgtttctggttctttccccaactccagccccgtccagttgttct

SEQ ID NO: 180334 - DNA, 120 bp, Artificial Sequence
  ENSG00000110906_15 (sequence is synthesized)
cctgattgacccgactccactccaggaaggccatctgaccctgtgacaggcatagctcataaactacccctccctgggatcccgctcctcttcagcctccttccccatgaagctgggcta

SEQ ID NO: 180335 - DNA, 120 bp, Artificial Sequence
  ENSG00000110906_16 (sequence is synthesized)
cctcacaccaccagccccagggagcttccctgctataaacacagacccccttgtctttgcctctgatttttacacagtgtagagtggccagcagtgaacaggttgaggatgtgcgggtag

SEQ ID NO: 180336 - DNA, 120 bp, Artificial Sequence
  ENSG00000110906_17 (sequence is synthesized)
atagataactttgggtctggtttgtgtctgtgttcatgtttgtttaagggatatgtgtgactgtgggtggggacgtgtgcttgtggggcacaggtggcggcccctgctggagcccggctg

SEQ ID NO: 180337 - DNA, 120 bp, Artificial Sequence
  ENSG00000110906_18 (sequence is synthesized)
ggcgcagcgcctatgtaggacgggtgttctcagtgacctacctcccaggctcctctgcacctgcaaaggaacaggagtgagtcgtgactgacaggggtggttgagactagactaggtaga

SEQ ID NO: 180338 - DNA, 120 bp, Artificial Sequence
  ENSG00000110906_19 (sequence is synthesized)
gtagttaccaggagatgtgaatgtgcgtcaggtgatggatgggtttgtcaagggaatcgttaccgttttataccaaaggtattaacatgggcagcctttgacacatgtattccaaaaacg

SEQ ID NO: 180339 - DNA, 120 bp, Artificial Sequence
  ENSG00000110906_20 (sequence is synthesized)
agtttatattttcaaacggtttttacagcttagactttgtacttactgccctgcctgtgacagttgtatgccttcattttgtatccaacagcaaagtctacaataaaactttaaaacaat

SEQ ID NO: 180340 - DNA, 120 bp, Artificial Sequence
  ENSG00000110906_21 (sequence is synthesized)
catgactgaatgtcaaaatcgtgtattgggcagatgctttttaaactgtcgtgtgagaaacttttatattaggccatttggattttattaagtgctaaggaaagagggcttacaaaatgt

SEQ ID NO: 180341 - DNA, 120 bp, Artificial Sequence
  ENSG00000110906_22 (sequence is synthesized)
ttcgtaaatattttatactgtttaagtgttaaacaccaaccctgtctttcttttgggttgagcttttttagaaagtcgaagtgaatgttggccaggaaaatggaaaagccattgtataaa

SEQ ID NO: 180342 - DNA, 120 bp, Artificial Sequence
  ENSG00000110906_23 (sequence is synthesized)
aaagccattgtataaatttttttttgaggcggagtcttgctctattggccaggctggagtgtagtggcaccatctccacttaccacaacttgtgcctcctgggttcaagcgattctgctg

SEQ ID NO: 180343 - DNA, 120 bp, Artificial Sequence
  ENSG00000110906_24 (sequence is synthesized)
gattacaggtgtgagtcaccacacctggctgcatagtgttttaaatgtttgtgtgaagaatgagtttgtggaacaatttgatttgctgtggcctctatgcctaatgagctagtgtttctg

SEQ ID NO: 180344 - DNA, 120 bp, Artificial Sequence
  ENSG00000110906_25 (sequence is synthesized)
ctaatgagctagtgtttctggcagctctctctacccaactttgcacttgtagttttgagtctttgtctctctggaatatgaacaggtttataaaacattccatggtgaacaattctgtcg

SEQ ID NO: 180345 - DNA, 120 bp, Artificial Sequence
  ENSG00000110906_26 (sequence is synthesized)
gctgcattatagccatgagtgaatagacagcattggctggtccaagctctgttattgagtatacaaggaactgatttttcttatgttagcactaagggcaaaaaccaatatttataatgt

SEQ ID NO: 180346 - DNA, 120 bp, Artificial Sequence
  ENSG00000110906_27 (sequence is synthesized)
aagcactatccaggtaaaacactggcccaagatttggtaaagagatttcattgcaatgtaataactacagttttttacaaattggaacagctttggtgtgtcgtaatcaagggttttttt

SEQ ID NO: 180347 - DNA, 120 bp, Artificial Sequence
  ENSG00000110906_28 (sequence is synthesized)
tgtttgtttgtttcaaataagccatctgattgtggtgactggggcccatgtccaagacaattcctggcatattctgtcaccctcccgtggggcgatcactgtgtggggaccccattcccc

SEQ ID NO: 180348 - DNA, 120 bp, Artificial Sequence
  ENSG00000110906_29 (sequence is synthesized)
agttaaagtgtgtctctgtaccttacaacagcgattcaggacccaagtgtgaacaacactcagcccgccctctggagcgtgtgctgtctttagggccctacccaaagtcactgtaacagt

SEQ ID NO: 180349 - DNA, 120 bp, Artificial Sequence
  ENSG00000110906_30 (sequence is synthesized)
taagtgtgtcattaacctttctgtctctttgcgccataaaaaaatgctcaaagttttagatgtagccactgtatgttgtacaaacgttggcgacatgtaaaataaaagtcataaaatgct

SEQ ID NO: 180350 - DNA, 120 bp, Artificial Sequence
  ENSG00000110906_31 (sequence is synthesized)
gatgatgcttggctgtctgttgaaggaatgagagactctgaaagctgtttgtgcatggaaggtccttgttgtccactgggctgcattgtgggtgataaggcagactttttcagcgggacc

SEQ ID NO: 180351 - DNA, 120 bp, Artificial Sequence
  ENSG00000110906_32 (sequence is synthesized)
cccaactgtcagaatctgtaagccattttgggggaagcaggtggtgttcctgaagaggaatcctctactctcctcctgcctgacgggtctaggcctggccggctgcctttggggatctgg

SEQ ID NO: 180352 - DNA, 120 bp, Artificial Sequence
  ENSG00000110906_33 (sequence is synthesized)
aaggggaaggagctggggttgctcatcacttagtgtgatgttcacttgtccccccgttttcagaatcgcagctcagccctgtcctctaccgtgcaaaccactgcaggaagatggcccttt

SEQ ID NO: 180353 - DNA, 120 bp, Artificial Sequence
  ENSG00000110906_34 (sequence is synthesized)
cttctgcctgcatggggacggagatggatttggggatctttccagtgcttccgcccactggtttcagctttccccctctccttggttaacgctcacctgtgacctttctaccctcaaatt

SEQ ID NO: 180354 - DNA, 120 bp, Artificial Sequence
  ENSG00000110906_35 (sequence is synthesized)
tttgactttttttactggtctgctgacctcacttctcccattctttttccccttatgggtttatgcttttttttttaattcctctgcagtcatggtagtggggttttaggagcttttgat

SEQ ID NO: 180355 - DNA, 120 bp, Artificial Sequence
  ENSG00000110906_36 (sequence is synthesized)
taaaacacgtttctgctgccacgtcaagggtttatttttgagtggcttcctgggctgtggaaaatgtgtcatcattgttagtacttactcagcatcctggcctatcatggtcatagccaa

SEQ ID NO: 180356 - DNA, 120 bp, Artificial Sequence
  ENSG00000110906_37 (sequence is synthesized)
agagcagacttactgggaaattcaactccctgtcttcccccatctagttcactggtggtgagaatccttctctcttcccagccatgactgccccatctcccctcgccagagcctgtccag

SEQ ID NO: 180357 - DNA, 120 bp, Artificial Sequence
  ENSG00000110906_38 (sequence is synthesized)
ccggtcaactttaaaaatgcagtgctaggcaggcctcctaggctgaaagcatgttttgttccagcagaacaaagatacttatgagcctttctgcaaggtccctgtgatcacctcatccaa

SEQ ID NO: 180358 - DNA, 120 bp, Artificial Sequence
  ENSG00000110906_39 (sequence is synthesized)
agtactacctagtccaaggcctggtggaagagtgccaggcggccctacaagtaggcatcaccctttcttcccatatgggtggagaggcaccaagcctacctgccttcctcattttccctc

SEQ ID NO: 180359 - DNA, 120 bp, Artificial Sequence
  ENSG00000110906_40 (sequence is synthesized)
tctgcaaaatgggggcagtttctgtctgactgagatgttgtgagagttaatgagtttgccctggagcccgattccttcggttggagtgacccctgagaggcctccctggaacagcaggcc

SEQ ID NO: 180360 - DNA, 120 bp, Artificial Sequence
  ENSG00000110906_41 (sequence is synthesized)
acctaactactgtgtcactccttgcagccccatgctgttggatcttctcatgtgtacatctcaacccttcagcagagaaccccgcggtgtgaaacttggtcggtgttcgggaccaatctt

SEQ ID NO: 180361 - DNA, 120 bp, Artificial Sequence
  ENSG00000110906_42 (sequence is synthesized)
agtccgggtttggagactcctgcgtcctccgacttttcatgggccctgacatggcaggtgatatccaggccactgttgggtgccatggagttggggagagttggccagaagagttggata

SEQ ID NO: 180362 - DNA, 120 bp, Artificial Sequence
  ENSG00000110906_43 (sequence is synthesized)
accttgaattgaatattgtccatgactgtcgcgttgcttctgctgttgcaagctgcctccctttactcccagtcccatttacaaaaataacgtttgtgttttaccagttatagttgtagt

SEQ ID NO: 180363 - DNA, 120 bp, Artificial Sequence
  ENSG00000110906_44 (sequence is synthesized)
acccattcattatagaaaatctggaaaagctagacaattctttttcagtttcagggaatagttcaaacaagttatgtgctgtcagtgccctgcagccaaaaagcacgaggagcatacctg

SEQ ID NO: 180364 - DNA, 120 bp, Artificial Sequence
  ENSG00000110906_45 (sequence is synthesized)
tagtcaagcaaagttgggtttatttccttgttgcattggggtggggaagaactgtgggacatctcagagaagggctgtgggcttgtgttgggtgatttgagagacagttcagagaagtgg

SEQ ID NO: 180365 - DNA, 120 bp, Artificial Sequence
  ENSG00000110906_46 (sequence is synthesized)
ggctttgctctgtgttggatgctgctgggaagcagggctaattctgtgattgggtctcagtgattcctgacttgaaagcaggaagaatggaaggaggctaaacctctcattggtaaagca

SEQ ID NO: 180366 - DNA, 120 bp, Artificial Sequence
  ENSG00000110906_47 (sequence is synthesized)
gcagctataactcctattagccaggataggggatctttggtcatttttgtattttggataatgtttatgtttttgtctgtgtccggacatgatgactgaatggtcctgtttttgtcttgt

SEQ ID NO: 180367 - DNA, 120 bp, Artificial Sequence
  ENSG00000110906_48 (sequence is synthesized)
cgcaagggcacagagtggccttgtctgagggtgatgtgctgtgaaaaactgttgatgttcaatgggaatggtagggccagccgtgggggctaccccagattcagcaaagattctgcccac

SEQ ID NO: 180368 - DNA, 120 bp, Artificial Sequence
  ENSG00000110906_49 (sequence is synthesized)
ccttgcacatctccacctctacagttttacctgttcatttcagacatgtttgctctgagtacacatgtgccggataccaatctcactttccaggcctgcgtaaatcagccactgtatcca

SEQ ID NO: 180369 - DNA, 120 bp, Artificial Sequence
  ENSG00000110906_50 (sequence is synthesized)
tttctttgagatgtacagagagtcagccatgctatcagggagatggtagtgggatcttgctcttttgggcagcactagtctaggaggtctaattttgcaataacttggttccaaaagttt

SEQ ID NO: 180370 - DNA, 120 bp, Artificial Sequence
  ENSG00000110906_51 (sequence is synthesized)
ccatgtctgttgtttagtcctcagaaacaccttctccctacaggaagtgataggagtgccagctggaatcccattcaacttcataaagcttatttcatctgtgatgcagctgaaaaatga

SEQ ID NO: 180371 - DNA, 120 bp, Artificial Sequence
  ENSG00000110906_52 (sequence is synthesized)
cacttagctagctattgagtggtacatggcaataaggaaatgtaaagagacctgggcagtgctttaggctgttttagggtgcagccagggtgttcatgtatacaggtgctaggcagaaag

SEQ ID NO: 180372 - DNA, 120 bp, Artificial Sequence
  ENSG00000110906_53 (sequence is synthesized)
gaagtgcttataacacaagagttaggggcacccttgtgcctgcagggtcgacaggcagggtcagtgtatgaggctttttgggtgggttttgggacaaactaggggatgcatggccctctc

SEQ ID NO: 180373 - DNA, 120 bp, Artificial Sequence
  ENSG00000110906_54 (sequence is synthesized)
tgattttaggagaagccagaagtccagatttttctgtgagctctccttagttgtccacattggaagcaaacttttaaatgctgtgtatgcgtggcccaagcaaaacacatctggaggcca

SEQ ID NO: 180374 - DNA, 120 bp, Artificial Sequence
  ENSG00000110906_55 (sequence is synthesized)
cttgtggaatttcttttgctaccagaaatgatggaggttcttctgaataacttttgaaataaaaacatgtataattgcctgagtgaggcctgataatgggttcacagtgggaagctacag

SEQ ID NO: 180375 - DNA, 120 bp, Artificial Sequence
  ENSG00000110906_56 (sequence is synthesized)
gtcatcttttgtgcccctgctattgggtcatgtggtccccctctccagccagcaagctatgcttgtctgcctcttctgatgcagggcagggccccagccctatgggaagctagtagttca

SEQ ID NO: 180376 - DNA, 120 bp, Artificial Sequence
  ENSG00000110906_57 (sequence is synthesized)
attctcccagtacagttcatcacagttttggttaaattcagagtttacgtcatgacgtgtaaatacggctgacagttaagccacagagtgtacagtgattattttctttcttctataact

SEQ ID NO: 180377 - DNA, 120 bp, Artificial Sequence
  ENSG00000110906_58 (sequence is synthesized)
ttaagtttgccagagttagggattgcctcattgttttgttcacttggttttctaaatatatgttcctacttcagccccacgttctcagcggtctcatagtggtgtgttcagacacatcag

SEQ ID NO: 180378 - DNA, 120 bp, Artificial Sequence
  ENSG00000110906_59 (sequence is synthesized)
aggttctgtttcatctttgtcttggagacatgcccctgggtctcgtttctgttagtctaaggttagacctccaggactgacctcctaattctttcctcttagtgtctctggctttatcct

SEQ ID NO: 180379 - DNA, 120 bp, Artificial Sequence
  ENSG00000110906_60 (sequence is synthesized)
tttgttctactttctcagaagttttatttttcaccttttcaacccttctatcaaaattttcatttctgcttcgtctttctaacttcaggagccttttcttgctgtccgaatgccctgctt

SEQ ID NO: 180380 - DNA, 120 bp, Artificial Sequence
  ENSG00000110906_61 (sequence is synthesized)
tccacagcgtgctcatcttgtttcctaggaggccgtatctgctctcaactgtctgatgattctgtttgttttctttcttctcccttcattatctgactcctcctcttttcctgtctttgt

SEQ ID NO: 180381 - DNA, 120 bp, Artificial Sequence
  ENSG00000110906_62 (sequence is synthesized)
ttcttcttcttttaaaacaacccacagccagccgtgaagttgctctacaacagaagtaacaacaaatactcatataccaggtaaggcgtcagccgggaaagacagctccatttactagga

SEQ ID NO: 180382 - DNA, 120 bp, Artificial Sequence
  ENSG00000110906_63 (sequence is synthesized)
aaacctccactcacaccagccaggcccagctcttcttcgtaccttcagatgaggatgacccctctgtacctctctgcctggatagataagtagacagatggatacaggggtataactctg

SEQ ID NO: 180383 - DNA, 120 bp, Artificial Sequence
  ENSG00000110906_64 (sequence is synthesized)
agctataattcacacatatcataaaagtcatctttctagagtgtacagttattattatattcacaatatgtggtttttatatattcacaagttgtgaggccataacgactatctaatttt

SEQ ID NO: 180384 - DNA, 120 bp, Artificial Sequence
  ENSG00000110906_65 (sequence is synthesized)
agaactttttcactgcctgaaaagaaaccctctattcgttagcagtcactccccattttccctcaaccattgcttccccaaccccacagccctaggtaaccactaatctgttttctgtct

SEQ ID NO: 180385 - DNA, 120 bp, Artificial Sequence
  ENSG00000110906_66 (sequence is synthesized)
tgatgaatttgcctgttctggacatttttatgtgaatggaattgcataatatatggccttttgtgaccagattccttcattcagcataatgagattacctaagaggttttcaaggtttat

SEQ ID NO: 180386 - DNA, 120 bp, Artificial Sequence
  ENSG00000110906_67 (sequence is synthesized)
ccatgttgtagcatgaatcaatacttcattcctttttatggcagaataatattccacagtgtagaccacattttctttacccattcatcagttgatggacatttgggttgtttgcacttt

SEQ ID NO: 180387 - DNA, 120 bp, Artificial Sequence
  ENSG00000110906_68 (sequence is synthesized)
gaacagaattgctgggtcatgtggtaattctatgtttaatcattcgaggacctgccaaactgttttctaaagtggctgcaccattttacattcccaccagcaatatatgcaggtttctag

SEQ ID NO: 180388 - DNA, 120 bp, Artificial Sequence
  ENSG00000110906_69 (sequence is synthesized)
aatgccatttggcccttgaaaacatgtggctctaactcaggaacttgagggatgcagggaggatttaatcaggttactcaagatctttaaaaagacctaggatatagagtctcccttggg

SEQ ID NO: 180389 - DNA, 120 bp, Artificial Sequence
  ENSG00000110906_70 (sequence is synthesized)
cagtgccattctgctcctcttggggctcggtgaggtgctctcctccacctggtgcctgtgcccagaggctgtcactcaagcacaatggttaggagcactcaggcttaggggccagggctg

SEQ ID NO: 180390 - DNA, 120 bp, Artificial Sequence
  ENSG00000110906_71 (sequence is synthesized)
tcttttggggggcgtgtctgccatttattaggttcagccttgagcaattacctaatttctctgatcctcactttccttcttgagtgatggagattggagtgcctttgtcatgggattatt

SEQ ID NO: 180391 - DNA, 120 bp, Artificial Sequence
  ENSG00000110906_72 (sequence is synthesized)
gtgaggttgaaatgaggtagtggagaaagtgggctcagtagggccctgcgtgtagaagggcccagcaaatgatggcagtttttaccagcttgtggtcaccgtatcaaatgctcttttgca

SEQ ID NO: 180392 - DNA, 120 bp, Artificial Sequence
  ENSG00000110906_73 (sequence is synthesized)
ttagatattgcaggagtcccttctggagtggttatggcaacttctactccctgcagaagtctggatttttgccaacccttggcactgtccaaccttttaattattgcaaatctggctgga

SEQ ID NO: 180393 - DNA, 120 bp, Artificial Sequence
  ENSG00000110906_74 (sequence is synthesized)
gatgtgtaggaggcagcttgttggggactcccaccatcttgacttggtcgttgatttgctatgttactttgagaaagtcacttcctcacccagggcttagcttgcttatctctgccatgc

SEQ ID NO: 180394 - DNA, 120 bp, Artificial Sequence
  ENSG00000110906_75 (sequence is synthesized)
ttctgtgacttcagagtgaaactcaagcctgggggagagagaggtatcttccctggacccttgtcctcccaagatggggtcttgacaaagacttgccaacctgggtttcagtctcagctc

SEQ ID NO: 180395 - DNA, 120 bp, Artificial Sequence
  ENSG00000110906_76 (sequence is synthesized)
cccattagtatctggtgatcctaaccaagtggccgaagcttttggtctcattttcttcctctggtgaaatgggcatgacaataccctcccccgtggggccatcggcacatagtcagtatt

SEQ ID NO: 180396 - DNA, 120 bp, Artificial Sequence
  ENSG00000110911_0 (sequence is synthesized)
agcgtggcgctggctcccggaatatggagccctgggcgcgggggcggcgtgtcaggtggttgcggagctggtaagaatcatattctaagaactcagccactcaggtatccaccatggtgc

SEQ ID NO: 180397 - DNA, 120 bp, Artificial Sequence
  ENSG00000110911_1 (sequence is synthesized)
tgggtcctgaacagaagatgtcagatgacagtgtttctggagatcatggggagtctgccagtcttggtaacatcaaccctgcctatagtaatccctctctttcacagtcccctggggact

SEQ ID NO: 180398 - DNA, 120 bp, Artificial Sequence
  ENSG00000110911_2 (sequence is synthesized)
cagaggagtacttcgccacttactttaatgagaagatctccattcctgaggaggagtactcttgttttagctttcgtaaactctgggctttcaccggaccaggttttcttatgagcattg

SEQ ID NO: 180399 - DNA, 120 bp, Artificial Sequence
  ENSG00000110911_3 (sequence is synthesized)
cctacctggatccaggaaatattgaatccgatttgcagtctggagcagtggctggatttaagttgctctggatccttctgttggccacccttgtggggctgctgctccagcggcttgcag

SEQ ID NO: 180400 - DNA, 120 bp, Artificial Sequence
  ENSG00000110911_4 (sequence is synthesized)
ctagactgggagtggttactgggctgcatcttgctgaagtatgtcaccgtcagtatcccaaggtcccacgagtcatcctgtggctgatggtggagttggctatcatcggctcagacatgc

SEQ ID NO: 180401 - DNA, 120 bp, Artificial Sequence
  ENSG00000110911_5 (sequence is synthesized)
aagaagtcattggctcagccattgctatcaatcttctgtctgtaggaagaattcctctgtggggtggcgttctcatcaccattgcagatacttttgtatttctcttcttggacaaatatg

SEQ ID NO: 180402 - DNA, 120 bp, Artificial Sequence
  ENSG00000110911_6 (sequence is synthesized)
gcttgcggaagctagaagcattttttggctttctcatcactattatggccctcacatttggatatgagtatgttacagtgaaacccagccagagccaggtactcaagggcatgttcgtac

SEQ ID NO: 180403 - DNA, 120 bp, Artificial Sequence
  ENSG00000110911_7 (sequence is synthesized)
catcctgttcaggctgtcgcactccacagattgaacaggctgtgggcatcgtgggagctgtcatcatgccacacaacatgtacctgcattctgccttagtcaagtctagacaggtaaacc

SEQ ID NO: 180404 - DNA, 120 bp, Artificial Sequence
  ENSG00000110911_8 (sequence is synthesized)
ggaacaataagcaggaagttcgagaagccaataagtactttttcattgaatcctgcattgcactctttgtttccttcatcatcaatgtctttgttgtctcagtctttgctgaagcatttt

SEQ ID NO: 180405 - DNA, 120 bp, Artificial Sequence
  ENSG00000110911_9 (sequence is synthesized)
ttgggaaaaccaacgagcaggtggttgaagtctgtacaaataccagcagtcctcatgctggcctctttcctaaagataactcgacactggctgtggacatctacaaagggggtgttgtgc

SEQ ID NO: 180406 - DNA, 120 bp, Artificial Sequence
  ENSG00000110911_10 (sequence is synthesized)
tgggatgttactttgggcctgctgcactctacatttgggcagtggggatcctggctgcaggacagagctccaccatgacaggaacctattctggccagtttgtcatggagggattcctga

SEQ ID NO: 180407 - DNA, 120 bp, Artificial Sequence
  ENSG00000110911_11 (sequence is synthesized)
acctaaagtggtcacgctttgcccgagtggttctgactcgctctattgccatcatccccactctgcttgttgctgtcttccaagatgtagagcatctaacagggatgaatgactttctga

SEQ ID NO: 180408 - DNA, 120 bp, Artificial Sequence
  ENSG00000110911_12 (sequence is synthesized)
atgttctacagagcttacagcttccctttgctctcatacccatcctcacatttacgagcttgcggccagtaatgagtgactttgccaatggactaggctggcggattgcaggaggaatct

SEQ ID NO: 180409 - DNA, 120 bp, Artificial Sequence
  ENSG00000110911_13 (sequence is synthesized)
tggtccttatcatctgttccatcaatatgtactttgtagtggtttatgtccgggacctagggcatgtggcattatatgtggtggctgctgtggtcagcgtggcttatctgggctttgtgt

SEQ ID NO: 180410 - DNA, 120 bp, Artificial Sequence
  ENSG00000110911_14 (sequence is synthesized)
tctacttgggttggcaatgtttgattgcactgggcatgtccttcctggactgtgggcatacggtaagcatctctaaaggcctgctgacagaagaagccacccgtggctacgttaaataac

SEQ ID NO: 180411 - DNA, 120 bp, Artificial Sequence
  ENSG00000110911_15 (sequence is synthesized)
actggattagtctgtcttctgcaggtagccatcagagccagtgtgtttctatggtttactgtgtgaacatagccaaaagtatgtgccgttgcacagactgtgtttatgactcaaccgttg

SEQ ID NO: 180412 - DNA, 120 bp, Artificial Sequence
  ENSG00000110911_16 (sequence is synthesized)
gttggaaaagactttgtttcatgtgtatttgaaagatggaattattttttccttcctgacctaaccttagaactggattagggtgggatctttgaaaagctgacatttgctgctatcatt

SEQ ID NO: 180413 - DNA, 120 bp, Artificial Sequence
  ENSG00000110911_17 (sequence is synthesized)
ggagagacaaggatatgcatgattcttaaccaggctatatgttaaaaaaaaattggaaaatgcaatacattttttattatacaaactacagaatgagtatgcaagttttatttatcaaaa

SEQ ID NO: 180414 - DNA, 120 bp, Artificial Sequence
  ENSG00000110911_18 (sequence is synthesized)
tgtaatggatttttaaaggctgagaaattttccttatacctaccttttcagttattttaattataccaaattatcaactagaatagcttcatccatatgaaatataaaatgaagagacac

SEQ ID NO: 180415 - DNA, 120 bp, Artificial Sequence
  ENSG00000110911_19 (sequence is synthesized)
ctagctctatcaggcttaggattctttgaacttatttccactttaatttctcagtggaagttaagaggggtgagaaaacaaagaaggggaaaaactgacaactaacaaaaccagcaccac

SEQ ID NO: 180416 - DNA, 120 bp, Artificial Sequence
  ENSG00000110911_20 (sequence is synthesized)
atcgctaggtggtgcttactaattaccttctcaggattttcctcagattgaaaagcttatgaggatttcttgggagtcttaataacctgcctgttagtacagagctttcctgatgatatt

SEQ ID NO: 180417 - DNA, 120 bp, Artificial Sequence
  ENSG00000110911_21 (sequence is synthesized)
tactcttgagcacatgtggttgtaaaaccttaactttctttctccaggagggtggtgatagaaacagatggtagtatttatgaactgatgttctcgtgaaatgttgagggtggggagaaa

SEQ ID NO: 180418 - DNA, 120 bp, Artificial Sequence
  ENSG00000110911_22 (sequence is synthesized)
agactttaagggaggagagccatctattttgttcctaaagccacctctcagcagaatcgtcatgtttttctgatgcaccgctctgcttcatgcccaagatgacttgcgaggcaatctcag

SEQ ID NO: 180419 - DNA, 120 bp, Artificial Sequence
  ENSG00000110911_23 (sequence is synthesized)
gagctgtggacttaaccgttgcaaagcacactgtctttctcagcgttctctgcaagtcagtaggtgttagtatggttgcaaagttcactgtctcagcaaagttgaactgggctacctctc

SEQ ID NO: 180420 - DNA, 120 bp, Artificial Sequence
  ENSG00000110911_24 (sequence is synthesized)
tacagctgtttcctcagagggaaaaatcttgagaccagatggtggagctctggagtcagaggaaatgggtgtcttcagcacaaagctgctgcttttacttcagccacttctgacattttt

SEQ ID NO: 180421 - DNA, 120 bp, Artificial Sequence
  ENSG00000110911_25 (sequence is synthesized)
acataccgagcctgagattgtgtgattatctcaaatcaaatcactttgatggagataaataatcaaaactgttttatagtcattgatttggtgagaacagtaatggaaaatggtgttgaa

SEQ ID NO: 180422 - DNA, 120 bp, Artificial Sequence
  ENSG00000110911_26 (sequence is synthesized)
ggacttctcatttttggagctttccttccagagtcctggctgattggtgttcgctgttcatctgagcccccaaaagcattattactgatacttgcacacagtcaaaagcgcagactggat

SEQ ID NO: 180423 - DNA, 120 bp, Artificial Sequence
  ENSG00000110911_27 (sequence is synthesized)
ggatggtcttttataaggcatttaagggtacactactgtgtttcactgaccatacatttttcttagcccctcaagtaatatagcacagagttatgaatgacaattcccctaaccattcct

SEQ ID NO: 180424 - DNA, 120 bp, Artificial Sequence
  ENSG00000110911_28 (sequence is synthesized)
cttcatatctgcctcttccccttaccatcgtaattctccaaactggtcataaaggcactctgtgaagatattggggactgacatcttaagctctcacctggctgcagtaggaaaggccaa

SEQ ID NO: 180425 - DNA, 120 bp, Artificial Sequence
  ENSG00000110911_29 (sequence is synthesized)
actgacgacaaaaaaaaaattctttataaagatgatatggtaacatgtatctttgccctgggtctgggtgggtccagtcagtctcagatttacaagcatttaggagcctaggtaaaagct

SEQ ID NO: 180426 - DNA, 120 bp, Artificial Sequence
  ENSG00000110911_30 (sequence is synthesized)
gctagtattcttttaaaagttatatttatgacttgcaatgatagaaaactccttccaattaaatggcattttataatattatgtgtgtacttcacagtgttaaaaataccctcatacgtt

SEQ ID NO: 180427 - DNA, 120 bp, Artificial Sequence
  ENSG00000110911_31 (sequence is synthesized)
attgcatttgatcttcacagaaagtgcattttaaccagtactctgggtgcaataaataatatgtagaaatttaagtcctccaattccagcatatccagtgagttttgacagtgtgtttat

SEQ ID NO: 180428 - DNA, 120 bp, Artificial Sequence
  ENSG00000110911_32 (sequence is synthesized)
gtggaatgtttaaggatatacaattgtactttatataaattggttcttgttcttcttaaatgtgacatgaaataattgtgctgctacattatactggaaattaacaggggaaaagggaag

SEQ ID NO: 180429 - DNA, 120 bp, Artificial Sequence
  ENSG00000110911_33 (sequence is synthesized)
agctcttggctcccttgaggttctgctagtggtgttaggagtggttacaactgagcttttagtaaccatttaaccgtatgtaaacttggtttctaattaaaaaaaaatttctttttccaa

SEQ ID NO: 180430 - DNA, 120 bp, Artificial Sequence
  ENSG00000110911_34 (sequence is synthesized)
agagtccaggactgatggagtcgcgccattcagagaaagacccaaagatgggggcagggagggaacgccggaggtcgcgggggtctcgccccttccccgccgcggcctaggacacatggc

SEQ ID NO: 180431 - DNA, 120 bp, Artificial Sequence
  ENSG00000110911_35 (sequence is synthesized)
ccagctcccagctgcaccggatggcgcgcccggcctgtgtcggggtgcgctgacctgcttcgacgcctcgaaagaggccgacgggcacagggcaaggtctttcgtggcctcttcgtcggc

SEQ ID NO: 180432 - DNA, 120 bp, Artificial Sequence
  ENSG00000110911_36 (sequence is synthesized)
gccgcagggggccgggctgctctccggggcctcccgccgccccgcttcaacaaaagactcattataacctaaccgacttcagggagcgccttctgtgtgaatagcctgcatacgcggctc

SEQ ID NO: 180433 - DNA, 120 bp, Artificial Sequence
  ENSG00000110911_37 (sequence is synthesized)
ccctttcaaccactggcactcacaggcttgccacctactcttgctcctgccaaatggtcaaagatgaaatctgattaggctttggagggcgtggtttgcctcttgaaattccttgctcgt

SEQ ID NO: 180434 - DNA, 120 bp, Artificial Sequence
  ENSG00000110911_38 (sequence is synthesized)
ctttagaaagctgtgttgcttagagcacccaaaagtgccctttatctaactgagggaggcgcacttgtcttcatatatagaggcaggagctggcattgggaaagtcaaactagttctgca

SEQ ID NO: 180435 - DNA, 120 bp, Artificial Sequence
  ENSG00000110911_39 (sequence is synthesized)
tgtttgattgcactgggcatgtccttcctggactgtgggcatacgtgccatctgggattgacagctcagcctgaactctatcttctgaacaccatggacgctgactcacttgtgtctaga

SEQ ID NO: 180436 - DNA, 120 bp, Artificial Sequence
  ENSG00000110911_40 (sequence is synthesized)
tgactgacagcctgagagactctataagaacatgtttttctaagccctttttgtgccaggtgtcccgttaacgtctctgttagttcagaggtgagttttgttcagacgttttgaacaaaa

SEQ ID NO: 180437 - DNA, 120 bp, Artificial Sequence
  ENSG00000110911_41 (sequence is synthesized)
ggcaaagatttcctcatgggaagggtgttcaaaactgacagctataaatgtaggtcagagacccacccacctcataacagtcatacactcccagagttaaacgattggcctctgatggcc

SEQ ID NO: 180438 - DNA, 120 bp, Artificial Sequence
  ENSG00000110911_42 (sequence is synthesized)
acacacccctatgggcttgtgtcttggactctgggatttaaaagatatatatgtatatatatttatgtaaacctgagcatctcagtttgggtagagttttaaggttatatgaaactgata

SEQ ID NO: 180439 - DNA, 120 bp, Artificial Sequence
  ENSG00000110911_43 (sequence is synthesized)
gaacttttgtattttttttttaaatattgttttgatatatcagatatttgttttgtctggatcacaagtgagaaagaaaagagaacaatgctctttttcacaatgaactggtcaaattga

SEQ ID NO: 180440 - DNA, 120 bp, Artificial Sequence
  ENSG00000110911_44 (sequence is synthesized)
ctatcttgtaaagtgatactttactatgtcagtgaaatttcagtttgattttagtcaaccagattatatcctttgtatctactgatattaacacatcatattaacacatcatttcttaaa

SEQ ID NO: 180441 - DNA, 120 bp, Artificial Sequence
  ENSG00000110911_45 (sequence is synthesized)
aaaacatttcttctgtttggcaatcataattaactctggttatcagcctattttgtaattattgtctttgtcgtcacttttcttgaattgttttctagtcattaaacagatatgaaggca

SEQ ID NO: 180442 - DNA, 120 bp, Artificial Sequence
  ENSG00000110911_46 (sequence is synthesized)
aacaagatccagaaaccacactttaaccagtgatcagttttccgtgctgcattgtaactcagctcattctggcattcaagttttaggcaaaaaaagaggaaacttctaacatttagcttg

SEQ ID NO: 180443 - DNA, 120 bp, Artificial Sequence
  ENSG00000110911_47 (sequence is synthesized)
taagtcctgacataagatagtgaagatatttatcttctttctaatatttgtatagtccgccaatgtattttcttcccactattcccattaacataccaaacactgtttctaggtccaaag

SEQ ID NO: 180444 - DNA, 120 bp, Artificial Sequence
  ENSG00000110911_48 (sequence is synthesized)
tctatttctaggagtggccaatatttgtattgttgaatctcctagggaatgctaaatgtttcactttaaaatacctatttataccaagtagcatgagattagtactagagtgagatttgg

SEQ ID NO: 180445 - DNA, 120 bp, Artificial Sequence
  ENSG00000110911_49 (sequence is synthesized)
aatattagtccacatatcacaaactgcttgcctacatgtatagattttttttttcacccaccttcctaaccaggaatttgtttccttaaatttgttgttgttgttgttgttgtttgttgt

SEQ ID NO: 180446 - DNA, 120 bp, Artificial Sequence
  ENSG00000110911_50 (sequence is synthesized)
tatttttttgagaagagtcttgccctgtcgccaaggtgggaatgcattgacgtgatctcagttcactgtaacctctacctccccggtttaatcgattctcctccttcagcctcctgaata

SEQ ID NO: 180447 - DNA, 80 bp, Artificial Sequence
  ENSG00000110911_51 (sequence is synthesized)
tgtgatctcagctcactgcaacttctgccacctgggcttaagccatcctcccacttcagcatcccaaatagctgggactg

SEQ ID NO: 180448 - DNA, 87 bp, Artificial Sequence
  ENSG00000110911_52 (sequence is synthesized)
tccagctcactcctcatttctttctagccccaaaggtgttgagtcagcaaatcctgcagcctttgtgtgactttgagcatcactttc

SEQ ID NO: 180449 - DNA, 120 bp, Artificial Sequence
  ENSG00000110911_53 (sequence is synthesized)
caaatcctgcagcctttgtgtgactttgagcatcactttcccctttcagcattaaatatatgacctctctgccttattttagaacttactacatttcaataaaactttttaaaaaatcca

SEQ ID NO: 180450 - DNA, 120 bp, Artificial Sequence
  ENSG00000110911_54 (sequence is synthesized)
gtgatccacctgcctcggcctctcaaagtacagggattacaggcgtgagctcctgtgcctggcctgcctgtgtagttttgatcaccatttgtttcccgtctatggaacctctgactcctc

SEQ ID NO: 180451 - DNA, 120 bp, Artificial Sequence
  ENSG00000110911_55 (sequence is synthesized)
tgtctgctttgactgaggattctattctgggtgttctctcatgtctgaagccttcttcagagcctctcctcttgtcatcatttaaagtaccccagcgtttgtacattattaccatgcaca

SEQ ID NO: 180452 - DNA, 120 bp, Artificial Sequence
  ENSG00000110911_56 (sequence is synthesized)
ctgtaactcagtaaagatttttgatgacctgtgggtgtagaaggattatagaggaagatcctagataacattgctgctagtctctgcccacatcacagcatatgtccagtgttttccctc

SEQ ID NO: 180453 - DNA, 120 bp, Artificial Sequence
  ENSG00000110911_57 (sequence is synthesized)
cagcctacctcttatagatgattgtgtatgatatgtaggagagctcttatttggtccttgcttctgaaacaaaagttgctgttgaattgctttgggttctaggttgaagtctgtacaaat

SEQ ID NO: 180454 - DNA, 120 bp, Artificial Sequence
  ENSG00000110911_58 (sequence is synthesized)
tactcctcttcgttcccaaaggggatgctgatatggggaaagggtatcttcatgcagtaggccagtcagacgtgagacacagagggaagcgatatgctttgagagaggctggcggattgc

SEQ ID NO: 180455 - DNA, 120 bp, Artificial Sequence
  ENSG00000110911_59 (sequence is synthesized)
cctcccgagtagctgggattacagaataagaggctgatggaacctgcaggtaagggaagagctttgacttggacagagaagtggccagcttcttaataaaaatactcttgttttagcttt

SEQ ID NO: 180456 - DNA, 120 bp, Artificial Sequence
  ENSG00000110911_60 (sequence is synthesized)
ccaaggcctagttttctgccattgtccctcctccctcaagtcctagcttctccaagtgttctttatctggagagctgttgggaagagagtgtttttcaatgtttcctttctttccgtctc

SEQ ID NO: 180457 - DNA, 120 bp, Artificial Sequence
  ENSG00000110911_61 (sequence is synthesized)
tctgacttccatatctcatctctgacctagaattcctctgtggggtggcgttctcatcaccattgcagatacttttgtatttctcttcttggacaaatatggtaaggagagcgggaatgg

SEQ ID NO: 180458 - DNA, 120 bp, Artificial Sequence
  ENSG00000110911_62 (sequence is synthesized)
gagcttagaattttatttttgtttgctctcctcagtgtcccaagtagttggactataggcacacaccacacagcaccacacctggcttgtttcctttttaaaatggtggctcttgtcctt

SEQ ID NO: 180459 - DNA, 120 bp, Artificial Sequence
  ENSG00000110911_63 (sequence is synthesized)
ggcagcacttcttgttaaggaatggggaagcttcttatgaatctaatcttactctaatgttaggaaatcagcagtggtcccttggattactctacaaagctagtaggcagctttggttca

SEQ ID NO: 180460 - DNA, 120 bp, Artificial Sequence
  ENSG00000110911_64 (sequence is synthesized)
aggcagctttggttcagttatgactcagtgaaggttagagaattatatctacaaagtaggatctttttctttctttctttcgttttttgatacggagtttcgctcttgttgcccaggctg

SEQ ID NO: 180461 - DNA, 120 bp, Artificial Sequence
  ENSG00000110911_65 (sequence is synthesized)
aagtgctggggtggtgtgagccaccgcgccctgccagatctttcttgtttgactttcattgctaagaatttggaatcatattctaagaactcagccactcaggtatccaccatggtgctg

SEQ ID NO: 180462 - DNA, 120 bp, Artificial Sequence
  ENSG00000110911_66 (sequence is synthesized)
agtaattgtgggtagattggttttaaggctgtttgtgtagctctcagggaccctctggattccaggctccaatgagcagggtttttctacagggggatattgcacatataatcatattct

SEQ ID NO: 180463 - DNA, 120 bp, Artificial Sequence
  ENSG00000110911_67 (sequence is synthesized)
actttactgcaagccttagtcagagtacaaagggttcctgcttggtggttttgctgcagcttcagagtttagcctgaactgtggcaggattttgtaacttgcacattttttgagaagtct

SEQ ID NO: 180464 - DNA, 120 bp, Artificial Sequence
  ENSG00000110911_68 (sequence is synthesized)
tctgacattgtaaatccttttttcttgtgaggctggattttgttgcttcatatgtgataacagaccaattatatcagtagttcaatggtgatgttcagtttaatctcttttcctctcttg

SEQ ID NO: 180465 - DNA, 120 bp, Artificial Sequence
  ENSG00000110911_69 (sequence is synthesized)
tacagtactcttgttttagctttcgtaaactctgggctttcaccggaccaggttttcttatgagcattgcctacctggatccaggaaatattgaatccgatttgcagtctggagcagtgg

SEQ ID NO: 180466 - DNA, 120 bp, Artificial Sequence
  ENSG00000110911_70 (sequence is synthesized)
gtatgtcaccgtcagtatcccaaggttctgccacgtggtagcacacttttccttctccaggtgagagccacagtgcagtgatcggccaagtggaggtcccacgagtcatcctgtggctga

SEQ ID NO: 180467 - DNA, 120 bp, Artificial Sequence
  ENSG00000110911_71 (sequence is synthesized)
atgagaagatctccattcctgaggaggaggttagtatcaggtccttggaggagaacactattgtctggggaaaacctgtgagtgaaagatctgctggatggctcaagttcagcagcctca

SEQ ID NO: 180468 - DNA, 84 bp, Artificial Sequence
  ENSG00000110911_72 (sequence is synthesized)
agtgaaagatctgctggatggctcaagttcagcagcctcaggtttaattttggctggcaatctctgaagactatatctatatat

SEQ ID NO: 180469 - DNA, 70 bp, Artificial Sequence
  ENSG00000110911_73 (sequence is synthesized)
atcttttttacagacagggtcttgctctgtcatctaggctccagtgcagtggcacaaccatagcccactg

SEQ ID NO: 180470 - DNA, 120 bp, Artificial Sequence
  ENSG00000110911_74 (sequence is synthesized)
gcagagaaacgaaggagcatccagtaaagtttagactgaaagcttctggaatgaggtccagacttgagcctagcttctggcacagtgcgcagcacagcacttggtgttggtggtgcatag

SEQ ID NO: 180471 - DNA, 120 bp, Artificial Sequence
  ENSG00000110911_75 (sequence is synthesized)
agtgtgttggattttccccgcctccctgggtggttttatttctcagttgtttcattaccagagagtgttggggaaacgaaggtaaaaaataaaaacatcctgttgtgaaactcatagaaa

SEQ ID NO: 180472 - DNA, 120 bp, Artificial Sequence
  ENSG00000110911_76 (sequence is synthesized)
gttagccagcgtggcgctggctcccggaatatggagccctgggcgcgggggcggcgtgtcaggtggttgcggagctgtactcttgttttagctttcgtaaactctgggctttcaccggac

SEQ ID NO: 180473 - DNA, 120 bp, Artificial Sequence
  ENSG00000110911_77 (sequence is synthesized)
agcgtggcgctggctcccggaatatggagccctgggcgcgggggcggcgtgtcaggtggttgcggagctggtaaggtgaggggaaggcaagaatcatattctaagaactcagccactcag

SEQ ID NO: 180474 - DNA, 120 bp, Artificial Sequence
  ENSG00000110917_0 (sequence is synthesized)
gtggctgagaagaaggaggcctgagagcgacatgtccccggcggctcaggcggagcggcccgtggcgctgtttttctgagtccggggtggcctggcagccggccgaggacgagggtcggc

SEQ ID NO: 180475 - DNA, 120 bp, Artificial Sequence
  ENSG00000110917_1 (sequence is synthesized)
gggggctgcccccgtggtggtggccgccatgctgggagcctgggcggttgagggaaccgctgtggcgctcctgcgactgctgctgctgctgctgccgccggcgatccggggacccgggct

SEQ ID NO: 180476 - DNA, 120 bp, Artificial Sequence
  ENSG00000110917_2 (sequence is synthesized)
cggcgtggccggcgtggccggcgcggcgggggccgggctgcccgagagcgtcatttgggcggtcaacgcgggtggagaggcgcatgtggacgtgcacgggatccacttccgcaaggaccc

SEQ ID NO: 180477 - DNA, 120 bp, Artificial Sequence
  ENSG00000110917_3 (sequence is synthesized)
tttggaaggccgggtgggccgagcctcagactatggcatgaaactgccaatcctgcgttccaaccctgaggaccagatcctgtatcaaactgagcggtacaatgaggagacctttggcta

SEQ ID NO: 180478 - DNA, 120 bp, Artificial Sequence
  ENSG00000110917_4 (sequence is synthesized)
cgaagtgcccatcaaagaggagggggactacgtgctggtcttgaaatttgcagaggtctactttgcacagtcccagcaaaaggtatttgatgtacgattgaatggccacgtcgtggtgaa

SEQ ID NO: 180479 - DNA, 120 bp, Artificial Sequence
  ENSG00000110917_5 (sequence is synthesized)
ggacttggatatctttgatcgtgttgggcatagcacagctcacgatgaaattatacctatgagcatcagaaaggggaagctgagtgtccagggggaggtgtccaccttcacagggaaact

SEQ ID NO: 180480 - DNA, 120 bp, Artificial Sequence
  ENSG00000110917_6 (sequence is synthesized)
ctacattgagtttgtcaaggggtactatgacaatcccaaggtctgtgcactctacatcatggctgggacagtggatgatgtaccaaagcttcagcctcatccgggattggagaagaaaga

SEQ ID NO: 180481 - DNA, 120 bp, Artificial Sequence
  ENSG00000110917_7 (sequence is synthesized)
agaggaagaagaagaagaagaatatgatgaagggtctaatctcaaaaaacagaccaataagaaccgggtgcagtcaggcccccgcacacccaacccctatgcctcggacaacagcagcct

SEQ ID NO: 180482 - DNA, 120 bp, Artificial Sequence
  ENSG00000110917_8 (sequence is synthesized)
catgtttcccatcctggtggccttcggagtcttcattccaaccctcttctgcctctgccggttgtgagaacaaatgactatcctgaacagggtggaggggtgtgggaaagaaaccagcca

SEQ ID NO: 180483 - DNA, 120 bp, Artificial Sequence
  ENSG00000110917_9 (sequence is synthesized)
tattggttttggtttctgtatttttcacaatgattaatgaacaaaaacaaagagaaaaaaacacacatcaattaaaggagacaaaaagaggcagagcgagtagagagcagccctcattca

SEQ ID NO: 180484 - DNA, 120 bp, Artificial Sequence
  ENSG00000110917_10 (sequence is synthesized)
ccacctggtcccagacgtgcttcagtcctcgtcctctctttgtggctggctcccagccttctctttcctcttgaggatacttagggtaaactggatccttcctgctcaaggatcctcatt

SEQ ID NO: 180485 - DNA, 120 bp, Artificial Sequence
  ENSG00000110917_11 (sequence is synthesized)
tgtatacctagtggaaaggactctgaactcagaggagtcactgttcctttttttaggttagaaattaacagcagggaaatgccatcttattacctgagacgaccagcactgggagttagg

SEQ ID NO: 180486 - DNA, 120 bp, Artificial Sequence
  ENSG00000110917_12 (sequence is synthesized)
tacggtctgaagttatgtctagataagacttcagacgtcctgggattgaaagaatgtgtgtgaaggggtagaatttgtgcggtaaagacttaaaaaaaaaagtagggagattaaaaaaaa

SEQ ID NO: 180487 - DNA, 120 bp, Artificial Sequence
  ENSG00000110917_13 (sequence is synthesized)
agaaagaaaatgcttccttatctggaagcctttctggattaatccagtgatggtcccacctttagtgtttgagctttgtcattgcttgtctccctggcatgtgccagttatagactgtcc

SEQ ID NO: 180488 - DNA, 120 bp, Artificial Sequence
  ENSG00000110917_14 (sequence is synthesized)
agcatccaagacgtttcggttatgtcgggtcctcagatcgcctctgacttgttaccacaacaaatcattttgatttcagtgcctgttggggacttgatttcttctcagttttgtttgttt

SEQ ID NO: 180489 - DNA, 120 bp, Artificial Sequence
  ENSG00000110917_15 (sequence is synthesized)
gtttgtttccttaatctggctcatttgaaatttcttctccctctcaaccatcccactaagttatagccaagaagggaaggagacacggggatttggggttctctgcttgaatgtcttctc

SEQ ID NO: 180490 - DNA, 120 bp, Artificial Sequence
  ENSG00000110917_16 (sequence is synthesized)
ctttaccacctcaccttgttggtacctccctccctggatctctgagccagcagccaggaggacctgacccagcagttctttactggcccctttgtagggccttgctgccagggggcaggg

SEQ ID NO: 180491 - DNA, 120 bp, Artificial Sequence
  ENSG00000110917_17 (sequence is synthesized)
atgctttccagcctgcagcaacagaacacttgaccttaaaagtctcttctggtctttggattagaaaaggcttatgttagcatagcttaagagcaacctcagagatttgagccctactaa

SEQ ID NO: 180492 - DNA, 120 bp, Artificial Sequence
  ENSG00000110917_18 (sequence is synthesized)
gtgactgaccactgtttagagtgtctggtatctgatgttcatttattcccatgttcttgtgtgtcacagttcagccagttttggtttatgcctagagctacttcaaggaactagactaat

SEQ ID NO: 180493 - DNA, 120 bp, Artificial Sequence
  ENSG00000110917_19 (sequence is synthesized)
tagctatataggcccagcgatgcttcttattgatcttaatagtatgcccctccttcccctgtcctttcatttctctatccaagtagcagtcaggttcttggtgtgatgggactgaaagaa

SEQ ID NO: 180494 - DNA, 120 bp, Artificial Sequence
  ENSG00000110917_20 (sequence is synthesized)
ttccagtcagccagagccttggcagctctgaagctaaccttagcatctaagtgtcgatcttgaattccctgaaaaaatttctataggaaatgaagcttccctggtcccctcctttctggc

SEQ ID NO: 180495 - DNA, 120 bp, Artificial Sequence
  ENSG00000110917_21 (sequence is synthesized)
cattgtcatccatttcccagttagggcaacaatgaaggaggacccagccaagctagaaggaattttgtggatgggagacagcaggattagcttcagcttgggctggagcagtcaatatag

SEQ ID NO: 180496 - DNA, 120 bp, Artificial Sequence
  ENSG00000110917_22 (sequence is synthesized)
gatctcaggccaggcccgcttttctagaatgtgtttaattttgagtttgctttattagatatgttttttaagagctctgtatatttgaactgctccttatgtgacaaaataggtagctct

SEQ ID NO: 180497 - DNA, 120 bp, Artificial Sequence
  ENSG00000110917_23 (sequence is synthesized)
tgggctcatgtcctgggttttggctctttaatgattactccaggccagcatttagtcgtttgagaattgtagcctgttgttttcgctgtgacttgggtctcagtgctagggtattgagtc

SEQ ID NO: 180498 - DNA, 120 bp, Artificial Sequence
  ENSG00000110917_24 (sequence is synthesized)
aggcagctggagggttgtggcccgaggctgcagtcagaggtatacttcccatagtgcttcacacagctcccctgcttctaaaggataaggtactgtagccttggtcctggggaccacctg

SEQ ID NO: 180499 - DNA, 120 bp, Artificial Sequence
  ENSG00000110917_25 (sequence is synthesized)
cctggggcagtggacatcctaactaaacaggcttctggcagtagctttggttcctatcccatcgaaattccccaaagccctgggccactgccattgggttagtcaagatgaaggaggagg

SEQ ID NO: 180500 - DNA, 120 bp, Artificial Sequence
  ENSG00000110917_26 (sequence is synthesized)
gagtctcagaaggaaaccctgactcctggggccatttcctaatggtactgtaagccaagcagctttgcttctgcctctgtttccaagcccacccttttcccctgagctcagggttaggga

SEQ ID NO: 180501 - DNA, 120 bp, Artificial Sequence
  ENSG00000110917_27 (sequence is synthesized)
tgggcgctttcctctctggttgtgaacgaaaggaaggaacatctttctatggctaacaaaaactaaaggggaagtgaggaaacaggaagaagtatggtgggggctggggtagactcccct

SEQ ID NO: 180502 - DNA, 120 bp, Artificial Sequence
  ENSG00000110917_28 (sequence is synthesized)
ggagccaagcctatccagctaacaagagctccctggggctggtcacagctggctcatgatgctgaacttgaaagtttttttgtttttgtttttgttttgtggctcctccaagatataggt

SEQ ID NO: 180503 - DNA, 120 bp, Artificial Sequence
  ENSG00000110917_29 (sequence is synthesized)
acatgaagtttaggttaaaggggtgggattctttatttttatttttgtattgtatgtgtcaagaattactctgttgttcaccttttgctttttgcactgtttgttctcttatctgtattt

SEQ ID NO: 180504 - DNA, 120 bp, Artificial Sequence
  ENSG00000110917_30 (sequence is synthesized)
tgagcttagtgctaggactgagaggctgcaccatagggaatgtatgggagatggtgaggggtgccagtgaggggtgcgtggaggagaggcctgggctcctctactggatctacactctgt

SEQ ID NO: 180505 - DNA, 120 bp, Artificial Sequence
  ENSG00000110917_31 (sequence is synthesized)
cccaggtttttagatcccactgagcccagctgactgaaaacaaggacagtcagggtgaaacttcttttgccagaagtgtggcctgagttgaatttctgggaggatgacgcagatgtctgc

SEQ ID NO: 180506 - DNA, 120 bp, Artificial Sequence
  ENSG00000110917_32 (sequence is synthesized)
tgcagagctgggctgagagttctgcagtctagctctgacttaggtcaggggcctgttggtctctcattggacgtttttgggtctcactcatgcttactgaaacattgtgccaagaaactc

SEQ ID NO: 180507 - DNA, 120 bp, Artificial Sequence
  ENSG00000110917_33 (sequence is synthesized)
tgtgggatttgtgtcccttaaaccagactcacttttctgaaaaatctccattgttgaggagaggctgctcaatcgacaccccgagttctcatgactgggaagatagttttcttcaggtgt

SEQ ID NO: 180508 - DNA, 120 bp, Artificial Sequence
  ENSG00000110917_34 (sequence is synthesized)
caatggcgttagactcccaggaagactagccctgcccacagggccacctgttggtttgagagcgtgttcgtgttctcttgccctccctgcctaagagctactgggatcacgttagcgggc

SEQ ID NO: 180509 - DNA, 120 bp, Artificial Sequence
  ENSG00000110917_35 (sequence is synthesized)
atttaggctttgatgagagggcacagtttgagttaggtttacctccccctttctgtgcctgggaactgtttggtccagctttagaactgtggttttgacttccttatctcttgggagaag

SEQ ID NO: 180510 - DNA, 120 bp, Artificial Sequence
  ENSG00000110917_36 (sequence is synthesized)
cttctgttttaaggaatttctcttccttcttctcctgcctctagcctctcctggaaaggcctggatatggtttctaaaatctcagctgagaacttcagaaaacagcagcagtattttcct

SEQ ID NO: 180511 - DNA, 120 bp, Artificial Sequence
  ENSG00000110917_37 (sequence is synthesized)
tttcctagtgctaaaatccctttccctagaaattggctcaccttgggaaacccagggaaagaatcagcaggttctctgccctccctaggggttggggaaggacccaccccggtcagcaca

SEQ ID NO: 180512 - DNA, 120 bp, Artificial Sequence
  ENSG00000110917_38 (sequence is synthesized)
gtgccttttcctctcctgctctgagccagggtggggcattccctctagattcaggtttgggcaggggtcctatagtccctgccatggggctgcttccctgtcccttccctcccctttgct

SEQ ID NO: 180513 - DNA, 120 bp, Artificial Sequence
  ENSG00000110917_39 (sequence is synthesized)
ggcctactctggcataattcaagtgtcttcttgccttggggatccttagtggcatcaaatggcaacatggaatattgtcctccatgcccctccagaaggacctaggagagtaggtgagct

SEQ ID NO: 180514 - DNA, 120 bp, Artificial Sequence
  ENSG00000110917_40 (sequence is synthesized)
ttccaaagtgagagacgaatctttctttctttttttttttaaagggcaggatgggtatgctttgggctttctccttctgtggccccggaggaaggagagactgaggcaaggcaaagtgat

SEQ ID NO: 180515 - DNA, 120 bp, Artificial Sequence
  ENSG00000110917_41 (sequence is synthesized)
agtacacggaagcagaaccggaaacacccaggaactgttcagaaatctcagaagaaatctgcttctcttcgatggaaagatataattaacgatcaaagagctctaagaaaattgcaaaga

SEQ ID NO: 180516 - DNA, 120 bp, Artificial Sequence
  ENSG00000110917_42 (sequence is synthesized)
agccttaatgttcaagctttagaaagatcagagcaatttttctctttcagtccaaactaagactctctgtatttaaatctctctggggcaagagggctagatttcctcattttgttatga

SEQ ID NO: 180517 - DNA, 120 bp, Artificial Sequence
  ENSG00000110917_43 (sequence is synthesized)
gactagattggtaccagtagatcagctgcctagcgagggcaggtttcttctttgcatctgtgtggcttgcttccagtctggcctgtcctttccagctgccttttgtctagcctgctatgg

SEQ ID NO: 180518 - DNA, 120 bp, Artificial Sequence
  ENSG00000110917_44 (sequence is synthesized)
ggggccagattatcttgataagagcaggtgatttggggactagctgggttggcaggaaaagagcaggatggatctcttgggacaggttcccccaggagtataaacacaaggagccaggat

SEQ ID NO: 180519 - DNA, 120 bp, Artificial Sequence
  ENSG00000110917_45 (sequence is synthesized)
tgtgctggcagccaaggaaacagtagtgcctgtttgagttggcagagagggccttggcacctcttgcatccaggcagtcttgtgagatgggggcacatagcactggggaaagcagaactc

SEQ ID NO: 180520 - DNA, 120 bp, Artificial Sequence
  ENSG00000110917_46 (sequence is synthesized)
cattctcacctctattttgagcttcagtgctttatttcagtatgaggaaaaacaacaacaaactgaagtgcgctttccgtcctttcaaaggacaactgtcgggaagggagagccgagttg

SEQ ID NO: 180521 - DNA, 120 bp, Artificial Sequence
  ENSG00000110917_47 (sequence is synthesized)
cgaggtaggaggggagcactggcagggagagacattcttgactcctctcttccctggtgtgttgtgatccagggaatgaaaagaaatttgaccctggattggttctctccttggacttaa

SEQ ID NO: 180522 - DNA, 120 bp, Artificial Sequence
  ENSG00000110917_48 (sequence is synthesized)
ggaatcttaccttttccttccacaaagttctcccaggcaaggaccagctgcccattctgagcccagggcagcctcttcaaccattattggtctaacctggcttgtcaggaaaccaagccc

SEQ ID NO: 180523 - DNA, 120 bp, Artificial Sequence
  ENSG00000110917_49 (sequence is synthesized)
acccttccacattgggcctggctgctctattctgtaccaagtactggagaaaaagcatcaagttcttagcccttgtagcttctaccctagtttcccatcctctctctgtggaggccaaac

SEQ ID NO: 180524 - DNA, 120 bp, Artificial Sequence
  ENSG00000110917_50 (sequence is synthesized)
caactctttgccagcagccacaacatgcattgacagcggcacagtgagatataactgatgggctttgaacctggttggccggggaagctgtaggggtggatagagctggctttccttctg

SEQ ID NO: 180525 - DNA, 120 bp, Artificial Sequence
  ENSG00000110917_51 (sequence is synthesized)
ggctgtctccatctgaccctaccccttccatgtcccaccccactcccaccaaaaagtacaaaatcaggatgtttttcactgtccattgctttgtgttttaataaacaatttgcagtgaca

SEQ ID NO: 180526 - DNA, 120 bp, Artificial Sequence
  ENSG00000110921_0 (sequence is synthesized)
gctctgggttgtgggagttggggagctgctccggcttcggcgcggaggggcggcggccggggaggcggcggcggcggcaggattcccaggagccatgttgtcagaagtcctactggtgtc

SEQ ID NO: 180527 - DNA, 120 bp, Artificial Sequence
  ENSG00000110921_1 (sequence is synthesized)
tgctccggggaaagtcatccttcatggagaacatgccgtggtacatggcaaggtagcactggctgtatccttgaacttgagaacattcctccggcttcaaccccacagcaatgggaaagt

SEQ ID NO: 180528 - DNA, 120 bp, Artificial Sequence
  ENSG00000110921_2 (sequence is synthesized)
ggacctcagcttacccaacattggtatcaagcgggcctgggatgtggccaggcttcagtcactggacacaagctttctggagcaaggtgatgtcacaacacccacctcagagcaagtgga

SEQ ID NO: 180529 - DNA, 120 bp, Artificial Sequence
  ENSG00000110921_3 (sequence is synthesized)
gaagctaaaggaggttgcaggcttgcctgacgactgtgctgtcaccgagcgcctggctgtgctggcctttctttacttatacctgtccatctgccggaagcagagggccctgccgagcct

SEQ ID NO: 180530 - DNA, 120 bp, Artificial Sequence
  ENSG00000110921_4 (sequence is synthesized)
ggatatcgtagtgtggtcggagctgccccccggggcgggcttgggctccagcgccgcctactcggtgtgtctggcagcagccctcctgactgtgtgcgaggagatcccaaacccgctgaa

SEQ ID NO: 180531 - DNA, 120 bp, Artificial Sequence
  ENSG00000110921_5 (sequence is synthesized)
ggacggggattgcgtcaacaggtggaccaaggaggatttggagctaattaacaagtgggccttccaaggggagagaatgattcacgggaacccctccggagtggacaatgctgtcagcac

SEQ ID NO: 180532 - DNA, 120 bp, Artificial Sequence
  ENSG00000110921_6 (sequence is synthesized)
ctggggaggagccctccgataccatcaagggaagatttcatccttaaagaggtcgccagctctccagatcctgctgaccaacaccaaagtccctcgcaataccagggcccttgtggctgg

SEQ ID NO: 180533 - DNA, 120 bp, Artificial Sequence
  ENSG00000110921_7 (sequence is synthesized)
cgtcagaaacaggctgctcaagttcccagagatcgtggcccccctcctgacctcaatagatgccatctccctggagtgtgagcgcgtgctgggagagatgggggaagccccagccccgga

SEQ ID NO: 180534 - DNA, 120 bp, Artificial Sequence
  ENSG00000110921_8 (sequence is synthesized)
gcagtacctcgtgctggaagagctcattgacatgaaccagcaccatctgaatgccctcggcgtgggccacgcctctctggaccagctctgccaggtgaccagggcccgcggacttcacag

SEQ ID NO: 180535 - DNA, 120 bp, Artificial Sequence
  ENSG00000110921_9 (sequence is synthesized)
caagctgactggcgcaggcggtggtggctgtggcatcacactcctcaagccagggctggagcagccagaagtggaggccacgaagcaggccctgaccagctgtggctttgactgcttgga

SEQ ID NO: 180536 - DNA, 120 bp, Artificial Sequence
  ENSG00000110921_10 (sequence is synthesized)
aaccagcatcggtgcccccggcgtctccatccactcagccacctccctggacagccgagtccagcaagccctggatggcctctgagaggagcccacgacactgcagccccacccagatgc

SEQ ID NO: 180537 - DNA, 120 bp, Artificial Sequence
  ENSG00000110921_11 (sequence is synthesized)
tggagaggccccagccgcttggcgatgccagccaagctctgcagtcccagcggtgggacctagggaggcatggtctgccctctgcatcctctggagccagccgagcaggaggcctaggag

SEQ ID NO: 180538 - DNA, 120 bp, Artificial Sequence
  ENSG00000110921_12 (sequence is synthesized)
ggtcctctgagactccagacctgaggcgagaagggctgcttccctgaagctcccacagtcccatctgcttcaggcccccgccttggcctgtgttcttcctggccgcctgggtccaatgct

SEQ ID NO: 180539 - DNA, 120 bp, Artificial Sequence
  ENSG00000110921_13 (sequence is synthesized)
caggtgctggggcctggttcccggagaagtgtgccttctctctcccttttcagggaccgccccctgtctctcagggccaggcctctccctcctccaggaagccttcccctaccccttgtc

SEQ ID NO: 180540 - DNA, 120 bp, Artificial Sequence
  ENSG00000110921_14 (sequence is synthesized)
gcccctccctcccagagcacctgctgtctgggtggctcactcagcacttggtgtggccttcccttctacctagcgggatggggctcccccaggggctgtcccggaggcggtgggcctggt

SEQ ID NO: 180541 - DNA, 120 bp, Artificial Sequence
  ENSG00000110921_15 (sequence is synthesized)
taaataaggcagggtttatatgcactttcttccgatctgtacctgagaggtttgtggaaaagatggcaaatggggaataaaaagattttgtgtcaacagtagagactccaggccaccagc

SEQ ID NO: 180542 - DNA, 120 bp, Artificial Sequence
  ENSG00000110921_16 (sequence is synthesized)
acctccctctgtccctgtcccctctccagctgtttcctccatggagctcttcagcaatggagggaaatagggtttggggtcactttgttgtgcgtcttggggatgaggtggcttttccca

SEQ ID NO: 180543 - DNA, 120 bp, Artificial Sequence
  ENSG00000110921_17 (sequence is synthesized)
gatggcccttgctggagagggactgggacacggctctcagtccatcagcacaactctaggctgctgctgcggagggagaagttgagcttcctagctccagaatcacaagcacccacgaga

SEQ ID NO: 180544 - DNA, 120 bp, Artificial Sequence
  ENSG00000110921_18 (sequence is synthesized)
gcacagacctgtgtaagacaggaaagcagaacctgccatcgctcctggggcgcgccttcctttctgaaatgaactggctggatggagaaaacagactcaaatgttctggcccgggtgcct

SEQ ID NO: 180545 - DNA, 120 bp, Artificial Sequence
  ENSG00000110921_19 (sequence is synthesized)
ggcactccccacccccgccccccaccggccctatttgaactttatattgcagtcagcttggtgctttccgaaatgccattagccatcaggaaacccttgtagttggtgccttgccagcca

SEQ ID NO: 180546 - DNA, 120 bp, Artificial Sequence
  ENSG00000110921_20 (sequence is synthesized)
gaacctctgggacccacggacctgcaaagaggccgagtggaaaggtgggggccggcgcagggatttcaggatgaggtgaaagcgattcagtgcgcgtctgcccttggccactagggggca

SEQ ID NO: 180547 - DNA, 120 bp, Artificial Sequence
  ENSG00000110921_21 (sequence is synthesized)
gctggcggccttccctgctgttgtcttcctgcagggtgagaggagcaggagccgagctccacccccacgccagccttgggcccggcctgggatcactgctgggaacgtgagagtgaaggg

SEQ ID NO: 180548 - DNA, 120 bp, Artificial Sequence
  ENSG00000110921_22 (sequence is synthesized)
aggacgcctaccccagcttaacttgtagaaatggccccagatcactgatggctgttccctgccccttcccttcaaaacacaacgcataaagcagtaatactaattaatactgaacgctca

SEQ ID NO: 180549 - DNA, 120 bp, Artificial Sequence
  ENSG00000110921_23 (sequence is synthesized)
actcacctgtccccgtcttccacgccctgagggccgcggctctggaaacggggatacaggagcctggcggcgccgaagcacccgcgcaggccaagacggctccccaggccaagacggctc

SEQ ID NO: 180550 - DNA, 120 bp, Artificial Sequence
  ENSG00000110921_24 (sequence is synthesized)
cccaggccgcacacagccatgagccaggctgcttgacgggacctgaccccgccaggttcccgtccagtccgcggggtgactccacccacagctggccgcgccaccgctcaggattcccag

SEQ ID NO: 180551 - DNA, 120 bp, Artificial Sequence
  ENSG00000110921_25 (sequence is synthesized)
ggccaggcttcagtcactggacacaagctttctggggtctcactctgttatgcagcctggagtacagtggtgcgaccacagctcactgtttcttcaacctcctgggctcaagcgatcctc

SEQ ID NO: 180552 - DNA, 120 bp, Artificial Sequence
  ENSG00000110921_26 (sequence is synthesized)
ctttgtggtggggctgccctgtgcattgtagccatccccagcccctacccactagatgccagtagcaccctcagcgtggcaatcaaaaacatctccagacattgcttagtgtcccttggg

SEQ ID NO: 180553 - DNA, 120 bp, Artificial Sequence
  ENSG00000110921_27 (sequence is synthesized)
aggcagaatcacccttgccgccgacctttgcactccgcagaagccagtaggagcgtggaacagcttcctcgggttgctccagcagtcgtcaggagagcctcgggtgccgaggtgaagctg

SEQ ID NO: 180554 - DNA, 120 bp, Artificial Sequence
  ENSG00000110921_28 (sequence is synthesized)
gtctgccaccgccccggatccatgtggaaccagagctggatcatgtgggggagtctcaaatgcccgggccccggcctgtcttcaggagcccacggtctgatggggaaggcggtcactgga

SEQ ID NO: 180555 - DNA, 120 bp, Artificial Sequence
  ENSG00000110921_29 (sequence is synthesized)
atcgtcagagagaagacacctgaagggttgtgaagctgctgtgggtgacagtgacaggcgtcttagatctggctgcgagcctggggaatcattcatggaagtggtggcatttcattcctt

SEQ ID NO: 180556 - DNA, 120 bp, Artificial Sequence
  ENSG00000110921_30 (sequence is synthesized)
cagtgtctcctgagagccacttgtggcctaagcactggactaggccctggagctagaaaactgatgaagacgtgggctgggcaccgagtgtacggtctactgggggcatcaggagatgaa

SEQ ID NO: 180557 - DNA, 120 bp, Artificial Sequence
  ENSG00000110921_31 (sequence is synthesized)
tgaggaggtttccaaggggggcgggcaggggaacggccaggggaatggccaggcgttgctggtgtgctgggcggaggcgctgggtccacaggcctaggtttgagtccagctctcccactt

SEQ ID NO: 180558 - DNA, 120 bp, Artificial Sequence
  ENSG00000110921_32 (sequence is synthesized)
gccagctggtgccctcaggtgagtcacttctcccagacctccagctccttgtttacttagggggatcttgaacatacaatcagaagcggtggctctgaagtgcttacctgtttgctggcc

SEQ ID NO: 180559 - DNA, 120 bp, Artificial Sequence
  ENSG00000110921_33 (sequence is synthesized)
gagttcattcatcctttccacaagtatcattaagcacctactgcgtgctgagtactggggcctccgcagggaacaaaacaaagccccgcctccgtggaactcatactttgttgggagagg

SEQ ID NO: 180560 - DNA, 120 bp, Artificial Sequence
  ENSG00000110921_34 (sequence is synthesized)
agaaaaaatcagttgtctgtgagagcatatcaggcagtcttaagcacctttaggaaacaaggcagggtcagaggctacaaagagaaggaggggtccgattggatgggggttcgggggctg

SEQ ID NO: 180561 - DNA, 120 bp, Artificial Sequence
  ENSG00000110921_35 (sequence is synthesized)
ctggtgaaggaacattgagcagaaacctgaataagtcacgccgctatggggcggggctggtccctggcagaggaagcgcggtgcaaaggtcctgagacgagcacgctgcctgccgtgtga

SEQ ID NO: 180562 - DNA, 120 bp, Artificial Sequence
  ENSG00000110921_36 (sequence is synthesized)
cacagtagctgggaggtcagagtggctgagtggagtgagcagcctggggagcgaggagagaagaagaggctggggcagtggccaagcccggatcacaggagcgcttaccaggcttacccc

SEQ ID NO: 180563 - DNA, 120 bp, Artificial Sequence
  ENSG00000110921_37 (sequence is synthesized)
ctgcgtggtggccgctggatgggtatgagccctggatctggtggggctggtgacaggcctgtctgcagaggacttgtctaagaaagatgaagatgcaacacccaaactcctcccgcctgg

SEQ ID NO: 180564 - DNA, 120 bp, Artificial Sequence
  ENSG00000110921_38 (sequence is synthesized)
ctagatgggagcatggagcaaaccaacctttgctgcctgctgtggggtgccacgggagcagatggcggcttcacagagaagctgggggccagactccacgttaatcccatggatggctta

SEQ ID NO: 180565 - DNA, 120 bp, Artificial Sequence
  ENSG00000110921_39 (sequence is synthesized)
aggagcttccccccaccaaccatgcgtggtgcctctctgtaaagaaaaaatgcattgtttgtgaagtggatcaagatgcggcctcccagaacgctgcccttttgaggaatggcttgtctt

SEQ ID NO: 180566 - DNA, 120 bp, Artificial Sequence
  ENSG00000110921_40 (sequence is synthesized)
agaagggaagagaaaagccaaatagaatgttcatcttttgtaaagttaaaaaaaaaaaaaagccagcctccaaggctgagaatcgatattaatttcatgggcttatgggcagtgagataa

SEQ ID NO: 180567 - DNA, 120 bp, Artificial Sequence
  ENSG00000110921_41 (sequence is synthesized)
agcaggtttctggcagccctttccagccctattggattttacaatcttgaactgtgaagacagcgaataaaggtatcaagggctctgcccgtctccagctgtctcgggccagagctcatc

SEQ ID NO: 180568 - DNA, 120 bp, Artificial Sequence
  ENSG00000110921_42 (sequence is synthesized)
caaatcccccaccttccatcccagcctgcagccctctgaaaggcaggttggatggcaagaaatgtcagcttgagccctcgaagacggctcactacaaggacagttgggattgtggcttta

SEQ ID NO: 180569 - DNA, 120 bp, Artificial Sequence
  ENSG00000110921_43 (sequence is synthesized)
ggtgaggaccacggggtcatgctagagagtcagctcaacgtggctgcctgggacacgtctatgtgccagagggcagccaaggggatgactgactctacatctggttttagaccagggctg

SEQ ID NO: 180570 - DNA, 120 bp, Artificial Sequence
  ENSG00000110921_44 (sequence is synthesized)
ctcgtccgggcaccattgaggtagggcaagaatgggctcagcgtgctggggaccatcctcctctgcaaccctgccctccctgcatttacgagcccgtgcgtggcactgcccgcaccagct

SEQ ID NO: 180571 - DNA, 120 bp, Artificial Sequence
  ENSG00000110921_45 (sequence is synthesized)
agcctgggcatcttccctctgtgtgatccatttcagggcctgttgcttggtctttctaaaactccagcttcgtgggggtgacccacacaagtgaaccttcgccccctccttgtactctgc

SEQ ID NO: 180572 - DNA, 120 bp, Artificial Sequence
  ENSG00000110921_46 (sequence is synthesized)
tatagccactttgaatttctcactggatgactgtgccgggttccgccacctccaggctcacacaggctgctccaactgccagaaatcctcacccttctagctttgcttggtggcttctta

SEQ ID NO: 180573 - DNA, 120 bp, Artificial Sequence
  ENSG00000110921_47 (sequence is synthesized)
cccttcctcagttctcagtgtccacgtcatgccagaaaaaccttctcggcccttctcccctatcccctctctggccccggccccaaggccacgctgtgcctagcatgttgtaggtcccag

SEQ ID NO: 180574 - DNA, 120 bp, Artificial Sequence
  ENSG00000110921_48 (sequence is synthesized)
ttgaagttgaatgaataaatgagtgaaaagccaagggagaatggccacccaaccagtgcctgggatggaggcgcagctgtggccagcagcagaagccccatgctcccccaatccagtgtc

SEQ ID NO: 180575 - DNA, 120 bp, Artificial Sequence
  ENSG00000110921_49 (sequence is synthesized)
acctcttgtgcctcccttcttcctccgtatcagggtgggcggcttcccggactgctcccagtcctgtcccagctcctccatcttgagttcagtgtggacctgcctcctcttcaccctgca

SEQ ID NO: 180576 - DNA, 120 bp, Artificial Sequence
  ENSG00000110921_50 (sequence is synthesized)
agctctgcacctttgggaagtaccataggaggcaggtgtccctggctcttcatcccccaatgtggccctcacagtgcactagctgcaaggaagcaggggtggtggggaagacctgctctc

SEQ ID NO: 180577 - DNA, 120 bp, Artificial Sequence
  ENSG00000110921_51 (sequence is synthesized)
tccttctccccttcagctcttaaattgcagagatatcagaaagggaaagtcatgcatggctgtgcccgtagactctcagctgctcattcattcattcctgtatttgcttagtaaacaaga

SEQ ID NO: 180578 - DNA, 80 bp, Artificial Sequence
  ENSG00000110925_0 (sequence is synthesized)
attgttagccggagccggggcggttctgggcgtctgctgccgggggcgcccgagttgccggagacgcccggccctctctg

SEQ ID NO: 180579 - DNA, 120 bp, Artificial Sequence
  ENSG00000110925_1 (sequence is synthesized)
cgcggggcccgggactcgctcgctcctccctccttcccaccgggctagggcggcggcggcagcgggggcggcagagaccatcacgggaggaggcagctgcggcggggccgaatcctaatg

SEQ ID NO: 180580 - DNA, 120 bp, Artificial Sequence
  ENSG00000110925_2 (sequence is synthesized)
gcagctgcggcggggccgaatcctaatgtacctggctagctggtggtgagtaggggctttggggccaacttggtgggctccccaaggaaacccctttgaaaccaatggatgcattcacgg

SEQ ID NO: 180581 - DNA, 120 bp, Artificial Sequence
  ENSG00000110925_3 (sequence is synthesized)
gctcgggtctcaagaggaagtttgatgatgtggatgtgggctcatcagtttccaactcagatgatgagatctccagcagtgatagtgctgacagctgcgacagcctcaatcctcctacca

SEQ ID NO: 180582 - DNA, 120 bp, Artificial Sequence
  ENSG00000110925_4 (sequence is synthesized)
ctgccagcttcacacccacatccatcctgaagcggcagaagcagctgcggaggaagaatgtacgctttgaccaggtgactgtatactactttgcccggcgccaaggttttaccagtgtgc

SEQ ID NO: 180583 - DNA, 120 bp, Artificial Sequence
  ENSG00000110925_5 (sequence is synthesized)
ccagccagggtggtagctctctgggcatggcccagcgccataactctgtacggagctatacactctgtgagtttgcccaggaacaggaggtgaaccatcgagagattctgcgtgagcacc

SEQ ID NO: 180584 - DNA, 120 bp, Artificial Sequence
  ENSG00000110925_6 (sequence is synthesized)
tgaaggaagagaaactccatgccaagaaaatgaagctgaccaagaatgggacagtggagtcggtggaggctgatggcctgacgctggatgatgtgtcagatgaagatattgatgtggaaa

SEQ ID NO: 180585 - DNA, 120 bp, Artificial Sequence
  ENSG00000110925_7 (sequence is synthesized)
atgtggaggtggatgattacttcttcctgcagcctctgcccaccaaacggcgacgggccctgctgagggcttctggggtccaccgtattgatgctgaagagaagcaagaacttcgagcca

SEQ ID NO: 180586 - DNA, 120 bp, Artificial Sequence
  ENSG00000110925_8 (sequence is synthesized)
tccgcctgtcacgggaagaatgtggttgtgactgccgactgtattgtgacccagaagcgtgtgcctgcagccaggctgggattaaatgccaggtggatcgcatgtcctttccatgtggct

SEQ ID NO: 180587 - DNA, 120 bp, Artificial Sequence
  ENSG00000110925_9 (sequence is synthesized)
gctcccgggatggctgtgggaacatggcaggacgcattgaatttaatccaatccgggtccggactcattacctccacaccattatgaagctggagctggagagcaagcggcaggtgagcc

SEQ ID NO: 180588 - DNA, 120 bp, Artificial Sequence
  ENSG00000110925_10 (sequence is synthesized)
gcccagcagccccagatgaggagccctccccgactgccagttgcagcctgacaggagcacagggctctgagacccaggacttccaggagttcattgctgagaatgagacagcagtgatgc

SEQ ID NO: 180589 - DNA, 120 bp, Artificial Sequence
  ENSG00000110925_11 (sequence is synthesized)
acctgcagagtgcagaggaactggagcggctcaaggcagaagaagattccagcggctctagtgccagcctggactcgagcatcgagagcctgggtgtgtgcatcctagaggagcctctgg

SEQ ID NO: 180590 - DNA, 120 bp, Artificial Sequence
  ENSG00000110925_12 (sequence is synthesized)
ctgtccccgaagagctgtgcccaggccttacagcccccattctcatccaggctcagctgcccccaggctcctctgtcctgtgttttaccgagaactcagaccacccaactgcctcaacgg

SEQ ID NO: 180591 - DNA, 120 bp, Artificial Sequence
  ENSG00000110925_13 (sequence is synthesized)
tgaacagcccatcctacttgaacagtgggcccctggtctattatcaagtggagcagaggccagtcttgggagtgaaaggagagcctggtacggaagaaggctcagcctctttcccaaagg

SEQ ID NO: 180592 - DNA, 120 bp, Artificial Sequence
  ENSG00000110925_14 (sequence is synthesized)
agaaggatctgaatgtcttctctctccctgttacctcactcgtggcttgtagctccacagacccagctgccctctgtaaatcagaggtggggaaaacacccaccctagaagctctattgc

SEQ ID NO: 180593 - DNA, 120 bp, Artificial Sequence
  ENSG00000110925_15 (sequence is synthesized)
ccgaagattgtaaccctgaggagcctgaaaatgaagacttccacccttcctggtccccctcaagcctccccttccgcacggacaatgaagagggctgtgggatggtgaagacctcccagc

SEQ ID NO: 180594 - DNA, 120 bp, Artificial Sequence
  ENSG00000110925_16 (sequence is synthesized)
agaatgaggatcggccccctgaagattcttccttagaactccctctggcagtgtgacaggcgctagaggtcctgcctcttacccattctctatttattcccttattttatctaacaccat

SEQ ID NO: 180595 - DNA, 120 bp, Artificial Sequence
  ENSG00000110925_17 (sequence is synthesized)
ttcaaaacaaaactgtagaagcagctgctgctcccatgttattttattggggtctttggggaatgggtgggaaaggattgtttgagtattttttaaaagggaaacagtaccaaggagacc

SEQ ID NO: 180596 - DNA, 120 bp, Artificial Sequence
  ENSG00000110925_18 (sequence is synthesized)
ggaacaaagaactaggatctcacaggaaaagctgggtaactcaagcagctattctttctgtagggaccagaacacgagaatttgaagagcatggcaaagccctttctctcccaagcccca

SEQ ID NO: 180597 - DNA, 120 bp, Artificial Sequence
  ENSG00000110925_19 (sequence is synthesized)
ggcagagtacaagctcatttttctcggtggttattctgatatcccattttggtgtgtcataatacttcaaactggaaagtcacctggtcgagtctagggaggagggagtggaagggtctc

SEQ ID NO: 180598 - DNA, 120 bp, Artificial Sequence
  ENSG00000110925_20 (sequence is synthesized)
tgcttctgtacaaaatctccaggatttacaaaaatgtaacctgccttccttcaatcccatatttggtaaataagttaatatttgacatgtttggtgttctctgacctgttccccacactg

SEQ ID NO: 180599 - DNA, 120 bp, Artificial Sequence
  ENSG00000110925_21 (sequence is synthesized)
gggattcctggtctgtaacttgaattgtttcttccacatgttcttaagtactagagttaaacttgtctatgtgtcttttttctctccatcctttttccttcggagaaagagctggattgg

SEQ ID NO: 180600 - DNA, 120 bp, Artificial Sequence
  ENSG00000110925_22 (sequence is synthesized)
ctggggatatggtataacgagcctgagccttctgtacgtgtctgacactagcactgtcaggcagctttcggctggggctcacccatcccataggaggcctatgtggagcattaactgtgg

SEQ ID NO: 180601 - DNA, 120 bp, Artificial Sequence
  ENSG00000110925_23 (sequence is synthesized)
ccaaaggaggcagcgggaacaggctgcttgctatctggaaagatgacatatttgtgccatgcttgttttttcacccaggtttttccctctttgtgagatctgagctttagtggaatgtag

SEQ ID NO: 180602 - DNA, 120 bp, Artificial Sequence
  ENSG00000110925_24 (sequence is synthesized)
aatgtggcaatcttaaggtcaccaatcagtttttgttcttttttcctggatctaccctcatggtcgttttcaacatagcgggttagagttcttatactgttccagttcaattccaagaat

SEQ ID NO: 180603 - DNA, 120 bp, Artificial Sequence
  ENSG00000110925_25 (sequence is synthesized)
tgcaaatgtttattggacccctccatcttgatgatatataaaaattggaagccaaaccagttcttaaatgctacatgcaactcccagattccaaaggattcaagttctaattataacctt

SEQ ID NO: 180604 - DNA, 120 bp, Artificial Sequence
  ENSG00000110925_26 (sequence is synthesized)
tgaagcgtatagaatggaactcattcagtttgattcagttcttacctctgtcaggaggaatacagttcctgttcatcctgtgttctaagatctccattgaacagcactgatttcctttca

SEQ ID NO: 180605 - DNA, 120 bp, Artificial Sequence
  ENSG00000110925_27 (sequence is synthesized)
ttagcaaagtgatctttgtctctgttctaaaatggaggcagtagggagcaaaactattcttctcaagcatcctttacaccatactttacttctggtatggtttattaaccacacacacac

SEQ ID NO: 180606 - DNA, 120 bp, Artificial Sequence
  ENSG00000110925_28 (sequence is synthesized)
acaaaagtgaaaaactgtgttgggggggagacactactcctacttatcttgctcataaagccttttctggtgggatattaaggccctggtgtcttacagaaaccatcacgtatgtcgcag

SEQ ID NO: 180607 - DNA, 120 bp, Artificial Sequence
  ENSG00000110925_29 (sequence is synthesized)
cagcatttcacccctgaagtctctaaactctgagcctgaaaagatttgtatttaatacacataacattttttagttcattctgcctttcctatttgttccagtttttgcttggttttagt

SEQ ID NO: 180608 - DNA, 120 bp, Artificial Sequence
  ENSG00000110925_30 (sequence is synthesized)
ttggaggggaacttaagtacacagatccttatctctccccatcccctagcctcacaaaacacagttgagagtcttttaagtacctgagctctcgaagctacccagaactgaactagactc

SEQ ID NO: 180609 - DNA, 120 bp, Artificial Sequence
  ENSG00000110925_31 (sequence is synthesized)
ccctaccttagactggtaccctcaaacacaggactgaagcttaattgggaatttggctttatggagaaaagaatctttttcaaagtttgtgtcggaaggggagggtgaggtttgcccact

SEQ ID NO: 180610 - DNA, 120 bp, Artificial Sequence
  ENSG00000110925_32 (sequence is synthesized)
gtctctgcaggaaggctccggcttaatctaggaagtagattccagctgcacgatgaggaacacattagcttttgggatcaaaccaggaatatgaatctgtaattattaagctcattgcca

SEQ ID NO: 180611 - DNA, 120 bp, Artificial Sequence
  ENSG00000110925_33 (sequence is synthesized)
acccacaagatatgtttctgaaaacctgtagtttcttaatttaagtccatccccttcattaacgctacagttgtgactcacactgatcccaaacttttaagtgctaaatattaacattta

SEQ ID NO: 180612 - DNA, 120 bp, Artificial Sequence
  ENSG00000110925_34 (sequence is synthesized)
gcattaactgtcttgtcaagcgaaaggccttctctacaacctagtccatctcacttctggtgctacctgagttggacagaattctagctcatggttgctaggaaagctaggcctctgatc

SEQ ID NO: 180613 - DNA, 120 bp, Artificial Sequence
  ENSG00000110925_35 (sequence is synthesized)
atagaagcagatagcttcagtcccagtctaggcctagataaatgactcttattaccacaacccttattattttccaatttcctttctcacatactgtacacaggtagtattttcaatgtg

SEQ ID NO: 180614 - DNA, 120 bp, Artificial Sequence
  ENSG00000110925_36 (sequence is synthesized)
aatccaaagcttgtctggttctctgaaaataattttttcccctttaggttctttacattgtgataatgctgtatttaaagagaatatttaaatgtaatattaaagaaatattcaaaagaa

SEQ ID NO: 180615 - DNA, 120 bp, Artificial Sequence
  ENSG00000110925_37 (sequence is synthesized)
tggcagtgtgacacacaaactgttcttcagaatgaaatgctagaagttatccccacaagacaacactgtccccttgtcctgcagttttcagttcaaggcattgatcctctaccaatgaat

SEQ ID NO: 180616 - DNA, 120 bp, Artificial Sequence
  ENSG00000110925_38 (sequence is synthesized)
aattgagagagaatcctaatgtacctggctagctggtgtttccaactcagatgatgagatctccagcagtgatagtgctgacagctgcgacagcctcaatcctcctaccactgccagctt

SEQ ID NO: 180617 - DNA, 120 bp, Artificial Sequence
  ENSG00000110925_39 (sequence is synthesized)
gtgtgacacacaaactgttcttcagaatgaaatgctagaagttatccccacaagacaacactgtccccttgtcctgcagttttcagttcaaggtgctaaaacttacaagtgtatctcttg

SEQ ID NO: 180618 - DNA, 120 bp, Artificial Sequence
  ENSG00000110925_40 (sequence is synthesized)
aacacaggcattgatcctctaccaatgaataattgagagagaatcctaatgtacctggctagctggtggtgagtaggggctttggggccaacttggtgggctccccaaggaaaccccttt

SEQ ID NO: 180619 - DNA, 120 bp, Artificial Sequence
  ENSG00000110925_41 (sequence is synthesized)
gagaatagaggggctgaagggaaacgaaagtaggagaatgttggccagagctagtagagaaagaacgtaatattgagaaagcagacatcagtgctaggtgaggtgctttctttagagagc

SEQ ID NO: 180620 - DNA, 120 bp, Artificial Sequence
  ENSG00000110925_42 (sequence is synthesized)
actgcgggggcagctcgcgggagaccgatgggcggcttggaagcctgcaggattgcagatgaggattgagttcggaatggagtggagaatgatgtaggatggagaatcctaatgtacctg

SEQ ID NO: 180621 - DNA, 85 bp, Artificial Sequence
  ENSG00000110931_0 (sequence is synthesized)
ggcgacagagcgagactccgttcggggtggagctctcattggctcgttgcatgtgagtgtccctacggcctagaaatacaagaga

SEQ ID NO: 180622 - DNA, 120 bp, Artificial Sequence
  ENSG00000110931_1 (sequence is synthesized)
gttgcatgtgagtgtccctacggcctagaaatacaagagaagcacatcggaacgggctggaaatccacccagttaactagagggctttgaaccttttattaacttggaggttgactctcc

SEQ ID NO: 180623 - DNA, 120 bp, Artificial Sequence
  ENSG00000110931_2 (sequence is synthesized)
tgtcaactcgattcccttttggctgtttggcagggtcagtgagacatcccctgggtcgctcgaccccgtaggacggttcagggagccctccaggtcttcgtttctcctcttccccgcaca

SEQ ID NO: 180624 - DNA, 120 bp, Artificial Sequence
  ENSG00000110931_3 (sequence is synthesized)
gtgctgttatccagctgggggatccaacgcacacttaaggctccagcaaagtggctccgctgccggatgggagtgccccagtgtgctggatgaagctggcgcatgcaccatgtcatcatg

SEQ ID NO: 180625 - DNA, 120 bp, Artificial Sequence
  ENSG00000110931_4 (sequence is synthesized)
tgtctctagccagcccagcagcaaccgggccgccccccaggatgagctggggggcaggggcagcagcagcagcgaaagccagaagccctgtgaggccctgcggggcctctcatccttgag

SEQ ID NO: 180626 - DNA, 120 bp, Artificial Sequence
  ENSG00000110931_5 (sequence is synthesized)
catccacctgggcatggagtccttcattgtggtcaccgagtgtgagccgggctgtgctgtggacctcggcttggcgcgggaccggcccctggaggccgatggccaagaggtcccccttga

SEQ ID NO: 180627 - DNA, 120 bp, Artificial Sequence
  ENSG00000110931_6 (sequence is synthesized)
cacctccgggtcccaggcccggccccacctctccggtcgcaagctgtctctgcaagagcggtcccagggtgggctggcagccggtggcagcctggacatgaacggacgctgcatctgccc

SEQ ID NO: 180628 - DNA, 120 bp, Artificial Sequence
  ENSG00000110931_7 (sequence is synthesized)
gtccctgccctactcacccgtcagctccccgcagtcctcgcctcggctgccccggcggccgacagtggagtctcaccacgtctccatcacgggtatgcaggactgtgtgcagctgaatca

SEQ ID NO: 180629 - DNA, 120 bp, Artificial Sequence
  ENSG00000110931_8 (sequence is synthesized)
gtataccctgaaggatgaaattggaaagggctcctatggtgtcgtcaagttggcctacaatgaaaatgacaatacctactatgcaatgaaggtgctgtccaaaaagaagctgatccggca

SEQ ID NO: 180630 - DNA, 120 bp, Artificial Sequence
  ENSG00000110931_9 (sequence is synthesized)
ggccggctttccacgtcgccctccaccccgaggcacccggccagctcctggaggctgcatccagcccaggggccccattgagcaggtgtaccaggaaattgccatcctcaagaagctgga

SEQ ID NO: 180631 - DNA, 120 bp, Artificial Sequence
  ENSG00000110931_10 (sequence is synthesized)
ccaccccaatgtggtgaagctggtggaggtcctggatgaccccaatgaggaccatctgtacatggtgttcgaactggtcaaccaagggcccgtgatggaagtgcccaccctcaaaccact

SEQ ID NO: 180632 - DNA, 120 bp, Artificial Sequence
  ENSG00000110931_11 (sequence is synthesized)
ctctgaagaccaggcccgtttctacttccaggatctgatcaaaggcatcgagtacttacactaccagaagatcatccaccgtgacatcaaaccttccaacctcctggtcggagaagatgg

SEQ ID NO: 180633 - DNA, 120 bp, Artificial Sequence
  ENSG00000110931_12 (sequence is synthesized)
gcacatcaagatcgctgactttggtgtgagcaatgaattcaagggcagtgacgcgctcctctccaacaccgtgggcacgcccgccttcatggcacccgagtcgctctctgagacccgcaa

SEQ ID NO: 180634 - DNA, 120 bp, Artificial Sequence
  ENSG00000110931_13 (sequence is synthesized)
gatcttctctgggaaggccttggatgtttgggccatgggtgtgacactatactgctttgtctttggccagtgcccattcatggacgagcggatcatgtgtttacacagtaagatcaagag

SEQ ID NO: 180635 - DNA, 120 bp, Artificial Sequence
  ENSG00000110931_14 (sequence is synthesized)
tcaggccctggaatttccagaccagcccgacatagctgaggacttgaaggacctgatcacccgtatgctggacaagaaccccgagtcgaggatcgtggtgccggaaatcaagctgcaccc

SEQ ID NO: 180636 - DNA, 120 bp, Artificial Sequence
  ENSG00000110931_15 (sequence is synthesized)
ctgggtcacgaggcatggggcggagccgttgccgtcggaggatgagaactgcacgctggtcgaagtgactgaagaggaggtcgagaactcagtcaaacacattcccagcttggcaaccgt

SEQ ID NO: 180637 - DNA, 120 bp, Artificial Sequence
  ENSG00000110931_16 (sequence is synthesized)
gatcctggtgaagaccatgatacgtaaacgctcctttgggaacccattcgagggcagccggcgggaggaacgctcactgtcagcgcctggaaacttgctcaccaaaaaaccaaccaggga

SEQ ID NO: 180638 - DNA, 120 bp, Artificial Sequence
  ENSG00000110931_17 (sequence is synthesized)
atgtgagtccctgtctgagctcaaggaagcaaggcagcgaagacaacctccagggcaccgacccgccccccgtgggggaggaggaagtgctcttgtgagaggcagtccctgcgtggaaag

SEQ ID NO: 180639 - DNA, 120 bp, Artificial Sequence
  ENSG00000110931_18 (sequence is synthesized)
ttgctgggcccccgcccccggctcccccgcacgcatgcatccactgcggccggaggaggccatggagcccgagtagctgcctggatcgctcgacctcgcatgcgcgccgcgtcgcctctg

SEQ ID NO: 180640 - DNA, 120 bp, Artificial Sequence
  ENSG00000110931_19 (sequence is synthesized)
gggggctgctgcaccgcgtttccatagcagcatgtcctacggaaacccagcacgtgtgtagagcctcgatcgtcatctctggttatttgttttttcctttgttgttttaaaggggacaaa

SEQ ID NO: 180641 - DNA, 120 bp, Artificial Sequence
  ENSG00000110931_20 (sequence is synthesized)
cccaaacccacgtgcattttgggacaattgctttttaaaacgtttttatgccaaaaatccttcattgtgattttcagaaccacgtcagatataccaagtgactgtgtgtggggtttgaca

SEQ ID NO: 180642 - DNA, 120 bp, Artificial Sequence
  ENSG00000110931_21 (sequence is synthesized)
actgtggaaaggcgagcagaaaactccggcggtctgaggccatggaggtggttgctgcatttgagagggagtagggggctagatgtggctcctagtgcaaaccggaaaccatggcacctt

SEQ ID NO: 180643 - DNA, 120 bp, Artificial Sequence
  ENSG00000110931_22 (sequence is synthesized)
ccagagccgtggtctcaaggagtcagagcagggctggccctcagtagctgcagggagctttgatgcaacttatttgtaagaaggatttttaaattttttatgggtagaattgtagtcagg

SEQ ID NO: 180644 - DNA, 120 bp, Artificial Sequence
  ENSG00000110931_23 (sequence is synthesized)
aaaacagaaagggcttgaaatttaataagtgctgctggaaggggattttccaagcctggaagggtattcagcagctgtggtggggaaacatttctcctgaaagactgaacgtgtttcttc

SEQ ID NO: 180645 - DNA, 120 bp, Artificial Sequence
  ENSG00000110931_24 (sequence is synthesized)
atgacagctgctcaaagcaggtttctgagatagctgaccgagctctggtaaatctctttgtcaaattacgaaaacttcagggtgaaatcctatgcttccatgtacattacatggcttaag

SEQ ID NO: 180646 - DNA, 120 bp, Artificial Sequence
  ENSG00000110931_25 (sequence is synthesized)
attaaacaaaaacatttttcaagtctctaactagagtgaactctagagcacagtagttcagaaactatttagagcttccaggatatatttcacagcttcaggcatgtgatcagttagagc

SEQ ID NO: 180647 - DNA, 120 bp, Artificial Sequence
  ENSG00000110931_26 (sequence is synthesized)
cgatgaaacctatgcccgcctgtatatatattagcagcttagctagttcataacctgtatattctaaagactgctaaggttttgttttcattttaaatcctagctgattgttgtggtcaa

SEQ ID NO: 180648 - DNA, 120 bp, Artificial Sequence
  ENSG00000110931_27 (sequence is synthesized)
tgaaatacccagtttctggagggccaggtgggaaatgctttcactggaccaacacacaaatgatcatcctgaggatctgagcttccctagactccacacaataaccttggggcacccttt

SEQ ID NO: 180649 - DNA, 120 bp, Artificial Sequence
  ENSG00000110931_28 (sequence is synthesized)
tagagaagactgttgaaacccacagcactcgttggggtatgaggaaaccagggcttggcacaggaagttcccctttgtagctaaaagtccagaaagaaagggttcatctttttgacttcc

SEQ ID NO: 180650 - DNA, 120 bp, Artificial Sequence
  ENSG00000110931_29 (sequence is synthesized)
aactgatattgggaagtttggttgaggttcaagtgtgactccttccagagccacaggtaggggagtgtgaagttgagggggaggaaagctggaaggactctgccttgggagattcccagc

SEQ ID NO: 180651 - DNA, 120 bp, Artificial Sequence
  ENSG00000110931_30 (sequence is synthesized)
tctgctttccagcgcttggtggaatctgggctggggaaagacggcaccgggaaactctgcttccccattgtttccatctgatcagctgtggtgtgaggacttctcagacaaaggcaaggc

SEQ ID NO: 180652 - DNA, 120 bp, Artificial Sequence
  ENSG00000110931_31 (sequence is synthesized)
ctcgtgcccctgcccagcccattcatggagccctgggccttcttggcttccatagatcctaagctcttgactgtagtttagccagacttgttttgctatcttataagcagttcagaatta

SEQ ID NO: 180653 - DNA, 120 bp, Artificial Sequence
  ENSG00000110931_32 (sequence is synthesized)
gggaatgctggttttgaagagcaaaggacaggtagtctagagagggtcgtctggcctgcttgctgggtctttgtaacccagcacttcctcttgccctcctggctttatgtttatggggag

SEQ ID NO: 180654 - DNA, 120 bp, Artificial Sequence
  ENSG00000110931_33 (sequence is synthesized)
aggactcaatagctccaccccttctggcaccagatggggcttggttagtttgcaataagcaccttgcagaggttaaagccagcgggtccctagtcttaggcccagcctgcttgtgtgggc

SEQ ID NO: 180655 - DNA, 120 bp, Artificial Sequence
  ENSG00000110931_34 (sequence is synthesized)
tctggcctggcctggtggctggcccagggggcagcagtgcttagagcttctgcagggcttctcttgtttacacagctgcatcagacaatgccatttctccccaccacggaaccttccatc

SEQ ID NO: 180656 - DNA, 120 bp, Artificial Sequence
  ENSG00000110931_35 (sequence is synthesized)
taagatttcttccagggaatgccagcaatcaggcagcacccagctgtgggggcagtggggtgggggagacccacattgatgactttttttttttcttttaatgaagaaacaccaaagaaa

SEQ ID NO: 180657 - DNA, 120 bp, Artificial Sequence
  ENSG00000110931_36 (sequence is synthesized)
gctgtggaaaggacctgccccacatgaaaaggataagccaagatggctgtaaacacagagcatttgagctgccactcttggagcacattgatttttcaaaagccagctctgtcaggaaag

SEQ ID NO: 180658 - DNA, 120 bp, Artificial Sequence
  ENSG00000110931_37 (sequence is synthesized)
gaggtgctgttatgagcagctcttccagtgggcaaagaggacgcccataatttcttccattgctagctcatctgtgggaccaatttggtgtaagcaacctgtggcctgcacttgtggcct

SEQ ID NO: 180659 - DNA, 120 bp, Artificial Sequence
  ENSG00000110931_38 (sequence is synthesized)
cgaaggaagcacaaaccctccatccacttcccatttcctctgcccttttccacctcccccttccatcccaccagctgccagtggctcccagaaagccttattgagccccttgttgacact

SEQ ID NO: 180660 - DNA, 120 bp, Artificial Sequence
  ENSG00000110931_39 (sequence is synthesized)
tggggctgcggaggcctctccctactggtctggcctttcctgagaggcaggtcttccgtcctcagagcctttctggaacaaggagaatgcctgtgcaggtggacacacaggcctggcctg

SEQ ID NO: 180661 - DNA, 120 bp, Artificial Sequence
  ENSG00000110931_40 (sequence is synthesized)
tcgctctcacttgtcttccagcggggagcttcacgttgccgagtggaagaaccatgacctccacttgcttccaaggtgctagggaagtttcagggtacgctggttcccctctccagctgg

SEQ ID NO: 180662 - DNA, 120 bp, Artificial Sequence
  ENSG00000110931_41 (sequence is synthesized)
aggccgagtttctggggactgcagatttttctactctgtgatcgattcaatgcccgatgcttctgtttcattcccgaccctttctactatgcattttccttttatcaggtgtataaagtt

SEQ ID NO: 180663 - DNA, 120 bp, Artificial Sequence
  ENSG00000110931_42 (sequence is synthesized)
aaatactgtgtatttatcactaaaaagtacatgaacttaagagacaactaagcctttcgtgtttttccacaggtgtttaagcttctctgtacagttgaaataaacagacagcaaaatggt

SEQ ID NO: 180664 - DNA, 120 bp, Artificial Sequence
  ENSG00000110931_43 (sequence is synthesized)
cagagcaagctgagccgagccgagccgagctgggggcgcagagcgcgggaggcggcggcggcgcggagcccaggtggctccgctgccggatgggagtgccccagtgtgctggatgaagct

SEQ ID NO: 180665 - DNA, 120 bp, Artificial Sequence
  ENSG00000110931_44 (sequence is synthesized)
tggatgcagaccttcttgctgtcagccacccttccttcatacacatagccagcccaggtgaccagaacctcccaggacagatgaggctttgtgtccttatgagactgggagaacctgctg

SEQ ID NO: 180666 - DNA, 120 bp, Artificial Sequence
  ENSG00000110931_45 (sequence is synthesized)
ggcacccctgctgcaggtgctgtggtgggtggggaccccactgcccttcccactgagcacatcatggctacctgacttggtgggagctccaggcagtcacttctgtttcttaaacatagc

SEQ ID NO: 180667 - DNA, 120 bp, Artificial Sequence
  ENSG00000110931_46 (sequence is synthesized)
tttactgaggtacaattcacataccatgtaattcacccacgggaagtgtatgattcagtggtttctaatacagacttctgcagccattaccaccgtcaactttacgacattttcatcagc

SEQ ID NO: 180668 - DNA, 120 bp, Artificial Sequence
  ENSG00000110931_47 (sequence is synthesized)
ccaagaagacaccctacactccttagctgtccccatccaactcccccaccccagtaaccactcagaataggtatggatttgcctattctggacgtttcgtataaatggcgtcatacacta

SEQ ID NO: 180669 - DNA, 120 bp, Artificial Sequence
  ENSG00000110931_48 (sequence is synthesized)
gccattaggatctcacactctgggggttttccctatcttccatcttaactgggaaacacgctgccaaatgcagccctcctgttggcaaacgcagccacgtggatgctgcctcctccctgc

SEQ ID NO: 180670 - DNA, 120 bp, Artificial Sequence
  ENSG00000110931_49 (sequence is synthesized)
aacgcacacttaaggctccagcaaagtaagtgccaaaaaggggagaatgggaagaatatgctgtatttcacaaaaagcatctaagtagccatctggaaaagccagaatgaacttcaatgg

SEQ ID NO: 180671 - DNA, 120 bp, Artificial Sequence
  ENSG00000110931_50 (sequence is synthesized)
gagtcggtggtggcccaaagtccaggccgcatccaccgcccggcgcctagcgcaggggcagcagccgggtcgccacaggaggggccccgggtgttcttgccggcttgggggaactttccc

SEQ ID NO: 180672 - DNA, 120 bp, Artificial Sequence
  ENSG00000110931_51 (sequence is synthesized)
agggtcagcccggaggcgccctgcagccccggcatttggctaaacaaagcaagcgctgccggcgcggcccgcccgagggcgccgcgggaagaacctgggcaggtggctccgctgccggat

SEQ ID NO: 180673 - DNA, 120 bp, Artificial Sequence
  ENSG00000110931_52 (sequence is synthesized)
ttgggattacagggctcctatggtgtcgtcaagttggcctacaatgaaaatgacaatacctactatgcaatgaaggtgctgtccaaaaagaagctgatccggcaggccggctttccacgt

SEQ ID NO: 180674 - DNA, 120 bp, Artificial Sequence
  ENSG00000110934_0 (sequence is synthesized)
atgcgaggcatgccgggagcccgcacttcctcctcgggggcctcagaaaaccacagggcgcggggccagggcggcggcccccagggagttggcaggatggcagagggcaaggcaggcggc

SEQ ID NO: 180675 - DNA, 120 bp, Artificial Sequence
  ENSG00000110934_1 (sequence is synthesized)
gcggccggcctcttcgccaagcaggtgcagaagaagtttagcagggcccaggagaaggtgctgcagaaattggggaaagctgtagaaaccaaagatgaacgatttgaacaaagcgctagc

SEQ ID NO: 180676 - DNA, 120 bp, Artificial Sequence
  ENSG00000110934_2 (sequence is synthesized)
aacttctaccaacaacaggcagaaggccacaagctgtacaaggacctgaagaacttccttagtgcagtcaaagtgatgcatgaaagttcaaaaagagtgtcagaaaccctgcaggagatc

SEQ ID NO: 180677 - DNA, 120 bp, Artificial Sequence
  ENSG00000110934_3 (sequence is synthesized)
tacagcagcgagtgggacggtcatgaggagctgaaggccatcgtatggaataatgatctcctttgggaagactacgaggagaaactggctgaccaggctgtaaggaccatggaaatctat

SEQ ID NO: 180678 - DNA, 120 bp, Artificial Sequence
  ENSG00000110934_4 (sequence is synthesized)
gttgcccagttcagtgaaattaaggagagaattgccaagcggggtcggaaactcgtggactatgacagtgcccgacaccacctggaggcagtgcagaatgccaagaagaaagatgaggcc

SEQ ID NO: 180679 - DNA, 120 bp, Artificial Sequence
  ENSG00000110934_5 (sequence is synthesized)
aagactgccaaggcagaggaagagttcaacaaagcccagactgtgtttgaagatctgaaccaagaactactagaggagctgcctattctttataatagtcgtattggctgctatgtgacc

SEQ ID NO: 180680 - DNA, 120 bp, Artificial Sequence
  ENSG00000110934_6 (sequence is synthesized)
atcttccaaaacatttccaacttgagggatgtcttctacagggaaatgagcaagctgaaccacaatctctacgaggtgatgagcaaactggagaagcaacattccaataaagtctttgtg

SEQ ID NO: 180681 - DNA, 120 bp, Artificial Sequence
  ENSG00000110934_7 (sequence is synthesized)
aagagtgagagtgaatctgtctcagcaactgaagatctggcacctgatgcagcccaaggggaagacaattctgagatcaaggagctcttagaagaggaggaaatagagaaggaaggatct

SEQ ID NO: 180682 - DNA, 120 bp, Artificial Sequence
  ENSG00000110934_8 (sequence is synthesized)
gaagcaagctcctctgaggaagatgagcctctaccagcctgcaatggccccgcccaggcccagccctctcctaccactgaaagggccaagtcccaggaggaagttctccccagctccaca

SEQ ID NO: 180683 - DNA, 120 bp, Artificial Sequence
  ENSG00000110934_9 (sequence is synthesized)
actccatcaccaggcggagccctgagcccttcagggcagccttcatcatctgccacagaagtagtcctccgaacccgcaccgcaagtgaaggatctgaacaaccaaagaagagagcctct

SEQ ID NO: 180684 - DNA, 120 bp, Artificial Sequence
  ENSG00000110934_10 (sequence is synthesized)
atccagaggacctcagcaccccctagtaggcctcctccacccagagccactgcaagccccaggccctcctcagggaacataccttccagccctacagcctctggagggggttcacccacc

SEQ ID NO: 180685 - DNA, 120 bp, Artificial Sequence
  ENSG00000110934_11 (sequence is synthesized)
agccctagggcctccttggggactgggactgcaagtcctaggacctccctagaggtctctcctaatccagaaccaccagagaagccagtaagaactcctgaggccaaagaaaatgaaaac

SEQ ID NO: 180686 - DNA, 120 bp, Artificial Sequence
  ENSG00000110934_12 (sequence is synthesized)
atccacaatcagaaccctgaagaactttgtacttcccccaccttaatgacatctcaggttgcttcagagcctggagaggcaaagaagatggaagacaaggaaaaggataataagcttatc

SEQ ID NO: 180687 - DNA, 120 bp, Artificial Sequence
  ENSG00000110934_13 (sequence is synthesized)
tcagctaactcctcggagggccaagaccagcttcaagtctccatggtaccagaaaacaacaacctcacagcacctgaacctcaagaagaggtatccacaagtgaaaatccacaactctga

SEQ ID NO: 180688 - DNA, 120 bp, Artificial Sequence
  ENSG00000110934_14 (sequence is synthesized)
ggttctcagtaggaatgctggtgctgtctaaagacctggcattaatggaggcggaggagcagccttacgggagggatggagggaggcaggctggggagaagagaacattagactcaggga

SEQ ID NO: 180689 - DNA, 120 bp, Artificial Sequence
  ENSG00000110934_15 (sequence is synthesized)
atatttaattctggttttagcattattagaataagactttatacattaactaaagtggagctttaatcactataaaaagcaaaagtatctatagacacagacacttgcctatacagagac

SEQ ID NO: 180690 - DNA, 120 bp, Artificial Sequence
  ENSG00000110934_16 (sequence is synthesized)
ataaccacacacactcagaggatagtgaacaaatctgtctttgacttacgacccattttgcaagacttaaagccggaagaacacattttcagattgttaaataaagtctgattctgacta

SEQ ID NO: 180691 - DNA, 120 bp, Artificial Sequence
  ENSG00000110934_17 (sequence is synthesized)
aggcggcgcggccggcctcttcgccaagcaggtgcagaagaagtttagcagggcccaggagaagaatattttctttgcttctaacctgagcctctgctctccacctaccaaccctctagt

SEQ ID NO: 180692 - DNA, 120 bp, Artificial Sequence
  ENSG00000110934_18 (sequence is synthesized)
agacaaggcggtttgggaagacatgtcagccagaagaaagagcgagggaagaaagacaagaaggacctgagatagagtttcggttttcctttttttctctctctctttattaagcccaac

SEQ ID NO: 180693 - DNA, 120 bp, Artificial Sequence
  ENSG00000110934_19 (sequence is synthesized)
ctgccttctacaacggagaagttttggttttctaagagctgatggacttagaagcatttggatgaacagctctgcttaccaactgaaatatccctattatcttctaaaagtggagcactg

SEQ ID NO: 180694 - DNA, 120 bp, Artificial Sequence
  ENSG00000110934_20 (sequence is synthesized)
cttaaaggcaaccagctctcccgagttgatttatcagcagaaaactgatggaatgtagatgtagctcctgactttaagagaccacaatggaagggaggttattttctatcatttgaggtc

SEQ ID NO: 180695 - DNA, 120 bp, Artificial Sequence
  ENSG00000110934_21 (sequence is synthesized)
atgtgaaagagaggaggaaaagggaaagagttcgtgtagccagacttcgttacttcacttaccctaacttcaccttgatcctagtttcagcctctctgaagacttacaaatctggtagac

SEQ ID NO: 180696 - DNA, 120 bp, Artificial Sequence
  ENSG00000110934_22 (sequence is synthesized)
ccgagagcagggcctatgggaaggtctagctcgaaacagtgtgggcgagcaggaggtactggagagaaggccacactgtggttgaaaaaaaaaaaaaccctaaaagacaaaacactcatg

SEQ ID NO: 180697 - DNA, 73 bp, Artificial Sequence
  ENSG00000110934_23 (sequence is synthesized)
ggatggctttcatttaggagccttggtggctggttttggcttaagtcctactttgtatttcaaacaaagaact

SEQ ID NO: 180698 - DNA, 120 bp, Artificial Sequence
  ENSG00000110934_24 (sequence is synthesized)
ctgtttctctctttcaagcccggctcgggtgtcctgcctgctttctgcactctatccctaccagttccaggcttagagcctacctggagcaagaaacgcagtgtacatggcggcttcgca

SEQ ID NO: 180699 - DNA, 120 bp, Artificial Sequence
  ENSG00000110934_25 (sequence is synthesized)
atgggtaagagtggcttgagttttacaacttattggcacttactcctgtttgcatctcaacctcagcttagcttctctatccaagaaaataggaaaacaaaggagccagttcacactgtg

SEQ ID NO: 180700 - DNA, 120 bp, Artificial Sequence
  ENSG00000110934_26 (sequence is synthesized)
catttgtgtagcctcagtcactgggtggtaggaagaagctacaactgttaaggtaaaaacaagttttccctaatctgtggatccctctaattttgaccctcttctcctctttaaaacatt

SEQ ID NO: 180701 - DNA, 120 bp, Artificial Sequence
  ENSG00000110934_27 (sequence is synthesized)
atgggaagttttacctcctaaagattggttgttttttaaaacaaacttcatgcagttatacactcttaaactttcccatctaagctctggagtccaaggctttgaccttgtgccctgttc

SEQ ID NO: 180702 - DNA, 120 bp, Artificial Sequence
  ENSG00000110934_28 (sequence is synthesized)
ttaatctctgaatgtatgttcagactcccatagagcagttccttggggtaggggctgtctcttttcttcctctgactagtccccagaatccaacatggtattctaaatacggtgctacaa

SEQ ID NO: 180703 - DNA, 120 bp, Artificial Sequence
  ENSG00000110934_29 (sequence is synthesized)
aaaaggtttttgcagggagaatttgggtatttccctggtaggcagttgttgttgggaagtggagccttcaccagcctctgactctatcctacagaataatgatctcctttgggaagacta

SEQ ID NO: 180704 - DNA, 120 bp, Artificial Sequence
  ENSG00000110934_30 (sequence is synthesized)
tcttgctctgtcaccgaggctggagtacagtggcgtgatccgatctcagctcactgcagtcttcgcctcccaggttcaagcgatccttctacctcagcctcctgcgtagctgggactaca

SEQ ID NO: 180705 - DNA, 120 bp, Artificial Sequence
  ENSG00000110944_0 (sequence is synthesized)
aacaggaagcagcttacaaactcggtgaacaactgagggaaccaaaccagagacgcgctgaacagagagaatcaggctcaaagcaagtggaagtgggcagagattccaccaggactggtg

SEQ ID NO: 180706 - DNA, 120 bp, Artificial Sequence
  ENSG00000110944_1 (sequence is synthesized)
caaggcgcagagccagccagatttgagaagaaggcaaaaagatgctggggagcagagctgtaatgctgctgttgctgctgccctggacagctcagggcagagctgtgcctgggggcagca

SEQ ID NO: 180707 - DNA, 120 bp, Artificial Sequence
  ENSG00000110944_2 (sequence is synthesized)
gccctgcctggactcagtgccagcagctttcacagaagctctgcacactggcctggagtgcacatccactagtgggacacatggatctaagagaagagggagatgaagagactacaaatg

SEQ ID NO: 180708 - DNA, 120 bp, Artificial Sequence
  ENSG00000110944_3 (sequence is synthesized)
atgttccccatatccagtgtggagatggctgtgacccccaaggactcagggacaacagtcagttctgcttgcaaaggatccaccagggtctgattttttatgagaagctgctaggatcgg

SEQ ID NO: 180709 - DNA, 120 bp, Artificial Sequence
  ENSG00000110944_4 (sequence is synthesized)
caactcctgcagcctgagggtcaccactgggagactcagcagattccaagcctcagtcccagccagccatggcagcgtctccttctccgcttcaaaatccttcgcagcctccaggccttt

SEQ ID NO: 180710 - DNA, 120 bp, Artificial Sequence
  ENSG00000110944_5 (sequence is synthesized)
gtggctgtagccgcccgggtctttgcccatggagcagcaaccctgagtccctaaaggcagcagctcaaggatggcactcagatctccatggcccagcaaggccaagataaatctaccacc

SEQ ID NO: 180711 - DNA, 120 bp, Artificial Sequence
  ENSG00000110944_6 (sequence is synthesized)
ccaggcacctgtgagccaacaggttaattagtccattaattttagtgggacctgcatatgttgaaaattaccaatactgactgacatgtgatgctgacctatgataaggttgagtattta

SEQ ID NO: 180712 - DNA, 120 bp, Artificial Sequence
  ENSG00000110944_7 (sequence is synthesized)
ttagatgggaagggaaatttggggattatttatcctcctggggacagtttggggaggattatttattgtatttatattgaattatgtacttttttcaataaagtcttatttttgtggcta

SEQ ID NO: 180713 - DNA, 120 bp, Artificial Sequence
  ENSG00000110944_8 (sequence is synthesized)
tggcgttagaaagtaactctgtttttagtcttcttgaacaaaattacgtctagggctcccagaatggggaccagagatgggaagaacataggagacgttgtacacaagatctaagagaag

SEQ ID NO: 180714 - DNA, 120 bp, Artificial Sequence
  ENSG00000110955_0 (sequence is synthesized)
agtctccacccggactacgccatgttggggtttgtgggtcgggtggccgctgctccggcctccggggccttgcggagactcaccccttcagcgtcgctgcccccagctcagctcttactg

SEQ ID NO: 180715 - DNA, 120 bp, Artificial Sequence
  ENSG00000110955_1 (sequence is synthesized)
cgggccgctccgacggcggtccatcctgtcagggactatgcggcgcaaacatctccttcgccaaaagcaggcgccgccaccgggcgcatcgtggcggtcattggcgcagtggtggacgtc

SEQ ID NO: 180716 - DNA, 120 bp, Artificial Sequence
  ENSG00000110955_2 (sequence is synthesized)
cagtttgatgagggactaccaccaattctaaatgccctggaagtgcaaggcagggagaccagactggttttggaggtggcccagcatttgggtgagagcacagtaaggactattgctatg

SEQ ID NO: 180717 - DNA, 120 bp, Artificial Sequence
  ENSG00000110955_3 (sequence is synthesized)
gatggtacagaaggcttggttagaggccagaaagtactggattctggtgcaccaatcaaaattcctgttggtcctgagactttgggcagaatcatgaatgtcattggagaacctattgat

SEQ ID NO: 180718 - DNA, 120 bp, Artificial Sequence
  ENSG00000110955_4 (sequence is synthesized)
gaaagaggtcccatcaaaaccaaacaatttgctcccattcatgctgaggctccagagttcatggaaatgagtgttgagcaggaaattctggtgactggtatcaaggttgtcgatctgcta

SEQ ID NO: 180719 - DNA, 120 bp, Artificial Sequence
  ENSG00000110955_5 (sequence is synthesized)
gctccctatgccaagggtggcaaaattgggctttttggtggtgctggagttggcaagactgtactgatcatggagttaatcaacaatgtcgccaaagcccatggtggttactctgtgttt

SEQ ID NO: 180720 - DNA, 120 bp, Artificial Sequence
  ENSG00000110955_6 (sequence is synthesized)
gctggtgttggtgagaggacccgtgaaggcaatgatttataccatgaaatgattgaatctggtgttatcaacttaaaagatgccacctctaaggtagcgctggtatatggtcaaatgaat

SEQ ID NO: 180721 - DNA, 120 bp, Artificial Sequence
  ENSG00000110955_7 (sequence is synthesized)
atgtactgctatttattgataacatctttcgcttcacccaggctggttcagaggtgtctgcattattgggccgaatcccttctgctgtgggctatcagcctaccctggccactgacatgg

SEQ ID NO: 180722 - DNA, 120 bp, Artificial Sequence
  ENSG00000110955_8 (sequence is synthesized)
gtactatgcaggaaagaattaccactaccaagaagggatctatcacctctgtacaggctatctatgtgcctgctgatgacttgactgaccctgcccctgctactacgtttgcccatttgg

SEQ ID NO: 180723 - DNA, 120 bp, Artificial Sequence
  ENSG00000110955_9 (sequence is synthesized)
atgctaccactgtactgtcgcgtgccattgctgagctgggcatctatccagctgtggatcctctagactccacctctcgtatcatggatcccaacattgttggcagtgagcattacgatg

SEQ ID NO: 180724 - DNA, 120 bp, Artificial Sequence
  ENSG00000110955_10 (sequence is synthesized)
ttgcccgtggggtgcaaaagatcctgcaggactacaaatccctccaggatatcattgccatcctgggtatggatgaactttctgaggaagacaagttgaccgtgtcccgtgcacggaaaa

SEQ ID NO: 180725 - DNA, 120 bp, Artificial Sequence
  ENSG00000110955_11 (sequence is synthesized)
tacagcgtttcttgtctcagccattccaggttgctgaggtcttcacaggtcatatggggaagctggtacccctgaaggagaccatcaaaggattccagcagattttggcaggtgaatatg

SEQ ID NO: 180726 - DNA, 120 bp, Artificial Sequence
  ENSG00000110955_12 (sequence is synthesized)
accatctcccagaacaggccttctatatggtgggacccattgaagaagctgtggcaaaagctgataagctggctgaagagcattcatcgtgaggggtctttgtcctctgtactgtctctc

SEQ ID NO: 180727 - DNA, 120 bp, Artificial Sequence
  ENSG00000110955_13 (sequence is synthesized)
tccttgcccctaacccaaaaagcttcatttttctgtgtaggctgcacaagagccttgattgaagatatattctttctgaacagtatttaaggtttccaataaaatgtacacccctcagaa

SEQ ID NO: 180728 - DNA, 120 bp, Artificial Sequence
  ENSG00000110955_14 (sequence is synthesized)
ggcgcagtggtggacgtccagtttgatgagggactaccaccaattctaaatgccctggaagtgcaaggcagggagaccagactggttttggaggtggcccagcatttggccattccaggt

SEQ ID NO: 180729 - DNA, 120 bp, Artificial Sequence
  ENSG00000110955_15 (sequence is synthesized)
ccctcataacaccaccaccttctctgccccctagcatgtaactttccctttgttagcttgtccaaattaaaggaatgagaatacttaactcagtcttcttttttctcataggactacaaa

SEQ ID NO: 180730 - DNA, 120 bp, Artificial Sequence
  ENSG00000110955_16 (sequence is synthesized)
aataacatttccaggttttctttttggtagatagtcccatcatttgaaagctaattttgggagggctggattggacgtggtacatatgtttcagttaagcctattttgtacttttcactt

SEQ ID NO: 180731 - DNA, 120 bp, Artificial Sequence
  ENSG00000110955_17 (sequence is synthesized)
aacttgaataggtttttatttcctttctactatagttttgccttactaatataagaagctgtcttttttttttgaactgcatctctaatagggaaaagaaacttgcacacaaaaacgctg

SEQ ID NO: 180732 - DNA, 120 bp, Artificial Sequence
  ENSG00000110955_18 (sequence is synthesized)
acaccttctgagaaaggatctgtggtcgtttctccgatttgggaaccttcagtatgtggcttctctactcctttgtcaggttttacgattatgtatgattactgcaggtagcgctggtat

SEQ ID NO: 180733 - DNA, 120 bp, Artificial Sequence
  ENSG00000110958_0 (sequence is synthesized)
ctcaccacccctcgtttgcacgcacgcacgttcattctccgtcctcgcgccccttttcctacactttcctcttctccccgaccggaggagccgctctttccgcgcggtgcattctggggc

SEQ ID NO: 180734 - DNA, 120 bp, Artificial Sequence
  ENSG00000110958_1 (sequence is synthesized)
ccgaggtcgagcccgccgctgccgccgtcgcctgagggaagcgagaagaggccgcgaccggagagaaaaagcggagtcgccaccggagagaagtcgactccctagcagcagccgccgcca

SEQ ID NO: 180735 - DNA, 120 bp, Artificial Sequence
  ENSG00000110958_2 (sequence is synthesized)
gagaggcccgcccaccagttcgcccgtccccctgccccgttcacaatgcagcctgcttctgcaaagtggtacgatcgaagggactatgtcttcattgaattttgtgttgaagacagtaag

SEQ ID NO: 180736 - DNA, 120 bp, Artificial Sequence
  ENSG00000110958_3 (sequence is synthesized)
gatgttaatgtaaattttgaaaaatccaaacttacattcagttgtctcggaggaagtgataattttaagcatttaaatgaaattgatctttttcactgtattgatccaaatgattccaag

SEQ ID NO: 180737 - DNA, 120 bp, Artificial Sequence
  ENSG00000110958_4 (sequence is synthesized)
cataaaagaacggacagatcaattttatgttgtttacgaaaaggagaatctggccagtcatggccaaggttaacaaaagaaagggcaaagcttaattggcttagtgtcgacttcaataat

SEQ ID NO: 180738 - DNA, 120 bp, Artificial Sequence
  ENSG00000110958_5 (sequence is synthesized)
tggaaagactgggaagatgattcagatgaagacatgtctaattttgatcgtttctctgagatgatgaacaacatgggtggtgatgaggatgtagatttaccagaagtagatggagcagat

SEQ ID NO: 180739 - DNA, 120 bp, Artificial Sequence
  ENSG00000110958_6 (sequence is synthesized)
gatgattcacaagacagtgatgatgaaaaaatgccagatctggagtaaggaatattgtcatcacctggattttgagaaagaaaaataacttctctgcaagatttcataattgagagaatt

SEQ ID NO: 180740 - DNA, 120 bp, Artificial Sequence
  ENSG00000110958_7 (sequence is synthesized)
atgtaccattgtatggggcaattttaagtcagctaaggcaataaccttatgcatgaacatttcccagactttcatgaagctgttgaggtcctaggcaattaatgcagcagttgcgataaa

SEQ ID NO: 180741 - DNA, 120 bp, Artificial Sequence
  ENSG00000110958_8 (sequence is synthesized)
taaaaacatctcacctaagtctccttttcttcataacatagatactgacatgataggaagctctcagcttagggaaagagaataaattttagattatagaacatggattcaaaagtgact

SEQ ID NO: 180742 - DNA, 120 bp, Artificial Sequence
  ENSG00000110958_9 (sequence is synthesized)
ggaacaaattggctgacaccttactggtaacctgctattcttctggtgttatccttcaggattgttccactaaaatttatttttcaaaaaatttacttcacattattctatgtaagtgat

SEQ ID NO: 180743 - DNA, 120 bp, Artificial Sequence
  ENSG00000110958_10 (sequence is synthesized)
gacttgtcagtgttccaggtgtatcttagctaaaactagagaatgccctaacttagatggtttttgaagcctatacaattggtattgtttgacccttaagcttttacatctcttagcatg

SEQ ID NO: 180744 - DNA, 120 bp, Artificial Sequence
  ENSG00000110958_11 (sequence is synthesized)
gaggacgaagaaagctgtacattgttgcttgagagtctgtacatttagtccagatttgtatttgcactgtcagtatggcaaatgagtgaaaaatgtttaatacactattggattttttat

SEQ ID NO: 180745 - DNA, 120 bp, Artificial Sequence
  ENSG00000110958_12 (sequence is synthesized)
ttcctttttttgattcagcttatacccgggctgaaaacctcaatttatgttcatgacagtggggatttttttaaatgtctacattctttctaataaactgttggaagacttcttggctgt

SEQ ID NO: 180746 - DNA, 120 bp, Artificial Sequence
  ENSG00000110958_13 (sequence is synthesized)
ccttttaagtgtctggcttactgtaatttttatgtatttaccatttactggaatggagtttatttgaggaagaatttgggattattcctctgtttgaaaaaagaggcttgctgtaatgtc

SEQ ID NO: 180747 - DNA, 120 bp, Artificial Sequence
  ENSG00000110958_14 (sequence is synthesized)
acaggaaaccttttaaaagtggatctgtaatagcatattgtagatgcactttgcagcagttggaaaagaaagtgttgtgtgatttgattgaaataaaactaaatgtgttgtcctcctaaa

SEQ ID NO: 180748 - DNA, 120 bp, Artificial Sequence
  ENSG00000110958_15 (sequence is synthesized)
gtgagtgcgacaccccgccgagggaaggtcgccgagtgaggccgaggccgcgttgggggctccctggaagcggccccctagcctttctcgcatcggtggtggcagtcgttcctgcctggg

SEQ ID NO: 180749 - DNA, 120 bp, Artificial Sequence
  ENSG00000110958_16 (sequence is synthesized)
ggcgggaggtccaggatccttgttccggttaccgttggcgggtggaggacatttttcctccagatgtctgcttcccccacccctgaaccgttccttggcttccccatgccggaaatccta

SEQ ID NO: 180750 - DNA, 120 bp, Artificial Sequence
  ENSG00000110958_17 (sequence is synthesized)
cttttacccctttggctgtctgggttactcgcctctttcggtaacttcaccctaggccttaagctcccggtagctgctcgccatgcggcgccctgaagcgtgaaccttcgtgggtcgcct

SEQ ID NO: 180751 - DNA, 120 bp, Artificial Sequence
  ENSG00000110958_18 (sequence is synthesized)
ctcggctgcttgggcgctccggttctgttgctttgtggtcccggggccaggccctgagtcgagtgcacctgtggtgggtgccgccaggtgcctggcggagctcctgggagagccccacgc

SEQ ID NO: 180752 - DNA, 120 bp, Artificial Sequence
  ENSG00000110958_19 (sequence is synthesized)
ggacctcgccgtgagctgcaggtactgctaggcaactagaaggaagccatgcccacgccgcaacatacttccctctccagtgtctgggtttcttgagtgtgggtacttccagtccgcctc

SEQ ID NO: 180753 - DNA, 120 bp, Artificial Sequence
  ENSG00000110958_20 (sequence is synthesized)
ctaactccagtctcttgaaaacacgggaggttgccaaaactcagccgcttccctggcagcgaggaggagttaccattgagcaggtagttccgcacgtgtcgactttggaaagatacggac

SEQ ID NO: 180754 - DNA, 120 bp, Artificial Sequence
  ENSG00000110958_21 (sequence is synthesized)
attcttttttctgtttactttcatactattaaatagtaagaaacaacatatttacaaatggttttatatagattcacaattacttcttattttctaaaaaaaaagaaaagggaaaagcaa

SEQ ID NO: 180755 - DNA, 120 bp, Artificial Sequence
  ENSG00000110958_22 (sequence is synthesized)
taaaatgtgcccatttttgacgaatgggggtatctattagggaactggttgtaccgtagaccattcctaaatggattagatttccaaagaatcattgtatagagacattatatattaata

SEQ ID NO: 180756 - DNA, 65 bp, Artificial Sequence
  ENSG00000110958_23 (sequence is synthesized)
tcagtttaggccgggcgaggtggctcatgtctgttatcccagcaggccaggtgggcagagaaaaa

SEQ ID NO: 180757 - DNA, 78 bp, Artificial Sequence
  ENSG00000110958_24 (sequence is synthesized)
gtgggcagcagagcgaggctccatctcaaaaagaaagaagagagtcagtttataggattcacaagacagtgatgatga

SEQ ID NO: 180758 - DNA, 120 bp, Artificial Sequence
  ENSG00000110958_25 (sequence is synthesized)
gctgggaggccccgccctttccgtagatatctctagaaagccgcgccggagcccaaaaacaaggactgcgcacgcgcggcggcaaggcccgggcattttgctgcgtcaccagccgccgcc

SEQ ID NO: 180759 - DNA, 120 bp, Artificial Sequence
  ENSG00000110975_0 (sequence is synthesized)
actccatgccgggtctctagttccagcgcgcctcggctcgctcgcgcggcgggagagttggcgcaaacctcgcggcagccgcagcctcctcgcgcgcctctccttcccctacgccctccg

SEQ ID NO: 180760 - DNA, 120 bp, Artificial Sequence
  ENSG00000110975_1 (sequence is synthesized)
ctcccgccatggggccaacgtggggctcctaagagttgccggctctcagcggcgcaatctccagccaaagtcaccgcgggcggactatggcttagggcgccagaggggttagaggtacgg

SEQ ID NO: 180761 - DNA, 120 bp, Artificial Sequence
  ENSG00000110975_2 (sequence is synthesized)
gaagaggaaaagacggctaactgggaaaaaaagagaaaacgaaagaaaagccaaacgatgagtttccacaaggaggacggagtgaacagtctgtgccagaaggctctgcacatcgtcacc

SEQ ID NO: 180762 - DNA, 120 bp, Artificial Sequence
  ENSG00000110975_3 (sequence is synthesized)
gagctgtgcttcgccggccaggtggagtgggagaagtgctcgggcatcttccctcgggacaggggcagccagggcggaagcagcacagatatttcagtcagcctgttagctgtcgttgtc

SEQ ID NO: 180763 - DNA, 120 bp, Artificial Sequence
  ENSG00000110975_4 (sequence is synthesized)
agcttttgtggactggccttgttggttgtctcactttttgtcttctggaagctgtgttggccatgctggaaaagcaaacctgtgacttccaacatcactacgcttccacagagcatttca

SEQ ID NO: 180764 - DNA, 120 bp, Artificial Sequence
  ENSG00000110975_5 (sequence is synthesized)
agtgctcctactgaagtttttgagactgaagagaaaaaagaaattaaggaaaatgaaaagccagccgtaaaagctattgagcctgcaataaaaatcagccacacttcccctgacatccca

SEQ ID NO: 180765 - DNA, 120 bp, Artificial Sequence
  ENSG00000110975_6 (sequence is synthesized)
gcagaagtccaaactgctttaaaagaacatttaattaaacatgcacgtgtgcaaagacaaattactgagcctacgtcatcaacccgccacagttccttccgaagacacctgccgaggcaa

SEQ ID NO: 180766 - DNA, 120 bp, Artificial Sequence
  ENSG00000110975_7 (sequence is synthesized)
atgcaggtttccagtgttgattttagcatgggcacagaacctgttttacaacgaggagaaacaacaaccagcattgggaggataaagccagaactctacaaacagaaatcagttgactct

SEQ ID NO: 180767 - DNA, 120 bp, Artificial Sequence
  ENSG00000110975_8 (sequence is synthesized)
gagggcaaccaaaacgaagatgtcaaaatctgtgggaaacttaactttaccctccagtatgattatgaaaatgaacttctagttgttaaaattatcaaagctttagatctccctgctaaa

SEQ ID NO: 180768 - DNA, 120 bp, Artificial Sequence
  ENSG00000110975_9 (sequence is synthesized)
gacttcacaggaacttctgacccttatgtgaagatgtatcttcttccagataggaaaaagaaatttcagacccgcgtgcacagaaagactttaaatcctctatttgatgaaacttttcaa

SEQ ID NO: 180769 - DNA, 120 bp, Artificial Sequence
  ENSG00000110975_10 (sequence is synthesized)
tttcctgtagcatatgatcaactaagcaaccgaaaactacatttcagtgtgtatgattttgacagattttctagacatgacatgattggggaagtgattcttgataatttgtttgaagtc

SEQ ID NO: 180770 - DNA, 120 bp, Artificial Sequence
  ENSG00000110975_11 (sequence is synthesized)
tctgatctctccagggaagccacagtatggaaagatattcactgtgctaccacagaaagtatagacctgggtgaaatcatgttttccctttgttacctaccgacggctgggcgtatgaca

SEQ ID NO: 180771 - DNA, 120 bp, Artificial Sequence
  ENSG00000110975_12 (sequence is synthesized)
ttgacagtcattaagtgcagaaatctgaaggcgatggatattactggctcatcagatccttatgtcaaagtgtccctgatgtgtgaaggtcgaagattaaaaaagaggaaaacaactaca

SEQ ID NO: 180772 - DNA, 120 bp, Artificial Sequence
  ENSG00000110975_13 (sequence is synthesized)
aagaaaaacactctaaaccctgtgtacaatgaggccattatttttgacatccctccagagaacgtggaccaggtcagcctctccattgcggtcatggattacgatagggtaggacacaat

SEQ ID NO: 180773 - DNA, 120 bp, Artificial Sequence
  ENSG00000110975_14 (sequence is synthesized)
gaggtcataggagtgtgcagaacaggactggatgctgagggtcttgggcgagaccactggaatgaaatgctggcctatcatcgaaaaccaataacgcactggcacccattgctggagtta

SEQ ID NO: 180774 - DNA, 120 bp, Artificial Sequence
  ENSG00000110975_15 (sequence is synthesized)
cctggccgggcgaccagttttgatagtcaaggatcctgcccttctcctaaaccaccttccacaccataatgcctccaaaatgagaccatgatattaagcatctaggatcacgtgctcatt

SEQ ID NO: 180775 - DNA, 120 bp, Artificial Sequence
  ENSG00000110975_16 (sequence is synthesized)
gaatcagaaaaaaagtggaaggtttggtttcctcatttgaaatatatccgtactaatgaacaaacttgatgtgcacttttttatttgcttttattgttgattttttaactttgaacatca

SEQ ID NO: 180776 - DNA, 120 bp, Artificial Sequence
  ENSG00000110975_17 (sequence is synthesized)
atacattttacttgaatacatatagtccttagttgcataaggcattttatccttcgtatcaaatgcctgttagcacaaagagtgttttactatgttgtaattctttgcatatgaaatgtt

SEQ ID NO: 180777 - DNA, 120 bp, Artificial Sequence
  ENSG00000110975_18 (sequence is synthesized)
cctaaaattaaatatagtttatgctgctattgtataaagtagcacatgtcatatatgtatgggtttgattttgttatactgtgttcatttctagttgtgcaggtggttctgtataaactt

SEQ ID NO: 180778 - DNA, 120 bp, Artificial Sequence
  ENSG00000110975_19 (sequence is synthesized)
aaaaggagattttgaacttaacttacacaacattaaatccttgcacaatcaaattaatgttacttatctgataatacttttctttcattctcagaaaattactttcttggtgaggtttgg

SEQ ID NO: 180779 - DNA, 120 bp, Artificial Sequence
  ENSG00000110975_20 (sequence is synthesized)
ctctgctaaactcaaaacttgtctctcaagcttgttctttaaaatacatagacaaagctgtaaatttaaagaatcattttgaatataaatttaagaagtaatacttattggctgaaaaac

SEQ ID NO: 180780 - DNA, 120 bp, Artificial Sequence
  ENSG00000110975_21 (sequence is synthesized)
ggaggctgagccattgtggctaccattttacactgttttactgtaacattagctcaaatatctgttgcactgttcaactgatatttttaaaattctaataatcttcatctcaaatgtagc

SEQ ID NO: 180781 - DNA, 120 bp, Artificial Sequence
  ENSG00000110975_22 (sequence is synthesized)
attagtatttctaagtgaacagaatcagaagttaatttttaagtgtttgtaaggttctcaagtactgtgacatgtatttttttgtgacgtgtattttttgtgacttgaagctatcatata

SEQ ID NO: 180782 - DNA, 120 bp, Artificial Sequence
  ENSG00000110975_23 (sequence is synthesized)
gatcctgtatttctgatagaccatactaacagacaccaaaggaacaacaacactgtctgtgttcatcaccgtttagattgtacacagtaatggtgactcttaaacccagtcagaagctca

SEQ ID NO: 180783 - DNA, 120 bp, Artificial Sequence
  ENSG00000110975_24 (sequence is synthesized)
agtattttcttaaagaaaggatgatttattttcagcaacatatagaaatatactataaatattaataatacaacttcaatgcttaataataataaacaaattaattctaaaggcccaggc

SEQ ID NO: 180784 - DNA, 120 bp, Artificial Sequence
  ENSG00000110975_25 (sequence is synthesized)
aaaggcccaggcctccagtccttgcatgaaaggcatttgccttcataaggatcaaggttcaggccactacatgtaaaaactatgcaagtgtttttacaagacagaactttcttttaagtc

SEQ ID NO: 180785 - DNA, 120 bp, Artificial Sequence
  ENSG00000110975_26 (sequence is synthesized)
aggtcaacatattttgtcccattttcaggccctgttggaaggtatctatactgaattaccccaaccttacttttaagatgtgtggtatagatagtatatatttcaagcttatttcaaaat

SEQ ID NO: 180786 - DNA, 120 bp, Artificial Sequence
  ENSG00000110975_27 (sequence is synthesized)
tggtggtttttttaaaaaaagaggcaagaaaataaaaacatatttacctggatgagaaaattttatcagcggttatgaaatttttatttttgtaaaatcccattatttctaaatattaaa

SEQ ID NO: 180787 - DNA, 120 bp, Artificial Sequence
  ENSG00000110975_28 (sequence is synthesized)
aaaaagttttaaaagccttgaaattttgttgacatctcttatagtgatggcattactgttaattaagaggtaaatattttgcacattaccattttaaaggcaaacacagttctgcctcag

SEQ ID NO: 180788 - DNA, 120 bp, Artificial Sequence
  ENSG00000110975_29 (sequence is synthesized)
atttttcaaaaatgcttataccaccctaaggaaaacaggtactcctagctaacattttctcattgaaaataatagaagaaagctgtttggaaacatttggctaccttgtcgagcctaaaa

SEQ ID NO: 180789 - DNA, 120 bp, Artificial Sequence
  ENSG00000110975_30 (sequence is synthesized)
gaattatttgctataggtaaaatgaaagatgacacttgcattttgaaattatttgttttattgggaaataaaacttttcaaataggaagacaaaaagttatactattaatagaatgacat

SEQ ID NO: 180790 - DNA, 120 bp, Artificial Sequence
  ENSG00000110975_31 (sequence is synthesized)
ttttggagacagttgttttattagtagatataactgcagcttaaagtaaattagcaattacgtttcctaagtgagtataattattttcacccaaaaacacatttttaaggactttttgtt

SEQ ID NO: 180791 - DNA, 120 bp, Artificial Sequence
  ENSG00000110975_32 (sequence is synthesized)
gattcttagaaactcgcttttctttactccctaaggagaaaaagccaatgcttgtgatgaaaaaatgtgaaccattggccaatcagaagactctaatatgggaattgtagattaaaataa

SEQ ID NO: 180792 - DNA, 120 bp, Artificial Sequence
  ENSG00000110975_33 (sequence is synthesized)
gttttaaaagaattttttaaatgtttccttgaagttagaataaactcatcatgcaaggatatgtgttaatcctgagaaagagatcagcgagaggaaattcaccacaactcatctttcatg

SEQ ID NO: 180793 - DNA, 120 bp, Artificial Sequence
  ENSG00000110975_34 (sequence is synthesized)
taattcaggaggtaggtttatgctcagattaataaggcatgattgttaaaaatgacagttcatattattaaaatgtaatcctaacaattttaatacaacacaccctcactctacacagcc

SEQ ID NO: 180794 - DNA, 120 bp, Artificial Sequence
  ENSG00000110975_35 (sequence is synthesized)
cacacattcatatacacataacttaccatctttctgcttgtaattgaagatgaaatattttcagtttcagtatttaaaataagatttgatattacaaatccccttatttgtgtgggacat

SEQ ID NO: 180795 - DNA, 120 bp, Artificial Sequence
  ENSG00000110975_36 (sequence is synthesized)
cacattttaatgacagtactgacacattatgaagctgcagttcaggtatataatgaacatctaatttcagggacttcttcagggacttaccaaatatcagtctaggaaaaaaaagagtaa

SEQ ID NO: 180796 - DNA, 120 bp, Artificial Sequence
  ENSG00000110975_37 (sequence is synthesized)
actgagcctacgtcatcaacccgagtttctgaagaccacagcatgttgaaaaaaagaaaatgtactcatttttggctgccacaactatatattctttttaaaagtaaatatgtatttagt

SEQ ID NO: 180797 - DNA, 120 bp, Artificial Sequence
  ENSG00000110975_38 (sequence is synthesized)
tagattaagaattagaaacaactcattataagaaaatgtggacctataacatgtttttaattttaatactatagtcactaaaatgtgaaattcatgagactcaaatatccaggtgaaaag

SEQ ID NO: 180798 - DNA, 120 bp, Artificial Sequence
  ENSG00000110975_39 (sequence is synthesized)
taacattcacaattttctgtggaatattgaatttttttgctaatcatgtttctttagaattgtttttaattatgtgcttatgattgagagtacaaaatttcaaaagcatatgaaaattaa

SEQ ID NO: 180799 - DNA, 120 bp, Artificial Sequence
  ENSG00000110975_40 (sequence is synthesized)
caaaagcatatgaaaattaacattggccagccacgtgttgtggctcacttgtgttatctcggcactttgggagactgaggtgagaggattgcgtgagcccagaagttcaagaccagcctg

SEQ ID NO: 180800 - DNA, 120 bp, Artificial Sequence
  ENSG00000110975_41 (sequence is synthesized)
aagacaaattactgagcctacgtcatcaacccgtggttggggaaagaagaagaagaaaagaattttgagcacttgcaattttgtcactatgccaaggcacccttcctgataatccttcac

SEQ ID NO: 180801 - DNA, 120 bp, Artificial Sequence
  ENSG00000110975_42 (sequence is synthesized)
caacctgcatgaaagtttctgaagaccacagcatgttgaaaaaaagaaaatgtactcatttttggctgccacaactatatattctttttaaaaccacagttccttccgaagacacctgcc

SEQ ID NO: 180802 - DNA, 79 bp, Artificial Sequence
  ENSG00000110987_0 (sequence is synthesized)
cgtgtgagagtgcgagtgtctgtgcgcgagtgagtgagcggcgggcgggcgcgagtgtggccgccgcggagcgcgagca

SEQ ID NO: 180803 - DNA, 120 bp, Artificial Sequence
  ENSG00000110987_1 (sequence is synthesized)
ggcgggcgggcgcgagtgtggccgccgcggagcgcgagcaggacccggcgggcgcgctccccagcctccgtctccccgccggaaccatgtcgggcaggtcggttcgagccgagacgagga

SEQ ID NO: 180804 - DNA, 120 bp, Artificial Sequence
  ENSG00000110987_2 (sequence is synthesized)
gccgggccaaagatgatatcaagagggtcatggcggcgatcgagaaagtgcgcaaatgggagaagaaatgggtgaccgttggtgacacatccctacgaatctacaaatgggtccctgtga

SEQ ID NO: 180805 - DNA, 120 bp, Artificial Sequence
  ENSG00000110987_3 (sequence is synthesized)
cggagcccaaggttgatgacaaaaacaagaataagaaaaaaggcaaggacgagaagtgtggctcagaggtgaccactccggagaacagttcctccccagggatgatggacatgcatgacg

SEQ ID NO: 180806 - DNA, 120 bp, Artificial Sequence
  ENSG00000110987_4 (sequence is synthesized)
ataacagcaaccagagctccatcgcagatgcctcccccatcaaacaggagaacagcagcaactccagccccgctccagagcccaactcggctgtgcccagcgacggcaccgaggccaagg

SEQ ID NO: 180807 - DNA, 120 bp, Artificial Sequence
  ENSG00000110987_5 (sequence is synthesized)
tggatgaggcccaggctgatgggaaggagcacccaggagctgaagatgcttctgatgagcagaattcacagtcctcgatggaacattcgatgaacagctcagagaaagtagatcggcagc

SEQ ID NO: 180808 - DNA, 120 bp, Artificial Sequence
  ENSG00000110987_6 (sequence is synthesized)
cgtctggagactcgggtctggccgcagagacgtctgcaatctctcaggatttggaaggagtgccaccctctaaaaagatgaaactggaggcctctcaacaaaactccgaagagatgtaga

SEQ ID NO: 180809 - DNA, 120 bp, Artificial Sequence
  ENSG00000110987_7 (sequence is synthesized)
cgatgctttaaagcctccgatccatgttccatggaaggtacatcagcaattaattctagagcaactttgccccagcgattcctcttgggtgcgaacagaactactaacgtttcaagttta

SEQ ID NO: 180810 - DNA, 120 bp, Artificial Sequence
  ENSG00000110987_8 (sequence is synthesized)
ccaagtgcaaatccaagaagacccagaacggcgtcacttctcagacactgaagaactctgctgtgaagcaaaacactcaaacctttaagggactgtccttggggaggcaggcggggctga

SEQ ID NO: 180811 - DNA, 120 bp, Artificial Sequence
  ENSG00000110987_9 (sequence is synthesized)
cagctcaggagtgtctgcacactgtctcggaagccaggattccatttgtgttgctgctgtattttccccccacttctctatgtaacgatataagctatcggagggtggtaccgatcagga

SEQ ID NO: 180812 - DNA, 120 bp, Artificial Sequence
  ENSG00000110987_10 (sequence is synthesized)
ttgtgcccttgaggtgacctctggcatgtatcctggtggttcttacatccccctctgcaaagtgccctcttggtttggttcgggcggcggctgccaccctactcaccgctctcctccctg

SEQ ID NO: 180813 - DNA, 120 bp, Artificial Sequence
  ENSG00000110987_11 (sequence is synthesized)
ccccaggacttcatcggagcaggcagggtggagcgaaggagctccttagcccacctggtttgcaggtgcagggggaccttaggcacgccccaagcaccaggcaccagggcccaaggacgc

SEQ ID NO: 180814 - DNA, 120 bp, Artificial Sequence
  ENSG00000110987_12 (sequence is synthesized)
gcaggtgttggggcacagtccccaagggctcggccccttggatcaggctgggcactcgctgtgctctcccctccttggggcgtttaggactgggcgtctccaagcccaccatggcccaga

SEQ ID NO: 180815 - DNA, 120 bp, Artificial Sequence
  ENSG00000110987_13 (sequence is synthesized)
tggacgtgcaaagcccttggaattttctggcacttcctctctattgcccccaccaccaccacccccatcactgctttctcccagacctccgaatacgaaatggcttctctggctgactgc

SEQ ID NO: 180816 - DNA, 120 bp, Artificial Sequence
  ENSG00000110987_14 (sequence is synthesized)
aaggctgtctccttaaggcactgagtgggccggggaggctgggagccggcggcaggattagctggtgctgaactttctctcataggacgtcgcttggatttcaaatccacggtcacctgc

SEQ ID NO: 180817 - DNA, 120 bp, Artificial Sequence
  ENSG00000110987_15 (sequence is synthesized)
tgccctttgcctcccccgacgccccagcctgtgccccggagaggcaggatcgcagtggtcagaatccacgtgctttcctattctcaggctgttctgactctgagccaacagctggaccgt

SEQ ID NO: 180818 - DNA, 120 bp, Artificial Sequence
  ENSG00000110987_16 (sequence is synthesized)
gtctcatccccagaacatgccgtctgtccccaccggggagtgggccttgatggccgggcctcgaaggccacaaacaaggcgtcgaggaattggaaagatttgcacaccctccagaaagga

SEQ ID NO: 180819 - DNA, 120 bp, Artificial Sequence
  ENSG00000110987_17 (sequence is synthesized)
gagacgcaatctcccctccctcccatcccccaccttcgctggaacagcttcctctcactgaacggagacgcccccttggacgaactgcctaatcgtttggttctgaggcctggtttgctc

SEQ ID NO: 180820 - DNA, 120 bp, Artificial Sequence
  ENSG00000110987_18 (sequence is synthesized)
ttaattaatatatgaactcctcagaccttaaaccttttcctaagctttctttactgcactggagttctgactccctttgagttgtgtgttactgggggtggggtggggtcatgggttttg

SEQ ID NO: 180821 - DNA, 120 bp, Artificial Sequence
  ENSG00000110987_19 (sequence is synthesized)
ttgtttttgggggctaattggtgcatattcaggtaccacctttgacgtgtggctctttctcctgaccatcatgggaagtgtctgctggattccattttctaagagtttctgagggtgagg

SEQ ID NO: 180822 - DNA, 120 bp, Artificial Sequence
  ENSG00000110987_20 (sequence is synthesized)
ctcttatttttttttttaagggatcctgtctatttcctgcacttcgagaagaatcaaaatgttcctgaatttcaaatacctcatgcaaaatgtctcctgaaataagggaaaaaaaaaaaa

SEQ ID NO: 180823 - DNA, 120 bp, Artificial Sequence
  ENSG00000110987_21 (sequence is synthesized)
cccagcctagatttctttttattatgatcaaatacacataaaattgaccattgtaaccatttaaaagtgtacaattcagcgtcattaagtacattcacattgttctgcaaccatcaccac

SEQ ID NO: 180824 - DNA, 120 bp, Artificial Sequence
  ENSG00000110987_22 (sequence is synthesized)
tatctcattccagaactttcctatcactccgaaaggaaaccccacatccgttagcagtcactcctgctctccctcccccttgcctctggcaaccaccaatctgatatctgtctttatgga

SEQ ID NO: 180825 - DNA, 120 bp, Artificial Sequence
  ENSG00000110987_23 (sequence is synthesized)
ttcgcctagttgtagatatctcccgcaaatggacttacgcatatttatccttttgtgactggcttctttcacttagcgtgtttcaaggttcacccatgttgtagcatgtattcattccct

SEQ ID NO: 180826 - DNA, 120 bp, Artificial Sequence
  ENSG00000110987_24 (sequence is synthesized)
tttatggctgaataatattccattgtgtggatagacacatttatctgttcctcagtcactatttgaattctgacataatattttcctattttaaattttaagatacatttttttaaagtt

SEQ ID NO: 180827 - DNA, 120 bp, Artificial Sequence
  ENSG00000110987_25 (sequence is synthesized)
tcatgtggcccaaagcacatacctattgatctcacatatctctgtgagatctgttttatgacctgctgttgcatattttcccagaaaattctcggaacgattctctgaagtccttctttc

SEQ ID NO: 180828 - DNA, 71 bp, Artificial Sequence
  ENSG00000110987_26 (sequence is synthesized)
ccagaaaattctcggaacgattctctgaagtccttctttctctttctcttttttttctttttctttctctc

SEQ ID NO: 180829 - DNA, 85 bp, Artificial Sequence
  ENSG00000110987_27 (sequence is synthesized)
tgcacctctgcctcccaggttcaagcattttcctgcctcagcctcccgcgtagctcagattacaggcctgcaccaccacgcccag

SEQ ID NO: 180830 - DNA, 71 bp, Artificial Sequence
  ENSG00000110987_28 (sequence is synthesized)
cagtggctggatctctactcccgagtagctgcgattacaggagcccaccaccgcgcccggctaatttttgt

SEQ ID NO: 180831 - DNA, 63 bp, Artificial Sequence
  ENSG00000110987_29 (sequence is synthesized)
ggttcaagcgagtctcctgcctcagactcccgagtagctgcgattacaggaccatgttggcca

SEQ ID NO: 180832 - DNA, 120 bp, Artificial Sequence
  ENSG00000110987_30 (sequence is synthesized)
acaggcatgagccaccgcgcccggccagtatttgttcttttcttcatttttcacgtcaggagactgcgtttcagaatagtaaaaacaaatgcctaggaaaaggcctgcggtctctccatt

SEQ ID NO: 180833 - DNA, 120 bp, Artificial Sequence
  ENSG00000110987_31 (sequence is synthesized)
gaaaaggcctgcggtctctccatttccacagtagcgtgttccccaaagaccaaaccctcaggggaaacgtctagaatgagtaacaacttaaggctgcaaccttaaactttcccaggactc

SEQ ID NO: 180834 - DNA, 120 bp, Artificial Sequence
  ENSG00000110987_32 (sequence is synthesized)
agtttccccagctgtgaaatggctgctgtcgggctgtcatctccaggcccggggcgctgacatttgggccactctcggtctccctcttcattctgggcgcgcattagctctggtccggcc

SEQ ID NO: 180835 - DNA, 120 bp, Artificial Sequence
  ENSG00000110987_33 (sequence is synthesized)
ggttccgctgcagctgaacagcaagatgcggcacccaggttaccctgatcatcgcagatttctccccggggctctgttctgaggcctcaaaagtgctccttgtagatgggaccaggggtc

SEQ ID NO: 180836 - DNA, 120 bp, Artificial Sequence
  ENSG00000110987_34 (sequence is synthesized)
atttgggcagtagcagcgcctggtctcagtctggtactgaagtcaggaatggcttaaggtgaaatcgtggtcctctggtgaagctcagcgaagaccccctcgccttgtttatgacaagag

SEQ ID NO: 180837 - DNA, 120 bp, Artificial Sequence
  ENSG00000110987_35 (sequence is synthesized)
aacttctgggggcgggaggaagagtccctgttacgatgctgatcatcattgagcttttgctgagcagaaaactctttagtactcaaggtcgagagtctctggtggtctgcctggcaccag

SEQ ID NO: 180838 - DNA, 120 bp, Artificial Sequence
  ENSG00000110987_36 (sequence is synthesized)
gcaccttcctacaaccctagttttccaaaaggacaaagcctggggcaggcgacgtcctagctcgcatttgaacagggccgcgggccagcagagatgcgcgatgcccaactctttccaaga

SEQ ID NO: 180839 - DNA, 120 bp, Artificial Sequence
  ENSG00000110987_37 (sequence is synthesized)
gcacctcgcgtcccgaaccggtgccttcaactcggagaagtcaagagacccgcaagaaacttgcacgactgcacccgccgccgcgctctgggggctgggcaggggcagctgggctggctc

SEQ ID NO: 180840 - DNA, 120 bp, Artificial Sequence
  ENSG00000110987_38 (sequence is synthesized)
gctcccggggaacgcgacccccccgcgccccgcagaccggctgtctcccatggacccctcggcacctgcagcctccgaggaagggtcagcgcgcgtgtccgcacgcccgcccccaccgcg

SEQ ID NO: 180841 - DNA, 80 bp, Artificial Sequence
  ENSG00000110987_39 (sequence is synthesized)
cagagccgggggtcgccgtgcgcccttcgccacctccccaggagggcgtccggggcgtcccctctgggggcgcaggaggc

SEQ ID NO: 180842 - DNA, 120 bp, Artificial Sequence
  ENSG00000110987_40 (sequence is synthesized)
aaaaaaaatccttgtacttatcaattttgccccttaggcagtcagttttgttgagaactgtgtcctgcatcctggcgcagaacctacctgatgcggttcctctccacgcatctcgaggcg

SEQ ID NO: 180843 - DNA, 120 bp, Artificial Sequence
  ENSG00000110987_41 (sequence is synthesized)
gcgttacctccagattccgtagagttagagtcacatttttctttgcagcgaaactccatcttggtgagagatgaatttggatatttatttccttctctgtttttgggaaacgagaggcta

SEQ ID NO: 180844 - DNA, 120 bp, Artificial Sequence
  ENSG00000110987_42 (sequence is synthesized)
caaccaagacagctgaaggagaatgaaacacacacatccacagaaacagagaggcgtaggtggccctgccgttgaccgcagcctctctggacaggcaaggggagttggcgcaggtgagga

SEQ ID NO: 180845 - DNA, 120 bp, Artificial Sequence
  ENSG00000110987_43 (sequence is synthesized)
ctcagacgacgtccaccgtcccaaggctgtcactagtatttctctgaagtgcctgaaggtaggaatgggccggcgattgggaccagctgggccccaccacggccacgccaggcaaagcgc

SEQ ID NO: 180846 - DNA, 120 bp, Artificial Sequence
  ENSG00000110987_44 (sequence is synthesized)
cagcagccctgcactccacgctggccaagaaggccttccacgcagaatgacaagactgcaaaaatccgatgtgcttccttccctggcgcagtcgctcctcgagccgctgccccccaccca

SEQ ID NO: 180847 - DNA, 120 bp, Artificial Sequence
  ENSG00000110987_45 (sequence is synthesized)
ccctgcacccctcgccctccccccaccacagaatctaagacctttcagcttcgagccagggggcgggggatcccgagcaaaagccttccgtggacatcaggccccgtggcctcaagggct

SEQ ID NO: 180848 - DNA, 120 bp, Artificial Sequence
  ENSG00000110987_46 (sequence is synthesized)
cccagggcaaacctaattccccccaaaacgtgaagtcggggaagctgcggctacacattccacaaagtgctggcacttacacccacaacccggaaggctgtggaccgattcctctagggt

SEQ ID NO: 180849 - DNA, 120 bp, Artificial Sequence
  ENSG00000110987_47 (sequence is synthesized)
ggtgacctcccattagcaaacggtgtcatggtttggaatgttcattatcgccaagaacctggttagaggcataaagaccttttttcaccgttacctaattttttcccctttcaagaattt

SEQ ID NO: 180850 - DNA, 120 bp, Artificial Sequence
  ENSG00000110987_48 (sequence is synthesized)
tttttttttttggtgtgttgtacagcagtataatttttcacttatttattccatcagtagatatggtttgtacaatgtacaattgtttcatttcagaaaataaaaatttcaaatcatgaa

SEQ ID NO: 180851 - DNA, 120 bp, Artificial Sequence
  ENSG00000110987_49 (sequence is synthesized)
atgaggcccaggctgatgggaaggagcacccaggagctgaaggtatgtggcctctggaggtggggctctgacggcctccctgtaaccggccttcaggcagtctgtggctaggtgttccag

SEQ ID NO: 180852 - DNA, 120 bp, Artificial Sequence
  ENSG00000110987_50 (sequence is synthesized)
gaggccctgtcatgtgccagccccagcaaggagacagtaaagagaggtgacacctggagtacatggtctcgtgggggaattaaaaaaatcagacaggccaggtgcagtggctcatgcctg

SEQ ID NO: 180853 - DNA, 120 bp, Artificial Sequence
  ENSG00000111011_0 (sequence is synthesized)
agtctgaggcgaagcttcggagcggccggtactgttgaaagcgacaagtggaggcgccgctctagcggccgggactctgaactatggcggctagtgatacagagcgagatggactagccc

SEQ ID NO: 180854 - DNA, 120 bp, Artificial Sequence
  ENSG00000111011_1 (sequence is synthesized)
cagaaaagacatcaccagatagagataagaaaaaagagcagtcagaagtatctgtttctcctagagcttcaaaacatcattattcaagatcacgatcaaggtcaagagaaagaaaacgaa

SEQ ID NO: 180855 - DNA, 120 bp, Artificial Sequence
  ENSG00000111011_2 (sequence is synthesized)
agtcagataatgaaggaagaaaacacaggagccggagcagaagcaaagagggaagaagacatgaatccaaagataaatcctctaagaaacataagtctgaggaacataatgacaaagaac

SEQ ID NO: 180856 - DNA, 120 bp, Artificial Sequence
  ENSG00000111011_3 (sequence is synthesized)
attcttctgataaaggaagagagcgactaaattcatctgaaaatggtgaggacaggcacaaacgcaaagaaagaaagtcatcaagaggcagaagtcactcaagatctaggtctcgtgaaa

SEQ ID NO: 180857 - DNA, 120 bp, Artificial Sequence
  ENSG00000111011_4 (sequence is synthesized)
gacgccatcgtagtagaagcagggagcggaagaagtctcgatccaggagtagggagcggaagaaatcgagatccagaagcagagagaggaagaaatcgagatccagaagcagggaaagaa

SEQ ID NO: 180858 - DNA, 120 bp, Artificial Sequence
  ENSG00000111011_5 (sequence is synthesized)
aacggcggatcaggtctcgttcccgctcaagatcaagacacaggcataggactagaagcaggagtaggacaaggagtaggagtcgagatagaaagaagagaattgaaaagccgagaagat

SEQ ID NO: 180859 - DNA, 120 bp, Artificial Sequence
  ENSG00000111011_6 (sequence is synthesized)
ttagcagaagtttaagccggactccaagtccacctcccttcagaggcagaaacacagcaatggatgcacaggaagctttagctagaaggttggaaagggcaaagaaattacaagaacagc

SEQ ID NO: 180860 - DNA, 120 bp, Artificial Sequence
  ENSG00000111011_7 (sequence is synthesized)
gagaaaaggaaatggttgaaaaacaaaaacaacaagaaatagctgcagctgcagctactggaggttctgttctcaatgttgctgccctgttggcatcaggaacacaagtaacacctcaga

SEQ ID NO: 180861 - DNA, 120 bp, Artificial Sequence
  ENSG00000111011_8 (sequence is synthesized)
tagccatggcagctcagatggcagccctgcaagctaaagctttggcagagacaggaatagctgttcctagctactataacccagccgctgttaatccaatgaaatttgctgaacaagaga

SEQ ID NO: 180862 - DNA, 120 bp, Artificial Sequence
  ENSG00000111011_9 (sequence is synthesized)
aaaaaaggaaaatgctttggcagggcaagaaagaaggggacaaatcccaatctgctgaaatatgggaaaaattgaattttggaaacaaggaccaaaatgtcaaatttaggaaattgatgg

SEQ ID NO: 180863 - DNA, 120 bp, Artificial Sequence
  ENSG00000111011_10 (sequence is synthesized)
gtattaagagtgaagatgaagctggatgtagctcagttgatgaagaaagttacaagactctgaagcagcaggaagaagtatttcgaaatttagatgctcagtatgaaatggcaagatcac

SEQ ID NO: 180864 - DNA, 120 bp, Artificial Sequence
  ENSG00000111011_11 (sequence is synthesized)
aaacccacacacaaagaggaatgggtttgggtttcacatcttcaatgcgaggaatggatgcagtttgaaaatgatcacacttgtaaagtttgggacttatagacttcttgttctgatgtc

SEQ ID NO: 180865 - DNA, 120 bp, Artificial Sequence
  ENSG00000111011_12 (sequence is synthesized)
acgtccttgttcaccaaacagctagcactctagcttgcatgggtgttgcattgactttaatttattgaaaaatacaaatttttgtaaatatcagatcagtgatactggtgttagtgttgt

SEQ ID NO: 180866 - DNA, 120 bp, Artificial Sequence
  ENSG00000111011_13 (sequence is synthesized)
aatcaggttaaacccacttccattaaacttgacaggactatagaaggataatattttttagttcatgaattctacttttcaaatatataaaagctgcaggtggggataaaatctcataca

SEQ ID NO: 180867 - DNA, 120 bp, Artificial Sequence
  ENSG00000111011_14 (sequence is synthesized)
tagaagatctggccatttggtacataatccagcacagataagctgggtggtaatgataataaaaatggttttctcaaaactggtgttaatttaagttacctgggatgtttctttgaattt

SEQ ID NO: 180868 - DNA, 120 bp, Artificial Sequence
  ENSG00000111011_15 (sequence is synthesized)
gttttatagtttctgtagcatttggcaattgctgttagaaaacactagctagaaatcccctccccaccaccctttttaaggccagttaactatactacagtcaataccgtggtgagcaaa

SEQ ID NO: 180869 - DNA, 120 bp, Artificial Sequence
  ENSG00000111011_16 (sequence is synthesized)
aatgtaaaaggtggaaggagaaaacttactaaaatagtatgttttcctattataagggacagacttggtattcagtatttgtcaaatattacatgtgttattcaggagatagattaatgc

SEQ ID NO: 180870 - DNA, 120 bp, Artificial Sequence
  ENSG00000111011_17 (sequence is synthesized)
attaaagggatgtaagcacttttattttaataaagtgccttataacaagttctttgcatgctttttgctcattatccctttgaagtcttctccagcatagactataaaatattaaaatat

SEQ ID NO: 180871 - DNA, 87 bp, Artificial Sequence
  ENSG00000111011_18 (sequence is synthesized)
ctctgttgcctaaactagcctctgccccccaggttcaagcaattctcccacctccacctcccatgtaactgggattacaggcgtacc

SEQ ID NO: 180872 - DNA, 83 bp, Artificial Sequence
  ENSG00000111011_19 (sequence is synthesized)
cactgccagagcctctgccccccaggttcaagcaattctcccacctccacctcccatgtaactgggattacaggcgtaccacc

SEQ ID NO: 180873 - DNA, 120 bp, Artificial Sequence
  ENSG00000111011_20 (sequence is synthesized)
aaagtgccgggattataggcgtgagccactgcagccagcctagaaaatgttttgttactagattgaacataaatctggagccaaggggtggggggggcctgcaaaacttgaagttaattt

SEQ ID NO: 180874 - DNA, 120 bp, Artificial Sequence
  ENSG00000111011_21 (sequence is synthesized)
gggggcctgcaaaacttgaagttaatttacttcagttacagcaaagtaataaggtttggctttcctttgaaaaatcctttggaaaacatcacagaatgagagcacattacaatcagggaa

SEQ ID NO: 180875 - DNA, 120 bp, Artificial Sequence
  ENSG00000111011_22 (sequence is synthesized)
gactacaggaataagattgacagccttattttaaaagctggaattaagtcttgccaacttgctcattaggtattttttttatacatgaaaatgaagtaatggggtgttttcttttttttt

SEQ ID NO: 180876 - DNA, 87 bp, Artificial Sequence
  ENSG00000111011_23 (sequence is synthesized)
atacatgaaaatgaagtaatggggtgttttctttttttttgctttctgtcctaggctggagtgcagtgcattgcagcaggctccttg

SEQ ID NO: 180877 - DNA, 86 bp, Artificial Sequence
  ENSG00000111011_24 (sequence is synthesized)
agtacctgggaccacaggtgctcaccaacacacctagcttgtttttaattttttataaagacaaggtcttgttacgttgcccaggt

SEQ ID NO: 180878 - DNA, 120 bp, Artificial Sequence
  ENSG00000111011_25 (sequence is synthesized)
cacttcacctagccagattgtaagatttttaatgtactttaataaacctttcattttcccagagcacagaaattctatggcaaaatggcttttcaccgtgtttcagtgacaaatctaagc

SEQ ID NO: 180879 - DNA, 120 bp, Artificial Sequence
  ENSG00000111011_26 (sequence is synthesized)
cttctaaggaaatgacactatggatccttcatttcgtgatcatcaacatttttcaattaagctctgcctttttaaatcaatcttattaaaaatgttcatgaccttctaaggcagtgtgga

SEQ ID NO: 180880 - DNA, 120 bp, Artificial Sequence
  ENSG00000111011_27 (sequence is synthesized)
cgcaaaagcttcctgtgtgtctacagttattttaggagctgaccatacatgatgagtgatacagcctgtactttgctcatctagagcagcactgtccaataaaatatgtgtgtatatgta

SEQ ID NO: 180881 - DNA, 120 bp, Artificial Sequence
  ENSG00000111011_28 (sequence is synthesized)
cgggtctctcgcgcgagcgatttagtctgaggcgaagcttcggagcggccggtactgttgaaagcgacaagtggaggcgccgctctagcggccgggactctgaactatggcgcccagagc

SEQ ID NO: 180882 - DNA, 120 bp, Artificial Sequence
  ENSG00000111011_29 (sequence is synthesized)
acatgtgaggagaggcagaccatattttgcagcagcactgtgccaaggggctgttttcattaaagagggttaatgacattaagatgaggttctcacttaggctagtgatacagagcgaga

SEQ ID NO: 180883 - DNA, 120 bp, Artificial Sequence
  ENSG00000111011_30 (sequence is synthesized)
aggaagaaaacacaggagccggagcagaagcaaagagcgtgcttatgcgcgaagagactgaactgaagacgctgcagactcagatagcaaaataataagcctacttcatgataagaacca

SEQ ID NO: 180884 - DNA, 120 bp, Artificial Sequence
  ENSG00000111011_31 (sequence is synthesized)
gaataggtactttaaaatacttataaagtgtctggtagaaagatttgtatgaatataagacgttgtcaaggtaagtacaaaacttgaaatttaaaaggtttattgggttataaaataagc

SEQ ID NO: 180885 - DNA, 120 bp, Artificial Sequence
  ENSG00000111011_32 (sequence is synthesized)
atgattttgattcatcatttttgaagaagatgtttatgtgaaaagtaccttcaaaactttaattttattatattgtgaaaatattcacaataaaaatttcatatgaagaatatgattggt

SEQ ID NO: 180886 - DNA, 120 bp, Artificial Sequence
  ENSG00000111011_33 (sequence is synthesized)
ttttttaggcctgtcacacagagcttccattaatctgaggtcccgagtctcctggtgcctgacagttgctcaggatttttaaacagcaatcatctttacatagcaataccctagatatct

SEQ ID NO: 180887 - DNA, 120 bp, Artificial Sequence
  ENSG00000111011_34 (sequence is synthesized)
gtgcgctgctttttccttatgaacgataacaggagttctcttttcttttgcaaactagttcagtttccctaatagtagtattgaattttgaaataaaggtttgagtgagggacagctgaa

SEQ ID NO: 180888 - DNA, 120 bp, Artificial Sequence
  ENSG00000111011_35 (sequence is synthesized)
aaggtggcggtgacaccaaaacttgaggaaaaagaaaggcagcagctgtattgcaaaggagttacttgttcacccacctgagaagacaaagaatgagccaataaggaagtgtagaagtag

SEQ ID NO: 180889 - DNA, 120 bp, Artificial Sequence
  ENSG00000111011_36 (sequence is synthesized)
tagccagaaagggagaagagtcttgtgggggctgggtaagggactcctaaaacaagagtgggcagggacttcacctcttcccgtaatggaagctctgttaaatttttaatttaggagagt

SEQ ID NO: 180890 - DNA, 120 bp, Artificial Sequence
  ENSG00000111011_37 (sequence is synthesized)
gaaaaactggtttgaaataaactttaaaacctttagaagtttaaccacttaagacttttccagtctgcctcgttatagcaaaaccaaggaaaatttcttttctaagctcctatagagaac

SEQ ID NO: 180891 - DNA, 120 bp, Artificial Sequence
  ENSG00000111011_38 (sequence is synthesized)
tggcaatgaaactaaaatttaattgtgtctccaggtctcttatttttctgcaaataataaattatgtactatgatcattttcagataaatcatcatgcatgttccaaaatgattggccaa

SEQ ID NO: 180892 - DNA, 120 bp, Artificial Sequence
  ENSG00000111011_39 (sequence is synthesized)
gaaacatgctatggccttttgggagacagtagtgtcttattacagtggaaaagtggtagcgtgggcatcagaaaaacatggggaaggttcagctcacccatgtagctttgtaactttaga

SEQ ID NO: 180893 - DNA, 120 bp, Artificial Sequence
  ENSG00000111011_40 (sequence is synthesized)
tcttagttatacataaaataaggggattaagttagaggatcttagtttccttccagaattaaaatttagtgattcagagatgtctaggattttaaactttcactacaagatgaatttgac

SEQ ID NO: 180894 - DNA, 120 bp, Artificial Sequence
  ENSG00000111011_41 (sequence is synthesized)
agatcttcctgtagggaactgtagtatgtagcacttctactttggtatttggtaggatgagacttgatcatgcagttaatttgagctgagtctctgaatgcacatgtgaaggccttggtc

SEQ ID NO: 180895 - DNA, 120 bp, Artificial Sequence
  ENSG00000111011_42 (sequence is synthesized)
tttttaaagtgtgggggcagtatgtattgtgtgatggcatgtggattgttatacctagtttggtttctttaaaattgaaacatacagttgccatttctaccctaggtacatgaagtgtaa

SEQ ID NO: 180896 - DNA, 120 bp, Artificial Sequence
  ENSG00000111011_43 (sequence is synthesized)
tactcctctaagcctattgggatactgcaagatgaaaagtgattgcttcacagtttagacattgggaggaaaatcaagagctgtcttttagaggatgtagcaggcagtataactgtaaaa

SEQ ID NO: 180897 - DNA, 120 bp, Artificial Sequence
  ENSG00000111011_44 (sequence is synthesized)
gggacactgcatctctgtgtaaaataatttgaaattatagaaaatattagtacttagtaataattatatttagctacctaattgaaatgcgtttctggtgcactttttgtgtcattatct

SEQ ID NO: 180898 - DNA, 120 bp, Artificial Sequence
  ENSG00000111011_45 (sequence is synthesized)
ccattacttacttaaacttaacattatgtaatctggatttagaagttgatgtatatacatggtctgtattcttttagataaacataagggattcctcttttgtctggcataatggctttt

SEQ ID NO: 180899 - DNA, 120 bp, Artificial Sequence
  ENSG00000111011_46 (sequence is synthesized)
caatatttcaactttaaaaatcattgtttctgttgtattgaaaatattttggggaggaactacattttgggtgtttatagtaaaaaaaatagtaattacatctgcaacatttgggtgatg

SEQ ID NO: 180900 - DNA, 120 bp, Artificial Sequence
  ENSG00000111011_47 (sequence is synthesized)
tgaaactagatcttttttttatttgccacacactcctaaggttactaatgttgcatcacaacatttttgtctactgatacccatactaactctctttgttgcactattttcctgaaagaa

SEQ ID NO: 180901 - DNA, 120 bp, Artificial Sequence
  ENSG00000111011_48 (sequence is synthesized)
gcgcgagcgatttagtctgaggcgaagcttcggagcggccggtactgttgaaagcgacaagtggaggcgccgctctagcggccgggactctgaactatggcgaactttaatcatttgttt

SEQ ID NO: 180902 - DNA, 120 bp, Artificial Sequence
  ENSG00000111011_49 (sequence is synthesized)
atgttgcccaggctggtaacacagtgtaacctgatgtgcttccctgggaacccagcctgacagaaactgcagctgaacagcagcaaaagtgttggaaagggcaaagaaattacaagaaca

SEQ ID NO: 180903 - DNA, 120 bp, Artificial Sequence
  ENSG00000111011_50 (sequence is synthesized)
agcacatttagttacttggaaagcaggcattctgatttattgattgtggggggctatcttccctccctttgtccctcttttaagaaattgaaaacatttaaaatgtaattaagaacttta

SEQ ID NO: 180904 - DNA, 120 bp, Artificial Sequence
  ENSG00000111011_51 (sequence is synthesized)
tgatacttgtttaaaatttgttaaaatacaatacccccatttattgtacttgatatttggtattcattttctggactaactttcctaaaggaggaagttctctaatgtgattcctcctgc

SEQ ID NO: 180905 - DNA, 120 bp, Artificial Sequence
  ENSG00000111011_52 (sequence is synthesized)
tgaagactatcgattccctatttattcaatccagattccgtttgatgttatacgtgaaaagtccataaactgtttctgtaaagggccagacggtaaatatttttggctttgtgggccatg

SEQ ID NO: 180906 - DNA, 120 bp, Artificial Sequence
  ENSG00000111011_53 (sequence is synthesized)
tgcagtctctgtcacattctttcccaggctggaggggcagtggcgcaatcttagctcacttcaacgtctgcctcatgggttcaagccattctcctgtctcaacctcctgagttgctggga

SEQ ID NO: 180907 - DNA, 120 bp, Artificial Sequence
  ENSG00000111011_54 (sequence is synthesized)
tcaagccattctcctgtctcaacctcctgagttgctgggattacaggcacgccccaccactcttggctaatttttgtgtttttagtagaagcagggttttaccatgttggctaggctggt

SEQ ID NO: 180908 - DNA, 120 bp, Artificial Sequence
  ENSG00000111011_55 (sequence is synthesized)
aagtgctaggattacaggcatgagccacaacactggcgttttaagtgcctttagttttaacagttcagtctttacagtgctatttactgaagttatttattaaatatgcctaaaatagtt

SEQ ID NO: 180909 - DNA, 120 bp, Artificial Sequence
  ENSG00000111011_56 (sequence is synthesized)
agttttaaaaaacgtaaaaaaccattcctagctcaaggccatacagaaacagaatgaggaccatagcttgccaacccttcctaagtaatcaattccccaggtgtatcaattattttattt

SEQ ID NO: 180910 - DNA, 120 bp, Artificial Sequence
  ENSG00000111011_57 (sequence is synthesized)
tcatgttatcttctctggtcagatagccgagcattgtctaccttctgcattagttgaaacttgtaaaatttatattgtaataattacttataaaatgctttaaagcagaaacaacttaat

SEQ ID NO: 180911 - DNA, 120 bp, Artificial Sequence
  ENSG00000111011_58 (sequence is synthesized)
aaatgctttggcagggcaagaaagaaggggtaagttctcttattctgcttttctgtcgtttattcctaattagtaattgcttagaaaaacaaatttgggttgaaaaatattactttcggc

SEQ ID NO: 180912 - DNA, 120 bp, Artificial Sequence
  ENSG00000111011_59 (sequence is synthesized)
ttaactttgtaagaacctggggtggccagacgcgggtggcttatgcctttaatcccagcactttgggatgccaagtgagcggatcagttgaggtaaggagtccaagaccagcctggccaa

SEQ ID NO: 180913 - DNA, 78 bp, Artificial Sequence
  ENSG00000111011_60 (sequence is synthesized)
tgaggcaggagaatcgcttgagcctgggatgcagagcctacatacagtgcccaccaccatgccagtcatccaggctag

SEQ ID NO: 180914 - DNA, 120 bp, Artificial Sequence
  ENSG00000111011_61 (sequence is synthesized)
cttgtatttctttgctttgtggtttcttaagtcttgaaataattaaacttacattgattgaatgctatccatggtgtttttttttttaatttagacattgttgagagatttcatgtccta

SEQ ID NO: 180915 - DNA, 120 bp, Artificial Sequence
  ENSG00000111011_62 (sequence is synthesized)
aaaaatatttaaattttacatattttaaagttcagtgtttgttaacaggacaaatcccaatctgctgaaatatgggaaaaattgaattttggaaacaaggaccaaaatgtcaaatttagg

SEQ ID NO: 180916 - DNA, 120 bp, Artificial Sequence
  ENSG00000111011_63 (sequence is synthesized)
aaattgatgggtattaaggtgagtttcacatgtgccaggggatctttgtattagctattagccctcctgcactgttcttccctcattttcttagttctggtctttactcaggtgtcagcg

SEQ ID NO: 180917 - DNA, 120 bp, Artificial Sequence
  ENSG00000111011_64 (sequence is synthesized)
tttttgagttctttcccaccaccttttgtgaaataacaagcaatcccattctgaaacatttccatctcccctacccactgtcctccctacacacacacttggagagagagagagagacgg

SEQ ID NO: 180918 - DNA, 120 bp, Artificial Sequence
  ENSG00000111011_65 (sequence is synthesized)
ggttttgctctgcttgctctgtcacttgggctggagtacagtggtgcagtcatacctcactgcagccttaaacttcgaggctcaagcagtccttccacctcggcctctcaaagccctgga

SEQ ID NO: 180919 - DNA, 120 bp, Artificial Sequence
  ENSG00000111011_66 (sequence is synthesized)
tcacagttctgagccactgcgcccagcctccatccccattttctactttactttcctctgtggcatttataccctgacatcttctacatattatgttttttccaacctactaaactgaag

SEQ ID NO: 180920 - DNA, 120 bp, Artificial Sequence
  ENSG00000111011_67 (sequence is synthesized)
tggatgcacaggaagctttagctagaaggtgtgtatatttcttaattcatttgttccagttcgcctttaaataaatgctcaattgtgtggataagatgaattctttcagtaagagaatga

SEQ ID NO: 180921 - DNA, 120 bp, Artificial Sequence
  ENSG00000111011_68 (sequence is synthesized)
ttcacatactttagtaatatggtggcatatttgtgatctagaactatgtaaatagtttaattctcatcctaaacatttgcacaactataagattgagatgtctacaatttctgttttttc

SEQ ID NO: 180922 - DNA, 120 bp, Artificial Sequence
  ENSG00000111011_69 (sequence is synthesized)
cttcatgatttaactgatttcatttttctcaaatttagactcccaaatattttcagtttgcatttgaaactttttttttttgagtcttaaatctggttcaagaactattattttctcatc

SEQ ID NO: 180923 - DNA, 120 bp, Artificial Sequence
  ENSG00000111011_70 (sequence is synthesized)
atttagtctgaggcgaagcttcggagcggccggtactgttgaaagcgacaagtggaggcgccgctctagcggccgggactctgaactatggcggaaggtattgctgaaagggagtgaaaa

SEQ ID NO: 180924 - DNA, 120 bp, Artificial Sequence
  ENSG00000111012_0 (sequence is synthesized)
agaagcgctttctttcgcgagcaccctgaaccagaccatgacccagaccctcaagtacgcctccagagtgttccatcgcgtccgctgggcgcccgagttgggcgcctccctaggctaccg

SEQ ID NO: 180925 - DNA, 120 bp, Artificial Sequence
  ENSG00000111012_1 (sequence is synthesized)
agagtaccactcagcacgccggagcttggcagacatcccaggcccctctacgcccagctttctggccgaacttttctgcaagggggggctgtcgaggctacacgagctgcaggtgcaggg

SEQ ID NO: 180926 - DNA, 120 bp, Artificial Sequence
  ENSG00000111012_2 (sequence is synthesized)
cgccgcgcacttcgggccggtgtggctagccagctttgggacagtgcgcaccgtgtacgtggctgcccctgcactcgtcgaggagctgctgcgacaggagggaccccggcccgagcgctg

SEQ ID NO: 180927 - DNA, 120 bp, Artificial Sequence
  ENSG00000111012_3 (sequence is synthesized)
cagcttctcgccctggacggagcaccgccgctgccgccagcgggcttgcggactgctcactgcggaaggcgaagaatggcaaaggctccgcagtctcctggccccgctcctcctccggcc

SEQ ID NO: 180928 - DNA, 120 bp, Artificial Sequence
  ENSG00000111012_4 (sequence is synthesized)
tcaagcggccgcccgctacgccggaaccctgaacaacgtagtctgcgaccttgtgcggcgtctgaggcgccagcggggacgtggcacggggccgcccgccctggttcgggacgtggcggg

SEQ ID NO: 180929 - DNA, 120 bp, Artificial Sequence
  ENSG00000111012_5 (sequence is synthesized)
ggaattttacaagttcggactggaaggcatcgccgcggttctgctcggctcgcgcttgggctgcctggaggctcaagtgccacccgacacggagaccttcatccgcgctgtgggctcggt

SEQ ID NO: 180930 - DNA, 120 bp, Artificial Sequence
  ENSG00000111012_6 (sequence is synthesized)
gtttgtgtccacgctgttgaccatggcgatgccccactggctgcgccaccttgtgcctgggccctggggccgcctctgccgagactgggaccagatgtttgcatttgctcagaggcacgt

SEQ ID NO: 180931 - DNA, 120 bp, Artificial Sequence
  ENSG00000111012_7 (sequence is synthesized)
ggagcggcgagaggcagaggcagccatgaggaacggaggacagcccgagaaggacctggagtctggggcgcacctgacccacttcctgttccgggaagagttgcctgcccagtccatcct

SEQ ID NO: 180932 - DNA, 120 bp, Artificial Sequence
  ENSG00000111012_8 (sequence is synthesized)
gggaaatgtgacagagttgctattggcgggagtggacacggtgtccaacacgctctcttgggctctgtatgagctctcccggcaccccgaagtccagacagcactccactcagagatcac

SEQ ID NO: 180933 - DNA, 120 bp, Artificial Sequence
  ENSG00000111012_9 (sequence is synthesized)
gactgtaccctgtggtacctggaaattctcgtgtcccagacaaagacattcatgtgggtgactatattatccccaaaaatacgctggtcactctgtgtcactatgccacttcaagggacc

SEQ ID NO: 180934 - DNA, 120 bp, Artificial Sequence
  ENSG00000111012_10 (sequence is synthesized)
ctgcccagttcccagagccaaattcttttcgtccagctcgctggctgggggagggtcccaccccccacccatttgcatctcttccctttggctttggcaagcgcagctgtatggggagac

SEQ ID NO: 180935 - DNA, 120 bp, Artificial Sequence
  ENSG00000111012_11 (sequence is synthesized)
gcctggcagagcttgaattgcaaatggctttggcccagatcctaacacattttgaggtgcagcctgagccaggtgcggccccagttagacccaagacccggactgtcctggtacctgaaa

SEQ ID NO: 180936 - DNA, 120 bp, Artificial Sequence
  ENSG00000111012_12 (sequence is synthesized)
ggagcatcaacctacagtttttggacagatagtcccatggaaagagactgtcatcatcaccctttcattcatcatagggataagattttttgtaggcacaagaccaaggtatacatcttc

SEQ ID NO: 180937 - DNA, 120 bp, Artificial Sequence
  ENSG00000111012_13 (sequence is synthesized)
ccctaatgcctatctgaccaaactggatagaaccaccatagtgaagtgtgaggcggccctgaccaatgtgtgaagtatgcacttggcctgactcaggaagccaggtgagaaaaccatggt

SEQ ID NO: 180938 - DNA, 120 bp, Artificial Sequence
  ENSG00000111012_14 (sequence is synthesized)
ctctctgcttgcttggcccttctgatcatgtatgcatcccccaaggatgaaatcagattttaactaataatgctggatggcctgaggaaagattcaactgcctctctttttgggctttca

SEQ ID NO: 180939 - DNA, 120 bp, Artificial Sequence
  ENSG00000111012_15 (sequence is synthesized)
tagtgttcattgatgctgctggctaagcatttatcaaagcataagctcagtaactgtgcatctggtctgtacctggttggtccttcgtctttgcatgtaagctctttgagaggaagggtg

SEQ ID NO: 180940 - DNA, 120 bp, Artificial Sequence
  ENSG00000111012_16 (sequence is synthesized)
aagccttatttgttttttatgtcccctgccagggcctgtctctgactaggtgtcaccatacacattcttagattgaatctgaaccatgtggcagaagggataagcagcttacttagtagg

SEQ ID NO: 180941 - DNA, 120 bp, Artificial Sequence
  ENSG00000111012_17 (sequence is synthesized)
ctctgtctacccccttccttctttgtcttgcccctaggaaggtgaatctgccctagcctggtttacggtttcttataactctcctttgctctctggccactattaagtgggtttgcccca

SEQ ID NO: 180942 - DNA, 120 bp, Artificial Sequence
  ENSG00000111012_18 (sequence is synthesized)
tcacttagttctcaggcagagacatctttgggcctgtccctgcccaggcctctggctttttatattgaaaatttttaaatattcacaaattttagaataaatcaaatattccattcttga

SEQ ID NO: 180943 - DNA, 120 bp, Artificial Sequence
  ENSG00000111012_19 (sequence is synthesized)
actgaggactcgtcctgagatggacagtccagacatggaacttttagagatttctcctcgaccgagatgatcagagaggtcctgaatgtctgccttgcacaaagttccggttttgcccat

SEQ ID NO: 180944 - DNA, 120 bp, Artificial Sequence
  ENSG00000111012_20 (sequence is synthesized)
cacactcaaactttctagggatgggaaatgagagaggaggagtttgcagtatcaaaggcatacactagttgggcacccgagaaagagcagaagctccctattcccaagcccagtcaacgc

SEQ ID NO: 180945 - DNA, 120 bp, Artificial Sequence
  ENSG00000111012_21 (sequence is synthesized)
ggcaggaaatgagtaaagaggaagggggctggaagacaggcgcaggccggtgcaggtttccgtaccccaagggggcagacgcaatccctctcctggccaccgcagccgaacgcgctcctt

SEQ ID NO: 180946 - DNA, 120 bp, Artificial Sequence
  ENSG00000111012_22 (sequence is synthesized)
cactgcagccagtcccgtcgagccgtccccaccttcccgatgcgcactctctcctcaaccctgcagggaaggcgaagaatggcaaaggctccgcagtctcctggccccgctcctcctccg

SEQ ID NO: 180947 - DNA, 120 bp, Artificial Sequence
  ENSG00000111012_23 (sequence is synthesized)
acagagttgctattggcgggagtggacacggtgaggttctccctccgtgctgtgagccggttccagggcttagcctccgcagactccggctccatttttctgttgcaggggatccattat

SEQ ID NO: 180948 - DNA, 120 bp, Artificial Sequence
  ENSG00000111012_24 (sequence is synthesized)
ggccacgtagaccagcttggcttagcaccctgtagccccagactcttccataatctgcaccctctgctgggttctcacacccaacacctctcttgctttcacatgtttttcaggtgtcca

SEQ ID NO: 180949 - DNA, 120 bp, Artificial Sequence
  ENSG00000111046_0 (sequence is synthesized)
actaattaaatgccatctgggtggttcctctgggtttttgagtccatcacccagttcagatcgagtcagaggccaaggaggagaacatgatgatggacctttttgaaactggctcctatt

SEQ ID NO: 180950 - DNA, 120 bp, Artificial Sequence
  ENSG00000111046_1 (sequence is synthesized)
tcttctacttggatggggaaaatgttactctgcagccattagaagtggcagaaggctctcctttgtatccagggagtgatggtaccttgtccccctgccaggaccaaatgcccccggaag

SEQ ID NO: 180951 - DNA, 120 bp, Artificial Sequence
  ENSG00000111046_2 (sequence is synthesized)
cggggagcgacagcagcggagaggaacatgtcctggcgcccccgggcctgcagcctccacactgccccggccagtgtctgatctgggcttgcaagacctgcaagagaaaatctgccccca

SEQ ID NO: 180952 - DNA, 120 bp, Artificial Sequence
  ENSG00000111046_3 (sequence is synthesized)
ctgaccggcgaaaagccgccaccctgcgcgaaaggaggaggctaaagaaaatcaacgaggccttcgaggcactgaagcggcgaactgtggccaaccccaaccagaggctgcccaaggtgg

SEQ ID NO: 180953 - DNA, 120 bp, Artificial Sequence
  ENSG00000111046_4 (sequence is synthesized)
agattctgcggagcgccatcagctatattgagcggctgcaggacctgctgcaccggctggatcagcaggagaagatgcaggagctgggggtggaccccttcagctacagacccaaacaag

SEQ ID NO: 180954 - DNA, 120 bp, Artificial Sequence
  ENSG00000111046_5 (sequence is synthesized)
agggtgcggatttcctgcgcacctgcagctcccagtggccaagtgtttccgatcattccagggggctcgtgataacggctaaggaaggaggagcaagtattgattcgtcagcctcgagta

SEQ ID NO: 180955 - DNA, 120 bp, Artificial Sequence
  ENSG00000111046_6 (sequence is synthesized)
gccttcgatgcctttcttccatcgtggacagtatttcctcggaggaacgcaaactcccctgcgtggaggaagtggtggagaagtaactgagcctgcgcttgagaccttctccacgcagca

SEQ ID NO: 180956 - DNA, 120 bp, Artificial Sequence
  ENSG00000111046_7 (sequence is synthesized)
ggaagatcccaccgacccttcctggcctaatcctttagattaggtcacattacattaacatttaggaacccagaccgaaaagttgctgaaagggaaggagacacattcacaaagaaacgt

SEQ ID NO: 180957 - DNA, 120 bp, Artificial Sequence
  ENSG00000111046_8 (sequence is synthesized)
tgcgaaaattgcgaaatctgttgtgcatgctcaaatgaaaacgcctttcggctttgggcttttatttttttggaactgcgagtggcttaggtctagcctcattttgtttttgtttggttg

SEQ ID NO: 180958 - DNA, 120 bp, Artificial Sequence
  ENSG00000111046_9 (sequence is synthesized)
gttttatactatattaacttttattacggtgatccttttgtgccatgttcaaaagaagttcattcctgtctaaagtgggaaagttgcatttaatgttaggggtatttaatgtatttttgt

SEQ ID NO: 180959 - DNA, 120 bp, Artificial Sequence
  ENSG00000111046_10 (sequence is synthesized)
aaatagtttaacactttctttttttacgtaaacctgaaatatattttaaatgtggaatgatgtatataaaatgtgcgaggatcctggtattgtaatattaaaaagaagtttctatatgaa

SEQ ID NO: 180960 - DNA, 120 bp, Artificial Sequence
  ENSG00000111049_0 (sequence is synthesized)
acccaggccaacaggcgtctgcccttgttaattaccggagcgacagactagggagctccgcccgggatttgcccatcggcggaggcgccaggctcccgtttctccccatccctctcgctg

SEQ ID NO: 180961 - DNA, 120 bp, Artificial Sequence
  ENSG00000111049_1 (sequence is synthesized)
ccgtccaggtgcaccgcctgcctctcagcaggatggacgtgatggatggctgccagttctcaccttctgagtacttctacgacggctcctgcataccgtcccccgagggtgaatttgggg

SEQ ID NO: 180962 - DNA, 120 bp, Artificial Sequence
  ENSG00000111049_2 (sequence is synthesized)
acgagtttgtgccgcgagtggctgccttcggagcgcacaaagcagagctgcagggctcagatgaggacgagcacgtgcgagcgcctaccggccaccaccaggctggtcactgcctcatgt

SEQ ID NO: 180963 - DNA, 120 bp, Artificial Sequence
  ENSG00000111049_3 (sequence is synthesized)
gggcctgcaaagcctgcaagaggaagtccaccaccatggatcggcggaaggcagccactatgcgcgagcggaggcgcctgaagaaggtcaaccaggctttcgaaaccctcaagaggtgta

SEQ ID NO: 180964 - DNA, 120 bp, Artificial Sequence
  ENSG00000111049_4 (sequence is synthesized)
ccacgaccaaccccaaccagaggctgcccaaggtggagatcctcaggaatgccatccgctacatcgagagcctgcaggagttgctgagagagcaggtggagaactactatagcctgccgg

SEQ ID NO: 180965 - DNA, 120 bp, Artificial Sequence
  ENSG00000111049_5 (sequence is synthesized)
gacagagctgctcggagcccaccagccccacctccaactgctctgatggcatgcccgaatgtaacagtcctgtctggtccagaaagagcagtacttttgacagcatctactgtcctgatg

SEQ ID NO: 180966 - DNA, 120 bp, Artificial Sequence
  ENSG00000111049_6 (sequence is synthesized)
tctccaggatctggcttctctctctccagttgccagcaccgattcacagcctgcaactccaggggcttctagttccaggcttatctatcatgtgctatgaactaattttctggtctatat

SEQ ID NO: 180967 - DNA, 120 bp, Artificial Sequence
  ENSG00000111049_7 (sequence is synthesized)
gacttcttccaggagggcctaatacacaggaagaagaaggcttcaaaaagtcccaaaccaagacaacatgtacataaagatttcttttcagttgtaaatttgtaaagattaccttgccac

SEQ ID NO: 180968 - DNA, 120 bp, Artificial Sequence
  ENSG00000111049_8 (sequence is synthesized)
tttataagaaagtgtatttaactaaaaagtcatcattgcaaataatactttcttcttctttattattctttgcttagatattaatacatagttccagtaatactatttctgatagggggc

SEQ ID NO: 180969 - DNA, 120 bp, Artificial Sequence
  ENSG00000111049_9 (sequence is synthesized)
cattgattgagggtagcttgttgcaatgcttaacttatatatacatatatatatattataaatattgctcatcaaaatgtctctggtgtttagagctttatttttttctttaaaacatta

SEQ ID NO: 180970 - DNA, 120 bp, Artificial Sequence
  ENSG00000111049_10 (sequence is synthesized)
ctctggtgtttagagctttatttttttctttaaaacattaaaacagctgagaatcagttaaatggaattttaaatatatttaactatttcttttctctttaatcctttagttatattgta

SEQ ID NO: 180971 - DNA, 120 bp, Artificial Sequence
  ENSG00000111049_11 (sequence is synthesized)
tcttttcttgtaagaaatgtatcttttaaatgtaagcacaaaatagtactttgtggatcatttcaagatataagaaattttggaaattccaccataaataaaattttttactacaagaaa

SEQ ID NO: 180972 - DNA, 120 bp, Artificial Sequence
  ENSG00000111052_0 (sequence is synthesized)
cggatacctgctcagctccgcaccgcaactgaagatctgccgccgcggaacagttgcgtctccatctggctaccaacccacccaagctttcttctccaccaccaccaccttccttccttc

SEQ ID NO: 180973 - DNA, 120 bp, Artificial Sequence
  ENSG00000111052_1 (sequence is synthesized)
cccctcctccccctcctttccgtcttccctctccacccccgcccccaatctcctcctttttttctcactacgagcggttgctgatgctgaagccgagcgtcacttcggctcccacggcag

SEQ ID NO: 180974 - DNA, 120 bp, Artificial Sequence
  ENSG00000111052_2 (sequence is synthesized)
acatggcgacattgacagtggtccagccgctcaccctggacagagatgttgcaagagcaattgaattactggaaaaactacaggaatctggagaagtaccagtgcacaagctacaatccc

SEQ ID NO: 180975 - DNA, 120 bp, Artificial Sequence
  ENSG00000111052_3 (sequence is synthesized)
tcaaaaaagtgcttcagagtgagttttgtacagctattcgagaggtgtatcaatatatgcatgaaacgataactgttaatggctgtcccgaattccgtgcgagggcaacagcaaaggcaa

SEQ ID NO: 180976 - DNA, 120 bp, Artificial Sequence
  ENSG00000111052_4 (sequence is synthesized)
cagttgcagcttttgcagctagtgaaggccactcccaccctcgagtagttgaactgccaaagactgatgaaggccttggttttaatgtgatgggaggaaaggagcaaaattcccccattt

SEQ ID NO: 180977 - DNA, 120 bp, Artificial Sequence
  ENSG00000111052_5 (sequence is synthesized)
atatctctcgcataattcctggaggggtggctgaaagacacggaggcctcaaaagaggagaccagctgctatcagtgaacggagtgagtgtggaaggagaacaccatgagaaagctgtgg

SEQ ID NO: 180978 - DNA, 120 bp, Artificial Sequence
  ENSG00000111052_6 (sequence is synthesized)
aactactcaaggctgctaaagacagcgtcaagctggtggtgcgatacaccccaaaagttctggaagaaatggaggctcgctttgaaaagctacgaacagccaggcgtcggcagcagcagc

SEQ ID NO: 180979 - DNA, 120 bp, Artificial Sequence
  ENSG00000111052_7 (sequence is synthesized)
aattgctaattcagcagcagcaacagcagcagcagcaacaaacacaacaaaaccacatgtcataggcccttgagggaaagctacttgatcaaacatccgatagtcacaaatttgaaaccg

SEQ ID NO: 180980 - DNA, 120 bp, Artificial Sequence
  ENSG00000111052_8 (sequence is synthesized)
tgcttcagaatcccagcacatagtaaaagacaacactgataattatacctgtcaagaagctgtgaacacatggtgtataaattctttaccaaggcaactcaacaccttctttctctgggc

SEQ ID NO: 180981 - DNA, 120 bp, Artificial Sequence
  ENSG00000111052_9 (sequence is synthesized)
ttgaaccgccactgctcacgtgggctttacatacattgaccttccattcactgcagtgggaattctcagtgtgcagagggagaggttttctagtctgcaaactgaaacagtgtaagaaga

SEQ ID NO: 180982 - DNA, 120 bp, Artificial Sequence
  ENSG00000111052_10 (sequence is synthesized)
ataaagtctatgacttttaaataaatcaccagggccaagattgagtgaatcttgggtccatagcttttccagatattagcaaacccctcattaggctataattcaaactgcatcagttca

SEQ ID NO: 180983 - DNA, 120 bp, Artificial Sequence
  ENSG00000111052_11 (sequence is synthesized)
aagtgaaacctacacattgctccttaccctcacctgctccacaatccatagtgctgagttgtctgaattggaattccagttaattgcaagttcaacctgttttcctcttgaaaatcgcaa

SEQ ID NO: 180984 - DNA, 120 bp, Artificial Sequence
  ENSG00000111052_12 (sequence is synthesized)
ggtatcatactatatttatattttcttcaggttctagaagcaatcggctttttcttttgtttccatgaattttattatgcattaatagaatggaccaattttagctcaacttttagtttg

SEQ ID NO: 180985 - DNA, 120 bp, Artificial Sequence
  ENSG00000111052_13 (sequence is synthesized)
ttagaagcaagtgtaggaactctagcactgtagtttttaattattgcttgtatctattattattaattccaacagagtataatgtatatttattctataaaatatatattatcagagtgc

SEQ ID NO: 180986 - DNA, 120 bp, Artificial Sequence
  ENSG00000111052_14 (sequence is synthesized)
atttgttacaacttaggttcttttcttaccaagtattaagaatctagtaagagaatactagcaaaggacctagccctgtgaacagattctcgtatgttatatacataaacccactctcaa

SEQ ID NO: 180987 - DNA, 120 bp, Artificial Sequence
  ENSG00000111052_15 (sequence is synthesized)
tattttttgagttttatactttttgattgataaacactgaagaaatctaaactctactcacactgatgtgctgtcatagaagcctatttcatattttaaagcttagcaaaactaaattat

SEQ ID NO: 180988 - DNA, 120 bp, Artificial Sequence
  ENSG00000111052_16 (sequence is synthesized)
atgtgcatatatattcaaatatttgtgtcacacaaagtttaggtcaatttccccaaatataaaccagatatttttggcactctcagataaacaagtattatttctcttataattgggcag

SEQ ID NO: 180989 - DNA, 120 bp, Artificial Sequence
  ENSG00000111052_17 (sequence is synthesized)
gtggaaaccagtgatatcaatattgtgaatggcagatgctgcttcctctagaaaaataaaataaaatcaccaactttaatatattcccataggtaaatagacaatgagatatcatttttc

SEQ ID NO: 180990 - DNA, 120 bp, Artificial Sequence
  ENSG00000111052_18 (sequence is synthesized)
agaaaatatcattcactggaaaataatctgttataactacatttacaggtcataatttttggtttatggtaaatctaggcacctaagtctgattttactttatgaaataaataggaagca

SEQ ID NO: 180991 - DNA, 120 bp, Artificial Sequence
  ENSG00000111052_19 (sequence is synthesized)
ataattgtttgggcatttgaataccttaagcacataaatgaacctaagaaaagaataattgcttagttgaagtattcaaaatagatcagtaaaccacaggcaaatatttgaatgttccct

SEQ ID NO: 180992 - DNA, 120 bp, Artificial Sequence
  ENSG00000111052_20 (sequence is synthesized)
tttctcaaatacagaaattgattccccaagatacaatacaatttgacacttcagataatcccccaaaatagaaatgtatgaagctcagtttagactgtcttcttgaaaataaaacaaaac

SEQ ID NO: 180993 - DNA, 120 bp, Artificial Sequence
  ENSG00000111052_21 (sequence is synthesized)
caatcaaaactacccagcacattttattatgccctgttgggtgatagtattgtcaataccaggttttccctgctcttcacaatgcatccctcaccagaggaaaaacagcaagaaaactag

SEQ ID NO: 180994 - DNA, 120 bp, Artificial Sequence
  ENSG00000111052_22 (sequence is synthesized)
gacatttgctaatttcaacaatacacccctgtgataacagattcccatccttgaatacatatcattttttactagagagaacgggggtggtgaggtgggggcagttaggaccctgtatgt

SEQ ID NO: 180995 - DNA, 120 bp, Artificial Sequence
  ENSG00000111052_23 (sequence is synthesized)
tatgtaaaatagatttacaaaaaggacaagcatgataaaagggaatgaatggagacgatgtattattcagtttgaaagagatagttcacatttttataagaaaaatttaataaaacatat

SEQ ID NO: 180996 - DNA, 120 bp, Artificial Sequence
  ENSG00000111052_24 (sequence is synthesized)
attttagttatcatttaacaaagatatattaaagctattcaggcaatgccacaggattctcatgaagggaaatcactgaacccttgtcatgagaaaatggtcatttcaacacatttcaat

SEQ ID NO: 180997 - DNA, 120 bp, Artificial Sequence
  ENSG00000111052_25 (sequence is synthesized)
agtgttacagaaacaactatcaaatggtaagatagtttacatttgtgttttctagaaacctttgtatttatgcttcatttggttaatgttaagtgctgataaaggcataccagattgttt

SEQ ID NO: 180998 - DNA, 120 bp, Artificial Sequence
  ENSG00000111052_26 (sequence is synthesized)
gtcaaagtaaagaagcaatccatcacacctaggacatctaaggatggattatacgtcagagtggtctcatatacaaatgaccattttccttcagtaaaatcttgttggttgaaatgtaag

SEQ ID NO: 180999 - DNA, 120 bp, Artificial Sequence
  ENSG00000111052_27 (sequence is synthesized)
tcttttcctaaagttttaatcagaggtagccatcactaagacttaagccacctgtggttctcttaagtttcactgaagccagaagaaggaaattaccacaacttgtattatactaattat

SEQ ID NO: 181000 - DNA, 120 bp, Artificial Sequence
  ENSG00000111052_28 (sequence is synthesized)
cttcattattaacgatcatattagagccactgacatgtcccaaattatattaaaataaaaacctgcattgctctgacatgaagctcaattcaatgtaataaacaaattaggtattaaacg

SEQ ID NO: 181001 - DNA, 120 bp, Artificial Sequence
  ENSG00000111052_29 (sequence is synthesized)
ttataatttaaaaaacttctacgatatcaccagaaatcctggtgaaatttaattttttcccttttttaggtcagtggccggtgggatagatttttctaaactttttcctgctatgatttt

SEQ ID NO: 181002 - DNA, 120 bp, Artificial Sequence
  ENSG00000111052_30 (sequence is synthesized)
gaaggcaaatacatagagcacagttcagtaaaagagtttccaagccttttcactggagcatttacattttgattctgttgtcatttgaaatagaacatctgcagggagataatgagctta

SEQ ID NO: 181003 - DNA, 120 bp, Artificial Sequence
  ENSG00000111052_31 (sequence is synthesized)
agttacaattgactttggaaagaataacagacttttgtgtttcctcaatcatgtagtcaatagggaattctccagttatgtgaacaatcacagtcttttaagacaatacttagatctaaa

SEQ ID NO: 181004 - DNA, 120 bp, Artificial Sequence
  ENSG00000111052_32 (sequence is synthesized)
tgcaaaatctagcatgcagaggctttttaaggattttagactgtctccaaagaacttggctcgagatggattacacagatttacaaatgcagttttcaactgtgacatcaaactgatctt

SEQ ID NO: 181005 - DNA, 120 bp, Artificial Sequence
  ENSG00000111052_33 (sequence is synthesized)
atctcatttcatgttactcaactgtgcccgtaggaccccaagaggtggaatattttgtctacattattttaaacatctatagatatgtgtggatgtgtgaataatgcctaaatttctcat

SEQ ID NO: 181006 - DNA, 120 bp, Artificial Sequence
  ENSG00000111052_34 (sequence is synthesized)
cttttaactagtttgtttttatcatacagacacagcctgttcataagaccagctttagacaacttagaactcaatgctctgaagattcagggaggccaacatagaaaaagatcttccaaa

SEQ ID NO: 181007 - DNA, 120 bp, Artificial Sequence
  ENSG00000111052_35 (sequence is synthesized)
atatggggtggtccaacccatctcatccctctctagctggaaaactatagagaaagggctgtgactgccttgaccactgcctggcacaatgtaggcactcggtatttgttggatgaataa

SEQ ID NO: 181008 - DNA, 120 bp, Artificial Sequence
  ENSG00000111052_36 (sequence is synthesized)
gtggctgaatcagtgaatagacaaaaaacatggattttgccttctgaaaatctcacaaattttaccagcttatattatactgattgtcactatgatttctaagtttcatggttagaacca

SEQ ID NO: 181009 - DNA, 120 bp, Artificial Sequence
  ENSG00000111052_37 (sequence is synthesized)
tattttgagtctatataaaaactttttagatgtatgaatttgaaatttcattaattactttaaaggcttcaaagatttgaggacatttgaacagtggataaggaacaatgtttggggata

SEQ ID NO: 181010 - DNA, 120 bp, Artificial Sequence
  ENSG00000111052_38 (sequence is synthesized)
cagagtttttatgctgagttgaactcaacctttctagttctttatacaagcttcctgaattatctggcaggaatgattcaaacataaaaccccatttttaaattttataaaagatatttt

SEQ ID NO: 181011 - DNA, 120 bp, Artificial Sequence
  ENSG00000111052_39 (sequence is synthesized)
catttttatataaaaagatcatcaggcatattatcccctttgatatttattaacaaccattctctaagaaattcataataattggagacaccatccctaaatctcttcctattttcaaaa

SEQ ID NO: 181012 - DNA, 120 bp, Artificial Sequence
  ENSG00000111052_40 (sequence is synthesized)
gatcatttatcctttcatatttgattcctggaatacactaagctgaagtttaatcacatacttactcagatgtttccatgtgtttattcatttaacaaatacttattgtgtacctagtgc

SEQ ID NO: 181013 - DNA, 120 bp, Artificial Sequence
  ENSG00000111052_41 (sequence is synthesized)
atgctaggttctggaaatgcaacagcaaacaagacagacacaatccctcttggaggttactgtgagaaactctccaacatttactctagcaataactagagagtttactgtccattgggt

SEQ ID NO: 181014 - DNA, 120 bp, Artificial Sequence
  ENSG00000111052_42 (sequence is synthesized)
cctcttcacacctgatagaaaaaataaaattcctcaccccatggaagtcatgaaatactccctgcacagatttgtgtgagcttgcttttctaaaaccactgctcaaaaatgctgcttagt

SEQ ID NO: 181015 - DNA, 120 bp, Artificial Sequence
  ENSG00000111052_43 (sequence is synthesized)
ttatctataaaccacggttataccccagtgaggtaggtaagtaatttattcataactaacatttatgcagctctattttctagccactgtgctgagtgcttttatggactatctcaccaa

SEQ ID NO: 181016 - DNA, 120 bp, Artificial Sequence
  ENSG00000111052_44 (sequence is synthesized)
atcccttcaacaactctattcagtaggttccattttatagatacaaaaactgaagcacagatatattatgtgacttgtccaaggtcacacagctagcaggtggaactgggatttgaaccc

SEQ ID NO: 181017 - DNA, 120 bp, Artificial Sequence
  ENSG00000111052_45 (sequence is synthesized)
atgcaatctgacacaagagttcatgtgtctaatcattatctgtggtttgggggacaccattacattaaaatgaatgagtcactaagtgagtcactgtatataaaatacttggaaattgta

SEQ ID NO: 181018 - DNA, 120 bp, Artificial Sequence
  ENSG00000111052_46 (sequence is synthesized)
aagtaatatacaaaagatattaacaaagtattattcatggtaaacaaatcacatcagtagcaaacacagggtgggaactcaatcttatgttatagcttactcttaagaagaatatgtgaa

SEQ ID NO: 181019 - DNA, 120 bp, Artificial Sequence
  ENSG00000111052_47 (sequence is synthesized)
gccaggaacatggttaaaggtacagaccagaaaatttctgacatgtgataaatatttcagtgacttttcagatttatttcttgttagccgctgtgtctatttggtgctacaaaaactgaa

SEQ ID NO: 181020 - DNA, 120 bp, Artificial Sequence
  ENSG00000111052_48 (sequence is synthesized)
agaaacaaaatccctgatgtaagggcttataataaatacacagtttggagatgaactaaggatattttacatttacgggaaaggattggacaatagtatcattttctcaccatttgcatg

SEQ ID NO: 181021 - DNA, 120 bp, Artificial Sequence
  ENSG00000111052_49 (sequence is synthesized)
tacatcatgtctttccaattgttttcattatttttctgaaagagctgcaaaattgtgcagtggttcaacctgaccaaagtggtattatgctgctgggaagtaaaagtattagacaccaaa

SEQ ID NO: 181022 - DNA, 120 bp, Artificial Sequence
  ENSG00000111052_50 (sequence is synthesized)
accaagagaaatttcccatgggaatgttacaaatgagacattgaaccacctaatacaattccatagaaaatacagaggcctttggtgtatggctacttcttatatcaatcctcagtgaaa

SEQ ID NO: 181023 - DNA, 120 bp, Artificial Sequence
  ENSG00000111052_51 (sequence is synthesized)
ccttacaactgaatgctgaattaaaatttaacattaataggaggtcaaaatgttacagtaagaatttatagctttctaatgatctccttttcacccttttatgctcaagtgttttctccg

SEQ ID NO: 181024 - DNA, 120 bp, Artificial Sequence
  ENSG00000111052_52 (sequence is synthesized)
caattttaagagagaactcaaggactatttataagggttgcagccaatgtggagccagcggcaaccgtaaatatatttagtgatagagtcaggatataaaaagtctcaatagaatggtac

SEQ ID NO: 181025 - DNA, 120 bp, Artificial Sequence
  ENSG00000111052_53 (sequence is synthesized)
tttttttgccccctgctattactgaagtcaacgttgaaaacctagaataaatattcattttatgtctaaccagctttctaagcattgatggatattaaacctataaaagctgcaatctaa

SEQ ID NO: 181026 - DNA, 120 bp, Artificial Sequence
  ENSG00000111057_0 (sequence is synthesized)
gccgccaccgtcgtccgcaaagcctgagtcctgtcctttctctctccccggacagcatgagcttcaccactcgctccaccttctccaccaactaccggtccctgggctctgtccaggcgc

SEQ ID NO: 181027 - DNA, 120 bp, Artificial Sequence
  ENSG00000111057_1 (sequence is synthesized)
ccagctacggcgcccggccggtcagcagcgcggccagcgtctatgcaggcgctgggggctctggttcccggatctccgtgtcccgctccaccagcttcaggggcggcatggggtccgggg

SEQ ID NO: 181028 - DNA, 120 bp, Artificial Sequence
  ENSG00000111057_2 (sequence is synthesized)
gcctggccaccgggatagccgggggtctggcaggaatgggaggcatccagaacgagaaggagaccatgcaaagcctgaacgaccgcctggcctcttacctggacagagtgaggagcctgg

SEQ ID NO: 181029 - DNA, 88 bp, Artificial Sequence
  ENSG00000111057_3 (sequence is synthesized)
ctagccattacttcaagatcatcgaggacctgagggctcagatcttcgcaaatactgtggacaatgcccgcatcgttctgcagattga

SEQ ID NO: 181030 - DNA, 89 bp, Artificial Sequence
  ENSG00000111057_4 (sequence is synthesized)
tacttcaagatcatcgaggacctgagggctcagatcttcgcaaatactgtggacaatgcccgcatcgttctgcagattgacaatgcccg

SEQ ID NO: 181031 - DNA, 120 bp, Artificial Sequence
  ENSG00000111057_5 (sequence is synthesized)
aagcccagattgccagctctgggttgaccgtggaggtagatgcccccaaatctcaggacctcgccaagatcatggcagacatccgggcccaatatgacgagctggctcggaagaaccgag

SEQ ID NO: 181032 - DNA, 120 bp, Artificial Sequence
  ENSG00000111057_6 (sequence is synthesized)
gggcccaatatgacgagctggctcggaagaaccgagaggagctagacaagtactggtctcagcagattgaggagagcaccacagtggtcaccacacagtctgctgaggttggagctgctg

SEQ ID NO: 181033 - DNA, 87 bp, Artificial Sequence
  ENSG00000111057_7 (sequence is synthesized)
acagtggtcaccacacagtctgctgaggttggagctgctgagacgacgctcacagagctgagacgtacagtccagtccttggagatc

SEQ ID NO: 181034 - DNA, 120 bp, Artificial Sequence
  ENSG00000111057_8 (sequence is synthesized)
tacagatggagcagctcaacgggatcctgctgcaccttgagtcagagctggcacagacccgggcagagggacagcgccaggcccaggagtatgaggccctgctgaacatcaaggtcaagc

SEQ ID NO: 181035 - DNA, 120 bp, Artificial Sequence
  ENSG00000111057_9 (sequence is synthesized)
gcccaggagtatgaggccctgctgaacatcaaggtcaagctggaggctgagatcgccacctaccgccgcctgctggaagatggcgaggactttaatcttggtgatgccttggacagcagc

SEQ ID NO: 181036 - DNA, 85 bp, Artificial Sequence
  ENSG00000111057_10 (sequence is synthesized)
ccatgcaaaccatccaaaagaccaccacccgccggatagtggatggcaaagtggtgtctgagaccaatgacaccaaagttctgag

SEQ ID NO: 181037 - DNA, 120 bp, Artificial Sequence
  ENSG00000111057_11 (sequence is synthesized)
gcagcctcgagggccaacaacacctgctgtccgtgtccatgcccggttggccaccccgtttctgggggcatgagcttcaccactcgctccaccttctccaccaactaccggtccctgggc

SEQ ID NO: 181038 - DNA, 120 bp, Artificial Sequence
  ENSG00000111057_12 (sequence is synthesized)
aggactttaagtgagtggggctctcctacccacacgtgctgggatcaggagatcacttctccccaaagtctgagcttttggaagcaccccatgtgtctgttcactggtatccactgagca

SEQ ID NO: 181039 - DNA, 120 bp, Artificial Sequence
  ENSG00000111057_13 (sequence is synthesized)
ctgggccgttgctccgtgggtgctcctgtgtcttcaagggagtaacagttacagaggtctcccccttgaagaaagcaaactaagtattgtccctagctgtacttagtatgcaaatgaagt

SEQ ID NO: 181040 - DNA, 120 bp, Artificial Sequence
  ENSG00000111057_14 (sequence is synthesized)
ttggccttgagtttcccttttctggaggaagaggctgagggtgatttggagataaaggtagaggtcaggaggctttttccctctacctttcttgtctcccttctactccacggggctgtt

SEQ ID NO: 181041 - DNA, 120 bp, Artificial Sequence
  ENSG00000111057_15 (sequence is synthesized)
tgctccccaggctgggtcagttaggggctcacagtgggatcctgttaggtgtgggtggatgagagtcagggtccatcagtgtattcatttaactgttcatttgtataaccccgtttaaga

SEQ ID NO: 181042 - DNA, 120 bp, Artificial Sequence
  ENSG00000111057_16 (sequence is synthesized)
atactgtcctccaagtgccaagaatggtgctcaggggattaccacctaattgctgactcaagttgctggtttgcaatgggcacagaacttctcttagtaggtggcatgagttgagaaggt

SEQ ID NO: 181043 - DNA, 120 bp, Artificial Sequence
  ENSG00000111057_17 (sequence is synthesized)
tctggatcagagataggggcccctctgatcacctccactcctataggtatgagacagagctggccatgcgccagtctgtggagaacgacatccatgggctccgcaaggtcattgatgaca

SEQ ID NO: 181044 - DNA, 120 bp, Artificial Sequence
  ENSG00000111057_18 (sequence is synthesized)
caccacagtggtcaccacacagtctgctgaggttggagctgctgagacgacgctcacagagctgagacgtacagtccagtccttggagatcgacctggactccatgagaaatctggtgag

SEQ ID NO: 181045 - DNA, 120 bp, Artificial Sequence
  ENSG00000111057_19 (sequence is synthesized)
tgccttcacatcacctgcccagctcctccttcacttggcctcagacccaaccctgtctcaacccaaatcctatccctcatatcatgagttcctttagctcagaaagagtcagtttcctct

SEQ ID NO: 181046 - DNA, 120 bp, Artificial Sequence
  ENSG00000111057_20 (sequence is synthesized)
gaggagctagacaagtactggtctcagcaggtgcgtgaggggaggggatggctgccaaggtgtgggagggaggcagacggaatgaggggcctgatggactgtccccatcctgcagattga

SEQ ID NO: 181047 - DNA, 120 bp, Artificial Sequence
  ENSG00000111057_21 (sequence is synthesized)
gacagggttgagagctttacagaggaagtggacagcatggagggaggtaaggaaaggcctgtaaagaggaggagacactggctctggcggaatggggactattggagggttaagcggatg

SEQ ID NO: 181048 - DNA, 120 bp, Artificial Sequence
  ENSG00000111057_22 (sequence is synthesized)
tggctaaggctgagtcatctaggagtaaacaagaggccttcctttgggaggagccaatccagggtgtagggggcccagagtgaccaggtgcactagggaaaaaatgccaggagagggcca

SEQ ID NO: 181049 - DNA, 120 bp, Artificial Sequence
  ENSG00000111057_23 (sequence is synthesized)
ggaagaggacttgttagtagcgactcacttctgggcaggcaggccagccagctagccagcctgctgaggcttcccaagaggggcagagtgctgggatctgggaatccaggaaaggaggga

SEQ ID NO: 181050 - DNA, 120 bp, Artificial Sequence
  ENSG00000111058_0 (sequence is synthesized)
accatttgtcgcacactcggggaccgcgggtggccggaggagatgaaaccgtcttggctgcagtgtcgtaaagtcaccagcgccggggggctcggagggcccttgcctgggtcctctccg

SEQ ID NO: 181051 - DNA, 120 bp, Artificial Sequence
  ENSG00000111058_1 (sequence is synthesized)
gcccggggagccggtgcggccctcagggctttagtggtcccgggcccgcggggcggtctcgggggccggggatgcagggcactgtcctccggcagtggcagcgagtacaagacccacttc

SEQ ID NO: 181052 - DNA, 120 bp, Artificial Sequence
  ENSG00000111058_2 (sequence is synthesized)
gcagcctcggtgaccgaccccgagaggttctggggcaaagctgccgagcagatcagctggtacaagccctggaccaaaacgctggagaacaaacactcgccctctaccaggtggtttgtg

SEQ ID NO: 181053 - DNA, 120 bp, Artificial Sequence
  ENSG00000111058_3 (sequence is synthesized)
gaaggaatgcttaacatttgttacaatgccgttgatcgtcatattgaaaatggtaaaggggataagattgctatcatctatgacagtcctgttacaaacactaaagcaacctttacctat

SEQ ID NO: 181054 - DNA, 120 bp, Artificial Sequence
  ENSG00000111058_4 (sequence is synthesized)
aaagaagttctggagcaggtctccaagctggctggtgtcttggtcaagcatggcatcaagaaaggtgacactgtggttatctacatgcctatgatcccacaggcgatgtataccatgttg

SEQ ID NO: 181055 - DNA, 120 bp, Artificial Sequence
  ENSG00000111058_5 (sequence is synthesized)
gcatgtgcaaggataggtgccatccacagtctcatatttggaggatttgcttccaaagaactaagtagtcgcattgatcatgtaaagcccaaggtggttgttacagcatcatttggcatt

SEQ ID NO: 181056 - DNA, 120 bp, Artificial Sequence
  ENSG00000111058_6 (sequence is synthesized)
gaacctggaaggagggtagagtacgtaccacttgtagaagaagcgctaaaaataggacaacacaaaccagacaaaattctcatttataatcgtccaaatatggaggcggttcctttggct

SEQ ID NO: 181057 - DNA, 120 bp, Artificial Sequence
  ENSG00000111058_7 (sequence is synthesized)
cccggtcgtgaccttgattgggatgaagagatggcaaaagcccagtcacatgactgtgttcctgttctttcagaacacccactgtatattctttacacatctggcacaacggggttacct

SEQ ID NO: 181058 - DNA, 120 bp, Artificial Sequence
  ENSG00000111058_8 (sequence is synthesized)
aagggtgtgattaggcccactgggggatacgctgtcatgctacactggtcaatgtcttccatatacggacttcaacccggagaggtgtggtgggcagcttctgacttaggctgggttgtt

SEQ ID NO: 181059 - DNA, 120 bp, Artificial Sequence
  ENSG00000111058_9 (sequence is synthesized)
ggacattcctatatctgctatggacctcttcttcatgggaacacaacagttttatatgaggggaagcctgtgggaacaccagatgctggcgcttatttccgtgtgcttgcagagcatgga

SEQ ID NO: 181060 - DNA, 120 bp, Artificial Sequence
  ENSG00000111058_10 (sequence is synthesized)
gtagctgccttgtttacagcaccaactgcaattagagcaatccgtcaacaggaccctggggcagctttggggaagcagtactctctgacaaggttcaaaacattatttgtggctggagaa

SEQ ID NO: 181061 - DNA, 120 bp, Artificial Sequence
  ENSG00000111058_11 (sequence is synthesized)
cgatgtgatgtagagaccctggaatggtccaaaaatgtcttcagagtacctgtcttagaccattggtggcaaactgagactggatctccaattactgcgtcatgtgttggattaggcaat

SEQ ID NO: 181062 - DNA, 120 bp, Artificial Sequence
  ENSG00000111058_12 (sequence is synthesized)
tctaaaacacctccaccagggcaagcaggaaaaagcgtcccaggatacaatgttatgattttggatgacaacatgcaaaaactgaaggctcggtgtttaggaaatattgtggtaaagtta

SEQ ID NO: 181063 - DNA, 120 bp, Artificial Sequence
  ENSG00000111058_13 (sequence is synthesized)
ccattgccacctggggctttttcaggactctggaagaatcaggaagcattcaagcatttatactttgaaaaatttcctggatattatgataccatggatgctggttacatggatgaagaa

SEQ ID NO: 181064 - DNA, 120 bp, Artificial Sequence
  ENSG00000111058_14 (sequence is synthesized)
ggctatttgtatgttatgtctcgagtggatgatgtaataaatgttgcaggtcacagaatttctgcaggcgccattgaagagtcaatcctttcccatggtaccgtggcagactgtgctgtt

SEQ ID NO: 181065 - DNA, 120 bp, Artificial Sequence
  ENSG00000111058_15 (sequence is synthesized)
gttggcaaggaagatcccttaaaaggtcatgtccccttagcactctgtgtattgagaaaagatataaatgcaacagaggagcaagttttggaagaaattgtgaaacacgttagacagaac

SEQ ID NO: 181066 - DNA, 120 bp, Artificial Sequence
  ENSG00000111058_16 (sequence is synthesized)
attggccctgtggctgcttttcgaaatgcagtgtttgtcaaacagctacccaaaaccagatctggcaagatcccccgatcagctttatctgccattgtcaatggcaagccatacaagata

SEQ ID NO: 181067 - DNA, 120 bp, Artificial Sequence
  ENSG00000111058_17 (sequence is synthesized)
acttctacaattgaagaccccagcatttttggccacgtagaagaaatgctgaagcaagcataatgagtttgtcttattcctattttgagttgatttaatttcttaattgaaattaaatta

SEQ ID NO: 181068 - DNA, 120 bp, Artificial Sequence
  ENSG00000111058_18 (sequence is synthesized)
tttgagttgtttctcagaaataaatatttcagtagaaattacttgcaaaatgaaatgtgaattgtaaaacttggcctaaacaaatctaatgaaaacatgtgaaagacctgtgcctttttt

SEQ ID NO: 181069 - DNA, 120 bp, Artificial Sequence
  ENSG00000111058_19 (sequence is synthesized)
ttggtttgaccctgttagcattgttattagttatctataacatggcttattgaatgtcatctactgctttaggaaaaacgtatctagtgtattatttttaaaattgtacctcccaagaag

SEQ ID NO: 181070 - DNA, 120 bp, Artificial Sequence
  ENSG00000111058_20 (sequence is synthesized)
aacactttaattgaaagcaacactaatatagagccacttcctgaaaccaagaatctgtagttttgatccaaaatctaaaacttaaagtcagaaaataattaaaatttttcttgtagaaat

SEQ ID NO: 181071 - DNA, 120 bp, Artificial Sequence
  ENSG00000111058_21 (sequence is synthesized)
tttagatattttctagtattctttagatgctcacattgttttaaataaaatagatgaaatgggaagtttaggtaatcatctagacagatgaaattattatctaggtaggagggcttttct

SEQ ID NO: 181072 - DNA, 120 bp, Artificial Sequence
  ENSG00000111058_22 (sequence is synthesized)
atacattttctgagggaaagcagaacaccggggttatagctataccttcaggtcttttgttacttaggcaaggaaaaccacatgtctgacctggttcagcatgtaatccgagcactttgg

SEQ ID NO: 181073 - DNA, 73 bp, Artificial Sequence
  ENSG00000111058_23 (sequence is synthesized)
aggctgaggcaaggagaatcacttgaatacaagaggcagaggttgcagtgagccaagttcccaacaaaaacaa

SEQ ID NO: 181074 - DNA, 120 bp, Artificial Sequence
  ENSG00000111058_24 (sequence is synthesized)
ccacatgcctggcggagaacaaagagatcatttagtccaatctcttcatggagatgagggctcctgggagcccctcttcatgtctcaggttcttagttgactatgtttatccaaatgatt

SEQ ID NO: 181075 - DNA, 120 bp, Artificial Sequence
  ENSG00000111058_25 (sequence is synthesized)
ccagattcctgtggaaacaaggaatcgatgtacaaatggggtagggtggcaaggaaaactcttaagagagaaacatcaaggttttcacattaggttaaagacaagaaggtttctaggcag

SEQ ID NO: 181076 - DNA, 120 bp, Artificial Sequence
  ENSG00000111058_26 (sequence is synthesized)
gtagtgtaatgtctaggtgattttgaagtgaacttaagccactaggtttgagggacaaaggacagtagaaaatggtgaagactgcagatcacctgctatacctcaaggagcagcggaccc

SEQ ID NO: 181077 - DNA, 120 bp, Artificial Sequence
  ENSG00000111058_27 (sequence is synthesized)
agcagaatatggcccaaaaaggaggcaggtctcctgttgcaagagcctctgtttttttaaagagaaaacaaagaatcctggtttttatgtgaaatctctaattttaaaataataactcat

SEQ ID NO: 181078 - DNA, 120 bp, Artificial Sequence
  ENSG00000111058_28 (sequence is synthesized)
taaaaatattgtaatgtccaaaagtatctttccatttaacttctaaaaatctcttaaatgttttttttaaataattgtaaagtgagtttttgttaagcttataggaatgggccagttaac

SEQ ID NO: 181079 - DNA, 120 bp, Artificial Sequence
  ENSG00000111058_29 (sequence is synthesized)
taaggtagacagatgtaggaaattaaatatttgatttacttagggatctatatgacatcagttatcaaagaatacattttaacccaaaagtataccatgctcattgtatctttgatcgtt

SEQ ID NO: 181080 - DNA, 120 bp, Artificial Sequence
  ENSG00000111058_30 (sequence is synthesized)
cttcaagtatttctcaatcttttaatctatcaggaacattactatcaagagcagattgttgtaacataatactcaggatacatgaaatgtatgtgagagataaatagataatagaaagtt

SEQ ID NO: 181081 - DNA, 120 bp, Artificial Sequence
  ENSG00000111058_31 (sequence is synthesized)
tattgttataaaaatgacctacaacttatataaaaaaattctgaaaatgttgactttttttggactgaagactgcaaaataaatggcttctcaaagtaaattcctatttacttaaattgc

SEQ ID NO: 181082 - DNA, 120 bp, Artificial Sequence
  ENSG00000111058_32 (sequence is synthesized)
cttcttgattgttacacctggaaaaatatattcatctactttttccttttaattatgttagtagactgaattaaaccagctacatagacactctctcatttgaagctgttgggatccttg

SEQ ID NO: 181083 - DNA, 120 bp, Artificial Sequence
  ENSG00000111058_33 (sequence is synthesized)
agagtcagttaatttgaaatggcaaattatttacctgaatgtgtatcattgttcatttgcaaggtttaagctcaggcagatccaataattaggtaaaggttgcatctttggtcctcttgc

SEQ ID NO: 181084 - DNA, 120 bp, Artificial Sequence
  ENSG00000111058_34 (sequence is synthesized)
acattttttctggtaatcaaatctgaagcgacatctcagcaagcagacttgggttattttccactaggatgggaatggaaaacagtgctggagactggggaagtggctatttcctgtgtc

SEQ ID NO: 181085 - DNA, 120 bp, Artificial Sequence
  ENSG00000111058_35 (sequence is synthesized)
tcactggggaattgcaagatcaaagaatgttgttacttttatgtgatgaaaaaatagggcaagaaagatatacctgaatcatcagactgcttaaaatttgggaggaaaaaattctatttt

SEQ ID NO: 181086 - DNA, 120 bp, Artificial Sequence
  ENSG00000111058_36 (sequence is synthesized)
actactaaccataaatcacttttgctagatagtactttaaagattctgaattaaatgtatctttaaaaacaacaatataatattactaaaaaatgcagacatacttaaacttgctagaat

SEQ ID NO: 181087 - DNA, 120 bp, Artificial Sequence
  ENSG00000111058_37 (sequence is synthesized)
aaattctgtgaggtcttcgtttggtattttcataggatttcttactgttaagttattggaaaatgaaaatataaagtgctttcagaagttatagtattttccaattcattgaattacttt

SEQ ID NO: 181088 - DNA, 120 bp, Artificial Sequence
  ENSG00000111058_38 (sequence is synthesized)
gcttgtgaaaatatattaaacatatttaaatgagacctatcctacatttaaaaaccagttttgtttatataaaattgtatttgaaaggtcctgaacattaaaaatgtgaaaatttataat

SEQ ID NO: 181089 - DNA, 120 bp, Artificial Sequence
  ENSG00000111058_39 (sequence is synthesized)
gttgatgatcaaaagtaacgtgttgagactctgagcttaatccattaaatggattttagaatctagtagaagttatctttcttataaattaaaacatattttatgcttcttttttgaggg

SEQ ID NO: 181090 - DNA, 120 bp, Artificial Sequence
  ENSG00000111058_40 (sequence is synthesized)
aaatacctggatcttttgcatcactatatgttagtgtctattatagatgattaatctttctaacttgatctttaaaagaaagaaattgattttagtgattgagtgttatataatagtaga

SEQ ID NO: 181091 - DNA, 120 bp, Artificial Sequence
  ENSG00000111058_41 (sequence is synthesized)
tacaaatctagttatggcattataatgtcgtagttcctatattctatttcatttctatgaatcaagatgcccatgtttagatgagcttagaaagctacttctcattgttcctactcaggc

SEQ ID NO: 181092 - DNA, 120 bp, Artificial Sequence
  ENSG00000111058_42 (sequence is synthesized)
cacatttttagaaaaaaattttaagatcactcccataagcaagtttagatctccctcttgtggcagactcaattttgaagctaaatatttgggtcacccaaagaacacatttcctgatag

SEQ ID NO: 181093 - DNA, 120 bp, Artificial Sequence
  ENSG00000111058_43 (sequence is synthesized)
tttaagtaaattgtcgagccttatgtgactagaaaacaaagcttaaacagagaactggaattattattttttttattgacaatggaaagggtttctgttatcattaccttttgactgaat

SEQ ID NO: 181094 - DNA, 120 bp, Artificial Sequence
  ENSG00000111058_44 (sequence is synthesized)
ctgttaaataaaaatagacatcaaaacaaatgtaatgtacgtgcaaacatagcaaattaaaatacagaaaagaaattactaatgacaggtcttgcgcttaataagatcaagcagcagaaa

SEQ ID NO: 181095 - DNA, 120 bp, Artificial Sequence
  ENSG00000111058_45 (sequence is synthesized)
atcagcagttagataaatggtattattaaataggctttactttgaatctcccatataaacaaagaataaacaacagtaacaccaccaaataaagccacagggaagagattactcttctat

SEQ ID NO: 181096 - DNA, 120 bp, Artificial Sequence
  ENSG00000111058_46 (sequence is synthesized)
acttttatacactatatatgttaatcattctgtctttcatttatttcctctgataaaactgacttcagggaagtcgcaacaaggccatctcggctaaaagcttataacattagacatgag

SEQ ID NO: 181097 - DNA, 120 bp, Artificial Sequence
  ENSG00000111058_47 (sequence is synthesized)
tctggctaatgccctgttacattgacaaaagggaaaggtatcttgggtttcgttttctctagtggaaatgagcctcagactctgcggtggttgacattcactgtccagtactggctggca

SEQ ID NO: 181098 - DNA, 120 bp, Artificial Sequence
  ENSG00000111058_48 (sequence is synthesized)
tttcaagatatttgaatgaacatgtggttcttagtaaagaagtttttttatctttttttttttcttggtccacaggtaacaagagaagattatggttttttaatataaatttttaaataa

SEQ ID NO: 181099 - DNA, 120 bp, Artificial Sequence
  ENSG00000111058_49 (sequence is synthesized)
ttgcttttgacccttgtaaacagcttggctttgttttgtattgaaaaggagatcaagccatcacagtgctatttctaaagatataggacatccctgattgcctttaaagctctatttttg

SEQ ID NO: 181100 - DNA, 120 bp, Artificial Sequence
  ENSG00000111058_50 (sequence is synthesized)
gctccggttccaggttaaatcattcttttttacatgatcagaggcaggttgttcagctttaagtattgacagacttgaaggagaaacacgttgaagcatgaaacatgcttcaaggaaaca

SEQ ID NO: 181101 - DNA, 120 bp, Artificial Sequence
  ENSG00000111058_51 (sequence is synthesized)
tattgatttgactattaacaatccaaaaactgtaaaaatggtggaatggtaaaatacaaacagtacttggaattgtcaaatgtttgcactcgagactccatgaaccatatattttatttt

SEQ ID NO: 181102 - DNA, 120 bp, Artificial Sequence
  ENSG00000111058_52 (sequence is synthesized)
ttaaaaaatcatatttatatccatttacataagacttacacatttaaaaagaaatgcacggtaatacataaatgcctagtatattacaataaaacatgaaaaacaactggcttcatttca

SEQ ID NO: 181103 - DNA, 120 bp, Artificial Sequence
  ENSG00000111058_53 (sequence is synthesized)
taaaagcatctgttgtacagagtttatgatgtagatgatgtttattattcaaatgacttaagcattttattacaatttgtagtaaactaatcaaatgtaatatctgactccccccaaaaa

SEQ ID NO: 181104 - DNA, 120 bp, Artificial Sequence
  ENSG00000111058_54 (sequence is synthesized)
tcacatttttcagcttttaataagtcatgacgtcattatttccttagaattcagttttcacaaaggttttcactgctcgtcttcttagatggtagtgcactttaggtagagtagactgaa

SEQ ID NO: 181105 - DNA, 120 bp, Artificial Sequence
  ENSG00000111058_55 (sequence is synthesized)
aagacgccatctaaaatatacaatggatagcattagttcactgaaaagtcccagactgggaaatctcattctactcctctgtggtgtacctccacgcagcctgcttactcctgtcctaga

SEQ ID NO: 181106 - DNA, 120 bp, Artificial Sequence
  ENSG00000111058_56 (sequence is synthesized)
agatcatgagaaggaaatcatctaggatgtagccaacagccgtatgtaattaacatttgcttttctccaatttggtgcaggggagcttaacaaataatagaatttgctcaactttgtgga

SEQ ID NO: 181107 - DNA, 120 bp, Artificial Sequence
  ENSG00000111058_57 (sequence is synthesized)
aagtatggcagtaatgtaaacaaaggtagttatgcaaaatgttagcatgccttctgaaaaatttacaacttgctaattaataaattgggttgaattgacctatttcataatgtagattta

SEQ ID NO: 181108 - DNA, 120 bp, Artificial Sequence
  ENSG00000111058_58 (sequence is synthesized)
tattctagttcatatattttagagttcttaaaaaatacctttatttgttacaaaaacataacgataataagtcacctattgtaaacgtttgtgtcagtagtatggcattgctgattgttt

SEQ ID NO: 181109 - DNA, 120 bp, Artificial Sequence
  ENSG00000111058_59 (sequence is synthesized)
tcagccataatgtacttagaaaaagctcacaattgctattactgacacaaaagaaacagcaagtagtatgctctggattattttaatatcaaaagtgttgttgtttcacccaaacaaaaa

SEQ ID NO: 181110 - DNA, 120 bp, Artificial Sequence
  ENSG00000111058_60 (sequence is synthesized)
atggttgtcctagattgaattattgtaaatgaatactgttatcccaattaatggtaaaaactaggaaatatgaactagaatgtcatgcacaaaaaacagattgcaaatagagtaactcta

SEQ ID NO: 181111 - DNA, 120 bp, Artificial Sequence
  ENSG00000111058_61 (sequence is synthesized)
cccatcacttaagagctaagaagcaagcactattgaacatattaaatagtcatttgtaaattagtgaagtgttcatttcctgaagaaattataatgctatgtgtagaatctaatataaac

SEQ ID NO: 181112 - DNA, 120 bp, Artificial Sequence
  ENSG00000111058_62 (sequence is synthesized)
agtattttgggagacctcttatttagccaaattattatatactttaaatcatgtctaattaggtgccaaattatataccataattaaaattttaatgtaagggttgtacattctgaaatt

SEQ ID NO: 181113 - DNA, 120 bp, Artificial Sequence
  ENSG00000111058_63 (sequence is synthesized)
aaatctcttatcgggatgcttttcattttatcagcttcaaatagtgatccaaataaggcagcatatctgctcccatcctaagcccaaaagaccaacaataaattgtgtggcacttttagt

SEQ ID NO: 181114 - DNA, 120 bp, Artificial Sequence
  ENSG00000111058_64 (sequence is synthesized)
tcaaggcaatgaaaacagcacaaggtgagttgttcctctgtctataactgttttctcttaaccctgtgcacacattttgttctaaatatcgctcttaaaaagtatttttctaaaatattg

SEQ ID NO: 181115 - DNA, 120 bp, Artificial Sequence
  ENSG00000111058_65 (sequence is synthesized)
attcatcgaaagtggttaaatattttggtaaagcatagttttaggttgaaaaaaaattatgaacatttgacatttataaatctaagaaaccacagttttactattaagactgtttttcaa

SEQ ID NO: 181116 - DNA, 120 bp, Artificial Sequence
  ENSG00000111058_66 (sequence is synthesized)
taaaacctcatttttatatggattttaaagtagctttcattaattggtatttccttaaaatcaaatgcttggtatttatggttacataggaaggttttgtgctggtcctattctccattc

SEQ ID NO: 181117 - DNA, 120 bp, Artificial Sequence
  ENSG00000111058_67 (sequence is synthesized)
gtcctattctccattcttaaagtaattttattttgttcctatatgtcttaaatacttaaaatttatatttgtttttagcaagtgtaaatcagattgataagaaacaatgtaataaaggtt

SEQ ID NO: 181118 - DNA, 120 bp, Artificial Sequence
  ENSG00000111058_68 (sequence is synthesized)
aaaaattgtaatttgaaaggttttaggatactaaaatggagcaaacagtctctgttatgcctgggtatttggtttgctttatttgtgatagaacatggaaatattttaaaactaagattt

SEQ ID NO: 181119 - DNA, 120 bp, Artificial Sequence
  ENSG00000111058_69 (sequence is synthesized)
gttgaaaaccccttattattaatattgttgtgttaaatgtataactattgaactgtcagtgaaatatgacacattttatccagtgacattttaaatgaatctcattgtaggggaagcctg

SEQ ID NO: 181120 - DNA, 120 bp, Artificial Sequence
  ENSG00000111058_70 (sequence is synthesized)
tgtacataaatagtaaagaaatgttccaaaaagctgcaaggattggaggaaacttttgagctacgaccagcagatcagacacaaactcgggattcgagtggttcaggtttcagtaaaaat

SEQ ID NO: 181121 - DNA, 120 bp, Artificial Sequence
  ENSG00000111058_71 (sequence is synthesized)
aagcaatttttttattgttgtgttattaataatgtcttcataagtgacattgatgccaccattctcttggtccctaggtataaagcactaaagacctctttatcttctcttctttgtttc

SEQ ID NO: 181122 - DNA, 120 bp, Artificial Sequence
  ENSG00000111058_72 (sequence is synthesized)
ttatatctggtaagttactaagtctcagattttcctttgaagtgtctgttgggttcattccaccttcagtattccccttgcctttgagctctggcagctgcattatcctctgtcctgatt

SEQ ID NO: 181123 - DNA, 120 bp, Artificial Sequence
  ENSG00000111058_73 (sequence is synthesized)
caaattattttgtgttgactattgaaggacccaaagaaataatgattcaaagataattttataaaagccaaagtaacttgtagctaatatataaaatacttttgaccaggaacttttaaa

SEQ ID NO: 181124 - DNA, 120 bp, Artificial Sequence
  ENSG00000111058_74 (sequence is synthesized)
gagataactatctatagcagtagatttactttgcaccaagaatgtttgatcactgactggaaatgtttgcagactttactttgaagtttagagagttacttcatttgcttttattttttt

SEQ ID NO: 181125 - DNA, 89 bp, Artificial Sequence
  ENSG00000111058_75 (sequence is synthesized)
ttcctgtcctgacacagttactccatatcttaaagagattttgtgtttagtgctaaatataaaaacatttattatttaacatcaaatat

SEQ ID NO: 181126 - DNA, 120 bp, Artificial Sequence
  ENSG00000111058_76 (sequence is synthesized)
agatggagacgcaactgttccgcggcggcagatcttcagttgcggtgcggagctgagcagagcactgaactgatttggagcagatgatctttcccatcatgactgcctgactgagtaaac

SEQ ID NO: 181127 - DNA, 120 bp, Artificial Sequence
  ENSG00000111058_77 (sequence is synthesized)
gtggatggaggaaaccctcatgactccaggaaacttcctgttcaggattttccaatgtggccatcatttttctaaagcaatacactgctaattctatattgttttatgattaatgtttag

SEQ ID NO: 181128 - DNA, 120 bp, Artificial Sequence
  ENSG00000111058_78 (sequence is synthesized)
tacatgattctaggcctactaaaatatttgaagctgatttttacttctttatttctatttgatgttacttactatgcacccatatacattgattctgtctttggtgcacacagagagaaa

SEQ ID NO: 181129 - DNA, 120 bp, Artificial Sequence
  ENSG00000111058_79 (sequence is synthesized)
aaaaaaaagaaaagaaaagaaagaaagacagccctgatattgacaaatatatcatagaacaagttgcatccatctgaacatgttgctccagaatcaagacaaaatatgaaaacatttttg

SEQ ID NO: 181130 - DNA, 120 bp, Artificial Sequence
  ENSG00000111058_80 (sequence is synthesized)
tatgaaaacatttttgagccataatggaatttgatactcattacgagtatcaaatttaaccaacagtggaaaatgaaatgagacccagagagattatatcaactgccccactattcctag

SEQ ID NO: 181131 - DNA, 120 bp, Artificial Sequence
  ENSG00000111058_81 (sequence is synthesized)
ttggtgaggaacagggctgagactgaagtccaagtttcaaccagtccagtgccctttatactacactgtgttattacactagattgtaaattccacaagtagagggacaatgtttgtttg

SEQ ID NO: 181132 - DNA, 120 bp, Artificial Sequence
  ENSG00000111058_82 (sequence is synthesized)
aagtagagggacaatgtttgtttgccactgcatattcattgcttggcattttactgatacccaataaatatttgtgaataaaagaagtagaaggccagcacagtggctcacgcctgtaat

SEQ ID NO: 181133 - DNA, 120 bp, Artificial Sequence
  ENSG00000111058_83 (sequence is synthesized)
tgaatccccgactctacaaaaaaaaaaaaaaatacaaaaattagctcagcatggtggtgcggcctgtagtcccagctccttcaggtggggtttgaggcaggaggatcacttgaacccagg

SEQ ID NO: 181134 - DNA, 120 bp, Artificial Sequence
  ENSG00000111058_84 (sequence is synthesized)
cactccagcctgggcaatagagcaagatcctgtcccaaaatataaataaatacataaataaaagaatgagtaagagaacaatatactgcccagcaaataatctccatttaaaatacattt

SEQ ID NO: 181135 - DNA, 120 bp, Artificial Sequence
  ENSG00000111058_85 (sequence is synthesized)
gcaaataatctccatttaaaatacattttacaatggaaaatcagttcaactacagttattaactgctcactttgtacaagatgttttatctactatgttctatggagatttacaagaaaa

SEQ ID NO: 181136 - DNA, 120 bp, Artificial Sequence
  ENSG00000111058_86 (sequence is synthesized)
aaataaataaaatgtggcccttgccctacaggaacttaatatttatcacaattctctgcaaaacagggtaggacatggtaagcaccaccatatataagagatatgaacacagtattacat

SEQ ID NO: 181137 - DNA, 120 bp, Artificial Sequence
  ENSG00000111058_87 (sequence is synthesized)
ggaacatggaaagcttcatgaatatggtggtatttatgctggatcttttaaaacagaagagtttttaggtggaggtaggattgaaaaacatttcagttgaactaaacagaatgtctaaat

SEQ ID NO: 181138 - DNA, 120 bp, Artificial Sequence
  ENSG00000111058_88 (sequence is synthesized)
gtacactcaggaaatgatggtatgtgttttattattgaaacagtctacttgtctggaacatgggagacatgaaggaaagtggaaacctgtgaaaagtagaaagaagctggtagaaaaggg

SEQ ID NO: 181139 - DNA, 120 bp, Artificial Sequence
  ENSG00000111058_89 (sequence is synthesized)
aaaagaaagataccacagggggctctgagagttaccttaaggagcttaagattcattcagtctaaagctttttgagcaggaaggtgacaggaggtccttcttgccagtgtattaaaactt

SEQ ID NO: 181140 - DNA, 120 bp, Artificial Sequence
  ENSG00000111058_90 (sequence is synthesized)
attatagaaaaatgatgatgaattttaaaaaggtataattacagaatgtcaaacaaaattatccacatgaactaatgatattctatgttaatatgaagagaagagattcattctcaggtc

SEQ ID NO: 181141 - DNA, 120 bp, Artificial Sequence
  ENSG00000111058_91 (sequence is synthesized)
atctgagactggatctccaattactgcgtcatgtgttggattaggcaattctaaaacacctccaccagggcaagcaggaaaaagcgtcccaggatacaatgttatgattttggatgacaa

SEQ ID NO: 181142 - DNA, 120 bp, Artificial Sequence
  ENSG00000111058_92 (sequence is synthesized)
gttactgtactctcagcaggatgttcttttgccttgcccatcgttcagtttaatcctctagaaagaaaatttttagaggtacatcggactaaatcattttcttctgagtacaccatttcc

SEQ ID NO: 181143 - DNA, 120 bp, Artificial Sequence
  ENSG00000111058_93 (sequence is synthesized)
aaatggccgcccagggtcctaaatccggcggctgcggagagggactagagggtgtcctcctctgcagagccgtaggactcgagcgccttcatcactggacgctggagccaggaaggaaac

SEQ ID NO: 181144 - DNA, 120 bp, Artificial Sequence
  ENSG00000111058_94 (sequence is synthesized)
ccacacactcagggacaggtataaccccacaggggtgcaccagtgaggccccgatcgcagcggaggactccatccctgagcttgtgagggcgtcctggggaggaagcgaacactttcccc

SEQ ID NO: 181145 - DNA, 120 bp, Artificial Sequence
  ENSG00000111058_95 (sequence is synthesized)
gttcaagtcagagagcaggactcactgggtggcaggtcagaagttgaattttaacccgacctgcgctttgtccccgcgccttccgcagcctgggcgccgcggtggcaccgagctgggaga

SEQ ID NO: 181146 - DNA, 120 bp, Artificial Sequence
  ENSG00000111058_96 (sequence is synthesized)
ggacacgagaggctggcgcgggagaagccgagagttgctatcgaccgggagctgccggcggcgggagcagacgcgaccctcgccgctttcgatctcgaagccgcggagagccgatctcgg

SEQ ID NO: 181147 - DNA, 120 bp, Artificial Sequence
  ENSG00000111058_97 (sequence is synthesized)
gatctcggctgctggggctcggctccccgcgctctgccttgccctttcggcagagggcagctccctgcctgctgcagccccgccactgtgcgcccggcagcccaggggtgcgcccagccc

SEQ ID NO: 181148 - DNA, 120 bp, Artificial Sequence
  ENSG00000111058_98 (sequence is synthesized)
agtggccgccgggactccagcagttggaccgaccctcgccctccggcgcctggacaaacttccttcctcccgggcccctgcgccaagcaagctgacaggcggctccctcgccggtctcct

SEQ ID NO: 181149 - DNA, 120 bp, Artificial Sequence
  ENSG00000111058_99 (sequence is synthesized)
ctgggctctggccgggcgagcttgctctctgcccctctccaaccccgagcccctggcgcctatagccgtccccgcgcagcggctccaacaaagccagaggaccggagacgacccggcgag

SEQ ID NO: 181150 - DNA, 120 bp, Artificial Sequence
  ENSG00000111058_100 (sequence is synthesized)
gggctgggagtggcagcggggaccccagagccagaaggaggcgtcccctcggcggggcgagtacagtgggaaggggcagcgggaacgtagcggggagagaaaggggaagaaagtgttctg

SEQ ID NO: 181151 - DNA, 120 bp, Artificial Sequence
  ENSG00000111058_101 (sequence is synthesized)
ttctcggcgcgaacgccttcctggctcgtcctcgttccccttctcctcctgcctgagcgcgtcccatgtcccgttgggaattggcaggcggggaagggaggaggggagaggggacgcggt

SEQ ID NO: 181152 - DNA, 120 bp, Artificial Sequence
  ENSG00000111058_102 (sequence is synthesized)
ggcctggcgagcgagccgctcccttacctctgtccagggtgagcggctggaccactgtcaatgtcgccatgtctgccgtgggagccgaagtgacgctcggcttcagcatcagcaaccgct

SEQ ID NO: 181153 - DNA, 120 bp, Artificial Sequence
  ENSG00000111058_103 (sequence is synthesized)
cgtagtgagaaaaaaaggaggagattgggggcgggggtggagagggaagacggaaaggagggggaggagggggaaggaaggaaggtggtggtggtggagaagaaagcttgggtgggttgg

SEQ ID NO: 181154 - DNA, 120 bp, Artificial Sequence
  ENSG00000111058_104 (sequence is synthesized)
tagccagatggagacgcaactgttccgcggcggcagatcttcagttgcggtgcggagctgagcaggtatccgagagcgactgcatcgccgggctctgggagggaaggctctgccctagaa

SEQ ID NO: 181155 - DNA, 120 bp, Artificial Sequence
  ENSG00000111058_105 (sequence is synthesized)
ctttgctattccacccccaggagcgctgggtgggtgtagctggcgggttgcttcctttcaactttccactctaataaaatggtcagaatatacgtgtgtgcatgcgggtgcgtgtgtgta

SEQ ID NO: 181156 - DNA, 120 bp, Artificial Sequence
  ENSG00000111058_106 (sequence is synthesized)
taaggggaagagagaggatggaaaggggatatggggaagggagtgggagatgagttttctcagattaagagaaattgccaatccaataatcccatcccctttagagagaaaatgcttcca

SEQ ID NO: 181157 - DNA, 120 bp, Artificial Sequence
  ENSG00000111058_107 (sequence is synthesized)
tcagtagatgttcatttaggacctgagtatattgcctggagaaaaaaaaaaaaaaaggcaaacctcttaaaagtgcttcaaaataaaaaacgtgtaggtaagtttctatcgctaagtttt

SEQ ID NO: 181158 - DNA, 120 bp, Artificial Sequence
  ENSG00000111058_108 (sequence is synthesized)
tctttttcaagccactgttaatacattaccaattcagtaaatgtagcttagaaacaagtacagtgttcagattttctccgaattttttacataccacatcctgtaaacatgccccactcc

SEQ ID NO: 181159 - DNA, 120 bp, Artificial Sequence
  ENSG00000111058_109 (sequence is synthesized)
ccctcacccacccagcaacaaaaactttgctcttaatgtccaaactgattttggttgtctatgactacgtttgaaaaatatgtacctagcacttttcatgttgatttctaaccagtggtt

SEQ ID NO: 181160 - DNA, 120 bp, Artificial Sequence
  ENSG00000111058_110 (sequence is synthesized)
cagagatgccacttatcgattgattaacatatatgccaggaattgagatagaagagttacattgccttgtgccacgccttgatttaggagttcaatttagtctccgacttcctgtagcct

SEQ ID NO: 181161 - DNA, 120 bp, Artificial Sequence
  ENSG00000111058_111 (sequence is synthesized)
gtaatctagtgggagatggtgttattaaaaacctgactttagagtcagttgatcaggattaaattacgagagccttcaaatactggctgtgacctcttcgccccaataaaaaggctactt

SEQ ID NO: 181162 - DNA, 120 bp, Artificial Sequence
  ENSG00000111058_112 (sequence is synthesized)
tcactatcttgtcatagtagggattcatttcctgactacgaaatcaagaaacataaagaaaccttctataagctgaataggggtgactgtgggtgcaggattggaaatgacaaagctgcc

SEQ ID NO: 181163 - DNA, 120 bp, Artificial Sequence
  ENSG00000111058_113 (sequence is synthesized)
tccatcttgtttcctgtgacagagctgaattgtttgggctaacaataaactctaaaaggcagatactgttttatagcaaaatatttgcatataattgatgccattttcttctgattacag

SEQ ID NO: 181164 - DNA, 120 bp, Artificial Sequence
  ENSG00000111058_114 (sequence is synthesized)
ataggatttctgaaggtctttttcattttatagtctacaattgaattttaaaaaacaacatttcaccaatgtgggaaagccaaagatgattggccatatatagacttaacagaccctaag

SEQ ID NO: 181165 - DNA, 120 bp, Artificial Sequence
  ENSG00000111058_115 (sequence is synthesized)
aacaaacctaaaatagtagttcgatatgtttatttttatttagtatttaagaaagaatgctgatcttgacatttgagtcttagtcatgtactcttcggaagtcacacaatctctcactga

SEQ ID NO: 181166 - DNA, 120 bp, Artificial Sequence
  ENSG00000111058_116 (sequence is synthesized)
tcctgtttcctcctctgtcatacaatggaaataatatcattcaatgtcacagagatctgtcatatgaggaaactaattctaccttgcaatctcacagagttttatgagggtctaatggag

SEQ ID NO: 181167 - DNA, 120 bp, Artificial Sequence
  ENSG00000111058_117 (sequence is synthesized)
tcatacatgtgactgtgctttgaaaacagtaaagaatatacaaatttatttatacaagcatacatcccctggaaccgtgtggtaagctctgtgctaggtgctaaccatgcaaagattaat

SEQ ID NO: 181168 - DNA, 120 bp, Artificial Sequence
  ENSG00000111058_118 (sequence is synthesized)
gagatggccccctttctgcccagtcttgcttgggagacagtgagcaaaccataagcttctgtgcagtactctaagcactattaaaaggaagtgccctcggtggccagaggttgcaaaaac

SEQ ID NO: 181169 - DNA, 120 bp, Artificial Sequence
  ENSG00000111058_119 (sequence is synthesized)
aactttggttttttaccgttattcacatgccctgaattaagcaacagaaagaagttgagatgagcgcaatgataccagagtgtgttacaagcttttgcacaaagttattaaacctcactc

SEQ ID NO: 181170 - DNA, 120 bp, Artificial Sequence
  ENSG00000111058_120 (sequence is synthesized)
ggtaactgaggataaaagaacatacaaatcccttgacttctaatgtagttattttacaacatcctttattagggaatatgtatttaagcagcttgattcatcagcccaaaagtcataaat

SEQ ID NO: 181171 - DNA, 120 bp, Artificial Sequence
  ENSG00000111058_121 (sequence is synthesized)
tgtacccattccaacacaaatccctgattgtggtgtcagtgaaggtagagttttctttgtctttttgtttcctaatgcatcctcaggactaaacatttcatagcatatttctggacttct

SEQ ID NO: 181172 - DNA, 120 bp, Artificial Sequence
  ENSG00000111058_122 (sequence is synthesized)
gccttgagcttcctatttgaaatttgctctgtcattctttctctgtgttgactctgtagggttgttgttgtttttaaatcaagattaaaagagaaattaaaaggaagcataaatcaccat

SEQ ID NO: 181173 - DNA, 120 bp, Artificial Sequence
  ENSG00000111058_123 (sequence is synthesized)
aaggtggtggtggtggagaagaaagcttgggtgggttggtagccagatggagacgcaactgttccgcggcggcagatcttcagttgcggtgcggagctgagcagagacagagactgactg

SEQ ID NO: 181174 - DNA, 120 bp, Artificial Sequence
  ENSG00000111058_124 (sequence is synthesized)
tgatgcccaggcttatctctaactcgtggcctcaagcaatcctcttgcctcaggctcccaaagcacttggattaccggataagctgtagacatgtttttaaaggtggatatgtgcctgta

SEQ ID NO: 181175 - DNA, 120 bp, Artificial Sequence
  ENSG00000111058_125 (sequence is synthesized)
ttttttttttttttttttgcattcctgtatgtgttttatttcatttttatttttataaaataaaaggaatctaaggaatttcataaaaaactaaagaaagaggaggggcaaaatgaatat

SEQ ID NO: 181176 - DNA, 120 bp, Artificial Sequence
  ENSG00000111058_126 (sequence is synthesized)
aatagagtctcagtgtggctggggaatcttaccatggtgaagggacaacactgccacctgatacttggaaaggacattaatgatagctaggacttgtttgtttgggacgctggctttatt

SEQ ID NO: 181177 - DNA, 120 bp, Artificial Sequence
  ENSG00000111058_127 (sequence is synthesized)
taaaacatggttaaaatggctttctcttgaggagcacctcaatatctgacttctatccctttaaatatagcttaacttactccttccaccagcaaaatttatctctaattttggtagtat

SEQ ID NO: 181178 - DNA, 120 bp, Artificial Sequence
  ENSG00000111058_128 (sequence is synthesized)
ggaattaatgaaagatattaggaagaaacagatgaacaggccatcttcaaattcttcacattcttacactgaacagtaattggggctagtaacagaatttactctaagtgtgctgggaaa

SEQ ID NO: 181179 - DNA, 120 bp, Artificial Sequence
  ENSG00000111058_129 (sequence is synthesized)
catacatgtcagtaattagcaagtttaagagctaaatgcacaattagcatggacagcacattcagtagagaattccaaactctctttagttttatcctccaatgctctaatttggagcaa

SEQ ID NO: 181180 - DNA, 120 bp, Artificial Sequence
  ENSG00000111058_130 (sequence is synthesized)
aaaatgctataattttagttagtttatatttaaatatcatctttctgggcccagcctaaaacatagagtgcccttttctcaaaactaattaggaggatcaaattatgctcctctaaaact

SEQ ID NO: 181181 - DNA, 120 bp, Artificial Sequence
  ENSG00000111058_131 (sequence is synthesized)
gagttccttactctcaacttctgtggtttcctggcttttctggtcctggaggaactcttacactcttgcccctcaggtgggcctttctgaccctgtaatctccttataccattcctgagt

SEQ ID NO: 181182 - DNA, 120 bp, Artificial Sequence
  ENSG00000111058_132 (sequence is synthesized)
ctatgccattacacaaggcagatccacttcctgaaatgcagtatctctgagaagtttcctcttctaaagttttcttaattttgcttattgctttaagcatttactcacataataaatcca

SEQ ID NO: 181183 - DNA, 120 bp, Artificial Sequence
  ENSG00000111058_133 (sequence is synthesized)
gttgtgactttattgtagtcttttagggatttaactagaatgggagcaaacgaggcaattgaagatggttttaactctatgttagtatctcaaggctcctgtcacccagaatattgcata

SEQ ID NO: 181184 - DNA, 120 bp, Artificial Sequence
  ENSG00000111058_134 (sequence is synthesized)
gattaattgtggtaaaccaacctgaatatttttatttagacctcaaatcaaagaaatccccaaaaagtagagacagcaagcaaatctctgccatctttatcaaggtaagataagcaaaca

SEQ ID NO: 181185 - DNA, 120 bp, Artificial Sequence
  ENSG00000111058_135 (sequence is synthesized)
aactattaactcttttatatatcttatatattctttcctttacaagagtttttgttttggaattttaaacataagacaatgcacatgtcaaacaattcaaaaggtactgcagaaacccac

SEQ ID NO: 181186 - DNA, 120 bp, Artificial Sequence
  ENSG00000111058_136 (sequence is synthesized)
ccactcaatcacaagtcatcaatgttaagaaggattttttttgtatatttaataccatatattgtatgaaatatatataacatatattacatgtgcacatatctttttaaaattccaagt

SEQ ID NO: 181187 - DNA, 120 bp, Artificial Sequence
  ENSG00000111058_137 (sequence is synthesized)
tgcatatttatttattttattttagtgatattttcatatcaatacatatagatctatataattcttcttaactacttcataacatttcattaaaatagcctgtcataggtgtactctccg

SEQ ID NO: 181188 - DNA, 120 bp, Artificial Sequence
  ENSG00000111058_138 (sequence is synthesized)
tgtcataggtgtactctccggttgtttctaggcttttgctatctcaaacagggctatgaatgaaaatcagtcttgtttatagcatctttataaacatgaactccactcaattatgacctt

SEQ ID NO: 181189 - DNA, 120 bp, Artificial Sequence
  ENSG00000111058_139 (sequence is synthesized)
gattataatacctgcgatggatttattcctgcttcattgcatgcattctttcatatgccatttgttaccacttatttataaaaatgtcatatttaattgaatttataaaacctaaagtga

SEQ ID NO: 181190 - DNA, 120 bp, Artificial Sequence
  ENSG00000111058_140 (sequence is synthesized)
ttaaaagcaaaaaactagtcaccatagactgatgacaatttttccatttgaaatacgtggtatcatgcactatccagctgactattcagtaagtcaagagatcatgacaataattttcta

SEQ ID NO: 181191 - DNA, 120 bp, Artificial Sequence
  ENSG00000111058_141 (sequence is synthesized)
gtcaagagatcatgacaataattttctactaagaaacaaatggtatatatgtctgaaggaagataaaaattaaaagcctaaaagtaccgctttttgcagtgactcacgcctgtaatccca

SEQ ID NO: 181192 - DNA, 82 bp, Artificial Sequence
  ENSG00000111058_142 (sequence is synthesized)
gtgacagaccaagactccaactaggaaaaaaaagtatgtatttatcatgtaccacatgatgtttttaagtatatacatcaca

SEQ ID NO: 181193 - DNA, 120 bp, Artificial Sequence
  ENSG00000111058_143 (sequence is synthesized)
tatcatgtaccacatgatgtttttaagtatatacatcacagaatgacatgtctagctaattaacatatgtattaactcatcatattattattatagtgatgagaacactttacatccact

SEQ ID NO: 181194 - DNA, 120 bp, Artificial Sequence
  ENSG00000111058_144 (sequence is synthesized)
ctcttatgtcaagaatacatagattactaactgtagtcattatgctgtacagtagagccacttttagatatttgttttattgaacattttatttccattaaatgaaatagtataggaaca

SEQ ID NO: 181195 - DNA, 120 bp, Artificial Sequence
  ENSG00000111058_145 (sequence is synthesized)
caatgaaaacacagagatgtttaagtactttcattttcaaataaaatgacatgttgatttattaactgaatcaaaaagctaagtacaacttaaaacaataaatactattctttcattaaa

SEQ ID NO: 181196 - DNA, 120 bp, Artificial Sequence
  ENSG00000111058_146 (sequence is synthesized)
ttttattagtagttagtaatgcaaagactattttaaaagctagtgcatatagtgctctctactggccttatctttattacaactacaatcagtgtcgagtttgtagttatatgggaacca

SEQ ID NO: 181197 - DNA, 120 bp, Artificial Sequence
  ENSG00000111058_147 (sequence is synthesized)
tcatgaaaatcttctatactgcaactacaatcatcgtcaaatttgtagttatgtaggaaacatcatgataaacttctgtctccgaagactaatagtattttaattttaatttctttttgt

SEQ ID NO: 181198 - DNA, 120 bp, Artificial Sequence
  ENSG00000111058_148 (sequence is synthesized)
tttctcctttaggggtgtgtgtgtgtatatgtatgtgcattcaaaaacattcattcttgaacttctatactgaagtcagttgtgaattctgcaaataagttgctggcatacatcatcaca

SEQ ID NO: 181199 - DNA, 120 bp, Artificial Sequence
  ENSG00000111058_149 (sequence is synthesized)
aataatcatgtaataaagagaaaatacaaaaaagatggatgtagaacaataaccgaactgaaaacattatgccttacataagtcagtagcagctacaatgcttgcttttattgtctttgg

SEQ ID NO: 181200 - DNA, 120 bp, Artificial Sequence
  ENSG00000111077_0 (sequence is synthesized)
gcacattctttcaagtgacagctatagcctgtcccaggggctgctgtccacagcttggggctgaagactcccaggccattaaccccttagcttttaggaagattactccccctttttcaa

SEQ ID NO: 181201 - DNA, 120 bp, Artificial Sequence
  ENSG00000111077_1 (sequence is synthesized)
ggccccatccacctccctcccttgactcccaggacgggaagttggccatgttcccaggagggaggccggaggcccatggatgggggtggagtatgtgttgggaggggggacctcctgtcc

SEQ ID NO: 181202 - DNA, 120 bp, Artificial Sequence
  ENSG00000111077_2 (sequence is synthesized)
agtcctcaggccctgggacagctgctgaggaaggagagcagacccaggagagccatgaagcctaggaaagctgagcctcatagcttccgggagaaggttttccggaagaaacctccagtc

SEQ ID NO: 181203 - DNA, 120 bp, Artificial Sequence
  ENSG00000111077_3 (sequence is synthesized)
tgtgcagtatgtaaggtgaccatcgatgggacaggcgtttcgtgcagagtctgcaaggtggcgacgcacagaaaatgtgaagcaaaggtgacttcagcctgtcaggccttgcctcccgtg

SEQ ID NO: 181204 - DNA, 120 bp, Artificial Sequence
  ENSG00000111077_4 (sequence is synthesized)
gagttgcggcgaaacacggccccagtcaggcgcatagagcacctgggatccaccaaatctctgaaccactcaaagcagcgcagcactctgcccaggagcttcagcctggacccgctcatg

SEQ ID NO: 181205 - DNA, 120 bp, Artificial Sequence
  ENSG00000111077_5 (sequence is synthesized)
gagcggcgctgggacttagacctcacctacgtgacggagcgcatcttggccgccgccttccccgcgcggcccgatgaacagcggcaccggggccacctgcgcgagctggcccatgtgctg

SEQ ID NO: 181206 - DNA, 120 bp, Artificial Sequence
  ENSG00000111077_6 (sequence is synthesized)
caatccaagcaccgggacaagtacctgctcttcaacctttcagagaaaaggcatgacctgacccgcttaaaccccaaggttcaagacttcggctggcctgagctgcatgctccacccctg

SEQ ID NO: 181207 - DNA, 120 bp, Artificial Sequence
  ENSG00000111077_7 (sequence is synthesized)
gacaagctgtgctccatctgcaaagccatggagacatggctcagtgctgacccacagcacgtggtcgtactatactgcaagggaaacaagggcaagcttggggtcatcgtttctgcctac

SEQ ID NO: 181208 - DNA, 120 bp, Artificial Sequence
  ENSG00000111077_8 (sequence is synthesized)
atgcactacagcaagatctctgcaggggcggaccaggcactggccactcttaccatgcggaaattctgcgaggacaaggtggccacagaactgcagccctcccagcgtcgatatatcagc

SEQ ID NO: 181209 - DNA, 120 bp, Artificial Sequence
  ENSG00000111077_9 (sequence is synthesized)
tacttcagtgggctgctatctggctccatcagaatgaacagcagccctctcttcctgcactatgtgctcatccccatgctgccagcctttgaacctggcacaggcttccagcccttcctt

SEQ ID NO: 181210 - DNA, 120 bp, Artificial Sequence
  ENSG00000111077_10 (sequence is synthesized)
aaaatctaccagtccatgcagcttgtctacacatctggagtctatcacattgcaggccctggtccccagcagctttgcatcagcctggagccagccctcctcctcaaaggcgatgtcatg

SEQ ID NO: 181211 - DNA, 120 bp, Artificial Sequence
  ENSG00000111077_11 (sequence is synthesized)
gtaacatgttatcacaagggtggccggggcacagaccggaccctcgtgttccgagtccagttccacacctgcaccatccacggaccacagctcactttccccaaggaccagcttgacgag

SEQ ID NO: 181212 - DNA, 120 bp, Artificial Sequence
  ENSG00000111077_12 (sequence is synthesized)
gcctggactgatgagaggttccccttccaagcctccgtggagtttgtcttctcctccagccccgagaagatcaaaggcagcactccacggaacgacccctcggtctctgtcgactacaac

SEQ ID NO: 181213 - DNA, 120 bp, Artificial Sequence
  ENSG00000111077_13 (sequence is synthesized)
accactgagccagccgtgcgctgggactcctatgagaacttcaaccagcaccacgaggacagtgtggatggctccttgacccacacccggggtcccctggatggcagtccttatgcccag

SEQ ID NO: 181214 - DNA, 120 bp, Artificial Sequence
  ENSG00000111077_14 (sequence is synthesized)
gtgcagcggcctccccggcagacccccccggcaccctctccagagcctccaccaccccccatgctctctgtcagcagcgactcaggccattcctccacgctgaccacagagccggctgct

SEQ ID NO: 181215 - DNA, 120 bp, Artificial Sequence
  ENSG00000111077_15 (sequence is synthesized)
gagtcccctggccggccgccccctacagctgctgaacggcaggagctggatcgcctcctaggaggctgcggagtggccagtgggggccggggagctgggcgcgagacggccatcctagat

SEQ ID NO: 181216 - DNA, 120 bp, Artificial Sequence
  ENSG00000111077_16 (sequence is synthesized)
gacgaagagcagcccactgtgggcggaggcccccacctcggagtgtatccaggccataggcctggcctcagccgccactgctcctgccgccagggctaccgggagccctgcggggttccc

SEQ ID NO: 181217 - DNA, 120 bp, Artificial Sequence
  ENSG00000111077_17 (sequence is synthesized)
aatgggggctactaccggccagagggaaccctggagaggaggcgactggcctacgggggctatgagggatccccccagggctacgccgaggcctcgatggagaagaggcgcctctgccga

SEQ ID NO: 181218 - DNA, 120 bp, Artificial Sequence
  ENSG00000111077_18 (sequence is synthesized)
tcgctgtcagaggggctatacccctacccacctgagatggggaaaccagccactggggactttggctaccgcgccccaggctaccgggaggtggtcatcctggaggaccctgggctgcct

SEQ ID NO: 181219 - DNA, 120 bp, Artificial Sequence
  ENSG00000111077_19 (sequence is synthesized)
gccctatacccatgcccagcctgcgaggagaagctggcgctgcctacagcagccttgtatggactgcggctggagagggaggctggagaagggtgggcaagtgaggctggcaagcctctc

SEQ ID NO: 181220 - DNA, 120 bp, Artificial Sequence
  ENSG00000111077_20 (sequence is synthesized)
ccgctgcctctgctcttgcctgcctgtgggcatcaccatgccccgatgcctgactacagctgcctgaagccacccaaggcaggcgaggaagggcacgagggctgctcctacaccatgtgc

SEQ ID NO: 181221 - DNA, 120 bp, Artificial Sequence
  ENSG00000111077_21 (sequence is synthesized)
cccgaaggcaggtatgggcatccagggtaccctgccctggtgacatacagctatggaggagcagttcccagttactgcccagcatatggccgtgtgcctcatagctgtggctctccagga

SEQ ID NO: 181222 - DNA, 120 bp, Artificial Sequence
  ENSG00000111077_22 (sequence is synthesized)
gagggcagagggtatcccagccctggtgcccactccccacgggctggctccatttccccgggcagcccgccctatccacaatctaggaagctgagctacgagatccctacggaggaggga

SEQ ID NO: 181223 - DNA, 120 bp, Artificial Sequence
  ENSG00000111077_23 (sequence is synthesized)
ggggacaggtacccattgcctgggcacctggcctcagcaggacctttggcatctgcagagtcgctggagccggtgtcctggagggagggccccagtgggcacagcacactgcctcggtct

SEQ ID NO: 181224 - DNA, 120 bp, Artificial Sequence
  ENSG00000111077_24 (sequence is synthesized)
ccccgagatgccccatgcagtgcttcgtcagagttgtctggtccctccacgcccctgcacaccagcagtccagtccagggcaaggaaagcacccggcgacaggacaccaggtcccccacc

SEQ ID NO: 181225 - DNA, 120 bp, Artificial Sequence
  ENSG00000111077_25 (sequence is synthesized)
tcagcgcccactcagagactgagtcctggcgaggccttgccccctgtttcccaggcaggcaccggaaaggcccctgagctgccgtcgggaagtgggcctgagcctctggcccctagccca

SEQ ID NO: 181226 - DNA, 120 bp, Artificial Sequence
  ENSG00000111077_26 (sequence is synthesized)
gtctctccgaccttccctcccagctcgcccagtgactggcctcaggaaaggagtccagggggccactcagatggcgccagtcctcggagccctgtgcccaccacacttcctggcctccgc

SEQ ID NO: 181227 - DNA, 120 bp, Artificial Sequence
  ENSG00000111077_27 (sequence is synthesized)
cacgccccctggcaaggccctcgaggcccccccgacagcccagatgggtctcccctcactcctgtgccttcccagatgccctggcttgtggccagcccagagccgcctcagagctcacct

SEQ ID NO: 181228 - DNA, 120 bp, Artificial Sequence
  ENSG00000111077_28 (sequence is synthesized)
acacctgctttccccctggctgcctcctatgacaccaatggccttagccagcccccacttcctgagaaacgccacctgcccgggccggggcaacagccaggaccctggggcccagagcag

SEQ ID NO: 181229 - DNA, 120 bp, Artificial Sequence
  ENSG00000111077_29 (sequence is synthesized)
gcatcatcgccagccagaggcatcagtcaccatgtcaccttcgcacctctgctctcagataatgtcccccaaaccccagagcctcctacacaagagagccaaagcaatgtcaagtttgtc

SEQ ID NO: 181230 - DNA, 120 bp, Artificial Sequence
  ENSG00000111077_30 (sequence is synthesized)
caggatacatccaagttctggtacaagccacacctgtcccgtgaccaagccattgccctgctgaaggacaaggaccctggggccttcctgatcagggacagtcattcattccaaggagct

SEQ ID NO: 181231 - DNA, 120 bp, Artificial Sequence
  ENSG00000111077_31 (sequence is synthesized)
tatgggctggccctcaaggtggccacaccgccacccagtgcccagccctggaaaggggaccccgtggaacagctggtccgccatttcctcatcgagactgggcccaaaggggtgaagatc

SEQ ID NO: 181232 - DNA, 120 bp, Artificial Sequence
  ENSG00000111077_32 (sequence is synthesized)
aagggctgccccagtgagccctactttggcagcctgtccgccttggtctcccagcactccatctcccccatctccctgccctgctgcctgcgcattcccagcaaagatcctctggaagag

SEQ ID NO: 181233 - DNA, 120 bp, Artificial Sequence
  ENSG00000111077_33 (sequence is synthesized)
accccagaggctccagtgcccaccaacatgagcacagcggcagacctcctgcgtcagggtgctgcctgcagcgtgctctacttgacctcagtggagacagagtcactgacgggcccccaa

SEQ ID NO: 181234 - DNA, 120 bp, Artificial Sequence
  ENSG00000111077_34 (sequence is synthesized)
gctgtggcccgggccagctctgcagctctgagctgtagcccccgcccgacaccagctgttgtccacttcaaggtgtcagcccagggcattacactgacggacaaccaaaggaagctcttc

SEQ ID NO: 181235 - DNA, 120 bp, Artificial Sequence
  ENSG00000111077_35 (sequence is synthesized)
tttcgccgccattatccagtgaacagcatcaccttctccagcactgaccctcaagaccggagatggaccaacccagacgggaccacctccaagatctttggtttcgtggccaagaagccg

SEQ ID NO: 181236 - DNA, 120 bp, Artificial Sequence
  ENSG00000111077_36 (sequence is synthesized)
ggaagcccctgggagaatgtgtgtcacctctttgcagagcttgacccagatcagcctgctggcgccattgtcaccttcatcaccaaagttctactgggccagagaaaatgaaggaaggcc

SEQ ID NO: 181237 - DNA, 120 bp, Artificial Sequence
  ENSG00000111077_37 (sequence is synthesized)
acaagctcagagcccacatcaacactgcccccctcccagcaccccacagccctcacatcccctggcctggacccaggagacccaggagaaagcaccctcccttaggaatgaggagtgggc

SEQ ID NO: 181238 - DNA, 120 bp, Artificial Sequence
  ENSG00000111077_38 (sequence is synthesized)
atcaggcctgggacactgctctccttccccgcccccagcctgctaagttaagtggacaggcccacaagatgaccttgcatgtgagcagatggcagagatgggtgtgtgaggggtgaggag

SEQ ID NO: 181239 - DNA, 120 bp, Artificial Sequence
  ENSG00000111077_39 (sequence is synthesized)
gcatcagcagttgagccccgaaggagatcaggcagccccacctgcaggagaacgtcagccctccaggggatcagcccctgccagttccacccagctgcaggtgccagcacggcagggatg

SEQ ID NO: 181240 - DNA, 120 bp, Artificial Sequence
  ENSG00000111077_40 (sequence is synthesized)
ggagaggggtggggagcgagtcactgcctcctctgagcagagattcagagtaggatcacatgaataggggaaaaaagagagtctatttttgtctaataataaagaatttctataaacttt

SEQ ID NO: 181241 - DNA, 120 bp, Artificial Sequence
  ENSG00000111077_41 (sequence is synthesized)
gggggagcaaaagatcacaggctgacactcccagcagggtagatcctgggaatctgatctcctggcctcccccacatcctcccccctccacttcctggagcagcgacctgcccccttccc

SEQ ID NO: 181242 - DNA, 120 bp, Artificial Sequence
  ENSG00000111077_42 (sequence is synthesized)
gcctgcacttccctccacttccagggccgggcttctcctcacaccagccagacagcctaccctccgcccaggggaagcggctgcctccgccaggccgcttccaggaagccccgggccagg

SEQ ID NO: 181243 - DNA, 120 bp, Artificial Sequence
  ENSG00000111077_43 (sequence is synthesized)
ccccagcattgttcaggccctggggccagcaccccagccagccgaacaccatgaagtccagcggccctgtggagaggctgctcagagccctggggaggagggacagcagccgggccgcaa

SEQ ID NO: 181244 - DNA, 120 bp, Artificial Sequence
  ENSG00000111077_44 (sequence is synthesized)
caactctctccccctctcagccacttcctgtctccagtatgtccctggcgcggcccggctggccgtctgcgcaccctctctcccctcggctctttcctaggaaagctgagcctcatagct

SEQ ID NO: 181245 - DNA, 120 bp, Artificial Sequence
  ENSG00000111077_45 (sequence is synthesized)
gctggggtggtcccacgtgaccccctttccgccggccccacacctcagcccagggcactgccccgcaacagagctccccgggacagccccccacccccaaagcggtattctccctccaga

SEQ ID NO: 181246 - DNA, 120 bp, Artificial Sequence
  ENSG00000111077_46 (sequence is synthesized)
ccgatccacccaccctcaggacccagcaggcttcacctgctgcccaacagacagccttcccgtcacactagccacctccgggtgccccgcccctgcgttcatgcgtaggctcctcctccc

SEQ ID NO: 181247 - DNA, 120 bp, Artificial Sequence
  ENSG00000111077_47 (sequence is synthesized)
agggctcagactctggtctcctggctccccctgactgcatagctgcctctgcacgcaggagcttctggttcatctctgccttctcctctctccccacagtcacattgcaggccctggtcc

SEQ ID NO: 181248 - DNA, 120 bp, Artificial Sequence
  ENSG00000111077_48 (sequence is synthesized)
ccgagaagatcaaaggtaagagcagggacatgggctggggactgagggccgcctctcccctgctccccaatacccgagtggccttccacaggcagcactccacggaacgacccctcggtc

SEQ ID NO: 181249 - DNA, 120 bp, Artificial Sequence
  ENSG00000111077_49 (sequence is synthesized)
ggcagagaccatggagcttggcagcagaggaggggggctgcatggggctcagtccacccctgtgaaaactcctccccactgcccgctacccctcaccctgcagccattgccctgctgaag

SEQ ID NO: 181250 - DNA, 120 bp, Artificial Sequence
  ENSG00000111077_50 (sequence is synthesized)
ccaaacctgagtggggtggggatgaagttgggggtggtgccagaggcaaggtaacagggcaggtgggggtgctgtgctggccatgccgctgtagaggggagaggtaggaaaagacctcag

SEQ ID NO: 181251 - DNA, 120 bp, Artificial Sequence
  ENSG00000111077_51 (sequence is synthesized)
ctgctcgggaaagaatcccattagggaagaagctggaacctggaatcctaaagccgcaatcttcccctcgcctcctctcaggggaccccgtggaacagctggtccgccatttcctcatcg

SEQ ID NO: 181252 - DNA, 120 bp, Artificial Sequence
  ENSG00000111077_52 (sequence is synthesized)
tccctgggcaccaagggggcattgtggatacagggcatggggcactgaaaggccttgaggtgggtgagccctggccaacccatgagggcaggggagccccatactgtcggggatgaggaa

SEQ ID NO: 181253 - DNA, 120 bp, Artificial Sequence
  ENSG00000111077_53 (sequence is synthesized)
ttttaacaagtcacctatgtgattgtaaagcatgtgacagcagtagctggggaatgtgcaagagctggtgggggtggctaggggatgggcactccctccctgacccactccctgcccctg

SEQ ID NO: 181254 - DNA, 120 bp, Artificial Sequence
  ENSG00000111077_54 (sequence is synthesized)
ccatcgatgggacaggcgtttcgtgcagaggtgaggctctctgtcctgtgactctgagaccctccacccagtaccactgtgttgcacaactccagcaggccagctcacacaatctcaaat

SEQ ID NO: 181255 - DNA, 120 bp, Artificial Sequence
  ENSG00000111077_55 (sequence is synthesized)
tgacagacacctcccataacccaggagagccagtactctccatcaccttcccatcctgacttgtgacggtagtcttccttccctctcttcctcctcacctccacccaccctggaacgtta

SEQ ID NO: 181256 - DNA, 120 bp, Artificial Sequence
  ENSG00000111077_56 (sequence is synthesized)
cccctggcctgggcagtagtaccccactgccacactcttccctcaaaacctagccctgctcctctgccccagccagcccagtccaggtgggatcttggaagtcccagggtctggttccag

SEQ ID NO: 181257 - DNA, 120 bp, Artificial Sequence
  ENSG00000111077_57 (sequence is synthesized)
ggccatggtgtccagaggtctggtggctccagagagggcccccaggagatgaccttgaacggagtgctgtgggtattgctcatcctatgaggaaagaaaaaactgtctgagtcctctgct

SEQ ID NO: 181258 - DNA, 120 bp, Artificial Sequence
  ENSG00000111077_58 (sequence is synthesized)
gacccacagcacgtggtcgtactatactgcaaggtgggccaggacctcgggttccctggtgcctggaggttccaggtcagcctggagctcccagaccctcatccctgtctctctgtctgt

SEQ ID NO: 181259 - DNA, 120 bp, Artificial Sequence
  ENSG00000111077_59 (sequence is synthesized)
cagggaaacaagggcaagcttggggtcatcgtttctgcctacatgcactacagcaagatctctgcagggtgaggctcccagcgcctgagtagctgcttccccagtggccctttctccagc

SEQ ID NO: 181260 - DNA, 120 bp, Artificial Sequence
  ENSG00000111077_60 (sequence is synthesized)
tggccccttaggaacccatctcccctggagcccacctcttcgttgagagtcctttgctgtcagcttagcacttccacctcccttttatcactagtactgcaacatagtctgcagcagatg

SEQ ID NO: 181261 - DNA, 120 bp, Artificial Sequence
  ENSG00000111077_61 (sequence is synthesized)
ctgcaacatagtctgcagcagatggtctgtagagtttcctggggcagccacaaacagggtggtgtaaaacagtggaaatgggccgggtgcgttggctcacgcctgtaataccagcacttt

SEQ ID NO: 181262 - DNA, 120 bp, Artificial Sequence
  ENSG00000111077_62 (sequence is synthesized)
tccagcactgaccctcaagaccggaggtgactctccctccaaaccctttgccccaaatccccatggtcccaccaggtcccagctcccagccccagccccagccccggccccggcccccct

SEQ ID NO: 181263 - DNA, 120 bp, Artificial Sequence
  ENSG00000111087_0 (sequence is synthesized)
gtaagcagtatagggtccctcaagggagggggaggatcctgggggtcctgggggtgcaataagcccggcaccccttctcttgcttccagctaccccgcctcatcctccagaacggcaaga

SEQ ID NO: 181264 - DNA, 120 bp, Artificial Sequence
  ENSG00000111087_1 (sequence is synthesized)
gggagggaaatagaagggaggtgaggggcgagcgggaagagcggcggcgcgccagcggctggagagagaaaaagtttttgcaaaagggaaaaaaaaagtttgcgcttctcgcgggtggtc

SEQ ID NO: 181265 - DNA, 120 bp, Artificial Sequence
  ENSG00000111087_2 (sequence is synthesized)
aaaaaaaaagtttgcgcttctcgcgggtggtccgggcttgcggcccggcgggctgggccggcgggagggctgggggccaggttgggggggtgggggtggcatcgaggctgcgctgccgtg

SEQ ID NO: 181266 - DNA, 120 bp, Artificial Sequence
  ENSG00000111087_3 (sequence is synthesized)
ccccagcccagactccagccctggaccgcgcatcccgagcccagcgcccagacagagtgtccccacaccctcctctgagacgccatgttcaactcgatgaccccaccaccaatcagtagc

SEQ ID NO: 181267 - DNA, 120 bp, Artificial Sequence
  ENSG00000111087_4 (sequence is synthesized)
tatggcgagccctgctgtctccggcccctccccagtcagggggcccccagtgtggggacagaaggactgtctggcccgcccttctgccaccaagctaacctcatgtccggcccccacagt

SEQ ID NO: 181268 - DNA, 120 bp, Artificial Sequence
  ENSG00000111087_5 (sequence is synthesized)
tatgggccagccagagagaccaacagctgcaccgagggcccactcttttcttctccccggagtgcagtcaagttgaccaagaagcgggcactgtccatctcacctctgtcggatgccagc

SEQ ID NO: 181269 - DNA, 120 bp, Artificial Sequence
  ENSG00000111087_6 (sequence is synthesized)
ctggacctgcagacggttatccgcacctcacccagctccctcgtagctttcatcaactcgcgatgcacatctccaggaggctcctacggtcatctctccattggcaccatgagcccatct

SEQ ID NO: 181270 - DNA, 120 bp, Artificial Sequence
  ENSG00000111087_7 (sequence is synthesized)
ctgggattcccagcccagatgaatcaccaaaaagggccctcgccttcctttggggtccagccttgtggtccccatgactctgcccggggtgggatgatcccacatcctcagtcccgggga

SEQ ID NO: 181271 - DNA, 120 bp, Artificial Sequence
  ENSG00000111087_8 (sequence is synthesized)
cccttcccaacttgccagctgaagtctgagctggacatgctggttggcaagtgccgggaggaacccttggaaggtgatatgtccagccccaactccacaggcatacaggatcccctgttg

SEQ ID NO: 181272 - DNA, 120 bp, Artificial Sequence
  ENSG00000111087_9 (sequence is synthesized)
gggatgctggatgggcgggaggacctcgagagagaggagaagcgtgagcctgaatctgtgtatgaaactgactgccgttgggatggctgcagccaggaatttgactcccaagagcagctg

SEQ ID NO: 181273 - DNA, 120 bp, Artificial Sequence
  ENSG00000111087_10 (sequence is synthesized)
gtgcaccacatcaacagcgagcacatccacggggagcggaaggagttcgtgtgccactgggggggctgctccagggagctgaggcccttcaaagcccagtacatgctggtggttcacatg

SEQ ID NO: 181274 - DNA, 120 bp, Artificial Sequence
  ENSG00000111087_11 (sequence is synthesized)
cgcagacacactggcgagaagccacacaagtgcacgtttgaagggtgccggaagtcatactcacgcctcgaaaacctgaagacgcacctgcggtcacacacgggtgagaagccatacatg

SEQ ID NO: 181275 - DNA, 120 bp, Artificial Sequence
  ENSG00000111087_12 (sequence is synthesized)
tgtgagcacgagggctgcagtaaagccttcagcaatgccagtgaccgagccaagcaccagaatcggacccattccaatgagaagccgtatgtatgtaagctccctggctgcaccaaacgc

SEQ ID NO: 181276 - DNA, 120 bp, Artificial Sequence
  ENSG00000111087_13 (sequence is synthesized)
tatacagatcctagctcgctgcgaaaacatgtcaagacagtgcatggtcctgacgcccatgtgaccaaacggcaccgtggggatggccccctgcctcgggcaccatccatttctacagtg

SEQ ID NO: 181277 - DNA, 120 bp, Artificial Sequence
  ENSG00000111087_14 (sequence is synthesized)
gagcccaagagggagcgggaaggaggtcccatcagggaggaaagcagactgactgtgccagagggtgccatgaagccacagccaagccctggggcccagtcatcctgcagcagtgaccac

SEQ ID NO: 181278 - DNA, 120 bp, Artificial Sequence
  ENSG00000111087_15 (sequence is synthesized)
tccccggcagggagtgcagccaatacagacagtggtgtggaaatgactggcaatgcagggggcagcactgaagacctctccagcttggacgagggaccttgcattgctggcactggtctg

SEQ ID NO: 181279 - DNA, 120 bp, Artificial Sequence
  ENSG00000111087_16 (sequence is synthesized)
cgccttgagaacctcaggctggaccagctacatcaactccggccaatagggacccggggtctcaaactgcccagcttgtcccacaccggtaccactgtgtcccgccgcgtgggcccccca

SEQ ID NO: 181280 - DNA, 120 bp, Artificial Sequence
  ENSG00000111087_17 (sequence is synthesized)
gtctctcttgaacgccgcagcagcagctccagcagcatcagctctgcctatactgtcagccgccgctcctccctggcctctcctttcccccctggctccccaccagagaatggagcatcc

SEQ ID NO: 181281 - DNA, 120 bp, Artificial Sequence
  ENSG00000111087_18 (sequence is synthesized)
tccctgcctggccttatgcctgcccagcactacctgcttcgggcaagatatgcttcagccagagggggtggtacttcgcccactgcagcatccagcctggatcggataggtggtcttccc

SEQ ID NO: 181282 - DNA, 120 bp, Artificial Sequence
  ENSG00000111087_19 (sequence is synthesized)
atgcctccttggagaagccgagccgagtatccaggatacaaccccaatgcaggggtcacccggagggccagtgacccagcccaggctgctgaccgtcctgctccagctagagtccagagg

SEQ ID NO: 181283 - DNA, 120 bp, Artificial Sequence
  ENSG00000111087_20 (sequence is synthesized)
ttcaagagcctgggctgtgtccataccccacccactgtggcagggggaggacagaactttgatccttacctcccaacctctgtctactcaccacagccccccagcatcactgagaatgct

SEQ ID NO: 181284 - DNA, 120 bp, Artificial Sequence
  ENSG00000111087_21 (sequence is synthesized)
gccatggatgctagagggctacaggaagagccagaagttgggacctccatggtgggcagtggtctgaacccctatatggacttcccacctactgatactctgggatatgggggacctgaa

SEQ ID NO: 181285 - DNA, 120 bp, Artificial Sequence
  ENSG00000111087_22 (sequence is synthesized)
ggggcagcagctgagccttatggagcgaggggtccaggctctctgcctcttgggcctggtccacccaccaactatggccccaacccctgtccccagcaggcctcatatcctgaccccacc

SEQ ID NO: 181286 - DNA, 120 bp, Artificial Sequence
  ENSG00000111087_23 (sequence is synthesized)
caagaaacatggggtgagttcccttcccactctgggctgtacccaggccccaaggctctaggtggaacctacagccagtgtcctcgacttgaacattatggacaagtgcaagtcaagcca

SEQ ID NO: 181287 - DNA, 120 bp, Artificial Sequence
  ENSG00000111087_24 (sequence is synthesized)
gaacaggggtgcccagtggggtctgactccacaggactggcaccctgcctcaatgcccaccccagtgaggggcccccacatccacagcctctcttttcccattacccccagccctctcct

SEQ ID NO: 181288 - DNA, 120 bp, Artificial Sequence
  ENSG00000111087_25 (sequence is synthesized)
ccccaatatctccagtcaggcccctatacccagccaccccctgattatcttccttcagaacccaggccttgcctggactttgattcccccacccattccacagggcagctcaaggctcag

SEQ ID NO: 181289 - DNA, 120 bp, Artificial Sequence
  ENSG00000111087_26 (sequence is synthesized)
cttgtgtgtaattatgttcaatctcaacaggagctactgtgggagggtgggggcagggaagatgcccccgcccaggaaccttcctaccagagtcccaagtttctggggggttcccaggtt

SEQ ID NO: 181290 - DNA, 120 bp, Artificial Sequence
  ENSG00000111087_27 (sequence is synthesized)
agcccaagccgtgctaaagctccagtgaacacatatggacctggctttggacccaacttgcccaatcacaagtcaggttcctatcccaccccttcaccatgccatgaaaattttgtagtg

SEQ ID NO: 181291 - DNA, 120 bp, Artificial Sequence
  ENSG00000111087_28 (sequence is synthesized)
ggggcaaatagggcttcacatagggcagcagcaccacctcgacttctgcccccattgcccacttgctatgggcctctcaaagtgggaggcacaaaccccagctgtggtcatcctgaggtg

SEQ ID NO: 181292 - DNA, 120 bp, Artificial Sequence
  ENSG00000111087_29 (sequence is synthesized)
ggcaggctaggagggggtcctgccttgtaccctcctcccgaaggacaggtatgtaaccccctggactctcttgatcttgacaacactcagctggactttgtggctattctggatgagccc

SEQ ID NO: 181293 - DNA, 120 bp, Artificial Sequence
  ENSG00000111087_30 (sequence is synthesized)
caggggctgagtcctcctccttcccatgatcagcggggcagctctggacataccccacctccctctgggccccccaacatggctgtgggcaacatgagtgtcttactgagatccctacct

SEQ ID NO: 181294 - DNA, 120 bp, Artificial Sequence
  ENSG00000111087_31 (sequence is synthesized)
ggggaaacagaattcctcaactctagtgcctaaagagtagggaatctcatccatcacagatcgcatttcctaaggggtttctatccttccagaaaaattgggggagctgcagtcccatgc

SEQ ID NO: 181295 - DNA, 120 bp, Artificial Sequence
  ENSG00000111087_32 (sequence is synthesized)
acaagatgccccagggatgggaggtatgggctgggggctatgtatagtctgtatacgttttgaggagaaatttgataatgacactgtttcctgataataaaggaactgcatcagaaaaaa

SEQ ID NO: 181296 - DNA, 120 bp, Artificial Sequence
  ENSG00000111087_33 (sequence is synthesized)
agaggtgtgggtgctggggttcactccttgcagttgagtcagacgcttccaaatgggatcccaccttttgcccatcccattcaccagtgtagtctgaggaggaagtcccttccaaaccca

SEQ ID NO: 181297 - DNA, 120 bp, Artificial Sequence
  ENSG00000111087_34 (sequence is synthesized)
ggaggttccagctgcttgggtgggggcacttagggcaggaagacctggcttggtttcctcttccttctgcttacttccaccctcatcaccgtcacctcttcccctggggaagctgaagtc

SEQ ID NO: 181298 - DNA, 120 bp, Artificial Sequence
  ENSG00000111087_35 (sequence is synthesized)
agactgaggttgaatgctcagttgggtaggcagaagctcagaagttgtagctttgccttagggagctggaagacctgagatgtgagatatgatattgctcctgcctcttcctccttgagg

SEQ ID NO: 181299 - DNA, 120 bp, Artificial Sequence
  ENSG00000111110_0 (sequence is synthesized)
acatgacccggcggcagtagccgtggcagcagccgcggcggctccgcgagctcgccgggtgggctcagttcagcgcacgccggagccgagcgcagggggcggggaagggacctgctgcag

SEQ ID NO: 181300 - DNA, 120 bp, Artificial Sequence
  ENSG00000111110_1 (sequence is synthesized)
ctgcagccgcctgggcgctcctggagcgcgcggtgactcccccggtcggcccgctccatgcagctccgttgcggaagtgtagcggggggaggcggcggccaccgcggcactaagcacgag

SEQ ID NO: 181301 - DNA, 120 bp, Artificial Sequence
  ENSG00000111110_2 (sequence is synthesized)
cggcactaagcacgagaggccggggctcggccccctgcagcactaggctctgggagccgcgcgcggcgcgtcccagtggcccgactcgccgtgcgcccggcgcccaccgcagcctgcatg

SEQ ID NO: 181302 - DNA, 120 bp, Artificial Sequence
  ENSG00000111110_3 (sequence is synthesized)
gcccggcccccgccgcctcctgctcgcaccgctgcagccgggcgccggagtaatatgctcactcgagtgaaatctgccgtggccaatttcatgggcggcatcatggctggcagctcaggc

SEQ ID NO: 181303 - DNA, 120 bp, Artificial Sequence
  ENSG00000111110_4 (sequence is synthesized)
tccgagcacggcggcggcagctgcggaggctcggacctgcccctgcgtttcccctacgggcggccagagttcctggggctgtctcaggacgaggtggagtgcagcgccgaccacatcgcc

SEQ ID NO: 181304 - DNA, 120 bp, Artificial Sequence
  ENSG00000111110_5 (sequence is synthesized)
cgccccatcctcatcctcaaggagactcggcggctgccctgggccactggctacgcagaggttatcaatgccgggaagagcacacacaatgaagaccaagccagctgtgaggtgctcact

SEQ ID NO: 181305 - DNA, 120 bp, Artificial Sequence
  ENSG00000111110_6 (sequence is synthesized)
gtgaagaagaaggcaggggccgtgacctcaaccccaaacaggaactcatccaagagacggtcctcccttcccaatggggaagggctgcagctgaaggagaactcggaatccgagggtgtt

SEQ ID NO: 181306 - DNA, 120 bp, Artificial Sequence
  ENSG00000111110_7 (sequence is synthesized)
tcctgccactattggtcgctgtttgacgggcacgcggggtccggggccgcggtggtggcgtcacgcctgctgcagcaccacatcacggagcagctgcaggacatcgtggacatcctgaag

SEQ ID NO: 181307 - DNA, 120 bp, Artificial Sequence
  ENSG00000111110_8 (sequence is synthesized)
aactccgccgtcctgccccctacctgcctgggggaggagcctgagaacacgcccgccaacagccggactctgacccgggcagcctccctgcgcggaggggtgggggccccgggctccccc

SEQ ID NO: 181308 - DNA, 120 bp, Artificial Sequence
  ENSG00000111110_9 (sequence is synthesized)
agcacgccccccacacgcttctttaccgagaagaagattccccatgagtgcctggtcatcggagcgcttgaaagtgcattcaaggaaatggacctacagatagaacgagagaggagttca

SEQ ID NO: 181309 - DNA, 120 bp, Artificial Sequence
  ENSG00000111110_10 (sequence is synthesized)
tataatatatctggtggctgcacggccctcattgtgatttgccttttggggaagctgtatgttgcaaatgctggggatagcagggccataatcatcagaaatggagaaattatccccatg

SEQ ID NO: 181310 - DNA, 120 bp, Artificial Sequence
  ENSG00000111110_11 (sequence is synthesized)
tcttcagaatttacccccgagacggagcgccagcgacttcagtacctggcattcatgcagcctcacttgctgggaaatgagttcacacatttggagtttccaaggagagtacagagaaag

SEQ ID NO: 181311 - DNA, 120 bp, Artificial Sequence
  ENSG00000111110_12 (sequence is synthesized)
gagcttggaaagaagatgctctacagggactttaatatgacaggctgggcatacaaaaccattgaggatgaggacttgaagttcccccttatatatggagaaggcaagaaggcccgggta

SEQ ID NO: 181312 - DNA, 120 bp, Artificial Sequence
  ENSG00000111110_13 (sequence is synthesized)
atggcaactattggagtgaccaggggacttggggaccatgacctgaaggtgcatgactccaacatctacattaaaccattcctgtcttcagctccagaggtaagaatctacgatctttca

SEQ ID NO: 181313 - DNA, 120 bp, Artificial Sequence
  ENSG00000111110_14 (sequence is synthesized)
aaatatgatcatggatcagatgatgtgctgatcttggccactgatggactctgggacgttttatcaaatgaagaagtagcagaagcaatcactcagtttcttcctaactgtgatccagat

SEQ ID NO: 181314 - DNA, 120 bp, Artificial Sequence
  ENSG00000111110_15 (sequence is synthesized)
gatcctcacaggtacacactggcagctcaggacctggtgatgcgtgcccggggtgtgctgaaggacagaggatggcggatatctaatgaccgactgggctcaggagacgacatttctgta

SEQ ID NO: 181315 - DNA, 120 bp, Artificial Sequence
  ENSG00000111110_16 (sequence is synthesized)
tatgtcattcctttaatacatggaaacaagctgtcatgaaaatggcccaggggattgggaggacagaggggaagaaagctgggatgcctcttggcaggacggaactgggaagtgccccag

SEQ ID NO: 181316 - DNA, 120 bp, Artificial Sequence
  ENSG00000111110_17 (sequence is synthesized)
ctgagttccaagtgatgcagtctcttcccagcccaagcggggagttcatggccaaaagactatgcttcaagatgaccctttggtttccatttcttctttagtaacaggtcaactcaacaa

SEQ ID NO: 181317 - DNA, 120 bp, Artificial Sequence
  ENSG00000111110_18 (sequence is synthesized)
gagcaaaacacaaaggctgctaccaagtgttgttgtatttcagttcctttcataggcctccgaggtggccattgactatttggggtatatatgtcatatttattttatctagagtagctg

SEQ ID NO: 181318 - DNA, 120 bp, Artificial Sequence
  ENSG00000111110_19 (sequence is synthesized)
gggcagccattttcaggtgtaaatggcagaggactcttcagcctgtcaagctgccagcttatctacgggttaaaaagtgctgcattggaaagtagggggtcatgcctcaaaatgtaagta

SEQ ID NO: 181319 - DNA, 120 bp, Artificial Sequence
  ENSG00000111110_20 (sequence is synthesized)
agtgcccaccttctaggaagcctgaggtttatttcagggattgccgtctgccccccgccccccttctctttttttcttctctgtttctattcttttatggcagtggtggagtgaggcagg

SEQ ID NO: 181320 - DNA, 120 bp, Artificial Sequence
  ENSG00000111110_21 (sequence is synthesized)
gatttttttttttttttttcgtgtttttgacattccttgaatctgttttttattccccttccacagaacaggcctgggactttccaacaccctgctaaggaagttctgtgtccaagtccc

SEQ ID NO: 181321 - DNA, 120 bp, Artificial Sequence
  ENSG00000111110_22 (sequence is synthesized)
acccaggctgggttgtccccacctcctccagcccacacagcccaggcagcatccgggccagtgccctgcatgacagagggtctttgttgtgtaatgtttgttcccaagttgcattttcta

SEQ ID NO: 181322 - DNA, 120 bp, Artificial Sequence
  ENSG00000111110_23 (sequence is synthesized)
accgaatcagtgtgttttcatgaaactgagtgtttctgtggaccagtagttcctctgttgtcttcagtggtcttcctgtgtggctcaagggttctctgtgagagtctggattttcatttc

SEQ ID NO: 181323 - DNA, 120 bp, Artificial Sequence
  ENSG00000111110_24 (sequence is synthesized)
tggaatggctggccccatcccacttttctgtatcatggggacacatataaagcagtgtttaatagagcagtttaagaagttgcttgcatctgttggttcaccatggctcatctggggacc

SEQ ID NO: 181324 - DNA, 120 bp, Artificial Sequence
  ENSG00000111110_25 (sequence is synthesized)
attttggattcatgtttcatggcttgtgactgtccccaagcccactccaaacaaagtgtaaggatcagagttctgtcaaggagcagcagttctgctctccccatcatctttgtgcaaggc

SEQ ID NO: 181325 - DNA, 120 bp, Artificial Sequence
  ENSG00000111110_26 (sequence is synthesized)
gtcccagctcctcaaggtccctctatggttccacatctgagtgttcgccacaagagcagcagcagcaggcacagtgcatgccatatctacctgctgcttctctgctgggaggaatggcca

SEQ ID NO: 181326 - DNA, 120 bp, Artificial Sequence
  ENSG00000111110_27 (sequence is synthesized)
agtagattataaaactcacttctgtctcttaggcagacttgtacggccacaaaattacctagtcttcttcctgctgagctactgaggtattgccaccattttgacaactttgagtaatta

SEQ ID NO: 181327 - DNA, 120 bp, Artificial Sequence
  ENSG00000111110_28 (sequence is synthesized)
aaacactcttctgacccaaaaaggaaaaaaggtcactgacgtgacccccccagcatgctagagagctaattccagttctcatatttgtttgaatttcttcccagaggagaggataggaac

SEQ ID NO: 181328 - DNA, 120 bp, Artificial Sequence
  ENSG00000111110_29 (sequence is synthesized)
ctctcctccagggcagtaaatcacctgcatttctggagttgtcggtattgtattcgaaaaggcctggagcccctcctgctcaggaaagaactcattccagggtgtggagacagtgccgtc

SEQ ID NO: 181329 - DNA, 120 bp, Artificial Sequence
  ENSG00000111110_30 (sequence is synthesized)
tggcaggtgaaatactgtgggaattcacgccaccaggtgtttgtgcaagtgttggcctgggaagaatgggacttcggccttgtcaggagttgtcttcatctgcagcacgtttcttcctcc

SEQ ID NO: 181330 - DNA, 120 bp, Artificial Sequence
  ENSG00000111110_31 (sequence is synthesized)
tgcagtagatcttagctaccccagatatctctatggagagaagtttgtggaaaatgctttgcttcgtggcagagtctgatgctgtaggaaaaccttcgggcatgtgacagcagtgtggtc

SEQ ID NO: 181331 - DNA, 120 bp, Artificial Sequence
  ENSG00000111110_32 (sequence is synthesized)
cactccctgttctgccctggcactcagagtcatgtgtaagtaggaaacctgagcaagtcttccgtggaggaccctgagctgccgtctttgggatccttcctgtgtccccaccgtctttca

SEQ ID NO: 181332 - DNA, 120 bp, Artificial Sequence
  ENSG00000111110_33 (sequence is synthesized)
tttatttgctttcctgggcctctatctgggccctaccttgagcttctccagttttattcaagccaccagagtaagaatttgggtgtagatgtcacaactaccttctactcaattcaccaa

SEQ ID NO: 181333 - DNA, 120 bp, Artificial Sequence
  ENSG00000111110_34 (sequence is synthesized)
ttcatttactgctatggcacgtctcaggaataactctagaaacctctaaatcgaaatattataaaatcttgagcacttagtcctgctggttttagttagaaaggcatccaggaattgttt

SEQ ID NO: 181334 - DNA, 120 bp, Artificial Sequence
  ENSG00000111110_35 (sequence is synthesized)
tcctacgcccccttgagtggaaagatcttagttagaagataaagtcaagtttgtgttcaggggatgggaggaagactataaataagatgaagaaatcaaaagtaggaaacatgatgtaaa

SEQ ID NO: 181335 - DNA, 120 bp, Artificial Sequence
  ENSG00000111110_36 (sequence is synthesized)
cgaagcatggcagatctgtccagcactgatattgctctataaattgagcttactcagttttggccttatttttttacccaggccccatgtcacccagtcctaaaacagtaaccgtgtcta

SEQ ID NO: 181336 - DNA, 120 bp, Artificial Sequence
  ENSG00000111110_37 (sequence is synthesized)
cataacgggttggcccctggtgcatccctggaaaagtcaaaggacgcacacttcgaaattctgcagaacgtatttatacatggttcagaaatcttgcgtatctgacttatagccaaatct

SEQ ID NO: 181337 - DNA, 120 bp, Artificial Sequence
  ENSG00000111110_38 (sequence is synthesized)
gcttgctcgaatagcctcagaggaagtcttgtttaataaaaaccttttgatttcctagtcaagtctttatggttgtctcgaggggtgtgtggctactttaatgaaaggctttcctgctct

SEQ ID NO: 181338 - DNA, 120 bp, Artificial Sequence
  ENSG00000111110_39 (sequence is synthesized)
aaatctctttgctgggctgggcctcttcagactatctggtgaaactcctttccttagaacaaactcagtccgtccatgctctgtggcattttgctagatgataaccaaagccttattcct

SEQ ID NO: 181339 - DNA, 120 bp, Artificial Sequence
  ENSG00000111110_40 (sequence is synthesized)
gtagccagtgtcagcagtcagagaggtggagggtgtgttctgctgtggttatgcatacctatctgctgttcttgaggtgtaaaaggaaaggtgaaaatcgggccaggccaagtactcagc

SEQ ID NO: 181340 - DNA, 120 bp, Artificial Sequence
  ENSG00000111110_41 (sequence is synthesized)
tgtcttaataggatgaagccttaagcagtggaaatttcagttattttccacagtattccattttggaggatttggggtgtttactttttaaattcttgaacaacttaacctccatgaggc

SEQ ID NO: 181341 - DNA, 120 bp, Artificial Sequence
  ENSG00000111110_42 (sequence is synthesized)
tttgtgaagtcagctgtgaccaccctcctcttactgtgttctcagtattcattcacttccagggaagaatgacagccacagggagatggtggtgggcaagaatgagagtcccaggatcca

SEQ ID NO: 181342 - DNA, 120 bp, Artificial Sequence
  ENSG00000111110_43 (sequence is synthesized)
gatttagcctcagatcttccccattcaggaagggttttccatttaacaagagcactagtatgaaaacattagggacaaatctcccatgtctttgaaattcggattctcctcttgagatcc

SEQ ID NO: 181343 - DNA, 120 bp, Artificial Sequence
  ENSG00000111110_44 (sequence is synthesized)
ccttcctcacctgccaatcaactttataaggccacaagtggtcactggttttccttccacaggtttgaggttctcagctttccttaagcgacccagcagctccgctgttttcagagtgaa

SEQ ID NO: 181344 - DNA, 120 bp, Artificial Sequence
  ENSG00000111110_45 (sequence is synthesized)
tatgttaagctttgatgagattctattttcagtaagttagtgcttctgggacacttggagaaagctgtgagagtcattgtctacgcaaagaacaacgaagctgatcctaaaagtgatcca

SEQ ID NO: 181345 - DNA, 120 bp, Artificial Sequence
  ENSG00000111110_46 (sequence is synthesized)
atctaagaaaatggtaaaacgagctctggccacagcacagaattttatgtgaggaactcagatttttgaagacttaacaattgcagagaaaggttgcagcctgcacaccatagcccacct

SEQ ID NO: 181346 - DNA, 120 bp, Artificial Sequence
  ENSG00000111110_47 (sequence is synthesized)
ctctgagcagactttggttttgtgtggtgacgtggcacatgtttgtacactgggatttttcaaaggacgctacgcgagcagactgacttgcctcttctgtgagcactgtggcttttgtca

SEQ ID NO: 181347 - DNA, 120 bp, Artificial Sequence
  ENSG00000111110_48 (sequence is synthesized)
gatggagtgccggtctgcagaggactgctctttcgaatccacagtgttatctgtgtaaatagctttaatttttcttctgtgtcttaggtgaagttttgttcatgtagcaaccaggtagac

SEQ ID NO: 181348 - DNA, 120 bp, Artificial Sequence
  ENSG00000111110_49 (sequence is synthesized)
agtgaccaaataaggctgtaaatgtgctgtagttttctactgtgatgtacttgaaggagaacctgtgtcctctacttttctgatctcccacaagtattttgtgtttgtttcctgagtcct

SEQ ID NO: 181349 - DNA, 120 bp, Artificial Sequence
  ENSG00000111110_50 (sequence is synthesized)
gaggttattattttactcctgttttgcccccagttttctttgttttttttctggagacccagggaggcccatggtggagatcatttgtaaggaatggatcatggtctgggtttccaaaac

SEQ ID NO: 181350 - DNA, 120 bp, Artificial Sequence
  ENSG00000111110_51 (sequence is synthesized)
taccctagtacagtgaatgagagaaatctgcctggaaattgtttcagaaccatgtacctttatgctttgtgattgtgaaacattgacttttttgtaaccccaaaatgaaaactgtttagt

SEQ ID NO: 181351 - DNA, 120 bp, Artificial Sequence
  ENSG00000111110_52 (sequence is synthesized)
aaaggggatctattttgtgtgttttgaaacttaggtgcaatgtcccctggaaaaagctaaagaaatgtatatgttcaatgacattttaaaataaaatattatatatatgtatatacgaca

SEQ ID NO: 181352 - DNA, 120 bp, Artificial Sequence
  ENSG00000111110_53 (sequence is synthesized)
actgcgcctgggagcttgtgtccgattccgggaggtggccgtgtccgagtgcgtggttgtacatttccgaaggtctcagtttctctcactttcagcccgcgagttcctccgcttctcctt

SEQ ID NO: 181353 - DNA, 120 bp, Artificial Sequence
  ENSG00000111110_54 (sequence is synthesized)
aggtggtaggaaagcaagcactaaagatttttctagtcccttcttgaagcacattcagagtctggggactgtcaagagaatgaaagtgagaaagcttttgctacacatcctgcacaatcc

SEQ ID NO: 181354 - DNA, 120 bp, Artificial Sequence
  ENSG00000111110_55 (sequence is synthesized)
cctgcttgcagcatgtggcctctgagtagagaagttagtacgtgagcattgcgtctctcggattgctagatttgaattttgaatgtgacaatgagactgttgtttcaaagcaattcccta

SEQ ID NO: 181355 - DNA, 120 bp, Artificial Sequence
  ENSG00000111110_56 (sequence is synthesized)
agtggctgtttgctcaagacttttgtagtgtgaacagagatttgggggagggggagaagccatctgctccagaatagtcttcgaatgacacgatcaaatgactgcagagcaaactggagg

SEQ ID NO: 181356 - DNA, 120 bp, Artificial Sequence
  ENSG00000111110_57 (sequence is synthesized)
gagtccaacagaaagttcctgtctgctgcatccagccccaaccagcactcaagccattgtgtttacatggaagctcacacacaggtttcaaaggcaaggccgtgataaccaaggatgcat

SEQ ID NO: 181357 - DNA, 120 bp, Artificial Sequence
  ENSG00000111110_58 (sequence is synthesized)
atctatgaaccagaaagggggccctcactggacacaaaaacttgctgatatcttgaacttggatttctcagccttcaaaactggttatcaatgccgggaagagcacacacaatgaagacc

SEQ ID NO: 181358 - DNA, 120 bp, Artificial Sequence
  ENSG00000111142_0 (sequence is synthesized)
ctcattccctcgcgctctctcgggcaacatggcgggtgtggaggaggtagcggcctccgggagccacctgaatggcgacctggatccagacgacagggaagaaggagctgcctctacggc

SEQ ID NO: 181359 - DNA, 120 bp, Artificial Sequence
  ENSG00000111142_1 (sequence is synthesized)
tgaggaagcagccaagaaaaaaagacgaaagaagaagaagagcaaagggccttctgcagcaggggaacaggaacctgataaagaatcaggagcctcagtggatgaagtagcaagacagtt

SEQ ID NO: 181360 - DNA, 120 bp, Artificial Sequence
  ENSG00000111142_2 (sequence is synthesized)
ggaaagatcagcattggaagataaagaaagagatgaagatgatgaagatggagatggcgatggagatggagcaactggaaagaagaagaaaaagaagaagaagaagagaggaccaaaagt

SEQ ID NO: 181361 - DNA, 120 bp, Artificial Sequence
  ENSG00000111142_3 (sequence is synthesized)
tcaaacagaccctccctcagttccaatatgtgacctgtatcctaatggtgtatttcccaaaggacaagaatgcgaatacccacccacacaagatgggcgaacagctgcttggagaactac

SEQ ID NO: 181362 - DNA, 120 bp, Artificial Sequence
  ENSG00000111142_4 (sequence is synthesized)
aagtgaagaaaagaaagcattagatcaggcaagtgaagagatttggaatgattttcgagaagctgcagaagcacatcgacaagttagaaaatacgtaatgagctggatcaagcctgggat

SEQ ID NO: 181363 - DNA, 120 bp, Artificial Sequence
  ENSG00000111142_5 (sequence is synthesized)
gacaatgatagaaatctgtgaaaagttggaagactgttcacgcaagttaataaaagagaatggattaaatgcaggcctggcatttcctactggatgttctctcaataattgtgctgccca

SEQ ID NO: 181364 - DNA, 120 bp, Artificial Sequence
  ENSG00000111142_6 (sequence is synthesized)
ttatactcccaatgccggtgacacaacagtattacagtatgatgacatctgtaaaatagactttggaacacatataagtggtaggattattgactgtgcttttactgtcacttttaatcc

SEQ ID NO: 181365 - DNA, 120 bp, Artificial Sequence
  ENSG00000111142_7 (sequence is synthesized)
caaatatgatacgttattaaaagctgtaaaagatgctactaacactggaataaagtgtgctggaattgatgttcgtctgtgtgatgttggtgaggccatccaagaagttatggagtccta

SEQ ID NO: 181366 - DNA, 120 bp, Artificial Sequence
  ENSG00000111142_8 (sequence is synthesized)
tgaagttgaaatagatgggaagacatatcaagtgaaaccaatccgtaatctaaatggacattcaattgggcaatatagaatacatgctggaaaaacagtgccgattgtgaaaggagggga

SEQ ID NO: 181367 - DNA, 120 bp, Artificial Sequence
  ENSG00000111142_9 (sequence is synthesized)
ggcaacaagaatggaggaaggagaagtatatgcaattgaaacctttggtagtacaggaaaaggtgttgttcatgatgatatggaatgttcacattacatgaaaaattttgatgttggaca

SEQ ID NO: 181368 - DNA, 120 bp, Artificial Sequence
  ENSG00000111142_10 (sequence is synthesized)
tgtgccaataaggcttccaagaacaaaacacttgttaaatgtcatcaatgaaaactttggaacccttgccttctgccgcagatggctggatcgcttgggagaaagtaaatacttgatggc

SEQ ID NO: 181369 - DNA, 120 bp, Artificial Sequence
  ENSG00000111142_11 (sequence is synthesized)
tctgaagaatctgtgtgacttgggcattgtagatccatatccaccattatgtgacattaaaggatcatatacagcgcaatttgaacataccatcctgttgcgtccaacatgtaaagaagt

SEQ ID NO: 181370 - DNA, 120 bp, Artificial Sequence
  ENSG00000111142_12 (sequence is synthesized)
tgtcagcagaggagatgactattaaacttagtccaaagccacctcaacacctttattttctgagctttgttggaaaacatgataccagaattaatttgccacatgttgtctgttttaaca

SEQ ID NO: 181371 - DNA, 120 bp, Artificial Sequence
  ENSG00000111142_13 (sequence is synthesized)
gtggacccatgtaatacttttatccatgtttaaaaaagaaggaatttggacaaaggcaaaccgtctaatgtaattaaccaacgaaaaagctttccggacttttaaatgctaactgttttt

SEQ ID NO: 181372 - DNA, 120 bp, Artificial Sequence
  ENSG00000111142_14 (sequence is synthesized)
ttaggaatgacttatacgttttgttttgaatacctaagagatactttttggatatttatattgccatattcttacttgaatgctttgaatgactacatccagttctgcacctataccctc

SEQ ID NO: 181373 - DNA, 120 bp, Artificial Sequence
  ENSG00000111142_15 (sequence is synthesized)
tggtgttgctttttaaccttcctggaatccattttctaaaaaataaagacattttcagatctgagagctacatctcaatgtctgtggttataattctggacaggataaatagctaaactt

SEQ ID NO: 181374 - DNA, 120 bp, Artificial Sequence
  ENSG00000111142_16 (sequence is synthesized)
aatgtaggcaaatgcagagacatttatctgaaatgtagacctctacactgagacttttctggcatagtggctaaaacaagatctacacatgcataaaaagggacaatcaccttttcttca

SEQ ID NO: 181375 - DNA, 120 bp, Artificial Sequence
  ENSG00000111142_17 (sequence is synthesized)
taaatatacagctttaggaatatttcaccattctttgtaggacatagtagtccttgtctttttttctcctgacattggaaagatgtgctaattgaaacttgacttagtaggaacattgtg

SEQ ID NO: 181376 - DNA, 120 bp, Artificial Sequence
  ENSG00000111142_18 (sequence is synthesized)
ccaactcaaaaccttgatttagtaaaaatctcaatgtttagatcctttgtccagtggtggtgtttatcagggaatgtattcagcttgctcagaaaaccaaaagggtattaaagccacaaa

SEQ ID NO: 181377 - DNA, 120 bp, Artificial Sequence
  ENSG00000111142_19 (sequence is synthesized)
agcaaagaagaaaaaaaaaaacttcccatgtttggatcttgttctagttagaaaaattaagttgaaattcttggactttttcattcatgaggcaaatgctgtaataccttcccctttgac

SEQ ID NO: 181378 - DNA, 120 bp, Artificial Sequence
  ENSG00000111142_20 (sequence is synthesized)
aggtttggattcttaacattactagtggtatttcaggaagtgacgttacagttactttccttatagcggctaagtgtattaagttgaatgtaacgatggtaatattaatttgtttgaact

SEQ ID NO: 181379 - DNA, 120 bp, Artificial Sequence
  ENSG00000111142_21 (sequence is synthesized)
gaggcccactactgattctttgacaaattgaattcttatatttaaataattttatgggaatgttccatcataatttctaaatcatttatatatcaaggtagccttaatttgtatatgttt

SEQ ID NO: 181380 - DNA, 120 bp, Artificial Sequence
  ENSG00000111142_22 (sequence is synthesized)
cagtacaatgagattttattgcctctgggatgctgtttagtttgtattttgttgaacgtttttatcctaggaagagaaacctatgacttgtgtacctagatcatctgttacattaaaaag

SEQ ID NO: 181381 - DNA, 120 bp, Artificial Sequence
  ENSG00000111142_23 (sequence is synthesized)
ctgctctttcagcattagagctataaatgaatgttaccttgtcgggaaacaatctaggttttagctgtatgagctatgtttattatggtgctaatgttcagtagccacatttgactaatg

SEQ ID NO: 181382 - DNA, 120 bp, Artificial Sequence
  ENSG00000111142_24 (sequence is synthesized)
tctccattctctgtgatgctgtggctagcagcagagctcgccagttcatgcctggacatactgtcagggctgggccctccagctagctcctttggggttgagtccgtatctttttgatgt

SEQ ID NO: 181383 - DNA, 120 bp, Artificial Sequence
  ENSG00000111142_25 (sequence is synthesized)
ggaagtataaagcaagtatcttgatttctaaacccagcaattttagaattgacctttatgagtgaagacttttggagcttttaaagaccttggcagtcatgatctcaaaccaattaggag

SEQ ID NO: 181384 - DNA, 120 bp, Artificial Sequence
  ENSG00000111142_26 (sequence is synthesized)
ctccaagctcccttcccaggtaactgttgggagcaatggcatcactgtatgcccttgtaatggctggaagggacatgatcttgtaagtaggaaagctgtaactaaaaattgtattgtttg

SEQ ID NO: 181385 - DNA, 120 bp, Artificial Sequence
  ENSG00000111142_27 (sequence is synthesized)
cttattagccatgtatctcttaaaattttgttatgtttacaacgatgtaccttattggcaacaagttattagtttgatgtttaacaatagtgcctttagtaaattattttacaactaaaa

SEQ ID NO: 181386 - DNA, 120 bp, Artificial Sequence
  ENSG00000111142_28 (sequence is synthesized)
gtcctgaattggaaagtgagcggagtgtgacgggttcccatcttgaaccgtccggggttgagtagtacaataaactaacacggaactccagcttccaaaattctctccagtgcctacaga

SEQ ID NO: 181387 - DNA, 120 bp, Artificial Sequence
  ENSG00000111142_29 (sequence is synthesized)
gcctcgcggagagctgtgattgtgaatgtcaacgcagatttgattaaatctcttagatttaagagatatgtggagtcatgacaatagaaatgtgtacaagtgaacacatttcttagcccg

SEQ ID NO: 181388 - DNA, 120 bp, Artificial Sequence
  ENSG00000111142_30 (sequence is synthesized)
tttccccactgcctgtgtgatttataaaaacgcaaatataaaatatttccgttccagcagagacgccgcttgctacggcgggttgcccgtctccacaggtatctccggctgactctagag

SEQ ID NO: 181389 - DNA, 120 bp, Artificial Sequence
  ENSG00000111142_31 (sequence is synthesized)
ctcaacttcccctttaaacttcaccctgcgcttgccgatttgcttcgggaatgcccgaggcaccggacgaagcagtcgggtctggccccagtcgactccagccaggcggggctccaagcc

SEQ ID NO: 181390 - DNA, 120 bp, Artificial Sequence
  ENSG00000111142_32 (sequence is synthesized)
gagactcctgcacgcccggcccgaagctagcccgacaccctcagctgagtcctccgccgtcccagcattccctgcgtccctaccatcgagagcagcttccggcgtggctggtgtaggcgg

SEQ ID NO: 181391 - DNA, 120 bp, Artificial Sequence
  ENSG00000111142_33 (sequence is synthesized)
tgaagatgatgaaggatacaagatctccctcccgtcacccaggctgacgtgctgtggctcgatctcagctcactgcagccttgacttccctggctcagatggagatggcgatggagatgg

SEQ ID NO: 181392 - DNA, 120 bp, Artificial Sequence
  ENSG00000111144_0 (sequence is synthesized)
ctctatcgacgagtctggtagctgagcgttgggctgtaggtcgctgtgctgtgtgatcccccagagccatgcccgagatagtggatacctgttcgttggcctctccggcttccgtctgcc

SEQ ID NO: 181393 - DNA, 120 bp, Artificial Sequence
  ENSG00000111144_1 (sequence is synthesized)
ggaccaagcacctgcacctgcgctgcagcgtcgactttactcgccggacgctgaccgggactgctgctctcacggtccagtctcaggaggacaatctgcgcagcctggttttggatacaa

SEQ ID NO: 181394 - DNA, 120 bp, Artificial Sequence
  ENSG00000111144_2 (sequence is synthesized)
aggaccttacaatagaaaaagtagtgatcaatggacaagaagtcaaatatgctcttggagaaagacaaagttacaagggatcgccaatggaaatctctcttcctatcgctttgagcaaaa

SEQ ID NO: 181395 - DNA, 120 bp, Artificial Sequence
  ENSG00000111144_3 (sequence is synthesized)
atcaagaaattgttatagaaatttcttttgagacctctccaaaatcttctgctctccagtggctcactcctgaacagacttctgggaaggaacacccatatctctttagtcagtgccagg

SEQ ID NO: 181396 - DNA, 120 bp, Artificial Sequence
  ENSG00000111144_4 (sequence is synthesized)
ccatccactgcagagcaatccttccttgtcaggacactccttctgtgaaattaacctatactgcagaggtgtctgtccctaaagaactggtggcacttatgagtgctattcgtgatggag

SEQ ID NO: 181397 - DNA, 120 bp, Artificial Sequence
  ENSG00000111144_5 (sequence is synthesized)
aaacacctgacccagaagacccaagcaggaaaatatacaaattcatccaaaaagttccaataccctgctacctgattgctttagttgttggagctttagaaagcaggcaaattggcccaa

SEQ ID NO: 181398 - DNA, 120 bp, Artificial Sequence
  ENSG00000111144_6 (sequence is synthesized)
gaactttggtgtggtctgagaaagagcaggtggaaaagtctgcttatgagttttctgagactgaatctatgcttaaaatagcagaagatctgggaggaccgtatgtatggggacagtatg

SEQ ID NO: 181399 - DNA, 120 bp, Artificial Sequence
  ENSG00000111144_7 (sequence is synthesized)
acctattggtcctgccaccatccttcccttatggtggcatggagaatccttgccttacttttgtaactcctactctactggcaggcgacaagtcactctccaatgtcattgcacatgaaa

SEQ ID NO: 181400 - DNA, 120 bp, Artificial Sequence
  ENSG00000111144_8 (sequence is synthesized)
acgattgtttggtgaaaagttcagacattttaatgctctgggaggatggggagaactacagaattcggtaaagacatttggggagacacatcctttcaccaaacttgtggttgatctgac

SEQ ID NO: 181401 - DNA, 120 bp, Artificial Sequence
  ENSG00000111144_9 (sequence is synthesized)
agatatagaccctgatgtagcttattcttcagttccctatgagaagggctttgctttacttttttaccttgaacaactgcttggaggaccagagattttcctaggattcttaaaagctta

SEQ ID NO: 181402 - DNA, 120 bp, Artificial Sequence
  ENSG00000111144_10 (sequence is synthesized)
tgttgagaagttttcctataagagcataactactgatgactggaaggatttcctgtattcctattttaaagataaggttgatgttctcaatcaagttgattggaatgcctggctctactc

SEQ ID NO: 181403 - DNA, 120 bp, Artificial Sequence
  ENSG00000111144_11 (sequence is synthesized)
tcctggactgcctcccataaagcccaattatgatatgactctgacaaatgcttgtattgccttaagtcaaagatggattactgccaaagaagatgatttaaattcattcaatgccacaga

SEQ ID NO: 181404 - DNA, 120 bp, Artificial Sequence
  ENSG00000111144_12 (sequence is synthesized)
cctgaaggatctctcttctcatcaattgaatgagtttttagcacagacgctccagagggcacctcttccattggggcacataaagcgaatgcaagaggtgtacaacttcaatgccattaa

SEQ ID NO: 181405 - DNA, 120 bp, Artificial Sequence
  ENSG00000111144_13 (sequence is synthesized)
caattctgaaatacgattcagatggctgcggctctgcattcaatccaagtgggaggacgcaattcctttggcgctaaagatggcaactgaacaaggaagaatgaagtttacccggccctt

SEQ ID NO: 181406 - DNA, 120 bp, Artificial Sequence
  ENSG00000111144_14 (sequence is synthesized)
attcaaggatcttgctgcctttgacaaatcccatgatcaagctgtccgaacctaccaagagcacaaagcaagcatgcatcccgtgactgcaatgctggtggggaaagacttaaaagtgga

SEQ ID NO: 181407 - DNA, 120 bp, Artificial Sequence
  ENSG00000111144_15 (sequence is synthesized)
ttaaagacctgcgtattgatgattttagagatttctcttttttaaatggaattcgtaaagaaatataaaacttcagctcacaattaaaactgtctttttagttttggctttttattgttt

SEQ ID NO: 181408 - DNA, 120 bp, Artificial Sequence
  ENSG00000111144_16 (sequence is synthesized)
tgttggtgattttactgaaataaagttgagctacttcttcttatagtggcatattctttgtaaattttaacaaggtttaatcttttgatttacaaattaaaaaattttgaattagcttta

SEQ ID NO: 181409 - DNA, 120 bp, Artificial Sequence
  ENSG00000111144_17 (sequence is synthesized)
attctattaatagacttccagaagtttatgccaacatatcctagtgttccagtctccaagttttagattcccctaaagttacaccactgagtgaagtaaagacatttggggagacacatc

SEQ ID NO: 181410 - DNA, 120 bp, Artificial Sequence
  ENSG00000111144_18 (sequence is synthesized)
tattggcaactgattggctgtggtgagaaaagaagaaattaaaaatgactgagcagagatgtaataaagattcagctcaatccagcacacatttattgtcaggcactaatatgatgaata

SEQ ID NO: 181411 - DNA, 120 bp, Artificial Sequence
  ENSG00000111144_19 (sequence is synthesized)
aggaactcacagagcaaatatgtatgtatcaagtaattataatacaatgaaaagtattttttttaaaatattaagtgttgtgggtgaggaaactattaattttaatggtgatggatttgg

SEQ ID NO: 181412 - DNA, 120 bp, Artificial Sequence
  ENSG00000111144_20 (sequence is synthesized)
acatcgtcttggagatgacttacaaaggagaatacaagaagtaaactgtagaaccttagaggatcttcattttagagctaggacagaggaaaggtagcaaaataaatggaaaactaaaaa

SEQ ID NO: 181413 - DNA, 120 bp, Artificial Sequence
  ENSG00000111144_21 (sequence is synthesized)
gatttcaaaggttcattgttaagaaagctgtgggaagaaataatttaaaagtggtacggagagtggtcagcagtctggtgtgctgtagaattatgaggagcctgagaataaaagcataga

SEQ ID NO: 181414 - DNA, 120 bp, Artificial Sequence
  ENSG00000111144_22 (sequence is synthesized)
aggggcctgatatagccaaaagacagttccaggaagtttaggagtggagaaggctttgcccattgcttttaaaattggggaaatctgggtggaaaattagttcttcaaaagtgtttcttt

SEQ ID NO: 181415 - DNA, 120 bp, Artificial Sequence
  ENSG00000111144_23 (sequence is synthesized)
gatatcaccgctgctaagggatcctttttgggcgttggttcattctagatcccttaagattgctttcaagtaataccaaagtgctggaggaaccctggaatcattcgtgtgcccgggaat

SEQ ID NO: 181416 - DNA, 120 bp, Artificial Sequence
  ENSG00000111144_24 (sequence is synthesized)
tctgtaaagagagagtatcttagaaaatctcaaaccacagaaaatactttgatccattgcagcacagaatcttggcttccacgatcctctttttataatgctctcatcatttgtatatgt

SEQ ID NO: 181417 - DNA, 120 bp, Artificial Sequence
  ENSG00000111144_25 (sequence is synthesized)
atttaaatatctgagtctatccacatctctccatttctactaccactgtccaagttcagtatcacatcttcacatcctggaagactgttctggcacccaaactgtgcacttgtatctgtt

SEQ ID NO: 181418 - DNA, 120 bp, Artificial Sequence
  ENSG00000111144_26 (sequence is synthesized)
ctgacttctcccagccactctccacactaaagctagagtaaacctttaaaagcacaaatgtgtcatgttgtcctcctgcttagcagtctccactggtatctctttgctcttgggctaaga

SEQ ID NO: 181419 - DNA, 120 bp, Artificial Sequence
  ENSG00000111144_27 (sequence is synthesized)
caaaatcctttagtggggattataagctcctaacactctagctccctttgcttcagtcacactggcagttttggagtttctcgaactccccatatgtcctccaacatagtacctgagcat

SEQ ID NO: 181420 - DNA, 120 bp, Artificial Sequence
  ENSG00000111144_28 (sequence is synthesized)
gctgttttctctacccggagccctttgcccagttaattccaatctcagctcaagaaccacttcctcttggaagcatttcttgacatccctggccaggtcaaatctcccattctagggctt

SEQ ID NO: 181421 - DNA, 120 bp, Artificial Sequence
  ENSG00000111144_29 (sequence is synthesized)
cttcgctatactgtcagcaccatgagaacaaggcacatatctggttttgctctttacttttctgaagactttgccataagtagggtcctttcccaggctaattcttaacttagtactttt

SEQ ID NO: 181422 - DNA, 120 bp, Artificial Sequence
  ENSG00000111144_30 (sequence is synthesized)
aattacactaataaggaagtttcaggacacgaagaaacagaccagctaaaggttttctactttgctattattttttaagaaatcaatgctaataatgttttggttgaaagcagtgtattc

SEQ ID NO: 181423 - DNA, 120 bp, Artificial Sequence
  ENSG00000111144_31 (sequence is synthesized)
tgatcagtcaaggacctctgatcccacctgttcttgaagacaaaatggcatgcctgcagtccacagcctgacacttcatgtaataaactggcagctgcttcgagttatgatatgactctg

SEQ ID NO: 181424 - DNA, 120 bp, Artificial Sequence
  ENSG00000111144_32 (sequence is synthesized)
cctcccataaagcccaagtaagtacttgcctgctaatgctttccttctcattctcctaactcctagagagcctcaaaatatctgaaagaatagtatgccttcctgaaactgttactagta

SEQ ID NO: 181425 - DNA, 120 bp, Artificial Sequence
  ENSG00000111144_33 (sequence is synthesized)
aatgatgaaagcagagttcttaggtgttttggccttaaccctgaggccaaaagaataatttctgcagtttacaaatatggtttttcacttcaagtaattgagtgcctcctttctgcacaa

SEQ ID NO: 181426 - DNA, 120 bp, Artificial Sequence
  ENSG00000111144_34 (sequence is synthesized)
ggatggtgagggatttagacaataagctattgtatcttccttcaaacttctgcaataaaaatattttataagtattatgttaattacaacactgttataagttattatccccatttccca

SEQ ID NO: 181427 - DNA, 120 bp, Artificial Sequence
  ENSG00000111144_35 (sequence is synthesized)
aggaggtaagttaggtttagctaggtaaagtgtcttgccctaggttgcacagctagtgagtagtaaaagttgagattcaaaccctggcagtcttattgcctccaatatactgctttcttc

SEQ ID NO: 181428 - DNA, 120 bp, Artificial Sequence
  ENSG00000111144_36 (sequence is synthesized)
cttccttctttttttttagaaacagggtctcactctgtggctcagcctggcgtgcagtgatgtgatcttagctcactgcaccctctgccttccaggctcaagtgatcctcctacctcagc

SEQ ID NO: 181429 - DNA, 120 bp, Artificial Sequence
  ENSG00000111144_37 (sequence is synthesized)
ctcaagtgatcctcctacctcagccttacaagtagctgggaccacagatgcgcactaccacacccggctgtttttgtacttttgctagaggcagggtttcaccatattgcccaggctggt

SEQ ID NO: 181430 - DNA, 120 bp, Artificial Sequence
  ENSG00000111144_38 (sequence is synthesized)
ggcgtgagccaccgtgcccggcctcaatatactgctttttatactgaaccccctccttcaatcggacctgaaccctggtctttcacgagttgtgtgaggacactgaccatggcatgttcc

SEQ ID NO: 181431 - DNA, 120 bp, Artificial Sequence
  ENSG00000111144_39 (sequence is synthesized)
gttgtgtgaggacactgaccatggcatgttccatggcatgttctcttgttgcctttcttttggatcaccaaaattgcctaccagcttctcttacactaaacaggccagtttaattgatgt

SEQ ID NO: 181432 - DNA, 120 bp, Artificial Sequence
  ENSG00000111144_40 (sequence is synthesized)
tcagggagcagcaggagagaagctaagaaacaagatgaggcctggtcatgtttgtttgtaaagcactttaaacagccaggccgagaagtgtttggttgagaagttactgggagttctgag

SEQ ID NO: 181433 - DNA, 120 bp, Artificial Sequence
  ENSG00000111144_41 (sequence is synthesized)
tatggaacaaatgtggtcagagcgccccactaactgggcagtcctggttatcataggctgtggtgggaaacaggagctcaggtagggaggggtgattacgatagaatgtttcgaattttg

SEQ ID NO: 181434 - DNA, 120 bp, Artificial Sequence
  ENSG00000111144_42 (sequence is synthesized)
tgttggaaacaggtggcacaaatcatcagtaaacccttttaacgtctaaaaaaggtatcagcaaaaataatactttagatttttttcctagcacttcattaagaagtgccatacattatc

SEQ ID NO: 181435 - DNA, 120 bp, Artificial Sequence
  ENSG00000111144_43 (sequence is synthesized)
tttttattgtctcccctagggaacaaacggagtcccagtcacaactctctttaagggagattcagtggtaacttctaatcaaaacttacttcatttaggctctaaggggcaggtgcctct

SEQ ID NO: 181436 - DNA, 120 bp, Artificial Sequence
  ENSG00000111144_44 (sequence is synthesized)
ctgttccctaatacaagcatttcagtacaagcaagcatgatttacggagaaagagggatgttttgcaagaattttgcacacactacatgttctttcccattgttgcaaaatatgatttct

SEQ ID NO: 181437 - DNA, 120 bp, Artificial Sequence
  ENSG00000111144_45 (sequence is synthesized)
aagttgagaacacacaaatattggtataatttgcttaacaattaccatgtgttaatttcattttcttctaaaaaggaatgaaatcatcaggcaatggtatcgggctctctcaagggtcta

SEQ ID NO: 181438 - DNA, 120 bp, Artificial Sequence
  ENSG00000111144_46 (sequence is synthesized)
gcatctagaacggtgccaattatgtagcaggtgcttgcaggtttgttagatgattagatgtttggaacaaccaagtaaaatccatgacagcaaggacttgatgttgttcatcttgttgtc

SEQ ID NO: 181439 - DNA, 120 bp, Artificial Sequence
  ENSG00000111144_47 (sequence is synthesized)
ttgagtgcctagaactgttcctgccatgtactaaatatgctcaactgattccaactactttagcatatactactcgagcacatgacagtcttttgctgaggtgctttggcattctttcta

SEQ ID NO: 181440 - DNA, 120 bp, Artificial Sequence
  ENSG00000111144_48 (sequence is synthesized)
aaagatagatgggtgtttcattaatgtggtatccatttgggtttgtgagttcttggatgatgccagtagtatgtaagttaggtaaaatatttcctattttcctcactttggagtttgttt

SEQ ID NO: 181441 - DNA, 120 bp, Artificial Sequence
  ENSG00000111144_49 (sequence is synthesized)
tccttatttaaaagggactttgaaatttaagtatgtactgtagctttaaaactgcatttctgcaaaagcacgtgcatttttaaacaatgtaatctttatctttgcagttatgatatgact

SEQ ID NO: 181442 - DNA, 120 bp, Artificial Sequence
  ENSG00000111144_50 (sequence is synthesized)
atgtttgtcttttaaagcaacaagggaagagggcaagaggatgcatgggcttgggagtttattttctctcctcctgtctacacctcctctaatctgtctcccatgctgccacagagaaat

SEQ ID NO: 181443 - DNA, 120 bp, Artificial Sequence
  ENSG00000111144_51 (sequence is synthesized)
tactttttaatgccatcatactagttcatgataaagctatgctgagttatgtacccatcccccactgatggacattgaggtgttctccttggttgattgacttggaaggctgtctgtcac

SEQ ID NO: 181444 - DNA, 120 bp, Artificial Sequence
  ENSG00000111144_52 (sequence is synthesized)
ctggatccattctgcctgtccagtcttatttttctcctttctagtcatgtgaaggttattgcttttagaacttgggttatgcattccttttctgtgtcttcatgtgttatccccttacct

SEQ ID NO: 181445 - DNA, 120 bp, Artificial Sequence
  ENSG00000111144_53 (sequence is synthesized)
cctattctctgaatgttctctgttctctgtggttaatagtacaatgccaaacacgcacacaaaatgtcaaataattacctttctatgaattgatttcttttcttttttactcttagagat

SEQ ID NO: 181446 - DNA, 120 bp, Artificial Sequence
  ENSG00000111144_54 (sequence is synthesized)
atcattttaacttgtctctgtggaagaaagcagaaaactaaactcctttgaaagatggagaaagggaatgcagagtatgagacatacttgagtcttgagaattccttgtcaaactgactg

SEQ ID NO: 181447 - DNA, 120 bp, Artificial Sequence
  ENSG00000111144_55 (sequence is synthesized)
cttctatataaatacttatagtggtatttaaggaatagttgcaatatgtaatctggtagtattaatctttttgttagactttgctctaaacctctcttgccttaaaagaaaaaaaaaaaa

SEQ ID NO: 181448 - DNA, 120 bp, Artificial Sequence
  ENSG00000111144_56 (sequence is synthesized)
ttagcacagacgctccagaggctcctttcttccaaggaatcctgttgaaatgatacggtatacttctttattttgctcttaggcacctcttccattggggcacataaagcgaatgcaaga

SEQ ID NO: 181449 - DNA, 120 bp, Artificial Sequence
  ENSG00000111145_0 (sequence is synthesized)
gcgggcctgggcggccagccccggcgcacagccgcggccggggcgcgcggcgcggggcggaaaagcctgtttacacagactgcacaccgcctggggaataatgcagtaaaggaagtgagc

SEQ ID NO: 181450 - DNA, 120 bp, Artificial Sequence
  ENSG00000111145_1 (sequence is synthesized)
cggctcggcctgactgctccaacttcctgctctcacacacaccagaggggaaaaaaaaagaggagcgagagaaagaaaaaaagggggaaaaatcaggatctcattacaagagccacagac

SEQ ID NO: 181451 - DNA, 120 bp, Artificial Sequence
  ENSG00000111145_2 (sequence is synthesized)
cgtctgcagacgcctgtcagcatggaaagtcgggggctttcgcccgggtcctcctagaaattccccccgaagaagactcccccacatctgggtatggagagtgcaatcacgctgtggcag

SEQ ID NO: 181452 - DNA, 120 bp, Artificial Sequence
  ENSG00000111145_3 (sequence is synthesized)
ttcctgttgcagttgctgctggatcagaaacatgagcatttgatctgctggacctcgaacgatggtgaattcaagctcctcaaagcagaagaagtggccaagctgtggggactccgaaaa

SEQ ID NO: 181453 - DNA, 120 bp, Artificial Sequence
  ENSG00000111145_4 (sequence is synthesized)
aacaaaacaaatatgaactatgataagctgagcagagccctgcgatactattatgacaagaacatcatcaagaaggtgatcgggcagaagtttgtgtacaagtttgtctctttcccggag

SEQ ID NO: 181454 - DNA, 120 bp, Artificial Sequence
  ENSG00000111145_5 (sequence is synthesized)
atcctgaagatggatcctcacgcggtggagatcagccgggagagccttctgctgcaggacagcgactgcaaggcgtctccggagggccgcgaggcccacaaacacggcctggccgccctc

SEQ ID NO: 181455 - DNA, 120 bp, Artificial Sequence
  ENSG00000111145_6 (sequence is synthesized)
agaagcacgagccgcaacgaatacatccactcaggcctgtactcgtccttcaccattaattccctgcagaacccaccagacgccttcaaggccatcaagacggagaagctggaggagccg

SEQ ID NO: 181456 - DNA, 120 bp, Artificial Sequence
  ENSG00000111145_7 (sequence is synthesized)
cccgaagacagcccccccgtggaagaagtcaggactgtgatcaggtttgtgaccaataaaaccgacaagcacgtcaccaggccggtggtgtccctgccttccacgtcagaggctgcggcg

SEQ ID NO: 181457 - DNA, 120 bp, Artificial Sequence
  ENSG00000111145_8 (sequence is synthesized)
gcgtccgccttcctggcctcgtccgtctcggccaagatctcctctttaatgttgccaaacgctgccagtatttcatccgcctcacccttctcatctcggtccccgtccctgtcccccaac

SEQ ID NO: 181458 - DNA, 120 bp, Artificial Sequence
  ENSG00000111145_9 (sequence is synthesized)
tcacccctcccttctgaacacagaagcctcttcctggaggccgcctgccatgactccgattccctggagcccttgaacctgtcatcgggctccaagaccaagtctccatctcttccccca

SEQ ID NO: 181459 - DNA, 120 bp, Artificial Sequence
  ENSG00000111145_10 (sequence is synthesized)
aaggccaaaaaacccaaaggcttggaaatctcagcgcccccgctggtgctctccggcaccgacatcggctccatcgccctcaacagcccagccctcccctcgggatccctcaccccagcc

SEQ ID NO: 181460 - DNA, 120 bp, Artificial Sequence
  ENSG00000111145_11 (sequence is synthesized)
ttcttcaccgcacagacaccaaatggattgcttctgactccgagtccactgctctccagcatacatttctggagcagccttagtccagttgctccgctgagtcctgccaggctgcaaggg

SEQ ID NO: 181461 - DNA, 120 bp, Artificial Sequence
  ENSG00000111145_12 (sequence is synthesized)
ccaagcacgctgttccagttccccacactgcttaatggccacatgccagtgccaatccccagtctggacagagctgcttctccagtactgctttcttcaaactctcagaaatcctgatga

SEQ ID NO: 181462 - DNA, 120 bp, Artificial Sequence
  ENSG00000111145_13 (sequence is synthesized)
cgtctggccacaattaaggactcattaactgatgaaacaaatttgtccccacgggctagtttacctgtgtcgtgagaaggacattgtgaaactcttgttaatttggtttgcacttttcat

SEQ ID NO: 181463 - DNA, 120 bp, Artificial Sequence
  ENSG00000111145_14 (sequence is synthesized)
aacatggatagtctagatttatgttagcattttaaaaactgtttttgatatattcaagtatatatgaaaatctgtttggcattaagtgaattttaatgtttttgtttttatatcctttta

SEQ ID NO: 181464 - DNA, 120 bp, Artificial Sequence
  ENSG00000111145_15 (sequence is synthesized)
gctcttaagtgttgaacactgttgacagtgaagaacttttcttaatggttttcagtataactaataaggatgtgaagcttttttctctttagttctgagtatgctaaactgtgtgcttat

SEQ ID NO: 181465 - DNA, 120 bp, Artificial Sequence
  ENSG00000111145_16 (sequence is synthesized)
atagactataaccagttgtgccttccttcgcatttaatgtaaatgaatgatttatatattttttagtattaagaggaaatgtttgaaagatgaaaattagtatcaaacagctctctagta

SEQ ID NO: 181466 - DNA, 120 bp, Artificial Sequence
  ENSG00000111145_17 (sequence is synthesized)
aatttcattatttttcaccagtgggcaatatgaaagcatatatcacgttttgttttactttcaattgtataagaattgccttagaacctcttttgaactgaaattcagtaaatgtccaag

SEQ ID NO: 181467 - DNA, 120 bp, Artificial Sequence
  ENSG00000111145_18 (sequence is synthesized)
taatgtttttataataaactaagccatatttagacaataaacattgataaaagaaaatgttctaaagtacattttcaaaagaatggaccttgaaaggctagcctccttagctgtttacag

SEQ ID NO: 181468 - DNA, 120 bp, Artificial Sequence
  ENSG00000111145_19 (sequence is synthesized)
tatcttatcttttagatgcctcccagacaaaaatctgagatggaaaagctacatcaagttcatgctattccaggcccaagaatatctcctaggttagcatattcttatttcaaaaaatta

SEQ ID NO: 181469 - DNA, 120 bp, Artificial Sequence
  ENSG00000111145_20 (sequence is synthesized)
gccctggttttctcagttttccatagggaatcccgaccatctgatatatttactgtgtcagtataagtaagttggggttcccctggaactataattaacatttaaaaaatctaatgcttt

SEQ ID NO: 181470 - DNA, 120 bp, Artificial Sequence
  ENSG00000111145_21 (sequence is synthesized)
agaagaagctcacagagtggtgatgaacccaaacaacaaagaaaccatttttaacactaggtatcttcatcagtataggtaggtgttcacaatttttgatggatcaaaaacttgctgtaa

SEQ ID NO: 181471 - DNA, 120 bp, Artificial Sequence
  ENSG00000111145_22 (sequence is synthesized)
tacaaatagagagtggaggtactaaaggccttgcttgtggaaactgagagaggatacactgctttatgtattactaaagttaggggagaatgaaggaaatctgacagatgaaaaattcta

SEQ ID NO: 181472 - DNA, 120 bp, Artificial Sequence
  ENSG00000111145_23 (sequence is synthesized)
caggaacctcatcatcgtggaactgaactgatgataacttggaacactccagtaaattctgttgtgtaatgtaatttggagcagtgataatacagacatattttctgttccatcagaaaa

SEQ ID NO: 181473 - DNA, 120 bp, Artificial Sequence
  ENSG00000111145_24 (sequence is synthesized)
tcagcaggcaccagtccaaaggtaccacacctgtacatgaagaaggaaagttctaatacaagaaaactgaaaagcaccaagctttaaattcaagattaattacaatccttaactataagt

SEQ ID NO: 181474 - DNA, 120 bp, Artificial Sequence
  ENSG00000111145_25 (sequence is synthesized)
gatgataaaaactaacttgaaatgtgactaaataactgatccaaactgggcattaagtggcaggattatgagaaaggataaaaaaagagatttgagaaaacacatttcttgaattttcag

SEQ ID NO: 181475 - DNA, 120 bp, Artificial Sequence
  ENSG00000111145_26 (sequence is synthesized)
aaaaaaatctagactattgctttgacacttagaaattctgaggtttttcaattggaattgagcatctctgtatgtggggatgtgggcccttatcaagggataaaaatccaaacactctaa

SEQ ID NO: 181476 - DNA, 120 bp, Artificial Sequence
  ENSG00000111145_27 (sequence is synthesized)
catgcctccttgactgtaaagtaatgacactggttccaaaattcacaaataatagacactactgtccccccacccccaccccataggctaagaataattctgtaccagaataaaaggagc

SEQ ID NO: 181477 - DNA, 120 bp, Artificial Sequence
  ENSG00000111145_28 (sequence is synthesized)
tggtccagggaactgatatttactgaacatacaaagttagtgctagaaggggcctttgagaatgcttcccgccacctgtttccagctcaagacaggtgcacagcagaagctgggagttgc

SEQ ID NO: 181478 - DNA, 120 bp, Artificial Sequence
  ENSG00000111145_29 (sequence is synthesized)
ctatggctgcacagctcactgaaggtagaacaatgattggtgctcagtccaattctgtctcccccatgcctagctgttaagtaattactggttcaaaactacgtgttattagtaaaacaa

SEQ ID NO: 181479 - DNA, 120 bp, Artificial Sequence
  ENSG00000111145_30 (sequence is synthesized)
acaaaacagataaagacagcatttaaaactgtgttgtcagataagagaacacatccaaaatgcatgattcttacaaactaaaggaagttaatgtgcaaaaatctcaaccaaaactactat

SEQ ID NO: 181480 - DNA, 120 bp, Artificial Sequence
  ENSG00000111145_31 (sequence is synthesized)
ttttagtatacttgtttacgtaaatgctgattggaaatatttaaatgactatagatctgattctttcttttcctttggaaactgggattaatgtatgctctagatccatttattagaaat

SEQ ID NO: 181481 - DNA, 120 bp, Artificial Sequence
  ENSG00000111145_32 (sequence is synthesized)
gcaaaaatactacaattttttgatggatgaaaatactcctgtaacacaaacagagaactggaggaactgaagaataactcactcatatagctctgcctcattctgtgtgtgtgtgcatgt

SEQ ID NO: 181482 - DNA, 120 bp, Artificial Sequence
  ENSG00000111145_33 (sequence is synthesized)
gtgtgttagcagaggtattttactcagaaaataggtttcaaagaacattaatgactttcttttcccttttatgtctgcttaatcagtgttaaactgctatgggaaaagttttatagaact

SEQ ID NO: 181483 - DNA, 120 bp, Artificial Sequence
  ENSG00000111145_34 (sequence is synthesized)
atataacctgaatgttggtctctttgtacacatcttttctatgactgcaaatcttcactttatgtatcatttttactgtcatattatttttgttcaataaaaactttgtgataaaaggtg

SEQ ID NO: 181484 - DNA, 120 bp, Artificial Sequence
  ENSG00000111145_35 (sequence is synthesized)
ccgtctgcagacgcctgtcagcatggaaagtcgggggctttcgcccgggtcctcctagaaattccccccgaagaagactcccccacatctggaagagattaaatgaagatgtgtgtgtgt

SEQ ID NO: 181485 - DNA, 120 bp, Artificial Sequence
  ENSG00000111145_36 (sequence is synthesized)
tgaagactgcatagtgcacactctgtgtggctaccggtgagccacgtggcgggatacaggactcaaagaagatcacactggagaagggagttcatgctctgttgcccaggctggggtgca

SEQ ID NO: 181486 - DNA, 120 bp, Artificial Sequence
  ENSG00000111145_37 (sequence is synthesized)
tctggaagaccagtatggtgctgtgaaatgttgcaaaacatgacctgatgacaacccaaaacacttcatagaaaactatccaagaatgtgacttcctggagtagagtcttttttcactga

SEQ ID NO: 181487 - DNA, 120 bp, Artificial Sequence
  ENSG00000111181_0 (sequence is synthesized)
agtgattagcctgtggagcaggaaagtccagcgatgggcagctggtcacggcagtgggtgaaagcaggggtggtcatctgacgaggggaggggaagcaggtggtgcccagcaaggtggaa

SEQ ID NO: 181488 - DNA, 120 bp, Artificial Sequence
  ENSG00000111181_1 (sequence is synthesized)
ggagaagtggacaggagaaacctcggggcattcccgagggcccaggaactgcaataaatgatcacagggaaacttagagttcagagagggggtgtgatttgcctgaggtcacacagcaag

SEQ ID NO: 181489 - DNA, 120 bp, Artificial Sequence
  ENSG00000111181_2 (sequence is synthesized)
ttagagacccagctccacgactcattgtcttggctttggccctcgtcatcctgcccacccagcggggcttcccaacccaccacacagccatggacgggaaggtggcagtgcaagagtgtg

SEQ ID NO: 181490 - DNA, 120 bp, Artificial Sequence
  ENSG00000111181_3 (sequence is synthesized)
ggcctcctgcagtctcctgggtccccgaggagggagagaagttggaccaggaagacgaggaccaggtgaaggatcggggccaatggaccaacaagatggagtttgtgctgtcagtggccg

SEQ ID NO: 181491 - DNA, 120 bp, Artificial Sequence
  ENSG00000111181_4 (sequence is synthesized)
gggagatcattgggctgggcaatgtctggaggtttccctatctctgctacaaaaacggaggtggagccttcttcatcccctacttcatcttcttctttgtctgcggcatcccggtgttct

SEQ ID NO: 181492 - DNA, 120 bp, Artificial Sequence
  ENSG00000111181_5 (sequence is synthesized)
tcctggaggtggcgttgggccaatacaccagccaagggagtgtcacagcctggaggaagatctgccccctcttccagggcattggtctggcatctgtggtcatcgagtcatatttgaatg

SEQ ID NO: 181493 - DNA, 120 bp, Artificial Sequence
  ENSG00000111181_6 (sequence is synthesized)
tctactacatcatcatccttgcctgggctctcttctacctgttcagctccttcacttctgagctgccctggacgacctgcaacaacttttggaacacagagcattgcacggactttctga

SEQ ID NO: 181494 - DNA, 120 bp, Artificial Sequence
  ENSG00000111181_7 (sequence is synthesized)
accactcaggagccggcacagtgaccccatttgagaattttacctcacctgtcatggaattctgggagagacgagttctgggcatcacctcgggcatccatgacctgggctccctgcgct

SEQ ID NO: 181495 - DNA, 120 bp, Artificial Sequence
  ENSG00000111181_8 (sequence is synthesized)
gggagctggccctgtgcctcctgctcgcctgggtcatctgctatttctgcatctggaagggggtcaagtccacaggcaaggtggtttatttcacagccacgtttccgtacctgatgcttg

SEQ ID NO: 181496 - DNA, 120 bp, Artificial Sequence
  ENSG00000111181_9 (sequence is synthesized)
tcattttgctgatcagaggtgtcacccttcccggagcctaccagggcatcatctactacttgaagccagatttgttccgcctcaaggaccctcaggtgtggatggatgcgggcacccaga

SEQ ID NO: 181497 - DNA, 120 bp, Artificial Sequence
  ENSG00000111181_10 (sequence is synthesized)
tcttcttctcctttgccatctgccaggggtgcctgacagccctgggcagctacaacaagtatcacaacaactgctacaaggactgcatcgccctctgcttcctgaacagtgccaccagct

SEQ ID NO: 181498 - DNA, 120 bp, Artificial Sequence
  ENSG00000111181_11 (sequence is synthesized)
ttgtggctgggtttgttgtcttctccatcctgggcttcatgtcccaagagcaaggggtgcccatttctgaagtggccgagtcaggtcctgggctggccttcatcgccttccccaaggctg

SEQ ID NO: 181499 - DNA, 120 bp, Artificial Sequence
  ENSG00000111181_12 (sequence is synthesized)
tgactatgatgcccttatcccagctgtggtcctgcctgttctttatcatgctcatattcctagggctggacagccagtttgtctgtgtggagtgcctggtgacagcctccatagacatgt

SEQ ID NO: 181500 - DNA, 120 bp, Artificial Sequence
  ENSG00000111181_13 (sequence is synthesized)
tcaccatcgccgtcatgtgctacctgatagggcttttcctggtcaccgagggcgggatgtacatcttccagctgtttgactactatgcttccagtggcatatgcctgctgttcctgtcat

SEQ ID NO: 181501 - DNA, 120 bp, Artificial Sequence
  ENSG00000111181_14 (sequence is synthesized)
tgtttgaagtggtctgcataagctgggtgtatggggcggaccgtttctatgacaacattgaggacatgattggctaccggccatggcccctggtgaagatctcctggctcttcctgaccc

SEQ ID NO: 181502 - DNA, 120 bp, Artificial Sequence
  ENSG00000111181_15 (sequence is synthesized)
ctggactttgcctggccactttcctcttctccttgagcaagtacacccccctcaagtacaacaacgtctatgtgtacccgccctggggatactccattggctggttcctggctctgtcct

SEQ ID NO: 181503 - DNA, 120 bp, Artificial Sequence
  ENSG00000111181_16 (sequence is synthesized)
ccatggtctgtgtcccactcttcgtcgtcatcaccctcctgaagactcggggtcctttcaggaagcgtctgcgtcagctcatcacccctgactccagtctgccacagcccaagcaacatc

SEQ ID NO: 181504 - DNA, 120 bp, Artificial Sequence
  ENSG00000111181_17 (sequence is synthesized)
cctgcttggatggcagtgctggccggaactttgggccctccccaacaagggaaggactgatagccggggagaaggagacccatttgtagggtgtggccagaggccaggcggctcctaagc

SEQ ID NO: 181505 - DNA, 120 bp, Artificial Sequence
  ENSG00000111181_18 (sequence is synthesized)
cgggaacctaggtcagggccaccctccattctcagcggacagcctctgcctctgtctcctgccacaatcctgctgggaacctctggagagccacaggcacccccagctggaggccagact

SEQ ID NO: 181506 - DNA, 120 bp, Artificial Sequence
  ENSG00000111181_19 (sequence is synthesized)
cctctcttgtgctagctggagcagctccttcccctttgctgataacaccaccactgggacgtgccatgttgggacgccactccctgtgggaaggcaccatcgtttttataaaggggggtc

SEQ ID NO: 181507 - DNA, 120 bp, Artificial Sequence
  ENSG00000111181_20 (sequence is synthesized)
tttttggaggccgccatctgattgcaacacctcgagttatgaggattccactgtggggatgcctcttgttagagcgtactgcatttgtacacggggagaggagctataattggaacgcac

SEQ ID NO: 181508 - DNA, 120 bp, Artificial Sequence
  ENSG00000111181_21 (sequence is synthesized)
actgccgtccaatgtggagagcctgatgggacaataccctgttggaagtgacaactgaacacactgtgttggatcggaggttccgttaggggatccttccttaggcttaacgacagaggc

SEQ ID NO: 181509 - DNA, 120 bp, Artificial Sequence
  ENSG00000111181_22 (sequence is synthesized)
aagcctttgcatgccgtcagtctggagtttcctccgagtctctcatggcatctccagctcctgccctagttccgcactgttcttgcagtgtttcatcaactcctggagcattggaatgga

SEQ ID NO: 181510 - DNA, 120 bp, Artificial Sequence
  ENSG00000111181_23 (sequence is synthesized)
aggggcttgggagatgattcctagacttcacaaacactcggcatgcctccctgcactgtccgttcctctgcccaaggccgatattgctaactgatcacagattctttcccacctcacaat

SEQ ID NO: 181511 - DNA, 120 bp, Artificial Sequence
  ENSG00000111181_24 (sequence is synthesized)
ccttccgaatgtgctccaggcagcaccatttgccatcctgcttctaacgcaaacccctgacttcatggatgaggaacctggagaccaaagagacaaagggactttttcaagttcacatgg

SEQ ID NO: 181512 - DNA, 120 bp, Artificial Sequence
  ENSG00000111181_25 (sequence is synthesized)
ggacccccttcttgggggccagagatatgactaaaaccttatctccttgtgctcaggccagtgtcttcccattaaccccctgccttagttaacaagtgtgtatggattgccttccatgcg

SEQ ID NO: 181513 - DNA, 120 bp, Artificial Sequence
  ENSG00000111181_26 (sequence is synthesized)
gttcagaggccccaccttctcttttcctcccaatcagctgcccagagctgctggctcccctgtttactctgagctgatcgatcaccttagcacacagctggctaggagagaaccatgcag

SEQ ID NO: 181514 - DNA, 120 bp, Artificial Sequence
  ENSG00000111181_27 (sequence is synthesized)
tcacttcggccacacctgcccgttgacccttgctacctcggcaggctttgatcccttctgacctggaggccagaggctaggctgaggtcactcagcagacatcaaggacctgggcagatg

SEQ ID NO: 181515 - DNA, 120 bp, Artificial Sequence
  ENSG00000111181_28 (sequence is synthesized)
ggccggctgggatggtggcgagctgtacagataaaaagggacatgaaaatgaaaagcccgagcctgagttttcatcacggttccactcctgagtggtcttgggtgaatcacttcatctgc

SEQ ID NO: 181516 - DNA, 120 bp, Artificial Sequence
  ENSG00000111181_29 (sequence is synthesized)
gggtgtgaaggactacagagagagccaggttttggtgccatgcacacagggaaacttagagttcagagagggggtgtgatttgcctgaggtcacacagcaagttagagacccagctccac

SEQ ID NO: 181517 - DNA, 120 bp, Artificial Sequence
  ENSG00000111181_30 (sequence is synthesized)
tctttctgtctgggagtccctggacaagtcacatgggattctgcgctgggaggaacagggtaaggcgtgaacgtggagggcagtttccctttcaggtcccggctctcttggctttcccat

SEQ ID NO: 181518 - DNA, 120 bp, Artificial Sequence
  ENSG00000111181_31 (sequence is synthesized)
gcggcggacgcccgggccgccccaacgccgctgcgcggtggagaccgcggtggaacccgtccttgccagggtgggctcgccgggccccaaaggagaggttttgttcatagtcagcattga

SEQ ID NO: 181519 - DNA, 90 bp, Artificial Sequence
  ENSG00000111181_32 (sequence is synthesized)
cgggccccaaaggagaggttttgttcatagtcagcattgatttttcagccaggctgttctgaaaggtccacagtccttcgttaagtagtg

SEQ ID NO: 181520 - DNA, 120 bp, Artificial Sequence
  ENSG00000111181_33 (sequence is synthesized)
aatgtctggaggtttccctatctctgctacaaaaacggaggtggtgagttcactttgaggtaggcatggtggggagagctgtgtgctggcagctgggcagtgcctacctgggccctcctt

SEQ ID NO: 181521 - DNA, 120 bp, Artificial Sequence
  ENSG00000111181_34 (sequence is synthesized)
gcttagcccctctaggctgtctctgaggttgggactgagctccgtgtgactcgagctgcctgtggggcgtggctggagggccactgcgtccccaccaggagtgaccttggcctgtccccc

SEQ ID NO: 181522 - DNA, 120 bp, Artificial Sequence
  ENSG00000111181_35 (sequence is synthesized)
accgtgctgggaccacttccccaggtgccttccccacccagccaggtctgtagttttgaaagtcttgtatagctttttccttggtttaaaagcaataaatgcccactggagataaattag

SEQ ID NO: 181523 - DNA, 120 bp, Artificial Sequence
  ENSG00000111181_36 (sequence is synthesized)
gaattctgggagtaggtgctgggcccatttgccacatatgaagaggaaatttggatgtctgagctgtgcaagtctgaatgtctggggtgcaagtttaagattctgtgtgtgctttccagc

SEQ ID NO: 181524 - DNA, 120 bp, Artificial Sequence
  ENSG00000111181_37 (sequence is synthesized)
acccacacgggtccacggagactcacatttatccgtcatgtccaccttcagccccacatccctacctccatgcgtgtgtctgcccacacatgtccagtggggtgctggacagagtcttca

SEQ ID NO: 181525 - DNA, 120 bp, Artificial Sequence
  ENSG00000111181_38 (sequence is synthesized)
cagctttaggggagctgagtgtgcatgtctcttcccactgccatgctcggtggtgtcatgccagtagcttgaaattgcccaaggcgggagtgctcacatcaagacatgggcacaccctcc

SEQ ID NO: 181526 - DNA, 120 bp, Artificial Sequence
  ENSG00000111181_39 (sequence is synthesized)
actcacacactcaccctctcacctgacaacgtaccccttcacattacgtgtgcccacactcgtccacctgcattcccacgcaagactgcctgtactctctcacactgagctaacccccac

SEQ ID NO: 181527 - DNA, 120 bp, Artificial Sequence
  ENSG00000111181_40 (sequence is synthesized)
gcctgccggctgagcgtgacgagctgggtgccaggcgcctcccaggaggaagctgtcttggctttgggcggtggatgctatgggtgtgcttgtacccgaggggggcactcaggggagttg

SEQ ID NO: 181528 - DNA, 120 bp, Artificial Sequence
  ENSG00000111181_41 (sequence is synthesized)
caggcagccaccagctgagaccggcactcacggggtgtgaaggactacagagagagccaggttttggtgccatgcacacagggaaacttagagttcagagagggggtgtgatttgcctga

SEQ ID NO: 181529 - DNA, 120 bp, Artificial Sequence
  ENSG00000111186_0 (sequence is synthesized)
tattcttccaaatggaaactgctaatttttgaagcagaaggttgacagcttcagtaagatctcaagagagcgagaagactggaatcagggaaccctactctggaaactgtcagtcccagg

SEQ ID NO: 181530 - DNA, 120 bp, Artificial Sequence
  ENSG00000111186_1 (sequence is synthesized)
gcactggggagggctgaggccgaccatgcccagcctgctgctgctgttcacggctgctctgctgtccagctgggctcagcttctgacagacgccaactcctggtggtcattagctttgaa

SEQ ID NO: 181531 - DNA, 120 bp, Artificial Sequence
  ENSG00000111186_2 (sequence is synthesized)
cccggtgcagagacccgagatgtttatcatcggtgcccagcccgtgtgcagtcagcttcccgggctctcccctggccagaggaagctgtgccaattgtaccaggagcacatggcctacat

SEQ ID NO: 181532 - DNA, 120 bp, Artificial Sequence
  ENSG00000111186_3 (sequence is synthesized)
aggggagggagccaagactggcatcaaggaatgccagcaccagttccggcagcggcggtggaattgcagcacagcggacaacgcatctgtctttgggagagtcatgcagataggcagccg

SEQ ID NO: 181533 - DNA, 120 bp, Artificial Sequence
  ENSG00000111186_4 (sequence is synthesized)
agagaccgccttcacccacgcggtgagcgccgcgggcgtggtcaacgccatcagccgggcctgccgcgagggcgagctctccacctgcggctgcagccggacggcgcggcccaaggacct

SEQ ID NO: 181534 - DNA, 120 bp, Artificial Sequence
  ENSG00000111186_5 (sequence is synthesized)
gccccgggactggctgtggggcggctgtggggacaacgtggagtacggctaccgcttcgccaaggagtttgtggatgcccgggagcgagagaagaactttgccaaaggatcagaggagca

SEQ ID NO: 181535 - DNA, 120 bp, Artificial Sequence
  ENSG00000111186_6 (sequence is synthesized)
gggccgggtgctcatgaacctgcaaaacaacgaggccggtcgcagggctgtgtataagatggcagacgtagcctgcaaatgccacggcgtctcggggtcctgcagcctcaagacctgctg

SEQ ID NO: 181536 - DNA, 120 bp, Artificial Sequence
  ENSG00000111186_7 (sequence is synthesized)
gctgcagctggccgagttccgcaaggtcggggaccggctgaaggagaagtacgacagcgcggccgccatgcgcgtcacccgcaagggccggctggagctggtcaacagccgcttcaccca

SEQ ID NO: 181537 - DNA, 120 bp, Artificial Sequence
  ENSG00000111186_8 (sequence is synthesized)
gcccaccccggaggacctggtctatgtggaccccagccccgactactgcctgcgcaacgagagcacgggctccctgggcacgcagggccgcctctgcaacaagacctcggagggcatgga

SEQ ID NO: 181538 - DNA, 120 bp, Artificial Sequence
  ENSG00000111186_9 (sequence is synthesized)
gcgtggctacaaccagttcaagagcgtgcaggtggagcgctgccactgcaagttccactggtgctgcttcgtcaggtgtaagaagtgcacggagatcgtggaccagtacatctgtaaata

SEQ ID NO: 181539 - DNA, 120 bp, Artificial Sequence
  ENSG00000111186_10 (sequence is synthesized)
gcccggagggcctgctcccggcccccctgcactctgcctcacaaaggtctatattatataaatctatataaatctattttatatttgtataagtaaatgggtgggtgctatacaatggaa

SEQ ID NO: 181540 - DNA, 120 bp, Artificial Sequence
  ENSG00000111186_11 (sequence is synthesized)
agatgaaaatggaaaggaagagcttatttaagagacgctggagatctctgaggagtggactttgctggttctctcctcttggtgggtgggagacagggctttttctctccctctggcgag

SEQ ID NO: 181541 - DNA, 120 bp, Artificial Sequence
  ENSG00000111186_12 (sequence is synthesized)
gactctcaggatgtagggacttggaaatatttactgtctgtccaccacggcctggaggagggaggttgtggttggatggaggagatgatcttgtctggaagtctagagtctttgttggtt

SEQ ID NO: 181542 - DNA, 120 bp, Artificial Sequence
  ENSG00000111186_13 (sequence is synthesized)
agaggactgcctgtgatcctggccactaggccaagaggccctatgaaggtggcgggaactcagcttcaacctcgatgtcttcagggtcttgtccagaatgtagatgggttccgtaagagg

SEQ ID NO: 181543 - DNA, 120 bp, Artificial Sequence
  ENSG00000111186_14 (sequence is synthesized)
cctggtgctctcttactctttcatccacgtgcacttgtgcggcatctgcagtttacaggaacggctccttccctaaaatgagaagtccaaggtcatctctggcccagtgaccacagagag

SEQ ID NO: 181544 - DNA, 120 bp, Artificial Sequence
  ENSG00000111186_15 (sequence is synthesized)
atctgcacctcccggacttcaggcctgcctttccagcgagaattcttcatcctccacggttcactagctcctacctgaagaggaaagggggccatttgacctgacatgtcaggaaagccc

SEQ ID NO: 181545 - DNA, 120 bp, Artificial Sequence
  ENSG00000111186_16 (sequence is synthesized)
taaactgaatgtttgcgcctgggctgcagaagccagggtgcatgaccaggctgcgtggacgttatactgtcttcccccacccccggggaggggaagcttgagctgctgctgtcactcctc

SEQ ID NO: 181546 - DNA, 120 bp, Artificial Sequence
  ENSG00000111186_17 (sequence is synthesized)
caccgagggaggcctcacaaaccacaggacgctgcaacgggtcaggctggcgggcccggcgtgctcatcatctctgccccaggtgtacggtttctctctgacattaaatgcccttcatgg

SEQ ID NO: 181547 - DNA, 120 bp, Artificial Sequence
  ENSG00000111186_18 (sequence is synthesized)
agtcacagccacagtgaccattagcaggcacccaggcctgtctttggctcggaaacggtggcccccaatgtagcctagtttgaacctaggaactgcaggaccagagagattccactggag

SEQ ID NO: 181548 - DNA, 120 bp, Artificial Sequence
  ENSG00000111186_19 (sequence is synthesized)
aaatgctccagatcctcagtgttcaagaacctcaggaagcttcgcagtcctgcctcgtgcctgcttgaacagctggatgtgggcaggaggctgtgggagcgggccatgccagcagaatcc

SEQ ID NO: 181549 - DNA, 120 bp, Artificial Sequence
  ENSG00000111186_20 (sequence is synthesized)
ataactctcttcccctctcagagcctcgggccccgcagacgccgaggtgggcgctcgtgccaggatcgcggggcgcgggtacgggctccttgggcgccccgagggggctgctggccgggg

SEQ ID NO: 181550 - DNA, 120 bp, Artificial Sequence
  ENSG00000111186_21 (sequence is synthesized)
gcttggttcctcttctctcaaaggatttggaaggtcttccccgcacaatcaaaggagcagtttgagacacaggggcgacagctggggacagcattagagggacccacattacttagagct

SEQ ID NO: 181551 - DNA, 120 bp, Artificial Sequence
  ENSG00000111186_22 (sequence is synthesized)
actggtttccccccagataaaaacccaggtgtcgtttctgcatgagcagtgagtgacgaggagaattcgcttgcagcctctccgctacgctctgcctttagagtccctctagccgtggtc

SEQ ID NO: 181552 - DNA, 120 bp, Artificial Sequence
  ENSG00000111186_23 (sequence is synthesized)
actgatgaagacaggctctggggctcgccgttgaaggtgctgtggacccaggggtgctgtccttccgctgttccattcattgcaacattcatctcctgcctgtttacaaaaatgaagcaa

SEQ ID NO: 181553 - DNA, 120 bp, Artificial Sequence
  ENSG00000111186_24 (sequence is synthesized)
ttatcctattcttccaaatggaaactgctaatttttgaagcagaaggttgacagcttcagtaagatctcaagagagcgagaagactggaatcagggaaccctactctggaaactgtcagt

SEQ ID NO: 181554 - DNA, 120 bp, Artificial Sequence
  ENSG00000111186_25 (sequence is synthesized)
gctcacttccgagctggctctgcatgacaaaggggaaggagcaagtgtcttctttgatctgccccctgccggccccacacacctgcctgttggtgcccccgccccagccgaggcttcgag

SEQ ID NO: 181555 - DNA, 120 bp, Artificial Sequence
  ENSG00000111186_26 (sequence is synthesized)
aaggaaaatcaaaagggggcttggggaagggctgtgtcccagctctcctggaccctgctcgggccactgtcctctcctggcggccccaggacaaaaatacttcccgggctgatgacccga

SEQ ID NO: 181556 - DNA, 120 bp, Artificial Sequence
  ENSG00000111186_27 (sequence is synthesized)
acattttgatttgggataactcaagttcaaatctactccacgttgtggcggttctgtgacttctggggtagacttgttttagatgaaccgctcctgcaggcaggcccagctgcttgcagt

SEQ ID NO: 181557 - DNA, 120 bp, Artificial Sequence
  ENSG00000111186_28 (sequence is synthesized)
tcccttgcacgttgcttcactgtgttactccagctctcccaagggggcgtctgggggctgctcgggaggaagacggtggtcttgctcacaaatggatggtgtatggcaagactcctgatg

SEQ ID NO: 181558 - DNA, 120 bp, Artificial Sequence
  ENSG00000111186_29 (sequence is synthesized)
caattcaccaaaatgttttaatcctacaaaggagagcctgagggtcagagaaataagtctctgggctggaatgagaggtaggcacgtgggggagtggataggatgggccccatttctttg

SEQ ID NO: 181559 - DNA, 120 bp, Artificial Sequence
  ENSG00000111186_30 (sequence is synthesized)
gatgttctgcagcaaggacaggtatgctttacaacagccgaagtggcctcccggctgccgaacggaggaacgccgcaagctccgctcttgaaattacttgttttcatttctctttgtggt

SEQ ID NO: 181560 - DNA, 120 bp, Artificial Sequence
  ENSG00000111186_31 (sequence is synthesized)
ttctcagctcattatttctttggaaattaggtcctgtgcagggttcccacagtttggggtaagagacagaagtcctagggtgggaagatgagcagtgggaggcggaggctggaaagaggc

SEQ ID NO: 181561 - DNA, 120 bp, Artificial Sequence
  ENSG00000111186_32 (sequence is synthesized)
cgagcttctttgtggggaacacgcagcacgtaagcatcagtgcaactttctccgcctcaccccggctcctggtctgcccttatccgctgagtttccacactgactctccatttctgtttt

SEQ ID NO: 181562 - DNA, 120 bp, Artificial Sequence
  ENSG00000111186_33 (sequence is synthesized)
tcgcccgccgacccagcgcagccgggcgcaggaagagccgggccgggccgagcggcgcccggagcccgcgggcctgacacgcggcgggacatgcagggaaccctactctggaaactgtca

SEQ ID NO: 181563 - DNA, 120 bp, Artificial Sequence
  ENSG00000111196_0 (sequence is synthesized)
attccgcgcgatgacgtcactgcaaggcgccgggggacacgttggctgcgttttcggcgggcttcccgggtacaaaaatggctgtggctagcgatttctacctgcgctactacgtagggc

SEQ ID NO: 181564 - DNA, 120 bp, Artificial Sequence
  ENSG00000111196_1 (sequence is synthesized)
acaagggcaagtttgggcacgagtttctggagttcgaatttcggccggacggaaagcttagatatgccaacaacagcaattacaaaaatgatgtcatgatcagaaaagaggcttatgtgc

SEQ ID NO: 181565 - DNA, 120 bp, Artificial Sequence
  ENSG00000111196_2 (sequence is synthesized)
acaagagtgtaatggaagaactgaagagaattattgatgacagtgaaattacaaaagaagatgatgctttgtggcctccccctgatagggttggccgacaggagcttgaaattgtaattg

SEQ ID NO: 181566 - DNA, 120 bp, Artificial Sequence
  ENSG00000111196_3 (sequence is synthesized)
gagatgagcacatatcttttaccacatcaaaaataggttctcttattgatgtaaatcagtcaaaggatcctgaaggccttcgagtattttactatttggtacaagacttgaaatgtttag

SEQ ID NO: 181567 - DNA, 120 bp, Artificial Sequence
  ENSG00000111196_4 (sequence is synthesized)
ttttcagtcttattggattacacttcaagattaaaccaatttaaattgtatgttttcaggctgtttgtatatttaattaagggatgggaggggttatttgtcatttacagtattggggtt

SEQ ID NO: 181568 - DNA, 120 bp, Artificial Sequence
  ENSG00000111196_5 (sequence is synthesized)
tttatgaatgtgaagcaaacaaaaaaaatttgtatgtaaactgaaaataagaaaatacattagcaagcttaatggttatccttacttgagtccatatgggttggacagtccccacacaca

SEQ ID NO: 181569 - DNA, 120 bp, Artificial Sequence
  ENSG00000111196_6 (sequence is synthesized)
ttaaattctgtaaatgaaagccaccttttgttaaaaatttgctctaataaaacataccaaatcctggttgcagagtagttttttgttttttccaggaggctatgtctctaattcacttta

SEQ ID NO: 181570 - DNA, 120 bp, Artificial Sequence
  ENSG00000111196_7 (sequence is synthesized)
gagataataagaaattgttctggtagatatatcctgtgacagaagatactttaggtggaactatgtagccagattcccatccatgaaaggcaagtgtagattgtcccttatttccttcat

SEQ ID NO: 181571 - DNA, 120 bp, Artificial Sequence
  ENSG00000111196_8 (sequence is synthesized)
acatgattggatttaattttggggggcttatacaaggtctagtttttttttacagttatgacaaacccctcagggattattcacatttaaatattttcagttataagcagtgaggtccta

SEQ ID NO: 181572 - DNA, 120 bp, Artificial Sequence
  ENSG00000111196_9 (sequence is synthesized)
aagtgttacaagagtacagtctaccccatgttaggcatatctttgattatgtctttattccttatttcacaatgtatttggtgtgtaggggaggggggagaactaaatgagttttcagct

SEQ ID NO: 181573 - DNA, 120 bp, Artificial Sequence
  ENSG00000111196_10 (sequence is synthesized)
cttcagtttcccagttcctttcaacctctttctgatagatttcctctttcattacttttagtaaccatgttccttgtttccttttattcttccatctgaagccccactcttaaaaagttg

SEQ ID NO: 181574 - DNA, 120 bp, Artificial Sequence
  ENSG00000111196_11 (sequence is synthesized)
cactgttccagtagttataatccacttgccctaggaacaagttagcactgaattttgggtggaataattagtttctgaaggcttgccaggactcctgagcaggtaggctctagagtcggg

SEQ ID NO: 181575 - DNA, 120 bp, Artificial Sequence
  ENSG00000111196_12 (sequence is synthesized)
cagtccaataacttttttgcaataatggaaacgttctatgtgcagtccaatagggtagcaactggccaaatgaggcctactgattacttgaggtgtgccttgtataactgaatttatggt

SEQ ID NO: 181576 - DNA, 120 bp, Artificial Sequence
  ENSG00000111196_13 (sequence is synthesized)
gctatttaaacaatttttttctaacgtgaaaaggataaaacattaaaaactcttgagaactataaagtgaacacctatatgcctacccctacctagattctatacttaacatctttttta

SEQ ID NO: 181577 - DNA, 120 bp, Artificial Sequence
  ENSG00000111196_14 (sequence is synthesized)
ctgtaatatctctattataataaatcttggtttttcacttaactggtgtaattggtgccaataaactactttttttgtagtgctatttaattttgattaaatttaggtagccacgtgtct

SEQ ID NO: 181578 - DNA, 120 bp, Artificial Sequence
  ENSG00000111196_15 (sequence is synthesized)
agcggctaccgtttggacagtatagctctagagcatggcttggtaacctgtttgccatggagcactagatggtccttttcactcctcaaaatgcatgcccattgtcttcaggtttgccat

SEQ ID NO: 181579 - DNA, 120 bp, Artificial Sequence
  ENSG00000111196_16 (sequence is synthesized)
ggaaagtcaaatgatttccacttcattatgcaagtacgctatcatcttcaggtcttttgtatgtaaaatgtttctgttccagttgtagaccttgatgattgtgcagtatgaaatcgtatt

SEQ ID NO: 181580 - DNA, 120 bp, Artificial Sequence
  ENSG00000111196_17 (sequence is synthesized)
gtaattttcttgcatttagatgtcaacctcagaaacaggaacaatcgtcttttgaacttccagtaggcccacagttgttggttgttcctcaaaacaggttgtggctcctgttgaataaga

SEQ ID NO: 181581 - DNA, 120 bp, Artificial Sequence
  ENSG00000111196_18 (sequence is synthesized)
tgatccattaaaaactgaacaaggttgaggagaaatagtgcttacgttgaaaaatctttaagtctttgtccccgttctctaacttccttacgttttcgtttatttagctctatccccact

SEQ ID NO: 181582 - DNA, 120 bp, Artificial Sequence
  ENSG00000111196_19 (sequence is synthesized)
atctactagaatttctcatatttaaaccaagatgggagactaggtcattaggaaaatattaccgtctacaattttcttatactttgatctgtcttttatttgattgtaagttgctgatgg

SEQ ID NO: 181583 - DNA, 120 bp, Artificial Sequence
  ENSG00000111196_20 (sequence is synthesized)
acagtgatcattagaaactgaattttgtataatactagttttatatgaaactagatttttattgcgctcaggttatgttccttttacctccttccttaataaagagaccacttgaaataa

SEQ ID NO: 181584 - DNA, 120 bp, Artificial Sequence
  ENSG00000111196_21 (sequence is synthesized)
gctagaaaacttgcaactaaaattgggatctgcttgtagcaagaatacagatacctctgggatagatttttatattaactacatttttctgctatattttttaggagcttgaaattgtaa

SEQ ID NO: 181585 - DNA, 120 bp, Artificial Sequence
  ENSG00000111196_22 (sequence is synthesized)
tgaaggcctaatttcactctgtaaaaagaaagtttggtttctgaattgggtcttttcaactcttggagaaattccttcaacaacccctggaaggaagaaacatttaatttcacttttgta

SEQ ID NO: 181586 - DNA, 120 bp, Artificial Sequence
  ENSG00000111196_23 (sequence is synthesized)
acaagggcaagtttgggcacgagtttctggagttcgaatttcggccggacggacgcatgaagagtaccaagcaagaggggagaggtaaagttccacaggagggagtcaggaagatcttct

SEQ ID NO: 181587 - DNA, 120 bp, Artificial Sequence
  ENSG00000111196_24 (sequence is synthesized)
tagaggacggcactcttgagatgagtctcgaaatgagagacttggcctttgagagaaaaaaacagacttccagagcagtatgagcagaggatgaggtgaaactgctacccaagtagtgtg

SEQ ID NO: 181588 - DNA, 120 bp, Artificial Sequence
  ENSG00000111196_25 (sequence is synthesized)
cttagagaatgttacattgatcttgcctacctgcaacaagaaagttcatttggatatatattttttgggtttttttgaatgcacgttttgtgctggacaacaagcaaatacaaaatttta

SEQ ID NO: 181589 - DNA, 120 bp, Artificial Sequence
  ENSG00000111196_26 (sequence is synthesized)
ggttggccgacaggtttgtatttagtgattctttaagtgtataaatattaaaaattgataatactattttgtttcccgttatttatttggaatgagtctaagttgattctttggctttct

SEQ ID NO: 181590 - DNA, 120 bp, Artificial Sequence
  ENSG00000111196_27 (sequence is synthesized)
atttaataggcacctggtaaattctctttaattttatctcttagttctgtttttctgtgctacctcctagtagtgaaggagtcagtgcatagctctaaatttagacatctttctctgtag

SEQ ID NO: 181591 - DNA, 120 bp, Artificial Sequence
  ENSG00000111196_28 (sequence is synthesized)
atgaataatttctgttgtgtgttaatcacttttattaagaatatgactatgtaaaatttatttttgccaaatcataacttctaaaattcttacttgcatccctataccccagagagaaac

SEQ ID NO: 181592 - DNA, 120 bp, Artificial Sequence
  ENSG00000111196_29 (sequence is synthesized)
ccttctttgaatagaagaaaatgtggagaaatctaacacatgctgacactctgtaggagtaacttaagtcttctgcttaaagaagcattatttagaaaagcaaaggtaatagttaacagt

SEQ ID NO: 181593 - DNA, 120 bp, Artificial Sequence
  ENSG00000111196_30 (sequence is synthesized)
atttattttaagcatcgtatcacttttaaaaagtaaatttaggcctcagtttgttttatgcagatacacatatgtactaaaaagcaaaccacagcagctaaccttttatatcatttagac

SEQ ID NO: 181594 - DNA, 120 bp, Artificial Sequence
  ENSG00000111196_31 (sequence is synthesized)
tcagggagagcctagtattttatctattcacttaaggatgtgttcatgggttttggttagtggggaggagtaggcatgcttcagaaattgccttttgtatcaagtcaaaggttttatggc

SEQ ID NO: 181595 - DNA, 120 bp, Artificial Sequence
  ENSG00000111196_32 (sequence is synthesized)
gtgtgtgtcataaactgcataattaggcctctgattaaataaatagctaggattgtcttcaatagtgtctgttaacttgaagattcattacagatatagctttttaattattggttttag

SEQ ID NO: 181596 - DNA, 120 bp, Artificial Sequence
  ENSG00000111196_33 (sequence is synthesized)
gcctgcagataaacaatatagggaaaaatctatacagtaattacagcacactaggaacatctacattaggttggttttttttttttttttttactagttcttaattttagttattttgtg

SEQ ID NO: 181597 - DNA, 120 bp, Artificial Sequence
  ENSG00000111196_34 (sequence is synthesized)
gagtattagttttgaagtcttaccatcttgggatcaaatataagtaccatcattattagtggttataaatatcaacaagtattttcttctgctctatgagttttggattacacatttgta

SEQ ID NO: 181598 - DNA, 120 bp, Artificial Sequence
  ENSG00000111196_35 (sequence is synthesized)
aaataggttagtaaggttattttcaagattacagagagtacaaagtccctaccactagggcctgacatacagtaggtgctaaagtggtggtggttattaatattacacattttatttgta

SEQ ID NO: 181599 - DNA, 120 bp, Artificial Sequence
  ENSG00000111196_36 (sequence is synthesized)
gaatcttccagaaagaaaaaatgtgtatttatcatattaaaaatggtcttatactccaatcatttttacaacatgtgcttcaaagtgatgtctttagtttttactgacattgtaagaaat

SEQ ID NO: 181600 - DNA, 120 bp, Artificial Sequence
  ENSG00000111196_37 (sequence is synthesized)
atttctttgtcattttgtttcatagtgtcttctttatgtctctggaaagcaattctttgttggtcctaaacttgggggtagtgcgcgtgagcagtctttattttaaggatatagtttata

SEQ ID NO: 181601 - DNA, 120 bp, Artificial Sequence
  ENSG00000111199_0 (sequence is synthesized)
gggattcaggaagcgcggatctcccggccgccggcgcccagccgtcccggaggctgagcagtgcagacgggcctggggcaggcatggcggattccagcgaaggcccccgcgcggggcccg

SEQ ID NO: 181602 - DNA, 120 bp, Artificial Sequence
  ENSG00000111199_1 (sequence is synthesized)
gggaggtggctgagctccccggggatgagagtggcaccccaggtggggaggcttttcctctctcctccctggccaatctgtttgagggggaggatggctccctttcgccctcaccggctg

SEQ ID NO: 181603 - DNA, 120 bp, Artificial Sequence
  ENSG00000111199_2 (sequence is synthesized)
atgccagtcgccctgctggcccaggcgatgggcgaccaaatctgcgcatgaagttccagggcgccttccgcaagggggtgcccaaccccatcgatctgctggagtccaccctatatgagt

SEQ ID NO: 181604 - DNA, 120 bp, Artificial Sequence
  ENSG00000111199_3 (sequence is synthesized)
cctcggtggtgcctgggcccaagaaagcacccatggactcactgtttgactacggcacctatcgtcaccactccagtgacaacaagaggtggaggaagaagatcatagagaagcagccgc

SEQ ID NO: 181605 - DNA, 120 bp, Artificial Sequence
  ENSG00000111199_4 (sequence is synthesized)
agagccccaaagcccctgcccctcagccgccccccatcctcaaagtcttcaaccggcctatcctctttgacatcgtgtcccggggctccactgctgacctggacgggctgctcccattct

SEQ ID NO: 181606 - DNA, 120 bp, Artificial Sequence
  ENSG00000111199_5 (sequence is synthesized)
tgctgacccacaagaaacgcctaactgatgaggagtttcgagagccatctacggggaagacctgcctgcccaaggccttgctgaacctgagcaatggccgcaacgacaccatccctgtgc

SEQ ID NO: 181607 - DNA, 120 bp, Artificial Sequence
  ENSG00000111199_6 (sequence is synthesized)
tgctggacatcgcggagcgcaccggcaacatgagggagttcattaactcgcccttccgtgacatctactatcgaggtcagacagccctgcacatcgccattgagcgtcgctgcaaacact

SEQ ID NO: 181608 - DNA, 120 bp, Artificial Sequence
  ENSG00000111199_7 (sequence is synthesized)
acgtggaacttctcgtggcccagggagctgatgtccacgcccaggcccgtgggcgcttcttccagcccaaggatgaggggggctacttctactttggggagctgcccctgtcgctggctg

SEQ ID NO: 181609 - DNA, 120 bp, Artificial Sequence
  ENSG00000111199_8 (sequence is synthesized)
cctgcaccaaccagccccacattgtcaactacctgacggagaacccccacaagaaggcggacatgcggcgccaggactcgcgaggcaacacagtgctgcatgcgctggtggccattgctg

SEQ ID NO: 181610 - DNA, 120 bp, Artificial Sequence
  ENSG00000111199_9 (sequence is synthesized)
acaacacccgtgagaacaccaagtttgttaccaagatgtacgacctgctgctgctcaagtgtgcccgcctcttccccgacagcaacctggaggccgtgctcaacaacgacggcctctcgc

SEQ ID NO: 181611 - DNA, 120 bp, Artificial Sequence
  ENSG00000111199_10 (sequence is synthesized)
ccctcatgatggctgccaagacgggcaagattgggatctttcagcacatcatccggcgggaggtgacggatgaggacacacggcacctgtcccgcaagttcaaggactgggcctatgggc

SEQ ID NO: 181612 - DNA, 120 bp, Artificial Sequence
  ENSG00000111199_11 (sequence is synthesized)
cagtgtattcctcgctttatgacctctcctccctggacacgtgtggggaagaggcctccgtgctggagatcctggtgtacaacagcaagattgagaaccgccacgagatgctggctgtgg

SEQ ID NO: 181613 - DNA, 120 bp, Artificial Sequence
  ENSG00000111199_12 (sequence is synthesized)
agcccatcaatgaactgctgcgggacaagtggcgcaagttcggggccgtctccttctacatcaacgtggtctcctacctgtgtgccatggtcatcttcactctcaccgcctactaccagc

SEQ ID NO: 181614 - DNA, 120 bp, Artificial Sequence
  ENSG00000111199_13 (sequence is synthesized)
gacttgttcatgaagaaatgccctggagtgaattctctcttcattgatggctccttccagctgctctacttcatctactctgtcctggtgatcgtctcagcagccctctacctggcaggg

SEQ ID NO: 181615 - DNA, 120 bp, Artificial Sequence
  ENSG00000111199_14 (sequence is synthesized)
atcgaggcctacctggccgtgatggtctttgccctggtcctgggctggatgaatgccctttacttcacccgtgggctgaagctgacggggacctatagcatcatgatccagaagattctc

SEQ ID NO: 181616 - DNA, 120 bp, Artificial Sequence
  ENSG00000111199_15 (sequence is synthesized)
ttcaaggaccttttccgattcctgctcgtctacttgctcttcatgatcggctacgcttcagccctggtctccctcctgaacccgtgtgccaacatgaaggtgtgcaatgaggaccagacc

SEQ ID NO: 181617 - DNA, 120 bp, Artificial Sequence
  ENSG00000111199_16 (sequence is synthesized)
aactgcacagtgcccacttacccctcgtgccgtgacagcgagaccttcagcaccttcctcctggacctgtttaagctgaccatcggcatgggcgacctggagatgctgagcagcaccaag

SEQ ID NO: 181618 - DNA, 120 bp, Artificial Sequence
  ENSG00000111199_17 (sequence is synthesized)
taccccgtggtcttcatcatcctgctggtgacctacatcatcctcacctttgtgctgctcctcaacatgctcattgccctcatgggcgagacagtgggccaggtctccaaggagagcaag

SEQ ID NO: 181619 - DNA, 120 bp, Artificial Sequence
  ENSG00000111199_18 (sequence is synthesized)
cacatctggaagctgcagtgggccaccaccatcctggacattgagcgctccttccccgtattcctgaggaaggccttccgctctggggagatggtcaccgtgggcaagagctcggacggc

SEQ ID NO: 181620 - DNA, 120 bp, Artificial Sequence
  ENSG00000111199_19 (sequence is synthesized)
actcctgaccgcaggtggtgcttcagggtggatgaggtgaactggtctcactggaaccagaacttgggcatcatcaacgaggacccgggcaagaatgagacctaccagtattatggcttc

SEQ ID NO: 181621 - DNA, 120 bp, Artificial Sequence
  ENSG00000111199_20 (sequence is synthesized)
tcgcataccgtgggccgcctccgcagggatcgctggtcctcggtggtaccccgcgtggtggaactgaacaagaactcgaacccggacgaggtggtggtgcctctggacagcatggggaac

SEQ ID NO: 181622 - DNA, 120 bp, Artificial Sequence
  ENSG00000111199_21 (sequence is synthesized)
ccccgctgcgatggccaccagcagggttacccccgcaagtggaggactgatgacgccccgctctagggactgcagcccagccccagcttctctgcccactcatttctagtccagccgcat

SEQ ID NO: 181623 - DNA, 120 bp, Artificial Sequence
  ENSG00000111199_22 (sequence is synthesized)
ttcagcagtgccttctggggtgtccccccacaccctgctttggccccagaggcgagggaccagtggaggtgccagggaggccccaggaccctgtggtcccctggctctgcctccccaccc

SEQ ID NO: 181624 - DNA, 120 bp, Artificial Sequence
  ENSG00000111199_23 (sequence is synthesized)
tggggtgggggctcccggccacctgtcttgctcctatggagtcacataagccaacgccagagcccctccacctcaggccccagcccctgcctctccattatttatttgctctgctctcag

SEQ ID NO: 181625 - DNA, 120 bp, Artificial Sequence
  ENSG00000111199_24 (sequence is synthesized)
gaagcgacgtgacccctgccccagctggaacctggcagaggccttaggaccccgttccaagtgcactgcccggccaagccccagcctcagcctgcgcctgagctgcatgcgccaccattt

SEQ ID NO: 181626 - DNA, 120 bp, Artificial Sequence
  ENSG00000111199_25 (sequence is synthesized)
ttggcagcgtggcagctttgcaaggggctggggccctcggcgtggggccatgccttctgtgtgttctgtagtgtctgggatttgccggtgctcaataaatgtttattcattgacggtgga

SEQ ID NO: 181627 - DNA, 120 bp, Artificial Sequence
  ENSG00000111199_26 (sequence is synthesized)
acagatgcattcatcgagccacccactgctccagcctgccccagctgttccctctgtctgtcctctctgttttgcagatggggaaactgaggcttaggtcggggatctagacaattggga

SEQ ID NO: 181628 - DNA, 120 bp, Artificial Sequence
  ENSG00000111199_27 (sequence is synthesized)
tttaaacccagggactatccagccccaaagcccttcccaccacaccaggtggcctgtcctggggccagctctgcacacagggcctggtgcccccggggtgcttgggaagtggcagggcag

SEQ ID NO: 181629 - DNA, 120 bp, Artificial Sequence
  ENSG00000111199_28 (sequence is synthesized)
ccgtgaacccctgaaatgttaggcagataccctgtgggagctttgttctgggatgctaagaaccgcttgaggatttaagctttgccactttggctccggagcaagggcagagggctgagc

SEQ ID NO: 181630 - DNA, 120 bp, Artificial Sequence
  ENSG00000111203_0 (sequence is synthesized)
gccttaggtggccttccgctctggcggctgtcgcgacgggggttcagggaatatttactgggcctctccgctccctctgctcttggaggtgccatgaggtcagttagctacgtgcagcgc

SEQ ID NO: 181631 - DNA, 120 bp, Artificial Sequence
  ENSG00000111203_1 (sequence is synthesized)
gtggcgctggagttcagcgggagcctcttcccgcacgcaatctgcctcggagacgttgataacgatacgttaaatgaactggtggtgggagacaccagcgggaaggtgtctgtgtataaa

SEQ ID NO: 181632 - DNA, 120 bp, Artificial Sequence
  ENSG00000111203_2 (sequence is synthesized)
aatgatgacagtcggccatggctcacctgttcctgccagggaatgctgacttgcgttggggttggagacgtgtgtaataaaggaaagaacctgttggtggcagtgagtgctgaaggctgg

SEQ ID NO: 181633 - DNA, 120 bp, Artificial Sequence
  ENSG00000111203_3 (sequence is synthesized)
tttcatttgtttgacctgacacctgccaaggtgttggatgcttctgggcaccacgagacactaatcggagaggagcagcgtccagtcttcaagcagcacatccctgccaacaccaaggtc

SEQ ID NO: 181634 - DNA, 120 bp, Artificial Sequence
  ENSG00000111203_4 (sequence is synthesized)
atgctgatcagcgacatcgatggagatgggtgtcgtgagctggtggtgggctacacagaccgtgtggtgcgagctttccgctgggaggagctaggtgagggtcctgaacatctgacaggg

SEQ ID NO: 181635 - DNA, 120 bp, Artificial Sequence
  ENSG00000111203_5 (sequence is synthesized)
cagctggtgtccctcaagaaatggatgctggagggtcaggtggacagcctctcagtgactctggggccactgggtcttcctgaactgatggtgtctcagccaggttgtgcgtatgcaatt

SEQ ID NO: 181636 - DNA, 120 bp, Artificial Sequence
  ENSG00000111203_6 (sequence is synthesized)
ctactgtgtacctggaaaaaggacactgggtcccctcctgcctctgaagggcccacggatggtagtagggagaccccagctgcccgagacgtggtgctgcaccagacatctggccgtatc

SEQ ID NO: 181637 - DNA, 120 bp, Artificial Sequence
  ENSG00000111203_7 (sequence is synthesized)
cacaacaagaatgtctccactcacctaattggcaacatcaaacaaggccacggcactgagagtagtggctctggcctctttgccctgtgcaccctggatgggacactgaagctcatggaa

SEQ ID NO: 181638 - DNA, 120 bp, Artificial Sequence
  ENSG00000111203_8 (sequence is synthesized)
gaaatggaagaagcagacaagctgctgtggtcagtgcaggtggatcaccagctctttgccctggagaaactggatgtcaccggcaacgggcatgaggaggtagttgcatgcgcctgggat

SEQ ID NO: 181639 - DNA, 120 bp, Artificial Sequence
  ENSG00000111203_9 (sequence is synthesized)
gcttccaagtggatgaaaatatccgtgccttctgtgcaggcctgtacgcctgcaaagagggccgcaacagcccctgcctcgtatatgtcactttcaaccagaagatctatgtgtactggg

SEQ ID NO: 181640 - DNA, 120 bp, Artificial Sequence
  ENSG00000111203_10 (sequence is synthesized)
aggtgcagctggagcggatggagtctaccaatctggtgaaactgctggagaccaagccggagtaccacagcctgctgcaggagctgggcgtggatcctgacgacctccctgtgactcgtg

SEQ ID NO: 181641 - DNA, 120 bp, Artificial Sequence
  ENSG00000111203_11 (sequence is synthesized)
ccctgcttcaccaaacgctctaccatccagaccagccaccacagtgtgctccctcaagcctccaggatcccacctagctgtacttgcctcatagctggtgaaggattcttctgaaccccc

SEQ ID NO: 181642 - DNA, 120 bp, Artificial Sequence
  ENSG00000111203_12 (sequence is synthesized)
accctaccccctaaaggtatctgtggtattggcaggatagggaatatgcattacagaaatgcaggatttgactctgggcatgaaagatggcagcagccctagggtgaccgtgaactatag

SEQ ID NO: 181643 - DNA, 120 bp, Artificial Sequence
  ENSG00000111203_13 (sequence is synthesized)
acctcgcagtcttttcggtgaaagaagagacaagttgaccctctgcccatttccttatggacctcacccatcatgccagcagggtcataggaccctggccttgttccaaatcatctggga

SEQ ID NO: 181644 - DNA, 120 bp, Artificial Sequence
  ENSG00000111203_14 (sequence is synthesized)
catgacccactccccactgtcactgtgttgaaaacagagacttgtttgtgtggccccaacacccataaggaaaccaggctttaggcccaggggagcagtggaggtaagggctccacccca

SEQ ID NO: 181645 - DNA, 120 bp, Artificial Sequence
  ENSG00000111203_15 (sequence is synthesized)
tcttaagctctgtcttccgtggcacaattccaagttcttgacgttagtaattgttaaaggaatggcaaactgttttgttttgaaggatctttctacagtctggtcttacccatgttccta

SEQ ID NO: 181646 - DNA, 120 bp, Artificial Sequence
  ENSG00000111203_16 (sequence is synthesized)
gcaaccctgagatgattttcttccatttaccaaagcagccgggtcagtgctttctcacgttgccgtattcttcaggtattagtcagcttcagaagccctgctcccatttttccacccacc

SEQ ID NO: 181647 - DNA, 120 bp, Artificial Sequence
  ENSG00000111203_17 (sequence is synthesized)
cattcccccataaaacagcttattgtctccaagacaatagacatttaaaatgtgatgcgggtttatgatccagaccacaatcagaattatatcttgggtcatttatgtgccgtctgttct

SEQ ID NO: 181648 - DNA, 120 bp, Artificial Sequence
  ENSG00000111203_18 (sequence is synthesized)
tgattctctatgctctaaatcggtgtttttcaaactgtggttgcagtcctttggtggattatggccagcattttttaaataggtagaatagaataaagtaaaatagaaaatagcagagta

SEQ ID NO: 181649 - DNA, 120 bp, Artificial Sequence
  ENSG00000111203_19 (sequence is synthesized)
cacagagcaaagacggtggccgaggaccagtgggaatttattgcgaatgttcaatagtgactgagtggttaagtggttccagagattacagggccaatgccttagaacacatgagttttt

SEQ ID NO: 181650 - DNA, 120 bp, Artificial Sequence
  ENSG00000111203_20 (sequence is synthesized)
tccagaattacgttatccatgcacacacaccatttgtctgtgtagagcacactgaggagtacttacttaatttaagtattgtattttgaccaaggaaggggggcagagtaatggtggtga

SEQ ID NO: 181651 - DNA, 120 bp, Artificial Sequence
  ENSG00000111203_21 (sequence is synthesized)
cagatggagttgcaccgaggagacatggcttggggcagggaggaaggaggtagaggatcctggttaggtccaggctagggagagaggtgccctttctccctccctccctctcccatcagg

SEQ ID NO: 181652 - DNA, 120 bp, Artificial Sequence
  ENSG00000111203_22 (sequence is synthesized)
gcagagcagaaaggagagcaggtgaagtgagtgcaggcagggttgttaatgaaagtgtgtccctgggaggcctctcaccttgcagttgaccagaagagctggaatctctgtcctgctggt

SEQ ID NO: 181653 - DNA, 120 bp, Artificial Sequence
  ENSG00000111203_23 (sequence is synthesized)
cttcctcctgctctcctggccatgaatcaggtcctgcatccggggaggctccccctgaagccaattcgggtttccctccaccaggcgtctttggatcacactgcgcggctgctggctcca

SEQ ID NO: 181654 - DNA, 120 bp, Artificial Sequence
  ENSG00000111203_24 (sequence is synthesized)
tcacaaaacaatgaaggaggaagtgggacgcagagagaaacgcacatggggagaacgccacgtgaaggctgaggtcgggataatgcatctgcaagccaaggaacacctaagaggaccagc

SEQ ID NO: 181655 - DNA, 120 bp, Artificial Sequence
  ENSG00000111203_25 (sequence is synthesized)
aaaccaccagaagccaggggagaggcgtggaacagaccctgccttacagctgtcagaaggaaccaaccctgccaacaccttcctgttgtactttcagcttccagaactaaaaaagagaaa

SEQ ID NO: 181656 - DNA, 120 bp, Artificial Sequence
  ENSG00000111203_26 (sequence is synthesized)
aaagcagggtaagaagagaaagtggtggagctgagctgggcagagtggctcttttagaagcgatgacatttacacataggtcactatggagagggccatgcagacacctggaggagtgcc

SEQ ID NO: 181657 - DNA, 120 bp, Artificial Sequence
  ENSG00000111203_27 (sequence is synthesized)
acagacacagggaagagtgcaggaaagctgacttggaaacacggggaggtggcagggaggggcaaaaaggactctggcaagcagatccacttgtctgggtccctgcagtgaagaacccaa

SEQ ID NO: 181658 - DNA, 120 bp, Artificial Sequence
  ENSG00000111203_28 (sequence is synthesized)
gatccaggtacctcagcctggaagaaaccgtgcactgcaggtcttcccttctatcaaaactaaaagcaaggaacagaagtcaattgaaaccccaggtcatcctacccaccttctggcagt

SEQ ID NO: 181659 - DNA, 120 bp, Artificial Sequence
  ENSG00000111203_29 (sequence is synthesized)
ctctggataatgatctaaggaaataagcttacatttataattagaggataatttggagaatttatactatttacacggaccaccctgcaaagatcagggaaggctggatttcttcctcct

SEQ ID NO: 181660 - DNA, 120 bp, Artificial Sequence
  ENSG00000111203_30 (sequence is synthesized)
tgatagtctgaactggaagcaaaggagaaaacccttctccaaacaggagtttctcctctttccctggtcctgcagaagaaagaggagctatcccctcctcagctagcagcacctgaaagg

SEQ ID NO: 181661 - DNA, 120 bp, Artificial Sequence
  ENSG00000111203_31 (sequence is synthesized)
gaaacagagataaggtgaaccaacggtcaccagacaggacgcacaaaaatatcacatacgggttctgatcctctttgtgtcgttttgaagtcttaaaatctattaaatatgagaatacga

SEQ ID NO: 181662 - DNA, 120 bp, Artificial Sequence
  ENSG00000111203_32 (sequence is synthesized)
gagaaaataattcacagaaagagctagagtgtcgaggtagaggtagcaattttaaatggagatgttagggaaatcctcactgagaaggtaacatttggtgaaaaaaaaaaaaagtggcaa

SEQ ID NO: 181663 - DNA, 120 bp, Artificial Sequence
  ENSG00000111203_33 (sequence is synthesized)
gcaagggaaccatccagatagggggcttgtaggtggtgggagatacgtgggatgaattgggacactttgagttgcatgtttgagaagtaatatgaaggcagagagcggataggagctgcg

SEQ ID NO: 181664 - DNA, 120 bp, Artificial Sequence
  ENSG00000111203_34 (sequence is synthesized)
gaacagatggaccaaatggacgggcaagatgccgcaaacacaggcaggggcgggggcagactgagggtgaagtgagtagcaccgcagatcgggtgtgaagccgcactggctggaaggtgc

SEQ ID NO: 181665 - DNA, 120 bp, Artificial Sequence
  ENSG00000111203_35 (sequence is synthesized)
acaggagctgctgccgggcagaagaaaagcagggcaggctggctcccaggcctcagggtggggatggcagtgggaatgaagcacctgtaactgggcccttcctgccctaatgttcagggg

SEQ ID NO: 181666 - DNA, 120 bp, Artificial Sequence
  ENSG00000111203_36 (sequence is synthesized)
aaaaggcctaagttaaccagcaggtccaaaggtcccaaggaacaaggtcagagacgccagggaaaagagcctctcctggtgccttaggaatcagacgccaataaaccacagagcccagca

SEQ ID NO: 181667 - DNA, 120 bp, Artificial Sequence
  ENSG00000111203_37 (sequence is synthesized)
agtgtgtgcctgtgcaagtgctccaactgctgctttgggtgaacttcaggccttgcctcttccctatcaccatcgtctccatcaacaccctctttcttttccagcctctcctggtgcctt

SEQ ID NO: 181668 - DNA, 120 bp, Artificial Sequence
  ENSG00000111203_38 (sequence is synthesized)
aggaatcagacgccaataaaccacagagcccagcatgtccaccttcgcttttattgagtagttagtgttctcaagctggctcacacccatgcggtcagctggggcctagggtggctcttt

SEQ ID NO: 181669 - DNA, 120 bp, Artificial Sequence
  ENSG00000111203_39 (sequence is synthesized)
gcaaagctgaggggcaagctaaggaagccaggcaggtcaggggccctttcggccttctcaagcctccacctgagttctcgtcaatgccagtctccctggtatgattggggacattatcag

SEQ ID NO: 181670 - DNA, 120 bp, Artificial Sequence
  ENSG00000111203_40 (sequence is synthesized)
ggccatggctcacctgttcctgccagggaatggtcagtattcacttccctgggcctggaggggggaagggatcccttctgtccagggaccacctagggtgagccccacacaggtgctcac

SEQ ID NO: 181671 - DNA, 120 bp, Artificial Sequence
  ENSG00000111203_41 (sequence is synthesized)
ccatgtgtcctgactccctagctactgggcccagccactgacttgcagccaatttgattcagggagggcagcccccagctagtgctcccatctgtcctcacacacgcgtgcgtgggctgg

SEQ ID NO: 181672 - DNA, 120 bp, Artificial Sequence
  ENSG00000111203_42 (sequence is synthesized)
ggtgtttttgtgtcgtggagtactccttgacactttatggaagttgcctaaggttgtctaatcttaaagtatagtcaaaaatgggggcaataatttgagtaagtctagaaatgtgatagc

SEQ ID NO: 181673 - DNA, 120 bp, Artificial Sequence
  ENSG00000111203_43 (sequence is synthesized)
ctagctctattaaatacagagtttctattttattttaagtgcaggttgtcttaaccgcctcaggtcttcatgttgctgtctgggtaaaccaaacctacagcacagtaacgccgttaataa

SEQ ID NO: 181674 - DNA, 120 bp, Artificial Sequence
  ENSG00000111203_44 (sequence is synthesized)
tatggcgaaagtcttcagtgagcgatggtgattagaaaacctgcccgctcctcctgcttcacagagatcagggagtactggtctcccttagcgtctccctgagcctccctttctctctta

SEQ ID NO: 181675 - DNA, 120 bp, Artificial Sequence
  ENSG00000111203_45 (sequence is synthesized)
cagccaggagagtaggagtcagtggatactagagcatatcccaagggattggggtgagagggagaatccgtattcatgtatgcatttgttatgtgctgagctcccatgataagccaggca

SEQ ID NO: 181676 - DNA, 120 bp, Artificial Sequence
  ENSG00000111203_46 (sequence is synthesized)
tcactcaaggcactggaattgccatagtgaataaatagacaaaaattgctgccctcctgggccttattatgaagaaacagaaaagaaacaatataggctaggtgtgctgcctctcgcctg

SEQ ID NO: 181677 - DNA, 72 bp, Artificial Sequence
  ENSG00000111203_47 (sequence is synthesized)
tgataccaacgctgtagtgagctatgatctcaccactgcactccactccagcgtgggaccctgtctctattt

SEQ ID NO: 181678 - DNA, 120 bp, Artificial Sequence
  ENSG00000111206_0 (sequence is synthesized)
ggttggaggagcccggagcccgccttcggagctacggcctaacggcggcggcgactgcagtctggagggtccacacttgtgattctcaatggagagtgaaaacgcagattcataatgaaa

SEQ ID NO: 181679 - DNA, 120 bp, Artificial Sequence
  ENSG00000111206_1 (sequence is synthesized)
actagcccccgtcggccactgattctcaaaagacggaggctgccccttcctgttcaaaatgccccaagtgaaacatcagaggaggaacctaagagatcccctgcccaacaggagtctaat

SEQ ID NO: 181680 - DNA, 120 bp, Artificial Sequence
  ENSG00000111206_2 (sequence is synthesized)
caagcagaggcctccaaggaagtggcagagtccaactcttgcaagtttccagctgggatcaagattattaaccaccccaccatgcccaacacgcaagtagtggccatccccaacaatgct

SEQ ID NO: 181681 - DNA, 120 bp, Artificial Sequence
  ENSG00000111206_3 (sequence is synthesized)
aatattcacagcatcatcacagcactgactgccaagggaaaagagagtggcagtagtgggcccaacaaattcatcctcatcagctgtgggggagccccaactcagcctccaggactccgg

SEQ ID NO: 181682 - DNA, 120 bp, Artificial Sequence
  ENSG00000111206_4 (sequence is synthesized)
cctcaaacccaaaccagctatgatgccaaaaggacagaagtgaccctggagaccttgggaccaaaacctgcagctagggatgtgaatcttcctagaccacctggagccctttgcgagcag

SEQ ID NO: 181683 - DNA, 120 bp, Artificial Sequence
  ENSG00000111206_5 (sequence is synthesized)
aaacgggagacctgtgcagatggtgaggcagcaggctgcactatcaacaatagcctatccaacatccagtggcttcgaaagatgagttctgatggactgggctcccgcagcatcaagcaa

SEQ ID NO: 181684 - DNA, 120 bp, Artificial Sequence
  ENSG00000111206_6 (sequence is synthesized)
gagatggaggaaaaggagaattgtcacctggagcagcgacaggttaaggttgaggagccttcgagaccatcagcgtcctggcagaactctgtgtctgagcggccaccctactcttacatg

SEQ ID NO: 181685 - DNA, 120 bp, Artificial Sequence
  ENSG00000111206_7 (sequence is synthesized)
gccatgatacaattcgccatcaacagcactgagaggaagcgcatgactttgaaagacatctatacgtggattgaggaccactttccctactttaagcacattgccaagccaggctggaag

SEQ ID NO: 181686 - DNA, 120 bp, Artificial Sequence
  ENSG00000111206_8 (sequence is synthesized)
aactccatccgccacaacctttccctgcacgacatgtttgtccgggagacgtctgccaatggcaaggtctccttctggaccattcaccccagtgccaaccgctacttgacattggaccag

SEQ ID NO: 181687 - DNA, 120 bp, Artificial Sequence
  ENSG00000111206_9 (sequence is synthesized)
gtgtttaagccactggacccagggtctccacaattgcccgagcacttggaatcacagcagaaacgaccgaatccagagctccgccggaacatgaccatcaaaaccgaactccccctgggc

SEQ ID NO: 181688 - DNA, 120 bp, Artificial Sequence
  ENSG00000111206_10 (sequence is synthesized)
gcacggcggaagatgaagccactgctaccacgggtcagctcatacctggtacctatccagttcccggtgaaccagtcactggtgttgcagccctcggtgaaggtgccattgcccctggcg

SEQ ID NO: 181689 - DNA, 120 bp, Artificial Sequence
  ENSG00000111206_11 (sequence is synthesized)
ttgcagccctcggtgaaggtgccattgcccctggcggcttccctcatgagctcagagcttgcccgccatagcaagcgagtccgcattgcccccaaggtttttggggaacaggtggtgttt

SEQ ID NO: 181690 - DNA, 120 bp, Artificial Sequence
  ENSG00000111206_12 (sequence is synthesized)
gattttggtacacccatcaccagcttgtttaattttatctttctttgtttatcagtgctgctagctgaggaggggatagctcctctttcttctgcaggaccagggaaagaggagaaactc

SEQ ID NO: 181691 - DNA, 120 bp, Artificial Sequence
  ENSG00000111206_13 (sequence is synthesized)
ctgtttggagaagggttttctcctttgcttccagttcagactatcaaggaggaagaaatccagcctggggaggaaatgccacacttagcgagacccatcaaagtggagagccctcccttg

SEQ ID NO: 181692 - DNA, 120 bp, Artificial Sequence
  ENSG00000111206_14 (sequence is synthesized)
caacccggtgtgtctcggaaatgcttgtgattcaacacagggagaggagggagaggagccggtctcggagaaaacagcatctactgcctccctgtgtggatgagccggagctgctcttct

SEQ ID NO: 181693 - DNA, 120 bp, Artificial Sequence
  ENSG00000111206_15 (sequence is synthesized)
cagaggggcccagtacttcccgctgggccgcagagctcccgttcccagcagactcctctgaccctgcctcccagctcagctactcccaggaagtgggaggaccttttaagacacccatta

SEQ ID NO: 181694 - DNA, 120 bp, Artificial Sequence
  ENSG00000111206_16 (sequence is synthesized)
aggaaacgctgcccatctcctccaccccgagcaaatctgtcctccccagaacccctgaatcctggaggctcacgcccccagccaaagtagggggactggatttcagcccagtacaaacct

SEQ ID NO: 181695 - DNA, 120 bp, Artificial Sequence
  ENSG00000111206_17 (sequence is synthesized)
cccagggtgcctctgaccccttgcctgaccccctggggctgatggatctcagcaccactcccttgcaaagtgctcccccccttgaatcaccgcaaaggctcctcagttcagaacccttag

SEQ ID NO: 181696 - DNA, 120 bp, Artificial Sequence
  ENSG00000111206_18 (sequence is synthesized)
acctcatctccgtcccctttggcaactcttctccctcagatatagacgtccccaagccaggctccccggagccacaggtttctggccttgcagccaatcgttctctgacagaaggcctgg

SEQ ID NO: 181697 - DNA, 120 bp, Artificial Sequence
  ENSG00000111206_19 (sequence is synthesized)
tcctggacacaatgaatgacagcctcagcaagatcctgctggacatcagctttcctggcctggacgaggacccactgggccctgacaacatcaactggtcccagtttattcctgagctac

SEQ ID NO: 181698 - DNA, 120 bp, Artificial Sequence
  ENSG00000111206_20 (sequence is synthesized)
agtagagccctgcccttgcccctgtgctcaagctgtccaccatcccgggcactccaaggctcagtgcaccccaagcctctgagtgaggacagcaggcagggactgttctgctcctcatag

SEQ ID NO: 181699 - DNA, 120 bp, Artificial Sequence
  ENSG00000111206_21 (sequence is synthesized)
ctccctgctgcctgattatgcaaaagtagcagtcacaccctagccactgctgggaccttgtgttccccaagagtatctgattcctctgctgtccctgccaggagctgaagggtgggaaca

SEQ ID NO: 181700 - DNA, 120 bp, Artificial Sequence
  ENSG00000111206_22 (sequence is synthesized)
acaaaggcaatggtgaaaagagattaggaaccccccagcctgtttccattctctgcccagcagtctcttaccttccctgatctttgcagggtggtccgtgtaaatagtataaattctcca

SEQ ID NO: 181701 - DNA, 120 bp, Artificial Sequence
  ENSG00000111206_23 (sequence is synthesized)
aattatcctctaattataaatgtaagcttatttccttagatcattatccagagactgccagaaggtgggtaggatgacctggggtttcaattgacttctgttccttgcttttagttttga

SEQ ID NO: 181702 - DNA, 120 bp, Artificial Sequence
  ENSG00000111206_24 (sequence is synthesized)
tagaagggaagacctgcagtgcacggtttcttccaggctgaggtacctggatcttgggttcttcactgcagggacccagacaagtggatctgcttgccagagtcctttttgcccctccct

SEQ ID NO: 181703 - DNA, 120 bp, Artificial Sequence
  ENSG00000111206_25 (sequence is synthesized)
gccacctccccgtgtttccaagtcagctttcctgcaagaagaaatcctggttaaaaaagtcttttgtattgggtcaggagttgaatttggggtgggaggatggatgcaactgaagcagag

SEQ ID NO: 181704 - DNA, 120 bp, Artificial Sequence
  ENSG00000111206_26 (sequence is synthesized)
tgtgggtgcccagatgtgcgctattagatgtttctctgataatgtccccaatcataccagggagactggcattgacgagaactcaggtggaggcttgagaaggccgaaagggcccctgac

SEQ ID NO: 181705 - DNA, 120 bp, Artificial Sequence
  ENSG00000111206_27 (sequence is synthesized)
ctgcctggcttccttagcttgcccctcagctttgcaaagagccaccctaggccccagctgaccgcatgggtgtgagccagcttgagaacactaactactcaataaaagcgaaggtggaca

SEQ ID NO: 181706 - DNA, 120 bp, Artificial Sequence
  ENSG00000111206_28 (sequence is synthesized)
tttcaaacagcggaacaaactgaaagctccggtgccagaccccacccccggccccggcccgggaccccctcccctcccgggatcccccggggttcccaccccgcccgcaccgccggggac

SEQ ID NO: 181707 - DNA, 120 bp, Artificial Sequence
  ENSG00000111206_29 (sequence is synthesized)
ccaattaagaatgttggaccttcagcttgcaaagcactctgataagtgttccttgagagcttataaatctagttgggtagaaaaggcataaaaacatagggaagtgtaatagcattagaa

SEQ ID NO: 181708 - DNA, 120 bp, Artificial Sequence
  ENSG00000111206_30 (sequence is synthesized)
cctgatgagcttgtaagaattcagacaaaagtgattgtgatagatgggctaggattattaaggaagatacacaagggaggcaggccttagaaagagatggatttggccgggcgctgtggc

SEQ ID NO: 181709 - DNA, 120 bp, Artificial Sequence
  ENSG00000111206_31 (sequence is synthesized)
agtgcaaaggacactagaatgataaacaaatgtatcttttagattgtgactcaatcttattgaatccaggcaaaatcattaagaagagctccttaactacttcatgtgttactacctaaa

SEQ ID NO: 181710 - DNA, 120 bp, Artificial Sequence
  ENSG00000111206_32 (sequence is synthesized)
gtccatggagggtcttcaatgtagcactcaagcccacttttctgctacactcaacagccgtcctagatgccagcagctagagtggctaagtagttttatgaaaatgtcttgattaaaaaa

SEQ ID NO: 181711 - DNA, 120 bp, Artificial Sequence
  ENSG00000111206_33 (sequence is synthesized)
ctcaagcacacaccaccagagcagctggtggggttttgccatcccctctttaccttattgtgttaacataggtttctttctctccccatctgccacaagcagcagcagaaacgaccgaat

SEQ ID NO: 181712 - DNA, 120 bp, Artificial Sequence
  ENSG00000111206_34 (sequence is synthesized)
ccagagctccgccggaacatgaccatcaaaaccgaactccccctgggcgcacgttagtatgggagagtgggccttgggcctggtccttgttctggggccatatctttagggaaccagact

SEQ ID NO: 181713 - DNA, 120 bp, Artificial Sequence
  ENSG00000111206_35 (sequence is synthesized)
ctgggattctgttcccacctcaaagggatctgagcccagagaaggagagcaaagctcctggggctgagaaggggtgtactccagtccccctgctcctgatctctcgtgtttcctcctagg

SEQ ID NO: 181714 - DNA, 120 bp, Artificial Sequence
  ENSG00000111215_0 (sequence is synthesized)
aacgcagagttgggagcaactccagagcctccttcaagatgctgctggtcctgctctcagtggtccttctggctctgagctcagctcagagcacagataatgatgtgaactatgaagact

SEQ ID NO: 181715 - DNA, 120 bp, Artificial Sequence
  ENSG00000111215_1 (sequence is synthesized)
ttactttcaccataccagatgtagaggactcaagtcagagaccagatcagggaccccagagacctcctcctgaaggactcctacctagaccccctggtgatagtggtaaccaagatgatg

SEQ ID NO: 181716 - DNA, 120 bp, Artificial Sequence
  ENSG00000111215_2 (sequence is synthesized)
cgacgaggacaccgtcaactctctctaccccgatttccttctgtcagcctgcaggaagcatcatcattcttccagagggacagaccagcaagacatccccaggagcaaccactctggtaa

SEQ ID NO: 181717 - DNA, 120 bp, Artificial Sequence
  ENSG00000111215_3 (sequence is synthesized)
tctagaattcagtggcagaaaataaataagaagataacttccttcagaaagccatgacattgaaataatgtggtcataactctttcttcagtataccaataaaatattaatagcatgcaa

SEQ ID NO: 181718 - DNA, 120 bp, Artificial Sequence
  ENSG00000111215_4 (sequence is synthesized)
aggggatgcagaatcaatgaaagagataaacaaacatcagagtactgtcagacatagaggactggataatacatttgtgtctttctacatagtggtatagaaatatcaggtccccaaatt

SEQ ID NO: 181719 - DNA, 120 bp, Artificial Sequence
  ENSG00000111215_5 (sequence is synthesized)
cccatttttcttccaatcacatttaaaatttcaatatgttgcaggcagcatgtgtaagattatatccaaatatttactcctggttgctcctcttgggcaagcttgtgaatatgatcaaaa

SEQ ID NO: 181720 - DNA, 120 bp, Artificial Sequence
  ENSG00000111215_6 (sequence is synthesized)
tatttaaagaaggaagaaggtaaagatctaaaatatgacatgaaaatacccagagaagtgtgcctaaattagcattagggtttgagggatcctaaggatgacaaaaagggactcttctat

SEQ ID NO: 181721 - DNA, 120 bp, Artificial Sequence
  ENSG00000111215_7 (sequence is synthesized)
tgaattcgtggttgatgctcagcgatagtaacaatcctgcctcccctaacatcttcctccccttccagcagcttcacagaacatggttgatgaggtaacttaggggatgcacagggtgtg

SEQ ID NO: 181722 - DNA, 120 bp, Artificial Sequence
  ENSG00000111215_8 (sequence is synthesized)
aacgcagagttgggagcaactccagagcctccttcaagatgctgctggtcctgctctcagtggtccttctggctctgagctcagctcagagcacagataatgaaagacctggctgtgctg

SEQ ID NO: 181723 - DNA, 120 bp, Artificial Sequence
  ENSG00000111218_0 (sequence is synthesized)
gcttcgcccagcggatcggcagaagttgagaggagttggcggctgcctccggccggccggactttgcgagcagcctggagaggatccgcgaccgccgccgccgccgccgcggaggcttcg

SEQ ID NO: 181724 - DNA, 120 bp, Artificial Sequence
  ENSG00000111218_1 (sequence is synthesized)
gggctgcttccctcgagcttagcccgcagcgcgggtggagaggggcggggagggggtcgggggcacgagaagaacttgaaaccgtgtgaaggaatccggagcagatgagaagggaggaaa

SEQ ID NO: 181725 - DNA, 120 bp, Artificial Sequence
  ENSG00000111218_2 (sequence is synthesized)
ataaaagaaagtggagactgcagaacagactccgctgtggctgactgtgccggccgacgctccagctgaggggctgggttggatttttttttttctcccatcctctcgctctctctttta

SEQ ID NO: 181726 - DNA, 120 bp, Artificial Sequence
  ENSG00000111218_3 (sequence is synthesized)
aagcgacaccagctctctctcctcctctactatctcggtatcaccaaacccttgccggctcttatgggcatgaaacactcctcccgctgcctgctcctgaggaggaaaatggcggagaac

SEQ ID NO: 181727 - DNA, 120 bp, Artificial Sequence
  ENSG00000111218_4 (sequence is synthesized)
gcggccgagagcaccgaggtgaacagccccccctcccagcccccccagcccgtcgtccctgctaagcccgtgcaatgcgtccatcatgtgtccactcaacccagctgcccaggacggggc

SEQ ID NO: 181728 - DNA, 120 bp, Artificial Sequence
  ENSG00000111218_5 (sequence is synthesized)
aagatgtccaagctgctgaacccagaggagatgacctcgagagattattacttcgactcctatgcccactttgggatccacgaggaaatgctgaaggatgaggtgcggactctcacttac

SEQ ID NO: 181729 - DNA, 120 bp, Artificial Sequence
  ENSG00000111218_6 (sequence is synthesized)
cggaactccatgtaccacaacaagcacgtgttcaaggacaaagtggtactggatgtggggagtggtactgggatcctttccatgttcgctgccaaggcaggggccaagaaggtgtttggg

SEQ ID NO: 181730 - DNA, 120 bp, Artificial Sequence
  ENSG00000111218_7 (sequence is synthesized)
atcgaatgctccagtatttctgactactcagagaagatcattaaggccaaccacttggacaacatcatcaccatatttaagggtaaagtggaagaggtggagctgcctgtggagaaggtg

SEQ ID NO: 181731 - DNA, 120 bp, Artificial Sequence
  ENSG00000111218_8 (sequence is synthesized)
gacatcatcatcagcgagtggatgggctactgtctgttctatgagtccatgctcaacacggtgatctttgccagggacaagtggctgaaacctggagggcttatgtttccagaccgggca

SEQ ID NO: 181732 - DNA, 120 bp, Artificial Sequence
  ENSG00000111218_9 (sequence is synthesized)
agtggacatcgtggatccaaagcaagtggtgaccaatgcctgtttgataaaggaggtggacatttacacagtgaagacggaagagctatcgttcacatctgcattctgcctgcagataca

SEQ ID NO: 181733 - DNA, 120 bp, Artificial Sequence
  ENSG00000111218_10 (sequence is synthesized)
gcgcaacgactacgtccacgccctggtcacctattttaatattgaatttaccaagtgccacaagaaaatggggttttccacagcccctgatgctccctacacccactggaagcagaccgt

SEQ ID NO: 181734 - DNA, 120 bp, Artificial Sequence
  ENSG00000111218_11 (sequence is synthesized)
cttctacttggaagattacctcactgtccggaggggggaggaaatctacgggaccatatccatgaagccaaatgccaaaaatgtgcgagacctcgatttcacagtagacttggattttaa

SEQ ID NO: 181735 - DNA, 120 bp, Artificial Sequence
  ENSG00000111218_12 (sequence is synthesized)
gggacagctgtgtgaaacatctgtatctaatgactacaaaatgcgttagcacacgtgggaagctgcagagagcaacgagaaaaggaactctcacctcgatctgccgtgccgtcccaaaga

SEQ ID NO: 181736 - DNA, 120 bp, Artificial Sequence
  ENSG00000111218_13 (sequence is synthesized)
ataccgtttgcaggactacacacttgaaaaccagagttttcaactctgccttgaagattggtgaactccccagggctcccgtgggctctgccactggacagaaggcctccagctcctccg

SEQ ID NO: 181737 - DNA, 120 bp, Artificial Sequence
  ENSG00000111218_14 (sequence is synthesized)
ctctgccctggtagcccttcacgaaggctttgtgttgccaacaaagagcgacctggcgtgctgtggctgggccccgagggtggaaacgtattcgcgtctccccgtctcctccttaactgt

SEQ ID NO: 181738 - DNA, 120 bp, Artificial Sequence
  ENSG00000111218_15 (sequence is synthesized)
gactctccgggtcttctgagttttgcatgctgcgggtgtctaggacagattgcttccactagaacctggagacatagcatctttgatagcataagccagattatctgtgtgtgcggtggt

SEQ ID NO: 181739 - DNA, 120 bp, Artificial Sequence
  ENSG00000111218_16 (sequence is synthesized)
gtgcgtgtgcgtgcatgtgtgaatgtgagcagcatagttgatatttacccacaaacacctgtatatgcgtgcatatacaaccaagtgggtagacctaggtgttctctcagaggggtgtgt

SEQ ID NO: 181740 - DNA, 120 bp, Artificial Sequence
  ENSG00000111218_17 (sequence is synthesized)
gtgtgtgtgcgtgcgcgtgtgcctagaatatatattactctcagaggagattctgttgcttttgaataggaatttgttttgtgattagttcgccccttccccaccccttaccagatgtta

SEQ ID NO: 181741 - DNA, 120 bp, Artificial Sequence
  ENSG00000111218_18 (sequence is synthesized)
agcagctatgaaacattctctgtactagttctggtctccttttgactggactgtggctctgaaccttgagcatagtaccacggactccgtgggcgctcaataaacacacatgagaacaaa

SEQ ID NO: 181742 - DNA, 120 bp, Artificial Sequence
  ENSG00000111218_19 (sequence is synthesized)
attctctttcctgtgaacctccagaacaatttgcttgaacttctcttgtagaacaaaccttattccagcatctatcagagacaataagggtcttagaatctagaaaacagggtcctggga

SEQ ID NO: 181743 - DNA, 120 bp, Artificial Sequence
  ENSG00000111218_20 (sequence is synthesized)
gggcacagttcccacacgtctatttcttccacaggacctgcacgctgccttgctgttggagatctgtgcagtaggcagttgtggaattaaaagcaacaccccatgtcgctgaatgttcag

SEQ ID NO: 181744 - DNA, 120 bp, Artificial Sequence
  ENSG00000111218_21 (sequence is synthesized)
ggatcacaggccactgccgtttcccacccactcccagcctccggggagtcttagcctgtggagtcccaggaagcacatggaaaagagagccttggaaccagagtggagtgacagctaagg

SEQ ID NO: 181745 - DNA, 120 bp, Artificial Sequence
  ENSG00000111218_22 (sequence is synthesized)
ggtgctggaggcccctgtgaccttgaccatgcacaatgcccagaccagctccgactttttcctctccttcacatatttaaatggagtcgatattggggtcagcttcatgcacggagcctt

SEQ ID NO: 181746 - DNA, 120 bp, Artificial Sequence
  ENSG00000111218_23 (sequence is synthesized)
cctcacccttcctcaaggcgtggccagaggcgtcagaaactccctcagtgcccctttgcgagtacttctcaagggaatggtccctgcccgaggcctgggggtagtctgaggggcccccaa

SEQ ID NO: 181747 - DNA, 120 bp, Artificial Sequence
  ENSG00000111218_24 (sequence is synthesized)
ataaatggccagcagaaagaagaaaaaaaaatctaatcccttgggtgatctgtgctctgaatgattgaaggtggggcagtccagctgaggagataagacccaaattaacccatataaagg

SEQ ID NO: 181748 - DNA, 120 bp, Artificial Sequence
  ENSG00000111218_25 (sequence is synthesized)
gtgggagaatgtctatggctttgacatgacctgcatccgggacgtggccatgaaggagcctctagtggacatcgtggatccaaagcaagtggtgaccaatgcctgtttgataaagataca

SEQ ID NO: 181749 - DNA, 120 bp, Artificial Sequence
  ENSG00000111218_26 (sequence is synthesized)
ctgcctccacccgcccttctagaagtacaaaatttggtccatctcttttgctggggtcacaccttcgaggagtagaagaaatcaggtgtgactctcaggaaggggagcaggctgcctgtc

SEQ ID NO: 181750 - DNA, 120 bp, Artificial Sequence
  ENSG00000111218_27 (sequence is synthesized)
ccctgtgcatggctcctggatccttacaaccactgacatttgcggaggaactgtggctttcctgagaccattccaatgtcatcatgacctttcagtgcttagccccaaggtcagcttcag

SEQ ID NO: 181751 - DNA, 120 bp, Artificial Sequence
  ENSG00000111218_28 (sequence is synthesized)
aggcagtgcaggtggttactcgggggagctctggtttgaatctctgcatttccattcactaggcatgtgaccttggactattcacttccctgcacctcactttttctccatctataaaat

SEQ ID NO: 181752 - DNA, 120 bp, Artificial Sequence
  ENSG00000111218_29 (sequence is synthesized)
gagcttaatagcagtcccttgcccatagggtgattgtgaggattaaatgagtataatacatatgtaaagtgcttaaaacagtgcccagcatatggcaaatgctcggcgtctattattata

SEQ ID NO: 181753 - DNA, 120 bp, Artificial Sequence
  ENSG00000111218_30 (sequence is synthesized)
gttgagatggggccctagagataatgggaacatctccttcttgttttctttagagggcaagtcggtcaacttaaattctgttgctttggctgtggcagcgtttccaggctagatgtggag

SEQ ID NO: 181754 - DNA, 120 bp, Artificial Sequence
  ENSG00000111218_31 (sequence is synthesized)
gctgaccctctgggaagcctcctacctatcccctggctctcccaaggcagctttgcccagcctgatgacagagggcctgggaaggtccagagctggaaagaaactaaaaagaagagctgc

SEQ ID NO: 181755 - DNA, 120 bp, Artificial Sequence
  ENSG00000111218_32 (sequence is synthesized)
gagatgctggctgatatttgaaaaatgcagtgggcccagggctggagcacaagcattcatcttggtcaaaatgaaaggcaaaccacaatgagattcccagtctgcatgtgagccggccca

SEQ ID NO: 181756 - DNA, 120 bp, Artificial Sequence
  ENSG00000111218_33 (sequence is synthesized)
tttgcagaggcctcagcgacctgagcagcattcagtgggtctttgctcccatgcatttggttgggccatcccatagccagccctggggacccccccccgcccactgactcccaggttgac

SEQ ID NO: 181757 - DNA, 120 bp, Artificial Sequence
  ENSG00000111218_34 (sequence is synthesized)
tagatccccctagatcctcctggccacctgctgcctccagaggtctgctcctaagtcacccagcagggcagcattcctcctccaagcctgacttggaaaacccttgggccatggctgccg

SEQ ID NO: 181758 - DNA, 120 bp, Artificial Sequence
  ENSG00000111218_35 (sequence is synthesized)
agggtcttctggaagcttgggctgccctcaagctgcctcaggtgcagctttgaccaggaaaagctgtgacgttctcagccgaggcacttgctgagggcaggggcccatccggaggcccaa

SEQ ID NO: 181759 - DNA, 120 bp, Artificial Sequence
  ENSG00000111218_36 (sequence is synthesized)
gggcaggtcatgtcatcatcactggtataactgctggttctccaggatggagacctcaggcaagggtcttagtgaggtcacagggcatcagagctggacttgagtcctctggtgaccccc

SEQ ID NO: 181760 - DNA, 120 bp, Artificial Sequence
  ENSG00000111218_37 (sequence is synthesized)
acgtgctttctttcccagcaccgaggccccgtctcagtgccggccttggtgggggacagggctgagcatggtgtccctggcgcctgagtcatccgggggctccagccaaggagctgtcag

SEQ ID NO: 181761 - DNA, 120 bp, Artificial Sequence
  ENSG00000111218_38 (sequence is synthesized)
gaggaggctcccacttggcgccttccagctgcggtgacttggcgcgatctgtctgcctcccgcccttttctctaacagctcttttataaatggctccaccacatttagctgggctccttt

SEQ ID NO: 181762 - DNA, 120 bp, Artificial Sequence
  ENSG00000111218_39 (sequence is synthesized)
ccggatggctcatttcacagtttctcctgttccagacccccttccacccactgctgtcctccagtggggagacgagatggcgggagagagagacagagagagagggagggaggaagacca

SEQ ID NO: 181763 - DNA, 120 bp, Artificial Sequence
  ENSG00000111218_40 (sequence is synthesized)
tcgtcccagagtggagacaggcacagagaaagagacagatgtgacaagagcaatggagaggagacagagacagagaaaggtgcagagaaaagctagagaaatgggagaggggcctggaaa

SEQ ID NO: 181764 - DNA, 85 bp, Artificial Sequence
  ENSG00000111218_41 (sequence is synthesized)
tgcagagaaaagctagagaaatgggagaggggcctggaaaagcagaaagaagacaaagtagaaagcacaaaagaaaagaatcggc

SEQ ID NO: 181765 - DNA, 69 bp, Artificial Sequence
  ENSG00000111218_42 (sequence is synthesized)
cgggcatggtggcgggtgcctgtaattccagctacttggagcagatcgcgccattgcactccagcctgg

SEQ ID NO: 181766 - DNA, 120 bp, Artificial Sequence
  ENSG00000111218_43 (sequence is synthesized)
acaaagtgagattttgtctcaaaaaataagaatcagaaaagtgaagacaggtggtaaagagagaagagggaagaaatggaagaggagaagatggaagaaaggaaaatgaggagggaagga

SEQ ID NO: 181767 - DNA, 120 bp, Artificial Sequence
  ENSG00000111218_44 (sequence is synthesized)
caccgccccgcactctgagtgttgagcaagcttcggctgagtttaccctcacacactcacgtgcattgggggcttcgacttctctcgggaggacactgaggcgcagttaggaagggcagt

SEQ ID NO: 181768 - DNA, 120 bp, Artificial Sequence
  ENSG00000111218_45 (sequence is synthesized)
ggccaggcataaatccaggcctggctccgggtcgcatgctcctcatcactcaacatggtcgcctcttgcagatcagatgatgacatggccagagggggagaagaagaggagggaatcaca

SEQ ID NO: 181769 - DNA, 120 bp, Artificial Sequence
  ENSG00000111218_46 (sequence is synthesized)
ccccacagacagtgcagcctgaaggccagggacctggcagcccaggaaagggctggttctcctgggacctgcaccctggctggagtcggcctccttggatgcagctctaaccaagtgacc

SEQ ID NO: 181770 - DNA, 120 bp, Artificial Sequence
  ENSG00000111218_47 (sequence is synthesized)
tccagaacccctggcagtgtgcctgagacgctaaccctgggctggagcttggcttccaaccattcccatgagggcctgctctcagggaaggtccactcatctctcaaataccttggccct

SEQ ID NO: 181771 - DNA, 120 bp, Artificial Sequence
  ENSG00000111218_48 (sequence is synthesized)
ttgcttaggaggtctggagagcctggaaagacgtctgaattaaaaggaataatttctttcaaagatgaagcggcgagagctaacgtggggggtgggaggggaagagaaagatcttaaacc

SEQ ID NO: 181772 - DNA, 120 bp, Artificial Sequence
  ENSG00000111218_49 (sequence is synthesized)
agccctgaggtcttgacctggctttttccagatggtcccatcctggcacgcggctcgtttaccctggaagggctgggctgcggtggggaggatcatgtcgagggaggctcgcaactctgg

SEQ ID NO: 181773 - DNA, 120 bp, Artificial Sequence
  ENSG00000111218_50 (sequence is synthesized)
cttggatctgccttcccgcgtcccccacggtggggaggacgtactgcctcctgccattctctgctggccaggagcatgaggtctgccagccccttttgagtctccagcacagagatcaat

SEQ ID NO: 181774 - DNA, 120 bp, Artificial Sequence
  ENSG00000111218_51 (sequence is synthesized)
ccctccatcacgggtggtgactagacatcagtcttttcgcaaaggcagcccaatttcgtggaaggccgctggccttgaggtgggggggctgggtttcggttttcagtctgccacaaagtt

SEQ ID NO: 181775 - DNA, 120 bp, Artificial Sequence
  ENSG00000111218_52 (sequence is synthesized)
gtgatgcagccgtgggcaagtcaccacccctgtctgggcctcagcgtctctatccattgaatcggtgtgggtcttgctgtgattttttttgacgccttgctcctttgtcctatgcccttt

SEQ ID NO: 181776 - DNA, 120 bp, Artificial Sequence
  ENSG00000111224_0 (sequence is synthesized)
ggtctgtaaacgctggcttgtgacagggagggggaggaggaaggccttcgtaaaggttgcatctccgtcccttcgctcccggggacccgcgggaaaaaaaaaaatccaacacccaggccc

SEQ ID NO: 181777 - DNA, 120 bp, Artificial Sequence
  ENSG00000111224_1 (sequence is synthesized)
cgcggctagccccttcccacaggctctctccgctcgattttgtcaccgttatgtgggaagcgaatccagagatgtttcacaaagcagaagaattattttctaaaacaacaaacaatgaag

SEQ ID NO: 181778 - DNA, 120 bp, Artificial Sequence
  ENSG00000111224_2 (sequence is synthesized)
tggatgacatggacacgtcagatacccagtggggctggttttacttggcagaatgtgggaagtggcacatgtttcagccggataccaacagtcagtgttcagttagcagtgaagatatcg

SEQ ID NO: 181779 - DNA, 120 bp, Artificial Sequence
  ENSG00000111224_3 (sequence is synthesized)
aaaaaagcttcaaaacaaacccttgtggctccatttcttttactacttccaaattcagctacaagatagactttgcagaaatgaagcaaatgaatctcaccactggaaagcagcgcttaa

SEQ ID NO: 181780 - DNA, 120 bp, Artificial Sequence
  ENSG00000111224_4 (sequence is synthesized)
taaaaagagcccccttttctatcagtgctttcagttacatctgtgaaaacgaggccatccctatgccaccacactgggagaatgtgaatactcaagtaccatatcagcttattcctctgc

SEQ ID NO: 181781 - DNA, 120 bp, Artificial Sequence
  ENSG00000111224_5 (sequence is synthesized)
acaatcaaacacatgaatataatgaagttgctaatctctttgggaagacgatggatcgcaaccgaattaaaagaattcagagaattcaaaacctagatttgtgggagttcttttgcagga

SEQ ID NO: 181782 - DNA, 120 bp, Artificial Sequence
  ENSG00000111224_6 (sequence is synthesized)
aaaaggctcagctcaagaaaaaaagaggtgtgcctcagattaatgaacaaatgctgtttcatggtaccagcagtgaatttgtggaagcaatctgcattcataactttgattggagaataa

SEQ ID NO: 181783 - DNA, 120 bp, Artificial Sequence
  ENSG00000111224_7 (sequence is synthesized)
atggtatacatggtgctgtctttggaaaaggaacctattttgctagagatgctgcttattccagtcgtttctgcaaagatgacataaagcatgggaacacattccaaattcatggtgtca

SEQ ID NO: 181784 - DNA, 120 bp, Artificial Sequence
  ENSG00000111224_8 (sequence is synthesized)
gcttgcaacagcggcatctgtttagaacatataaatctatgtttcttgctcgagtgctaattggagattacataaacggagactccaaatacatgcgacctccttccaaagacgggagct

SEQ ID NO: 181785 - DNA, 120 bp, Artificial Sequence
  ENSG00000111224_9 (sequence is synthesized)
atgtgaatttatatgacagctgtgtggatgatacctggaacccaaagatctttgtggtttttgatgccaaccaaatctatcctgagtacttgatagactttcattgatttcacttccaaa

SEQ ID NO: 181786 - DNA, 120 bp, Artificial Sequence
  ENSG00000111224_10 (sequence is synthesized)
tctcggtggtcaaggaagctttattcttttttgcaggaaggtttgctcttcagtcatctagccactaaatgttaattatctgatacttttgaaacagatatgaaaaaaagtggcctccat

SEQ ID NO: 181787 - DNA, 120 bp, Artificial Sequence
  ENSG00000111224_11 (sequence is synthesized)
ataaaaagacatactgacttcaaggttggtttttgttgttttgtttttgcctgtttcttgtagtcttgtttgttaaaagttgatatcattgatgttttaacacataggggtgaaagatac

SEQ ID NO: 181788 - DNA, 120 bp, Artificial Sequence
  ENSG00000111224_12 (sequence is synthesized)
cattcaaaatggaatcagctgagtctcaactaatgtggtcattgagatctttaaagtttacgtgtgtgttatcaggataaatgattttagtttaaatagacttattcgtataaatgttga

SEQ ID NO: 181789 - DNA, 120 bp, Artificial Sequence
  ENSG00000111224_13 (sequence is synthesized)
aaaaaaatacagacataaatgtgtccctttagaggaattgatcctttgtaaattgaattcaggtagtagtatcatccaccaatccatctgttgctttgttggtcttctgaaggggggatt

SEQ ID NO: 181790 - DNA, 120 bp, Artificial Sequence
  ENSG00000111224_14 (sequence is synthesized)
taaaactctgaaacagtctgagcaccttgagagaaatcagaaacaagacaattatttgcagtgctgtcaaacaagccagaaggagaaaatcaaggtagaatgccccactttccagttgcc

SEQ ID NO: 181791 - DNA, 120 bp, Artificial Sequence
  ENSG00000111224_15 (sequence is synthesized)
ttaggatagcaggctgcagcctcagacttgatcctgtcattctcctctgtctcccacatctgaattgataattgctgcaaaatgtcattagcctacacttcatccatcagggctcttgga

SEQ ID NO: 181792 - DNA, 120 bp, Artificial Sequence
  ENSG00000111224_16 (sequence is synthesized)
ttcttacaccacgacttgctgtgcaaggtgtttattgcatcttcaaagtgaaactttaaattattattcaaacatttattttccttttgttttaaaaagagtccctacaatgatcacttc

SEQ ID NO: 181793 - DNA, 120 bp, Artificial Sequence
  ENSG00000111224_17 (sequence is synthesized)
taagatttttttttaccttcccctctgcagcacacacagctattcaacaatgatttctaaaattcatatttcaaatttgtatctctccattttgaaacattatagaaagcatgggatgct

SEQ ID NO: 181794 - DNA, 120 bp, Artificial Sequence
  ENSG00000111224_18 (sequence is synthesized)
tctggtttctcctttgaagtagctgttgacaacctactctcttgaaaagttagatataattcttaatcatgtttagtggaaatttgtttacctgttccatctgttttgctgtttcattgt

SEQ ID NO: 181795 - DNA, 120 bp, Artificial Sequence
  ENSG00000111224_19 (sequence is synthesized)
aaggaagatgagaagtgttggaacagcttccctcccctaaaggtattctagcagaggcgagacagcaacttggcgggcatgttgcataggagttaagtaccagatggggaattgcccatg

SEQ ID NO: 181796 - DNA, 120 bp, Artificial Sequence
  ENSG00000111224_20 (sequence is synthesized)
tgatggtgaagagtctctcacattgattttcttccttttctcctcttctctcctccttctcttctctcctctttctcttctcttctttctcttctcttctgtcttcctcttcctcttctc

SEQ ID NO: 181797 - DNA, 120 bp, Artificial Sequence
  ENSG00000111224_21 (sequence is synthesized)
tcctcttcctcttctcttcctctcctcttcctctttctctctcttcctttttctcttcctctttctctttctctttctcttctcttctctctctcttccttccttctttctttccttcct

SEQ ID NO: 181798 - DNA, 60 bp, Artificial Sequence
  ENSG00000111224_22 (sequence is synthesized)
gctgtacccggcctgattttctatgattctgcctttaaaagacagcacgtataccaagcc

SEQ ID NO: 181799 - DNA, 120 bp, Artificial Sequence
  ENSG00000111224_23 (sequence is synthesized)
ctatgattctgcctttaaaagacagcacgtataccaagcctttttcagaaagcttttctcttaactccttctaatgctgaattttctctctattatcctcacccaattttggctgagagt

SEQ ID NO: 181800 - DNA, 120 bp, Artificial Sequence
  ENSG00000111224_24 (sequence is synthesized)
tagtgtacacaatttaacttcttagaaaaattccagtgtctatgcttatattgctcacttgaatcatttgaattagaaagggatctacaaataataaaagcaaagagtgcagacagatta

SEQ ID NO: 181801 - DNA, 120 bp, Artificial Sequence
  ENSG00000111224_25 (sequence is synthesized)
gggatagtaattcttaaagtgccatctatcccagatttccgttatagaccagcatatgtgtaattgtgcagtgggaggtaagtagtacccaggacattgcatgtacaatactttgaaaca

SEQ ID NO: 181802 - DNA, 120 bp, Artificial Sequence
  ENSG00000111224_26 (sequence is synthesized)
aagtggcaacaaagatttcctggctcaggtatgcaccccagctgctggtttagatgaagtgctgagaatatttagaaaaagcgctttaaaaagcatctagagattatcatgaaaataatt

SEQ ID NO: 181803 - DNA, 120 bp, Artificial Sequence
  ENSG00000111224_27 (sequence is synthesized)
ggagacaaagtcactaggctgctttgtgagaggcagcataccatggctctaaacccgttcacaaaaaacaatgttagagacattaggaattcaggttttgaaaatctttttttcgattta

SEQ ID NO: 181804 - DNA, 120 bp, Artificial Sequence
  ENSG00000111224_28 (sequence is synthesized)
tttgtaatttacataccaaaaaaccacattaaaatagtcctcccttcaacatggctatcttttttcaagttttatatgcatagctctctcagcacttgaatggaaaaactgttacagcat

SEQ ID NO: 181805 - DNA, 120 bp, Artificial Sequence
  ENSG00000111224_29 (sequence is synthesized)
ttgggagttgtttttcttttagactttgcagatcttatctcaaggtgactaggaacccagagctaagtatctgtgaggcaatctctgcgaacgctgaacttacctagttggtttctatga

SEQ ID NO: 181806 - DNA, 120 bp, Artificial Sequence
  ENSG00000111224_30 (sequence is synthesized)
aatatgtagaatgcactgcagtagccattgtaagaaggtactataccggttttttggggcttgttgttgttgtttggtctgagaatgtactgccaacccctcttttataagagagaactg

SEQ ID NO: 181807 - DNA, 120 bp, Artificial Sequence
  ENSG00000111224_31 (sequence is synthesized)
actgattttgatacatattttaaaatatgatagtacagagttaatggatgttaaaattttatttctttgttttggtaagtagattaaatcgagaatcatataatcagtacatttgagaat

SEQ ID NO: 181808 - DNA, 120 bp, Artificial Sequence
  ENSG00000111224_32 (sequence is synthesized)
taaccagtatataataatactggacacaaccatttgccatcttttcctgttatcatcccatagagtgggtggggagaatgaatagacataaacctagaataatgataaatggtttttaaa

SEQ ID NO: 181809 - DNA, 120 bp, Artificial Sequence
  ENSG00000111224_33 (sequence is synthesized)
actctatattgaatacattccagctgataatgacttttctttttcaccttggtgatatcagcctcagggtaaaaaaaaaagtttcataaatcttttagttataaacaggaaagttttata

SEQ ID NO: 181810 - DNA, 120 bp, Artificial Sequence
  ENSG00000111224_34 (sequence is synthesized)
ttagtgtgtcatttcatttctagactgttgatggtgatgatgataaagaatttggagccaattttgatatatgaatgtattgcttttacatgtgatgattaaagctctccattagcagtt

SEQ ID NO: 181811 - DNA, 120 bp, Artificial Sequence
  ENSG00000111224_35 (sequence is synthesized)
gagaatcagcgtgcaagctcatttcctccactttattcctataagaagaagatcaagcctcaacttgggagccagctgatctgaattttattcctggctttgctgtctgattcagtgtga

SEQ ID NO: 181812 - DNA, 120 bp, Artificial Sequence
  ENSG00000111224_36 (sequence is synthesized)
ccttggataactcaccagagagggaaggttcacttttcagaaggttaagtgcatggaaagaacctctgatggaaatcaaggagtactgacagcacgatgtggaaaataagagagaaaaga

SEQ ID NO: 181813 - DNA, 120 bp, Artificial Sequence
  ENSG00000111224_37 (sequence is synthesized)
gaaattaagatgcatgtccatggatgttttttgttttgatgatagcaaaagagtgatatatttgcataacaatatgaggacactgaggcaactcccctcaccccagggcacatagctagg

SEQ ID NO: 181814 - DNA, 120 bp, Artificial Sequence
  ENSG00000111224_38 (sequence is synthesized)
aagtggcaaagccaatctggctggagtaccctgtactagccactctgctactctgctgcttttaagtctgtattaatggcaagcacgcgcgcacgcgcacacacacaactcctttatcct

SEQ ID NO: 181815 - DNA, 120 bp, Artificial Sequence
  ENSG00000111224_39 (sequence is synthesized)
tgccatcgtctttcaaagataagaatcaaagaccaaagcgtccttagatgttgtatcagagttcaagcaagggacagaaatcaccgcagaaatttggacagggaaaatttaatataaaga

SEQ ID NO: 181816 - DNA, 120 bp, Artificial Sequence
  ENSG00000111224_40 (sequence is synthesized)
attgttgactatgtaaagttctgttaactactgaaaggggaaaaagaactctaagaagcagcaaggcagttaactgcagaaagtggcttctacacctaagactaagggaaaaatgaacaa

SEQ ID NO: 181817 - DNA, 120 bp, Artificial Sequence
  ENSG00000111224_41 (sequence is synthesized)
ggaaggaacttacaaactattggaaaaggtccctgcaaggctggattcagacctctgaggagagttcctggttgttacaggaacatgctgcctgtagtcctggtgccaaggaaacttgct

SEQ ID NO: 181818 - DNA, 120 bp, Artificial Sequence
  ENSG00000111224_42 (sequence is synthesized)
gaagggtacccgctgttaaactgcatagggcagcctgccactgctgtaaaccctgaccgggataaccgcgtgccgatctgcctgccactatatgggaaaacagaaaactagatgaagaag

SEQ ID NO: 181819 - DNA, 120 bp, Artificial Sequence
  ENSG00000111224_43 (sequence is synthesized)
aaaaaggcctctgtcttccagccatgcattgttccttccacactccttattgtcaaagcctaacatggagccagctggcaaaggaaaagtgtggcctgtagagttcagccccagtattac

SEQ ID NO: 181820 - DNA, 120 bp, Artificial Sequence
  ENSG00000111224_44 (sequence is synthesized)
aaagcaggatgaagaaactgggattggagctgaaagacaataaattaataactgatacagatggaaagtacatttttcaacccaaggatagaaagaagccccaaacatcatcacacaaaa

SEQ ID NO: 181821 - DNA, 120 bp, Artificial Sequence
  ENSG00000111224_45 (sequence is synthesized)
ggaagacagattggctgagagaggcatttacattaaaaaaataaaatactgaaggtttacagggacacatctcttggagtagagcagcctacctccaaggtattggataagcaagacaag

SEQ ID NO: 181822 - DNA, 120 bp, Artificial Sequence
  ENSG00000111224_46 (sequence is synthesized)
gtgttataaagcctattgtgtaaatatatacagaagactgagaggttttcaaccgaataaatgaatgcctggtacagcgttaatatagctgagaaattcatcctgtaacaagttgagtca

SEQ ID NO: 181823 - DNA, 120 bp, Artificial Sequence
  ENSG00000111224_47 (sequence is synthesized)
accgttatgtgggaagcgaatccatgtatttgcatgcccgagtctttgagccgtgctataccagtttgtccagattgtttatactagcaatgcagtttacggtgaagacctgccttccct

SEQ ID NO: 181824 - DNA, 120 bp, Artificial Sequence
  ENSG00000111229_0 (sequence is synthesized)
gcccaggctgccagaccggaagcgctccgctgtacctggatcctgctcctctgggttgaaacccgggcgccgccaagatgccggcttaccactcttctctcatggatcctgataccaaac

SEQ ID NO: 181825 - DNA, 120 bp, Artificial Sequence
  ENSG00000111229_1 (sequence is synthesized)
tcatcggaaacatggcactgttgcctatcagaagtcaattcaaaggacctgcccccagagagacaaaagatacagatattgtggatgaagccatctattacttcaaggccaatgtcttct

SEQ ID NO: 181826 - DNA, 120 bp, Artificial Sequence
  ENSG00000111229_2 (sequence is synthesized)
tcaaaaactatgaaattaagaatgaagctgataggaccttgatatatataactctctacatttctgaatgtctgaagaaactgcaaaagtgcaattccaaaagccaaggtgagaaagaaa

SEQ ID NO: 181827 - DNA, 120 bp, Artificial Sequence
  ENSG00000111229_3 (sequence is synthesized)
agcctatttacaacagctaaggcaagagactggactgagactttgtgagaaagttttcgaccctcagaatgataaacccagcaagtggtggacttgctttgtgaagagacagttcatgaa

SEQ ID NO: 181828 - DNA, 120 bp, Artificial Sequence
  ENSG00000111229_4 (sequence is synthesized)
caagagtctttcaggacctggacagtgaagggagcccgggcagccaccgtctccagagccctgggcagcattttccagcaagatgtacacaatcttttgcctttatttcgtaaagtttta

SEQ ID NO: 181829 - DNA, 120 bp, Artificial Sequence
  ENSG00000111229_5 (sequence is synthesized)
tacagaagagagaagagcatgtctttacttgaaaaactcttgatcaagaatttgggtgggagaaaagaaagtgggttatcaagggtgatttgaaattttctgcagcattaaagctggcgc

SEQ ID NO: 181830 - DNA, 120 bp, Artificial Sequence
  ENSG00000111229_6 (sequence is synthesized)
ttaataagaataagtaataataaagaaatttctaacattccatgtcagaaaaactttattgccagtctttgacattcacttacaatttgttttgagataaaattcacattccataatgcc

SEQ ID NO: 181831 - DNA, 120 bp, Artificial Sequence
  ENSG00000111229_7 (sequence is synthesized)
ccccagagagaggcaatgagctgggatgaagacaactgaattgcagagtatgaaagcttcaagattactttgcatttctgctgtgcgagaacgttaacagtcatagacaagaagtataag

SEQ ID NO: 181832 - DNA, 120 bp, Artificial Sequence
  ENSG00000111229_8 (sequence is synthesized)
aagaaaaacaaaaaattgccaaacaaattgtgtcatgagatctgtctttgtcaagacagtatttctggcttttgtccgtctagagctacctacaacagcttgtacaagtatattttaagt

SEQ ID NO: 181833 - DNA, 120 bp, Artificial Sequence
  ENSG00000111229_9 (sequence is synthesized)
tgtacaagtatattttaagtcatagttttcataaaaagaaagatgtgtatctgaacctcaacatgttctaaataattgagtttttttctgaaactataatatgtaaattcaaataaaatt

SEQ ID NO: 181834 - DNA, 120 bp, Artificial Sequence
  ENSG00000111229_10 (sequence is synthesized)
catttggagaatgggagttttgatgtgatagtggctgtcctaccactgcattcagcagataatcagaagacaaagatggaatgcatacattgcacatcattgttatgttttgataactgt

SEQ ID NO: 181835 - DNA, 120 bp, Artificial Sequence
  ENSG00000111229_11 (sequence is synthesized)
tcctcactctgtgacacaagaagattttctccatttgacttcctaccacccctctttttcttgccttgattcatgtacagattgagagtgaaatcataggaagtacattatcttattagt

SEQ ID NO: 181836 - DNA, 120 bp, Artificial Sequence
  ENSG00000111229_12 (sequence is synthesized)
ttggcaacaaggatgacatgcagaaaatcttttgaacaaaaacaaatatagttataaaactatctggactgtcatttctattttgtatcctgttcaaatgtataaaaatgtattaccaca

SEQ ID NO: 181837 - DNA, 120 bp, Artificial Sequence
  ENSG00000111229_13 (sequence is synthesized)
gttctttcaaacaaatctaatgctgttacgtctagaatgccacatgcccatcctttctgtcatcaacctggaaaagaacaacaacaaatattttaacctcttcctcgtctaaatctactt

SEQ ID NO: 181838 - DNA, 120 bp, Artificial Sequence
  ENSG00000111229_14 (sequence is synthesized)
ttttattcaactccacaactgttgacagttgtatgtgttttccctttatggctttgatagttgttatgttttgtatttggctaatgttctctgtgctccttcccttgtgtcctgcttagc

SEQ ID NO: 181839 - DNA, 120 bp, Artificial Sequence
  ENSG00000111229_15 (sequence is synthesized)
ccgccaagatgccggcttaccactcttctctcatggatcctgataccaaactcatcggaaacatggcactgttgcctatcagaagtcaattcaaaggacctgcccccagagagaaatgaa

SEQ ID NO: 181840 - DNA, 120 bp, Artificial Sequence
  ENSG00000111229_16 (sequence is synthesized)
gctgataggaccttgatatatataactctctacatttctgaatgtctgaagaaactgcaaaaggtaattaaacttggatgattgtatatcaggaaaacaaattgctgagaggcatttacc

SEQ ID NO: 181841 - DNA, 120 bp, Artificial Sequence
  ENSG00000111229_17 (sequence is synthesized)
cctctgacttacagcatggacttaagagaaaaatttgaatttagttacctgaacttgtagtataattgactgacacaaagataaaagtagtggtgttttaaggctttgaatatattttct

SEQ ID NO: 181842 - DNA, 120 bp, Artificial Sequence
  ENSG00000111229_18 (sequence is synthesized)
caagacagaaatcttgacagaggaattccttttaagcccttgactcaagggttcttaacctggggtccaaggatagaattcttcttttccctgtaaaatatgtgtgtgtgtgtgtgtgtg

SEQ ID NO: 181843 - DNA, 120 bp, Artificial Sequence
  ENSG00000111229_19 (sequence is synthesized)
caattcaaaggacctgcccccagagagagtaagtctaaacccattattttcaaattttggtacgaaatgcctaacaatcttctgaaatgatcaaatcagaaaaattcttagctcagtctt

SEQ ID NO: 181844 - DNA, 120 bp, Artificial Sequence
  ENSG00000111229_20 (sequence is synthesized)
gtaacattacttacgtctattcccgcttttctgaattttatttcagaaagccgcaatatttttcagacactgtctgagactcttctgatgctttctgagatgttctcccaacagtataat

SEQ ID NO: 181845 - DNA, 120 bp, Artificial Sequence
  ENSG00000111231_0 (sequence is synthesized)
agtgggcgtcgcgcgaaggctaagggagtgtggcgggcggctccgggagccaacatgcctcggtatgcgcagctggtcatgggccccgcgggcagcgggaagagcacctactgtgccacc

SEQ ID NO: 181846 - DNA, 120 bp, Artificial Sequence
  ENSG00000111231_1 (sequence is synthesized)
atggtccagcactgtgaagccctcaaccggtctgtccaagttgtaaacctggatccagcagcagaacacttcaactactccgtgatggctgacatccgggaactgatcgaggtggatgat

SEQ ID NO: 181847 - DNA, 120 bp, Artificial Sequence
  ENSG00000111231_2 (sequence is synthesized)
gtaatggaggatgattctctgcgattcggtcccaacggaggattggtattttgcatggagtactttgccaataattttgactggctggagaactgtcttggccatgtagaggacgactat

SEQ ID NO: 181848 - DNA, 120 bp, Artificial Sequence
  ENSG00000111231_3 (sequence is synthesized)
atcctttttgattgtccaggtcagattgagttgtacactcacctgcctgtgatgaaacagctggtccagcagctcgagcagtgggagttccgagtctgtggagtttttcttgttgattct

SEQ ID NO: 181849 - DNA, 120 bp, Artificial Sequence
  ENSG00000111231_4 (sequence is synthesized)
cagttcatggtggagtcattcaagtttatttctggcatcttggcagccctgagtgccatgatctctctagaaattccgcaagtcaacatcatgacaaaaatggatctgctgagtaaaaaa

SEQ ID NO: 181850 - DNA, 120 bp, Artificial Sequence
  ENSG00000111231_5 (sequence is synthesized)
gcaaaaaaggaaattgagaaatttttagatccagacatgtattctttattagaagattctacaagtgacttaagaagcaaaaaattcaagaaactgactaaagctatatgtggactgatt

SEQ ID NO: 181851 - DNA, 120 bp, Artificial Sequence
  ENSG00000111231_6 (sequence is synthesized)
tcgatttttaccttacgatcagtcagatgaagaaagcatgaacattgtattgcagcatattgattttgccattcaatatggagaagacctagaatttaaagaaccaaaggaacgtgaaga

SEQ ID NO: 181852 - DNA, 120 bp, Artificial Sequence
  ENSG00000111231_7 (sequence is synthesized)
tgagtcttcctctatgtttgacgaatattttcaagaatgccaggatgaatgaagagtttactaaaagtaaccatctaaagagcttgtggccaaaccagcagaacattcttctcttcaaag

SEQ ID NO: 181853 - DNA, 120 bp, Artificial Sequence
  ENSG00000111231_8 (sequence is synthesized)
gatgcaatagtagaaagctacttattttaatgaaaaaaagtaaaacttcgttctttatcagcctcatgcctgaatcaaatttttaattattctgaaactgctgctgtttaaagtggaatc

SEQ ID NO: 181854 - DNA, 120 bp, Artificial Sequence
  ENSG00000111231_9 (sequence is synthesized)
ttttagtattataacagcatcactttagattttgtaagtcaaaattgaaatgaatgcacatagatttatatataaattagcacctgagctaaggttaaggctggtctaaacttattttca

SEQ ID NO: 181855 - DNA, 120 bp, Artificial Sequence
  ENSG00000111231_10 (sequence is synthesized)
ctttttgtattatttttgagatgcaggaattactgtaacaaaatatgtatgtccgaagggaaaaagctgcaaggatatatataagaccactgcttatctgtatcttcccattttcctata

SEQ ID NO: 181856 - DNA, 120 bp, Artificial Sequence
  ENSG00000111231_11 (sequence is synthesized)
ggagctcagtgggcgtcgcgcgaaggctaagggagtgtggcgggcggctccgggagccaacatgcctcggtatgcgcagctggtcatgggccccgcgggcagcgggaaggtgaggatctg

SEQ ID NO: 181857 - DNA, 120 bp, Artificial Sequence
  ENSG00000111231_12 (sequence is synthesized)
acctcgtggccactgcaccaaacgctcctccgaagcttccctcagagaccctccctcaaccgcgaggcagtcctcccctctgccctctgtccacaacaaaactgctccccgcctctcact

SEQ ID NO: 181858 - DNA, 120 bp, Artificial Sequence
  ENSG00000111231_13 (sequence is synthesized)
cacttgagggcaccggggccagcccccgagacgagaggtcggccgcagccctcctccacggggctcacgacccgggggcctcacgacccgggggccccatgctgccacccttaccccggg

SEQ ID NO: 181859 - DNA, 120 bp, Artificial Sequence
  ENSG00000111231_14 (sequence is synthesized)
cagcgggcggctctgcagaagagctacgctccgtccagtcggaccccggaccctggccgggcatctccgcggcgccgagaccgcgagccgtgtgcgggagcagctgtcccagcatccctc

SEQ ID NO: 181860 - DNA, 120 bp, Artificial Sequence
  ENSG00000111231_15 (sequence is synthesized)
ccccgacagcacgctattccagatcctcagcacatttgcaaatcgcgagggtcaccatacaggtcaaacgtctgcacgcaaaccacggaccgaagcacgtggcgcaaggatgcggagctt

SEQ ID NO: 181861 - DNA, 120 bp, Artificial Sequence
  ENSG00000111231_16 (sequence is synthesized)
tatctgttgtccgttattactcaggacgcgtttctcacgggatttggcccgcgggctgccccgtagtaggaggtgtggtagaactggaggcgtagaaagaatgtggattgcgattggttc

SEQ ID NO: 181862 - DNA, 120 bp, Artificial Sequence
  ENSG00000111231_17 (sequence is synthesized)
tattatagtctggatccctggtgttatggtaaatagcatgagcttgtcatttggtcacatctgttcatggtgatatgtgtgacagtatcctttcttggtctttgatgtaagatttaaaag

SEQ ID NO: 181863 - DNA, 60 bp, Artificial Sequence
  ENSG00000111231_18 (sequence is synthesized)
gacagtatcctttcttggtctttgatgtaagatttaaaagtaaatggggccgggcgcgga

SEQ ID NO: 181864 - DNA, 120 bp, Artificial Sequence
  ENSG00000111231_19 (sequence is synthesized)
aggggcaggagcgctgcggtcgctgagcgtttgcacgtttgcacctctctgtggaagcagtgcgtcacaggagggaaatatacatgctccccaaaacaagaggtgccttccacttcagta

SEQ ID NO: 181865 - DNA, 120 bp, Artificial Sequence
  ENSG00000111237_0 (sequence is synthesized)
gaggagcctgaggaagagggcggcgacggtggtggtgactgagcggagcccggtgacaggatgttggtgttggtattaggagatctgcacatcccacaccggtgcaacagtttgccagct

SEQ ID NO: 181866 - DNA, 120 bp, Artificial Sequence
  ENSG00000111237_1 (sequence is synthesized)
aaattcaaaaaactcctggtgccaggaaaaattcagcacattctctgcacaggaaacctttgcaccaaagagagttatgactatctcaagactctggctggtgatgttcatattgtgaga

SEQ ID NO: 181867 - DNA, 120 bp, Artificial Sequence
  ENSG00000111237_2 (sequence is synthesized)
ggagacttcgatgagaatctgaattatccagaacagaaagttgtgactgttggacagttcaaaattggtctgatccatggacatcaagttattccatggggagatatggccagcttagcc

SEQ ID NO: 181868 - DNA, 120 bp, Artificial Sequence
  ENSG00000111237_3 (sequence is synthesized)
ctgttgcagaggcaatttgatgtggacattcttatctcgggacacacacacaaatttgaagcatttgagcatgaaaataaattctacattaatccaggttctgccactggggcatataat

SEQ ID NO: 181869 - DNA, 120 bp, Artificial Sequence
  ENSG00000111237_4 (sequence is synthesized)
gccttggaaacaaacattattccatcatttgtgttgatggatatccaggcttctacagtggtcacctatgtgtatcagctaattggagatgatgtgaaagtagaacgaatcgaatacaaa

SEQ ID NO: 181870 - DNA, 120 bp, Artificial Sequence
  ENSG00000111237_5 (sequence is synthesized)
aaaccttaaagccaggcctgtcttgatgatttttggttttttttcattgtcctgttgaaatcaagtaattaaacatttaagagccacaaaattgtatcacttttataatattttgcagta

SEQ ID NO: 181871 - DNA, 120 bp, Artificial Sequence
  ENSG00000111237_6 (sequence is synthesized)
atgaaaaaatgtccacaacacagtaattggtcacttgttaagaaaaatttatccttgtaagtatcttcaaagttgatatttggaactttattccaaaagtagtgcatgtggagaaagaat

SEQ ID NO: 181872 - DNA, 120 bp, Artificial Sequence
  ENSG00000111237_7 (sequence is synthesized)
ctagactttcttgtatacatttttctcttctccagtaataaacaattacctttcatttatactttgataacctgtatttaatttaaaaaaaaacataaaaatgaggaaccaagtgaaact

SEQ ID NO: 181873 - DNA, 120 bp, Artificial Sequence
  ENSG00000111237_8 (sequence is synthesized)
acggatataaatattaaagtggacgagatgacctttcagagctcttctcttacattgtgtcataatgttggactcagattttatttgctaaataatataccatgccgacattaacagtga

SEQ ID NO: 181874 - DNA, 120 bp, Artificial Sequence
  ENSG00000111237_9 (sequence is synthesized)
gtgattcttcaaactgttgctatttccatttttcaaggtttaataaaagttttaaaaatacaagtttaggggccgggcacagtggctcacaccctaatcccaacactttgggaggctgag

SEQ ID NO: 181875 - DNA, 68 bp, Artificial Sequence
  ENSG00000111237_10 (sequence is synthesized)
gaggctgaggcagtagaatcacttgaatcctcaacaagagcataactccgtctcaaaaaaaaacaaaa

SEQ ID NO: 181876 - DNA, 120 bp, Artificial Sequence
  ENSG00000111237_11 (sequence is synthesized)
gaagagggcggcgacggtggtggtgactgagcggagcccggtgacaggatggctgggcacagattggtgttggtattaggagatctgcacatcccacaccggtgcaacagtttgccagct

SEQ ID NO: 181877 - DNA, 120 bp, Artificial Sequence
  ENSG00000111237_12 (sequence is synthesized)
gcggcgacggtggtggtgactgagcggagcccggtgacaggatgggaaagggaataaaccaccctcctcgctcctgaaataacatctagctgccattgagatgagcaggtgtgctctcag

SEQ ID NO: 181878 - DNA, 120 bp, Artificial Sequence
  ENSG00000111237_13 (sequence is synthesized)
ggtgactgagcggagcccggtgacaggatgaaggaatccccctctaaaatgaagattgttctatatccagttggtgttggtattaggagatctgcacatcccacaccggtgcaacagttt

SEQ ID NO: 181879 - DNA, 120 bp, Artificial Sequence
  ENSG00000111237_14 (sequence is synthesized)
agcctgaggaagagggcggcgacggtggtggtgactgagcggagcccggtgacaggatggctgggcacagaaaggaatccccctctaaaatgaagattgttctatatccagttggggaac

SEQ ID NO: 181880 - DNA, 120 bp, Artificial Sequence
  ENSG00000111237_15 (sequence is synthesized)
gattataattcaaaagcacacatttacctgatgaaactgaaggctgttgtatatctctgtaacgtacacctaatagtttgaattggtgttggtattaggagatctgcacatcccacaccg

SEQ ID NO: 181881 - DNA, 120 bp, Artificial Sequence
  ENSG00000111237_16 (sequence is synthesized)
gaggagcctgaggaagagggcggcgacggtggtggtgactgagcggagcccggtgacaggatggctgggcacagagtaagtttcttcacttagctcctactaacagtggtggttgggtgg

SEQ ID NO: 181882 - DNA, 120 bp, Artificial Sequence
  ENSG00000111237_17 (sequence is synthesized)
ggagcctgaggaagagggcggcgacggtggtggtgactgagcggagcccggtgacaggatgttggggaactataccgaggatatatgagcaatttaatccagaccataaaaatatgacag

SEQ ID NO: 181883 - DNA, 120 bp, Artificial Sequence
  ENSG00000111237_18 (sequence is synthesized)
agtaacaaaaatatcaaattttggctattatgcttgcacatagttgtcagtctagtacagataaattacataattaacttttttgtctattaacaatttccttaaatatttctgggatta

SEQ ID NO: 181884 - DNA, 120 bp, Artificial Sequence
  ENSG00000111237_19 (sequence is synthesized)
agtctttaaaaatgccaaattctatagggcccagtagtatactttacattttgtaatttttaaaattcagtgtatttacaggtctctaaatgaatcactttagaatgcttgatttcactc

SEQ ID NO: 181885 - DNA, 120 bp, Artificial Sequence
  ENSG00000111237_20 (sequence is synthesized)
ttggtaaatagaatgattacctgtattttatatatgcaactgtttacaaccaaaataagattgatttagaacaaagtacattaccataagtatgtctgtttaaattgtcatgatacaatc

SEQ ID NO: 181886 - DNA, 120 bp, Artificial Sequence
  ENSG00000111237_21 (sequence is synthesized)
aatgatgaaacctatcccaaagctgatgacctgaagaaaaatacgtacagattcagcttctgagattaaataaatagtcatgataggaaccctatgaataatttctgggattcgggatct

SEQ ID NO: 181887 - DNA, 120 bp, Artificial Sequence
  ENSG00000111237_22 (sequence is synthesized)
ttactgactggatttcttacccttttaaggtctgttgaaaggaagtaaccgaattcccatgctttgattgggttggctctttattttaatttaataagactgccatttccaggatctttt

SEQ ID NO: 181888 - DNA, 120 bp, Artificial Sequence
  ENSG00000111237_23 (sequence is synthesized)
gctttcttaaaggactctatcatctatgtctatcccgatttgtcaaagtgtggaatttgggcgggaacatgtttcaaagtatgacacgtgttatgtaacactatttccccataactttgt

SEQ ID NO: 181889 - DNA, 120 bp, Artificial Sequence
  ENSG00000111237_24 (sequence is synthesized)
actgctaatagtcttgagtcttggagataatccacagtactttatagaattaggtcatcaatcattataaagtaccatgtcttactaatgttctttctggtacattcagattgaacagct

SEQ ID NO: 181890 - DNA, 120 bp, Artificial Sequence
  ENSG00000111237_25 (sequence is synthesized)
cattcattattagtaccaaacatttcaacctgttgtagacatatacccttttatgagtttggggtggtggttgttgttgttgttcttcttcttcttttaaatatagaaatctattatttt

SEQ ID NO: 181891 - DNA, 120 bp, Artificial Sequence
  ENSG00000111237_26 (sequence is synthesized)
tacctttttctcaaagcaagattcccatactaactatgtacttcaatccatatcagaaggaatccccctctaaaatgaagattgttctatatccaggtacttttatgttgattaccagtg

SEQ ID NO: 181892 - DNA, 120 bp, Artificial Sequence
  ENSG00000111241_0 (sequence is synthesized)
tttagggccattaattctgaccacgtgcctgagaggcaaggtggatggccctgggacagaaactgttcatcactatgtcccggggagcaggacgtctgcagggcacgctgtgggctctcg

SEQ ID NO: 181893 - DNA, 120 bp, Artificial Sequence
  ENSG00000111241_1 (sequence is synthesized)
tcttcctaggcatcctagtgggcatggtggtgccctcgcctgcaggcacccgtgccaacaacacgctgctggactcgaggggctggggcaccctgctgtccaggtctcgcgccgggctag

SEQ ID NO: 181894 - DNA, 120 bp, Artificial Sequence
  ENSG00000111241_2 (sequence is synthesized)
ctggagagattgccggggtgaactgggaaagtggctatttggtggggatcaagcggcagcggaggctctactgcaacgtgggcatcggctttcacctccaggtgctccccgacggccgga

SEQ ID NO: 181895 - DNA, 120 bp, Artificial Sequence
  ENSG00000111241_3 (sequence is synthesized)
ccctacagcctgctggaaatttccactgtggagcgaggcgtggtgagtctctttggagtgagaagtgccctcttcgttgccatgaacagtaaaggaagattgtacgcaacgcccagcttc

SEQ ID NO: 181896 - DNA, 120 bp, Artificial Sequence
  ENSG00000111241_4 (sequence is synthesized)
caagaagaatgcaagttcagagaaaccctcctgcccaacaattacaatgcctacgagtcagacttgtaccaagggacctacattgccctgagcaaatacggacgggtaaagcggggcagc

SEQ ID NO: 181897 - DNA, 120 bp, Artificial Sequence
  ENSG00000111241_5 (sequence is synthesized)
aaggtgtccccgatcatgactgtcactcatttccttcccaggatctaaggacccacaaaagaaggctcacagatttaaagcatcatctgttcgattgaaattttgcaccagcgaagaatt

SEQ ID NO: 181898 - DNA, 120 bp, Artificial Sequence
  ENSG00000111241_6 (sequence is synthesized)
attcacccatcaagatatactgagttcctcaaccctgccccggactaggctaggtttctgggatacacatgtgaacaaggtagatgcagtccccatgctctcattaacttgcattacaaa

SEQ ID NO: 181899 - DNA, 120 bp, Artificial Sequence
  ENSG00000111241_7 (sequence is synthesized)
aaagaaagaagatgactggagagtttacgtcaggaggaccccacagcctcccgagtttcctccctcccttcacactgccccttcctgagcttcccgtcatcagccctgtcatctccgtgc

SEQ ID NO: 181900 - DNA, 120 bp, Artificial Sequence
  ENSG00000111241_8 (sequence is synthesized)
cacgttcctgctgtggccatccccactctctcgcccctttcatgccatctctgggggtgatcccaatgtgccttcagtcgagcaactctgggttccaaataaatctatgttctcttggaa

SEQ ID NO: 181901 - DNA, 120 bp, Artificial Sequence
  ENSG00000111245_0 (sequence is synthesized)
gttcctgggctgcagagagctgggcggagtgtggaattcttctcgggaggcagtgctgggtcctttccaccatggcacctaagaaagcaaagaagagagccgggggcgccaactccaacg

SEQ ID NO: 181902 - DNA, 120 bp, Artificial Sequence
  ENSG00000111245_1 (sequence is synthesized)
tgttctccatgttcgaacagacccaaatccaggaatttaaggaggccttcactatcatggaccagaacagggatggcttcattgacaagaacgatctgagagacacctttgctgcccttg

SEQ ID NO: 181903 - DNA, 120 bp, Artificial Sequence
  ENSG00000111245_2 (sequence is synthesized)
ggcgagtgaacgtgaaaaatgaagaaattgatgaaatgatcaaggaggctccgggtccaattaactttactgtgttcctcacaatgtttggggagaaacttaagggagcggaccctgagg

SEQ ID NO: 181904 - DNA, 120 bp, Artificial Sequence
  ENSG00000111245_3 (sequence is synthesized)
gaggttgaccagatgttcgccgccttcccccctgacgtgactggcaacttggactacaagaacctggtgcacatcatcacccacggagaagagaaggactaggagggggctcgctgctgc

SEQ ID NO: 181905 - DNA, 120 bp, Artificial Sequence
  ENSG00000111245_4 (sequence is synthesized)
gccctgggctcgtctttgcagagtggtccctgccctcatctctctcccccgagtaccgcctctgtccctaccttgtctgttagccatgtggctgccccatttatccacctccatcttctt

SEQ ID NO: 181906 - DNA, 120 bp, Artificial Sequence
  ENSG00000111245_5 (sequence is synthesized)
tgcagcctgggtggctatgggtacttcgtggccgcacatcctacagttggaaatccatccagaggccatgttccaataaacaggaggtcgtgtatttggtcacgacatttctctgacaaa

SEQ ID NO: 181907 - DNA, 120 bp, Artificial Sequence
  ENSG00000111245_6 (sequence is synthesized)
ctgattagtgagtggggtctgtgggggaggaagggggttccctgcttgccccctgtcccccctacacacacacaactgacaccaacacctgctttcctttctctgcagcgttcgggaaat

SEQ ID NO: 181908 - DNA, 120 bp, Artificial Sequence
  ENSG00000111245_7 (sequence is synthesized)
gagccacccttacttcagaagaacggcatggggtgggggggccttaggtggtgcccgcctcacctatgactgccaaaagcggtcatggggttatttttaaacatggggaggaagtattta

SEQ ID NO: 181909 - DNA, 120 bp, Artificial Sequence
  ENSG00000111245_8 (sequence is synthesized)
aatcccacccacgagggagaaccttctttttgttccatattcccagcagggacctttcattagatgcctctatcctccaaacaatcccaaattcggcctgaacggatgtgtgaattttta

SEQ ID NO: 181910 - DNA, 120 bp, Artificial Sequence
  ENSG00000111245_9 (sequence is synthesized)
aaagaaactatttttaatattttcactgattatcaaagtaaaacatattccatgttgaaaaatgttggaaaatttttcagaaaagcacagaaaaggaaataaaaactacctacaattcta

SEQ ID NO: 181911 - DNA, 120 bp, Artificial Sequence
  ENSG00000111247_0 (sequence is synthesized)
gaagccaacaagaatttgagaactgtaaataccaagccttgaaagggaccatggtgcggcctgtgagacataagaaaccagtcaattactcacagtttgaccactctgacagtgatgatg

SEQ ID NO: 181912 - DNA, 120 bp, Artificial Sequence
  ENSG00000111247_1 (sequence is synthesized)
attttgtttctgcaactgtacctttaaacaagaaatccagaacagcaccaaaggagttaaaacaagataaaccaaaacctaacttgaacaatctccggaaagaagaaatcccagtacaag

SEQ ID NO: 181913 - DNA, 120 bp, Artificial Sequence
  ENSG00000111247_2 (sequence is synthesized)
agaaaacccctaaaaaaaggatggctttagatgacaagctctaccagagagacttagaagttgcactagctttatcagtgaaggaacttccaacagtcaccactaatgtgcagaactctc

SEQ ID NO: 181914 - DNA, 120 bp, Artificial Sequence
  ENSG00000111247_3 (sequence is synthesized)
aagataaaagcattgaaaaacatggcagtagtaaaatagaaacaatgaataagtctcctcatatctctaattgcagtgtagccagtgattatttagatttggataagattactgtggaag

SEQ ID NO: 181915 - DNA, 120 bp, Artificial Sequence
  ENSG00000111247_4 (sequence is synthesized)
atgatgttggtggtgttcaagggaaaagaaaagcagcatctaaagctgcagcacagcagaggaagattcttctggaaggcagtgatggtgatagtgctaatgacactgaaccagactttg

SEQ ID NO: 181916 - DNA, 120 bp, Artificial Sequence
  ENSG00000111247_5 (sequence is synthesized)
cacctggtgaagattctgaggatgattctgatttttgtgagagtgaggataatgacgaagacttctctatgagaaaaagtaaagttaaagaaattaaaaagaaagaagtgaaggtaaaat

SEQ ID NO: 181917 - DNA, 120 bp, Artificial Sequence
  ENSG00000111247_6 (sequence is synthesized)
ccccagtagaaaagaaagagaagaaatctaaatccaaatgtaatgctttggtgacttcggtggactctgctccagctgccgtcaaatcagaatctcagtccttgccaaaaaaggtttctc

SEQ ID NO: 181918 - DNA, 120 bp, Artificial Sequence
  ENSG00000111247_7 (sequence is synthesized)
tgtcttcagataccactaggaaaccattagaaatacgcagtccttcagctgaaagcaagaaacctaaatgggtcccaccagcggcatctggaggtagcagaagtagcagcagcccactgg

SEQ ID NO: 181919 - DNA, 120 bp, Artificial Sequence
  ENSG00000111247_8 (sequence is synthesized)
gcatccaaatgccactagcacctgagtgtggtacaggaggaatgtttggttgggagaatcacagctttacaagggtgtttatatttgatttgtgtttatatttgaggcaggtattgtaat

SEQ ID NO: 181920 - DNA, 120 bp, Artificial Sequence
  ENSG00000111247_9 (sequence is synthesized)
ataaaggaatccattaccatgtcctataaatgacctctagccattttatgattatgttctctgtaaaactcttcaagacttcaatgagaagtttgtttataagaattatcttctcatacc

SEQ ID NO: 181921 - DNA, 120 bp, Artificial Sequence
  ENSG00000111247_10 (sequence is synthesized)
tttccttgtgaagagcgtattctgtttttctatcagttcgacatgaagtccacatcacatgctgttcttttctagttacatgatgtgcctttctagctttgtctagtttatagcacctta

SEQ ID NO: 181922 - DNA, 120 bp, Artificial Sequence
  ENSG00000111247_11 (sequence is synthesized)
actttaactgttcagttttatctggcagaggaaaacattcttatttctttcagaagacatttctgaaatcttataagctacttaagctacgttgtcagttttatcgcaaagatgttttgt

SEQ ID NO: 181923 - DNA, 120 bp, Artificial Sequence
  ENSG00000111247_12 (sequence is synthesized)
attttagccaaatctttttatagtacaaacttagaattattttacacactaaaatggttgcagttttatggcatatgtctccgatttagatggttattctctagaaaatagtatttaaag

SEQ ID NO: 181924 - DNA, 120 bp, Artificial Sequence
  ENSG00000111247_13 (sequence is synthesized)
acattttatgaaatcttcattgtcaaaacctttaataaaagtggaaatattttgaaatgccctttttcttgataccactcatccacgtgttcctgattgtccacatttcatgataaaatg

SEQ ID NO: 181925 - DNA, 120 bp, Artificial Sequence
  ENSG00000111247_14 (sequence is synthesized)
agagctccgcagagaatgttagcctttctgttgtaaatgtaatcttcaagtagtcactttttgttaagttctttagaaagtagttgtcaagtacttagtcatccctattatgatatgaga

SEQ ID NO: 181926 - DNA, 120 bp, Artificial Sequence
  ENSG00000111247_15 (sequence is synthesized)
tagtacagcttttcaggaagcttagatctgaatttactttgaaaaacaattgtaatgaatattttatatttacattgagaatttcaactagcttctgatcaatttttaataaaaaatttt

SEQ ID NO: 181927 - DNA, 120 bp, Artificial Sequence
  ENSG00000111247_16 (sequence is synthesized)
caaatcatgttagctgttaaaaaatgtataataactcagtttttcttggtttatggaaatatctatattaatgtgaaaataattaatttagaattgtgattaaagtgagcatttgtctat

SEQ ID NO: 181928 - DNA, 120 bp, Artificial Sequence
  ENSG00000111247_17 (sequence is synthesized)
ccccagtagaaaagaaagagaagaaatctaaatccaaatgtaatgctttggataccactaggaaaccattagaaatacgcagtccttcagctgaaagcaagaaacctaaatgggtcccac

SEQ ID NO: 181929 - DNA, 120 bp, Artificial Sequence
  ENSG00000111247_18 (sequence is synthesized)
gggtaagcttggtccaaaacacttaattttataaaggaaatgtatgtggtttgtttgccgtatttttcttatttttgcctttgttctctttaacattttcctaacgtccatttcttgtta

SEQ ID NO: 181930 - DNA, 120 bp, Artificial Sequence
  ENSG00000111247_19 (sequence is synthesized)
gtgaagcggcatctggaggtagcagaagtagcagcagcccactggtggtagtgtctgtgaagtctcccaatcagagtctccgccttggcttgtccagattagcacgagttaaacctttgc

SEQ ID NO: 181931 - DNA, 120 bp, Artificial Sequence
  ENSG00000111247_20 (sequence is synthesized)
aagcaagaaacctaaatgggtcccaccaggtatggcatatttatcatcaaggacaggagcttggaaaattatcactgcggcatctggaggtagcagaagtagcagcagcccactggtggt

SEQ ID NO: 181932 - DNA, 120 bp, Artificial Sequence
  ENSG00000111247_21 (sequence is synthesized)
agaaaacccctaaaaaaaggtgagagccatagaaagaaatgacaactgataactgatatatactgcaatatggatgaaccttggaaacatcattctgagtgaaagaagccagatatacag

SEQ ID NO: 181933 - DNA, 120 bp, Artificial Sequence
  ENSG00000111249_0 (sequence is synthesized)
gatagcccccaagatggccgccaatgtgggatcgatgtttcaatattggaagcgatttgatctacggcgactccagaaggagcttaattccgtcgcttctgagctgtctgcacggcagga

SEQ ID NO: 181934 - DNA, 120 bp, Artificial Sequence
  ENSG00000111249_1 (sequence is synthesized)
ggagagtgaacattctcataaacatttaattgaactccgccgggaatttaagaaaaatgtacctgaggaaatcagagagatggtggctcctgtattaaaaagcttccaagccgaggtggt

SEQ ID NO: 181935 - DNA, 120 bp, Artificial Sequence
  ENSG00000111249_2 (sequence is synthesized)
ggcccttagtaagagaagtcaggaggcggaggctgcttttctgagtgtttacaagcaattaattgaagcaccagaccccgtgcctgtgtttgaggcggcacgcagcctagacgacagact

SEQ ID NO: 181936 - DNA, 120 bp, Artificial Sequence
  ENSG00000111249_3 (sequence is synthesized)
gcagccccccagctttgaccccagtgggcagccccggcgagacctccacacttcgtggaagaggaaccccgagctcctcagccccaaagagcagagagaggggacgtcgcctgccgggcc

SEQ ID NO: 181937 - DNA, 120 bp, Artificial Sequence
  ENSG00000111249_4 (sequence is synthesized)
cacgctgaccgagggaagccgcctcccaggcattcccgggaaagccctcctgacagaaaccttgctgcagagaaatgaggcggaaaaacaaaagggccttcaagaagtacagatcacttt

SEQ ID NO: 181938 - DNA, 120 bp, Artificial Sequence
  ENSG00000111249_5 (sequence is synthesized)
ggcggccagactgggggaggcagaggagaaaatcaaagtcctacattcagcgctaaaggctacgcaggcagagctgctagagctgcggcggaagtacgacgaggaggcagcatccaaggc

SEQ ID NO: 181939 - DNA, 120 bp, Artificial Sequence
  ENSG00000111249_6 (sequence is synthesized)
agatgaagtcggcctgatcatgaccaacctggagaaagctaatcagcgagctgaggctgcccagcgggaggtggaaagtctccgggaacagctggcctctgtcaacagctccatccgcct

SEQ ID NO: 181940 - DNA, 120 bp, Artificial Sequence
  ENSG00000111249_7 (sequence is synthesized)
ggcttgctgctctccccaggggcccagtggggataaggtgaacttcactctgtgctcgggccctcggctggaggccgcgctggcctccaaggacagggagatcctgcggctgctgaagga

SEQ ID NO: 181941 - DNA, 120 bp, Artificial Sequence
  ENSG00000111249_8 (sequence is synthesized)
cgtgcagcacctccagagctcactgcaggagctggaggaggcatccgccaaccagatcgccgacctggagcggcagctcacggccaagtccgaggccatagaaaagctggaagagaagct

SEQ ID NO: 181942 - DNA, 120 bp, Artificial Sequence
  ENSG00000111249_9 (sequence is synthesized)
ccaggcccagtctgactatgaggaaattaaaacggagctgagcatcctgaaagccatgaagctggcctccagcacctgcagcctcccccagggcatggccaagcctgaagactcactgct

SEQ ID NO: 181943 - DNA, 120 bp, Artificial Sequence
  ENSG00000111249_10 (sequence is synthesized)
tattgcaaaggaggccttcttccccacgcagaaattccttctggagaagcccagcctcctggccagccctgaggaagacccatcagaggacgattccatcaaggattcactgggcacgga

SEQ ID NO: 181944 - DNA, 120 bp, Artificial Sequence
  ENSG00000111249_11 (sequence is synthesized)
gcagtcctacccctcccctcagcagctcccacctccaccagggccagaagaccccctgtctcccagccccgggcagcccctgctgggccccagcttggggcctgacggcactcggacttt

SEQ ID NO: 181945 - DNA, 120 bp, Artificial Sequence
  ENSG00000111249_12 (sequence is synthesized)
ctcgctgtcccccttccccagcctggcatcaggggagagactgatgatgcccccagccgccttcaagggagaggcgggcggcctgctggtgttccccccagccttctatggcgccaagcc

SEQ ID NO: 181946 - DNA, 120 bp, Artificial Sequence
  ENSG00000111249_13 (sequence is synthesized)
cccctgccaccccggcccctggccctgagccactgggcggtcctgagcccgcggatggtggtgggggcggagcggcggggcccggggcagaggaggagcagctggacacggcagagatcg

SEQ ID NO: 181947 - DNA, 120 bp, Artificial Sequence
  ENSG00000111249_14 (sequence is synthesized)
agagatcgccttccaggtgaaggagcagctgctgaaacacaacatcgggcagcgggtgtttgggcattacgtgctggggctgtcgcagggctcggtcagcgagatcctagcccggcccaa

SEQ ID NO: 181948 - DNA, 120 bp, Artificial Sequence
  ENSG00000111249_15 (sequence is synthesized)
gccctggcgcaagctcacggtgaagggcaaggagcccttcatcaagatgaagcagttcctgtcggatgagcagaatgtactggcgctcaggaccatccaagtgcggcagcgaggcagcat

SEQ ID NO: 181949 - DNA, 120 bp, Artificial Sequence
  ENSG00000111249_16 (sequence is synthesized)
caccccgagaatccgcacgcctgagacaggctcagacgacgccatcaagagcattctagagcaggccaagaaggagatcgagtcgcagaagggcggcgagcccaagacctcggtggcccc

SEQ ID NO: 181950 - DNA, 120 bp, Artificial Sequence
  ENSG00000111249_17 (sequence is synthesized)
gctgagcatcgccaacggcacgacccccgccagcacctcggaggacgccatcaagagcatcctggagcaggcacgccgtgagatgcaggcgcaacagcaggcgctgctggagatggaggt

SEQ ID NO: 181951 - DNA, 120 bp, Artificial Sequence
  ENSG00000111249_18 (sequence is synthesized)
ggagatggaggtggcgcccaggggccgctcggtgcccccctcgcccccggagcggccatcactggccaccgcgagccagaacggggccccggccttggtgaagcaggaggagggcagcgg

SEQ ID NO: 181952 - DNA, 120 bp, Artificial Sequence
  ENSG00000111249_19 (sequence is synthesized)
ggcgccgctcccggtcctgtcccccgccgccttcgtgcagagcatcatccgcaaggtcaagtccgagatcggcgacgccggctacttcgaccaccactgggcctccgaccgcggcctgct

SEQ ID NO: 181953 - DNA, 120 bp, Artificial Sequence
  ENSG00000111249_20 (sequence is synthesized)
cagccgcccctacgcctccgtgtcgccctcgctgtcctcctcctcctcctctggctactctggccagcccaacggccgcgcctggccccgcggggacgaggcccctgtgccccccgagga

SEQ ID NO: 181954 - DNA, 120 bp, Artificial Sequence
  ENSG00000111249_21 (sequence is synthesized)
gcggcggcaggggcggaggacgaaccccccaggacgggcgagctcaaggctgagggcgcgacggccgaggcgggcgcgcggctgccctactacccggcctacgtgccgcgcaccctgaag

SEQ ID NO: 181955 - DNA, 120 bp, Artificial Sequence
  ENSG00000111249_22 (sequence is synthesized)
gaagcccaccgtgccgccgctgacccccgagcagtacgagctgtacatgtaccgtgaggtagacacgctggagctcacccgccaggtcaaggagaagctggccaagaacggcatctgcca

SEQ ID NO: 181956 - DNA, 120 bp, Artificial Sequence
  ENSG00000111249_23 (sequence is synthesized)
gaggatcttcggggagaaggtgctgggcctgtcacagggcagcgtgagcgacatgctgtcccggccgaagccatggagcaagctgacgcagaaggggcgggagcccttcatccgcatgca

SEQ ID NO: 181957 - DNA, 120 bp, Artificial Sequence
  ENSG00000111249_24 (sequence is synthesized)
gctgtggctctctgaccagctcggccaggcagtgggccagcagcctggtgcctcccaggccagtcccacagaaccaaggtcctcaccatccccaccccccagccccacagagcctgagaa

SEQ ID NO: 181958 - DNA, 120 bp, Artificial Sequence
  ENSG00000111249_25 (sequence is synthesized)
gagctcccaggagccgttgagcctgtccctggagagcagcaaggagaaccagcagccagagggccgctccagctcctcgttgagcgggaagatgtactcaggcagccaggccccaggggg

SEQ ID NO: 181959 - DNA, 120 bp, Artificial Sequence
  ENSG00000111249_26 (sequence is synthesized)
catccaggagatcgtggccatgtcccccgagctggacacgtactccatcaccaagagggtgaaggaggtcctcacagacaacaatctagggcagcggctgtttggggaaagcatcctggg

SEQ ID NO: 181960 - DNA, 120 bp, Artificial Sequence
  ENSG00000111249_27 (sequence is synthesized)
aatgacccccataacgtggagaagctgagggatatgaagaagctggagaagaaagcctacctgaaacgtcgctatggcctcatcagcaccggctcagacagtgagtccccggccacccgc

SEQ ID NO: 181961 - DNA, 120 bp, Artificial Sequence
  ENSG00000111249_28 (sequence is synthesized)
tcagagtgccccagcccctgcctgcagccccaggacctgagcctcctgcagatcaagaagccccgggtggtgctggcacccgaggagaaggaggcactgcggaaggcctatcagctggaa

SEQ ID NO: 181962 - DNA, 120 bp, Artificial Sequence
  ENSG00000111249_29 (sequence is synthesized)
ccctacccctcgcagcagaccatcgagctcctctccttccagctcaacctcaagaccaacaccgtcatcaactggttccacaactacaggtcccggatgcgccgggagatgttggtggag

SEQ ID NO: 181963 - DNA, 120 bp, Artificial Sequence
  ENSG00000111249_30 (sequence is synthesized)
gggacccaggatgagccagaccttgatccaagcgggggtcctggaatcctaccgccaggccactcccacccagaccccaccccgcagagccctgactctgagactgaggaccagaagcca

SEQ ID NO: 181964 - DNA, 120 bp, Artificial Sequence
  ENSG00000111249_31 (sequence is synthesized)
accgtgaaggaactggagcttcaggagggccctgaggagaacagcacacccctgaccacccaggacaaggcccaagtgaggatcaagcaggaacagatggaggaggatgctgaggaagag

SEQ ID NO: 181965 - DNA, 120 bp, Artificial Sequence
  ENSG00000111249_32 (sequence is synthesized)
gcaggcagccagccccaggactcaggggagctggacaaaggccaaggtccccccaaagaggagcatcccgaccctccgggtaatgatggactcccaaaagtggctcccgggcccctcctt

SEQ ID NO: 181966 - DNA, 120 bp, Artificial Sequence
  ENSG00000111249_33 (sequence is synthesized)
ccaggtggatccaccccagactgtccctcacttcatccccaacaggagagtgaggccggggagcgacttcacccggaccctttaagttttaagtcagcctcagagtcctcacgctgcagc

SEQ ID NO: 181967 - DNA, 120 bp, Artificial Sequence
  ENSG00000111249_34 (sequence is synthesized)
ctggaggtgtcactgaactcgccctcggccgcctcctcaccaggcctcatgatgtctgtgtcacctgtcccctcctcctcagctcccatctccccatccccacctggcgccccccctgcc

SEQ ID NO: 181968 - DNA, 120 bp, Artificial Sequence
  ENSG00000111249_35 (sequence is synthesized)
aaagtgccgagtgccagccccactgctgacatggctggagccttgcaccccagtgccaaggtgaaccccaacttgcagcggcggcatgagaagatggccaatctgaacaacatcatttac

SEQ ID NO: 181969 - DNA, 120 bp, Artificial Sequence
  ENSG00000111249_36 (sequence is synthesized)
cgagtagagcgggctgccaatcgggaggaggccctggagtgggagttctgaaggcagggtgagggggcaagggacataccctggtaactaccttccttctcgcacttactctcctcaaca

SEQ ID NO: 181970 - DNA, 120 bp, Artificial Sequence
  ENSG00000111249_37 (sequence is synthesized)
ggatggggtaagggagggaggaactcaaccatcaaaatgtggacagcaatgttatgccgtttacgttttttgttgtaatcctagttctatgaagctgtgtgagcaggtgggtcaaatgcc

SEQ ID NO: 181971 - DNA, 120 bp, Artificial Sequence
  ENSG00000111249_38 (sequence is synthesized)
attgcctccacttttctgcacccccctgctcctcttcaccctgacccctctgcaggaggcagaagcaaaatggcaccacatattcacctgaaaactccaaactcttttagaaaaataaat

SEQ ID NO: 181972 - DNA, 120 bp, Artificial Sequence
  ENSG00000111249_39 (sequence is synthesized)
aaatatttatagacctcttttagatattttaataaaggatcctttggaatttatcccagctgatgctgttttgatattacagagagttataaaatcaggatgctgtcacaactgttgcga

SEQ ID NO: 181973 - DNA, 120 bp, Artificial Sequence
  ENSG00000111249_40 (sequence is synthesized)
agtatacactgaagttgtgtcgtttttgccactagatgagattaaaagaagacaattattcaaagccatcacaaaacactataagactgaccaaaatttagataacctttgaaccacgat

SEQ ID NO: 181974 - DNA, 120 bp, Artificial Sequence
  ENSG00000111249_41 (sequence is synthesized)
ttttttccacatctgtctgtgagacacagcgcaatgctactgcccttccagaaactgtgctaaaaagagaaagtccaaaagactctaaacaaaaacctcgacgccgttgaggatgtgttt

SEQ ID NO: 181975 - DNA, 120 bp, Artificial Sequence
  ENSG00000111249_42 (sequence is synthesized)
cattctggtggtctgttttgcaagcttgataacagaatgtccgtgccattgtaaatgttgtagagatgtgggccgtggcccaaccgtcctatatgagatgtagcatggtacagaacaaac

SEQ ID NO: 181976 - DNA, 120 bp, Artificial Sequence
  ENSG00000111249_43 (sequence is synthesized)
tgcttacacaggtctcactagttagaaacctgtgggccatggaggtcagacatccatcttgtccatctataggcaagaagtgtttccagatcctttggaaaggtgggcatggggcaggtg

SEQ ID NO: 181977 - DNA, 120 bp, Artificial Sequence
  ENSG00000111249_44 (sequence is synthesized)
cttggagagtggcgtttgagccagagcgaccccatttcccgtgtgaaccataggcacaacccaggaagtttccccacttgtaggagtgtgggtattccagagcaagactgtggccaccat

SEQ ID NO: 181978 - DNA, 120 bp, Artificial Sequence
  ENSG00000111249_45 (sequence is synthesized)
cttcccctcttggtgttttccgaaagtgacagtgttggtcatcccatgaccactgaagcttagtaaccagcgccaaaaagtagattcatcaaactagagaccccagctccccttctcgcc

SEQ ID NO: 181979 - DNA, 120 bp, Artificial Sequence
  ENSG00000111249_46 (sequence is synthesized)
atcttctttctcaagttgaccgtggtgctgtttctggaaggcatctgcaactccaagtccatgcagaactctggaaggccaagttcatcgcagcatgttcaccatatcccagcctccaaa

SEQ ID NO: 181980 - DNA, 120 bp, Artificial Sequence
  ENSG00000111249_47 (sequence is synthesized)
tctatcctcctaccttccaacgcatgacctgttggggagcagagacttaacccccaactcagaggaacccttcctccagcgtctttggcatggtttctagggtgagagttcccaatttgg

SEQ ID NO: 181981 - DNA, 120 bp, Artificial Sequence
  ENSG00000111249_48 (sequence is synthesized)
atagaacggccaccatattggttactgaatctctctcccttgtttttattacgtttcctttttcaaactgtccatgggaaggctgaattgagtgactccccagaatgaagatgagaaggt

SEQ ID NO: 181982 - DNA, 120 bp, Artificial Sequence
  ENSG00000111249_49 (sequence is synthesized)
gaatataatcaatgccaatgtaatgccagcgggtgagatggccgatggaggtttcaaagatgtagctagcattttgaaaccatatgggcaaaacccggcaaccagaaggggacagataag

SEQ ID NO: 181983 - DNA, 120 bp, Artificial Sequence
  ENSG00000111249_50 (sequence is synthesized)
gaccgttccagaaatcccaactctcacacccagcccaggctgcagtctccacaccaaacagtcaacaaaacacaaaccctgaaggaaaaccttttccatacacccaggctatgcattgaa

SEQ ID NO: 181984 - DNA, 120 bp, Artificial Sequence
  ENSG00000111249_51 (sequence is synthesized)
gagttttccactgtatacatttttatccagatgaaggtatttttatattttgacaataggaaacagtgaccattttcagagtaatcaaatctggaacaaatgaaacatcttttagccacc

SEQ ID NO: 181985 - DNA, 120 bp, Artificial Sequence
  ENSG00000111249_52 (sequence is synthesized)
accaccctgttgcaattaagacaaccgtgggggaacacaccactttttactgttgaaaccaacacaacgttgaaatccaggcttatacgcagactccgattcctagagaactaaatttgg

SEQ ID NO: 181986 - DNA, 120 bp, Artificial Sequence
  ENSG00000111249_53 (sequence is synthesized)
ctttagtgtgacgggatttgattaagcacttagtatagtcttttgaacacggaaatcctgttgtacttaaagctagcggacccgtgaacaactttgtcaggttcacgtcctataacggtt

SEQ ID NO: 181987 - DNA, 120 bp, Artificial Sequence
  ENSG00000111249_54 (sequence is synthesized)
aaaaaacacacacacacatacacaaaccgtttctatgagagattgatgaactttgtttaaaattttaaaaaaaggaacacgttctgtaaacgagtcgctaaatacagaattgtataataa

SEQ ID NO: 181988 - DNA, 120 bp, Artificial Sequence
  ENSG00000111249_55 (sequence is synthesized)
attaattgaagcaccaggcaaattatttgtcgaaatactcctccccgccacccgaagccacacaagtcctgattcaacatttttgttttgagtgactgctgccaacacagatctttggca

SEQ ID NO: 181989 - DNA, 120 bp, Artificial Sequence
  ENSG00000111249_56 (sequence is synthesized)
taaatcttttggatattgttcacacagatgtggcgtgaagtgagaaaaaaaaagcagtaaaacgtgttaaaagcataattaatgtcattgttgtgggtgatgatgtgatttaaacctctc

SEQ ID NO: 181990 - DNA, 120 bp, Artificial Sequence
  ENSG00000111249_57 (sequence is synthesized)
tgacttctgtattggtgatggctgattcctttatcgcactcgtagagtcactaggtacggacccaagcttcagaaggctaacttgttaactgagtgattagttaaaaggaaaaaaaaaaa

SEQ ID NO: 181991 - DNA, 120 bp, Artificial Sequence
  ENSG00000111249_58 (sequence is synthesized)
cccggaaagccaggttgggtcactgctgggaggtatgaggtgagactcgggtttgcaggcagggcaagttgtggggaggtgggggtggccccctatttgttgggggcagacctgccattt

SEQ ID NO: 181992 - DNA, 120 bp, Artificial Sequence
  ENSG00000111249_59 (sequence is synthesized)
gaaagccaccatcctcatgtgtagccctcacatgggagaacaggattggacctgcagggatcctggctgggagcagaacctgcgtcagctcagagtcctgtgggaagggaacggctttat

SEQ ID NO: 181993 - DNA, 120 bp, Artificial Sequence
  ENSG00000111249_60 (sequence is synthesized)
cgcagcctttcgcttttatttttgcacattcgctttttatttgccggtggtgctgctgacgggccctcggagcggggctgtgtctggacacttctgggagccttggacggctctggagag

SEQ ID NO: 181994 - DNA, 120 bp, Artificial Sequence
  ENSG00000111252_0 (sequence is synthesized)
tgcccgcccggactgtcgcggcccgcggtggcgacggcggccgctgcaaagtttccccggcggcggcggcccgggggcgcatcctcccgcaactgtcaagcgctggcggcggaaatgatg

SEQ ID NO: 181995 - DNA, 120 bp, Artificial Sequence
  ENSG00000111252_1 (sequence is synthesized)
caagcgctggcggcggaaatgatgaggcgctggccattttccgagcccgggtttcctgcctgagccccgctcgagcgagccgcgagcgaggagccggcgggcgggagaggacgcgcccag

SEQ ID NO: 181996 - DNA, 120 bp, Artificial Sequence
  ENSG00000111252_2 (sequence is synthesized)
cccgccccctcgggatttcgagggcccgggggcgcgcgacgccatgggccggccgggcccagagctcctgtctctcagcccggccgcaccacctgggtctccgccatgaacgggcctgcc

SEQ ID NO: 181997 - DNA, 120 bp, Artificial Sequence
  ENSG00000111252_3 (sequence is synthesized)
aacgggcctgccctgcagccctcctcgccctcttccgcgccctcagcctccccggcggcggccccgcggggctggagcgagttctgtgagttgcacgccgtagcggcggcccgggagctg

SEQ ID NO: 181998 - DNA, 120 bp, Artificial Sequence
  ENSG00000111252_4 (sequence is synthesized)
gcccgccagtactggctgttcgcccgggagcatccgcagcacgcgccgctgcgcgccgagctggtgtcgctgcagttcaccgacctcttccagcgctacttctgccgcgaggtgcgcgac

SEQ ID NO: 181999 - DNA, 120 bp, Artificial Sequence
  ENSG00000111252_5 (sequence is synthesized)
ctcttccagcgctacttctgccgcgaggtgcgcgacggacgggcgccgggccgcgactaccgggacacaggccgtgggcccccagccaaggccgaggcgtccccggagccaggccccggc

SEQ ID NO: 182000 - DNA, 120 bp, Artificial Sequence
  ENSG00000111252_6 (sequence is synthesized)
ctctgaggagctggccccgccgcggccgcccgggccctgctccttccagcactttcgccgcagcctccgccacatcttccgccgccgctcggccggggagctgccagcggcccacaccgc

SEQ ID NO: 182001 - DNA, 120 bp, Artificial Sequence
  ENSG00000111252_7 (sequence is synthesized)
gcccccgggacccccggagaggctgctgagacccccgcccggcctggcctggccaagaagttcctgccctggagcctggcccgggagccgccacccgaggcgctgaaggaggcggtgctg

SEQ ID NO: 182002 - DNA, 120 bp, Artificial Sequence
  ENSG00000111252_8 (sequence is synthesized)
cgctacagcctggccgacgaggcctccatggacagcggggcacgctggcagcgcgggaggctggcgctgcgccgggccccgggccccgatggccccgaccgcgtgctggagctcttcgac

SEQ ID NO: 182003 - DNA, 120 bp, Artificial Sequence
  ENSG00000111252_9 (sequence is synthesized)
ccacccaagagttcaaggcccaagctacaagcagcttgctccagcatccaggaggtccggtggtgcacacggcttgagatgcctgacaacctttacacctttgtgctgaaggtgaaggac

SEQ ID NO: 182004 - DNA, 120 bp, Artificial Sequence
  ENSG00000111252_10 (sequence is synthesized)
cggacagacatcatctttgaggtgggagacgagcagcagctgaattcatggatggctgagctctcggagtgcacaggccgagggctggagagcacagaagcagagatgcatattccctca

SEQ ID NO: 182005 - DNA, 120 bp, Artificial Sequence
  ENSG00000111252_11 (sequence is synthesized)
gccctagagcctagcacgtccagctccccaaggggcagcacagattcccttaaccaaggtgcttctcctggggggctgctggacccggcctgccagaagacggaccatttcctgtcctgc

SEQ ID NO: 182006 - DNA, 120 bp, Artificial Sequence
  ENSG00000111252_12 (sequence is synthesized)
tacccctggttccacggccccatctccagagtgaaagcagctcagctggttcagctgcagggccctgatgctcatggagtgttcctggtgcggcagagcgagacgcggcgtggggaatac

SEQ ID NO: 182007 - DNA, 120 bp, Artificial Sequence
  ENSG00000111252_13 (sequence is synthesized)
gtgctcactttcaactttcaggggatagccaagcacctgcgcctgtcgctgacagagcggggccagtgccgtgtgcagcacctccactttccctcggtcgtggacatgctccaccacttc

SEQ ID NO: 182008 - DNA, 120 bp, Artificial Sequence
  ENSG00000111252_14 (sequence is synthesized)
cagcgctcgcccatcccactcgagtgcggcgccgcctgtgatgtccggctctccagctacgtggtagtcgtctcccaaccaccaggttcctgcaacacggtcctcttccctttctccctt

SEQ ID NO: 182009 - DNA, 120 bp, Artificial Sequence
  ENSG00000111252_15 (sequence is synthesized)
cctcactgggattcagagtcccttcctcactggggttcagagttgggccttccccaccttagttcttctggctgtccccgggggctcagcccagagggtctcccagggcgatcctcaccc

SEQ ID NO: 182010 - DNA, 120 bp, Artificial Sequence
  ENSG00000111252_16 (sequence is synthesized)
cccgagcagatcttccacctggtgccttcgcccgaagaactggccaacagcctgcagcacctggagcatgagcctgtgaatcgagcccgggactcggactacgaaatggactcatcctcc

SEQ ID NO: 182011 - DNA, 120 bp, Artificial Sequence
  ENSG00000111252_17 (sequence is synthesized)
cggagccacctgcgggccatagacaatcagtacacacctctctgaccagtgaggaattccaggcctcaacagctgcccttgaggagcacaggcagaagtgtgaacttgtgaatgtaattg

SEQ ID NO: 182012 - DNA, 120 bp, Artificial Sequence
  ENSG00000111252_18 (sequence is synthesized)
atctttccttccttccagagaaagatttaagggacactgttaactgctcgtgccagtttggaagtgacccttctattaggcctgttgaagggccctcctgtaggtttcatctatccacct

SEQ ID NO: 182013 - DNA, 120 bp, Artificial Sequence
  ENSG00000111252_19 (sequence is synthesized)
ggctttctccttattgtttacagatgtagttcttgttagaggatgccgctagctcctgcccggggtccctatgcccagtccccgttactcttagagaaaggagttggggtgagggccaga

SEQ ID NO: 182014 - DNA, 120 bp, Artificial Sequence
  ENSG00000111252_20 (sequence is synthesized)
gctggcagtggaaacttgttctctttttcactgacactgtcacagcggatgacagactttctacggggaggagggggggatcatcaggaagcccagaacactaacaagcggttctcccat

SEQ ID NO: 182015 - DNA, 120 bp, Artificial Sequence
  ENSG00000111252_21 (sequence is synthesized)
ctaccgtcagtccacatggcaggtctgctgtgtccacaccacagatgaccacatctaatcctgcttctactctcagctttaggacaaaagctctgtcagaggcacaagctgaaggtcaaa

SEQ ID NO: 182016 - DNA, 120 bp, Artificial Sequence
  ENSG00000111252_22 (sequence is synthesized)
ttaaaacattttacctcagactaatttctttaaaggattcaggttcaaaacttaaccactgcttatttcagtgcactgtttcaactaacacccatgctatttttgtagtcagaaacagct

SEQ ID NO: 182017 - DNA, 120 bp, Artificial Sequence
  ENSG00000111252_23 (sequence is synthesized)
atgcaaaccctacctaatttacagtctgagccagcatgctggcttgtctactgcatcctcgggacagtcacctgccactgagtggccactgtccttcctaaatgtcaagaagtgaagtat

SEQ ID NO: 182018 - DNA, 120 bp, Artificial Sequence
  ENSG00000111252_24 (sequence is synthesized)
gtcaccctttcagggaaattcaggcaattactgaaataggagggtggcaagaacagttctatcctggtgccttacgaataaaaaactggattctggtttacagcagctttacagtgatag

SEQ ID NO: 182019 - DNA, 120 bp, Artificial Sequence
  ENSG00000111252_25 (sequence is synthesized)
ttaaattaactggggctaggggaagagcaagcaaaaagggaagaaggactcctaggccctttctagtaaatccttcagcaacaaggctggcttggtgccctccaagcatctaatggctta

SEQ ID NO: 182020 - DNA, 120 bp, Artificial Sequence
  ENSG00000111252_26 (sequence is synthesized)
ttaaattatcccacaagtgggttttaggctccttttttgagccaaaatggaagctgggaatctggtgccataactaatgagaaactcctttaatagcccacaatcagtgttctgttctag

SEQ ID NO: 182021 - DNA, 120 bp, Artificial Sequence
  ENSG00000111252_27 (sequence is synthesized)
ctggctactgcttcactggattgagaatctatctatctccttgcacacatgggcacacacaatctccaccatccagggaggtcctgaagtcaaatctctatctatacaagtgatacaatt

SEQ ID NO: 182022 - DNA, 120 bp, Artificial Sequence
  ENSG00000111252_28 (sequence is synthesized)
catagggggctggctcctcccagaacctgtctggaggctcagaaacgggggcagtgacagtggagtcagctgctcttgggtgccagcagagccattcagtacaacccccaggctcacagc

SEQ ID NO: 182023 - DNA, 120 bp, Artificial Sequence
  ENSG00000111252_29 (sequence is synthesized)
agtggcttctaggaaactgggagtttagatcagctttacagatacatcgatcagaggctaaaatgaaacctcagcctaaaactcataggactgactgcctgggaggagggttaggtctgc

SEQ ID NO: 182024 - DNA, 120 bp, Artificial Sequence
  ENSG00000111252_30 (sequence is synthesized)
ttcttccacttatacttagtctctgtgctccaagaggtcaaatttttgcttctagaatttccttggggtctttcagagggtgggggaacaaacccctatgcacttttctttttttttttt

SEQ ID NO: 182025 - DNA, 80 bp, Artificial Sequence
  ENSG00000111252_31 (sequence is synthesized)
tggttcaagcgattctgcctcgacctctcaagtagctgggattacaagcaccagccaccatgcctggctaattttgtatt

SEQ ID NO: 182026 - DNA, 120 bp, Artificial Sequence
  ENSG00000111252_32 (sequence is synthesized)
tacaggcgcgagccaccgcgcccagcctacaccacttttagtaccaacactcttgggtgatttcatggaccctaaagcagacctgacactgatccagatttgcagtccatttttaaggac

SEQ ID NO: 182027 - DNA, 120 bp, Artificial Sequence
  ENSG00000111252_33 (sequence is synthesized)
atttttaaggacacctgtctttatttcctcaaagtcaagcagctttctctggaaaatgaatgctaattagtgtgaaccaaaagagtaagtaagagtctgaagtttttttaaaggagaaag

SEQ ID NO: 182028 - DNA, 120 bp, Artificial Sequence
  ENSG00000111252_34 (sequence is synthesized)
cttattatggaaagtcactggtcctcccctccgcacaggaaaggtacccagtagataatgaaccaaattaagttccctccctccagccagaagttaaacatctgggatatgacgtcttca

SEQ ID NO: 182029 - DNA, 120 bp, Artificial Sequence
  ENSG00000111252_35 (sequence is synthesized)
tgccaggggcactcatttcttagcagcctctctacatacatctctcaggtggtgccaagaggcacaccaggtagagcaaacttagcagctctgactaacaggctgcaaagtgcaagttca

SEQ ID NO: 182030 - DNA, 120 bp, Artificial Sequence
  ENSG00000111252_36 (sequence is synthesized)
gattctgtggcagagatttggaaggcacccacctccagactgcttcccgtccaagttaccaggacagctcaaaaacatgctgacagaaaactcccatggctctaggaagaagtgacacta

SEQ ID NO: 182031 - DNA, 120 bp, Artificial Sequence
  ENSG00000111252_37 (sequence is synthesized)
agccaacacctttctttatgtgggagcagaatcagctgatgaaggggtgggcagcagtgtggggcaggcaccccactggctgcagctagcccaccataggcacagcacatcccaccactc

SEQ ID NO: 182032 - DNA, 120 bp, Artificial Sequence
  ENSG00000111252_38 (sequence is synthesized)
tccttccagtcctgaccaggccccagccggcaacttctaccgagagccatggctcaacaccaaactggacagtagacatcatgatccctccagttagctctaattacagaccccaccagt

SEQ ID NO: 182033 - DNA, 120 bp, Artificial Sequence
  ENSG00000111252_39 (sequence is synthesized)
acagcttgacagctcccggcaccatcccttccttcatctgacttattgaacttttacaaactaacagtcaccagcaccaaagaattaagtcaactaacctgccttgaattttagaccagc

SEQ ID NO: 182034 - DNA, 120 bp, Artificial Sequence
  ENSG00000111252_40 (sequence is synthesized)
aatccatatggctttatctggtataaatcttctgcctttgatcatttctggaccgtaggaaaaaggaatagcaatcattaaaatcttgggccagagaacactatttttacataacagttt

SEQ ID NO: 182035 - DNA, 120 bp, Artificial Sequence
  ENSG00000111252_41 (sequence is synthesized)
cttaacctaaagtcaaggccttggactcttccctgagggttgcctgagattccttcatgctttctattcaggactaagtcccttactgcaaatgtgttagctctaacatctcccacaagc

SEQ ID NO: 182036 - DNA, 120 bp, Artificial Sequence
  ENSG00000111252_42 (sequence is synthesized)
tagaggaacttgcgagtatattaacaaggacacatctgacatcctgtgtttggttagaatatacagcacattgtgataacataaagtggattcatcttgtatcattataggcagaaggta

SEQ ID NO: 182037 - DNA, 120 bp, Artificial Sequence
  ENSG00000111252_43 (sequence is synthesized)
tttggcaaatttttatgtattgttttatgtactgtacaagtaacttattcttgaataatgcaaattttgctataatgtacaaattgctatatgtgaattaaaaagttttcagaatcttga

SEQ ID NO: 182038 - DNA, 120 bp, Artificial Sequence
  ENSG00000111252_44 (sequence is synthesized)
atagtaatgagagtccgtgccgggtggagctcagaaggacatgggattcccggtgctgtgccgtggctggaggaggacctggcctggctgtgccagttggctgggagcccctccacccca

SEQ ID NO: 182039 - DNA, 120 bp, Artificial Sequence
  ENSG00000111254_0 (sequence is synthesized)
gcctgtctgcgcaagcgctaaccaagaaacgacggtttcgggtagattgttggttaagaagaaagctgggaaagtgaaggagagggggaagaaaggaagtgaaaagactttggctgttgg

SEQ ID NO: 182040 - DNA, 120 bp, Artificial Sequence
  ENSG00000111254_1 (sequence is synthesized)
aatctcagatctggaataggctgtataggctatttataatctctaattgccgaggaacctgaagttcagagttaaccagtgactgactcaggacatgcaaaatggcaagacccgaggtag

SEQ ID NO: 182041 - DNA, 120 bp, Artificial Sequence
  ENSG00000111254_2 (sequence is synthesized)
aagagctcacctttcctgactctcagtttcctgttccctgaaaatgtaagctaagctggcagccctgtcccagcaagggggaggtacatggaaggccacaggaagaaacaagatcttgag

SEQ ID NO: 182042 - DNA, 120 bp, Artificial Sequence
  ENSG00000111254_3 (sequence is synthesized)
ctgagcaagaacatcccagcatcttcattgactttaaaagtatattctggagtcttccgtggttcactattccagtactacagagattccttatattacatggcaggaggggggtaaact

SEQ ID NO: 182043 - DNA, 120 bp, Artificial Sequence
  ENSG00000111254_4 (sequence is synthesized)
gagggatagtgaagacaacaataaattaatcaagagctttcctcatatctcagaacctatcctctgtaagaatgtcagaaaaggttgactggttacaaagccaaaatggagtatgcaaag

SEQ ID NO: 182044 - DNA, 120 bp, Artificial Sequence
  ENSG00000111254_5 (sequence is synthesized)
ttgatgtctattctcctggagacaaccaagcccaggactggaaaatggacacctccacggatcctgtcagagtgctcagctggctccgcagagacctggagaagagtacagcagagttcc

SEQ ID NO: 182045 - DNA, 120 bp, Artificial Sequence
  ENSG00000111254_6 (sequence is synthesized)
aagatgttcggttcaaacccggagaatcatttggtggggaaacgtccaactcaggagacccacacaaaggtttctctgtagactattacaacaccaccaccaagggcactccagaaagat

SEQ ID NO: 182046 - DNA, 120 bp, Artificial Sequence
  ENSG00000111254_7 (sequence is synthesized)
tgcattttgagatgactcacaaagagattccttgccagggccccagggcccaacttggcaacgggagttcagtagatgaagtttccttctatgctaaccgcctcacgaatctagtcatag

SEQ ID NO: 182047 - DNA, 120 bp, Artificial Sequence
  ENSG00000111254_8 (sequence is synthesized)
ccatggcccgcaaagagatcaatgagaagatcgatggctctgaaaacaaatgtgtctatcagtcattgtacatggggaatgaacccacacccaccaaaagcctcagtaagatagcatcag

SEQ ID NO: 182048 - DNA, 120 bp, Artificial Sequence
  ENSG00000111254_9 (sequence is synthesized)
agcttgtgaatgagaccgtctctgcatgttccaggaatgctgccccagacaaggctcctggctctggagacagagtctcgggatcatcacaaagtcccccaaatttgaaatacaagtcca

SEQ ID NO: 182049 - DNA, 120 bp, Artificial Sequence
  ENSG00000111254_10 (sequence is synthesized)
ctttgaagatcaaggagagcaccaaagaaagacagggtccagatgacaagcctccttctaagaagtctttcttctataaggaagtgtttgaatctcgtaatggagattatgccagagagg

SEQ ID NO: 182050 - DNA, 120 bp, Artificial Sequence
  ENSG00000111254_11 (sequence is synthesized)
gtggaaggttctttcctcgggagagaaagaggtttcgagggcaggaaaggcctgatgactttacggcttctgttagtgaagggatcatgacctatgctaacagtgtggtatctgatatga

SEQ ID NO: 182051 - DNA, 120 bp, Artificial Sequence
  ENSG00000111254_12 (sequence is synthesized)
tggtctccatcatgaagacactgaagatccaagtgaaagacacaaccattgccaccatcctactgaagaaggttctgctcaagcatgcaaaagaggtggtctcggatctcatcgactcct

SEQ ID NO: 182052 - DNA, 120 bp, Artificial Sequence
  ENSG00000111254_13 (sequence is synthesized)
aaaggccacagatatcatggatgccatgctaaggaagctgtacaatgtaatgtttgccaagaaagtccctgagcatgtcaggaaagcccaagacaaggctgagagttattccctcatctc

SEQ ID NO: 182053 - DNA, 120 bp, Artificial Sequence
  ENSG00000111254_14 (sequence is synthesized)
catgaaaggaatgggtgatcctaaaaaccgaaatgtgaactttgccatgaaatctgaaactaaattgagagaaaaaatgtattctgaacccaaatcagaggaggagacttgtgcgaaaac

SEQ ID NO: 182054 - DNA, 120 bp, Artificial Sequence
  ENSG00000111254_15 (sequence is synthesized)
tctgggtgagcacattatcaaagaggggcttaccttgtggcataaaactcagcagaaagaatgtaaatctctaggtttccagcatgcagcatttgaagctcccaacacacagcgtaagcc

SEQ ID NO: 182055 - DNA, 120 bp, Artificial Sequence
  ENSG00000111254_16 (sequence is synthesized)
tgcatcagacatttcctttgagtaccctgaagatattggcaacctcagccttcctccatatcctccagagaaacctgagaattttatgtatgattcagactcctgggccgaggacctgat

SEQ ID NO: 182056 - DNA, 120 bp, Artificial Sequence
  ENSG00000111254_17 (sequence is synthesized)
cgtgtctgccctgcttctgattcaatatcacctggcccagggaggaagaagggatgcacggagcttcgttgaagctgctggcaccaccaactttcctgccaatgaacctcctgtagctcc

SEQ ID NO: 182057 - DNA, 120 bp, Artificial Sequence
  ENSG00000111254_18 (sequence is synthesized)
cgatgaatcttgccttaagtctgctcccattgtaggtgaccaagaacaagcagaaaagaaggacctaaggagtgttttctttaatttcatccggaacttacttagtgagaccattttcaa

SEQ ID NO: 182058 - DNA, 120 bp, Artificial Sequence
  ENSG00000111254_19 (sequence is synthesized)
gcgtgaccagagccctgaacccaaggtgccggaacagccagttaaggaagataggaagttgtgtgaaagaccgttggcgtcttctccccccaggctatatgaggatgatgagacccctgg

SEQ ID NO: 182059 - DNA, 120 bp, Artificial Sequence
  ENSG00000111254_20 (sequence is synthesized)
tgccctttctgggctgaccaagatggctgtcagccagatagatggccacatgagtgggcagatggtagaacatctgatgaactcagtgatgaagctgtgtgtcatcattgctaagtcctg

SEQ ID NO: 182060 - DNA, 120 bp, Artificial Sequence
  ENSG00000111254_21 (sequence is synthesized)
tgatgcttcgttggcagagctgggagatgacaagtctggagatgccagtaggctaacttcggccttcccagatagtttatatgagtgcttaccagccaagggcacagggtcagcagaagc

SEQ ID NO: 182061 - DNA, 120 bp, Artificial Sequence
  ENSG00000111254_22 (sequence is synthesized)
tgtcctgcagaatgcctatcaagctatccataatgaaatgagaggcacatcaggacagccccctgaagggtgtgcagcacccacggtgattgtcagcaatcacaacctaacggacacagt

SEQ ID NO: 182062 - DNA, 120 bp, Artificial Sequence
  ENSG00000111254_23 (sequence is synthesized)
tcagaacaagcaactccaagccgtccttcaatgggtagctgcctctgagctcaatgtccctattttgtattttgctggtgatgatgaagggatccaggagaagctacttcagctctcagc

SEQ ID NO: 182063 - DNA, 120 bp, Artificial Sequence
  ENSG00000111254_24 (sequence is synthesized)
tgctgctgtggacaaaggatgcagtgtgggcgaggttctgcagtcggtgctgcgctatgagaaggagcgccagctgaatgaggcggtggggaatgtcacaccgctgcagctgctggactg

SEQ ID NO: 182064 - DNA, 120 bp, Artificial Sequence
  ENSG00000111254_25 (sequence is synthesized)
gctgatggtgaacctgtaatcggcaaccccactgctttcccctcttctggcagtggggccggcccttatccccgcccttctttctcacttccacatctccccctctatatcctcacagag

SEQ ID NO: 182065 - DNA, 120 bp, Artificial Sequence
  ENSG00000111254_26 (sequence is synthesized)
ccctaacattatcttcacaccactctcatcaaagacatgtcatcttgtgctagccactggattttgcagattttcctgtccatgcaagcaaggacgtaaaattaaaaaattacaattaaa

SEQ ID NO: 182066 - DNA, 120 bp, Artificial Sequence
  ENSG00000111254_27 (sequence is synthesized)
gggggacaagaacgaggggaaaagtggagaagagaaaccaaaatagggtgtgtcccaagtaaataaatgtgcgtcgagcccgccaagcacattctctcatagggacccttgcgcctgctg

SEQ ID NO: 182067 - DNA, 120 bp, Artificial Sequence
  ENSG00000111254_28 (sequence is synthesized)
ttcgcgtttcctggaatgcacactcaggtgtctgcaccagctcaagtctctgctcaaaagtgacctcttcggataaaacttctctgaccatcctatccaagattccttatattacatggc

SEQ ID NO: 182068 - DNA, 120 bp, Artificial Sequence
  ENSG00000111254_29 (sequence is synthesized)
aagaaacaagatcttgagctgagcaagaacatcccagcatcttcattgactttaaaagtatattctggagtcttccgtggttcactattccagtactacagagtcatttttatctgtgtc

SEQ ID NO: 182069 - DNA, 120 bp, Artificial Sequence
  ENSG00000111261_0 (sequence is synthesized)
acttgctaaccacaaaacccgccaggccggtgcgggagctgcggagcatccgctgcggtcctcgccgagacccccgcgcggattcgccggtccttcccgcgggcgcgacagagctgtcct

SEQ ID NO: 182070 - DNA, 120 bp, Artificial Sequence
  ENSG00000111261_1 (sequence is synthesized)
cgcacctggatggcagcaggggcgccggggtcctctcgacgccagagagaaatctcatcatctgtgcagccttcttaaagcaaactaagaccagagggaggattatccttgacctttgaa

SEQ ID NO: 182071 - DNA, 120 bp, Artificial Sequence
  ENSG00000111261_2 (sequence is synthesized)
gaccaaaactaaactgaaatttaaaatgttcttcgggggagaagggagcttgacttacactttggtaataatttgcttcctgacactaaggctgtctgctagtcagaattgcctcaaaaa

SEQ ID NO: 182072 - DNA, 120 bp, Artificial Sequence
  ENSG00000111261_3 (sequence is synthesized)
gagtctagaagatgttgtcattgacatccagtcatctctttctaagggaatcagaggcaatgagcccgtatatacttcaactcaagaagactgcattaattcttgctgttcaacaaaaaa

SEQ ID NO: 182073 - DNA, 120 bp, Artificial Sequence
  ENSG00000111261_4 (sequence is synthesized)
catatcaggggacaaagcatgtaacttgatgatcttcgacactcgaaaaacagctagacaacccaactgctacctatttttctgtcccaacgaggaagcctgtccattgaaaccagcaaa

SEQ ID NO: 182074 - DNA, 120 bp, Artificial Sequence
  ENSG00000111261_5 (sequence is synthesized)
aggacttatgagttacaggataattacagattttccatctttgaccagaaatttgccaagccaagagttaccccaggaagattctctcttacatggccaattttcacaagcagtcactcc

SEQ ID NO: 182075 - DNA, 120 bp, Artificial Sequence
  ENSG00000111261_6 (sequence is synthesized)
cctagcccatcatcacacagattattcaaagcccaccgatatctcatggagagacacactttctcagaagtttggatcctcagatcacttggagaaactatttaagatggatgaagcaag

SEQ ID NO: 182076 - DNA, 120 bp, Artificial Sequence
  ENSG00000111261_7 (sequence is synthesized)
tgcccagctccttgcttataaggaaaaaggccattctcagagttcacaattttcctctgatcaagaaatagctcatctgctgcctgaaaatgtgagtgcgctcccagctacggtggcagt

SEQ ID NO: 182077 - DNA, 120 bp, Artificial Sequence
  ENSG00000111261_8 (sequence is synthesized)
tgcttctccacataccacctcggctactccaaagcccgccacccttctacccaccaatgcttcagtgacaccttctgggacttcccagccacagctggccaccacagctccacctgtaac

SEQ ID NO: 182078 - DNA, 120 bp, Artificial Sequence
  ENSG00000111261_9 (sequence is synthesized)
cactgtcacttctcagcctcccacgaccctcatttctacagtttttacacgggctgcggctacactccaagcaatggctacaacagcagttctgactaccacctttcaggcacctacgga

SEQ ID NO: 182079 - DNA, 120 bp, Artificial Sequence
  ENSG00000111261_10 (sequence is synthesized)
ctcgaaaggcagcttagaaaccataccgtttacagaaatctccaacctaactttgaacacagggaatgtgtataaccctactgcactttctatgtcaaatgtggagtcttccactatgaa

SEQ ID NO: 182080 - DNA, 120 bp, Artificial Sequence
  ENSG00000111261_11 (sequence is synthesized)
taaaactgcttcctgggaaggtagggaggccagtccaggcagttcctcccagggcagtgttccagaaaatcagtacggccttccatttgaaaaatggcttcttatcgggtccctgctctt

SEQ ID NO: 182081 - DNA, 120 bp, Artificial Sequence
  ENSG00000111261_12 (sequence is synthesized)
tggtgtcctgttcctggtgataggcctcgtcctcctgggtagaatcctctcggaatcactccgcaggaaacgttactcaagactggattatttgatcaatgggatctatgtggacatcta

SEQ ID NO: 182082 - DNA, 120 bp, Artificial Sequence
  ENSG00000111261_13 (sequence is synthesized)
aggatggaactcggtgtctcttaattcatttagtaaccagaagcccaaatgcaatgagtttctgctgacttgctagtcttagcaggaggttgtattttgaagacaggaaaatgccccctt

SEQ ID NO: 182083 - DNA, 120 bp, Artificial Sequence
  ENSG00000111261_14 (sequence is synthesized)
ttacaggcatgagccaccacagctggcccccttctgttttatgtttggtttttgagaaggaatgaagtgggaaccaaattaggtaattttgggtaatctgtctctaaaatattagctaaa

SEQ ID NO: 182084 - DNA, 120 bp, Artificial Sequence
  ENSG00000111261_15 (sequence is synthesized)
aattttgggtaatctgtctctaaaatattagctaaaaacaaagctctatgtaaagtaataaagtataattgccatataaatttcaaaattcaactggcttttatgcaaagaaacaggtta

SEQ ID NO: 182085 - DNA, 120 bp, Artificial Sequence
  ENSG00000111261_16 (sequence is synthesized)
ggacatctaggttccaattcattcacattcttggttccagataaaatcaactgtttatatcaatttctaatggatttgcttttctttttatatggattcctttaaaacttattccagatg

SEQ ID NO: 182086 - DNA, 120 bp, Artificial Sequence
  ENSG00000111261_17 (sequence is synthesized)
tagttccttccaattaaatatttgaataaatcttttgttactcagtagtgttctcataagtagcatgtccagctggataactttccatttatttccactagcaaaatgattatgtggtga

SEQ ID NO: 182087 - DNA, 120 bp, Artificial Sequence
  ENSG00000111261_18 (sequence is synthesized)
aaatatgcgttccacgttaaaatgacaaccccccctttttcccatcagtgagcaaagagcttcacttgggagaatctagcggaatgttagcccacatggagacaatgataagtcagttct

SEQ ID NO: 182088 - DNA, 76 bp, Artificial Sequence
  ENSG00000111261_19 (sequence is synthesized)
ggaatgttagcccacatggagacaatgataagtcagttctgataaatggccatatccacttgggatctgttctagt

SEQ ID NO: 182089 - DNA, 120 bp, Artificial Sequence
  ENSG00000111261_20 (sequence is synthesized)
ttttaaagaagtattatagacattttctaaacttgtactaagttaaaaatgtaccactattattttatatccttacttaaattgaccagcaatcagtctaagcttaatttagaacaacat

SEQ ID NO: 182090 - DNA, 88 bp, Artificial Sequence
  ENSG00000111261_21 (sequence is synthesized)
acagagccctagcactaacatgatgctacaatttttactggttaccaattaaaatttctgagaaaggcttttaataaagttttccaga

SEQ ID NO: 182091 - DNA, 120 bp, Artificial Sequence
  ENSG00000111261_22 (sequence is synthesized)
ttaaaatttctgagaaaggcttttaataaagttttccagacaagttataggtgaggtaacaaagagtccagaagtcccctgggtcagtttgatacctctttcctctggacttcaatttgc

SEQ ID NO: 182092 - DNA, 120 bp, Artificial Sequence
  ENSG00000111261_23 (sequence is synthesized)
ttatctgcaaaacaggaaatttgatcccttccaagtgtcaccagagtttttaaagataaaaatggaattcagatgcgaacttaatacagtgagcactagagggcagtagctggttaataa

SEQ ID NO: 182093 - DNA, 120 bp, Artificial Sequence
  ENSG00000111261_24 (sequence is synthesized)
gtacagcaattaagacaaatgcaggaaatgacagaaaaggcttttcttctccttcctcctcacctcttccttcctcctcacctccttcccctctgctcttctggtacccctcccccattt

SEQ ID NO: 182094 - DNA, 120 bp, Artificial Sequence
  ENSG00000111261_25 (sequence is synthesized)
ccctggtttacactaagttcataaagtacattaagaggaaagctggtctattgaaaatactacttttcttatattttccaacttaacagcttgacacaaatctccaaggggtttacataa

SEQ ID NO: 182095 - DNA, 120 bp, Artificial Sequence
  ENSG00000111261_26 (sequence is synthesized)
gctttaagtaggctgaataaataaaaccttgagtcaatttaacttaacaagtatttattgaatatccacatgtaggccagaatcagattagtaaccaggtgccttggaattttaaaattt

SEQ ID NO: 182096 - DNA, 120 bp, Artificial Sequence
  ENSG00000111261_27 (sequence is synthesized)
ctcctctctttattaatggatttagcgagtggaaatcaggctttctgtgatggtttataaaggtattttcctggctctcttggagttctctgtccaccttgctgcagtctttgttgtgat

SEQ ID NO: 182097 - DNA, 120 bp, Artificial Sequence
  ENSG00000111261_28 (sequence is synthesized)
ggggagaccacatgggagcggtccagatgagtgatgctacgggcccaaactgttagtggccgtgaggatataggttgtaggggacatctggagtggaaagagtgctcttctcacacagct

SEQ ID NO: 182098 - DNA, 120 bp, Artificial Sequence
  ENSG00000111261_29 (sequence is synthesized)
ctctctacttactgcccctaggatggtgggtgcaactgtggcaagggcagtcagggtaggggaatcccttagaggaattcagcagtgactagtctggttagcctttcccacaaggcccat

SEQ ID NO: 182099 - DNA, 120 bp, Artificial Sequence
  ENSG00000111261_30 (sequence is synthesized)
tgagttatgagccccctcctttggtttgtagaaagagaaggtagcagcctagaacaggtgagaagatgaggtaggtccttctgctcaaacatcctctctccgtattttaccaacacgata

SEQ ID NO: 182100 - DNA, 61 bp, Artificial Sequence
  ENSG00000111261_31 (sequence is synthesized)
ctgctcaaacatcctctctccgtattttaccaacacgatactgacctaggttaaaaagcta

SEQ ID NO: 182101 - DNA, 65 bp, Artificial Sequence
  ENSG00000111261_32 (sequence is synthesized)
ctagctactcttagccaggcacatagtggctcacatctgtaatctcagccctttgggagactgag

SEQ ID NO: 182102 - DNA, 64 bp, Artificial Sequence
  ENSG00000111261_33 (sequence is synthesized)
aaaataaaataaaaataagctactcttagccaggcacatagtggctcacatctgtaatctcagc

SEQ ID NO: 182103 - DNA, 120 bp, Artificial Sequence
  ENSG00000111261_34 (sequence is synthesized)
aaacaaaacaacaacaacaaaaaaaaaactaaaaaactcttaaaaaacctgaggactcctggatgaatactgttatgtgcctgtttctcaattacccctggcctgagtgaggaacttttg

SEQ ID NO: 182104 - DNA, 120 bp, Artificial Sequence
  ENSG00000111261_35 (sequence is synthesized)
cctggcctgagtgaggaacttttggaactctttggctcccagactgtggtgggcactaccggtcagctgcccagcagccagccctagtcccacttctgcctcatttgttacaggttggaa

SEQ ID NO: 182105 - DNA, 120 bp, Artificial Sequence
  ENSG00000111261_36 (sequence is synthesized)
gtgccaggttcagggatgggcctgtgacccaagttttagctgaaaggaaacctactagggacttctaggagagattttcttgcttgtaaagggaaggctgcacaaggagaaaagcccttt

SEQ ID NO: 182106 - DNA, 120 bp, Artificial Sequence
  ENSG00000111261_37 (sequence is synthesized)
ctaaccacatccccttatttcatgcttgggatgctgaccatgtgaagacttggttgttggagctgtggtggcctccctgccatgatgaggggagaaggcactgccacactgagcgtggca

SEQ ID NO: 182107 - DNA, 120 bp, Artificial Sequence
  ENSG00000111261_38 (sequence is synthesized)
gtgggtacaggaagagtccagtctccgggatgccttggttaattgacaggacaaaccctggaactgccaacttccatcttgttctgtaataataaatctctaatatttgtaccactttca

SEQ ID NO: 182108 - DNA, 120 bp, Artificial Sequence
  ENSG00000111261_39 (sequence is synthesized)
ggcagcaggggcgccggggtcctctcgacgccagatttttgtgtggacataagttttcaattcatttgagtgaatacataggaggacaattgctgaattgtatgagagaaatctcatcat

SEQ ID NO: 182109 - DNA, 120 bp, Artificial Sequence
  ENSG00000111262_0 (sequence is synthesized)
agaaatggaccgagcggacccgccgccgcacgcaccctgctccactccaagctcctaagggctcctggcgcgccgcgtagccttggcgaggtccgcgctggggtgcggagagcgaaggga

SEQ ID NO: 182110 - DNA, 120 bp, Artificial Sequence
  ENSG00000111262_1 (sequence is synthesized)
actggagagccatgtagatccaggctctcgcccgcccgcctccttcgggatcgaatcaagggctcccatagtgttaggagggggcgagagtgctgtttatcgtcatttgcctcggagctt

SEQ ID NO: 182111 - DNA, 120 bp, Artificial Sequence
  ENSG00000111262_2 (sequence is synthesized)
cgagagagggtggtattttgcttttccgccccgcatcctccggaactccctgcaccggagagaggacggcgtctccaggttgctggcaaccggtgagaatgggggtagggaaggaacatt

SEQ ID NO: 182112 - DNA, 120 bp, Artificial Sequence
  ENSG00000111262_3 (sequence is synthesized)
ttcgccgtagctgctccgtaaagcgattgtccaactgagaggggcgtcggacgagtggaccagggcggcgagtttgcccggcgcgtctcggatgctgctgcggcggccgccgcggctccc

SEQ ID NO: 182113 - DNA, 120 bp, Artificial Sequence
  ENSG00000111262_4 (sequence is synthesized)
gccagggcactgcaaagacgacctgccgcattcccactcgggctctccgctgactcagcaccgcccctgcgccaagccagccggccagcgtgcatcgatcgccctggtgggagcttagaa

SEQ ID NO: 182114 - DNA, 120 bp, Artificial Sequence
  ENSG00000111262_5 (sequence is synthesized)
ggcggcaggcgaagaggggtaggaggggggagagccgaggagaagcagagagggtggcaggcgtggggatctgccgagccggcactgcaccgggtcctaggaaggctctcggaggggagg

SEQ ID NO: 182115 - DNA, 120 bp, Artificial Sequence
  ENSG00000111262_6 (sequence is synthesized)
ggaggccagggcgacccccgaagcaatggcccagtccgctagaacggcactgcgttaaggcacctgggatcaggaagaaatatctaaacaacaacaacagaaaaccaacaaacccccaaa

SEQ ID NO: 182116 - DNA, 120 bp, Artificial Sequence
  ENSG00000111262_7 (sequence is synthesized)
cccaaacccaaccctctgcaaaaagctgcacccggcccgcaggcgagggggattccaaactgagtgaaaggcagggtggaggggaaggcagcgagaggcaaagtcgcagatctcccgacc

SEQ ID NO: 182117 - DNA, 120 bp, Artificial Sequence
  ENSG00000111262_8 (sequence is synthesized)
tgctcgtgttgaagcacctccccctgggcgtgagggagacgcgcgctccggtgggggggccgcttgggtcccccccacccctggtccctggctgcttcccaccccgggctctctcctggc

SEQ ID NO: 182118 - DNA, 120 bp, Artificial Sequence
  ENSG00000111262_9 (sequence is synthesized)
ctcccacccccgcgcccggcttccaccatgacggtgatgtctggggagaacgtggacgaggcttcggccgccccgggccacccccaggatggcagctacccccggcaggccgaccacgac

SEQ ID NO: 182119 - DNA, 120 bp, Artificial Sequence
  ENSG00000111262_10 (sequence is synthesized)
gaccacgagtgctgcgagcgcgtggtgatcaacatctccgggctgcgcttcgagacgcagctcaagaccctggcgcagttccccaacacgctgctgggcaaccctaagaaacgcatgcgc

SEQ ID NO: 182120 - DNA, 120 bp, Artificial Sequence
  ENSG00000111262_11 (sequence is synthesized)
tacttcgaccccctgaggaacgagtacttcttcgaccgcaaccggcccagcttcgacgccatcctctactactaccagtccggcggccgcctgcggaggccggtcaacgtgcccctggac

SEQ ID NO: 182121 - DNA, 120 bp, Artificial Sequence
  ENSG00000111262_12 (sequence is synthesized)
atgttctccgaggagatcaagttttacgagttgggcgaggaggccatggagaagttccgggaggacgagggcttcatcaaggaggaggagcgccctctgcccgagaaggagtaccagcgc

SEQ ID NO: 182122 - DNA, 120 bp, Artificial Sequence
  ENSG00000111262_13 (sequence is synthesized)
caggtgtggctgctcttcgagtaccccgagagctcggggcccgccagggtcatcgccatcgtctccgtcatggtcatcctcatctccatcgtcatcttttgcctggagacgctccccgag

SEQ ID NO: 182123 - DNA, 120 bp, Artificial Sequence
  ENSG00000111262_14 (sequence is synthesized)
ctgaaggatgacaaggacttcacgggcaccgtccaccgcatcgacaacaccacggtcatctacaattccaacatcttcacagaccccttcttcatcgtggaaacgctgtgtatcatctgg

SEQ ID NO: 182124 - DNA, 120 bp, Artificial Sequence
  ENSG00000111262_15 (sequence is synthesized)
ttctccttcgagctggtggtgcgcttcttcgcctgccccagcaagacggacttcttcaaaaacatcatgaacttcatagacattgtggccatcattccttatttcatcacgctgggcacc

SEQ ID NO: 182125 - DNA, 120 bp, Artificial Sequence
  ENSG00000111262_16 (sequence is synthesized)
gagatagctgagcaggaaggaaaccagaagggcgagcaggccacctccctggccatcctcagggtcatccgcttggtaagggtttttagaatcttcaagctctcccgccactctaagggc

SEQ ID NO: 182126 - DNA, 120 bp, Artificial Sequence
  ENSG00000111262_17 (sequence is synthesized)
ctccagatcctgggccagaccctcaaagctagtatgagagagctagggctgctcatctttttcctcttcatcggggtcatcctgttttctagtgcagtgtactttgccgaggcggaagaa

SEQ ID NO: 182127 - DNA, 120 bp, Artificial Sequence
  ENSG00000111262_18 (sequence is synthesized)
gctgagtcgcacttctccagtatccccgatgctttctggtgggcggtggtgtccatgaccactgtaggatacggtgacatgtaccctgtgacaattggaggcaagatcgtgggctccttg

SEQ ID NO: 182128 - DNA, 120 bp, Artificial Sequence
  ENSG00000111262_19 (sequence is synthesized)
tgtgccatcgctggtgtgctaacaattgccctgcccgtacctgtcattgtgtccaatttcaactatttctaccaccgagaaactgagggggaagagcaggctcagttgctccacgtcagt

SEQ ID NO: 182129 - DNA, 120 bp, Artificial Sequence
  ENSG00000111262_20 (sequence is synthesized)
tcccctaacttagcctctgacagtgacctcagtcgccgcagttcctctactatgagcaagtctgagtacatggagatcgaagaggatatgaataatagcatagcccattatagacaggtc

SEQ ID NO: 182130 - DNA, 120 bp, Artificial Sequence
  ENSG00000111262_21 (sequence is synthesized)
aatatcagaactgccaattgcaccactgctaaccaaaactgcgttaataagagcaagctactgaccgatgtttaaaaaacaaaggcaagcaaacaaaaaagccccacttagcagctcaaa

SEQ ID NO: 182131 - DNA, 120 bp, Artificial Sequence
  ENSG00000111262_22 (sequence is synthesized)
agacttaaaaaacaaaacagaaaacctagtgactcatgtcacgctttgtagatactttactaagtagacttggaatgctctatttaactgtcaatgcgttgttgcattgaggattttggg

SEQ ID NO: 182132 - DNA, 120 bp, Artificial Sequence
  ENSG00000111262_23 (sequence is synthesized)
ggtggtgaaccagaagctttcaagatccatgacaaaataaactattttccttttattaaaaaatgggaaaagagagagtattttctaaaactggcttaaaaagattcagtccacgaacta

SEQ ID NO: 182133 - DNA, 120 bp, Artificial Sequence
  ENSG00000111262_24 (sequence is synthesized)
gtctaggtaaaataataatcatatgcttccccaaactgaaacatttttaatgctttggtttctttaacttttttaaaaactcagaacaagatgatcacttagaaatatgaaattgaaatt

SEQ ID NO: 182134 - DNA, 120 bp, Artificial Sequence
  ENSG00000111262_25 (sequence is synthesized)
cgcatgggactccagtaaaacatctttgcaaactgcgtagcacattgaagacagtgcatcagatgtattatatgtaacatgatagaccagccaaaatggacaatgaatagatatttttat

SEQ ID NO: 182135 - DNA, 120 bp, Artificial Sequence
  ENSG00000111262_26 (sequence is synthesized)
ttcgatcaactgaactgcatattacaaggtgaaaaaagaaaactccgattacttaagactggttcacaaagcaccttataaattggatactggtcctgatctgtagggatttccccctgg

SEQ ID NO: 182136 - DNA, 120 bp, Artificial Sequence
  ENSG00000111262_27 (sequence is synthesized)
gcccattctctttctaatccagattattctctaagaaaaagttaactgaattaaattaattgattcttctgcagtgccgctaaatggtctcaactgcagatgagccaaatacaggtcttt

SEQ ID NO: 182137 - DNA, 120 bp, Artificial Sequence
  ENSG00000111262_28 (sequence is synthesized)
tctcaccaggcctgcactccgacccctggctttcagaactggatgtaaaaccttagcctccttattgcaagagagcacaaatgaagttaaatgtaagcatgtttgaatctgatacaattt

SEQ ID NO: 182138 - DNA, 120 bp, Artificial Sequence
  ENSG00000111262_29 (sequence is synthesized)
attttataatcgcatgctgagaagttaacccagacaataggggataagcttaagttgaaatcgattcttctaaaaatagatcctttttcatttgcattcaccaaaagtgcactcctccat

SEQ ID NO: 182139 - DNA, 120 bp, Artificial Sequence
  ENSG00000111262_30 (sequence is synthesized)
ttattaactattttattagtaaataaagtactgtatttaagtgcatatgttagtcagatgggaacaataactttttggagctcaaagcatgttctcttattcagcattatggcctatttg

SEQ ID NO: 182140 - DNA, 120 bp, Artificial Sequence
  ENSG00000111262_31 (sequence is synthesized)
actaagatgtaccttgaattaattaatgcatgatttcagtaataaaaattttaaaagtaataaaaattacaagtctgtggggtgaaaggcccaatagaaattatggggggtgggggtggg

SEQ ID NO: 182141 - DNA, 120 bp, Artificial Sequence
  ENSG00000111262_32 (sequence is synthesized)
ggcactcagtcaattttcctgcctttgctcagggaaataccaggtttttgtgcaggtataggcggagagaggaccaatatgcccatcccttaaagggaagccatgtgaaaaactcaataa

SEQ ID NO: 182142 - DNA, 120 bp, Artificial Sequence
  ENSG00000111262_33 (sequence is synthesized)
caacacaaacaagcaaacaaacaaacaaacaaaaaggtgcaatactgcatgttttttggtgcattcttaggatgtaaatgaaaatgtttctctattatatgcatccgaagcagagctgat

SEQ ID NO: 182143 - DNA, 120 bp, Artificial Sequence
  ENSG00000111262_34 (sequence is synthesized)
ttttttttctttgcagtcattctttgaagtctgtagagacttcagccctccccttgaggctccctgaagaaactaaaccaattgatttaatagttgcttagtgcctttatcctgtaccca

SEQ ID NO: 182144 - DNA, 120 bp, Artificial Sequence
  ENSG00000111262_35 (sequence is synthesized)
cagtgaactgtagaaagtgcctccttaacacagctgagaagttaggtagcaaaagtggggaagggttggggcacagaccttttgctttttctttttccattctcgctctctcatttcacc

SEQ ID NO: 182145 - DNA, 120 bp, Artificial Sequence
  ENSG00000111262_36 (sequence is synthesized)
actgtgagaagaccacaccaccctaaaccctggagaggagagacccaggagggtgctgtctctctggccatctactagcattggtccctttgacagcctgacgctggatgtgaactgaga

SEQ ID NO: 182146 - DNA, 120 bp, Artificial Sequence
  ENSG00000111262_37 (sequence is synthesized)
cccatctttgaactggacatgaactgtgaacttgttttttcctctctccaccaaagccaagataaactttttgggaatttgtttcctatcgagggccactttggacacacaaggcttcct

SEQ ID NO: 182147 - DNA, 120 bp, Artificial Sequence
  ENSG00000111262_38 (sequence is synthesized)
caggtccagtgtagtgctcctggcacctttccttatttttttctctgtcggtaacagcactttgcaaatctctctgacggtccagtcttttcaggcattgttgtggatgtgggaacactc

SEQ ID NO: 182148 - DNA, 120 bp, Artificial Sequence
  ENSG00000111262_39 (sequence is synthesized)
agttcataataacctttcctaggccttccctcctggtctacccctttcagatatttcctgatgcccctatgatcttcccacctggcagtcacttcacaggttgaacatctaacttctgct

SEQ ID NO: 182149 - DNA, 120 bp, Artificial Sequence
  ENSG00000111262_40 (sequence is synthesized)
gcccccccgttacccagcccagagaatggtggggaccctgttcctggctgaaagagagccacggaacacaggcctctggagctcggcagctgcccaccggtggagaggtactcacagcct

SEQ ID NO: 182150 - DNA, 120 bp, Artificial Sequence
  ENSG00000111262_41 (sequence is synthesized)
ttcaaaggaccctgaggtggggaatcttcattctgcacttagcatgtggctgcctgttacctgacattctggcccagcttcttctgaaaatctgtcctgcttctcccacccctttccccc

SEQ ID NO: 182151 - DNA, 120 bp, Artificial Sequence
  ENSG00000111262_42 (sequence is synthesized)
atcctgtcctagaactagcagtgaggcaatcaccctagaaactcgagttacacccattctggctaactcgattaaaagaaagaacatggatatcttattttcctatgtgacttttgtgaa

SEQ ID NO: 182152 - DNA, 120 bp, Artificial Sequence
  ENSG00000111262_43 (sequence is synthesized)
tctgtgagatgaacacaacacacatcgtggaagatgaggggccaagaactgcgcagcatccgactacagggcattaaaccctcccatgtgatgtctccttctcgtctgaaccttaactca

SEQ ID NO: 182153 - DNA, 120 bp, Artificial Sequence
  ENSG00000111262_44 (sequence is synthesized)
ttctggcgattcctttcctacttgcttaaaaatccccaattaggaaaaaaatgccaacctcctcccaggcttggggttatcttgatctttcatttcaacgttgaggtctagtgcacacag

SEQ ID NO: 182154 - DNA, 120 bp, Artificial Sequence
  ENSG00000111262_45 (sequence is synthesized)
aacttgaaacaccgcactctgtcaacagcaataatccactcagtactgtgggatggatgggttaatggatgagaaaacggcaccaagactgactttgggtatttggtatatttaccgtgg

SEQ ID NO: 182155 - DNA, 120 bp, Artificial Sequence
  ENSG00000111262_46 (sequence is synthesized)
ttacactctggactggttgattcttctgcatgtgatatagaaaaaagtgctgcatgcggtgaacctgtcagtctgggactgggggtgagttgttgttatgagtttggggtggtgtgagga

SEQ ID NO: 182156 - DNA, 120 bp, Artificial Sequence
  ENSG00000111262_47 (sequence is synthesized)
aagtgaatgctgcttagctcatctgtagctcattgcaatgaattcagtaagaatggagtacagggattatctgtgtagcataggcatgcaatgtttgaccaagctcttaccctcgcactg

SEQ ID NO: 182157 - DNA, 120 bp, Artificial Sequence
  ENSG00000111262_48 (sequence is synthesized)
taatgtgttgaaatgtctttgtagacctgaaggtgcacttaacaaaactgcctattaagggatgactattttttggtttacttattcatatttattttagcagcctttttaccttttctt

SEQ ID NO: 182158 - DNA, 120 bp, Artificial Sequence
  ENSG00000111262_49 (sequence is synthesized)
ccccttcctaggcatggagctgtaacagctcatgtcctgactatgtgttttctccagaaggagaagacttctgatgtgctgatagctataattcctctcttccagtctattggggcccta

SEQ ID NO: 182159 - DNA, 120 bp, Artificial Sequence
  ENSG00000111262_50 (sequence is synthesized)
gttcaatagggtggcaatagaagagttggtcacaccagggctgttagccatcccagaatctctgaagtggttaactcacctgaagtgatctgaatcagagagaccaaagacattcatttc

SEQ ID NO: 182160 - DNA, 120 bp, Artificial Sequence
  ENSG00000111262_51 (sequence is synthesized)
ctctgtcctcagatttctagaagacaaattctagccaggaaaactttctgtttttgcatctcccttttcccatttgtgcccaactccccttgcactccctggagacttgagttctgattt

SEQ ID NO: 182161 - DNA, 120 bp, Artificial Sequence
  ENSG00000111262_52 (sequence is synthesized)
tcagttatatcagctcattgggagtgtgttcgtgggtgagccttgcagaatcagataaaccaatagcaagtccttctccaggattctggccagtgggcagtcatttccctgaaatgaatt

SEQ ID NO: 182162 - DNA, 120 bp, Artificial Sequence
  ENSG00000111262_53 (sequence is synthesized)
gtagggcaggtttagattccactatggtggacgtgaagcacaggtggtgtcacaatcttgatttgcttgagaattaaaaaaatacatgtaaatggtaaatgaggaatacatttttttaaa

SEQ ID NO: 182163 - DNA, 120 bp, Artificial Sequence
  ENSG00000111262_54 (sequence is synthesized)
gtagaaatttggtttagcctataaaaggccttcttcacattgtgtatagttacacgtttttcaaattaggtaccatctaaaagtcaataaaaatagtttcctagccctctcatttaatat

SEQ ID NO: 182164 - DNA, 120 bp, Artificial Sequence
  ENSG00000111262_55 (sequence is synthesized)
aggagacctcaaaacacatgctttttaacaattttacattttaattcttagtttggtagattggattgaaagaaaggagaaagaacattagcagaaggcactttcccattttcttccagg

SEQ ID NO: 182165 - DNA, 120 bp, Artificial Sequence
  ENSG00000111262_56 (sequence is synthesized)
aatgacttattcctggggtggtgagaattggtgggtggtaaccatccatagtataaaattgttagaaagaatataaactgccaaacaagcatgttatcttcaggcttttccaagcaagaa

SEQ ID NO: 182166 - DNA, 120 bp, Artificial Sequence
  ENSG00000111262_57 (sequence is synthesized)
tgaagtcttttgatgtttatgttcattttaagaagacaaacaaactaaaattttaagaccagacacaacccaagttgaattgtgatctcaggaggtgaactctcattcaccatgtggcat

SEQ ID NO: 182167 - DNA, 120 bp, Artificial Sequence
  ENSG00000111262_58 (sequence is synthesized)
attactacctgtatttatatcatggaatttcagggtatatgtgaacatgtctagtatgactcaggtaaacctttaaagaatgtatgttacttaccatttttgtaaagaagcaaacaggag

SEQ ID NO: 182168 - DNA, 120 bp, Artificial Sequence
  ENSG00000111262_59 (sequence is synthesized)
ctgaattgttaaccaaaactgttccattaccttgggtcactgtgcaaactaattcagggtacagatataaagtttagaagccttgggattaaatgccagcctctttgctcaggcaaaatg

SEQ ID NO: 182169 - DNA, 120 bp, Artificial Sequence
  ENSG00000111262_60 (sequence is synthesized)
accctgggctttcttgggaagtccagcatgtatgtaaggggtgaggccctgctgacctcagggcttttcgctttaaggagattaaccctagtcacagtgattttcatttaggagctaact

SEQ ID NO: 182170 - DNA, 120 bp, Artificial Sequence
  ENSG00000111262_61 (sequence is synthesized)
aggagtttactctttatgacgtgaaacttcaaagagtatagaaaacttttgtaccacaatcaaagaagaagaaatggtgtatggaaagaaaacaaaacaaaacaagaaatctcttgtaaa

SEQ ID NO: 182171 - DNA, 120 bp, Artificial Sequence
  ENSG00000111262_62 (sequence is synthesized)
atattccaggtcaaagttgtctcctctccaaaccttgcagaagcacctttcttctcttcagcgcactgttttgggactgtttatgcagcagatgtaagtagacaacatggactccatgtg

SEQ ID NO: 182172 - DNA, 120 bp, Artificial Sequence
  ENSG00000111262_63 (sequence is synthesized)
acatgcctctaatagtaaagataaagtattactgaggttaaaaataaaaattgagtagtattaatttaaagtgcaccatcaggacaacaaaccatttaagctgaaaaaacgctattttat

SEQ ID NO: 182173 - DNA, 120 bp, Artificial Sequence
  ENSG00000111262_64 (sequence is synthesized)
ttcttgagtttgccagttgcttccaccttgagttaaggacgtgtctcatcttcacctactgcgcattctcccttctctaactgtgtaatatgtcaggtcaaggacattgaatgttatgaa

SEQ ID NO: 182174 - DNA, 120 bp, Artificial Sequence
  ENSG00000111262_65 (sequence is synthesized)
ttgagaacctaattgatgcgcatagttttcatctatgcaattttacttgcttctgtcactttacgatctgttcatatttggcatcaattaaagatactttttaaggatcttatcaaggaa

SEQ ID NO: 182175 - DNA, 120 bp, Artificial Sequence
  ENSG00000111262_66 (sequence is synthesized)
cgagatagctgagcaggaaggaaaccagaagggcgagcaggccacctccctggccatcctcagggtcatccgcttggcctgcactccgacccctggctttcagaactggatgtaaaacct

SEQ ID NO: 182176 - DNA, 80 bp, Artificial Sequence
  ENSG00000111266_0 (sequence is synthesized)
agagtcgccggactctggaagggaacatgacctgacccctccccgagcggccggaacgaggcgcggagccgcgctccggg

SEQ ID NO: 182177 - DNA, 120 bp, Artificial Sequence
  ENSG00000111266_1 (sequence is synthesized)
ggcgcccaccgccctgccctcgcctgtctcctcctttccccggggctccgctgagttcattcactgggattggtttcaagtgacgccatctctttatttttaaaccaatgacctcatccg

SEQ ID NO: 182178 - DNA, 120 bp, Artificial Sequence
  ENSG00000111266_2 (sequence is synthesized)
cgcttgaagtttcctgaccagcgactctttctctttcccccaaccccccaccccacccccccgcctttccccctctttctatgtatcagtgtttggggggctttaatcagtttttaaacg

SEQ ID NO: 182179 - DNA, 120 bp, Artificial Sequence
  ENSG00000111266_3 (sequence is synthesized)
attattaccacctctctctcccccccaacccccactttcacaacgcggccccccacctttacctccctaagttcttcatctctttcgacattttttttgaaggctgatgggggggagggt

SEQ ID NO: 182180 - DNA, 120 bp, Artificial Sequence
  ENSG00000111266_4 (sequence is synthesized)
ggaagagaaagagtgaagaaaagttgcgagcgtctcctctcttcctaagcctcccgccccaacccacccctcagagaaggagaagataatatactgaaaagaagaggaggaggagagcga

SEQ ID NO: 182181 - DNA, 120 bp, Artificial Sequence
  ENSG00000111266_5 (sequence is synthesized)
cgggacgggacgcgagcgggagcgcagccgccctctcggctccgcggcggcgcctcgcaagtccgggaggcgaggggggcccgaggggagacgccgtgacaactttcgtttccctctgag

SEQ ID NO: 182182 - DNA, 120 bp, Artificial Sequence
  ENSG00000111266_6 (sequence is synthesized)
ggaattgggaggtcggcggccccaaaagctttcagtccagtgtaaagctgttggagcgcgggagcaaaggtaaagaatgatgtaatgcgctggctgctccaaagcatcttttgttgtgga

SEQ ID NO: 182183 - DNA, 120 bp, Artificial Sequence
  ENSG00000111266_7 (sequence is synthesized)
atggttattccagtcatctctttatgaatcaaatgtgaggggctgctttgtggacggagtcctttgcaagagcacatcaacgggaaagagaaagagacattcacttggagggctcttgct

SEQ ID NO: 182184 - DNA, 120 bp, Artificial Sequence
  ENSG00000111266_8 (sequence is synthesized)
gaaaatgggtttaactctccttttgccagtcaccaccagcctgacctcatacacttttagtacaatggagtggctgagcctttgagcacaccaccattacatcatcgtggcaaattaaag

SEQ ID NO: 182185 - DNA, 120 bp, Artificial Sequence
  ENSG00000111266_9 (sequence is synthesized)
aaggaggtgggaaaagaggacttattgttgtcatggcccatgagatgattggaactcaaattgttactgagaggttggtggctctgctggaaagtggaacggaaaaagtgctgctaattg

SEQ ID NO: 182186 - DNA, 120 bp, Artificial Sequence
  ENSG00000111266_10 (sequence is synthesized)
atagccggccatttgtggaatacaatacatcccacattttggaagccattaatatcaactgctccaagcttatgaagcgaaggttgcaacaggacaaagtgttaattacagagctcatcc

SEQ ID NO: 182187 - DNA, 120 bp, Artificial Sequence
  ENSG00000111266_11 (sequence is synthesized)
agcattcagcgaaacataaggttgacattgattgcagtcagaaggttgtagtttacgatcaaagctcccaagatgttgcctctctctcttcagactgttttctcactgtacttctgggta

SEQ ID NO: 182188 - DNA, 120 bp, Artificial Sequence
  ENSG00000111266_12 (sequence is synthesized)
aactggagaagagcttcaactctgttcacctgcttgcaggtgggtttgctgagttctctcgttgtttccctggcctctgtgaaggaaaatccactctagtccctacctgcatttctcagc

SEQ ID NO: 182189 - DNA, 120 bp, Artificial Sequence
  ENSG00000111266_13 (sequence is synthesized)
cttgcttacctgttgccaacattgggccaacccgaattcttcccaatctttatcttggctgccagcgagatgtcctcaacaaggagctgatgcagcagaatgggattggttatgtgttaa

SEQ ID NO: 182190 - DNA, 120 bp, Artificial Sequence
  ENSG00000111266_14 (sequence is synthesized)
atgccagcaatacctgtccaaagcctgactttatccccgagtctcatttcctgcgtgtgcctgtgaatgacagcttttgtgagaaaattttgccgtggttggacaaatcagtagatttca

SEQ ID NO: 182191 - DNA, 120 bp, Artificial Sequence
  ENSG00000111266_15 (sequence is synthesized)
ttgagaaagcaaaagcctccaatggatgtgttctagtgcactgtttagctgggatctcccgctccgccaccatcgctatcgcctacatcatgaagaggatggacatgtctttagatgaag

SEQ ID NO: 182192 - DNA, 120 bp, Artificial Sequence
  ENSG00000111266_16 (sequence is synthesized)
cttacagatttgtgaaagaaaaaagacctactatatctccaaacttcaattttctgggccaactcctggactatgagaagaagattaagaaccagactggagcatcagggccaaagagca

SEQ ID NO: 182193 - DNA, 120 bp, Artificial Sequence
  ENSG00000111266_17 (sequence is synthesized)
aactcaagctgctgcacctggagaagccaaatgaacctgtccctgctgtctcagagggtggacagaaaagcgagacgcccctcagtccaccctgtgccgactctgctacctcagaggcag

SEQ ID NO: 182194 - DNA, 120 bp, Artificial Sequence
  ENSG00000111266_18 (sequence is synthesized)
caggacaaaggcccgtgcatcccgccagcgtgcccagcgtgcccagcgtgcagccgtcgctgttagaggacagcccgctggtacaggcgctcagtgggctgcacctgtccgcagacaggc

SEQ ID NO: 182195 - DNA, 120 bp, Artificial Sequence
  ENSG00000111266_19 (sequence is synthesized)
tggaagacagcaataagctcaagcgttccttctctctggatatcaaatcagtttcatattcagccagcatggcagcatccttacatggcttctcctcatcagaagatgctttggaatact

SEQ ID NO: 182196 - DNA, 120 bp, Artificial Sequence
  ENSG00000111266_20 (sequence is synthesized)
acaaaccttccactactctggatgggaccaacaagctatgccagttctcccctgttcaggaactatcggagcagactcccgaaaccagtcctgataaggaggaagccagcatccccaaga

SEQ ID NO: 182197 - DNA, 120 bp, Artificial Sequence
  ENSG00000111266_21 (sequence is synthesized)
agctgcagaccgccaggccttcagacagccagagcaagcgattgcattcggtcagaaccagcagcagtggcaccgcccagaggtcccttttatctccactgcatcgaagtgggagcgtgg

SEQ ID NO: 182198 - DNA, 120 bp, Artificial Sequence
  ENSG00000111266_22 (sequence is synthesized)
aggacaattaccacaccagcttccttttcggcctttccaccagccagcagcacctcacgaagtctgctggcctgggccttaagggctggcactcggatatcttggccccccagacctcta

SEQ ID NO: 182199 - DNA, 120 bp, Artificial Sequence
  ENSG00000111266_23 (sequence is synthesized)
ccccttccctgaccagcagctggtattttgccacagagtcctcacacttctactctgcctcagccatctacggaggcagtgccagttactctgcctacagctgcagccagctgcccactt

SEQ ID NO: 182200 - DNA, 120 bp, Artificial Sequence
  ENSG00000111266_24 (sequence is synthesized)
gcggagaccaagtctattctgtgcgcaggcggcagaagccaagtgacagagctgactcgcggcggagctggcatgaagagagcccctttgaaaagcagtttaaacgcagaagctgccaaa

SEQ ID NO: 182201 - DNA, 120 bp, Artificial Sequence
  ENSG00000111266_25 (sequence is synthesized)
tggaatttggagagagcatcatgtcagagaacaggtcacgggaagagctggggaaagtgggcagtcagtctagcttttcgggcagcatggaaatcattgaggtctcctgagaagaaagac

SEQ ID NO: 182202 - DNA, 120 bp, Artificial Sequence
  ENSG00000111266_26 (sequence is synthesized)
acttgtgacttctatagacaatttttttttcttgttcacaaaaaaattccctgtaaatctgaaatatatatatgtacatacatatatatttttggaaaatggagctatggtgtaaaagca

SEQ ID NO: 182203 - DNA, 120 bp, Artificial Sequence
  ENSG00000111266_27 (sequence is synthesized)
ttctctcaacaaaaatggaagggcagatgctagaatcccccctagacggaggaaaaccattttattcagtgaattacacatcctcttgttcttaaaaaagcaagtgtctttggtgttgga

SEQ ID NO: 182204 - DNA, 120 bp, Artificial Sequence
  ENSG00000111266_28 (sequence is synthesized)
ggacaaaatcccctaccattttcacgttgtgctactaagagatctcaaatattagtctttgtccggacccttccatagtacaccttagcgctgagactgagccagcttgggggtcaggta

SEQ ID NO: 182205 - DNA, 120 bp, Artificial Sequence
  ENSG00000111266_29 (sequence is synthesized)
ggtagaccctgttagggacagagcctagtggtaaatccaagagaaatgatcctatccaaagctgattcacaaacccacgctcacctgacagccgagggacacgagcatcactctgctgga

SEQ ID NO: 182206 - DNA, 120 bp, Artificial Sequence
  ENSG00000111266_30 (sequence is synthesized)
cggaccattaggggccttgccaaggtctaccttagagcaaacccagtacctcagacaggaaagtcggggctttgaccactaccatatctggtagcccattttctaggcattgtgaatagg

SEQ ID NO: 182207 - DNA, 120 bp, Artificial Sequence
  ENSG00000111266_31 (sequence is synthesized)
taggtagctagtcacacttttcagaccaattcaaactgtctatgcacaaaattcccgtgggcctagatggagataatttttttttcttctcagctttatgaagagaagggaaactgtcta

SEQ ID NO: 182208 - DNA, 120 bp, Artificial Sequence
  ENSG00000111266_32 (sequence is synthesized)
ggattcagctgaaccaccaggaacctggcaacatcacgatttaagctaaggttgggaggctaacgagtctacctccctctttgtaaatcaaagaattgtttaaaatgggattgtcaatcc

SEQ ID NO: 182209 - DNA, 120 bp, Artificial Sequence
  ENSG00000111266_33 (sequence is synthesized)
tttaaataaagatgaacttggtttcaagccaaatgtgaatttatttgggttggtagcagagcagcagcaccttcaaattctcagccaaagcagatgtttttgccctttctgcttcactgc

SEQ ID NO: 182210 - DNA, 120 bp, Artificial Sequence
  ENSG00000111266_34 (sequence is synthesized)
atggatacagttggtaaaatgtaataatatggcagaattttataggaaacttcctagggaggtaaattatgggaagattaagaaaggtacaaattgctgaggagaagcaggaaacctgtt

SEQ ID NO: 182211 - DNA, 120 bp, Artificial Sequence
  ENSG00000111266_35 (sequence is synthesized)
tccttagtggcttttatcccctcggcatgcgatggggctgatgtttctatgattgcctcagactttcacatttactagtagggctgagagaggctttagtgaggaaggaatattcagaat

SEQ ID NO: 182212 - DNA, 120 bp, Artificial Sequence
  ENSG00000111266_36 (sequence is synthesized)
aaaacggttgagaaagctgagaagaccattgagttttgatcagttgtgaatagagtgcaaagccatggccaagctgtttttggaaacgctggccggcgtgtcttcagtggaaaaagcaaa

SEQ ID NO: 182213 - DNA, 120 bp, Artificial Sequence
  ENSG00000111266_37 (sequence is synthesized)
tcaaaatggagcgagagcaaaggggcgtcctcagtcctcaacctacaatcactgtatggaatcggtcctggcagctgaacataggaggtcactggaacaagtgatagtgcagattggctt

SEQ ID NO: 182214 - DNA, 120 bp, Artificial Sequence
  ENSG00000111266_38 (sequence is synthesized)
tcaaacatcctcctggcttgagttttatcagctacaatgtgggtcctcttttgaagccttaattcacaacagcagctttttgggggtggggctgggcgggtgttgtcattgttctttccc

SEQ ID NO: 182215 - DNA, 120 bp, Artificial Sequence
  ENSG00000111266_39 (sequence is synthesized)
ttcctgtaagtgtcgctagttgctgcctcgtatctcaggtttttctctgtttttgagaaatggacagttttttgaccaggatgtgacttcatgtttcctatggtgacttctaaaaccagc

SEQ ID NO: 182216 - DNA, 120 bp, Artificial Sequence
  ENSG00000111266_40 (sequence is synthesized)
acagaatgatatgactcaacacagaccgacttggttatggggatgatgagccgcacagacctcactagttgtgcacaaataatgtgctatgatggggtgtaaagtgaaggcagaagaggg

SEQ ID NO: 182217 - DNA, 120 bp, Artificial Sequence
  ENSG00000111266_41 (sequence is synthesized)
tcagccgcattgttatgatactgggaaagtgctggtcaacgatttgagttagtttttagatatacattgaaatctttaatcagacattctcaagtttcacacagtagtttttgatgttat

SEQ ID NO: 182218 - DNA, 120 bp, Artificial Sequence
  ENSG00000111266_42 (sequence is synthesized)
gtacacacacaccaaatgtgtaacagttcaccacttccagagtgtggtcatgcccaaaacatgtttaagaaaggaaagcagtagctccttgctaacgatgtttcaggaggtttgggggac

SEQ ID NO: 182219 - DNA, 120 bp, Artificial Sequence
  ENSG00000111266_43 (sequence is synthesized)
ttggttttaatgagcttctgtcatttagggcttctcttggccatggtcccccttccttctggaactgtgatgtagtcacatcctacagcctttagtgctggttcactagtgtcagataat

SEQ ID NO: 182220 - DNA, 120 bp, Artificial Sequence
  ENSG00000111266_44 (sequence is synthesized)
cagttcttggaatcgagactgccgtggcgaaggggtggcctcggaggcaggctctggagctgcttggatgtctttaggtggggtggtggctggctctcttcagcatgtaattggggaaac

SEQ ID NO: 182221 - DNA, 120 bp, Artificial Sequence
  ENSG00000111266_45 (sequence is synthesized)
cctcgcgtctactaggggtgatacagatggtgattttaaagagcaaaactagacttctatgtgagaagtgctggaaaatgatttaggacatgtgtaaagttagatggaaagactgtaaat

SEQ ID NO: 182222 - DNA, 120 bp, Artificial Sequence
  ENSG00000111266_46 (sequence is synthesized)
gtttaatatgaatatagtgttcttttgaagtaaggccagctgttgaacggttaaactgtgcatttctcattttgatgtgtcatgtatgttaatgtatgaaatgattaaataaaatcaaaa

SEQ ID NO: 182223 - DNA, 120 bp, Artificial Sequence
  ENSG00000111266_47 (sequence is synthesized)
ctggtacctgtttatacataaatacgagaaaagacctatctttgcagccataaactcggtgggaacaccaccactcaagttgccaaaggaggcagtggtgaaacctgtcctgttctcact

SEQ ID NO: 182224 - DNA, 120 bp, Artificial Sequence
  ENSG00000111266_48 (sequence is synthesized)
taaatgaggatttagctcaaaataaagtggtggtgtcatcaggtttattccgtgttctgtcattcacatggaacaccggatgattagctaacagtttagtgccagccttcattctttact

SEQ ID NO: 182225 - DNA, 120 bp, Artificial Sequence
  ENSG00000111266_49 (sequence is synthesized)
gtgtacgttaaatgcacactacagtgaaaaagcctaagacacttggtaaatattttctagctgactgattccagaacacacaagtacatggtaggaaaaaaaaggccagctacacacaca

SEQ ID NO: 182226 - DNA, 120 bp, Artificial Sequence
  ENSG00000111266_50 (sequence is synthesized)
tggcccatttcgatataacatgtaaatgatgttacgattcctacaggaaaaacaggaagggcaattgttgaagagctgtcctttgtccttgccacatacatctcaacaacctctctgctc

SEQ ID NO: 182227 - DNA, 120 bp, Artificial Sequence
  ENSG00000111266_51 (sequence is synthesized)
atgacactagatttgatgacttatgagactagaaacttagtctcatcagtttcataaaaattaggcattgaaggaataaagcttcagtgcaaacagatggaatattgactacagaaagaa

SEQ ID NO: 182228 - DNA, 120 bp, Artificial Sequence
  ENSG00000111266_52 (sequence is synthesized)
tcacaggtgaccttgaagttggttgagttgaagttacatttaagaaaatttataagaaagattgggccgggtgagctagactagaagagctatcttggccaggaccctgcagaaaaagag

SEQ ID NO: 182229 - DNA, 120 bp, Artificial Sequence
  ENSG00000111266_53 (sequence is synthesized)
gtggaagtgagatagaggaataaagggaattagaataaatcagcctccagagatagagggtaacaggaggaacagttgtttcagtgagaggcttccaatgagaagatgcagatcttggga

SEQ ID NO: 182230 - DNA, 120 bp, Artificial Sequence
  ENSG00000111266_54 (sequence is synthesized)
gagcctgaagttcaggccagttgctgacagtgctcggagccccttcatgaccagcctcagcaggctattgttggaggactggtttggatgtgacaactacaattagaccaggaattaaac

SEQ ID NO: 182231 - DNA, 120 bp, Artificial Sequence
  ENSG00000111266_55 (sequence is synthesized)
aatgcctctttatgccactcaccttatggggctgatggagagtccacgtaaaggataaccgtttcctcaaaggatttatgctgtttcacctccatcaagaaaagggctttttaaagttaa

SEQ ID NO: 182232 - DNA, 120 bp, Artificial Sequence
  ENSG00000111266_56 (sequence is synthesized)
aaaactctctgaagtttttatttacccagcgctctggctcccacttctgttttaaaagattataagtaaatactctgctctttcaagtgaaccaaacctatcaaacctgtttagaaaata

SEQ ID NO: 182233 - DNA, 120 bp, Artificial Sequence
  ENSG00000111266_57 (sequence is synthesized)
agttagtttttagaggtccaagggaaatcaggcagtgtctcatctgttgttaattaatgaaacgaaactggagtcactagagtgcagcagtgaatgaaaggtgggtttgctgagttctct

SEQ ID NO: 182234 - DNA, 120 bp, Artificial Sequence
  ENSG00000111266_58 (sequence is synthesized)
gttttaaaagattataagtaaatactctgctctttcaagtgaaccaaacctatcaaacctgtttagaaaataaaccaggcagaataaaatgatgcgaaatgttcattttaaaaaacttca

SEQ ID NO: 182235 - DNA, 120 bp, Artificial Sequence
  ENSG00000111269_0 (sequence is synthesized)
ggtctcggcggctctccagagcgtctgtaaacacccagagactgtcatggagggggaggaggaggcggcggcggcgaagggaggcgtttggggccgcctccagggtccgctctgccattc

SEQ ID NO: 182236 - DNA, 120 bp, Artificial Sequence
  ENSG00000111269_1 (sequence is synthesized)
ctgaactggtccctcgtccccgtgactctggcatcagggaagcgaactgttaggcgagaggaggaggcagccagaaccatatccccttcttcctcggggcgggggccgggccaggccggc

SEQ ID NO: 182237 - DNA, 120 bp, Artificial Sequence
  ENSG00000111269_2 (sequence is synthesized)
tgagccgggggagggctccgggagggagtgcctggccaggccggcctgtctgccgcgatggatgacagtaaggtggttggaggcaaagtaaagaagcccggtaaacgtggtcggaagcca

SEQ ID NO: 182238 - DNA, 120 bp, Artificial Sequence
  ENSG00000111269_3 (sequence is synthesized)
gccaaaattgacttgaaagcaaaacttgagaggagccggcagagtgcaagagaatgccgagcccgaaaaaagctgagatatcagtatttggaagagttggtatccagtcgagaaagagct

SEQ ID NO: 182239 - DNA, 120 bp, Artificial Sequence
  ENSG00000111269_4 (sequence is synthesized)
atatgtgccctcagagaggaactggaaatgtacaagcagtggtgcatggcaatggaccaaggaaaaatcccttctgaaataaaggccctactcactggagaagagcagaacaaatctcag

SEQ ID NO: 182240 - DNA, 120 bp, Artificial Sequence
  ENSG00000111269_5 (sequence is synthesized)
cagaactcaagcaggcataccaaggctgggaagacagatgctaatagcaattcctggtgaagattatataaagatgagtcagtgattgaagccaatattctgattcccatggaagatgga

SEQ ID NO: 182241 - DNA, 120 bp, Artificial Sequence
  ENSG00000111269_6 (sequence is synthesized)
tgggcaagagtgtacttcttggctccatttactacctactgctcagtagtcatctctgtaaatctgcaatttctaccaaaatgtgtgatcgtagatctcaaaggatcttgctttaacttt

SEQ ID NO: 182242 - DNA, 120 bp, Artificial Sequence
  ENSG00000111269_7 (sequence is synthesized)
caacacttagaaaatctacaaacattcagacctgtctgggttggtattgccacccatgacatttaacatgttgtgatgcttgaaaacacaggagtagagaaaatcgatgaagattgtatt

SEQ ID NO: 182243 - DNA, 120 bp, Artificial Sequence
  ENSG00000111269_8 (sequence is synthesized)
tttgcaccttaactccacattgctttattggttaatttatattctttccatgtaattcatgtaattgtatgtctgtgtgtgttttatgtgtcaccacctttcatgtttttgattgcccta

SEQ ID NO: 182244 - DNA, 120 bp, Artificial Sequence
  ENSG00000111269_9 (sequence is synthesized)
caaagagaaaccaaatgagctgattactgactataagttctcagcctttatggacctaatcttatttttatttacttgagtaatgtttattctctgcatgaaccatgatttctcctgtga

SEQ ID NO: 182245 - DNA, 120 bp, Artificial Sequence
  ENSG00000111269_10 (sequence is synthesized)
gccattccagcataagctgtgaatatgtattaacaaatatatacatttctatttttataatccataaggatatgcctgttttaaataacatacatattaacaatatctatcaggaaaacc

SEQ ID NO: 182246 - DNA, 120 bp, Artificial Sequence
  ENSG00000111269_11 (sequence is synthesized)
ctcaagacagcttctagttaaaacctttgttgctgtcctctcaaactatatttataaaaatttgctagggccaaatccatacttgcagaataattcatcaaattttatttttaagtgaaa

SEQ ID NO: 182247 - DNA, 120 bp, Artificial Sequence
  ENSG00000111269_12 (sequence is synthesized)
agtaacctttcaggcatttcagcagcatacattgacaatctagggtatatatgtatgtatgtttcttattgtatgtctatatatgtatgtggggaggacaggagtgaatgttcacacact

SEQ ID NO: 182248 - DNA, 120 bp, Artificial Sequence
  ENSG00000111269_13 (sequence is synthesized)
tttcttgcgtactcaactaaattggagaatgtttctgaagaaaattggatgaaattagctgctgagattgagtttctgccttaaaatctgaaacaaaaaaagggacaaattgctggtaga

SEQ ID NO: 182249 - DNA, 120 bp, Artificial Sequence
  ENSG00000111269_14 (sequence is synthesized)
tctactgactgtagccatcaccagaacacttagtttcttcccagacatgaatttcctgacaggctctgagccagaaacacactgtgggcgtgcatctggttcagccctggatatgcctcc

SEQ ID NO: 182250 - DNA, 120 bp, Artificial Sequence
  ENSG00000111269_15 (sequence is synthesized)
tgggcctggctgggggtgcagaagggcagggtagttctttccatttccccttgcagctacacttactttctccctgactaccaaatggagtgacggttgaagaatcaagctcataatatg

SEQ ID NO: 182251 - DNA, 120 bp, Artificial Sequence
  ENSG00000111269_16 (sequence is synthesized)
atacacccagacagacccagaaatcttttgatttccccagcgagatacttaccactctctcttctctttcccatggttaaaacaggagttgtgttctctgtcgctgctaaattattcttc

SEQ ID NO: 182252 - DNA, 120 bp, Artificial Sequence
  ENSG00000111269_17 (sequence is synthesized)
acttgagtgaagcaaatatttagcttccaaataaagtatattttgttctgaactggcagtttaagaggagataccgtagtctagattgtctttgaggtagaatatatgatggaccacata

SEQ ID NO: 182253 - DNA, 120 bp, Artificial Sequence
  ENSG00000111269_18 (sequence is synthesized)
gtttaagattacaaggtactttccctcttctctcaggccatgcatttgaataaagtgcctcccttagcctgagctcctaaagacctcttgtacttggttgcaaactcagatctctagtct

SEQ ID NO: 182254 - DNA, 120 bp, Artificial Sequence
  ENSG00000111269_19 (sequence is synthesized)
agtctagtctagtctagtctagtcatgtgtgactgtgtactgagataccactagcccagtttgctgggtctctatgttttggaagttgggggtttaataatatttaatgtctttttagga

SEQ ID NO: 182255 - DNA, 120 bp, Artificial Sequence
  ENSG00000111269_20 (sequence is synthesized)
tcataaacataaataggtttgttgatattcaggccttcagaatttaagggttttaaatatagcattcagattgtaattggtatgtttttgccatctggtccactcaattgtatattttta

SEQ ID NO: 182256 - DNA, 120 bp, Artificial Sequence
  ENSG00000111269_21 (sequence is synthesized)
ttttgcaaaacaacccaaaacttactttatgttgctttgttcagtaccttttgaattcccccagaagagttgttttcaaaacaaacattccagaatgaatgtcgctcttcaatggaacgt

SEQ ID NO: 182257 - DNA, 120 bp, Artificial Sequence
  ENSG00000111269_22 (sequence is synthesized)
ctttattgtgcttgaagtatttcttctctggttgtaattctaaattacagagtcatttgagctttctcccctcccgctagtatctttacaggagcagggaagagcagtagaggatgtata

SEQ ID NO: 182258 - DNA, 120 bp, Artificial Sequence
  ENSG00000111269_23 (sequence is synthesized)
attttgggcgaagttaaattacaatttatttgaggttattcctaaacctatttatttggtgttttggaggagatcacacactaagagaacgttgattgcctcggctattgtgctggctgg

SEQ ID NO: 182259 - DNA, 120 bp, Artificial Sequence
  ENSG00000111269_24 (sequence is synthesized)
acactttggtcacttttgaagcatgttaataaatgtcactgattaaaacagctggagcatttccttccctttccagtgaaggagcagcatagtgaaatcctggcacccctcacctttttg

SEQ ID NO: 182260 - DNA, 120 bp, Artificial Sequence
  ENSG00000111269_25 (sequence is synthesized)
tgatgacaagatggctgacagtcacggagtccaggagaaggtgctgctctccttgctttctgagtaaacagagtaatgttttttttcttattttcccaaagaaagaaaagggggaaaata

SEQ ID NO: 182261 - DNA, 120 bp, Artificial Sequence
  ENSG00000111269_26 (sequence is synthesized)
tatttgtatgtttagaccagccaaattctgtcattattttagtatcaacctgctgtatattagagcaactgaatataatatggaataagtttgaccaggtcaagttttaggatatagttg

SEQ ID NO: 182262 - DNA, 120 bp, Artificial Sequence
  ENSG00000111269_27 (sequence is synthesized)
aatttctttaaaaagttttctattttatctaaaatctttccattatatctaaattagaatgatcatcctgcgcaaattcagattactgtttgctggctaattgacagtatttctcagcat

SEQ ID NO: 182263 - DNA, 120 bp, Artificial Sequence
  ENSG00000111269_28 (sequence is synthesized)
cactatgtagcattctgttttagcatctttgaattatgatcatttgatttggctaattacaaaaagtacaggtttaaactggacttagcttgagttaaaggcaaagaaaatctaaaaaca

SEQ ID NO: 182264 - DNA, 120 bp, Artificial Sequence
  ENSG00000111269_29 (sequence is synthesized)
taaatgttatatttcacaagaaatcagttgcatattatccattacatatttagttttaaaaggaggagtcaccttgaattattttctgagtcaccttgagttatttgatctctcagcctg

SEQ ID NO: 182265 - DNA, 120 bp, Artificial Sequence
  ENSG00000111269_30 (sequence is synthesized)
ctttctcatctgtaaaaaaggggggaggataactttcacagggtaattggtaggctaaataggagttacagaaaactgttaaatagggaagaactacattaaatttaaatattcacatta

SEQ ID NO: 182266 - DNA, 120 bp, Artificial Sequence
  ENSG00000111271_0 (sequence is synthesized)
gtcgtggagattgcttgcgctggggtgccacacttaggctgagctgcaggttttcgcacagtcgcgagttaacctctgcttgctccagaggcctcgtcctaatccacctcggctgacggc

SEQ ID NO: 182267 - DNA, 120 bp, Artificial Sequence
  ENSG00000111271_1 (sequence is synthesized)
gcgggatccctggctccgcgagcctcagcctcaccatgtgtgtcaggagctgtttccagtccccccgtctccagtgggtgtggagaacagccttcctgaaacacacccagcgcaggcacc

SEQ ID NO: 182268 - DNA, 120 bp, Artificial Sequence
  ENSG00000111271_2 (sequence is synthesized)
aggggtcccaccgatggacacaccttggaggcagcacctacagagcggtgattttcgacatgggcggagttctcattccttctccagggagagtcgctgcagaatgggaggtacagaatc

SEQ ID NO: 182269 - DNA, 120 bp, Artificial Sequence
  ENSG00000111271_3 (sequence is synthesized)
gtatcccttctggaactatattaaaggccttgatggaaggtggtgaaaatgggccctggatgagatttatgagagcagaaataacagcagagggttttttacgagaatttgggagacttt

SEQ ID NO: 182270 - DNA, 120 bp, Artificial Sequence
  ENSG00000111271_4 (sequence is synthesized)
gctctgaaatgttaaagacctccgtgcctgtggactcatttttctctctgttgaccagtgagcgagtggcaaagcagttcccagtgatgactgaggccataactcaaattcgggcaaaag

SEQ ID NO: 182271 - DNA, 120 bp, Artificial Sequence
  ENSG00000111271_5 (sequence is synthesized)
gtcttcagactgcagtcttgagcaataatttttatcttcccaaccagaaaagctttttgcccctggaccggaaacagtttgatgtgattgtggagtcctgcatggaagggatctgtaagc

SEQ ID NO: 182272 - DNA, 120 bp, Artificial Sequence
  ENSG00000111271_6 (sequence is synthesized)
cagaccctaggatctacaagctgtgcttggagcagctcggcctgcagccctctgagtccatctttcttgatgaccttggaacaaatctaaaagaagctgccagacttggtattcacacca

SEQ ID NO: 182273 - DNA, 120 bp, Artificial Sequence
  ENSG00000111271_7 (sequence is synthesized)
ttaaggttaatgacccagagactgcagtaaaggaattagaagctctcttgggttttacattgagagtaggtgttccaaacactcggcctgtgaaaaagacgatggaaattccgaaagatt

SEQ ID NO: 182274 - DNA, 120 bp, Artificial Sequence
  ENSG00000111271_8 (sequence is synthesized)
ccttgcagaagtacctcaaagacttactgggtatccagaccacaggcccattggaactacttcagtttgatcacgggcagtcaaatccaacttactacatcaggctggctaatcgtgatc

SEQ ID NO: 182275 - DNA, 120 bp, Artificial Sequence
  ENSG00000111271_9 (sequence is synthesized)
tagttctgaggaagaagcccccagggacactccttccatctgcccatgccatagagagggagttcaggattatgaaagcccttgcaaatgctggagtacctgtccctaacgttcttgatc

SEQ ID NO: 182276 - DNA, 120 bp, Artificial Sequence
  ENSG00000111271_10 (sequence is synthesized)
tctgtgaagattcaagtgtcattggcacccccttctatgtgatggagtactgcccaggtctcatctacaaagacccttccctgccaggcttggagcccagccacagacgagccatataca

SEQ ID NO: 182277 - DNA, 120 bp, Artificial Sequence
  ENSG00000111271_11 (sequence is synthesized)
ctgccatgaacacagtcctgtgcaaaattcacagtgtggatctgcaggctgtgggacttgaagactatgggaagcaaggggactatattccacgccaggtacgaacctgggttaagcagt

SEQ ID NO: 182278 - DNA, 120 bp, Artificial Sequence
  ENSG00000111271_12 (sequence is synthesized)
atcgagcttccgaaactagcaccatcccagccatggagaggctgatcgaatggctgcccctccatcttccccgtcagcagaggaccacagtggtgcacggggacttcaggctcgacaacc

SEQ ID NO: 182279 - DNA, 120 bp, Artificial Sequence
  ENSG00000111271_13 (sequence is synthesized)
tggtgtttcatccagaagagccagaggtgcttgctgtccttgactgggaactttctaccttgggcgacccccttgctgatgtggcctacagctgcctggctcattacctgccatccagtt

SEQ ID NO: 182280 - DNA, 120 bp, Artificial Sequence
  ENSG00000111271_14 (sequence is synthesized)
ttcccgtgctgagaggtattaatgactgtgacttgacacagctgggaatccctgctgcagaggagtatttcaggatgtactgtctccaaatggggctccctcccactgagaactggaact

SEQ ID NO: 182281 - DNA, 120 bp, Artificial Sequence
  ENSG00000111271_15 (sequence is synthesized)
tctatatggctttttcctttttccgtgtggctgcaatcctacagggagtctacaagcgatcactcacagggcaagcaagctccacatatgcggaacaaactggaaagctgaccgaatttg

SEQ ID NO: 182282 - DNA, 120 bp, Artificial Sequence
  ENSG00000111271_16 (sequence is synthesized)
tgccccacaggcagcaggagttatagctccgttccagaagcttccccagctcatacctcaaggggaggtctggttatctctccagagagcctctctccacctgtcagagagctgtatcac

SEQ ID NO: 182283 - DNA, 120 bp, Artificial Sequence
  ENSG00000111271_17 (sequence is synthesized)
cggctgaagcacttcatggagcaacgtgtgtaccctgcagagccagagctgcagagtcaccaggcctcagcagccaggtggagcccctccccactgatcgaagacctcaaggagaaagcc

SEQ ID NO: 182284 - DNA, 120 bp, Artificial Sequence
  ENSG00000111271_18 (sequence is synthesized)
aaagctgaaggactttggaaccttttcctacccttagaggctgatcccgagaaaaaatacggagcaggactgaccaatgtggaatatgcacatctgtgtgagctcatgggcacgtccctg

SEQ ID NO: 182285 - DNA, 120 bp, Artificial Sequence
  ENSG00000111271_19 (sequence is synthesized)
tatgcccccgaggtatgtaactgctctgcgcctgacacgggcaacatggagctgctggtgaggtatggcaccgaagcgcagaaggctcgctggctgattcctctgctggaggggaaagcc

SEQ ID NO: 182286 - DNA, 120 bp, Artificial Sequence
  ENSG00000111271_20 (sequence is synthesized)
cgctcctgttttgctatgaccgagccccaggttgcctcttcagatgccaccaacattgaggcttccatcagagaggaggacagcttctatgtcataaacggtcacaaatggtggatcaca

SEQ ID NO: 182287 - DNA, 120 bp, Artificial Sequence
  ENSG00000111271_21 (sequence is synthesized)
ggcatcctggatcctcgttgccaactctgtgtgtttatgggaaaaacagacccacatgcaccaagacaccggcagcagtctgtgctcttggttcccatggataccccagggataaaaatc

SEQ ID NO: 182288 - DNA, 120 bp, Artificial Sequence
  ENSG00000111271_22 (sequence is synthesized)
atccggcctctgacggtgtatggactggaagatgcaccaggtggccatggtgaagtccgatttgagcacgtgcgtgtgcccaaagagaacatggtcctgggccctggccgaggctttgag

SEQ ID NO: 182289 - DNA, 120 bp, Artificial Sequence
  ENSG00000111271_23 (sequence is synthesized)
atcgcccagggcagactgggccccggcaggatccatcactgcatgaggctgatcgggttctcagagagggccctggcactcatgaaggcccgcgtgaagtcccgcttggcttttgggaag

SEQ ID NO: 182290 - DNA, 120 bp, Artificial Sequence
  ENSG00000111271_24 (sequence is synthesized)
cccctggtggagcagggcacagtgctggcggacatcgcgcagtcgcgcgtggagattgagcaggcacggctgctggtgctgagagctgcccacctcatggacctggcaggaaacaaggct

SEQ ID NO: 182291 - DNA, 120 bp, Artificial Sequence
  ENSG00000111271_25 (sequence is synthesized)
gcagccttggatatagccatgattaaaatggtcgccccgtccatggcctcccgagtgattgatcgtgcgattcaggcctttggagcagcaggcctgagcagcgactacccactggctcag

SEQ ID NO: 182292 - DNA, 120 bp, Artificial Sequence
  ENSG00000111271_26 (sequence is synthesized)
ttcttcacctgggcccgagccctgcgctttgccgacggccctgacgaggtgcaccgggccacggtggccaagctagagctgaagcaccgcatttagagccttggggctgcagtggctcaa

SEQ ID NO: 182293 - DNA, 120 bp, Artificial Sequence
  ENSG00000111271_27 (sequence is synthesized)
tgtcctggctggtccagctgtgcccagatctgtcactgatgtgcctcgaaagatccggtgtttgtggctcctgcaccctgctcagcagctctgtcccgggacagtcagggtggactcaat

SEQ ID NO: 182294 - DNA, 120 bp, Artificial Sequence
  ENSG00000111271_28 (sequence is synthesized)
ctttctggttctccacagaagacgtctctgcaagaagcctggagtctgtttcaggccaggaggaggggatttgctgagggccaagggggttctgggacagagtctggaaagctggtcttc

SEQ ID NO: 182295 - DNA, 120 bp, Artificial Sequence
  ENSG00000111271_29 (sequence is synthesized)
aggctctcagtcccaggctgggcaggcacggtcacttcacttcagcctttcagtccctctctctctgcctgtgggaatctggacacattttgggaggcctcccaaggctgtgggacgtgc

SEQ ID NO: 182296 - DNA, 120 bp, Artificial Sequence
  ENSG00000111271_30 (sequence is synthesized)
ttgctctggcagctgcagggttcctgtctggcctccctggtgagcagaggggcggccacggcgggcggtggcctagagacccaggacctgggcgcctgggaaaatggaatgcaacccaca

SEQ ID NO: 182297 - DNA, 120 bp, Artificial Sequence
  ENSG00000111271_31 (sequence is synthesized)
ttgtaaagccactggcatctgattatctccatttgaacacacagcacagaacaatcatttaaatgttattttggaaaggggttttggggacacagaagaataagtaaacacatctcggag

SEQ ID NO: 182298 - DNA, 120 bp, Artificial Sequence
  ENSG00000111271_32 (sequence is synthesized)
gatgtttttgctattgcactttcaagctacaggagagaaaagcccatatgctaacacaaattccaatttgttaaagacaaataaaatttgggtaggagggaaaagaaactttatcacaac

SEQ ID NO: 182299 - DNA, 120 bp, Artificial Sequence
  ENSG00000111271_33 (sequence is synthesized)
ctctcccagaagttctcagatatttaagttatcctgcaagataagtatatgcctgctttagggataattggtagaaaacatcttttttaacattcaaaaaatacatattaatctagtttc

SEQ ID NO: 182300 - DNA, 83 bp, Artificial Sequence
  ENSG00000111271_34 (sequence is synthesized)
cttatagaaaagtcaaaagaagttacagtgatctcccgttatacctttcatctagactcactattaatgtctggccatgtttg

SEQ ID NO: 182301 - DNA, 120 bp, Artificial Sequence
  ENSG00000111271_35 (sequence is synthesized)
cctttcatctagactcactattaatgtctggccatgtttggttttctctatacacgagtgtatatagcctcagcctcaccatgtgtgtcaggagctgtttccagtccccccgtctccagt

SEQ ID NO: 182302 - DNA, 120 bp, Artificial Sequence
  ENSG00000111271_36 (sequence is synthesized)
aggtgagctattgattctgtttcactttgtgggactagagtggtggtgggagaatggagggtgatcgggaaggcagaggggaacacttgggcagcagtgtgtcccagcaggccatgctct

SEQ ID NO: 182303 - DNA, 120 bp, Artificial Sequence
  ENSG00000111271_37 (sequence is synthesized)
ggctctcgagtcgaattccaagcaccactagggggctgagtgtcttgggcgcatgattcagcttctccaaatcttactttcctcatcattaaatgagctaatggtagtgccttcctcctt

SEQ ID NO: 182304 - DNA, 120 bp, Artificial Sequence
  ENSG00000111271_38 (sequence is synthesized)
caggttgcctcttcagatgccaccaacattgaggcttccatcagagaggaggacagcttctatgtcataaacggtcacaaatggtggatcacagggcagggacgtcccccggtgcccaca

SEQ ID NO: 182305 - DNA, 120 bp, Artificial Sequence
  ENSG00000111271_39 (sequence is synthesized)
ggagctcaggcacccgggcacagaggggatgggagggtggggagccaagcctaaagggcaaacagaccacgcagaatccaccctagccggcagttttcttagtgctgtctctattcctcc

SEQ ID NO: 182306 - DNA, 120 bp, Artificial Sequence
  ENSG00000111271_40 (sequence is synthesized)
tgaatgatctttgcttccatcgtctcagaaagagccagctcttcatgactcagtttccatctcttgctcttgctgtgcctgtgtcacaggcagatggctcaggtgtgactgcacagccca

SEQ ID NO: 182307 - DNA, 120 bp, Artificial Sequence
  ENSG00000111271_41 (sequence is synthesized)
ggcagtggaatgcttggccttagaaagccagggcaggttaggcctatctgatgggtatttgaattatgtaaatttgaaacagtgctgtatcagctaataaatctctctctagagaacccg

SEQ ID NO: 182308 - DNA, 120 bp, Artificial Sequence
  ENSG00000111271_42 (sequence is synthesized)
taatatcacagctagagggccagatccactgtgagctgagtttctgtgttgtctcccagtgctgtcacttcagctgataaacagaaacacccgctgttccttatcacgtgaaccttggat

SEQ ID NO: 182309 - DNA, 120 bp, Artificial Sequence
  ENSG00000111271_43 (sequence is synthesized)
ttccttatcacgtgaaccttggattgtgttagttttgaaattacttgagatcttcaggagcataatgcaatcatcatctacttttctttttttctctttttttttgagacggagtcttgc

SEQ ID NO: 182310 - DNA, 120 bp, Artificial Sequence
  ENSG00000111271_44 (sequence is synthesized)
tgtcatcacatgttaacatccctatgatgggtcgtgtgggagtaatcactgtttttctttgattctgcttagggcaagcaagctccacatatgcggaacaaactggaaagctgaccgaat

SEQ ID NO: 182311 - DNA, 120 bp, Artificial Sequence
  ENSG00000111271_45 (sequence is synthesized)
atgtttttattcatggagcaggagctggcaggaaggacaaaattggacacctgcacaaactgagaaaattactgtggtataaaatgaatggcctttgacaaactgtagtggcatgtgatc

SEQ ID NO: 182312 - DNA, 120 bp, Artificial Sequence
  ENSG00000111271_46 (sequence is synthesized)
cagggacattgccagcagataacccagactgaggctgcagccttggatatagccatgattaaaatggtcgccccgtccatggcctcccgagtgattgatcgtgcgattcaggtgccacag

SEQ ID NO: 182313 - DNA, 120 bp, Artificial Sequence
  ENSG00000111271_47 (sequence is synthesized)
ggaagtccgggaagatggttgttatgggccatcaagagcaggctatcattcctggggctctcggagacaagggctgacccagggccgcctccctccactctgtgtctgccaggcctttgg

SEQ ID NO: 182314 - DNA, 120 bp, Artificial Sequence
  ENSG00000111271_48 (sequence is synthesized)
ctttgggcagctccccttccttggtggcttcctggctcctcgatcaggctgtttcctgccgtccttttccctttaaccatgtcccagtaagaaggctaaataaagggcagggacattgcc

SEQ ID NO: 182315 - DNA, 120 bp, Artificial Sequence
  ENSG00000111271_49 (sequence is synthesized)
agcagataacccagactgaggtgaggaataaacacatccaaggaaaatgactatggctattgctcacagtgatcgtttgggtctttcaggtggccatggtgaagtccgatttgagcacgt

SEQ ID NO: 182316 - DNA, 120 bp, Artificial Sequence
  ENSG00000111271_50 (sequence is synthesized)
caggaagtggaccccaaacctactcttccaggccccagtgtgaacagctgacctctaggccacagccctggtttggtccgctcccagtttggttctctgctaatagtgttcacattttta

SEQ ID NO: 182317 - DNA, 120 bp, Artificial Sequence
  ENSG00000111271_51 (sequence is synthesized)
ctttcagtgttttcataggatcactacattgtcacaaaccactaggagcttcagcttaaggtggcattattatgtttttataaaaggaatcacagaatagtcatttgccattataaatca

SEQ ID NO: 182318 - DNA, 120 bp, Artificial Sequence
  ENSG00000111271_52 (sequence is synthesized)
ggtgactagatggtgggattctaggtgctcttactgtcttctctttttttgttctgaaaacaggtagtttttctgccatgagataaattatttgtgtagattgtttttagtgaaaaaaaa

SEQ ID NO: 182319 - DNA, 120 bp, Artificial Sequence
  ENSG00000111271_53 (sequence is synthesized)
tggttcatgcctgtaatcccaacacttggggagaccaaggcaggaggattgcctgagtctaagagtttgagaccagtctgggcaatgtagtgagaccctgtctctacaaaaaattggaaa

SEQ ID NO: 182320 - DNA, 120 bp, Artificial Sequence
  ENSG00000111271_54 (sequence is synthesized)
agtgagaccctgtctctacaaaaaattggaaagttagctagatgtggtggttcttgcctgtggtcccagctactcaggtggctgaggtaggaagattgcttgagcccgggaggcggaggt

SEQ ID NO: 182321 - DNA, 90 bp, Artificial Sequence
  ENSG00000111271_55 (sequence is synthesized)
agatcacgccactgcactccagcctgcgcaacaaagtgagaccccgtctccaaaaaaataataaaaaaaagaaggggaatacttagaacc

SEQ ID NO: 182322 - DNA, 120 bp, Artificial Sequence
  ENSG00000111271_56 (sequence is synthesized)
aaccttttctgatgccttgtgactttcagaatttaaaatcccccttgcagataaggccacccacggcggaaggccgggagcgagacggggctgaggggaccttgctcccattggagctgc

SEQ ID NO: 182323 - DNA, 120 bp, Artificial Sequence
  ENSG00000111271_57 (sequence is synthesized)
agggcaggaaggggtgctgcggtcagcagagggcacccttcgcctgcgccgtgtgcagtgcctgcagtcactccctcattcccaggagtagccttgggtcagatgctggctcagatctat

SEQ ID NO: 182324 - DNA, 120 bp, Artificial Sequence
  ENSG00000111271_58 (sequence is synthesized)
aactgctcctgtctggtagccaggcctgcccagatgtgcaatggctggaataaagggttcttggaagcaatttgttacaggcaccctgtgggctgtggctggctgtggcacacgtgaagg

SEQ ID NO: 182325 - DNA, 120 bp, Artificial Sequence
  ENSG00000111271_59 (sequence is synthesized)
ttgtgtgtcagacctactccctggacatggcgcatggctgcacacaggcaccttggctgagaagatgcacagtcctggtttcactctcctcccctgccctgtcctgtctgcttccaccca

SEQ ID NO: 182326 - DNA, 120 bp, Artificial Sequence
  ENSG00000111271_60 (sequence is synthesized)
catcaatactagatgccaaactctcctatcttcagccgcccagcctcccatagaccctggcagatgccctgtgtcacccactcaccatgcatgcaactttccttttcctcttcagaatga

SEQ ID NO: 182327 - DNA, 120 bp, Artificial Sequence
  ENSG00000111271_61 (sequence is synthesized)
cccagcaaggtgggaggtgccatcgtacccccattttgaatgtgaggaaacaggcacagaaaagtgaagtgacttgtccaggtcactgagcttgcaagtagctgacctcaaattcacatg

SEQ ID NO: 182328 - DNA, 120 bp, Artificial Sequence
  ENSG00000111271_62 (sequence is synthesized)
aacttgggttttcataagcccagagcccaggctctttcccatgcaggggggccgcctccttagatcctaacccccggccccagcacagggcagaaggcacctgcagagtgggcctgggga

SEQ ID NO: 182329 - DNA, 120 bp, Artificial Sequence
  ENSG00000111271_63 (sequence is synthesized)
ttttacatttgtagctctagctttccttagggtttccccctgtgtttccatagtcatcttattttgtgttaattatgaaatctatgtgactagctgcttgtattttcaatgggaagcaag

SEQ ID NO: 182330 - DNA, 120 bp, Artificial Sequence
  ENSG00000111271_64 (sequence is synthesized)
acaaacaggtactgcgaaggcaggttgagaaaagagatgggaaaggaggtgaatggcaggcttaagacctttgtgggggtgttcacactgtcctcatgatccagtgatgctgccttaagt

SEQ ID NO: 182331 - DNA, 120 bp, Artificial Sequence
  ENSG00000111271_65 (sequence is synthesized)
ttcaattcctacctgttttctgagtgcagtcctagcaggtgaagcaaggtgatgtccttgccaagaagttgcattcctgtctgctttgcatctgctactttgctgcagtttggattcaga

SEQ ID NO: 182332 - DNA, 120 bp, Artificial Sequence
  ENSG00000111271_66 (sequence is synthesized)
gcagaatggaccccactctgtcgaggtgacctgaagggaaacgccaggctctgtagcagcagaggcaaggttccaaggtgtaaaggtcatgctgctagcacattattaaaaatcagtctg

SEQ ID NO: 182333 - DNA, 120 bp, Artificial Sequence
  ENSG00000111271_67 (sequence is synthesized)
ggtgcaatggctcacagctataatcccagtactttgggaggtctaggtaggagggttgcttgaagccaagcatttgagaccagcctaggcgaaaaagagagactcagtctctacaaaaaa

SEQ ID NO: 182334 - DNA, 120 bp, Artificial Sequence
  ENSG00000111275_0 (sequence is synthesized)
gagaccctagctctgctctcggtccgctcgctgtccgctagcccgctgcgatgttgcgcgctgccgcccgcttcgggccccgcctgggccgccgcctcttgtcagccgccgccacccagg

SEQ ID NO: 182335 - DNA, 120 bp, Artificial Sequence
  ENSG00000111275_1 (sequence is synthesized)
ccgtgcctgcccccaaccagcagcccgaggtcttctgcaaccagattttcataaacaatgaatggcacgatgccgtcagcaggaaaacattccccaccgtcaatccgtccactggagagg

SEQ ID NO: 182336 - DNA, 120 bp, Artificial Sequence
  ENSG00000111275_2 (sequence is synthesized)
tcatctgtcaggtagctgaaggggacaaggaagatgtggacaaggcagtgaaggccgcccgggccgccttccagctgggctcaccttggcgccgcatggacgcatcacacaggggccggc

SEQ ID NO: 182337 - DNA, 120 bp, Artificial Sequence
  ENSG00000111275_3 (sequence is synthesized)
tgctgaaccgcctggccgatctgatcgagcgggaccggacctacctggcggccttggagaccctggacaatggcaagccctatgtcatctcctacctggtggatttggacatggtcctca

SEQ ID NO: 182338 - DNA, 120 bp, Artificial Sequence
  ENSG00000111275_4 (sequence is synthesized)
aatgtctccggtattatgccggctgggctgataagtaccacgggaaaaccatccccattgacggagacttcttcagctacacacgccatgaacctgtgggggtgtgcgggcagatcattc

SEQ ID NO: 182339 - DNA, 120 bp, Artificial Sequence
  ENSG00000111275_5 (sequence is synthesized)
cgtggaatttcccgctcctgatgcaagcatggaagctgggcccagccttggcaactggaaacgtggttgtgatgaaggtagctgagcagacacccctcaccgccctctatgtggccaacc

SEQ ID NO: 182340 - DNA, 120 bp, Artificial Sequence
  ENSG00000111275_6 (sequence is synthesized)
tgatcaaggaggctggctttccccctggtgtggtcaacattgtgcctggatttggccccacggctggggccgccattgcctcccatgaggatgtggacaaagtggcattcacaggctcca

SEQ ID NO: 182341 - DNA, 120 bp, Artificial Sequence
  ENSG00000111275_7 (sequence is synthesized)
ctgagattggccgcgtaatccaggttgctgctgggagcagcaacctcaagagagtgaccttggagctgggggggaagagccccaacatcatcatgtcagatgccgatatggattgggccg

SEQ ID NO: 182342 - DNA, 120 bp, Artificial Sequence
  ENSG00000111275_8 (sequence is synthesized)
tggaacaggcccacttcgccctgttcttcaaccagggccagtgctgctgtgccggctcccggaccttcgtgcaggaggacatctatgatgagtttgtggagcggagcgttgcccgggcca

SEQ ID NO: 182343 - DNA, 120 bp, Artificial Sequence
  ENSG00000111275_9 (sequence is synthesized)
agtctcgggtggtcgggaacccctttgatagcaagaccgagcaggggccgcaggtggatgaaactcagtttaagaagatcctcggctacatcaacacggggaagcaagagggggcgaagc

SEQ ID NO: 182344 - DNA, 120 bp, Artificial Sequence
  ENSG00000111275_10 (sequence is synthesized)
tgctgtgtggtgggggcattgctgctgaccgtggttacttcatccagcccactgtgtttggagatgtgcaggatggcatgaccatcgccaaggaggagatcttcgggccagtgatgcaga

SEQ ID NO: 182345 - DNA, 120 bp, Artificial Sequence
  ENSG00000111275_11 (sequence is synthesized)
tcctgaagttcaagaccatagaggaggttgttgggagagccaacaattccacgtacgggctggccgcagctgtcttcacaaaggatttggacaaggccaattacctgtcccaggccctcc

SEQ ID NO: 182346 - DNA, 120 bp, Artificial Sequence
  ENSG00000111275_12 (sequence is synthesized)
aggcgggcactgtgtgggtcaactgctatgatgtgtttggagcccagtcaccctttggtggctacaagatgtcggggagtggccgggagttgggcgagtacgggctgcaggcatacactg

SEQ ID NO: 182347 - DNA, 120 bp, Artificial Sequence
  ENSG00000111275_13 (sequence is synthesized)
aagtgaaaactgtcacagtcaaagtgcctcagaagaactcataagaatcatgcaagcttcctccctcagccattgatggaaagttcagcaagatcagcaacaaaaccaagaaaaatgatc

SEQ ID NO: 182348 - DNA, 120 bp, Artificial Sequence
  ENSG00000111275_14 (sequence is synthesized)
cttgcgtgctgaatatctgaaaagagaaatttttcctacaaaatctcttgggtcaagaaagttctagaatttgaattgataaacatggtgggttggctgagggtaagagtatatgaggaa

SEQ ID NO: 182349 - DNA, 120 bp, Artificial Sequence
  ENSG00000111275_15 (sequence is synthesized)
ccttttaaacgacaacaatactgctagctttcaggatgatttttaaaaaatagattcaaatgtgttatcctctctctgaaacgcttcctataactcgagtttataggggaagaaaaagct

SEQ ID NO: 182350 - DNA, 120 bp, Artificial Sequence
  ENSG00000111275_16 (sequence is synthesized)
attgtttacaattatatcaccattaaggcaactgctacaccctgctttgtattctgggctaagattcattaaaaactagctgctcttaacttactgggtaactctttgtccatctcaata

SEQ ID NO: 182351 - DNA, 63 bp, Artificial Sequence
  ENSG00000111275_17 (sequence is synthesized)
ggccaacgtagtgaaaccctgtctctcactaaaaatacacaaattaggcaggttgaacctggg

SEQ ID NO: 182352 - DNA, 120 bp, Artificial Sequence
  ENSG00000111275_18 (sequence is synthesized)
atcatgccactgcactccagcctgggagtcagagcgagactccatctcaaaaaaagtaaataaatgaaatagcctaaggaaatgctggcaggcagtaatgatatggcacactggatatga

SEQ ID NO: 182353 - DNA, 120 bp, Artificial Sequence
  ENSG00000111275_19 (sequence is synthesized)
atgatttctgcccctcctctgctgtgggtaaacagcttctgtttcatgcatttacttttttattttaattacaccaataagaatgtgcttgaatgtttcatgcatttaatttgtttcatg

SEQ ID NO: 182354 - DNA, 120 bp, Artificial Sequence
  ENSG00000111275_20 (sequence is synthesized)
catttaacttctggcctgtttacctgtagcaggctctgagatgtgctctagagacagaacctaaacatgatgcccaagagaggggagagatactgaatgtccaatgttctcaaatttttt

SEQ ID NO: 182355 - DNA, 85 bp, Artificial Sequence
  ENSG00000111275_21 (sequence is synthesized)
tgcctcgacctcctgggctcaaatgatcctcctgcttcagcttcctgggctaatgtttgtattttttgtggagatgggactttgt

SEQ ID NO: 182356 - DNA, 120 bp, Artificial Sequence
  ENSG00000111275_22 (sequence is synthesized)
tgggctcaaatgatcctcctgcttcagcttcctgggctaatgtttgtattttttgtggagatgggactttgttatgttgcccaggctgttttcaaactcctggactcaagtgatcctccc

SEQ ID NO: 182357 - DNA, 120 bp, Artificial Sequence
  ENSG00000111275_23 (sequence is synthesized)
tgtgagccactgtgcccaattcagttctcagtaaaaacttgatcaggccaaatgaaagtgacatgggccaatttcataatagattgatttggaaaccagatgtcaatttacttactttaa

SEQ ID NO: 182358 - DNA, 120 bp, Artificial Sequence
  ENSG00000111275_24 (sequence is synthesized)
tacttactttaagtgagatctgtatcttcagtaaccagacctcttgagtctcccacccagaacactatcttcctctagtcaagatacctggcaaaggccgggcacagtggctcacgccta

SEQ ID NO: 182359 - DNA, 120 bp, Artificial Sequence
  ENSG00000111275_25 (sequence is synthesized)
agagagaaactccgtctcaaaatataaataaataagaaaaagaagaaatggaagctgggttcaagagggcaatcagcagtctctaccatcatgtgaaacaccactctgtgatttgagtct

SEQ ID NO: 182360 - DNA, 87 bp, Artificial Sequence
  ENSG00000111275_26 (sequence is synthesized)
tttgccatgttggccaggctggtgttgaaggcctgacctcaggtaatccacccacctctgcctcccagagtacaactgtagggacca

SEQ ID NO: 182361 - DNA, 86 bp, Artificial Sequence
  ENSG00000111275_27 (sequence is synthesized)
taaaagaaaagacagctgggcttgggggaccactaccaccaagaggcggagaccggtagaggccccgaatgtctggctgcactgtt

SEQ ID NO: 182362 - DNA, 70 bp, Artificial Sequence
  ENSG00000111275_28 (sequence is synthesized)
cttccctgcctggcagccaaggcagagatagacagggagagagagagacagcttacgccattatttctgc

SEQ ID NO: 182363 - DNA, 60 bp, Artificial Sequence
  ENSG00000111275_29 (sequence is synthesized)
aggagcgtgaccactgaagcacagcacgtctgtgatctagatctagtataactcttgttg

SEQ ID NO: 182364 - DNA, 67 bp, Artificial Sequence
  ENSG00000111275_30 (sequence is synthesized)
gcacctggatggcttgccgcccacagccaacaatgtgttttcaatatgctccccaaactacagcaaa

SEQ ID NO: 182365 - DNA, 120 bp, Artificial Sequence
  ENSG00000111275_31 (sequence is synthesized)
caacaatgtgttttcaatatgctccccaaactacagcaaactcctcttaactcgggatttagggtgatgccctacttatgcctaactttatcaccagcttaaccctcatctcattatata

SEQ ID NO: 182366 - DNA, 120 bp, Artificial Sequence
  ENSG00000111275_32 (sequence is synthesized)
tatcaccagcttaaccctcatctcattatataggatgatattacttctaggaagattttctatgtatggagggtgcatcatttaagagtattttaggccaggcactgtggctcatgcctg

SEQ ID NO: 182367 - DNA, 64 bp, Artificial Sequence
  ENSG00000111275_33 (sequence is synthesized)
aaaatacaaaaattagctgagcgtggtgatgtgtgcctgtggtcccagttactctggaggctga

SEQ ID NO: 182368 - DNA, 120 bp, Artificial Sequence
  ENSG00000111275_34 (sequence is synthesized)
agagtgagaccccatctctgaaaaaaacacaaaaaacaagaaaagaatactgcaaagaaccttggtaggggtgaattggaaaaagtagagaaatgtaatatttctttcctgctgtactca

SEQ ID NO: 182369 - DNA, 120 bp, Artificial Sequence
  ENSG00000111275_35 (sequence is synthesized)
ctgtaactgtgagaggatcggctcttttaaccaacagataagaaaggaaatattagctatgaagaaatgtctatcaagttgattttgacaacctagacacattaatctccttgcactttt

SEQ ID NO: 182370 - DNA, 120 bp, Artificial Sequence
  ENSG00000111275_36 (sequence is synthesized)
agtgacaggaacccattagaaccttaagcagctgtctgaagtaaaaacaaagctctcaggtgatgaaccacctaatctccctgggtattcggatgtgggtcagtcacaggagtattaggt

SEQ ID NO: 182371 - DNA, 120 bp, Artificial Sequence
  ENSG00000111275_37 (sequence is synthesized)
gtaaagccgctgcttctgggtagagcctccacttgtggctgcacagagggcacagagagcttttccttcagcccggagaagcttcctaagtgtgggcgccaccttgtgggacatacattg

SEQ ID NO: 182372 - DNA, 120 bp, Artificial Sequence
  ENSG00000111275_38 (sequence is synthesized)
aactacgacgctatttctccaagaattaacaggacagcccctcccaccggtgtccttccaacgatgttgcatacaatttggctgtacatttggcaggcagtgtaatgagggaatcaaaga

SEQ ID NO: 182373 - DNA, 120 bp, Artificial Sequence
  ENSG00000111275_39 (sequence is synthesized)
ccaggatcacatactggaaagaattgaaaacagagactcccaacaaaaacttgtacacggacgttcacagcagcactattcacgacagctcagagatggaatcaacccaaatatcagtca

SEQ ID NO: 182374 - DNA, 120 bp, Artificial Sequence
  ENSG00000111275_40 (sequence is synthesized)
atagatgaatggacagacaaaatgtgacatatccatgcagtggaatattatttagccataaaaaggaaggaagtgctgatgcatgttgcgatgtggatgaaccttgaaaacatgatgctg

SEQ ID NO: 182375 - DNA, 120 bp, Artificial Sequence
  ENSG00000111275_41 (sequence is synthesized)
agtgaaagaagccagacacaaaaggagaaggactgtatgatttcacttataggaaatatccagaacaggcaaatctatatagagagaaggtcgattgctgggggccctgggaagggacca

SEQ ID NO: 182376 - DNA, 120 bp, Artificial Sequence
  ENSG00000111275_42 (sequence is synthesized)
agggggagtgacttctaatggtggggtgcccttttggggtgatgaaaatgttttggaaccagatacaggtggtggttgtacaacattgtgaatttactaaatgcaaccaaattgctcact

SEQ ID NO: 182377 - DNA, 61 bp, Artificial Sequence
  ENSG00000111275_43 (sequence is synthesized)
caacattgtgaatttactaaatgcaaccaaattgctcacttaaaaacaacaaattcaggcc

SEQ ID NO: 182378 - DNA, 88 bp, Artificial Sequence
  ENSG00000111275_44 (sequence is synthesized)
caaaaaaaaaaaaaaaaaaaagtggccaggtggtgccatactgaggcgggtggattacctgaggccaggagttcgagatcagcctggc

SEQ ID NO: 182379 - DNA, 78 bp, Artificial Sequence
  ENSG00000111275_45 (sequence is synthesized)
tcgagatcagcctggccaacatgatgaaaacccatctctgctaaaaatacaaaaaattggctgggcttggtagcatgt

SEQ ID NO: 182380 - DNA, 76 bp, Artificial Sequence
  ENSG00000111275_46 (sequence is synthesized)
atgctatgttatgtgaatttcacctcaactgaaaaaaacagggtcccagagctggtcaggggaacttggacaaacc

SEQ ID NO: 182381 - DNA, 120 bp, Artificial Sequence
  ENSG00000111275_47 (sequence is synthesized)
aacagggtcccagagctggtcaggggaacttggacaaaccacacaacttctgagcttccatttcctcacaatctctgcagtcacttccaactctcatttggcttattctgtgaaggataa

SEQ ID NO: 182382 - DNA, 120 bp, Artificial Sequence
  ENSG00000111275_48 (sequence is synthesized)
aacagagctgacatttgttcatttgtattgattttatttacatttttcaaaaggaaatagatgcagatggtatagaaagtttcagtgaaatgtaaatctgatgcccaatcctgtggcccc

SEQ ID NO: 182383 - DNA, 120 bp, Artificial Sequence
  ENSG00000111275_49 (sequence is synthesized)
aagaagtattaactgtgcacccactacatgccaggaactgtacttggagccttctcaagagcttcttaacaatattttcattttttatattttttaatgacagggtctaactccgtcgtc

SEQ ID NO: 182384 - DNA, 82 bp, Artificial Sequence
  ENSG00000111275_50 (sequence is synthesized)
ctctacctcctaggctactacaagcatgtgccaccacagtcagctaattatttttggagagtcagggtttcactatgtagct

SEQ ID NO: 182385 - DNA, 120 bp, Artificial Sequence
  ENSG00000111275_51 (sequence is synthesized)
gctaattatttttggagagtcagggtttcactatgtagctcaggctggtcttcagctcctggcttgaagtgatcctcctgccttggcacatagaaggggttacaatatacatatattaga

SEQ ID NO: 182386 - DNA, 120 bp, Artificial Sequence
  ENSG00000111275_52 (sequence is synthesized)
gtgagagcatagatgtgatgcctggcgatatggcttacttatgagacagcacctgacctacagccatctatgactcctactgtatcttccatgccaggagtaagggtgaggatacctggc

SEQ ID NO: 182387 - DNA, 86 bp, Artificial Sequence
  ENSG00000111275_53 (sequence is synthesized)
tgtatcttccatgccaggagtaagggtgaggatacctggcaataataaaaataataacctgagagtctaatggctttaggctggtc

SEQ ID NO: 182388 - DNA, 120 bp, Artificial Sequence
  ENSG00000111275_54 (sequence is synthesized)
ctgagtagctgggattataggcgtgcactaccatgcatatatatatatatttttttttttttttgagagagagagagagagatggagtcttgctatgttgctcaggctggtctcgaactc

SEQ ID NO: 182389 - DNA, 120 bp, Artificial Sequence
  ENSG00000111275_55 (sequence is synthesized)
ctggcctcaagtcatcctgctggcttggcctctcaagtgctaggattacaggcatgagacactgggcacagccctaatagcttatttttaaagctatatcaaaatgtcatgcacctgaac

SEQ ID NO: 182390 - DNA, 120 bp, Artificial Sequence
  ENSG00000111275_56 (sequence is synthesized)
atttgaagtaacctctctgatagtacggatatttatcccctcaaaatctcatgttaaaatgtaatcttcagtgttggaggtggggcaaggtgtgaggtgttaggatcatgggggtggatc

SEQ ID NO: 182391 - DNA, 120 bp, Artificial Sequence
  ENSG00000111275_57 (sequence is synthesized)
cctcatgaatggcttggtgtcctcccccatggtaatgagttcactcaagagctggttgtttaaaaggtgacgtggacctaatccctgttggactgaacaaaaggggacgaacacagcaat

SEQ ID NO: 182392 - DNA, 120 bp, Artificial Sequence
  ENSG00000111275_58 (sequence is synthesized)
aaagataaagaccaaagagtatatttggaagaaggggtcagggggctccttgcttctagtgaaaaagggccctgagctttagtgccctttgtatttattgggtaaaggagatagggagaa

SEQ ID NO: 182393 - DNA, 120 bp, Artificial Sequence
  ENSG00000111275_59 (sequence is synthesized)
gggggggtggttgtcggtcagcagcttgattcacagcaggctcacaagattgcattctttgaacagtaggctctagatgtctcagtagataacctcaaagagcatggcgccagggagtga

SEQ ID NO: 182394 - DNA, 120 bp, Artificial Sequence
  ENSG00000111275_60 (sequence is synthesized)
ataacctcaaagagcatggcgccagggagtgattgccctcagcgaaccttctggcggctgaagcagaagtgagtttgcccacattctgcatttatgataaacagtttgctgtttgatcat

SEQ ID NO: 182395 - DNA, 120 bp, Artificial Sequence
  ENSG00000111275_61 (sequence is synthesized)
cccatgggcattcagctctctacatttccccctttctgtttatgaattaattgaaagaatgtaaggccaggctgggcagctctcattttctgattggcagtccatccaattttacagact

SEQ ID NO: 182396 - DNA, 120 bp, Artificial Sequence
  ENSG00000111275_62 (sequence is synthesized)
atgaacagaagacagagacaaaacaacattattccaaggactacatataagatgttaatgtggtgctttagacaggtccaagggttgaggctctccaggccttgctggaatttggtctag

SEQ ID NO: 182397 - DNA, 120 bp, Artificial Sequence
  ENSG00000111275_63 (sequence is synthesized)
tcttctaaagaaggctgaaactcttgagtttgtttatttaaatcaagaattttgttttgtaattcaccgatatcaaaggtgatgttggatgtgcaagctccctgcaaatgggctttcaca

SEQ ID NO: 182398 - DNA, 120 bp, Artificial Sequence
  ENSG00000111275_64 (sequence is synthesized)
ttatattctaagttggttacacaaatatgagtgtgattaaaatgatggtgcaattgctgttgcaattgcaagctttgtacttgttctcctaactgtagagccgtggatttcaacaatgcc

SEQ ID NO: 182399 - DNA, 120 bp, Artificial Sequence
  ENSG00000111275_65 (sequence is synthesized)
aactcagtgttaattttattctgaagtggccatgcttggttggctatacgcatccagttttccatgtactgagttgtttgaatagaactatgcaaagctacagaggacatcacaacggaa

SEQ ID NO: 182400 - DNA, 120 bp, Artificial Sequence
  ENSG00000111275_66 (sequence is synthesized)
gaactatgcaaagctacagaggacatcacaacggaagttattaatgtgaccaaggaaacaatagcaaaaattatcatgcctaaggctctatgggcacaatgagtaagttgagttagaaga

SEQ ID NO: 182401 - DNA, 120 bp, Artificial Sequence
  ENSG00000111275_67 (sequence is synthesized)
tgtttcatgaagtgcaaagcaggtgtggtagcccaaggctgggacagattaacaggaatccatagcccagggatgcgacccaaaattatcaaagtagagacattatgtgtttgcaatgtg

SEQ ID NO: 182402 - DNA, 120 bp, Artificial Sequence
  ENSG00000111275_68 (sequence is synthesized)
ctatgattaatgcagtgacataactggcaagatttacaggtcaattggatattgtttacctggagctggtccttcttagttgccaaaaaagacataaggattaaaaagacaaaccataaa

SEQ ID NO: 182403 - DNA, 120 bp, Artificial Sequence
  ENSG00000111275_69 (sequence is synthesized)
accagcagcccgaggtcttctgcaaccagtctagattgaaaatgtcaactccagacatcactgtgcttctggaaactataaagaggaagtgggagctaggacatccccccaccacgcccc

SEQ ID NO: 182404 - DNA, 120 bp, Artificial Sequence
  ENSG00000111276_0 (sequence is synthesized)
cttcttcgtcagcctcccttccaccgccatattgggccactaaaaaaagggggctcgtcttttcggggtgtttttctccccctcccctgtccccgcttgctcacggctctgcgactccga

SEQ ID NO: 182405 - DNA, 120 bp, Artificial Sequence
  ENSG00000111276_1 (sequence is synthesized)
cgccggcaaggtttggagagcggctgggttcgcgggacccgcgggcttgcacccgcccagactcggacgggctttgccaccctctccgcttgcctggtcccctctcctctccgccctccc

SEQ ID NO: 182406 - DNA, 120 bp, Artificial Sequence
  ENSG00000111276_2 (sequence is synthesized)
gctcgccagtccatttgatcagcggagactcggcggccgggccggggcttccccgcagcccctgcgcgctcctagagctcgggccgtggctcgtcggggtctgtgtcttttggctccgag

SEQ ID NO: 182407 - DNA, 120 bp, Artificial Sequence
  ENSG00000111276_3 (sequence is synthesized)
ggcagtcgctgggcttccgagaggggttcgggctgcgtaggggcgctttgttttgttcggttttgtttttttgagagtgcgagagaggcggtcgtgcagacccgggagaaagatgtcaaa

SEQ ID NO: 182408 - DNA, 120 bp, Artificial Sequence
  ENSG00000111276_4 (sequence is synthesized)
cgtgcgagtgtctaacgggagccctagcctggagcggatggacgccaggcaggcggagcaccccaagccctcggcctgcaggaacctcttcggcccggtggaccacgaagagttaacccg

SEQ ID NO: 182409 - DNA, 120 bp, Artificial Sequence
  ENSG00000111276_5 (sequence is synthesized)
ggacttggagaagcactgcagagacatggaagaggcgagccagcgcaagtggaatttcgattttcagaatcacaaacccctagagggcaagtacgagtggcaagaggtggagaagggcag

SEQ ID NO: 182410 - DNA, 120 bp, Artificial Sequence
  ENSG00000111276_6 (sequence is synthesized)
cttgcccgagttctactacagacccccgcggccccccaaaggtgcctgcaaggtgccggcgcaggagagccaggatgtcagcgggagccgcccggcggcgcctttaattggggctccggc

SEQ ID NO: 182411 - DNA, 120 bp, Artificial Sequence
  ENSG00000111276_7 (sequence is synthesized)
taactctgaggacacgcatttggtggacccaaagactgatccgtcggacagccagacggggttagcggagcaatgcgcaggaataaggaagcgacctgcaaccgacgattcttctactca

SEQ ID NO: 182412 - DNA, 120 bp, Artificial Sequence
  ENSG00000111276_8 (sequence is synthesized)
aaacaaaagagccaacagaacagaagaaaatgtttcagacggttccccaaatgccggttctgtggagcagacgcccaagaagcctggcctcagaagacgtcaaacgtaaacagctcgaat

SEQ ID NO: 182413 - DNA, 120 bp, Artificial Sequence
  ENSG00000111276_9 (sequence is synthesized)
taagaatatgtttccttgtttatcagatacatcactgcttgatgaagcaaggaagatatacatgaaaattttaaaaatacatatcgctgacttcatggaatggacatcctgtataagcac

SEQ ID NO: 182414 - DNA, 120 bp, Artificial Sequence
  ENSG00000111276_10 (sequence is synthesized)
aacacaataacactaaaattttaggcactcttaaatgatctgcctctaaaagcgttggatgtagcattatgcaattaggtttttccttatttgcttcattgtactacctgtgtatatagt

SEQ ID NO: 182415 - DNA, 120 bp, Artificial Sequence
  ENSG00000111276_11 (sequence is synthesized)
ttttaccttttatgtagcacataaactttggggaagggagggcagggtggggctgaggaactgacgtggagcggggtatgaagagcttgctttgatttacagcaagtagataaatatttg

SEQ ID NO: 182416 - DNA, 120 bp, Artificial Sequence
  ENSG00000111276_12 (sequence is synthesized)
acttgcatgaagagaagcaattttggggaagggtttgaattgttttctttaaagatgtaatgtccctttcagagacagctgatacttcatttaaaaaaatcacaaaaatttgaacactgg

SEQ ID NO: 182417 - DNA, 120 bp, Artificial Sequence
  ENSG00000111276_13 (sequence is synthesized)
ctaaagataattgctatttatttttacaagaagtttattctcatttgggagatctggtgatctcccaagctatctaaagtttgttagatagctgcatgtggcttttttaaaaaagcaaca

SEQ ID NO: 182418 - DNA, 120 bp, Artificial Sequence
  ENSG00000111276_14 (sequence is synthesized)
gaaacctatcctcactgccctccccagtctctcttaaagttggaatttaccagttaattactcagcagaatggtgatcactccaggtagtttggggcaaaaatccgaggtgcttgggagt

SEQ ID NO: 182419 - DNA, 120 bp, Artificial Sequence
  ENSG00000111276_15 (sequence is synthesized)
tttgaatgttaagaattgaccatctgcttttattaaatttgttgacaaaattttctcattttcttttcacttcgggctgtgtaaacacagtcaaaataattctaaatccctcgatatttt

SEQ ID NO: 182420 - DNA, 120 bp, Artificial Sequence
  ENSG00000111276_16 (sequence is synthesized)
taaagatctgtaagtaacttcacattaaaaaatgaaatattttttaatttaaagcttactctgtccatttatccacaggaaagtgttatttttcaaggaaggttcatgtagagaaaagca

SEQ ID NO: 182421 - DNA, 120 bp, Artificial Sequence
  ENSG00000111276_17 (sequence is synthesized)
cacttgtaggataagtgaaatggatactacatctttaaacagtatttcattgcctgtgtatggaaaaaccatttgaagtgtacctgtgtacataactctgtaaaaacactgaaaaattat

SEQ ID NO: 182422 - DNA, 120 bp, Artificial Sequence
  ENSG00000111276_18 (sequence is synthesized)
actaacttatttatgttaaaagattttttttaatctagacaatatacaagccaaagtggcatgttttgtgcatttgtaaatgctgtgttgggtagaataggttttcccctcttttgttaa

SEQ ID NO: 182423 - DNA, 120 bp, Artificial Sequence
  ENSG00000111276_19 (sequence is synthesized)
ataatatggctatgcttaaaaggttgcatactgagccaagtataattttttgtaatgtgtgaaaaagatgccaattattgttacacattaagtaatcaataaagaaaacttccatagcta

SEQ ID NO: 182424 - DNA, 120 bp, Artificial Sequence
  ENSG00000111276_20 (sequence is synthesized)
catataagacatgaattccatgagtaaaatcaaacttctgtggcaaggaaacctctctgagtctcgatttcctccgtggtaaaaaggagagggttaaaccacagggtcccgagggtccct

SEQ ID NO: 182425 - DNA, 120 bp, Artificial Sequence
  ENSG00000111291_0 (sequence is synthesized)
atgtacaaggactgcatcgagtccactggagactattttcttctctgtgacgccgaggggccatggggcatcattctggagtccctggccatacttggcatcgtggtcacaattctgcta

SEQ ID NO: 182426 - DNA, 120 bp, Artificial Sequence
  ENSG00000111291_1 (sequence is synthesized)
ctcttagcatttctcttcctcatgcgaaagatccaagactgcagccagtggaatgtcctccccacccagctcctcttcctcctgagtgtcctggggctcttcggactcgcttttgccttc

SEQ ID NO: 182427 - DNA, 120 bp, Artificial Sequence
  ENSG00000111291_2 (sequence is synthesized)
atcatcgagctcaatcaacaaactgcccccgtacgctactttctctttggggttctctttgctctctgtttctcatgcctcttagctcatgcctccaatctagtgaagctggttcggggt

SEQ ID NO: 182428 - DNA, 120 bp, Artificial Sequence
  ENSG00000111291_3 (sequence is synthesized)
attattgccactgagtatgtgactctcatcatgaccagaggtatgatgtttgtgaatatgacaccctgccagctcaatgtggactttgttgtactcctggtctatgtcctcttcctgatg

SEQ ID NO: 182429 - DNA, 120 bp, Artificial Sequence
  ENSG00000111291_4 (sequence is synthesized)
gccctcacattcttcgtctccaaagccaccttctgtggcccgtgtgagaactggaagcagcatggaaggctcatctttatcactgtgctcttctccatcatcatctgggtggtgtggatc

SEQ ID NO: 182430 - DNA, 120 bp, Artificial Sequence
  ENSG00000111291_5 (sequence is synthesized)
tccatgctcctgagaggcaacccgcagttccagcgacagccccagtgggacgacccggtcgtctgcattgctctggtcaccaacgcatgggttttcctgctgctgtacatcgtccctgag

SEQ ID NO: 182431 - DNA, 120 bp, Artificial Sequence
  ENSG00000111291_6 (sequence is synthesized)
ctctgcattctctacagatcgtgtagacaggagtgccctttacaaggcaatgcctgccccgtcacagcctaccaacacagcttccaagtggagaaccaggagctctccagagactgttga

SEQ ID NO: 182432 - DNA, 120 bp, Artificial Sequence
  ENSG00000111291_7 (sequence is synthesized)
gaggatgtagcattaacttcatatggtactcccattcagccgcagactgttgatcccacacaagagtgtttcatcccacaggctaaactaagcccccagcaagatgcaggaggagtataa

SEQ ID NO: 182433 - DNA, 120 bp, Artificial Sequence
  ENSG00000111300_0 (sequence is synthesized)
gcttgtcatcatggcgacgcggggccatgtgcaggaccctaacgacaggcgcctccggcccatttacgattatcttgacaatggtaataataaaatggcaattcagcaagcagataaact

SEQ ID NO: 182434 - DNA, 120 bp, Artificial Sequence
  ENSG00000111300_1 (sequence is synthesized)
gttgaagaaacataaggatcttcattgtgctaaggttttaaaggcaattggtttacagagaactggaaagcaagaggaagcctttactcttgcacaggaggtggcagcccttgaacccac

SEQ ID NO: 182435 - DNA, 120 bp, Artificial Sequence
  ENSG00000111300_2 (sequence is synthesized)
agatgacaactcactgcaggcactgactatcctttaccgggagatgcaccgaccggagttagttacaaaactttatgaggcagctgtgaagaaagttcccaatagtgaggagtatcactc

SEQ ID NO: 182436 - DNA, 120 bp, Artificial Sequence
  ENSG00000111300_3 (sequence is synthesized)
tcacctcttcatggcctatgccagagtgggtgaatacaagaaaatgcaacaggctggcatggctctatataagattgtccccaaaaatccctactacttttggtctgtgatgagcttaat

SEQ ID NO: 182437 - DNA, 120 bp, Artificial Sequence
  ENSG00000111300_4 (sequence is synthesized)
tatgcaatctatatcggcacaggatgaaaacctctcaaaaacaatgtttctgccccttgctgagagaatggtcgaaaaaatggtgaaagaggacaagatagaagctgaggctgaagttga

SEQ ID NO: 182438 - DNA, 120 bp, Artificial Sequence
  ENSG00000111300_5 (sequence is synthesized)
actttattatatgatcctggaacgtttgggaaagtaccaggaggccttggatgtcatcagagggaaattaggagagaagttgacaagtgagattcagagtcgggaaaataaatgcatggc

SEQ ID NO: 182439 - DNA, 120 bp, Artificial Sequence
  ENSG00000111300_6 (sequence is synthesized)
tatgtacaagaagctgagcaggtggccagagtgcaatgccctttcccggcgcctcttactaaaaaactcagatgactggcagttctatctgacttatttcgattctgtctttcgactgat

SEQ ID NO: 182440 - DNA, 120 bp, Artificial Sequence
  ENSG00000111300_7 (sequence is synthesized)
tgaagaggcctggagtcctcctgctgaaggtgaacactctttagaaggagaagtacattattctgcagaaaaagctgtgaagtttatagaagatcggataacggaagaatctaaaagttc

SEQ ID NO: 182441 - DNA, 120 bp, Artificial Sequence
  ENSG00000111300_8 (sequence is synthesized)
tcgccatctccgaggaccacatctagctaaattggagctgattaggcgtttacgaagtcaaggttgtaacgatgagtacaaactgggtgatccagaagaattaatgttccagtattttaa

SEQ ID NO: 182442 - DNA, 120 bp, Artificial Sequence
  ENSG00000111300_9 (sequence is synthesized)
aaagtttggcgataaaccttgttgttttacagaccttaaggtgtttgttgacctcttacctgctacacagtgtacaaaatttattaatcagttacttggagttgttcctttgtcgacacc

SEQ ID NO: 182443 - DNA, 120 bp, Artificial Sequence
  ENSG00000111300_10 (sequence is synthesized)
aacagaggataagctggcactgcctgctgacatcagagctctgcagcaacatttgtgtgtggtgcagctgacgaggttacttggcttgtaccacaccatggataaaaatcagaaattgag

SEQ ID NO: 182444 - DNA, 120 bp, Artificial Sequence
  ENSG00000111300_11 (sequence is synthesized)
tgtggtcagagaattgatgttaaggtaccagcatggactggaatttgggaaaacctgtttgaaaacagaattgcaattttctgactattactgtctccttgctgtccatgcgcttattga

SEQ ID NO: 182445 - DNA, 120 bp, Artificial Sequence
  ENSG00000111300_12 (sequence is synthesized)
tgtatggagggaaacaggtgatgagaccactgtgtggcaggccctgactttgctggaagagggattaacccatagcccttccaatgctcagttcaaattgctgcttgttcgaatctactg

SEQ ID NO: 182446 - DNA, 120 bp, Artificial Sequence
  ENSG00000111300_13 (sequence is synthesized)
tatgctgggtgcatttgaaccagtggtggatctttactccagcctcgatgctaagcatatccagcatgataccattggttatcttttgacccgatatgctgaatctctaggtcagtatgc

SEQ ID NO: 182447 - DNA, 120 bp, Artificial Sequence
  ENSG00000111300_14 (sequence is synthesized)
tgctgcgtcccaatcctgtaacttcgcactcaggttttttcactccaaccagaaagatacctcagaatatattattcaagcttacaaatatggtgcatttgagaagatcccagagtttat

SEQ ID NO: 182448 - DNA, 120 bp, Artificial Sequence
  ENSG00000111300_15 (sequence is synthesized)
cgcttttaggaacaggctgaataattctcttcattttgcacaagtccgtactgaacggatgctgttagaccttctacttgaagcaaatatatcaaccagtttagcagaaagtataaagtc

SEQ ID NO: 182449 - DNA, 120 bp, Artificial Sequence
  ENSG00000111300_16 (sequence is synthesized)
aatgaaccttaggccagaagaagatgacattccatgggaagatttgcgagacaacagagacttaaatgtttttttcagctgggatccaaaagacagggacgtttctgaagaacataagaa

SEQ ID NO: 182450 - DNA, 120 bp, Artificial Sequence
  ENSG00000111300_17 (sequence is synthesized)
actttccttagaggaggagaccttgtggttaagaatccgatccttaacattgaggctgataagtggacttccaagtctcaaccaccctgtggagccaaagaactcggagaagactgccga

SEQ ID NO: 182451 - DNA, 120 bp, Artificial Sequence
  ENSG00000111300_18 (sequence is synthesized)
gaatggggtatcctcccggattgatattcttcgtttgctccttcaacagctggaggcaaccctggagacaggaaagcgatttattgagaaggatattcagtatcctttccttggtcctgt

SEQ ID NO: 182452 - DNA, 120 bp, Artificial Sequence
  ENSG00000111300_19 (sequence is synthesized)
acctaccagaatgggtggattctttaattctggctgttctcagtgccagataagctctttttatcttgtcaatgatatttatgagctggataccagtggtttagaggatacaatggagat

SEQ ID NO: 182453 - DNA, 120 bp, Artificial Sequence
  ENSG00000111300_20 (sequence is synthesized)
tcaggaacgaatagaaaatagttttaagtctttactagaccagttaaaagatgtcttcagtaaatgtaaaggtgacctcttagaagttaaagatggtaacttgaaaacacatcctactct

SEQ ID NO: 182454 - DNA, 120 bp, Artificial Sequence
  ENSG00000111300_21 (sequence is synthesized)
tttagaaaatctagttttctttgttgagactatttctgttatcctttgggtatccagttactgtgagagtgtcctacgaccatacaaactaaatttacagaaaaagaaaaagaagaaaaa

SEQ ID NO: 182455 - DNA, 120 bp, Artificial Sequence
  ENSG00000111300_22 (sequence is synthesized)
agaaaccagcatcatcatgccacctgtctttaccagtttccaagactatgttactgggcttcagactttaatttccaatgttgtggatcatattaaagggcttgaaacacatctaattgc

SEQ ID NO: 182456 - DNA, 120 bp, Artificial Sequence
  ENSG00000111300_23 (sequence is synthesized)
acttaaacttgaagaacttattttagaagacacttctctctcaccggaagagagaaaattttcaaagactgtgcaagggaaggtgcagagcagttatctgcactcacttctggaaatggg

SEQ ID NO: 182457 - DNA, 120 bp, Artificial Sequence
  ENSG00000111300_24 (sequence is synthesized)
aaaaaagacttgagaccacaaagaaactaaaaatttaaggaagtatctatcatgggcactgatgactctgcaacagaatatgacaccatcttcccaggcaaaagcaacatctggttgacc

SEQ ID NO: 182458 - DNA, 120 bp, Artificial Sequence
  ENSG00000111300_25 (sequence is synthesized)
atgattttaatccagaacttcctcataaaatgcatgaaggactttgatcgtgaatttttttaggtgttaaatatatacaactgattaaattattgtatataaaccagaagcgggaccctc

SEQ ID NO: 182459 - DNA, 120 bp, Artificial Sequence
  ENSG00000111300_26 (sequence is synthesized)
atctgggtttgaccactttttatacatgttcatatgcatatggcagcaacaagagaaccctacttttcttcttcccatcaccagaaacatcttttcaggggagcggggggtctataaaaa

SEQ ID NO: 182460 - DNA, 120 bp, Artificial Sequence
  ENSG00000111300_27 (sequence is synthesized)
cagcaatagaaattaagcataaagcatcaacctcatagcaactgaatagcccttccattataaataacattgagagtttttggtctggtccttgagccacaagaagtggaggggagacca

SEQ ID NO: 182461 - DNA, 120 bp, Artificial Sequence
  ENSG00000111300_28 (sequence is synthesized)
tgcctgggaacagacccccttttcacagcagtaagtttgttttgaggctttctcagctacttggctcccacagaacccaaggcaggtacacaaaggaccttagatgagatctggcatatg

SEQ ID NO: 182462 - DNA, 120 bp, Artificial Sequence
  ENSG00000111300_29 (sequence is synthesized)
cacccgcaatagaagggcaccacttggatgaccacaggcacttagtttttggctagtttttgtctgatagttaagacatccccatcctagcttctgtgagagttaaaaatctcaggtaag

SEQ ID NO: 182463 - DNA, 120 bp, Artificial Sequence
  ENSG00000111300_30 (sequence is synthesized)
aaggcaaggaaggctctgttaatttatagctgtttagaggggaaagcagtgcagaccacttattaagcccgctgaggactagctttctgtctttcatacatttgggaaagataggaatga

SEQ ID NO: 182464 - DNA, 120 bp, Artificial Sequence
  ENSG00000111300_31 (sequence is synthesized)
ctgtttcaaagaagagaggtgcacataatttatgcaggcaagtatgatacttatttcattggttttgtgagtcatatatatacatatatatatatacacatatatatatgacttgaaaat

SEQ ID NO: 182465 - DNA, 120 bp, Artificial Sequence
  ENSG00000111300_32 (sequence is synthesized)
taagatttaatactttaatgttttaagtgtggggggtttgggaaggaaggaatgtaatattatggatttagccttaggctttaagttttaggctggcaaaagaaatgttattcagtgggt

SEQ ID NO: 182466 - DNA, 120 bp, Artificial Sequence
  ENSG00000111300_33 (sequence is synthesized)
ttgaggtttggactactttcttcaaacttagagaattataacaggatggtgtttactttgttcacctggatgtccccaagactctagcttcttctatcagtggttggtctgatagaagag

SEQ ID NO: 182467 - DNA, 120 bp, Artificial Sequence
  ENSG00000111300_34 (sequence is synthesized)
gtaaaaattgctcttgaaaatgtcctacaatttatgcagtttctttgataatatttttctgtttaaatccctgcttctgtttttggtctgttacctaaatatagttcaagtttaattctg

SEQ ID NO: 182468 - DNA, 120 bp, Artificial Sequence
  ENSG00000111300_35 (sequence is synthesized)
taagagcaaagaaatgaatttgatgaggaaattaagcatccaatggaggattggtcttgaagaccttaaaggtgctttccaacctgcactgctccagtgaaatgtggtacttttttcttt

SEQ ID NO: 182469 - DNA, 120 bp, Artificial Sequence
  ENSG00000111300_36 (sequence is synthesized)
taaaagcaaccaagagagctgggaatatctgtgtacgcaaagtaattgcattttgtcccttcattttgactttcttagattcataatttgatacagtgcttaaacttccaaggaaatttt

SEQ ID NO: 182470 - DNA, 120 bp, Artificial Sequence
  ENSG00000111300_37 (sequence is synthesized)
aaacaattactacattacctgttcaaaataaggcttgttggaaatcctagtccatcaactaatttcaaaaatttatttttgatatgagtagcaacagctggtcatataccctatcccaaa

SEQ ID NO: 182471 - DNA, 120 bp, Artificial Sequence
  ENSG00000111300_38 (sequence is synthesized)
aggaagaactgtcttgaacaagatgaatggaaaattgtggttaattctgaatttcatgtaatgacaacatattctttcataaaactatggcctgtttaagatggaactttgtgtgtgtct

SEQ ID NO: 182472 - DNA, 120 bp, Artificial Sequence
  ENSG00000111300_39 (sequence is synthesized)
gctggggagggtggggtacatgtgtatggcgtgtgttcttgaaatgatgtctctctgaatatccaaaaaagtactgtactgtagaaatgctctttgaaaaagtctatcgactgaccatga

SEQ ID NO: 182473 - DNA, 120 bp, Artificial Sequence
  ENSG00000111300_40 (sequence is synthesized)
tcaatctagcatatgtatgttcagtgggctagccttggtcctcagggacagtgtgtgactctagtggtcttcctaaccagtctcttgcctaaagatatctgggacctctactggctttaa

SEQ ID NO: 182474 - DNA, 120 bp, Artificial Sequence
  ENSG00000111300_41 (sequence is synthesized)
tgacaaataatgttatgttgaggttatgcttcctttgttatttgctgattttcctactaaatgtagcatttcaattagatccagctttcacattttgagataattgtaaaaagaatgaaa

SEQ ID NO: 182475 - DNA, 120 bp, Artificial Sequence
  ENSG00000111300_42 (sequence is synthesized)
ttatgcagaaatggccaatatctcttatcaatctgttcttttggaaaccctcatgtactataaattgtgtacagttaaaaaaatatatatatatatatattcttacatgagtaaaaagca

SEQ ID NO: 182476 - DNA, 120 bp, Artificial Sequence
  ENSG00000111300_43 (sequence is synthesized)
ccctctcccagcaatcgtatgccattggtatttgaagagaattcccaaataacccattgctgctgctgctgtttttgatttgtatgggtttttttgttttgtttgtttttgtgtggtaaa

SEQ ID NO: 182477 - DNA, 120 bp, Artificial Sequence
  ENSG00000111300_44 (sequence is synthesized)
ctgatatttaaaaaaggaaaggagaaaaatcacgactactgtttacagactgaaaaattattgctttttatactactgagatcctaagttaagactctccaaagcaaacatttggtttaa

SEQ ID NO: 182478 - DNA, 120 bp, Artificial Sequence
  ENSG00000111300_45 (sequence is synthesized)
atcatttatctgatgtagataaaaggtagagaaacttgtagtgttctccacataatggaaaatgtacaaatgcctagttgtgttgcccatcaattttgtatattttcataattttaattg

SEQ ID NO: 182479 - DNA, 120 bp, Artificial Sequence
  ENSG00000111300_46 (sequence is synthesized)
ttgaaaattgcattatattttgcaatcactatgttcaatctggatttgtctttcattttaacttttaatataaaaaggggtttcaatgtatctacaggcttgttattgaaacttcctact

SEQ ID NO: 182480 - DNA, 120 bp, Artificial Sequence
  ENSG00000111300_47 (sequence is synthesized)
tatttgatgtgatttattaatataggaagtatatattcttccttaagtaagtgaagcatagcaaatctactttaaactggatgggttaatttatataaacattttcattttaagttggca

SEQ ID NO: 182481 - DNA, 120 bp, Artificial Sequence
  ENSG00000111300_48 (sequence is synthesized)
gagttcaagaccaggctgggcaacatagcaagacaaaaaggaaaaaaaaaaggagggcaaagtttgaaagtataggtcagattggctttgttgctctccttctaatgaaagctttcagcc

SEQ ID NO: 182482 - DNA, 120 bp, Artificial Sequence
  ENSG00000111300_49 (sequence is synthesized)
tctaatgaaagctttcagccctagaacatgtcagatagctttttgggaattgtcttttgtagtgttttttgttgtctttctggtttctaaaaatgagaatggtttttctgatatcagagt

SEQ ID NO: 182483 - DNA, 120 bp, Artificial Sequence
  ENSG00000111300_50 (sequence is synthesized)
aacccataaaggtgtgaataaagtgaagatcattcatatacttaccagtcagtaataaccactgggaaaattttcgtggtaaacaaacctgctatccagaaggttctgtaacttgccttt

SEQ ID NO: 182484 - DNA, 120 bp, Artificial Sequence
  ENSG00000111300_51 (sequence is synthesized)
ttgcctttttgttttcatataacagggtatcttggacattttttcatgtcagtaaatatagatatatctcattacttttaatggttatatattgtactgttatattaatatgctataatt

SEQ ID NO: 182485 - DNA, 80 bp, Artificial Sequence
  ENSG00000111300_52 (sequence is synthesized)
atattgatgaattgttggttctaatttttgaatattataaatatgctgctattgatacagacagattcacaaagatacat

SEQ ID NO: 182486 - DNA, 90 bp, Artificial Sequence
  ENSG00000111300_53 (sequence is synthesized)
ctgtcgcccaggctggagtgcagtggcggcggatctcagctcactgcagccgccgcctcctgagttcaagcgattcttctccctcaggct

SEQ ID NO: 182487 - DNA, 120 bp, Artificial Sequence
  ENSG00000111300_54 (sequence is synthesized)
tatacatttatacagttaataaatgtatatgcatatatacatttgtactcatccccaacagtgttgagtatgtatctttaaccatctggtaggtgaatattggtatctcctttttctaat

SEQ ID NO: 182488 - DNA, 120 bp, Artificial Sequence
  ENSG00000111300_55 (sequence is synthesized)
actgatttttaaaattttattgatattgaactgtccaagaatacttcttgagtgaaaagctagctttattaattgattggctaggttttttagttgtatcacatgtttcttggatttctt

SEQ ID NO: 182489 - DNA, 120 bp, Artificial Sequence
  ENSG00000111300_56 (sequence is synthesized)
tgatatgtcttctattctttgtccaagtttcttattgtggtagtaatatttttcctatttatatgtgttgagctactgggttcttaacataataatgttactaatcccctgtcataggtg

SEQ ID NO: 182490 - DNA, 120 bp, Artificial Sequence
  ENSG00000111300_57 (sequence is synthesized)
atgcagtttttttttcagtttgttatttgtcttttaacttgagtgattttttttttgtcaatgtagtaatatttttaaaaacaaggataatctttttaatggtttttagctttgtgtgat

SEQ ID NO: 182491 - DNA, 120 bp, Artificial Sequence
  ENSG00000111300_58 (sequence is synthesized)
gtttagaaagggtttttcagctgtcagtgtcatgattgcagaagttgttacctaattttcttccagtgctttgatggatttttttttatttaagtatttaatctatcggaaatttatttt

SEQ ID NO: 182492 - DNA, 120 bp, Artificial Sequence
  ENSG00000111300_59 (sequence is synthesized)
aatattactgtgttattttgtatctccaaatgtctagctggttattttagtaccattcattcacttgaaaccactggtttgaaatgccactatttaaattccctcacatctttcagtagc

SEQ ID NO: 182493 - DNA, 120 bp, Artificial Sequence
  ENSG00000111300_60 (sequence is synthesized)
aaaaaggtaattagtgcctttctttttattcttccttttcctttcattatcattttctttttgtctcaaaataatgaaaaatgcataagggtctgtagagagaagaaaatgtccttgccc

SEQ ID NO: 182494 - DNA, 120 bp, Artificial Sequence
  ENSG00000111300_61 (sequence is synthesized)
tctgactgtttgcccttgtctgatttctcactcatgatttgaatggatacagtaggtagaataacgcattagccagggtttgcgagaactgtagatagaaaggatagtttacatgcatta

SEQ ID NO: 182495 - DNA, 120 bp, Artificial Sequence
  ENSG00000111300_62 (sequence is synthesized)
ggatccttgaattggaatgagaattaaagtgacttcatttgtgatattttgatctgctaaatggaggcttcacccttattttcactttttaatatggaaaatttcaagcagacaaaaata

SEQ ID NO: 182496 - DNA, 120 bp, Artificial Sequence
  ENSG00000111300_63 (sequence is synthesized)
gaatagaataataaaccccattgttctcattatccaccttcagcaattaacacatggcccattttattttgtttttaccctttcccctggcagattacttcagagcatatcctaagtagt

SEQ ID NO: 182497 - DNA, 120 bp, Artificial Sequence
  ENSG00000111300_64 (sequence is synthesized)
atacctgtaacttaaccctccatccctgtttttgttaattgaaaagcaatttaaatcattttctaaaccaatttcttccaagaattctaagatgatttcattcataatacttaggtaaaa

SEQ ID NO: 182498 - DNA, 120 bp, Artificial Sequence
  ENSG00000111300_65 (sequence is synthesized)
cttcttgaaatttgctgtactcatctctaaacttccccagattcacctcaaatctagctgttttcattctcctttctgactcactctttattatgtagtttaattcctccagcttctttt

SEQ ID NO: 182499 - DNA, 120 bp, Artificial Sequence
  ENSG00000111300_66 (sequence is synthesized)
actgatacagcaaaactccctcctctttttttgccagagggaagagaaggaagattgcaaacactcataatctattatcttttcttttatttctgtcacatatttgttgactgttctccc

SEQ ID NO: 182500 - DNA, 120 bp, Artificial Sequence
  ENSG00000111300_67 (sequence is synthesized)
cttactactctgtgtggggagtgtacactgttctggtgattggcaaactgtaagtgcctaagagatttttattaagtgaatgagtaataagcggacatatatgtacatgcacacactgta

SEQ ID NO: 182501 - DNA, 120 bp, Artificial Sequence
  ENSG00000111300_68 (sequence is synthesized)
gtataggagaagacatataaacagctaatttgatacagtgcaggatatgtactgatcaactgggtagattttgccatacatatgtaagttaagatttgcaggtaaggtggtatcttacct

SEQ ID NO: 182502 - DNA, 120 bp, Artificial Sequence
  ENSG00000111300_69 (sequence is synthesized)
gcttggagagatgtgacgggagaggcatattgtaaagaacctttggattccatgcctaggaatttggactcttctctgagtgaaaaggatgttaaatcagtccccacttcttcagggaag

SEQ ID NO: 182503 - DNA, 120 bp, Artificial Sequence
  ENSG00000111300_70 (sequence is synthesized)
tgacagaaaattggagtgaagtggaggatggattttgagctaggagagccagaagaaatgctgaagagttaggccattgtagtattctgagcaggagatgatgaaggcctggatcagtag

SEQ ID NO: 182504 - DNA, 120 bp, Artificial Sequence
  ENSG00000111300_71 (sequence is synthesized)
agtgattgcagaaagtagagtggagattcacatgagaaattgaagggatttacatagaagaactgcgttagaatttgttgaatccattgcctctaatttcctgatagatatttttagtgt

SEQ ID NO: 182505 - DNA, 62 bp, Artificial Sequence
  ENSG00000111300_72 (sequence is synthesized)
gtcatcatggcgacgcggggccatgtgcaggaccctaacgacaggcgcctccggcccattta

SEQ ID NO: 182506 - DNA, 120 bp, Artificial Sequence
  ENSG00000111300_73 (sequence is synthesized)
gggattacagccgtgagccaccacgcctggccgagacaactctttttctttgctgcacatcaatcaacttgcatccccgaaagtgccttcaaaatagaaattctggagctgccactgatt

SEQ ID NO: 182507 - DNA, 120 bp, Artificial Sequence
  ENSG00000111300_74 (sequence is synthesized)
tcactccaaccagaaagatatactgcaggcaaacagctcgccgaggtgtcccatgggggtttaaaagccgcatcgaatgcagttgaattagcgcccgtggcgcaatcccgcggcctgaaa

SEQ ID NO: 182508 - DNA, 120 bp, Artificial Sequence
  ENSG00000111305_0 (sequence is synthesized)
aattattaaatgcccgtgttccctgtaaggcagcatttaatcatgaggcactccaaagaatatgagatagaaggggaggggtaggaggagagggaggagggtaggaagacagtttgcatt

SEQ ID NO: 182509 - DNA, 120 bp, Artificial Sequence
  ENSG00000111305_1 (sequence is synthesized)
cttgcaacattaaaccaaagggacttggagtgcagatggcatccttcggttcttccagacaagctgcaagacgctgaccatggccaagatggagctctcgaaggccttctctggccagcg

SEQ ID NO: 182510 - DNA, 120 bp, Artificial Sequence
  ENSG00000111305_2 (sequence is synthesized)
gacactcctatctgccatcctcagcatgctatcactcagcttctccacaacatccctgctcagcaactactggtttgtgggcacacagaaggtgcccaagcccctgtgcgagaaaggtct

SEQ ID NO: 182511 - DNA, 120 bp, Artificial Sequence
  ENSG00000111305_3 (sequence is synthesized)
ggcagccaagtgctttgacatgccagtgtccctggatggagataccaacacatccacccaggaggtggtacaatacaactgggagactggggatgaccggttctccttccggagcttccg

SEQ ID NO: 182512 - DNA, 120 bp, Artificial Sequence
  ENSG00000111305_4 (sequence is synthesized)
gagtggcatgtggctatcctgtgaggaaactgtggaagaaccaggggagaggtgccgaagtttcattgaacttacaccaccagccaagagaggtgagaaaggactactggaatttgccac

SEQ ID NO: 182513 - DNA, 120 bp, Artificial Sequence
  ENSG00000111305_5 (sequence is synthesized)
gttgcaaggcccatgtcaccccactctccgatttggagggaagcggttgatggagaaggcttccctcccctcccctcccttggggctttgtggcaaaaatcctatggttatccctgggaa

SEQ ID NO: 182514 - DNA, 120 bp, Artificial Sequence
  ENSG00000111305_6 (sequence is synthesized)
gggaaccctgcctgtgggctcaaactgagcgcctttgctgctgtttcctctgtcctgtcaggtctcctggggatggtggcccacatgatgtattcacaagtcttccaagcgactgtcaac

SEQ ID NO: 182515 - DNA, 120 bp, Artificial Sequence
  ENSG00000111305_7 (sequence is synthesized)
ttgggtccagaagactggagaccacatgtttggaattatggctgggccttctacatggcctggctctccttcacctgctgcatggcgtcggctgtcaccaccttcaacacgtacaccagg

SEQ ID NO: 182516 - DNA, 120 bp, Artificial Sequence
  ENSG00000111305_8 (sequence is synthesized)
atggtgctggagttcaagtgcaagcatagtaagagcttcaaggaaaacccgaactgcctaccacatcaccatcagtgtttccctcggcggctgtcaagtgcagcccccaccgtgggtcct

SEQ ID NO: 182517 - DNA, 120 bp, Artificial Sequence
  ENSG00000111305_9 (sequence is synthesized)
ttgaccagctaccaccagtatcataatcagcccatccactctgtctctgagggagtcgacttctactccgagctgcggaacaagggatttcaaagaggggccagccaggagctgaaagaa

SEQ ID NO: 182518 - DNA, 120 bp, Artificial Sequence
  ENSG00000111305_10 (sequence is synthesized)
gcagttaggtcatctgtagaggaagagcagtgttaggagttaagcgggtttggggagtaggcttgagccctaccttacacgtctgctgattatcaacatgtgcttaagccaacatccgtc

SEQ ID NO: 182519 - DNA, 120 bp, Artificial Sequence
  ENSG00000111305_11 (sequence is synthesized)
tcttgagcatggtttttagaggctacgaataaggctatgaataagggttatctttaagtcctaagggattcctgggtgccactgctctcttttcctctacagctccatcttgtttcaccc

SEQ ID NO: 182520 - DNA, 120 bp, Artificial Sequence
  ENSG00000111305_12 (sequence is synthesized)
accccacatctcacacatccagaattcccttctttactgatagtttctgtgccaggttctgggctaaaccatggagataaaaagaagagtaaaatacacttcccgaccttaaggatctga

SEQ ID NO: 182521 - DNA, 120 bp, Artificial Sequence
  ENSG00000111305_13 (sequence is synthesized)
tgtgactgtggctcaactttccatggtacgcgcgaattgttctggaagtcacagatgggaagacagaagcgcccctgagtgctttgtcatatagcacagaagtcctccacactgcctggg

SEQ ID NO: 182522 - DNA, 120 bp, Artificial Sequence
  ENSG00000111305_14 (sequence is synthesized)
acagtgtcctgcatccacacagtaggtacccagtaaaagtgttattaaatattgtcccaggagcccttaggagagtggtttaacatgagaaggcgccaacagcacacagggtcagggtca

SEQ ID NO: 182523 - DNA, 120 bp, Artificial Sequence
  ENSG00000111305_15 (sequence is synthesized)
cttctagaaatagcccaccaaggctattcagattggactgtggttcccttctggacagtcacaccagggacttcccagtgaacaagggggcataggctcctctctggatcccaccttttc

SEQ ID NO: 182524 - DNA, 120 bp, Artificial Sequence
  ENSG00000111305_16 (sequence is synthesized)
taggctcctctctggatcccaccttttcatcccttctgagaaatgtaccctattatttccttcataaagaatgccacccatctgattcctcaagaatctagacctagaaataccatttga

SEQ ID NO: 182525 - DNA, 120 bp, Artificial Sequence
  ENSG00000111305_17 (sequence is synthesized)
acacaccaccttacccctctgctggcaagaggggacctgattcatcctcacgctaaacactcattctacccaactgattgagacagaacagaagataaactgaaacttctctgccttccc

SEQ ID NO: 182526 - DNA, 120 bp, Artificial Sequence
  ENSG00000111305_18 (sequence is synthesized)
aactgtggaagaaccagcactgctccatccccagtcctggaaacaatttagagcccttcggtccagtggtacagcggcagcaaaaggggagaggtgccgaagtttcattgaacttacacc

SEQ ID NO: 182527 - DNA, 120 bp, Artificial Sequence
  ENSG00000111319_0 (sequence is synthesized)
gcttccatccctggccggccagcgggcgggctccccagccaggccgctgcacctgtcaggggaacaagctggaggagcaggaccctagacctctgcagcccataccaggtctcatggagg

SEQ ID NO: 182528 - DNA, 120 bp, Artificial Sequence
  ENSG00000111319_1 (sequence is synthesized)
ggaacaagctggaggagcaggactctagccctccacagtccactccagggctcatgaaggggaacaagcgtgaggagcaggggctgggccccgaacctgcggcgccccagcagcccacgg

SEQ ID NO: 182529 - DNA, 120 bp, Artificial Sequence
  ENSG00000111319_2 (sequence is synthesized)
cggaggaggaggccctgatcgagttccaccgctcctaccgagagctcttcgagttcttctgcaacaacaccaccatccacggcgccatccgcctggtgtgctcccagcacaaccgcatga

SEQ ID NO: 182530 - DNA, 120 bp, Artificial Sequence
  ENSG00000111319_3 (sequence is synthesized)
agacggccttctgggcagtgctgtggctctgcacctttggcatgatgtactggcaattcggcctgcttttcggagagtacttcagctaccccgtcagcctcaacatcaacctcaactcgg

SEQ ID NO: 182531 - DNA, 120 bp, Artificial Sequence
  ENSG00000111319_4 (sequence is synthesized)
acaagctcgtcttccccgcagtgaccatctgcaccctcaatccctacaggtacccggaaattaaagaggagctggaggagctggaccgcatcacagagcagacgctctttgacctgtaca

SEQ ID NO: 182532 - DNA, 120 bp, Artificial Sequence
  ENSG00000111319_5 (sequence is synthesized)
aatacagctccttcaccactctcgtggccggctcccgcagccgtcgcgacctgcgggggactctgccgcaccccttgcagcgcctgagggtcccgcccccgcctcacggggcccgtcgag

SEQ ID NO: 182533 - DNA, 120 bp, Artificial Sequence
  ENSG00000111319_6 (sequence is synthesized)
cccgtagcgtggcctccagcttgcgggacaacaacccccaggtggactggaaggactggaagatcggcttccagctgtgcaaccagaacaaatcggactgcttctaccagacatactcat

SEQ ID NO: 182534 - DNA, 120 bp, Artificial Sequence
  ENSG00000111319_7 (sequence is synthesized)
caggggtggatgcggtgagggagtggtaccgcttccactacatcaacatcctgtcgaggctgccagagactctgccatccctggaggaggacacgctgggcaacttcatcttcgcctgcc

SEQ ID NO: 182535 - DNA, 120 bp, Artificial Sequence
  ENSG00000111319_8 (sequence is synthesized)
gcttcaaccaggtctcctgcaaccaggcgaattactctcacttccaccacccgatgtatggaaactgctatactttcaatgacaagaacaactccaacctctggatgtcttccatgcctg

SEQ ID NO: 182536 - DNA, 120 bp, Artificial Sequence
  ENSG00000111319_9 (sequence is synthesized)
gaatcaacaacggtctgtccctgatgctgcgcgcagagcagaatgacttcattcccctgctgtccacagtgactggggcccgggtaatggtgcacgggcaggatgaacctgcctttatgg

SEQ ID NO: 182537 - DNA, 120 bp, Artificial Sequence
  ENSG00000111319_10 (sequence is synthesized)
atgatggtggctttaacttgcggcctggcgtggagacctccatcagcatgaggaaggaaaccctggacagacttgggggcgattatggcgactgcaccaagaatggcagtgatgttcctg

SEQ ID NO: 182538 - DNA, 120 bp, Artificial Sequence
  ENSG00000111319_11 (sequence is synthesized)
ttgagaacctttacccttcaaagtacacacagcaggtgtgtattcactcctgcttccaggagagcatgatcaaggagtgtggctgtgcctacatcttctatccgcggccccagaacgtgg

SEQ ID NO: 182539 - DNA, 120 bp, Artificial Sequence
  ENSG00000111319_12 (sequence is synthesized)
agtactgtgactacagaaagcacagttcctgggggtactgctactataagctccaggttgacttctcctcagaccacctgggctgtttcaccaagtgccggaagccatgcagcgtgacca

SEQ ID NO: 182540 - DNA, 120 bp, Artificial Sequence
  ENSG00000111319_13 (sequence is synthesized)
tggccctcggtgacatcccaggaatgggtcttccagatgctatcgcgacagaacaattacaccgtcaacaacaagagaaatggagtggccaaagtcaacatcttcttcaaggagctgaac

SEQ ID NO: 182541 - DNA, 120 bp, Artificial Sequence
  ENSG00000111319_14 (sequence is synthesized)
tacaaaaccaattctgagtctccctctgtcacgatggtcaccctcctgtccaacctgggcagccagtggagcctgtggttcggctcctcggtgttgtctgtggtggagatggctgagctc

SEQ ID NO: 182542 - DNA, 120 bp, Artificial Sequence
  ENSG00000111319_15 (sequence is synthesized)
gtctttgacctgctggtcatcatgttcctcatgctgctccgaaggttccgaagccgatactggtctccaggccgagggggcaggggtgctcaggaggtagcctccaccctggcatcctcc

SEQ ID NO: 182543 - DNA, 120 bp, Artificial Sequence
  ENSG00000111319_16 (sequence is synthesized)
cctccttcccacttctgcccccaccccatgtctctgtccttgtcccagccaggccctgctccctctccagccttgacagcccctccccctgcctatgccaccctgggcccccgcccatct

SEQ ID NO: 182544 - DNA, 120 bp, Artificial Sequence
  ENSG00000111319_17 (sequence is synthesized)
ccagggggctctgcaggggccagttcctccacctgtcctctgggggggccctgagagggaaggagaggtttctcacaccaaggcagatgctcctctggtgggagggtgctggccctggca

SEQ ID NO: 182545 - DNA, 120 bp, Artificial Sequence
  ENSG00000111319_18 (sequence is synthesized)
agattgaaggatgtgcagggcttcctctcagagccgcccaaactgccgttgatgtgtggaggggaagcaagatgggtaagggctcaggaagttgctccaagaacagtagctgatgaagct

SEQ ID NO: 182546 - DNA, 120 bp, Artificial Sequence
  ENSG00000111319_19 (sequence is synthesized)
gcccagaagtgccttggctccagccctgtaccccttggtactgcctctgaacactctggtttccccacccaactgcggctaagtctctttttcccttggatcagccaagcgaaacttgga

SEQ ID NO: 182547 - DNA, 120 bp, Artificial Sequence
  ENSG00000111319_20 (sequence is synthesized)
gctttgacaaggaactttcctaagaaaccgctgataaccaggacaaaacacaaccaagggtacacgcaggcatgcacgggtttcctgcccagcgacggcttaagccagcccccgactggc

SEQ ID NO: 182548 - DNA, 120 bp, Artificial Sequence
  ENSG00000111319_21 (sequence is synthesized)
ctggccacactgctctccagtagcacagatgtctgctcctcctcttgaacttgggtgggaaaccccacccaaaagccccctttgttacttaggcaattccccttccctgactcccgaggg

SEQ ID NO: 182549 - DNA, 120 bp, Artificial Sequence
  ENSG00000111319_22 (sequence is synthesized)
ctagggctagagcagacccgggtaagtaaaggcagacccagggctcctctagcctcatacccgtgccctcacagagccatgccccggcacctctgccctgtgtctttcatacctctacat

SEQ ID NO: 182550 - DNA, 120 bp, Artificial Sequence
  ENSG00000111319_23 (sequence is synthesized)
gtctgcttgagatatttcctcagcctgaaagtttccccaaccatctgccagagaactcctatgcatcccttagaaccctgctcagacaccattacttttgtgaacgcttctgccacatct

SEQ ID NO: 182551 - DNA, 120 bp, Artificial Sequence
  ENSG00000111319_24 (sequence is synthesized)
tgtcttccccaaaattgatcactccgccttctcctgggctcccgtagcacactataacatctgctggagtgttgctgttgcaccatactttcttgtacatttgtgtctcccttcccaact

SEQ ID NO: 182552 - DNA, 120 bp, Artificial Sequence
  ENSG00000111319_25 (sequence is synthesized)
agactgtaagtgccttgcggtcagggactgaatcttgcccgtttatgtatgctccatgtctagcccatcatcctgcttggagcaagtaggcaggagctcaataaatgtttgttgcatgaa

SEQ ID NO: 182553 - DNA, 120 bp, Artificial Sequence
  ENSG00000111319_26 (sequence is synthesized)
aaacagaaggcagatagagagggagtgagaggcaggagctgagacacagatcctggaggaagaagaccaaaggaagggggcagagacagaaagggaggtgctaggacaaaactcgaaagg

SEQ ID NO: 182554 - DNA, 120 bp, Artificial Sequence
  ENSG00000111319_27 (sequence is synthesized)
tggccctatcagggaagcagaggagaggccgttctagggaagcccagctccggcacttttggccccaactcccgcaggtctgctggctccaggaaaggtggaggagggagggaggagtgg

SEQ ID NO: 182555 - DNA, 120 bp, Artificial Sequence
  ENSG00000111319_28 (sequence is synthesized)
gagaatgtgggcgcagggtgggacatgggcatggccaggggcagcctcactcgggttccaggggtgatgggagagggcactcagggcccagagctcagccttgaccctgacccttgctct

SEQ ID NO: 182556 - DNA, 120 bp, Artificial Sequence
  ENSG00000111319_29 (sequence is synthesized)
aacctcagaaaactgatttatccttgggaagggtcagtttcttcattaggacaatgaagaaaaatccagctgtcccttccaaggggaggtatcatgagcagtatcaaggggaacaagctg

SEQ ID NO: 182557 - DNA, 120 bp, Artificial Sequence
  ENSG00000111319_30 (sequence is synthesized)
gcggcactcaagccgaaaggccaccgacactcgcctgcggggatcagggcgggatgacctgggtaccgcggtcacgccaaggccgaggccctcacccttcccctctttgggaaagggcag

SEQ ID NO: 182558 - DNA, 120 bp, Artificial Sequence
  ENSG00000111319_31 (sequence is synthesized)
acaagttccgggttcccttctaggtccgggcgagggggagagcgccccacagacgacaggcgcctcctgcctctctccttcaataaacagtccacagtgtcccggctgggctcgccgtgg

SEQ ID NO: 182559 - DNA, 120 bp, Artificial Sequence
  ENSG00000111319_32 (sequence is synthesized)
cctccgccttcccggcggacacacctgtttacccttcaccgccggacggccaggaggcgccacgacgaccccagccccgcccaggcttctccgggatggaccggcctcccggggcacaga

SEQ ID NO: 182560 - DNA, 120 bp, Artificial Sequence
  ENSG00000111319_33 (sequence is synthesized)
tgaggaccctgaccccggaggggccagacactcgctccagggcccctggcctgaccctcttcccctcgccccttcaggtacccggaaattaaagaggagctggaggagctggaccgcatc

SEQ ID NO: 182561 - DNA, 120 bp, Artificial Sequence
  ENSG00000111319_34 (sequence is synthesized)
gggagtgggaagctggaggcagcccagacctcctggagccctgcagtcctggggcagagacagaatcaggacacagctcgagatgacaggatctatgcaactaacccagagatgacacag

SEQ ID NO: 182562 - DNA, 120 bp, Artificial Sequence
  ENSG00000111319_35 (sequence is synthesized)
agatgaatgagatgtggctcctgtcatcaaggagctcatgattcaatggggaactaacacttagatgcatgggcagttagggacatgcaagaatctttgtaatgcaacaagagagaagtt

SEQ ID NO: 182563 - DNA, 120 bp, Artificial Sequence
  ENSG00000111319_36 (sequence is synthesized)
gatgcatgggcagttagggacatgcaagaatctttgtaatgcaacaagagagaagttacaaggcagcacggaagtcaatgccggtgaacccagatggcctggtgagaggagcctggacta

SEQ ID NO: 182564 - DNA, 120 bp, Artificial Sequence
  ENSG00000111319_37 (sequence is synthesized)
gaaggtagatgtgtgaccttgggccagctgtttgagctctctgagccttagcttcctcctctgtgatatgaggatgagactctcacaggctgttggttggagtgactgagggagtgtgag

SEQ ID NO: 182565 - DNA, 120 bp, Artificial Sequence
  ENSG00000111319_38 (sequence is synthesized)
taagagagtggacatttctctctgcctcatctccctattccctgcaccacctacactttcctctctgaccctactctctctttcctgataaggaattactctcacttccaccacccgatg

SEQ ID NO: 182566 - DNA, 120 bp, Artificial Sequence
  ENSG00000111319_39 (sequence is synthesized)
gcttccatccctggccggccagcgggcgggctccccagccaggccgctgcacctgtcaggtgagggggaggagaggtttggctgccagattcaactggaaaggaaccagtcccagtccag

SEQ ID NO: 182567 - DNA, 120 bp, Artificial Sequence
  ENSG00000111319_40 (sequence is synthesized)
ccgcaacctgggagtgggaagctggaggcagcccagacctcctggagccctgcagtcctggggcagagacagaatcaggacacagctcgaggggaacaagctggaggagcaggaccctag

SEQ ID NO: 182568 - DNA, 120 bp, Artificial Sequence
  ENSG00000111319_41 (sequence is synthesized)
agaacctttgagatcaaacagccagggtgctgagcaccttattgcagggaggaccatgcccaatgggaacaagctggaggagcaggaccctagacctctgcagcccataccaggtctcat

SEQ ID NO: 182569 - DNA, 120 bp, Artificial Sequence
  ENSG00000111319_42 (sequence is synthesized)
ttcctggagacagactccctttggtgctggctccttctatttgcccccaccactgccccccacctgcctctactcactcagtgcccctcctccatccctatctctctgtccttcgctgtc

SEQ ID NO: 182570 - DNA, 120 bp, Artificial Sequence
  ENSG00000111319_43 (sequence is synthesized)
cctctctattgtctccctctttctgccctcctgtcctcccggttccccacccaggccctctcagcctggctggccccttctccttgtgttgccctcctagctgtgggctcaggatccttc

SEQ ID NO: 182571 - DNA, 120 bp, Artificial Sequence
  ENSG00000111319_44 (sequence is synthesized)
tgcagggaggaccatgcccaataaaactgatttatccttgggaagggtcagtttcttcattaggacaatgaagaaaaatccagctgtcccttccaaggggaggtatcatgagcagtatca

SEQ ID NO: 182572 - DNA, 120 bp, Artificial Sequence
  ENSG00000111319_45 (sequence is synthesized)
aggtaagcaagggaacctggtttggaatcctggttgacaccggctttcactttaagaagtcgcaagagactgccgcaagagaggaagccacagaccaggggaacaagctggaggagcagg

SEQ ID NO: 182573 - DNA, 120 bp, Artificial Sequence
  ENSG00000111319_46 (sequence is synthesized)
attcactcctgcttccaggagagcatgatcaaggagtgtggctgtgcctacatcttctatccgcggccccagaacgtggagtactgtgactacagaaagcacagttcctggggccaggtg

SEQ ID NO: 182574 - DNA, 120 bp, Artificial Sequence
  ENSG00000111321_0 (sequence is synthesized)
actcccacttcctgagctccgccatgggagccctggaggcccggcctggccgctcccggccctggggtgcacatcggccctgagtcccgtcccaggctctgggctcgggcagccgccgcc

SEQ ID NO: 182575 - DNA, 120 bp, Artificial Sequence
  ENSG00000111321_1 (sequence is synthesized)
accgctgcccaggacgtcgggcctcctgccttcctcccaggcccccacgttgctggccgcctggccgagtggccgccatgctcctgccttgggccacctctgcccccggcctggcctggg

SEQ ID NO: 182576 - DNA, 120 bp, Artificial Sequence
  ENSG00000111321_2 (sequence is synthesized)
ggcctctggtgctgggcctcttcgggctcctggcagcatcgcagccccaggcggtgcctccatatgcgtcggagaaccagacctgcagggaccaggaaaaggaatactatgagccccagc

SEQ ID NO: 182577 - DNA, 120 bp, Artificial Sequence
  ENSG00000111321_3 (sequence is synthesized)
accgcatctgctgctcccgctgcccgccaggcacctatgtctcagctaaatgtagccgcatccgggacacagtttgtgccacatgtgccgagaattcctacaacgagcactggaactacc

SEQ ID NO: 182578 - DNA, 120 bp, Artificial Sequence
  ENSG00000111321_4 (sequence is synthesized)
tgaccatctgccagctgtgccgcccctgtgacccagtgatgggcctcgaggagattgccccctgcacaagcaaacggaagacccagtgccgctgccagccgggaatgttctgtgctgcct

SEQ ID NO: 182579 - DNA, 120 bp, Artificial Sequence
  ENSG00000111321_5 (sequence is synthesized)
gggccctcgagtgtacacactgcgagctactttctgactgcccgcctggcactgaagccgagctcaaagatgaagttgggaagggtaacaaccactgcgtcccctgcaaggccgggcact

SEQ ID NO: 182580 - DNA, 120 bp, Artificial Sequence
  ENSG00000111321_6 (sequence is synthesized)
tccagaatacctcctcccccagcgcccgctgccagccccacaccaggtgtgagaaccaaggtctggtggaggcagctccaggcactgcccagtccgacacaacctgcaaaaatccattag

SEQ ID NO: 182581 - DNA, 120 bp, Artificial Sequence
  ENSG00000111321_7 (sequence is synthesized)
agccactgcccccagagatgtcaggaaccatgctgatgctggccgttctgctgccactggccttctttctgctccttgccaccgtcttctcctgcatctggaagagccacccttctctct

SEQ ID NO: 182582 - DNA, 120 bp, Artificial Sequence
  ENSG00000111321_8 (sequence is synthesized)
cttccctgacttggtacagccactgctacccatttctggagatgtttccccagtatccactgggctccccgcagccccagttttggaggcaggggtgccgcaacagcagagtcctctgga

SEQ ID NO: 182583 - DNA, 120 bp, Artificial Sequence
  ENSG00000111321_9 (sequence is synthesized)
cctgaccagggagccgcagttggaacccggggagcagagccaggtggcccacggtaccaatggcattcatgtcaccggcgggtctatgactatcactggcaacatctacatctacaatgg

SEQ ID NO: 182584 - DNA, 120 bp, Artificial Sequence
  ENSG00000111321_10 (sequence is synthesized)
accagtactggggggaccaccgggtcctggagacctcccagctacccccgaacctccataccccattcccgaagagggggaccctggccctcccgggctctctacaccccaccaggaaga

SEQ ID NO: 182585 - DNA, 120 bp, Artificial Sequence
  ENSG00000111321_11 (sequence is synthesized)
tggcaaggcttggcacctagcggagacagagcactgtggtgccacaccctctaacaggggcccaaggaaccaatttatcacccatgactgactgagtctgagaaaaggcagaagaagggg

SEQ ID NO: 182586 - DNA, 120 bp, Artificial Sequence
  ENSG00000111321_12 (sequence is synthesized)
ggcacaagggcaccttctcccttgaggctgccctgcccacgtgggattcacaggggcctgagtagggcccggggaagcagagccctaagggattaaggctcagacacctctgagagcagg

SEQ ID NO: 182587 - DNA, 120 bp, Artificial Sequence
  ENSG00000111321_13 (sequence is synthesized)
tgggcactggctgggtacggtgccctccacaggactctccctactgcctgagcaaacctgaggcctcccggcagacccacccaccccctggggctgctcagcctcaggcacggacagggc

SEQ ID NO: 182588 - DNA, 120 bp, Artificial Sequence
  ENSG00000111321_14 (sequence is synthesized)
acatgataccaactgctgcccactacggcacgccgcaccggagcacggcaccgagggagccgccacacggtcacctgcaaggacgtcacgggcccctctaaaggattcgtggtgctcatc

SEQ ID NO: 182589 - DNA, 120 bp, Artificial Sequence
  ENSG00000111321_15 (sequence is synthesized)
cccaagcttcagagaccctttggggttccacacttcacgtggactgaggtagaccctgcatgaagatgaaattatagggaggacgctccttccctcccctcctagaggagaggaaaggga

SEQ ID NO: 182590 - DNA, 120 bp, Artificial Sequence
  ENSG00000111321_16 (sequence is synthesized)
gtcattaacaactagggggttgggtaggattcctaggtatggggaagagttttggaaggggaggaaaatggcaagtgtatttatattgtaaccacatgcaaataaaaagaatgggaccta

SEQ ID NO: 182591 - DNA, 120 bp, Artificial Sequence
  ENSG00000111321_17 (sequence is synthesized)
actcccaggttgcggctggactgggactggttcctttccagttgaatctggcagccaaacctctcctccccctcacctgacaggtgcagcggcctggctggggagcccgcccgctggccg

SEQ ID NO: 182592 - DNA, 120 bp, Artificial Sequence
  ENSG00000111321_18 (sequence is synthesized)
aggagctgcattgtgtctagaaggaaaaaagctgctcccttttctctgtctgggttgcccagggatctggaaagctcttccttctcctcctcccctctgcccttcttggggctgtgatca

SEQ ID NO: 182593 - DNA, 75 bp, Artificial Sequence
  ENSG00000111321_19 (sequence is synthesized)
cagcaaagcagagcttgggaaaggtgagagctacgcaatggggtggatgggcatcctgaggcttaaaggaaactc

SEQ ID NO: 182594 - DNA, 120 bp, Artificial Sequence
  ENSG00000111321_20 (sequence is synthesized)
caatggggtggatgggcatcctgaggcttaaaggaaactcacaggccggcaaagggcccctcccttttgcccattcaccctggctggcctgcctttctcttgccagatgaagttgggaag

SEQ ID NO: 182595 - DNA, 120 bp, Artificial Sequence
  ENSG00000111321_21 (sequence is synthesized)
acatcttaaaaaaaatggggaaaagatgaacacttccctcccagaattgggcaagaagaaagttccttacagaaaaaattggagtatctctaggctagtttacacacacacacacacaca

SEQ ID NO: 182596 - DNA, 120 bp, Artificial Sequence
  ENSG00000111321_22 (sequence is synthesized)
cacacacacacacttttaaaattatatatactgtaatactatgtcaaggaacacatcccacactgagatgtaatgataactactattgtcatcattttgggcttaccaacattacacaat

SEQ ID NO: 182597 - DNA, 120 bp, Artificial Sequence
  ENSG00000111321_23 (sequence is synthesized)
gtggactgattggcttgctagcctagtagatgactattgtttctaatgactgtaacatcactaattggcagaaggttcactgtgtgtgttgggcactctgtaaccactttacatttacta

SEQ ID NO: 182598 - DNA, 120 bp, Artificial Sequence
  ENSG00000111321_24 (sequence is synthesized)
actcatttaatcttcttaatgatgctatgaagtagattctattatcatcctcatggactgaaggaagaaaccgaggctcaaagaggttaagtgatatactcaagatcacccacacaggtg

SEQ ID NO: 182599 - DNA, 120 bp, Artificial Sequence
  ENSG00000111321_25 (sequence is synthesized)
gtcactggtgttattagaacctgtactcaggttttcttactccagagcccatgtcataatgcatgcactatagaaaattagagacttcagataagcaaaactaaaaactcacccacagag

SEQ ID NO: 182600 - DNA, 120 bp, Artificial Sequence
  ENSG00000111321_26 (sequence is synthesized)
ccactacctagaatatccactcgttacattgtggtatatatcctcccggacattttctatgcatgtttatacatactgggttttgttgttgtttactaaaagtgaagtaattttaatatt

SEQ ID NO: 182601 - DNA, 120 bp, Artificial Sequence
  ENSG00000111321_27 (sequence is synthesized)
tcgtaacctgattttttcattccacaatctaagtatttttctgtgccctgttaatttttaactatgtatcaaatacaactggcattttagagctggaattttagagagtatgtaagctaa

SEQ ID NO: 182602 - DNA, 120 bp, Artificial Sequence
  ENSG00000111321_28 (sequence is synthesized)
cctcatcctatatatgaaaaactgatgcccaaagaagtgaaatgacttaaaagtcacacagccgggcaggaaaccgtggcccagactcccagtccagtttctccccaggcctcccatccc

SEQ ID NO: 182603 - DNA, 120 bp, Artificial Sequence
  ENSG00000111321_29 (sequence is synthesized)
ttcattcattcaactgatgatttactgaacatgccacgtaccaggcactgtcctaggcactgggcgtacagcagtgagcaaaacacagtacctcatttcctggagttcacatgcccatgg

SEQ ID NO: 182604 - DNA, 120 bp, Artificial Sequence
  ENSG00000111321_30 (sequence is synthesized)
agcaagaataagttaaactatatatcaggtggtataattgctaaacaaagcagggaaggggtcaatgagtgacagtggcaaaggatgggggtattttagacagagtggagagtgaaggcc

SEQ ID NO: 182605 - DNA, 120 bp, Artificial Sequence
  ENSG00000111321_31 (sequence is synthesized)
tctctgagaacctgatatttgagcggagagctgaagaagcaaggagccagccatggggttatctggggagaaagtgctccaggaagagggagcaaccagtgcaaagaccctgaggcaggg

SEQ ID NO: 182606 - DNA, 120 bp, Artificial Sequence
  ENSG00000111321_32 (sequence is synthesized)
ggcatggggaggagcagaggcaagtggtgagttgccaaagcatgcggtggggtgtgggaactaaagaaagatgagccagcctgggcaacacagccagaccccatctctacccaaaatgtt

SEQ ID NO: 182607 - DNA, 120 bp, Artificial Sequence
  ENSG00000111321_33 (sequence is synthesized)
gttccaagttagccaggcagggccaggtgcagtggctcacgcccaagctcccatcctgcacgcacaagcctgcccaatcctggtctctgaacaggagggcacccgcaccacccccaaaca

SEQ ID NO: 182608 - DNA, 120 bp, Artificial Sequence
  ENSG00000111321_34 (sequence is synthesized)
gtctcaaaaaaaaaaaaaaaaaaaagttagccagacagtcccagctactcaggaggctgaggctagaggatcacttgagtccaagagttcatgagcctgcagtgagctatgattgcacca

SEQ ID NO: 182609 - DNA, 89 bp, Artificial Sequence
  ENSG00000111321_35 (sequence is synthesized)
agtgagctatgattgcaccactgcactgtagcctgggtgacagaccctgaccctgtctggaaagaaagaaaaggaaggaaggaaagaaa

SEQ ID NO: 182610 - DNA, 120 bp, Artificial Sequence
  ENSG00000111321_36 (sequence is synthesized)
aaaagtgccggagctgggcttccctagaacggcctctcctctgcttccctgatagggccacctttcgagttttgtcctagcacctccctttctgtctctgcccccttcctttggtcttct

SEQ ID NO: 182611 - DNA, 120 bp, Artificial Sequence
  ENSG00000111321_37 (sequence is synthesized)
tcctccaggatctgtgtctcagctcctgcctctcactccctctctatctgccttctgtttctctttgggtctctcctgctctcctctttctggcctgcctcctctctctaatcctgcctc

SEQ ID NO: 182612 - DNA, 120 bp, Artificial Sequence
  ENSG00000111321_38 (sequence is synthesized)
tcttcctctcccccccttgccttgccccctctcactctaggccctcagctccagcctctggccctgacctcgagctgtgtcctgattctgtctctgccccaggactgcagggctccagga

SEQ ID NO: 182613 - DNA, 120 bp, Artificial Sequence
  ENSG00000111321_39 (sequence is synthesized)
gctactttctgactgcccgcctggcactgaagccgagctcaaaggtcagaggtccctgaggggctggatgtgaaaaggaggctgggtgccagggatctcaagtgggagcagggaatatgg

SEQ ID NO: 182614 - DNA, 120 bp, Artificial Sequence
  ENSG00000111321_40 (sequence is synthesized)
tgtgtccacggcgaccccccagatccttggcttaaaattcctcttctcattccatgcagaggctcacagaagggttctggagggacatggaactgggacaggtgcaggggacacaggagg

SEQ ID NO: 182615 - DNA, 89 bp, Artificial Sequence
  ENSG00000111321_41 (sequence is synthesized)
agggacatggaactgggacaggtgcaggggacacaggaggtggttcttctcagtactgggaagcttgggcaaaatggtaggcagtaggc

SEQ ID NO: 182616 - DNA, 120 bp, Artificial Sequence
  ENSG00000111321_42 (sequence is synthesized)
cctgagcaagggggtggagaacttgcaagccctgctctaccaggcggccacaggcagttccgaagcaagtttccctactctctcacccctgtaaacacccccacaggaaccatgctgatg

SEQ ID NO: 182617 - DNA, 120 bp, Artificial Sequence
  ENSG00000111325_0 (sequence is synthesized)
acggaagctggtagggctgtgggtgcttcactatggcgacggtgggggctccgcggcacttctgccgctgcgcctgcttctgcaccgataacttgtacgtggcgcgctatgggctgcacg

SEQ ID NO: 182618 - DNA, 120 bp, Artificial Sequence
  ENSG00000111325_1 (sequence is synthesized)
tgcgcttccgaggcgagcagcagctgcgccgggactacggcccgatcctgcgcagccgaggctgtgttagcgccaaggacttccagcagctgttagcagagcttgagcaggaggtggagc

SEQ ID NO: 182619 - DNA, 120 bp, Artificial Sequence
  ENSG00000111325_2 (sequence is synthesized)
ggcggcagcggctggggcaggagtcagcagctaggaaagccctcatcgcgagttcctaccacccggcacggcctgaggtctacgactcactgcaggatgcagctctggcccccgagttcc

SEQ ID NO: 182620 - DNA, 120 bp, Artificial Sequence
  ENSG00000111325_3 (sequence is synthesized)
tggccgtgactgagtacagcgtgtccccagacgcagacctcaagggccttctccagcggctggagacagtatcggaggagaagcgcatctaccgggtgcctgttttcacagcgcccttct

SEQ ID NO: 182621 - DNA, 120 bp, Artificial Sequence
  ENSG00000111325_4 (sequence is synthesized)
gccaggccctgctggaagagctggagcacttcgagcaatcggacatgcctaaggggaggcccaacaccatgaacaactacggggtgctgctgcacgagctcgggctggacgagccgctga

SEQ ID NO: 182622 - DNA, 120 bp, Artificial Sequence
  ENSG00000111325_5 (sequence is synthesized)
tgacaccactgcgggagcgcttcctgcagccgctgatggccctgctgtaccctgactgtggcgggggccggctcgacagccaccgggcctttgtggtcaaatacgcaccgggccaggacc

SEQ ID NO: 182623 - DNA, 120 bp, Artificial Sequence
  ENSG00000111325_6 (sequence is synthesized)
tggagctgggctgccactatgataatgccgagctcaccctcaatgtggccttgggcaaggtcttcacagggggcgccctgtattttgggggcctcttccaggcacccacagccctgacgg

SEQ ID NO: 182624 - DNA, 120 bp, Artificial Sequence
  ENSG00000111325_7 (sequence is synthesized)
tgtcgtctggctccgagcctctgctgtgcgcaacagcctctgtcccatgtgctgccgtgagcccgacctggtggacgatgagggcttcggtgatggcttcacccgagaggagcccgccac

SEQ ID NO: 182625 - DNA, 120 bp, Artificial Sequence
  ENSG00000111325_8 (sequence is synthesized)
ggtggatgtatgtgcgctcacctgagcttgcttgggcccagtgtgggggtggcaggcaggtgagggctccgttgccttggtctgggggcagaaataaaatccccgcagcctactgcactt

SEQ ID NO: 182626 - DNA, 120 bp, Artificial Sequence
  ENSG00000111325_9 (sequence is synthesized)
cttggctcaacggtgtgccagcttctgggtcattctatgggcaaagatgctgccttagttcaggtttgtcagaagcagggtctggaatggggcttcagcgagggagtcagggaagcaggg

SEQ ID NO: 182627 - DNA, 120 bp, Artificial Sequence
  ENSG00000111325_10 (sequence is synthesized)
gaggggagggagcagctgggcaaggaagtggcttcagaggacgtccagcctcagctggccccacggagagctccaggcagagcccacagtaccacagtgtgcccacaccaccggttactg

SEQ ID NO: 182628 - DNA, 120 bp, Artificial Sequence
  ENSG00000111325_11 (sequence is synthesized)
gctcctggatgagggggccagagaggagtgaataacttcccagacacttatctccagggcagggtgccttccagtagccaagggaagcctccagagagcacagatgtgaaccctcagcag

SEQ ID NO: 182629 - DNA, 120 bp, Artificial Sequence
  ENSG00000111325_12 (sequence is synthesized)
caggcatcaccccccagtggactcgggtgggccaccagtagcatcttctagatggcagaggggtgaatggcagggccaggaaccaggctgcccgggttcccattctgcttctgccacttc

SEQ ID NO: 182630 - DNA, 120 bp, Artificial Sequence
  ENSG00000111325_13 (sequence is synthesized)
cagctgtgtggctttaggtgagccttcaccttttggtgccttcgtttcctcatttagcacctacctcctagagctgttttgggagtcaaatgcgctgacgtatataaagtgctttgcaag

SEQ ID NO: 182631 - DNA, 120 bp, Artificial Sequence
  ENSG00000111325_14 (sequence is synthesized)
gaactagtcggacctccgagctctttaaactgtcctcagctcggctggttctccacgagctccgggcagacggcggggggtgggtcggcgtttaagtcaaaggccttggggctccgagtc

SEQ ID NO: 182632 - DNA, 120 bp, Artificial Sequence
  ENSG00000111325_15 (sequence is synthesized)
ccttcctctccccgtcctgtgaaggcacgacccagttcagctgtctgtaaagtggagccattagtccctgcctcgtagtgggaaaactgggaggcggaacgaggaggccgccggtcccaa

SEQ ID NO: 182633 - DNA, 120 bp, Artificial Sequence
  ENSG00000111325_16 (sequence is synthesized)
aaaagcaaaggcctcatctccatggcacaggtgatgaaacaggaagactgaagcccaggcctggccggcccacggccacattcaggccaacagaccatccctccttccacagaggagaag

SEQ ID NO: 182634 - DNA, 120 bp, Artificial Sequence
  ENSG00000111325_17 (sequence is synthesized)
tgcaagagttgtcatttgttggctgcggtgagaccacgccccgtcgccctcccacacctgaccccgccctcccgcgtccattgggaacgccaccggaagtaatgcgagacggagcgtttt

SEQ ID NO: 182635 - DNA, 120 bp, Artificial Sequence
  ENSG00000111325_18 (sequence is synthesized)
ggtggagacactcactggggcaatctgaggtaatccaacagactgtggcggagggaccggaagcgccaggcagggacccggggtagatgctaaatccaaactgaaacgtacagggctgga

SEQ ID NO: 182636 - DNA, 120 bp, Artificial Sequence
  ENSG00000111325_19 (sequence is synthesized)
ctgctgccagggctgctgccccactccctcctcctccttcccctggagtcagtggtgggaagcttcccaggagagtcctcagcaacctctggaacacaggacttggccatgactgtctcc

SEQ ID NO: 182637 - DNA, 120 bp, Artificial Sequence
  ENSG00000111325_20 (sequence is synthesized)
ccttcctgctgggggacagaggctcccagagccacttctgagttggggtacagacttcggtggctcatcagatgaaaggaggtgcagagagagcctgaagttggctctgtgatcccgact

SEQ ID NO: 182638 - DNA, 120 bp, Artificial Sequence
  ENSG00000111325_21 (sequence is synthesized)
ttggattgagaagctgaggcttaaagagggatcccttgcccaagcttttacagcaggagcagatgtgatcccagccacagcttccaggcccctgggctcctcacaccttaccatataccc

SEQ ID NO: 182639 - DNA, 120 bp, Artificial Sequence
  ENSG00000111325_22 (sequence is synthesized)
taacagtctggaacttgcagttgacccagatagattcaggagtgtaggctagacttggcttccagcctgggccctgtctggcgttctgggcttcagtttcttcatctgtacagtggcctc

SEQ ID NO: 182640 - DNA, 120 bp, Artificial Sequence
  ENSG00000111325_23 (sequence is synthesized)
caagtagggcaaaaaatgccccacttctcttcggatttcttgctgggctcacttattggctaaacccagcaggaaatgctgggcaagggaggtttgcgtgttgtttaacctctgattcag

SEQ ID NO: 182641 - DNA, 120 bp, Artificial Sequence
  ENSG00000111325_24 (sequence is synthesized)
tttcctcatctgtaaaatgggagcaacagtaaccccctctcttaaggcactgcgacgatcaagtgagttaatctgcatagagtgcctgtcacagggcccgcacgtagtgtttggaaagtg

SEQ ID NO: 182642 - DNA, 120 bp, Artificial Sequence
  ENSG00000111325_25 (sequence is synthesized)
tttcctattcttattggcactgatagcctgggctaggggctcctgtgggaggcagatacaagtttcccctcatggagcctgtgctttgttgggagtcatgggtggaatgaatccccctcc

SEQ ID NO: 182643 - DNA, 120 bp, Artificial Sequence
  ENSG00000111325_26 (sequence is synthesized)
tcccagcctgggggtgctctcctcattgccttccactccccggcagctgagatagtgctgaggctgttggctggggcagggcctaggctgcgaggtggccccatcgtgggcacactagcc

SEQ ID NO: 182644 - DNA, 120 bp, Artificial Sequence
  ENSG00000111325_27 (sequence is synthesized)
agacctcaagggccttctccagcggctggagacagtatcgggtgaggtcctggccctgagacctggcaggaccagggaatggcagcctgggaaacctgggtgtgggatgctggggtccct

SEQ ID NO: 182645 - DNA, 120 bp, Artificial Sequence
  ENSG00000111325_28 (sequence is synthesized)
ccagccaccatctctgcctccaaaaaccaaaccagcaggagctggaagggtcagtgggaccaacctgccaggagcaggacatccgcattcattcattcaatacctgccatgagcctgccc

SEQ ID NO: 182646 - DNA, 120 bp, Artificial Sequence
  ENSG00000111325_29 (sequence is synthesized)
cattctttccttcacccttccttcgtgccctcatccagcaaatagtggatatttgtgtcatgtgtgggacagctggcacactcaaacagggctgatccaagatcttaaagggaccattga

SEQ ID NO: 182647 - DNA, 120 bp, Artificial Sequence
  ENSG00000111325_30 (sequence is synthesized)
gacaggtatgggcaggataaagggaccagtaaggaatggcaaagcccggccccccagggctggcaacaggagggagcagttaccacctggagttgtggctctgggcggaggcctgcggcc

SEQ ID NO: 182648 - DNA, 120 bp, Artificial Sequence
  ENSG00000111325_31 (sequence is synthesized)
gctttgcgcacgccgcgcaccgtatcttcaaatacaagaatgacggcctctctctgcctcggttttctcaccgtaaagggatcctgcgcagccgaggctgtgttagcgccaaggacttcc

SEQ ID NO: 182649 - DNA, 120 bp, Artificial Sequence
  ENSG00000111325_32 (sequence is synthesized)
gcagaccgtttcctggcgagatcctgcgcagccgaggctgtgttagcgccaaggacttccagcagctgttagcagaggtaccagtcccctgcccctgcacagctcctcctcgttagattt

SEQ ID NO: 182650 - DNA, 120 bp, Artificial Sequence
  ENSG00000111325_33 (sequence is synthesized)
gtgtccgcagcttgaggacacagcttgagcctagcctcagtccctgatccctgaagggtcacttaggccctcactttcctccttcctgccccccactcatccctccacacctgagtcttg

SEQ ID NO: 182651 - DNA, 120 bp, Artificial Sequence
  ENSG00000111328_0 (sequence is synthesized)
aaagtttgcggccgcccctgcgccgcacccggggcctgggtgagactgcggcggcggcagggcgcggacggccatatttgccggcgcggcccgagccgccgacaacaaaaagtgcgcggg

SEQ ID NO: 182652 - DNA, 80 bp, Artificial Sequence
  ENSG00000111328_1 (sequence is synthesized)
gacaacaaaaagtgcgcgggcgctcggcgggcgctcggacgggcgcggggctgcagcgctaccgcccggcctcgccgccg

SEQ ID NO: 182653 - DNA, 120 bp, Artificial Sequence
  ENSG00000111328_2 (sequence is synthesized)
gtcttacaaaccgaacttggccgcgcacatgcccgccgccgccctcaacgccgctgggagtgtccactcgccttccaccagcatggcaacgtcttcacagtaccgccagctgctcagtga

SEQ ID NO: 182654 - DNA, 120 bp, Artificial Sequence
  ENSG00000111328_3 (sequence is synthesized)
ctacgggccaccgtccctaggctacacccagggaactgggaacagccaggtgccccaaagcaaatacgcggagctgctggccatcattgaagagctggggaaggagatcagacccacgta

SEQ ID NO: 182655 - DNA, 120 bp, Artificial Sequence
  ENSG00000111328_4 (sequence is synthesized)
cgcagggagcaagagtgccatggagaggctgaagcgcggcatcattcacgctagaggactggttcgggagtgcttggcagaaacggaacggaatgccagatcctagctgccttgttggtt

SEQ ID NO: 182656 - DNA, 120 bp, Artificial Sequence
  ENSG00000111328_5 (sequence is synthesized)
atgagaagttacagttcatctcccctgttcagatgaaacccttgttttcaaaatggttacagtttcgtttttcctcccatggttcacttggctctgaacctacagtctcaaagattgaga

SEQ ID NO: 182657 - DNA, 120 bp, Artificial Sequence
  ENSG00000111328_6 (sequence is synthesized)
aaagattttgcagttaattaggatttgcattttaagtagttaggaactgcccaggttttttttgttttttaagcattgatttaaaagatgcacggaaagttatcttacagcaaactgtag

SEQ ID NO: 182658 - DNA, 120 bp, Artificial Sequence
  ENSG00000111328_7 (sequence is synthesized)
tttgcctccaagacaccattgtctccctttaatcttctcttttgtatacatttgttacccatggtgttctttgttccttttcataagctaataccactgtagggattttgttttgaacgc

SEQ ID NO: 182659 - DNA, 120 bp, Artificial Sequence
  ENSG00000111328_8 (sequence is synthesized)
atattgacagcacgctttacttagtagccggttcccatttgccatacaatgtaggttctgcttaatgtaacttcttttttgcttaagcatttgcatgactattagtgcttcaaagtcaat

SEQ ID NO: 182660 - DNA, 120 bp, Artificial Sequence
  ENSG00000111328_9 (sequence is synthesized)
ttttaaaaatgcacaagttataaatacagaagaaagagcaacccaccaaacctaacaaggacccccgaacactttcatactaagactgtaagtagatctcagttctgcgtttattgtaag

SEQ ID NO: 182661 - DNA, 120 bp, Artificial Sequence
  ENSG00000111328_10 (sequence is synthesized)
ttgataaaaacatctggaagaaaatgactaaaactgtttgcatctttgtatgtatttattacttgatgtaataaagcttattttcattaacaatttgtattaaaatgtgggttccttgaa

SEQ ID NO: 182662 - DNA, 120 bp, Artificial Sequence
  ENSG00000111328_11 (sequence is synthesized)
ctgaggtcgcggggccgccgggactgggaccaggatggggtcgccggcgggcagcgtactcggaggcccgggggcctcggccgggagcgtgggagcaggggctaccccatgcggtcacgc

SEQ ID NO: 182663 - DNA, 120 bp, Artificial Sequence
  ENSG00000111328_12 (sequence is synthesized)
ctcttgggaagcactgcctctaacaaatggagaaactgaggactggagggcggggagcctgtctgaggtcacacagccaggagtggcacagctggggctggcacgaagtccagtggggag

SEQ ID NO: 182664 - DNA, 120 bp, Artificial Sequence
  ENSG00000111328_13 (sequence is synthesized)
tcctagccacggactcccctgccagatccaggaggctgcgttctgggctgggccctgcttggtcactgactgcagctctggacaggccccaatgttgcatcccatatgtggggcctcaac

SEQ ID NO: 182665 - DNA, 120 bp, Artificial Sequence
  ENSG00000111328_14 (sequence is synthesized)
cctcctgtcttgggatacagagcccttggggcatagactgctaagagtctggtcccctctttggggagggggagacaggcacagaggggttgaggggctttatctggggcacacagaggc

SEQ ID NO: 182666 - DNA, 120 bp, Artificial Sequence
  ENSG00000111328_15 (sequence is synthesized)
catggtgttctctagatttctgatttgatgtccagcgtgcctgtctccagccagggttgggtctcaaatactccaaggccttcctgtcttccctgtcattgagcacagcagagatttgag

SEQ ID NO: 182667 - DNA, 120 bp, Artificial Sequence
  ENSG00000111328_16 (sequence is synthesized)
cgcatagaagcaaaaaggcttggaagctcagcctggtttcgaccagcctatgtggcgctgtggtgtgatgtggcctctaggttctcagcctctggggaccaggacacagggagaggggat

SEQ ID NO: 182668 - DNA, 120 bp, Artificial Sequence
  ENSG00000111328_17 (sequence is synthesized)
gggcagagttcaggccaggagtggcaataattttatctttgggagcagccctgctgcttggaaggttctggttggatgggatggagctctgtgaggaccagcggctgctgcagagctggg

SEQ ID NO: 182669 - DNA, 120 bp, Artificial Sequence
  ENSG00000111328_18 (sequence is synthesized)
gatggtcaggtgccttgtagctacatttcattatccatcttatatgctggtcaaaccggaggtggagagcagggttctccatcctgctacagttggtggtgtgggtcctgggcaagggct

SEQ ID NO: 182670 - DNA, 120 bp, Artificial Sequence
  ENSG00000111328_19 (sequence is synthesized)
gttgcaggacccggagtccttgccttggtacaactggctgagctgactcctggcctctctctccccaccccacagctgggagtgtccactcgccttccaccagcatggcaacgtcttcac

SEQ ID NO: 182671 - DNA, 120 bp, Artificial Sequence
  ENSG00000111328_20 (sequence is synthesized)
gtctcaaaggagtcttggatccccaaagggttaaaaaccacttcatacagacagagacatgaaatttatttgaaatcaatgtcaagcatcggttattctaatcctggggcttggccagac

SEQ ID NO: 182672 - DNA, 120 bp, Artificial Sequence
  ENSG00000111328_21 (sequence is synthesized)
ccaagtctgcggcgcccactgtgtgtgtgagagagagaccgtgtggctctgggggcggcaggcgggcagctgccgaggaggactagctgggagtgtccactcgccttccaccagcatggc

SEQ ID NO: 182673 - DNA, 86 bp, Artificial Sequence
  ENSG00000111328_22 (sequence is synthesized)
taacaaggacccccgaacactttcatactaagactggtcttgttttgccacccaggctggagtgcagtaatataatcttggctcac

SEQ ID NO: 182674 - DNA, 72 bp, Artificial Sequence
  ENSG00000111328_23 (sequence is synthesized)
attctgtatttgtcctgattgggaagcaacttaaaactttttaaaagaggcgaaggcagaagagaacaaagg

SEQ ID NO: 182675 - DNA, 120 bp, Artificial Sequence
  ENSG00000111328_24 (sequence is synthesized)
aaaactttttaaaagaggcgaaggcagaagagaacaaaggaaggagaaagtaacttgtggaatggtgagaaaggcatgaggcgaattctcagccatgacaaggctgaaggccagcaggaa

SEQ ID NO: 182676 - DNA, 120 bp, Artificial Sequence
  ENSG00000111328_25 (sequence is synthesized)
caggctctagcgaaatgggtgctgtgtccccttcctgcatgtggcagaaagttgcaaagtttcatggatttgaatgtgaacatctgttccctggacgcactgccaacaacgtggtccaac

SEQ ID NO: 182677 - DNA, 71 bp, Artificial Sequence
  ENSG00000111328_26 (sequence is synthesized)
catctgttccctggacgcactgccaacaacgtggtccaactggtactcatcgttggaactaccaagtcaac

SEQ ID NO: 182678 - DNA, 120 bp, Artificial Sequence
  ENSG00000111328_27 (sequence is synthesized)
tgacttccccagggtcaggcgattctgtcacctcaggctccctagtaggtgaagactacaggcagacaccaccacatctgagtaattactttttgtagagatggggtttcgccatattgc

SEQ ID NO: 182679 - DNA, 120 bp, Artificial Sequence
  ENSG00000111328_28 (sequence is synthesized)
agatattaaaagacagatgagatgggcctagactctctgcctacatctttctccagtgctggatgctccctgcccttgaacatcagactccacgttcttcagttttgggactcagactgg

SEQ ID NO: 182680 - DNA, 120 bp, Artificial Sequence
  ENSG00000111328_29 (sequence is synthesized)
cagcctattttgggaccttgtgatcataatttatttgcatgggagctcctgggatcatagcagacaggaggcaggactagattgtagcttcagacagagcagcatgcagaggcttgcatt

SEQ ID NO: 182681 - DNA, 84 bp, Artificial Sequence
  ENSG00000111328_30 (sequence is synthesized)
ggattgctcctgcagggcccgggagacccccaaatactgtgagtgccccaactgtggaagtgggaaagggagatcctcctctcc

SEQ ID NO: 182682 - DNA, 120 bp, Artificial Sequence
  ENSG00000111328_31 (sequence is synthesized)
gccccaactgtggaagtgggaaagggagatcctcctctcccgaacacacacccccccactggagaggctgaaggtctgtttgcaggagaaatttccaactttacctggagctaagtcaga

SEQ ID NO: 182683 - DNA, 90 bp, Artificial Sequence
  ENSG00000111328_32 (sequence is synthesized)
aggccgtgggagctcgctgggtccccagaagatcgggagggtggccagaggagcaagggataaaactccacagggagaagaattctctag

SEQ ID NO: 182684 - DNA, 120 bp, Artificial Sequence
  ENSG00000111328_33 (sequence is synthesized)
gagcaagggataaaactccacagggagaagaattctctagtcgaacttcgtaacaatttaaacagggtgagaagcctcctggccagaacttgggcaactgcacgaatccagcatgcagac

SEQ ID NO: 182685 - DNA, 120 bp, Artificial Sequence
  ENSG00000111328_34 (sequence is synthesized)
ttcacaggtgggggaagaactacagcccttttctttcgctgctgggaggggcacagccttggggcaaattttcaagccagtctcaccctctgcctggaaacagactcggggcagttgtgg

SEQ ID NO: 182686 - DNA, 77 bp, Artificial Sequence
  ENSG00000111328_35 (sequence is synthesized)
tctcaccctctgcctggaaacagactcggggcagttgtgggggaacacggtgggagtaagaccggcccttgggtttg

SEQ ID NO: 182687 - DNA, 120 bp, Artificial Sequence
  ENSG00000111328_36 (sequence is synthesized)
ctctcctaggtacacgactccagtgacctgggaatctcacccacattccctacagcagccgcagcaagacccgcccaaggagagtctgagctcagacacgcctagctccacccccacctg

SEQ ID NO: 182688 - DNA, 120 bp, Artificial Sequence
  ENSG00000111328_37 (sequence is synthesized)
atggtccttccctatgcaccctggcaggaagacaaagggcaaataaatcttgggagttctagggccccgcccactgctggttcctccccatattaccacagctgatgctttctggaaagg

SEQ ID NO: 182689 - DNA, 120 bp, Artificial Sequence
  ENSG00000111328_38 (sequence is synthesized)
accacctcctggcaggaggccaaccagcaaaaaaaatagaccattaacccaccaaagctccattgtaccctctgccacctccaccgaacaggcactggtagccatggctgagagacccat

SEQ ID NO: 182690 - DNA, 76 bp, Artificial Sequence
  ENSG00000111328_39 (sequence is synthesized)
agatggttcacatcacaggactctgcagataacctccagtaccagcctggaactgggaagatgtttggctcatagg

SEQ ID NO: 182691 - DNA, 89 bp, Artificial Sequence
  ENSG00000111328_40 (sequence is synthesized)
cagaagagagacaacaatcactgcaagtttggctcataggaagccacatccataggaaaaggggcagagtactacatgaagagccttca

SEQ ID NO: 182692 - DNA, 120 bp, Artificial Sequence
  ENSG00000111328_41 (sequence is synthesized)
gaacaaaccctggtaatatgacaaaacaagacgcttcaacaccccccaaaaaacatactagttcactggcaatggatccaaaccaagaagaaatacctgatttacctgaaaaagaattca

SEQ ID NO: 182693 - DNA, 77 bp, Artificial Sequence
  ENSG00000111328_42 (sequence is synthesized)
aaaaagaattcaggaggttagttattaatcagggaaggaccagagaaaggtgaagcccaatgactcagggaaataga

SEQ ID NO: 182694 - DNA, 120 bp, Artificial Sequence
  ENSG00000111328_43 (sequence is synthesized)
tctagcgaaatgggtgctgtgtccccttcctgcatgtggcagaaagttgcaaaggtatgagagaggagacaaacggaaaccattctcccttatctccagctccaaatttcccctcccact

SEQ ID NO: 182695 - DNA, 120 bp, Artificial Sequence
  ENSG00000111328_44 (sequence is synthesized)
ggctctagcgaaatgggtgctgtgtccccttcctgcatgtggcagaaagttgcaaagggcgtttgggctggggaagggtcctgtacactcgcaacaggaggtgtagaatgagccctgcat

SEQ ID NO: 182696 - DNA, 120 bp, Artificial Sequence
  ENSG00000111328_45 (sequence is synthesized)
tgaatgtgtaagcatccaaagctgtcactgaggtgagaagagccttcattggcagcctcaaagagaaaggtgtgcttggatgtatgcactggacatgccacctaggcctactggacatgc

SEQ ID NO: 182697 - DNA, 120 bp, Artificial Sequence
  ENSG00000111331_0 (sequence is synthesized)
agaaatccgaaggccgcgccagagccctgcttccccttgcacctgcgccgggcggccatggacttgtacagcaccccggccgctgcgctggacaggttcgtggccagaaggctgcagccg

SEQ ID NO: 182698 - DNA, 120 bp, Artificial Sequence
  ENSG00000111331_1 (sequence is synthesized)
cggaaggagttcgtagagaaggcgcggcgcgctctgggcgccctggccgctgccctgagggagcgcgggggccgcctcggtgctgctgccccgcgggtgctgaaaactgtcaagggaggc

SEQ ID NO: 182699 - DNA, 120 bp, Artificial Sequence
  ENSG00000111331_2 (sequence is synthesized)
tcctcgggccggggcacagctctcaagggtggctgtgattctgaacttgtcatcttcctcgactgcttcaagagctatgtggaccagagggcccgccgtgcagagatcctcagtgagatg

SEQ ID NO: 182700 - DNA, 120 bp, Artificial Sequence
  ENSG00000111331_3 (sequence is synthesized)
cgggcatcgctggaatcctggtggcagaacccagtccctggtctgagactcacgtttcctgagcagagcgtgcctggggccctgcagttccgcctgacatccgtagatcttgaggactgg

SEQ ID NO: 182701 - DNA, 120 bp, Artificial Sequence
  ENSG00000111331_4 (sequence is synthesized)
atggatgttagcctggtgcctgccttcaatgtcctgggtcaggccggctccggcgtcaaacccaagccacaagtctactctaccctcctcaacagtggctgccaagggggcgagcatgcg

SEQ ID NO: 182702 - DNA, 120 bp, Artificial Sequence
  ENSG00000111331_5 (sequence is synthesized)
gcctgcttcacagagctgcggaggaactttgtgaacattcgcccagccaagttgaagaacctaatcttgctggtgaagcactggtaccaccaggtgtgcctacaggggttgtggaaggag

SEQ ID NO: 182703 - DNA, 120 bp, Artificial Sequence
  ENSG00000111331_6 (sequence is synthesized)
acgctgcccccggtctatgccctggaattgctgaccatcttcgcctgggagcagggctgtaagaaggatgctttcagcctagccgaaggcctccgaactgtcctgggcctgatccaacag

SEQ ID NO: 182704 - DNA, 120 bp, Artificial Sequence
  ENSG00000111331_7 (sequence is synthesized)
catcagcacctgtgtgttttctggactgtcaactatggcttcgaggaccctgcagttgggcagttcttgcagcggcagcttaagagacccaggcctgtgatcctggacccagctgacccc

SEQ ID NO: 182705 - DNA, 120 bp, Artificial Sequence
  ENSG00000111331_8 (sequence is synthesized)
acatgggacctggggaatggggcagcctggcactgggatttgctagcccaggaggcagcatcctgctatgaccacccatgctttctgagggggatgggggacccagtgcagtcttggaag

SEQ ID NO: 182706 - DNA, 120 bp, Artificial Sequence
  ENSG00000111331_9 (sequence is synthesized)
gggccgggccttccacgtgctggatgctcaggtttgggccaccccatccagctagaccctaaccagaagacccctgaaaacagcaagagcctcaatgctgtgtacccaagagcagggagc

SEQ ID NO: 182707 - DNA, 120 bp, Artificial Sequence
  ENSG00000111331_10 (sequence is synthesized)
aaacctccctcatgcccagctcctggccccactggggcagccagcatcgtcccctctgtgccgggaatggccttggacctgtctcagatccccaccaaggagctggaccgcttcatccag

SEQ ID NO: 182708 - DNA, 120 bp, Artificial Sequence
  ENSG00000111331_11 (sequence is synthesized)
gaccacctgaagccgagcccccagttccaggagcaggtgaaaaaggccattgacatcatcttgcgctgcctccatgagaactgtgttcacaaggcctcaagagtcagtaaagggggctca

SEQ ID NO: 182709 - DNA, 120 bp, Artificial Sequence
  ENSG00000111331_12 (sequence is synthesized)
tttggccggggcacagacctaagggatggctgtgatgttgaactcatcatcttcctcaactgcttcacggactacaaggaccaggggccccgccgcgcagagatccttgatgagatgcga

SEQ ID NO: 182710 - DNA, 120 bp, Artificial Sequence
  ENSG00000111331_13 (sequence is synthesized)
gcgcagctagaatcctggtggcaggaccaggtgcccagcctgagccttcagtttcctgagcagaatgtgcctgaggctctgcagttccagctggtgtccacagccctgaagagctggacg

SEQ ID NO: 182711 - DNA, 120 bp, Artificial Sequence
  ENSG00000111331_14 (sequence is synthesized)
gatgttagcctgctgcctgccttcgatgctgtggggcagctcagttctggcaccaaaccaaatccccaggtctactcgaggctcctcaccagtggctgccaggagggcgagcataaggcc

SEQ ID NO: 182712 - DNA, 120 bp, Artificial Sequence
  ENSG00000111331_15 (sequence is synthesized)
tgcttcgcagagctgcggaggaacttcatgaacattcgccctgtcaagctgaagaacctgattctgctggtgaagcactggtaccgccaggttgcggctcagaacaaaggaaaaggacca

SEQ ID NO: 182713 - DNA, 120 bp, Artificial Sequence
  ENSG00000111331_16 (sequence is synthesized)
gcccctgcctctctgcccccagcctatgccctggagctcctcaccatctttgcctgggagcagggctgcaggcaggattgtttcaacatggcccaaggcttccggacggtgctggggctc

SEQ ID NO: 182714 - DNA, 120 bp, Artificial Sequence
  ENSG00000111331_17 (sequence is synthesized)
gtgcaacagcatcagcagctctgtgtctactggacggtcaactatagcactgaggacccagccatgagaatgcaccttcttggccagcttcgaaaacccagacccctggtcctggacccc

SEQ ID NO: 182715 - DNA, 120 bp, Artificial Sequence
  ENSG00000111331_18 (sequence is synthesized)
gctgatcccacctggaacgtgggccacggtagctgggagctgttggcccaggaagcagcagcgctggggatgcaggcctgctttctgagtagagacgggacatctgtgcagccctgggat

SEQ ID NO: 182716 - DNA, 120 bp, Artificial Sequence
  ENSG00000111331_19 (sequence is synthesized)
gtgatgccagccctcctttaccaaaccccagctggggaccttgacaagttcatcagtgaatttctccagcccaaccgccagttcctggcccaggtgaacaaggccgttgataccatctgt

SEQ ID NO: 182717 - DNA, 120 bp, Artificial Sequence
  ENSG00000111331_20 (sequence is synthesized)
tcatttttgaaggaaaactgcttccggaattctcccatcaaagtgatcaaggtggtcaagggtggctcttcagccaaaggcacagctctgcgaggccgctcagatgccgacctcgtggtg

SEQ ID NO: 182718 - DNA, 120 bp, Artificial Sequence
  ENSG00000111331_21 (sequence is synthesized)
ttcctcagctgcttcagccagttcactgagcagggcaacaagcgggccgagatcatctccgagatccgagcccagctggaggcatgtcaacaggagcggcagttcgaggtcaagtttgaa

SEQ ID NO: 182719 - DNA, 120 bp, Artificial Sequence
  ENSG00000111331_22 (sequence is synthesized)
gtctccaaatgggagaatccccgcgtgctgagcttctcactgacatcccagacgatgctggaccagagtgtggactttgatgtgctgccagcctttgacgccctaggccagctggtctct

SEQ ID NO: 182720 - DNA, 120 bp, Artificial Sequence
  ENSG00000111331_23 (sequence is synthesized)
ggctccaggcccagctctcaagtctacgtcgacctcatccacagctacagcaatgcgggcgagtactccacctgcttcacagagctacaacgggacttcatcatctctcgccctaccaag

SEQ ID NO: 182721 - DNA, 120 bp, Artificial Sequence
  ENSG00000111331_24 (sequence is synthesized)
ctgaagagcctgatccggctggtgaagcactggtaccagcagtgtaccaagatctccaaggggagaggctccctacccccacagcacgggctggaactcctgactgtgtatgcctgggag

SEQ ID NO: 182722 - DNA, 120 bp, Artificial Sequence
  ENSG00000111331_25 (sequence is synthesized)
cagggcgggaaggactcccagttcaacatggctgagggcttccgcacggtcctggagctggtcacccagtaccgccagctctgtatctactggaccatcaactacaacgccaaggacaag

SEQ ID NO: 182723 - DNA, 120 bp, Artificial Sequence
  ENSG00000111331_26 (sequence is synthesized)
actgttggagacttcctgaaacagcagcttcagaagcccaggcctatcatcctggatccggctgacccgacaggcaacctgggccacaatgcccgctgggacctgctggccaaggaagct

SEQ ID NO: 182724 - DNA, 120 bp, Artificial Sequence
  ENSG00000111331_27 (sequence is synthesized)
atggacaccagccctcagcatgaggaaattcagggtcccctaccagatgagagagattgtgtacatgtgtgtgtgagcacatgtgtgcatgtgtgtgcacacgtgtgcatgtgtgtgttt

SEQ ID NO: 182725 - DNA, 120 bp, Artificial Sequence
  ENSG00000111331_28 (sequence is synthesized)
tagtgaatctgctctcccagctcacacactcccctgcctcccatggcttacacactaggatccagactccatggtttgacaccagcctgcgtttgcagcttctctgtcacttccatgact

SEQ ID NO: 182726 - DNA, 120 bp, Artificial Sequence
  ENSG00000111331_29 (sequence is synthesized)
ctatcctcataccaccactgctgcttcccacccagctgagaatgccccctcctccctgactcctctctgcccatgcaaattagctcacatctttcctcctgctgcaatccatcccttcct

SEQ ID NO: 182727 - DNA, 120 bp, Artificial Sequence
  ENSG00000111331_30 (sequence is synthesized)
cccattggcctctccttgccaaatctaaatagtttatatagggatggcagagagttcccatctcatctgtcagccacagtcatttggtactggctacctggagccttatcttctgaaggg

SEQ ID NO: 182728 - DNA, 120 bp, Artificial Sequence
  ENSG00000111331_31 (sequence is synthesized)
ttttaaagaatggccaattagctgagaagaattatctaatcaattagtgatgtctgccatggatgcagtagaggaaagtggtggtacaagtgccatgattgattagcaatgtctgcactg

SEQ ID NO: 182729 - DNA, 120 bp, Artificial Sequence
  ENSG00000111331_32 (sequence is synthesized)
gatacggaaaaaagaaggtgcttgcaggtttacagtgtatatgtgggctattgaagagccctctgagctcggttgctagcaggagagcatgcccatattggcttactttgtctgccacag

SEQ ID NO: 182730 - DNA, 120 bp, Artificial Sequence
  ENSG00000111331_33 (sequence is synthesized)
acacagacagagggagttgggacatgcatgctatggggaccctcttgttggacacctaattggatgcctcttcatgagaggcctccttttcttcaccttttatgctgcactcctccccta

SEQ ID NO: 182731 - DNA, 120 bp, Artificial Sequence
  ENSG00000111331_34 (sequence is synthesized)
gtttacacatcttgatgctgtggctcagtttgccttcctgaatttttattgggtccctgttttctctcctaacatgctgagattctgcatccccacagcctaaactgagccagtggccaa

SEQ ID NO: 182732 - DNA, 120 bp, Artificial Sequence
  ENSG00000111331_35 (sequence is synthesized)
acaaccgtgctcagcctgtttctctctgccctctagagcaaggcccaccaggtccatccaggaggctctcctgacctcaagtccaacaacagtgtccacactagtcaaggttcagcccag

SEQ ID NO: 182733 - DNA, 120 bp, Artificial Sequence
  ENSG00000111331_36 (sequence is synthesized)
aaaacagaaagcactctaggaatcttaggcagaaagggattttatctaaatcactggaaaggctggaggagcagaaggcagaggccaccactggactattggtttcaatattagaccact

SEQ ID NO: 182734 - DNA, 120 bp, Artificial Sequence
  ENSG00000111331_37 (sequence is synthesized)
gtagccgaatcagaggccagagagcagccactgctactgctaatgccaccactacccctgccatcactgccccacatggacaaaactggagtcgagacctaggttagattcctgcaacca

SEQ ID NO: 182735 - DNA, 120 bp, Artificial Sequence
  ENSG00000111331_38 (sequence is synthesized)
caaacatccatcagggatggccagctgccagagctgcgggaagacggatcccacctccctttcttagcagaatctaaattacagccagacctctggctgcagaggagtctgagacatgta

SEQ ID NO: 182736 - DNA, 120 bp, Artificial Sequence
  ENSG00000111331_39 (sequence is synthesized)
tgattgaatgggtgccaagtgccagggggcggagtccccagcagatgcatcctggccatctgttgcgtggatgagggagtgggtctatctcagaggaaggaacaggaaacaaagaaagga

SEQ ID NO: 182737 - DNA, 120 bp, Artificial Sequence
  ENSG00000111331_40 (sequence is synthesized)
agccactgaacatcccttctctgctccacaggagtgccttagacagcctgactctccacaaaccactgttaaaacttacctgctaggaatgctagattgaatgggatgggaagagccttc

SEQ ID NO: 182738 - DNA, 120 bp, Artificial Sequence
  ENSG00000111331_41 (sequence is synthesized)
cctcattattgtcattcttggagagaggtgagcaaccaagggaagctcctctgattcacctagaacctgttctctgccgtctttggctcagcctacagagactagagtaggtgaagggac

SEQ ID NO: 182739 - DNA, 120 bp, Artificial Sequence
  ENSG00000111331_42 (sequence is synthesized)
agaggacagggcttctaatacctgtgccatattgacagcctccatccctgtcccccatcttggtgctgaaccaacgctaagggcaccttcttagactcacctcatcgatactgcctggta

SEQ ID NO: 182740 - DNA, 120 bp, Artificial Sequence
  ENSG00000111331_43 (sequence is synthesized)
atccaaagctagaactctcaggaccccaaactccacctcttggattggccctggctgctgccacacacatatccaagagctcagggccagttctggtgggcagcagagacctgctctgcc

SEQ ID NO: 182741 - DNA, 120 bp, Artificial Sequence
  ENSG00000111331_44 (sequence is synthesized)
aagttgtccagcagcagagtggccctggcctgggcatcacaagccagtgatgctcctgggaagaccaggtggcaggtcgcagttgggtaccttccattcccaccacacagactctgggcc

SEQ ID NO: 182742 - DNA, 120 bp, Artificial Sequence
  ENSG00000111331_45 (sequence is synthesized)
tccccgcaaaatggctccagaattagagtaattatgagatggtgggaaccagagcaactcaggtgcatgatacaaggagaggttgtcatctgggtagggcagagaggagggcttgctcat

SEQ ID NO: 182743 - DNA, 120 bp, Artificial Sequence
  ENSG00000111331_46 (sequence is synthesized)
ctgaacaggggtgtatttcattccaggccctcagtctttggcaatggccaccctggtgttggcatattggccccactgtaacttttgggggcttcccggtctagccacaccctcggatgg

SEQ ID NO: 182744 - DNA, 120 bp, Artificial Sequence
  ENSG00000111331_47 (sequence is synthesized)
aaagacttgactgcataaagatgtcagttctccctgagttgattgataggcttaatggtcaccctaaaaacacccacatatgcttttcgatggaaccaggtaagttgacgctaaagttct

SEQ ID NO: 182745 - DNA, 120 bp, Artificial Sequence
  ENSG00000111331_48 (sequence is synthesized)
tatggaaaaatacacacgcaatagctaggaaaacacagggaaagaagagttctgagcagggcctagtcttagccaatattaaaacatactatgaagcctctgatacttaaacagcatggc

SEQ ID NO: 182746 - DNA, 120 bp, Artificial Sequence
  ENSG00000111331_49 (sequence is synthesized)
gctggtacgtaaatagaccaatgcagttaggtggctctttccaagactctggggaaaaaagtagtaaaaagctaaatgcaatcaatcagcaattgaaagctaagtgagagagccagaggg

SEQ ID NO: 182747 - DNA, 120 bp, Artificial Sequence
  ENSG00000111331_50 (sequence is synthesized)
cctccttggtggtaaaagagggttgcatttcttgcagccagaaggcagagaaagtgaagaccaagtccagaactgaatcctaagaaatgcaggactgcaaagaaattggtgtgtgtgtgt

SEQ ID NO: 182748 - DNA, 120 bp, Artificial Sequence
  ENSG00000111331_51 (sequence is synthesized)
gtgtgtgtgtgtgtgtgtgtgtttaatttttaaaaagtttttattgagatacaagtcaataccataaagctctcacccttctaaagtgtacaattcagtggtgtgagtatattcataaga

SEQ ID NO: 182749 - DNA, 120 bp, Artificial Sequence
  ENSG00000111331_52 (sequence is synthesized)
tttatacttggtgtctattcataagacttatatccagcatattcataactagagccatatcacagatgcattcatcataataattccagacattttcatcaccctaaaaggaaaccctga

SEQ ID NO: 182750 - DNA, 120 bp, Artificial Sequence
  ENSG00000111331_53 (sequence is synthesized)
aacccattagcagtcattccccattcctccaacccattctctccctaatccctagaaaccaccaatctgctgtgtatttcatctattgccaacatttcatataaatggcatcatacaata

SEQ ID NO: 182751 - DNA, 120 bp, Artificial Sequence
  ENSG00000111331_54 (sequence is synthesized)
agacctgacatcagcaagagggcaggttccaggctgtagatggggcgcaggtgatgggatcgtagtccgactcccaggctcctagagggtccctgatctgagctgttcttccctccacag

SEQ ID NO: 182752 - DNA, 120 bp, Artificial Sequence
  ENSG00000111331_55 (sequence is synthesized)
tgattgattaacaatgcctcccctgaataaggaaggggtaagcggtagcaccgtggttgattagtaatgtttgcctgaatgcagaatggcaaagtggccatgtgtgtcttattttctata

SEQ ID NO: 182753 - DNA, 120 bp, Artificial Sequence
  ENSG00000111331_56 (sequence is synthesized)
cctgccctgtagtgtataggagcactgaggaatctctgagccctggctctagcccctgcaaagtgttagataaaaggggaaaatagtccaaccagtgccacaggtggacacctagatgtt

SEQ ID NO: 182754 - DNA, 120 bp, Artificial Sequence
  ENSG00000111331_57 (sequence is synthesized)
tagcctggtgcctgccttcaatgtcctgggtgaggggttcctagaccattccagggttgggggcaaaagatcattgggaacaacacaggacttccaattctagcccagccaccaacttgc

SEQ ID NO: 182755 - DNA, 120 bp, Artificial Sequence
  ENSG00000111331_58 (sequence is synthesized)
tgtttgacctgggccagcctctacccctctctcagcctcagtctggggactaaacatattggacttgtgccagacaaaggcagagaaaccccagttcctcctggatctgtggtcctgctg

SEQ ID NO: 182756 - DNA, 120 bp, Artificial Sequence
  ENSG00000111331_59 (sequence is synthesized)
tcaagatgcttggccctcccacaggcatctgggagtttccctcagccactgcctggagcggttactgctcagcccttccacaaatactcccgaaagctaagccaagtggacatgtggcta

SEQ ID NO: 182757 - DNA, 120 bp, Artificial Sequence
  ENSG00000111331_60 (sequence is synthesized)
gcagtaggggcctggggacgaaaccagaattctgcaaaatcttgtattttatgttgaaaacatcaatgtgatttttgtgttctccttcgtaatacacgtatgcttgagttaagataaaaa

SEQ ID NO: 182758 - DNA, 120 bp, Artificial Sequence
  ENSG00000111331_61 (sequence is synthesized)
tggccattcatgttctctctctgggaattgtctgtttatgtcccttgtgcattattttctcttgggttagctgtcttgttactgatttgttgaagctctttatatattgtggatactgat

SEQ ID NO: 182759 - DNA, 120 bp, Artificial Sequence
  ENSG00000111331_62 (sequence is synthesized)
ccttatttagttaatataatgcattcttccaatagtcttccagtctgtgtcttgggcttttgctttgtttaaaggttatttgtaggacaaaatatctacagtttaatgtactcagatata

SEQ ID NO: 182760 - DNA, 120 bp, Artificial Sequence
  ENSG00000111331_63 (sequence is synthesized)
tcctttgaaaaatgagttattctttgtgtgtcttaagaagtctttccctatcctgccaggtgcagtggctcatggctggaatcccagcactttgagtggccgaggcaggtggatcacttg

SEQ ID NO: 182761 - DNA, 120 bp, Artificial Sequence
  ENSG00000111335_0 (sequence is synthesized)
agttggtaaactcactgcaaggggcagggcagagcctctgagcttaagttagttttgtttccctgtcccggatacaagagttggtaagctcgctgcagtgggtggagagaggcctctaga

SEQ ID NO: 182762 - DNA, 120 bp, Artificial Sequence
  ENSG00000111335_1 (sequence is synthesized)
cttcagtttcagtttcctggctctgggcagcagcaagaattcctctgcctcccatcctaccattcactgtcttgccggcagccagctgagagcaatgggaaatggggagtcccagctgtc

SEQ ID NO: 182763 - DNA, 120 bp, Artificial Sequence
  ENSG00000111335_2 (sequence is synthesized)
ctcggtgcctgctcagaagctgggttggtttatccaggaatacctgaagccctacgaagaatgtcagacactgatcgacgagatggtgaacaccatctgtgacgtcctgcaggaacccga

SEQ ID NO: 182764 - DNA, 120 bp, Artificial Sequence
  ENSG00000111335_3 (sequence is synthesized)
acagttccccctggtgcagggagtggccataggtggctcctatggacggaaaacagtcttaagaggcaactccgatggtacccttgtcctcttcttcagtgacttaaaacaattccagga

SEQ ID NO: 182765 - DNA, 120 bp, Artificial Sequence
  ENSG00000111335_4 (sequence is synthesized)
tcagaagagaagccaacgtgacatcctcgataaaactggggataagctgaagttctgtctgttcacgaagtggttgaaaaacaatttcgagatccagaagtcccttgatgggttcaccat

SEQ ID NO: 182766 - DNA, 120 bp, Artificial Sequence
  ENSG00000111335_5 (sequence is synthesized)
ccaggtgttcacaaaaaatcagagaatctctttcgaggtgctggccgccttcaacgctctgagcttaaatgataatcccagcccctggatctatcgagagctcaaaagatccttggataa

SEQ ID NO: 182767 - DNA, 120 bp, Artificial Sequence
  ENSG00000111335_6 (sequence is synthesized)
gacaaatgccagtcctggtgagtttgcagtctgcttcactgaactccagcagaagttttttgacaaccgtcctggaaaactaaaggatttgatcctcttgataaagcactggcatcaaca

SEQ ID NO: 182768 - DNA, 120 bp, Artificial Sequence
  ENSG00000111335_7 (sequence is synthesized)
gtgccagaaaaaaatcaaggatttaccctcgctgtctccgtatgccctggagctgcttacggtgtatgcctgggaacaggggtgcagaaaagacaactttgacattgctgaaggcgtcag

SEQ ID NO: 182769 - DNA, 120 bp, Artificial Sequence
  ENSG00000111335_8 (sequence is synthesized)
aaccgtactggagctgatcaaatgccaggagaagctgtgtatctattggatggtcaactacaactttgaagatgagaccatcaggaacatcctgctgcaccagctccaatcagcgaggcc

SEQ ID NO: 182770 - DNA, 120 bp, Artificial Sequence
  ENSG00000111335_9 (sequence is synthesized)
agtaatcttggatccagttgacccaaccaataatgtgagtggagataaaatatgctggcaatggctgaaaaaagaagctcaaacctggttgacttctcccaacctggataatgagttacc

SEQ ID NO: 182771 - DNA, 120 bp, Artificial Sequence
  ENSG00000111335_10 (sequence is synthesized)
tgcaccatcttggaatgttctgcctgcaccactcttcacgaccccaggccaccttctggataagttcatcaaggagtttctccagcccaacaaatgcttcctagagcagattgacagtgc

SEQ ID NO: 182772 - DNA, 120 bp, Artificial Sequence
  ENSG00000111335_11 (sequence is synthesized)
tgttaacatcatccgtacattccttaaagaaaactgcttccgacaatcaacagccaagatccagattgtccggggaggatcaaccgccaaaggcacagctctgaagactggctctgatgc

SEQ ID NO: 182773 - DNA, 120 bp, Artificial Sequence
  ENSG00000111335_12 (sequence is synthesized)
cgatctcgtcgtgttccataactcacttaaaagctacacctcccaaaaaaacgagcggcacaaaatcgtcaaggaaatccatgaacagctgaaagccttttggagggagaaggaggagga

SEQ ID NO: 182774 - DNA, 120 bp, Artificial Sequence
  ENSG00000111335_13 (sequence is synthesized)
gcttgaagtcagctttgagcctcccaagtggaaggctcccagggtgctgagcttctctctgaaatccaaagtcctcaacgaaagtgtcagctttgatgtgcttcctgcctttaatgcact

SEQ ID NO: 182775 - DNA, 120 bp, Artificial Sequence
  ENSG00000111335_14 (sequence is synthesized)
gggtcagctgagttctggctccacacccagccccgaggtttatgcagggctcattgatctgtataaatcctcggacctcccgggaggagagttttctacctgtttcacagtcctgcagcg

SEQ ID NO: 182776 - DNA, 120 bp, Artificial Sequence
  ENSG00000111335_15 (sequence is synthesized)
tcccggcccaccaaactaaaggatttaattcgcctggtgaagcactggtacaaagagtgtgaaaggaaactgaagccaaaggggtctttgcccccaaagtatgccttggagctgctcacc

SEQ ID NO: 182777 - DNA, 120 bp, Artificial Sequence
  ENSG00000111335_16 (sequence is synthesized)
atctatgcctgggagcaggggagtggagtgccggattttgacactgcagaaggtttccggacagtcctggagctggtcacacaatatcagcagctctgcatcttctggaaggtcaattac

SEQ ID NO: 182778 - DNA, 120 bp, Artificial Sequence
  ENSG00000111335_17 (sequence is synthesized)
aactttgaagatgagaccgtgaggaagtttctactgagccagttgcagaaaaccaggcctgtgatcttggacccagccgaacccacaggtgacgtgggtggaggggaccgttggtgttgg

SEQ ID NO: 182779 - DNA, 120 bp, Artificial Sequence
  ENSG00000111335_18 (sequence is synthesized)
catcttctggcaaaagaagcaaaggaatggttatcctctccctgcttcaaggatgggactggaaacccaataccaccttggaaagtgccgacaatgcagacaccaggaagttgtggagct

SEQ ID NO: 182780 - DNA, 120 bp, Artificial Sequence
  ENSG00000111335_19 (sequence is synthesized)
aggatccatcctattgtcaatgagatgttctcatccagaagccatagaatcctgaataataattctaaaagaaacttctagagatcatctggcaatcgcttttaaagactcggctcaccg

SEQ ID NO: 182781 - DNA, 120 bp, Artificial Sequence
  ENSG00000111335_20 (sequence is synthesized)
tgagaaagagtcactcacatccattcttcccttgatggtccctattcctccttcccttgcttcttggacttcttgaaatcaatcaagactgcaaaccctttcataaagtcttgccttgct

SEQ ID NO: 182782 - DNA, 120 bp, Artificial Sequence
  ENSG00000111335_21 (sequence is synthesized)
gaactccctctctgcaggcagcctgcctttaaaaatagttgctgtcatccactttatgtgcatcttatttctgtcaacttgtattttttttcttgtatttttccaattagctcctccttt

SEQ ID NO: 182783 - DNA, 120 bp, Artificial Sequence
  ENSG00000111335_22 (sequence is synthesized)
ttccttccagtctaaaaaaggaatcctctgtgtcttcaaagcaaagctctttactttccccttggttctcataactctgtgatcttgctctcggtgcttccaactcatccacgtcctgtc

SEQ ID NO: 182784 - DNA, 120 bp, Artificial Sequence
  ENSG00000111335_23 (sequence is synthesized)
tgtttcctctgtatacaaaaccctttctgcccctgctgacacagacatcctctatgccagcagccagccaaccctttcattagaacttcaagctctccaaaggctcagattataactgtt

SEQ ID NO: 182785 - DNA, 120 bp, Artificial Sequence
  ENSG00000111335_24 (sequence is synthesized)
gtcatatttatatgaggctgttgtcttttccttctgagcctgcctttctcccccccacccaggagtatcctcttgccaaatcaaaagactttttccttgggctttagccttaaagatact

SEQ ID NO: 182786 - DNA, 120 bp, Artificial Sequence
  ENSG00000111335_25 (sequence is synthesized)
tgaaggtctaggtgctttaacctcacataccctcacttaaacttttatcactgttgcatataccagttgtgatacaataaagaatgtatctggattttgtgcctagttcctagcacacag

SEQ ID NO: 182787 - DNA, 120 bp, Artificial Sequence
  ENSG00000111335_26 (sequence is synthesized)
cttcaaaaattctagagtttcctgataggagtgtcttttgtattcataacaagcccttttcacccatgcctgggtttatgctaacaaggttacccatggtgggcccttagtttcaaggaa

SEQ ID NO: 182788 - DNA, 120 bp, Artificial Sequence
  ENSG00000111335_27 (sequence is synthesized)
ggagttggccaagccagaaagaccaagcatgtggttaaagcattggaattttcagccccatcccacccccaatctccaaggaggtgatggggctggaaattgagttcaattttaacatgg

SEQ ID NO: 182789 - DNA, 120 bp, Artificial Sequence
  ENSG00000111335_28 (sequence is synthesized)
ccagtgatttaagcaatgctgcctatgtaaagaaaccccaataaaaactctggacagtgaggcttggggagcttcctgattggcagacattccaatgtactaggaaggtagcgcatcttg

SEQ ID NO: 182790 - DNA, 120 bp, Artificial Sequence
  ENSG00000111335_29 (sequence is synthesized)
attccacagggacaaaggctcctgagctctgggcccttccagtgcttgccaccctacatactctttgtctggctcttcatttgtattctttataataaaatggtgattgtaagtagagca

SEQ ID NO: 182791 - DNA, 120 bp, Artificial Sequence
  ENSG00000111335_30 (sequence is synthesized)
caacctgaaattaactcagacacaaataaaggaaacccagctcacaggagcttaaacagctggtcagccccctaagcccccactacaagtgatcctcaggcaggtaaccccagattcatg

SEQ ID NO: 182792 - DNA, 120 bp, Artificial Sequence
  ENSG00000111335_31 (sequence is synthesized)
cactgtagggtgctgcgcagcatccctagtctctacccagtagatgccactagccctcctctcccagtgacaaccaaaagtcttcagacattgtcaaacgttcccctgggttcacagatc

SEQ ID NO: 182793 - DNA, 120 bp, Artificial Sequence
  ENSG00000111335_32 (sequence is synthesized)
tttctgcctttggcttttggctccaccctctttagctgttaatttgagtacttatggccctgaaagcggccacggtgcctccagatggcaggtttgcaatccaagcaggaagaaggaaaa

SEQ ID NO: 182794 - DNA, 120 bp, Artificial Sequence
  ENSG00000111335_33 (sequence is synthesized)
gatacccaaaggtcaagaacacagtgattttattagaagtttcatccgcaaattttcttccatttcattgctcagaaatgtcatgtggctacctgtaacttgaaggtggctacaaagatg

SEQ ID NO: 182795 - DNA, 120 bp, Artificial Sequence
  ENSG00000111335_34 (sequence is synthesized)
actgtggacgtgggttgcactggccacccaaggatgtctgccacacctctccaaagccctccctacctaccaagatatacctgatatattccaccaggatatcctccctccagatatact

SEQ ID NO: 182796 - DNA, 120 bp, Artificial Sequence
  ENSG00000111335_35 (sequence is synthesized)
tggttctctccaccaggttctttctttaaagcaggatttctcaactttgatacttactcacatttggggctagacagttctttgtttggaggctctcttgtgcattgtaggatgttgagc

SEQ ID NO: 182797 - DNA, 120 bp, Artificial Sequence
  ENSG00000111335_36 (sequence is synthesized)
agcatctctggcctgtacccagtagatgccacccagttgtgacaattaaaagtgtcttgagactttatcatgtgtcttctgccctaggtgagaacccttgcactagaggaaccctacacc

SEQ ID NO: 182798 - DNA, 120 bp, Artificial Sequence
  ENSG00000111335_37 (sequence is synthesized)
ccaaccctggggggaatgtagggaagaggtggccaagccaaccgtggggttagctctaattattaagatatgcattataaataaataccaaaaaattgtctctggcaatagttaccttcc

SEQ ID NO: 182799 - DNA, 120 bp, Artificial Sequence
  ENSG00000111335_38 (sequence is synthesized)
cagatacaggtccccccttttttcccctaactcttttaagcaatgattgtaactattaggagacattgctctcccacgtatgtttttctttttagacaatgcagacaccaggaagttgtg

SEQ ID NO: 182800 - DNA, 120 bp, Artificial Sequence
  ENSG00000111335_39 (sequence is synthesized)
gaaaagccaaagaagcgggtgccagacagctctgtgcaacctctaggccatgagtgggatagataccactgctgctttaaaaaatgggagaccatagaccctcaggagagaagaatccct

SEQ ID NO: 182801 - DNA, 120 bp, Artificial Sequence
  ENSG00000111335_40 (sequence is synthesized)
tctaccctggactcgctctcttctctggaactaacttctcccccataccctgattgtctttggagaaaatgttctggattctagaatctaaggcagagccttttaagccatactgtacac

SEQ ID NO: 182802 - DNA, 120 bp, Artificial Sequence
  ENSG00000111335_41 (sequence is synthesized)
ataaatcacctggaaccttgttaaaatgcagatcctgactcaggaggtctgagttagagcccaggatttcatatttctagccagctccatgatgagctgctggtccgcagatcatgcttg

SEQ ID NO: 182803 - DNA, 120 bp, Artificial Sequence
  ENSG00000111335_42 (sequence is synthesized)
taagaggatgaggcagacatctgggaaaagtccagctggggcaagcatttgaagtctgccttcctaccaggtcaaaatcaaggcaacgaccttccatagataactatcaaagcttgaggg

SEQ ID NO: 182804 - DNA, 120 bp, Artificial Sequence
  ENSG00000111335_43 (sequence is synthesized)
ggtgccttgaacccaactcctaaatccctaagacctgcccacctcttgtgtctcctgtctcagcaaacattcccacactcttgcatattgttaaagtaacctctgcttaccaggcttctg

SEQ ID NO: 182805 - DNA, 120 bp, Artificial Sequence
  ENSG00000111335_44 (sequence is synthesized)
gtttaataaaagatggctagagtgactccatcttaaagcaagtagctaggcactcaaaaggaacctacaggcttaatacttgggtctgaaaatagccacagtctaagctgaccaccaatt

SEQ ID NO: 182806 - DNA, 120 bp, Artificial Sequence
  ENSG00000111335_45 (sequence is synthesized)
ataattgcagaatatttaaggccatacaaaacatctcccactaagcctacaaaatgtccaggtgtcctaaaagttcagcccacttaaaggcagcattaatgagcaggtttaggttgaagg

SEQ ID NO: 182807 - DNA, 120 bp, Artificial Sequence
  ENSG00000111335_46 (sequence is synthesized)
attaatggtcatcaataccactgttaagaagaaaattcttggccaaattgaatttaatggagtttaactgagcagacaattcacaaatctagaagcctcctgagccagagtaggttcaga

SEQ ID NO: 182808 - DNA, 120 bp, Artificial Sequence
  ENSG00000111335_47 (sequence is synthesized)
gagtcttgaacacagccacgtggtggaagaagatttatggacaggaaaaggaaaatgatgtactgaaaatgaaagtgaggtacagaaacagccagactggttatagctcagcattggcct

SEQ ID NO: 182809 - DNA, 120 bp, Artificial Sequence
  ENSG00000111335_48 (sequence is synthesized)
tatttgaacgagatttgaacagttggccacctttgattggccgaaactcagtgattggcacaagagtaggttgcagtctgtttacacatccttttaggttatagttcaccatgtacagag

SEQ ID NO: 182810 - DNA, 120 bp, Artificial Sequence
  ENSG00000111335_49 (sequence is synthesized)
gctttaggctaaacttgatttaacagcaccaataccccctacctttagtgagcacatctgcacattccaattttaatgacagctccttagaatttcttatcaacgaagacactaacaaag

SEQ ID NO: 182811 - DNA, 120 bp, Artificial Sequence
  ENSG00000111335_50 (sequence is synthesized)
ccttagaatttcttatcaacgaagacactaacaaagaatggcgcattcctccttctcctttctgaggatgccctaccctgtaacaaagtcgtttctaataaatttgcttctttcaccata

SEQ ID NO: 182812 - DNA, 120 bp, Artificial Sequence
  ENSG00000111339_0 (sequence is synthesized)
gctacttggccccaaacgctggacagagcatgctttttcctgtttggctgggaaagggaaggctgaactgctgagtctgacacttaacaggacttcggcattcccctgaatacagactag

SEQ ID NO: 182813 - DNA, 120 bp, Artificial Sequence
  ENSG00000111339_1 (sequence is synthesized)
atcagagattttatttttttaattgaaaagtaacttgggttctctttagaaacccttatttggtgtgcgcatctggctatttcacagagatttcagttttgcaaagaagtcggagttgat

SEQ ID NO: 182814 - DNA, 120 bp, Artificial Sequence
  ENSG00000111339_2 (sequence is synthesized)
ttcttccctcagacaagctattggttgttggtgggcaacagaagttgctcagcatagacaggggaaaaaacggttacggatgagactgaaagaaaacctcaaaggagaactctgagaatt

SEQ ID NO: 182815 - DNA, 120 bp, Artificial Sequence
  ENSG00000111339_3 (sequence is synthesized)
catctcaggatgaagctgcaagggcaaaggagaagtacttgtgacacaagcaaatgggtccattgatcaacagatgcaagaagattcttctcccaactactgtacctcctgcaacgatga

SEQ ID NO: 182816 - DNA, 120 bp, Artificial Sequence
  ENSG00000111339_4 (sequence is synthesized)
gaatctggctccttggaggcctgctgccattcctgctgctcctctctggcctgcagagacccacagagggttctgaggttgcaattaaaatcgacttcgacttcgcaccaggttcttttg

SEQ ID NO: 182817 - DNA, 120 bp, Artificial Sequence
  ENSG00000111339_5 (sequence is synthesized)
atgatcagtaccaaggctgtagcaaacaggttatggagaaactaactcaaggggattatttcacaaaagacatagaagcccagaagaattattttaggatgtggcaaaaagcccacttag

SEQ ID NO: 182818 - DNA, 120 bp, Artificial Sequence
  ENSG00000111339_6 (sequence is synthesized)
cctggcttaaccaaggaaaagttctaccccagaacatgactaccacacacgctgtggctattttgttttatacattgaacagcaatgttcattctgactttactagagccatggcctctg

SEQ ID NO: 182819 - DNA, 120 bp, Artificial Sequence
  ENSG00000111339_7 (sequence is synthesized)
ttgccaggactccacagcagtatgaacgttcattccacttcaaatatttacactactacctcacctcagcaatccagctgctgaggaaagacagcatcatggagaatggcactctgtgct

SEQ ID NO: 182820 - DNA, 120 bp, Artificial Sequence
  ENSG00000111339_8 (sequence is synthesized)
atgaggtgcattataggacgaaggatgtccactttaatgcctacacaggggccaccattcgatttggccaattcctctccacatccctcctgaaagaagaggcacaggagtttgggaacc

SEQ ID NO: 182821 - DNA, 120 bp, Artificial Sequence
  ENSG00000111339_9 (sequence is synthesized)
agacactatttaccatattcacctgcctgggtgcacctgtacagtacttctccctcaagaaggaagtcttgatccctccctatgagctgtttaaagttataaatatgagctaccacccaa

SEQ ID NO: 182822 - DNA, 120 bp, Artificial Sequence
  ENSG00000111339_10 (sequence is synthesized)
gaggagactggttgcagttgaggtcaactgggaacctgagcacatataactgtcagctgctaaaagcttccagcaagaaatgcatccctgatcctatagctattgcatctctctcctttt

SEQ ID NO: 182823 - DNA, 120 bp, Artificial Sequence
  ENSG00000111339_11 (sequence is synthesized)
tgaccagtgtcatcatcttttccaaaagcagagtataaagaaatcttgtggctccttttatttaaaaaaaatatttaaataaaatcttttttattggccttttggctagaaatggacatt

SEQ ID NO: 182824 - DNA, 120 bp, Artificial Sequence
  ENSG00000111339_12 (sequence is synthesized)
tattttccaggaaggatgatcccatcatacttctgctgaaaccagtgcatggcctcctctttgctaattctcttatgcctttccttgtacccctttgccttatttcaatctgggcaccct

SEQ ID NO: 182825 - DNA, 120 bp, Artificial Sequence
  ENSG00000111339_13 (sequence is synthesized)
aagtactcttggggaaatcactctgcccagctagcaactgatgcagagctggctcagcccactgactgtgattggcctgtaactcaggccttagccaatcagtatatttcttcttcatgg

SEQ ID NO: 182826 - DNA, 120 bp, Artificial Sequence
  ENSG00000111339_14 (sequence is synthesized)
acacaaagattcatgctggaatagaaaatgatccaatcagagcctgtgagatacaatcagggtacttttgtggaattgcaattggaaatagaatgggagcttcttttctgaatggatatt

SEQ ID NO: 182827 - DNA, 120 bp, Artificial Sequence
  ENSG00000111339_15 (sequence is synthesized)
aatgaaagcagggtaggagcttatagctgccagcaaagatcccgccaccaggagaggagaccccatctccttgagaaaggatctaacacaacaaaggaagagctgataagtgaaaagaaa

SEQ ID NO: 182828 - DNA, 120 bp, Artificial Sequence
  ENSG00000111339_16 (sequence is synthesized)
ctgagacctgatgagaatgtataagcctctggatccaactttgcctaaagctgaatactacaagatttttcattacataaatcaataatttatgtttttgcttgcataatttgaattaga

SEQ ID NO: 182829 - DNA, 120 bp, Artificial Sequence
  ENSG00000111339_17 (sequence is synthesized)
ttttctatgtcaagcatcaagcagttgaagttccaacgaatacaagcactcttccttattttttttaatttagttattctaaataggaacaaatcaaagaagattaaattagaaagcaaa

SEQ ID NO: 182830 - DNA, 120 bp, Artificial Sequence
  ENSG00000111339_18 (sequence is synthesized)
ggacaaattcttcaccaaacagaaaagctttgaaccccagagattaaccaaggtgtgaattttcttcagagattttttatgagcattcaagattaagctagtatggcctcagatgagaag

SEQ ID NO: 182831 - DNA, 120 bp, Artificial Sequence
  ENSG00000111339_19 (sequence is synthesized)
acacatggaaacttgagaaataaaagggaaagttaatgaaagatgttagtgaaatttcattcaccagcagtaatgggtgttcatgcatgttcctaagacattacaaaagttaaaatttaa

SEQ ID NO: 182832 - DNA, 120 bp, Artificial Sequence
  ENSG00000111339_20 (sequence is synthesized)
actcatatgttaattcatagagaacttgatggcaaatttaagtcttcatagcaaatttaaatattaggaaaacatgagggtatgtgtgaaggttaacagagagtatgagagaaaaaaaca

SEQ ID NO: 182833 - DNA, 120 bp, Artificial Sequence
  ENSG00000111339_21 (sequence is synthesized)
ctgattacaaacaaatatcagcaatatagcgaggtctcattacatgtaaactagtacatgcaaagaagtataaattgttgaattgtatagctggaaatgtcctctaacgcttccctcagg

SEQ ID NO: 182834 - DNA, 120 bp, Artificial Sequence
  ENSG00000111339_22 (sequence is synthesized)
tagtaatttaggtagcgacataagggattatttaacccgatcacgatcactgaagaccctggtatcaggctaaatggagtaaagatgagggctagctctataattttggattttgaaagt

SEQ ID NO: 182835 - DNA, 120 bp, Artificial Sequence
  ENSG00000111339_23 (sequence is synthesized)
ccatgctccttatcccttttaagatttggataagaaacagcaaaactgaaaatcggtccatctatttactctccataggacttcctgaatggcctgtgtcatgatcaaagaaatggaatg

SEQ ID NO: 182836 - DNA, 120 bp, Artificial Sequence
  ENSG00000111339_24 (sequence is synthesized)
gggaataagctacataaaattacctggcagggagttcaggcatctctgtactatcattctttaaattgggatttgaaactaacagggccaaatcacctctgtcacctagttgcagtagcc

SEQ ID NO: 182837 - DNA, 67 bp, Artificial Sequence
  ENSG00000111339_25 (sequence is synthesized)
aacagggccaaatcacctctgtcacctagttgcagtagcctctacagtcaataaaggaaagaatttc

SEQ ID NO: 182838 - DNA, 120 bp, Artificial Sequence
  ENSG00000111339_26 (sequence is synthesized)
tccagcctgggcaacagagtgagactcgatctcaaaaaaagaaaaaaagaaagaatttctacaaacagacaatttatgtgacttgcataggatagggtctttggcagtttggtggctacc

SEQ ID NO: 182839 - DNA, 120 bp, Artificial Sequence
  ENSG00000111339_27 (sequence is synthesized)
gcataggatagggtctttggcagtttggtggctacctagtagagagtcctggggacatggctctgggagcaagcttttccagtgagcatcgatgagtcagtaatgacatgctatgttggt

SEQ ID NO: 182840 - DNA, 120 bp, Artificial Sequence
  ENSG00000111339_28 (sequence is synthesized)
aaaagccacccaacatcttaagtacatttttcctgtgccatataaatgcatgtattgagccatactgtgtacaaagcactttggggattaaaagttaagaacactaggccagatctctca

SEQ ID NO: 182841 - DNA, 120 bp, Artificial Sequence
  ENSG00000111339_29 (sequence is synthesized)
tgagtttacaatctcttaggagaaattaagaacataaagcaagccacaagtgaaatgccaaaaaaaaaaaaggcaaaaatcaagttttctgttcataacaattcaaaagaaagatttctt

SEQ ID NO: 182842 - DNA, 120 bp, Artificial Sequence
  ENSG00000111339_30 (sequence is synthesized)
ccaactgaggcaagaagagacacccggaaggctttaagtaagaggctgcatttgaaccagccgttagggctctaggctgggagaaggggtgagcagaaggagaaaaaaacaagaaagagt

SEQ ID NO: 182843 - DNA, 120 bp, Artificial Sequence
  ENSG00000111339_31 (sequence is synthesized)
atgtgccaagtgcgtagtgcccaaaacaaggccaaatattaaatgcttggagctgagagaaaaatgtgattcctctggcctatggttagataaagctttctatcagagatgatgttttac

SEQ ID NO: 182844 - DNA, 120 bp, Artificial Sequence
  ENSG00000111339_32 (sequence is synthesized)
ttagaggaaagcagaaaatagaagcgaatacggaatgatcgatgtatgtacagcataaggtcagggagcagataggtctggcagagagtgaggggtaatgtgggctggagaggaaattgg

SEQ ID NO: 182845 - DNA, 120 bp, Artificial Sequence
  ENSG00000111339_33 (sequence is synthesized)
aagccactcagtgaagctaaaaagtcagccaaaagcatttgatttccatgagaagtcataattttctgagtaagacaattctcctaaagcgttgactctctaggcacaagcagcaatagc

SEQ ID NO: 182846 - DNA, 120 bp, Artificial Sequence
  ENSG00000111339_34 (sequence is synthesized)
atcctttaagaactcattagaaatgtgaattttagggcctgatcccagactacagactacagaaattgaacagtctgttttaataagtcctctagatgattctgctatacaccaacattt

SEQ ID NO: 182847 - DNA, 120 bp, Artificial Sequence
  ENSG00000111339_35 (sequence is synthesized)
gagaacactgtgacttacacaattatgatccttaagggaatagccaagtttctaaaaaagataacttagttctaactcctgctgctgttttacagatcaaatctctggagacagaaacta

SEQ ID NO: 182848 - DNA, 120 bp, Artificial Sequence
  ENSG00000111339_36 (sequence is synthesized)
ttctcttaaaattatgtagattcatgagtttggttaaggataaatgtacatagctcacatcccctcagtctctccctatagtccaaagttgttgagcaaggaatctgtagagtattgatt

SEQ ID NO: 182849 - DNA, 120 bp, Artificial Sequence
  ENSG00000111339_37 (sequence is synthesized)
taaattgattaagttacatgtttatgaaactctaagagactagttttagaaatttcactgtaatttctgctgggataaatttgttagcctgggatatcttccaaagataaggcggatgct

SEQ ID NO: 182850 - DNA, 120 bp, Artificial Sequence
  ENSG00000111339_38 (sequence is synthesized)
caaatatgtgtaaattcatgcaactgttaacagagactgtgctgtaaggagtacttatgtcctatagtaattttattaaacaaatacatgtatgtctccttttgatgtgtacagaaatat

SEQ ID NO: 182851 - DNA, 120 bp, Artificial Sequence
  ENSG00000111339_39 (sequence is synthesized)
actgtttaatctgaagaagctgattgaaacaggaaaaatttaaaaagtaaaaacactcaacccatgtaatactttatttttataacaaggtgttctctttaatacgcctattagattatc

SEQ ID NO: 182852 - DNA, 120 bp, Artificial Sequence
  ENSG00000111339_40 (sequence is synthesized)
ctgaagttctctatttactcttactttaaaaaaaatccaatgaaagaaaatttcagtaaagtttgttttgctagaagaatcaggattcttgtactgagttgtctaataatatgaatcaaa

SEQ ID NO: 182853 - DNA, 120 bp, Artificial Sequence
  ENSG00000111339_41 (sequence is synthesized)
ttgatttacactgaatgaactagctcttgatttggtaaaattcaacaagcatttattaggtgctttcagaaataccaagatgcagcaaacactggcaactaataaaaaaaattacaagta

SEQ ID NO: 182854 - DNA, 120 bp, Artificial Sequence
  ENSG00000111339_42 (sequence is synthesized)
gtagcaaacagcttccagcaagaaatgcatccctgatcctatagctattgcatctctctcctttttgaccagtgtcatcatcttttccaaaagcagagtataaagaaatcttgtggctcc

SEQ ID NO: 182855 - DNA, 120 bp, Artificial Sequence
  ENSG00000111339_43 (sequence is synthesized)
gaacctgagcacatataactgtcagctgctaaaaggtattctttatctaaattgaggccactcaggatcacagaccactgctcttttataaaagttattttttctcagtgggtttttggg

SEQ ID NO: 182856 - DNA, 120 bp, Artificial Sequence
  ENSG00000111339_44 (sequence is synthesized)
agggttctgagcttccagcaagaaatgcatccctgatcctatagctattgcatctctctcctttttgaccagtgtcatcatcttttccaaaagcagagtataaagaaatcttgtggctcc

SEQ ID NO: 182857 - DNA, 120 bp, Artificial Sequence
  ENSG00000111341_0 (sequence is synthesized)
gtaggagcctctctccctactgctgctacacaagaccctgagactgacctgcaggacgaaaccatgaagagcctgatccttcttgccatcctggccgccttagcggtagtaactttgtgt

SEQ ID NO: 182858 - DNA, 120 bp, Artificial Sequence
  ENSG00000111341_1 (sequence is synthesized)
tatgaatcacatgaaagcatggaatcttatgaacttaatcccttcattaacaggagaaatgcaaataccttcatatcccctcagcagagatggagagctaaagtccaagagaggatccga

SEQ ID NO: 182859 - DNA, 120 bp, Artificial Sequence
  ENSG00000111341_2 (sequence is synthesized)
gaacgctctaagcctgtccacgagctcaatagggaagcctgtgatgactacagactttgcgaacgctacgccatggtttatggatacaatgctgcctataatcgctacttcaggaagcgc

SEQ ID NO: 182860 - DNA, 120 bp, Artificial Sequence
  ENSG00000111341_3 (sequence is synthesized)
cgagggaccaaatgagactgagggaagaaaaaaaatctctttttttctggaggctggcacctgattttgtatccccctgtagcagcattacagaaatacataggcttatatacaatgctt

SEQ ID NO: 182861 - DNA, 120 bp, Artificial Sequence
  ENSG00000111341_4 (sequence is synthesized)
ctttcctgtatattctcttgtctggctgcacccctttttcccgcccccagattgataagtaatgaaagtgcactgcagtgagggtcaaaggagagtcaacatatgtgattgttccataat

SEQ ID NO: 182862 - DNA, 120 bp, Artificial Sequence
  ENSG00000111341_5 (sequence is synthesized)
aaacttctggtgtgatactttcatcttgtaaatctgctttcttttgggaagatattgagatatttaaatcatggcccaccttacccaaaataggagattctgttcatctcatatctagta

SEQ ID NO: 182863 - DNA, 120 bp, Artificial Sequence
  ENSG00000111341_6 (sequence is synthesized)
cgtgaatggaatctggtatgttttttgcaggattttcctattgtaaattgtggcaaatacagggctcccttcatttgcttttcatctcttatgcatcaaagtcaaaaacatttctgaatc

SEQ ID NO: 182864 - DNA, 120 bp, Artificial Sequence
  ENSG00000111341_7 (sequence is synthesized)
aagataatctagaagagaaaaaaggaggaaaaggaaaagagaaagcagaagggacaaataaaagcaattggcaaaaactgtcaataatagtttatacacttaactatatcaataatcaca

SEQ ID NO: 182865 - DNA, 120 bp, Artificial Sequence
  ENSG00000111341_8 (sequence is synthesized)
ttatatgtaaatagtctaaacaatccaattattttttacttctacttatgttatatttttacttctacatttgttaaaggttccacgctacatttttactattcttgctttaaataattt

SEQ ID NO: 182866 - DNA, 120 bp, Artificial Sequence
  ENSG00000111341_9 (sequence is synthesized)
taataatttcttttaaagtttagataataagaaaatatcccgggccaggcacagtggccacacctgtaatctcagtagccatgaccataccaatgcactccagcctgtgaaacagagtga

SEQ ID NO: 182867 - DNA, 120 bp, Artificial Sequence
  ENSG00000111341_10 (sequence is synthesized)
gactctgtctctacagaaaaataaaaaagaaaagaaagaaaagatctcatatatttacccatgtaattttcatttcctgttttcttcattcttctttccatctggtgtcacttcctttct

SEQ ID NO: 182868 - DNA, 120 bp, Artificial Sequence
  ENSG00000111341_11 (sequence is synthesized)
gcctgacgacttcctttaacgttttttatagttcaggtctgcaggattctttaagttttgtatgcttgtttttattcttgaaagatattttcactgtatattgaatcccaagttgccacg

SEQ ID NO: 182869 - DNA, 120 bp, Artificial Sequence
  ENSG00000111341_12 (sequence is synthesized)
tttcttttaattattttaaggtattccactgaattctagcttgcacaatttttcgatataaaatttgttgtaattcttacctttgttccactgtgtatactgcatcttttatctctggct

SEQ ID NO: 182870 - DNA, 120 bp, Artificial Sequence
  ENSG00000111341_13 (sequence is synthesized)
tatgaatcacatgaaagcatggaatcttatgaacttagtaagtgaatatttaacttctttattcaaatcccttgcattaaagaacctcttcttatttttaaataaacaagatggaaagat

SEQ ID NO: 182871 - DNA, 120 bp, Artificial Sequence
  ENSG00000111341_14 (sequence is synthesized)
atataacagggagggaaaagggggcctcttttggaaaactaaagtaaatttttaaatctaatgactataaaaattgccaaaggagcaattttttaagtttgaagtagtgcaatatgggat

SEQ ID NO: 182872 - DNA, 120 bp, Artificial Sequence
  ENSG00000111341_15 (sequence is synthesized)
ttaagctacaggcgacatatttagaagccataaaatctcatttggaaattttaaattggcaccacgtcaactgcacagatggaaaacgaggagtaatgacaaatggtaaagcacagagct

SEQ ID NO: 182873 - DNA, 120 bp, Artificial Sequence
  ENSG00000111341_16 (sequence is synthesized)
aacgaggagtaatgacaaatggtaaagcacagagctggacgccaagtcagctgggagaccacaggcgccacgttaagctgagtgctgttttggtttttttgtgtttttctttcttgtttt

SEQ ID NO: 182874 - DNA, 120 bp, Artificial Sequence
  ENSG00000111341_17 (sequence is synthesized)
agccaccacacccagccagctgattgctgttgaatagctggatttataaagactgagcataggaggaaatggcacatcactctcatttttaatttattcattatttttatagtgtttaaa

SEQ ID NO: 182875 - DNA, 120 bp, Artificial Sequence
  ENSG00000111341_18 (sequence is synthesized)
ctgttcatgtatcggcaatctagttatgcttcataaatcctcaggacagagaatttctcctcaaaaggaatttaaaatctaccaagtagaaatacagaaattaagaaaggcaaagtgatc

SEQ ID NO: 182876 - DNA, 120 bp, Artificial Sequence
  ENSG00000111341_19 (sequence is synthesized)
gtccaaactcaaaaccaacaaagcctatatgacaagtctctaagacacatggattgattactgatttcatttgatcaggaagttaatgaaatctactttatactctcctttaatttttgc

SEQ ID NO: 182877 - DNA, 120 bp, Artificial Sequence
  ENSG00000111341_20 (sequence is synthesized)
caatctccgtttatatgagttgcataagttaaggcactttcaaatatatttgtgtcaaggaatattcacggaaatatttccagctatgtgtcgctaaaactgcatttatttattttctgt

SEQ ID NO: 182878 - DNA, 120 bp, Artificial Sequence
  ENSG00000111344_0 (sequence is synthesized)
gtgtttaactggaaactagaacgagatggaaggggatgttcaaggcccctcccttgactctgaacggacccccagggaacatgcgaccctctctctggcgacgcctcccacccaccacta

SEQ ID NO: 182879 - DNA, 120 bp, Artificial Sequence
  ENSG00000111344_1 (sequence is synthesized)
atacttgctcctggaccggggggcgcggaggttggagagaggaggcaggtgtctgcatgctacccgggtctcggacaggcggcactgggaccacgaggcagggagccaggcttgaagcag

SEQ ID NO: 182880 - DNA, 120 bp, Artificial Sequence
  ENSG00000111344_2 (sequence is synthesized)
gtgacatgtagacgtcccctggtccagcctcggaacctgagcgcccttctgcctggaaagtttgtggctaggcgccatggccaagagcagctccctgaatgttcgcgtggtggagggccg

SEQ ID NO: 182881 - DNA, 120 bp, Artificial Sequence
  ENSG00000111344_3 (sequence is synthesized)
cgcgctgcctgccaaggacgtgtctgggagcagcgacccctactgcctagtgaaagtggacgacgaggtggtggccaggacagctactgtctggaggagcctgggccccttctgggggga

SEQ ID NO: 182882 - DNA, 120 bp, Artificial Sequence
  ENSG00000111344_4 (sequence is synthesized)
ggagtacacggtgcacctgcctctggatttccaccagctggccttctacgtgctggatgaggacactgtcgggcacgacgacatcatcggcaagatctcgctgagcagggaggcgattac

SEQ ID NO: 182883 - DNA, 120 bp, Artificial Sequence
  ENSG00000111344_5 (sequence is synthesized)
agccgacccccgagggattgacagctggattaacttgagccgagtggacccagatgcagaagtgcagggtgagatctgcctgtcagtgcagatgctggaggatgggcagggccgctgcct

SEQ ID NO: 182884 - DNA, 120 bp, Artificial Sequence
  ENSG00000111344_6 (sequence is synthesized)
tcgctgccatgtgcttcaggccagggacctggctcccagagacatctctggcacatctgacccatttgcacgtgtgttttggggcagccagagcttggagacctcaaccatcaagaagac

SEQ ID NO: 182885 - DNA, 120 bp, Artificial Sequence
  ENSG00000111344_7 (sequence is synthesized)
tcgcttcccgcactgggatgaagtgctggagctgcgggagatgccaggtgccccgtccccactgcgggtggagctctgggactgggacatggtgggcaagaatgacttcttgggcatggt

SEQ ID NO: 182886 - DNA, 120 bp, Artificial Sequence
  ENSG00000111344_8 (sequence is synthesized)
ggagttctctccaaagaccctccagcagaagccacctaaaggctggttccgcctcctgccctttcccagagccgaggaggattctggggggaacctgggtgccctgcgagtgaaggtacg

SEQ ID NO: 182887 - DNA, 120 bp, Artificial Sequence
  ENSG00000111344_9 (sequence is synthesized)
cctgattgaggaccgcgtcctgccctcccagtgctaccagcctctcatggagctgctcatggagtctgtgcaggggccagcagaggaggacactgctagccccttggctttgctggaaga

SEQ ID NO: 182888 - DNA, 120 bp, Artificial Sequence
  ENSG00000111344_10 (sequence is synthesized)
gctgaccttgggggactgccgccaggaccttgccaccaagctggtgaaactctttcttggccggggactggctgggcgctttctggactatctcacccggcgtgaggtggctcggaccat

SEQ ID NO: 182889 - DNA, 120 bp, Artificial Sequence
  ENSG00000111344_11 (sequence is synthesized)
ggaccccaacaccctcttccgttctaactccctggcatccaagtcgatggaacagtttatgaagctcgtgggcatgccctacctgcacgaggtcctgaagcctgtgattagccgtgtctt

SEQ ID NO: 182890 - DNA, 120 bp, Artificial Sequence
  ENSG00000111344_12 (sequence is synthesized)
tgaggagaagaagtacatggagctggatccctgcaagatggacctgggccgcacccggaggatctccttcaaaggcgcactctcggaggagcagatgcgggagaccagcctggggctgct

SEQ ID NO: 182891 - DNA, 120 bp, Artificial Sequence
  ENSG00000111344_13 (sequence is synthesized)
gacgggctacctggggcccatcgtggacgccatcgtgggctccgtggggcgctgcccgcccgccatgcgcctcgccttcaagcagctgcaccggcgagtggaggagcgcttcccccaggc

SEQ ID NO: 182892 - DNA, 120 bp, Artificial Sequence
  ENSG00000111344_14 (sequence is synthesized)
ctggccatcagtggatttctcttcttgcgattcttcgcacctgccatccttaccccaaagctgtttgaccttcgggaccaacacgcggacccccagactagccgctcactgctgttgctt

SEQ ID NO: 182893 - DNA, 120 bp, Artificial Sequence
  ENSG00000111344_15 (sequence is synthesized)
gccaaggctgtgcagagcattggaaacctgggccagcagctgggccaaggcaaggaactgtggatggcccccctgcaccccttcctgctgcagtgtgtctcacgtgtgagagacttcctg

SEQ ID NO: 182894 - DNA, 120 bp, Artificial Sequence
  ENSG00000111344_16 (sequence is synthesized)
gaccggctggtggatgtggatggggatgaagctggtgtcccagccagggccctgttcccgccctcggccattgttcgagaaggctatctgctgaagcgcaaggaggagcctgccggcctg

SEQ ID NO: 182895 - DNA, 120 bp, Artificial Sequence
  ENSG00000111344_17 (sequence is synthesized)
gccacgcgctttgccttcaagaagcgctacgtctggctcagcggggagaccctctccttctccaagagtcctgagtggcagatgtgtcactccatccccgtgtctcacatccgcgccgtg

SEQ ID NO: 182896 - DNA, 120 bp, Artificial Sequence
  ENSG00000111344_18 (sequence is synthesized)
gagcgcgtagacgagggcgccttccaactgccccacgtgatgcaggtggtgacgcaggacggcacgggggcgctgcacaccacctacctccagtgcaagaatgtgaatgagctcaaccag

SEQ ID NO: 182897 - DNA, 120 bp, Artificial Sequence
  ENSG00000111344_19 (sequence is synthesized)
tggctctcggccttgcgcaaggccagcgcccccaacccgaacaagctggccgcctgccaccccggtgccttccgcagcgcgcgctggacctgctgcctccaggctgagcgctcagccgcc

SEQ ID NO: 182898 - DNA, 120 bp, Artificial Sequence
  ENSG00000111344_20 (sequence is synthesized)
ggctgcagccgtacacactcagctgtcaccctgggggactggagtgacccactggatcctgatgctgaggcccagacagtgtatcggcagctgctcctggggcgggaccagctcaggctg

SEQ ID NO: 182899 - DNA, 120 bp, Artificial Sequence
  ENSG00000111344_21 (sequence is synthesized)
aaattactggaggattctaacatggatacaactctggaggcagacacaggggcctgtcctgaggtcctggcccggcaaagagcagcaactgcccgcctgctggaggtgctcgcagacctg

SEQ ID NO: 182900 - DNA, 120 bp, Artificial Sequence
  ENSG00000111344_22 (sequence is synthesized)
gatcgtgcccacgaggagttccagcagcaggagcgagggaaggcggccctgggcccccttggcccctaaggaaatgccagagctagcccggaaggaggagcaagagccagggggccctct

SEQ ID NO: 182901 - DNA, 120 bp, Artificial Sequence
  ENSG00000111344_23 (sequence is synthesized)
tcagcgcatcctgccccgggagtctcctgtctccttggacctctttgattctgtggtttggaggctcccagagacgtgcctagtcctgtgtgccttgagtccagaactcagggcatggaa

SEQ ID NO: 182902 - DNA, 120 bp, Artificial Sequence
  ENSG00000111344_24 (sequence is synthesized)
gccctttggcaggggccagccttgcactgagtgaaacttgccctctggcttgattcagactggagtggataggataaggaacctgacttatttgactgagactggggtctctacttcacc

SEQ ID NO: 182903 - DNA, 120 bp, Artificial Sequence
  ENSG00000111344_25 (sequence is synthesized)
aaactggcctctatccataccaaggaggccagcctggccctgagctgctggatacagctggacctgaattcctgatgcccatgtgatgttgttgccccagatgggcactaaatggcctca

SEQ ID NO: 182904 - DNA, 120 bp, Artificial Sequence
  ENSG00000111344_26 (sequence is synthesized)
ctccttcctgttttcatgtctgctaatccctataacctcactgattcttctgtaccctgcccttggcctaggactccaaccacaagcttccagaatcaggtgccctcaggaagaaccaag

SEQ ID NO: 182905 - DNA, 120 bp, Artificial Sequence
  ENSG00000111344_27 (sequence is synthesized)
gctgggtgggggtccagtgtgccaaactcagacccttggagcctgggagaccttgggccaggctgtttatctctctctgggtctcagattaccctgtataaaaagaggagggaaagtcta

SEQ ID NO: 182906 - DNA, 120 bp, Artificial Sequence
  ENSG00000111344_28 (sequence is synthesized)
ttgtctggagctccagacgcctcggcaagagcccgctgcgccccctgcgcgctcctcctgctcggagcacggctcctacctgtagagtccggacgggcgctccctccccgggcacctaca

SEQ ID NO: 182907 - DNA, 120 bp, Artificial Sequence
  ENSG00000111344_29 (sequence is synthesized)
agaaatgcagatttctgaggcccagccagctactgactcagaatctgagggtatatgaaggcaagaatcagggttatttaacagattccgtaggtcatttggatgagtatcagctttgag

SEQ ID NO: 182908 - DNA, 120 bp, Artificial Sequence
  ENSG00000111344_30 (sequence is synthesized)
gaccacaggcctggggaatgggcaattttattttattttgtttttagagttgggggtctcactctgttgcccaggctgcagtacagtggcatgatcataggtcagtgcaccctcaaactt

SEQ ID NO: 182909 - DNA, 120 bp, Artificial Sequence
  ENSG00000111344_31 (sequence is synthesized)
ctggacttcagtgatcctcccacgttagcctccagagcagctgcgactacaggtgcaagccatcacgcctggctaatttttaaatttttgtagagatggggggtctcactatgttgccca

SEQ ID NO: 182910 - DNA, 120 bp, Artificial Sequence
  ENSG00000111344_32 (sequence is synthesized)
gttataagtgccaagatgagacgtttgagattccagtggatgcctctgacccagcctcaggatggggactcaaggagggcttcctggaggaggtgctgcttaaatgtgacctgagtagag

SEQ ID NO: 182911 - DNA, 120 bp, Artificial Sequence
  ENSG00000111344_33 (sequence is synthesized)
tcttggcttactgcaacctctgcctcctcggttcaagtgatcttcccacctcagcttctggagtagctggatttacaggcgtgagccaccacgaccagctaatttttgcatttttagtag

SEQ ID NO: 182912 - DNA, 85 bp, Artificial Sequence
  ENSG00000111344_34 (sequence is synthesized)
ccacgaatcaccatgttggccaggctcgtcacaagctcctgacctcaagtgatccgcttacttcggcctcccaaagtgctgggat

SEQ ID NO: 182913 - DNA, 120 bp, Artificial Sequence
  ENSG00000111344_35 (sequence is synthesized)
gccttctacgtgctggatgaggacactgtcgggtttgtggttggggaaagtggaatgtgtgggttagggacccaagcctgggcacctgaggggagaggggatgtgggtccacagcccacg

SEQ ID NO: 182914 - DNA, 120 bp, Artificial Sequence
  ENSG00000111344_36 (sequence is synthesized)
agggtgtgccctcccacccagaccttgacacctgcccccacttctcttggggcggggcaaaggggcccctgactcagaccttcacgtgcccgccttcctgcaggcacgacgacatcatcg

SEQ ID NO: 182915 - DNA, 120 bp, Artificial Sequence
  ENSG00000111348_0 (sequence is synthesized)
gccagtactcagaagtcagagttgagagacagaggcaccccggacagagacgtgaagcactgaataaatagatcagaatgactgaaaaagccccagagccacatgtggaggaggatgacg

SEQ ID NO: 182916 - DNA, 120 bp, Artificial Sequence
  ENSG00000111348_1 (sequence is synthesized)
atgatgagctggacagcaagctcaattataagcctccaccacagaagtccctgaaagagctgcaggaaatggacaaagatgatgagagtctaattaagtacaagaaaacgctgctgggag

SEQ ID NO: 182917 - DNA, 120 bp, Artificial Sequence
  ENSG00000111348_2 (sequence is synthesized)
atggtcctgtggtgacagatccgaaagcccccaatgtcgttgtcacccggctcaccctggtttgtgagagtgccccgggaccaatcaccatggaccttactggagatctggaagccctca

SEQ ID NO: 182918 - DNA, 120 bp, Artificial Sequence
  ENSG00000111348_3 (sequence is synthesized)
aaaaggaaaccattgtgttaaaggaaggttctgaatatagagtcaaaattcacttcaaagtgaacagggatattgtgtcaggcctgaaatacgttcagcacacctacaggactggggtga

SEQ ID NO: 182919 - DNA, 120 bp, Artificial Sequence
  ENSG00000111348_4 (sequence is synthesized)
gctggcgcgaggcacgtaccacaacaagtccttcttcaccgacgatgacaagcaagaccacctcagctgggagtggaacctgtcgattaagaaggagtggacagaatgaatgcatccacc

SEQ ID NO: 182920 - DNA, 120 bp, Artificial Sequence
  ENSG00000111348_5 (sequence is synthesized)
cctttccccacccttgccacctggaagaattctctcaggcgtgttcagcaccctgtccctcctccctgtccacagctgggtccctcttcaacactgccacatttccttattgatgcatct

SEQ ID NO: 182921 - DNA, 120 bp, Artificial Sequence
  ENSG00000111348_6 (sequence is synthesized)
tttcccaccctgtcactcaacgtggtccctagaacaagaggcttaaaaccgggctttcacccaacctgctccctctgatcctccatcagggccagatcttccacgtctccatctcagtac

SEQ ID NO: 182922 - DNA, 120 bp, Artificial Sequence
  ENSG00000111348_7 (sequence is synthesized)
acaatcatttaatatttccctgtcttacccctattcaagcaactagaggccagaaaatgggcaaattatcactaacaggtctttgactcaggttccagtagttcattctaatgcctagat

SEQ ID NO: 182923 - DNA, 120 bp, Artificial Sequence
  ENSG00000111348_8 (sequence is synthesized)
tcttttgtggttgttgctggcccaatgagtccctagtcacatcccctgccagagggagttcttcttttgtgagagacactgtaaacgacacaagagaacaagaataaaacaataactgtg

SEQ ID NO: 182924 - DNA, 120 bp, Artificial Sequence
  ENSG00000111348_9 (sequence is synthesized)
aactgccagtactcagaagtcagagttgagagacagaggcaccccggacagagacgtgaagcactgaataggatgaaactggggcccagtgaggttaagcaacttgcaggaggtaacgca

SEQ ID NO: 182925 - DNA, 120 bp, Artificial Sequence
  ENSG00000111348_10 (sequence is synthesized)
ggaaccgagttgcgctgaaacatcgttatctgacacttccctgctttgttaaagctgtctctgcagagcttgcaaagaagcatttacctctgcttgtgcacctccagaaatagatcagaa

SEQ ID NO: 182926 - DNA, 120 bp, Artificial Sequence
  ENSG00000111348_11 (sequence is synthesized)
ggctggctggatttggaggactgtgataactcctacagctttttgactgggcttttgcttcatttgttcaggagtctttgtgccatgttgcttcactcgtaaaatagatcagaatgactg

SEQ ID NO: 182927 - DNA, 120 bp, Artificial Sequence
  ENSG00000111348_12 (sequence is synthesized)
tcagaagggctctgagaacacgcaccgggagtgcctggaggggtttcctgcaaagtaggagcaggcacctggccaggcttggaagaaaaagactgtagatccaaaatgatacgaaataga

SEQ ID NO: 182928 - DNA, 120 bp, Artificial Sequence
  ENSG00000111348_13 (sequence is synthesized)
cattatcactcagactgtgcatgctgcaagctttgacgctagccaggctggctggatttggaggactgtgataactcctacagctttttgactgggcttttgcttcatttgttcaggagt

SEQ ID NO: 182929 - DNA, 120 bp, Artificial Sequence
  ENSG00000111348_14 (sequence is synthesized)
ctttgtgccatgttgcttcactcgtagtacgttattcacatatgagtgatttctttcttgtcagttttgttcagtgaatagaagatactacaatggtacagagaaattcaggcagaaata

SEQ ID NO: 182930 - DNA, 120 bp, Artificial Sequence
  ENSG00000111348_15 (sequence is synthesized)
aggaaaccattgtgttaaaggaaggttctgaatatagagtcaaaattcacttcaaagtaagtatcctgccttgtgtgtttttgtaaagtttaaatcttttctttaatcagtgactacatt

SEQ ID NO: 182931 - DNA, 120 bp, Artificial Sequence
  ENSG00000111348_16 (sequence is synthesized)
tcttgcatgatcatgttgaggtactttttgtttgtttctcccctagtacccccaagctgggtctggaatgtcctcttcccagccctgagggctacctgttgagacccacgtttgcctcct

SEQ ID NO: 182932 - DNA, 120 bp, Artificial Sequence
  ENSG00000111348_17 (sequence is synthesized)
gctgctcaagttggctgatcaagagataggcagtgcaaaggaacaggatttgagacagcccagggtttcctcttcaaaaatagatcagaatgactgaaaaagccccagagccacatgtgg

SEQ ID NO: 182933 - DNA, 120 bp, Artificial Sequence
  ENSG00000111358_0 (sequence is synthesized)
acttgctctgcgctgaggtgctgggacagccatggtttcagacgaagatgaattgaatcttctggttattgtagttgatgccaacccaatttggtggggaaagcaagcattaaaggaatc

SEQ ID NO: 182934 - DNA, 120 bp, Artificial Sequence
  ENSG00000111358_1 (sequence is synthesized)
tcagttcactttatccaaatgcatagatgccgtgatggtgctgggaaattcgcatttattcatgaatcgttccaacaaacttgctgtgatagcaagtcacattcaagaaagccgattctt

SEQ ID NO: 182935 - DNA, 120 bp, Artificial Sequence
  ENSG00000111358_2 (sequence is synthesized)
atatcctggaaagaatggcagacttggagacttcttcggagaccctggcaaccctcctgaatttaatccctctgggagtaaagatggaaaatacgaacttttaacctcagcaaatgaagt

SEQ ID NO: 182936 - DNA, 120 bp, Artificial Sequence
  ENSG00000111358_3 (sequence is synthesized)
tattgttgaagagattaaagatctaatgaccaaaagtgacataaagggtcaacatacagaaactttgctggcaggatccctggccaaagccctttgctacattcatagaatgaacaagga

SEQ ID NO: 182937 - DNA, 120 bp, Artificial Sequence
  ENSG00000111358_4 (sequence is synthesized)
agttaaagacaatcaggaaatgaaatcaaggatattggtgattaaggctgcagaagacagtgcgttgcagtatatgaacttcatgaatgtcatctttgcagcacagaaacagaatatttt

SEQ ID NO: 182938 - DNA, 120 bp, Artificial Sequence
  ENSG00000111358_5 (sequence is synthesized)
gattgatgcctgtgttttagactccgactcagggctcctccaacaggcttgtgacatcacgggaggactgtacctgaaggtgcctcagatgccttctcttctgcagtatttgctgtgggt

SEQ ID NO: 182939 - DNA, 120 bp, Artificial Sequence
  ENSG00000111358_6 (sequence is synthesized)
gtttcttcccgatcaagatcagagatctcagttaatcctcccacccccagttcatgttgactacagggctgcttgcttctgtcatcgaaatctcattgaaattggttatgtctgttctgt

SEQ ID NO: 182940 - DNA, 120 bp, Artificial Sequence
  ENSG00000111358_7 (sequence is synthesized)
gtgtttgtcaatattctgcaatttcagccccatttgtactacgtgcgagacagcctttaaaatttctctgcctccagtgctgaaagccaagaaaaagaaactgaaagtgtctgcctgagg

SEQ ID NO: 182941 - DNA, 120 bp, Artificial Sequence
  ENSG00000111358_8 (sequence is synthesized)
ataaaatattttccccatcttttagagctgttaatagaaattatatagcagattctttgttgggaagactgaaaaaaataaagataggtataggataatttttaatatggtgaccttaca

SEQ ID NO: 182942 - DNA, 120 bp, Artificial Sequence
  ENSG00000111358_9 (sequence is synthesized)
gaaaatatttcccaaacatccttttcatcctgtgcttctggaggactgatttgtttgagggaatcattctatgcattatatcctaaaatattctatgactggtttctgtccatgtttgtg

SEQ ID NO: 182943 - DNA, 120 bp, Artificial Sequence
  ENSG00000111358_10 (sequence is synthesized)
gctttcatttttttaatgggatgactattagtcaaagtcagcttgtcatgactcatcataggctttctaacctactccctgaatccgggtcctcattgtgaaatgcatgccatacgaaat

SEQ ID NO: 182944 - DNA, 120 bp, Artificial Sequence
  ENSG00000111358_11 (sequence is synthesized)
ttgaacgtagctttggaaaaagggactatttgtggagtaatggcattaatcaacatagaacatcttatttgaatcaacagttaacttcagtagtcatgtgaataaaattcttattgtcta

SEQ ID NO: 182945 - DNA, 120 bp, Artificial Sequence
  ENSG00000111358_12 (sequence is synthesized)
aattgagacagcctcagatatttgcagatatttactttttgtctgatatcagtacatatttggacaaagtcatctaaataatagtttgtcaccaaataactacaaaatctcattttaaat

SEQ ID NO: 182946 - DNA, 120 bp, Artificial Sequence
  ENSG00000111358_13 (sequence is synthesized)
ggagaacttactggagaaaatggactctatgttaagtatggttttcagatagaattctttccttttttaatgaggaaaaaaaatccacattaatattgaaactgcacctgtaatcccagc

SEQ ID NO: 182947 - DNA, 120 bp, Artificial Sequence
  ENSG00000111358_14 (sequence is synthesized)
gaggattgcttgagcccaggagttcgagagcagcctgggcagcaaagtgagaccccatctctactaaaaatttaaatgtatttattaaaactgttctctagaagctttggactgaatccc

SEQ ID NO: 182948 - DNA, 120 bp, Artificial Sequence
  ENSG00000111358_15 (sequence is synthesized)
gaagctttggactgaatcccaaaagtgtttataagttcaaaagcaaaagtatttgtaatttcaacaacaaaaaatgtatttctttatgtaatcttgaaattattaaaagtccttttagct

SEQ ID NO: 182949 - DNA, 120 bp, Artificial Sequence
  ENSG00000111358_16 (sequence is synthesized)
ttttagcttctagcacatatttgtacaaagagtttaaggaatggtggctggtttggtttgttttttaaaaatgtttactgacgaggccgggcgtggtggctcacccctgcaatcccagca

SEQ ID NO: 182950 - DNA, 60 bp, Artificial Sequence
  ENSG00000111358_17 (sequence is synthesized)
gatcaggctgggtttctgttttgttttgttttgtgagacagagtctcgctctgttgccca

SEQ ID NO: 182951 - DNA, 71 bp, Artificial Sequence
  ENSG00000111358_18 (sequence is synthesized)
gagtgatcaggctgggtttctgttttgttttgttttgctcggctctctgcaagctctgtctcctgggttca

SEQ ID NO: 182952 - DNA, 78 bp, Artificial Sequence
  ENSG00000111358_19 (sequence is synthesized)
cagcctcccaagtagctgggattactactctactgaacccatgaggcagaaatttgagaccatcctgcccaacgtggt

SEQ ID NO: 182953 - DNA, 120 bp, Artificial Sequence
  ENSG00000111358_20 (sequence is synthesized)
ctcaaaaaaaaaaaaaaaaaaaaagtctgtactgataaaacccattgtgtacaaaactttgtatgtaaggaagattttaattttctctttatacaagctgagtcatatttaaataatttg

SEQ ID NO: 182954 - DNA, 120 bp, Artificial Sequence
  ENSG00000111358_21 (sequence is synthesized)
ataatttgatgttggcttagataatttcagatagattttatattctggatttgtgtttttgttaacaaatatacaaagactttggtgatcactttgcaaatatttgttaatccttgagtt

SEQ ID NO: 182955 - DNA, 120 bp, Artificial Sequence
  ENSG00000111358_22 (sequence is synthesized)
tgagaacctgtcttttaaaaataatattttgtatactaattaagtgtaatggaaatcacaattttaagtctaggaaataaagtattatatatactttcaaacaagctagcaaggctttta

SEQ ID NO: 182956 - DNA, 120 bp, Artificial Sequence
  ENSG00000111358_23 (sequence is synthesized)
gctagcaaggcttttattattacttttttatttgaaatatcttatatatttggttagttctgtttaacttgtttttaactgttgcccttatgagttattttatataaatttttacaataa

SEQ ID NO: 182957 - DNA, 120 bp, Artificial Sequence
  ENSG00000111358_24 (sequence is synthesized)
aatagtgttgattttggaggtcctttaggctttaagttcaaagatgtgaggttctttatgttgtatgcctgcacgttctcactttttaaaaatcattttcgtcaaagttggttcattatt

SEQ ID NO: 182958 - DNA, 120 bp, Artificial Sequence
  ENSG00000111358_25 (sequence is synthesized)
tgcctagcctctacagcatttgacgctgctgagcagcctttacttctggaaacacgacttttggcttctacgaatgccctgtgacctgtttttcctcttttcttgaaacattatttcata

SEQ ID NO: 182959 - DNA, 120 bp, Artificial Sequence
  ENSG00000111358_26 (sequence is synthesized)
tttgctaaattaagacattcatagaatgaacaaggaagttaaagacaatcaggaaatgaaatcaaggatattggtgattaaggctgcagaagacagtgcgttgcagtatatgaacttcat

SEQ ID NO: 182960 - DNA, 120 bp, Artificial Sequence
  ENSG00000111358_27 (sequence is synthesized)
tcaaaatataaaaataaaaataaaataataataatctgcagtgtcatatcctcctctgattttgtaggcccaaggcattgctcatgagaacctcattcctctggaaaccctaggtaagtg

SEQ ID NO: 182961 - DNA, 120 bp, Artificial Sequence
  ENSG00000111358_28 (sequence is synthesized)
cctggccaaagccctttgctgtatccttggtgtctgaatcatttagaaggtgtcttctgtaataaacatatcttaacttgtgacatttcttaggaccttgggtgcccattactgggacat

SEQ ID NO: 182962 - DNA, 120 bp, Artificial Sequence
  ENSG00000111361_0 (sequence is synthesized)
gcgccggaagtggggtgcggaggtgtgcagcgcgctgtcagactggctcgcaggcggcgcggccggcggacccgttcgagacagcgcgggcggctcgggtcccctggggctccgcagcag

SEQ ID NO: 182963 - DNA, 120 bp, Artificial Sequence
  ENSG00000111361_1 (sequence is synthesized)
gaggacgccatggacgacaaggagttaattgaatactttaagtctcagatgaaagaagatcctgacatggcctcagcagtggctgccatccggacgttgctggagttcttgaagagagat

SEQ ID NO: 182964 - DNA, 120 bp, Artificial Sequence
  ENSG00000111361_2 (sequence is synthesized)
aaaggggagacaatccagggtctgagggcgaatctcaccagtgccatagaaaccctgtgtggtgtggactcctctgtggcagtgtcctctggcggggagctcttcctccgcttcatcagt

SEQ ID NO: 182965 - DNA, 120 bp, Artificial Sequence
  ENSG00000111361_3 (sequence is synthesized)
cttgcctccctggaatactccgattactccaaatgtaaaaagatcatgattgagcggggagaactttttctcaggagaatatcactgtcaagaaacaaaattgcagatctgtgccatact

SEQ ID NO: 182966 - DNA, 120 bp, Artificial Sequence
  ENSG00000111361_4 (sequence is synthesized)
ttcatcaaagatggagcgacaatattgactcacgcctactccagagtggtcctgagagtcctggaagcagccgtggcggccaagaagcgatttagtgtatacgtcacagagtcacagcct

SEQ ID NO: 182967 - DNA, 120 bp, Artificial Sequence
  ENSG00000111361_5 (sequence is synthesized)
gatttgtcaggtaagaaaatggccaaagccctctgccacctcaacgtccctgtcactgtggtgctagatgctgctgtcggctacatcatggagaaagcagatcttgtcatagttggtgct

SEQ ID NO: 182968 - DNA, 120 bp, Artificial Sequence
  ENSG00000111361_6 (sequence is synthesized)
gaaggagttgttgaaaacggaggaattattaacaagattggaaccaaccagatggctgtgtgtgccaaagcacagaacaaacctttctatgtggttgcagaaagtttcaagtttgtccgg

SEQ ID NO: 182969 - DNA, 120 bp, Artificial Sequence
  ENSG00000111361_7 (sequence is synthesized)
ctctttccactaaaccagcaagacgtcccagataagtttaagtataaggcagacactctcaaggtcgcgcagactggacaagacctcaaagaggagcatccgtgggtcgactacactgcc

SEQ ID NO: 182970 - DNA, 120 bp, Artificial Sequence
  ENSG00000111361_8 (sequence is synthesized)
ccttccttaatcactctgctgtttacagacctgggcgtgctgacaccctcagcagtcagcgatgagctcatcaagctctatctgtaacctgtgagccctttcctgccaaggtgcagctta

SEQ ID NO: 182971 - DNA, 120 bp, Artificial Sequence
  ENSG00000111361_9 (sequence is synthesized)
ttcttactcatttcagtcccatctaaaaatgtgtcagctattctaaatcccaacttaaattgttcttacggtttctagaaactttccttttcagtttccagaaatacaagttagataatt

SEQ ID NO: 182972 - DNA, 120 bp, Artificial Sequence
  ENSG00000111361_10 (sequence is synthesized)
ggctacttaactgatgaaagatgagcccaagtccacctgtcttcatcctcccctgcactccagactgatctgcctaaagcacgcgagatgcaggcgaaaagcagccacacccctctgcca

SEQ ID NO: 182973 - DNA, 120 bp, Artificial Sequence
  ENSG00000111361_11 (sequence is synthesized)
caaatgaccaacagctggtcaggacgttacacgcggtgccttgtaagaggcaagaaacacttgctgaatctgcatctggcttccagtggtaagcacattcctcagcaggatcaagccaaa

SEQ ID NO: 182974 - DNA, 120 bp, Artificial Sequence
  ENSG00000111361_12 (sequence is synthesized)
cagtaaaaactaccaagagaacacgaggaaggcagaaacgatgtttagcaacagtattctgcatggttcactgcttaagaaaatgccttctggaatatttgtaaactgaaattctgtatg

SEQ ID NO: 182975 - DNA, 120 bp, Artificial Sequence
  ENSG00000111361_13 (sequence is synthesized)
tgtaagagatgtttaaatatgtttgggtcctaaacagctttttaaaattatacttgggaataaattcagcatcttttcaaataaactctatgaaagacgctgatgtggtgttgcatcaat

SEQ ID NO: 182976 - DNA, 120 bp, Artificial Sequence
  ENSG00000111361_14 (sequence is synthesized)
actgcaagctgaccaggccatctaggggaaaacactgtccagctacatttacacacttaagacccaggcaatcaggacaccatttattcaacaggaggcataaaaactataattctcttt

SEQ ID NO: 182977 - DNA, 120 bp, Artificial Sequence
  ENSG00000111361_15 (sequence is synthesized)
cccggaatatgacttaatccctctgtttttcagctattcaccaataaaacaatactgtgactattaacacagaaaaaccccagcacattagccacccctgcaggacatcaaaggataact

SEQ ID NO: 182978 - DNA, 120 bp, Artificial Sequence
  ENSG00000111361_16 (sequence is synthesized)
gaagcccagggccaagcacattcaggaggtcaaatgcctgaagatactgaggaatggttttgaaaatcagaagtcaagaagacttctgtatctttatgtttaaaaataactataaaatag

SEQ ID NO: 182979 - DNA, 80 bp, Artificial Sequence
  ENSG00000111361_17 (sequence is synthesized)
tgtctatatgtgacccatcatgataaatactgacatctattatttacactcaaataattttacattttcttctgttagac

SEQ ID NO: 182980 - DNA, 120 bp, Artificial Sequence
  ENSG00000111361_18 (sequence is synthesized)
tacactcaaataattttacattttcttctgttagactactccaagactggaattgttttgttttgttgtttttaatgagagggtctcgctgtgttcccaggctggtcttgaactcctggg

SEQ ID NO: 182981 - DNA, 120 bp, Artificial Sequence
  ENSG00000111361_19 (sequence is synthesized)
gagtggataatcatcatggtggtaaggaggagcaacggtttcgagtccgactgcctggggtaaaatccgggctctgccactcacttgctgtggagacttgaacaagtaacttaacctgtc

SEQ ID NO: 182982 - DNA, 120 bp, Artificial Sequence
  ENSG00000111361_20 (sequence is synthesized)
cagccataattttacagagcaaactgcggattacagtccaacaggatcagaaccagaatgtgcccccagcttgccagcagtcagcactgcctttcattgtaccttttcctgcctttggaa

SEQ ID NO: 182983 - DNA, 120 bp, Artificial Sequence
  ENSG00000111361_21 (sequence is synthesized)
ttgatgaagatttttatcaaggaataggtaacttatatctccctctctctagacgataatcaaagcaaaacttcctccttttttcctgaatttacatctcttacccagagtctaagagta

SEQ ID NO: 182984 - DNA, 120 bp, Artificial Sequence
  ENSG00000111361_22 (sequence is synthesized)
tagttttccaaaaatacttctttctaaagaactcaaattcttgtttccttagtccaaagtattgggatctgccccttaacccattagtattaatgtgagtttcaagcaaacatccactgt

SEQ ID NO: 182985 - DNA, 120 bp, Artificial Sequence
  ENSG00000111361_23 (sequence is synthesized)
ccacattaggtgacatacatcactgtggtactgtcttgtactttctctaacgttctcaaaatgtcatcttcagtaagaaaatggccaaagccctctgccacctcaacgtccctgtcactg

SEQ ID NO: 182986 - DNA, 120 bp, Artificial Sequence
  ENSG00000111361_24 (sequence is synthesized)
tggtgctagatgctgctgtcgggtgagtgcccatcttccccagccataatcacctcccccaccccatgctggcttacagcaagttttcagattgaaagtttgagtcccgttcataaagcc

SEQ ID NO: 182987 - DNA, 120 bp, Artificial Sequence
  ENSG00000111361_25 (sequence is synthesized)
acaccaggtagcgtcctacttcttaattaatagctgccctaaaccagcaagcttgttatgaggttgtgatagcatacaaagaagacagagctgtaggatgttggggagagtgggagttgt

SEQ ID NO: 182988 - DNA, 89 bp, Artificial Sequence
  ENSG00000111361_26 (sequence is synthesized)
gaagacagagctgtaggatgttggggagagtgggagttgtgtctatagctttatggctgtaagtgttgagtttgttgttgttggagatg

SEQ ID NO: 182989 - DNA, 120 bp, Artificial Sequence
  ENSG00000111364_0 (sequence is synthesized)
gcacaaggcgcgttcgagcagcggcgaccgacgcggcgaaggagcgcgccatggagcatgtgacagagggctcctgggagtcgctgcctgtgccgctgcacccgcaggtgctgggcgcgc

SEQ ID NO: 182990 - DNA, 120 bp, Artificial Sequence
  ENSG00000111364_1 (sequence is synthesized)
tgcgggagctgggcttcccgtacatgacgccggtgcagtccgcaaccatccctctgttcatgcgaaacaaagatgtcgctgcagaagcggtcacaggtagtggcaaaacactcgcttttg

SEQ ID NO: 182991 - DNA, 120 bp, Artificial Sequence
  ENSG00000111364_2 (sequence is synthesized)
tcatccccatcctggaaattcttctgagaagagaagagaagttaaaaaagagtcaggttggagccataatcatcacccccactcgagagctggccattcaaatagacgaggtcctgtcgc

SEQ ID NO: 182992 - DNA, 120 bp, Artificial Sequence
  ENSG00000111364_3 (sequence is synthesized)
atttcacgaagcacttccccgagttcagccagattctttggatcggaggcaggaatcctggagaagatgttgagaggtttaagcaacaaggtgggaacatcattgtggccactccaggcc

SEQ ID NO: 182993 - DNA, 120 bp, Artificial Sequence
  ENSG00000111364_4 (sequence is synthesized)
gcttggaggacatgttccggaggaaggccgaaggcttggatctggccagctgtgtgcgatccctggatgtcctggtgttggatgaggcagacagacttctggacatggggtttgaggcaa

SEQ ID NO: 182994 - DNA, 120 bp, Artificial Sequence
  ENSG00000111364_5 (sequence is synthesized)
gcatcaacaccattctggagtttttgccaaagcagaggagaacaggccttttctctgccactcagacgcaggaagtggagaacctggtgagagcgggcctccggaaccctgtccgggtct

SEQ ID NO: 182995 - DNA, 120 bp, Artificial Sequence
  ENSG00000111364_6 (sequence is synthesized)
cagtgaaggagaagggcgtggcagccagcagtgcccagaagaccccctcccgcctggaaaactactacatggtatgcaaggcagatgagaaatttaatcagctggtccattttcttcgca

SEQ ID NO: 182996 - DNA, 120 bp, Artificial Sequence
  ENSG00000111364_7 (sequence is synthesized)
atcataagcaggagaaacacctggtcttcttcagcacctgtgcctgtgtggaatactatgggaaggctctggaagtgctggtgaagggcgtgaagattatgtgcattcacggaaagatga

SEQ ID NO: 182997 - DNA, 120 bp, Artificial Sequence
  ENSG00000111364_8 (sequence is synthesized)
aatataaacgcaataagatcttcatggagttccgcaaattgcaaagtgggattttagtgtgcactgatgtgatggcccggggaattgatattcctgaagtcaactgggttttgcagtatg

SEQ ID NO: 182998 - DNA, 120 bp, Artificial Sequence
  ENSG00000111364_9 (sequence is synthesized)
accctcccagcaatgcaagtgccttcgtgcatcgctgcggtcgcacagctcgcattggccacgggggcagcgctctggtgttcctcctgcccatggaagagtcatacatcaatttccttg

SEQ ID NO: 182999 - DNA, 120 bp, Artificial Sequence
  ENSG00000111364_10 (sequence is synthesized)
caattaaccaaaaatgccccctgcaggagatgaagccccagagaaacacagcggaccttctgccaaaactcaagtccatggccctggctgacagagctgtgtttgaaaagggcatgaaag

SEQ ID NO: 183000 - DNA, 120 bp, Artificial Sequence
  ENSG00000111364_11 (sequence is synthesized)
ccaagcttatgcaaagcatgaatgcaacctgattttcagattaaaggatcttgattttgccagccttgctcgaggttttgccctgctgaggatgcccaagatgccagaattgagaggaaa

SEQ ID NO: 183001 - DNA, 120 bp, Artificial Sequence
  ENSG00000111364_12 (sequence is synthesized)
gcagtttccagattttgtgcccgtggacgttaataccgacacgattccatttaaagataaaatcagagaaaagcagaggcagaaactcctggagcaacaaagaagagagaaaacagaaaa

SEQ ID NO: 183002 - DNA, 120 bp, Artificial Sequence
  ENSG00000111364_13 (sequence is synthesized)
tgaagggagaagaaaattcataaaaaataaagcttggtcaaagcagaaggccaaaaaagaaaagaagaaaaaaatgaatgagaaaaggaaaagggaagagggttctgatattgaagatga

SEQ ID NO: 183003 - DNA, 120 bp, Artificial Sequence
  ENSG00000111364_14 (sequence is synthesized)
ggacatggaagaacttcttaatgacacaagactcttgaaaaaacttaagaaaggcaaaataactgaagaagaatttgagaagggcttgttgacaactggcaaaagaacaatcaagacagt

SEQ ID NO: 183004 - DNA, 120 bp, Artificial Sequence
  ENSG00000111364_15 (sequence is synthesized)
ggatttagggatctcagatttggaagatgactgctgattccagtgccacagatgaacccacaaggacatagctgttccctaacttggtggatggctccagtttgcttttaacgaaaatca

SEQ ID NO: 183005 - DNA, 120 bp, Artificial Sequence
  ENSG00000111364_16 (sequence is synthesized)
caacttcaggagacatctgaaaagaatgatgtctctgaaagctgtcctttcagatgagggagaaatgaaggatttcacacttcagaatattttactaaaaacattccagtcttggccggg

SEQ ID NO: 183006 - DNA, 71 bp, Artificial Sequence
  ENSG00000111364_17 (sequence is synthesized)
cacagcgagaccctctcattaaaaacaacaaaacaaaacaattccagtcttggagtagtctaacagaagaa

SEQ ID NO: 183007 - DNA, 120 bp, Artificial Sequence
  ENSG00000111364_18 (sequence is synthesized)
aacaaaacaattccagtcttggagtagtctaacagaagaaaatgtaaaattatttgagtgtaaataatagatgtcagtatttatcatgatgggtcacatatagacatatgtacatattat

SEQ ID NO: 183008 - DNA, 120 bp, Artificial Sequence
  ENSG00000111364_19 (sequence is synthesized)
atatatatatatatatatataagctcttttttctgaggctattttatagttatttttaaacataaagatacagaagtcttcttgacttctgattttcaaaaccattcctcagtatcttca

SEQ ID NO: 183009 - DNA, 120 bp, Artificial Sequence
  ENSG00000111364_20 (sequence is synthesized)
caaaaccattcctcagtatcttcaggcatttgacctcctgaatgtgcttggccctgggcttcagttatcctttgatgtcctgcaggggtggctaatgtgctggggtttttctgtgttaat

SEQ ID NO: 183010 - DNA, 120 bp, Artificial Sequence
  ENSG00000111364_21 (sequence is synthesized)
agtcacagtattgttttattggtgaatagctgaaaaacagagggattaagtcatattccgggaaagagaattatagtttttatgcctcctgttgaataaatggtgtcctgattgcctggg

SEQ ID NO: 183011 - DNA, 120 bp, Artificial Sequence
  ENSG00000111364_22 (sequence is synthesized)
tgagtgcctcgggtatgtgcagcctgtcctcgtgttctccctcagatgaactctgaggaagaaagggaaaccaaaactctctgtttgcaggtcacaggtagtggcaaaacactcgctttt

SEQ ID NO: 183012 - DNA, 120 bp, Artificial Sequence
  ENSG00000111364_23 (sequence is synthesized)
gtcatccccatcctggaaattcttctgagaagagaagagaagttaaaaaagagtcagccagattctttggatcggaggcaggaatcctggagaagatgttgagaggtttaagcaacaagg

SEQ ID NO: 183013 - DNA, 120 bp, Artificial Sequence
  ENSG00000111364_24 (sequence is synthesized)
taagcaacaagggtgagtttgctcgtgtctgcttgtttctttgcttgcttttggcattgaacctaagaatcgatgtgtgatctcagcctaactgtgggtccccctttcagcagcctcctc

SEQ ID NO: 183014 - DNA, 120 bp, Artificial Sequence
  ENSG00000111364_25 (sequence is synthesized)
agcagggtcctcactgttggcactattgacattttgtgctggaaaattttttgttatggggctgtcctgggcattgtaggatgtttaacaacatcactggaatctgtccatcagaggaca

SEQ ID NO: 183015 - DNA, 120 bp, Artificial Sequence
  ENSG00000111364_26 (sequence is synthesized)
aatctgtccatcagaggacatcacctcccaaccctggttgtattttatttatttatttatttattgaggcagggttttgctctgttacccgggctggagtgcagtggcacagtcacagct

SEQ ID NO: 183016 - DNA, 120 bp, Artificial Sequence
  ENSG00000111364_27 (sequence is synthesized)
tgggactgcaggcatgcaccaccacacccacataattaaaaaaattttctttgtagagacagagtctccctgtgttgcctggctggtctggaattcctggccttaagggatctacccacc

SEQ ID NO: 183017 - DNA, 120 bp, Artificial Sequence
  ENSG00000111364_28 (sequence is synthesized)
ggctggtctggaattcctggccttaagggatctacccacctgggcctcccaaagtgctgtgattatagatgtgagccaccacgcctggcccaccctgggttttgacaaccaaaaatgtct

SEQ ID NO: 183018 - DNA, 120 bp, Artificial Sequence
  ENSG00000111364_29 (sequence is synthesized)
ccttacattgtcaaatgttccctcaggggttgagcagggggatagcaatcactgtgtagaggcagttagaataatattacacctgctgtgatttaagtgagctcaggccctggggaccag

SEQ ID NO: 183019 - DNA, 120 bp, Artificial Sequence
  ENSG00000111364_30 (sequence is synthesized)
ggctgaatcctggagggagcagcctccaggccaaggcctgaatctaattgaggttttttttgattgctaaaaccaggtttcttttaaagtctggcaacctctacagtgcttaaaatgaga

SEQ ID NO: 183020 - DNA, 120 bp, Artificial Sequence
  ENSG00000111364_31 (sequence is synthesized)
gggtttatttgaatcatgattctgtgatactagagctggaagggaccctaaaacccaatgtcttcaacgccttcctggttcagagaggaaagtaggagcgacagggctagaattcaggac

SEQ ID NO: 183021 - DNA, 120 bp, Artificial Sequence
  ENSG00000111364_32 (sequence is synthesized)
tcccacctcccagctcagctcactgtccccacacgccgtccacatagacacagttgccacgtttgattcaacttctctatggtgacttggttactcagagccccttttgtggtgggaccc

SEQ ID NO: 183022 - DNA, 120 bp, Artificial Sequence
  ENSG00000111364_33 (sequence is synthesized)
actgtgaccttagctgcccattatgttcctagggcttcgggtctcacctgtgaattgatggcatcctttaaccagtgctttgcaatctctctctttagtccgcaaccatccctctgttca

SEQ ID NO: 183023 - DNA, 120 bp, Artificial Sequence
  ENSG00000111364_34 (sequence is synthesized)
ggtagctggaaaagttctccagcatgtggtcagcaattgaaattacgaattgcaaactcactggggctgggctggtggtggcagtggggggccctggtggggtttttttttttttttttt

SEQ ID NO: 183024 - DNA, 120 bp, Artificial Sequence
  ENSG00000111364_35 (sequence is synthesized)
aaggccctgatgagaacttcacaaactcaggttcttacagaggtcaagagaacgacgtgaagataaatgagtggtcaggggctgggggatggtgaggaactggccagcagctgccttgaa

SEQ ID NO: 183025 - DNA, 120 bp, Artificial Sequence
  ENSG00000111364_36 (sequence is synthesized)
tactcagctccagctggtagttgcctgggaggactcggctcagtagtggcaggttttgaattttttaaaaagaagatggaattccagatttgtgtgtgtaatctcctgattttttaactg

SEQ ID NO: 183026 - DNA, 120 bp, Artificial Sequence
  ENSG00000111364_37 (sequence is synthesized)
ttggcgtgtaatccacatttgaaaaacatatcttgtaggtgagccagtctgagggagccacatctggccctgagtctgccagtttgtgatctttacataggattctctaattctgtcaac

SEQ ID NO: 183027 - DNA, 120 bp, Artificial Sequence
  ENSG00000111364_38 (sequence is synthesized)
atttccattttacaagtgagttacctgggacctacaatggttgagtaacttgcgtaagtcagaggttggtaagctttttttttataaaggagcagatggtaaatgttttcggctttgtga

SEQ ID NO: 183028 - DNA, 120 bp, Artificial Sequence
  ENSG00000111364_39 (sequence is synthesized)
accatatggtctccatcgcacttactcaactgctgttgtagtgtgaaggcagcgatagacaacatgtgaataaatgggcgtggttttctgccaataaaatacttggcaaggacaggcagc

SEQ ID NO: 183029 - DNA, 120 bp, Artificial Sequence
  ENSG00000111364_40 (sequence is synthesized)
gtttggtccgggagctggagtttgccaaccttgcctaggtcatagcccagaacccagatcccgtctcaccacagccctcagtctttctaccctgcagcactcttctactctcatgctctt

SEQ ID NO: 183030 - DNA, 120 bp, Artificial Sequence
  ENSG00000111364_41 (sequence is synthesized)
cgttctcttcactagggcttaaatgactttggggggatataaaacttggtattttggtaatcatcaaccacattcccaagatccagagagtttggtaaatgttaactttctttccaaagt

SEQ ID NO: 183031 - DNA, 120 bp, Artificial Sequence
  ENSG00000111364_42 (sequence is synthesized)
tgacaggcgtgagccaccgtgcccggccaccctggtgggctttaaggctgtggaggcacctcggtcatggagtgaccaagtctcctgtgtggtagcatgccctgctgggacccaggcaag

SEQ ID NO: 183032 - DNA, 120 bp, Artificial Sequence
  ENSG00000111364_43 (sequence is synthesized)
tagcatgccctgctgggacccaggcaagggttacttcttgtgaatagagacccagtgttgccatactttgctaccagattaggattgtcatgtgaaatctgatttttaaattttctttta

SEQ ID NO: 183033 - DNA, 120 bp, Artificial Sequence
  ENSG00000111364_44 (sequence is synthesized)
aaaatttaacatactttacagagcatgtgaaatatttgggttggagttgggcttcagacctcaacagttgaaaaggaattgtttcgcttttgtttttcttggttgtgatggggagccctg

SEQ ID NO: 183034 - DNA, 120 bp, Artificial Sequence
  ENSG00000111371_0 (sequence is synthesized)
actgacacgcagctttggttaaagagcgggcgcacaggaggggaggagaccgcgcgcgggacggggaggaatggcctgtccgcgttaaaccatcacaagccatggttgcggaagggccac

SEQ ID NO: 183035 - DNA, 120 bp, Artificial Sequence
  ENSG00000111371_1 (sequence is synthesized)
gcgtcccccagtaggagaatgactccgattcgtgaccctcagcgccggtgcatgtcgatgtaagtgcgaggccggcgagcagagtgtgagtgggggttggtggtgaggggagattctgat

SEQ ID NO: 183036 - DNA, 120 bp, Artificial Sequence
  ENSG00000111371_2 (sequence is synthesized)
gcaatcggcccggaaaggaggagagccaggcgagcgcggactggggcggccacgccactccgccagaaggtcgccaggagcctccgcccttcaccttcctccgaaatccgccaggccacg

SEQ ID NO: 183037 - DNA, 120 bp, Artificial Sequence
  ENSG00000111371_3 (sequence is synthesized)
ccaagctccctgcccaacccttactgacgggggccacattttcccggcctccgcagccagaccttgacacaaaggacatcaaactgccgagggtaaaaaccccggaagggcggacacctc

SEQ ID NO: 183038 - DNA, 120 bp, Artificial Sequence
  ENSG00000111371_4 (sequence is synthesized)
cacatcgccttttgccacctttccctttatttccggagatatttattgagtgtctactgtgtgccaggcactatatctatgtgcatagaaaaaccctggaaggccatacaacaatatata

SEQ ID NO: 183039 - DNA, 120 bp, Artificial Sequence
  ENSG00000111371_5 (sequence is synthesized)
tagagtgatcgtctctgcttgctgagctaacaggggtgtcaagcttccattttggtatctacttctaaatacactcagaacaggagaaatttggactaattttcaaactacagacacttt

SEQ ID NO: 183040 - DNA, 120 bp, Artificial Sequence
  ENSG00000111371_6 (sequence is synthesized)
ctaatcatgatgcatttcaaaagtggactcgaattaactgagttgcaaaacatgacagtgcccgaggatgataacattagcaatgactccaatgatttcaccgaagtagaaaatggtcag

SEQ ID NO: 183041 - DNA, 120 bp, Artificial Sequence
  ENSG00000111371_7 (sequence is synthesized)
ataaatagcaagtttatttctgatcgtgaaagtagaagaagtctcacaaacagccatttggaaaaaaagaagtgtgatgagtatattccaggtacaacctccttaggcatgtctgttttt

SEQ ID NO: 183042 - DNA, 120 bp, Artificial Sequence
  ENSG00000111371_8 (sequence is synthesized)
aacctaagcaacgccattatgggcagtgggattttgggactcgcctttgccctggcaaacactggaatcctactttttctggtacttttgacttcagtgacattgctgtctatatattca

SEQ ID NO: 183043 - DNA, 120 bp, Artificial Sequence
  ENSG00000111371_9 (sequence is synthesized)
ataaacctcctattgatctgttcaaaagaaacaggctgcatggtgtatgaaaagctgggggaacaagtctttggcaccacagggaagttcgtaatctttggagccacctctctacagaac

SEQ ID NO: 183044 - DNA, 120 bp, Artificial Sequence
  ENSG00000111371_10 (sequence is synthesized)
actggagcaatgctgagctacctcttcatcgtaaaaaatgaactaccctctgccataaagtttctaatgggaaaggaagagacattttcagcctggtacgtggatggccgcgttctggtg

SEQ ID NO: 183045 - DNA, 120 bp, Artificial Sequence
  ENSG00000111371_11 (sequence is synthesized)
gtgatagttacctttggcataattctccctctgtgtctcttgaagaacttagggtatcttggctatactagtggattttccttgagctgtatggtttttttcctaattgtggttatttac

SEQ ID NO: 183046 - DNA, 120 bp, Artificial Sequence
  ENSG00000111371_12 (sequence is synthesized)
aagaaatttcaaattccctgcattgttccagagctaaattcaacaataagtgctaattcaacaaatgctgacacgtgtacgccaaaatatgttaccttcaattcaaagaccgtgtatgct

SEQ ID NO: 183047 - DNA, 120 bp, Artificial Sequence
  ENSG00000111371_13 (sequence is synthesized)
ttacccaccattgcatttgcatttgtttgccacccgtcagtcctgccaatttacagtgagcttaaagaccgatcacagaaaaaaatgcagatggtttcaaacatctcctttttcgccatg

SEQ ID NO: 183048 - DNA, 120 bp, Artificial Sequence
  ENSG00000111371_14 (sequence is synthesized)
tttgttatgtacttcttgactgccatttttggctacttgacattctatgacaacgtgcagtccgacctccttcacaaatatcagagtaaagatgacattctcatcctgacagtgcggctg

SEQ ID NO: 183049 - DNA, 120 bp, Artificial Sequence
  ENSG00000111371_15 (sequence is synthesized)
gctgtcattgttgctgtgatcctcacagtgccggtgttatttttcacggttcgttcatctttatttgaactggctaagaaaacaaagtttaatttatgtcgtcataccgtggttacctgc

SEQ ID NO: 183050 - DNA, 120 bp, Artificial Sequence
  ENSG00000111371_16 (sequence is synthesized)
atactcttggttgttatcaacttgttggtgatcttcataccctccatgaaggatatttttggagtcgtaggagttacatctgctaacatgcttattttcattcttccttcatctctttat

SEQ ID NO: 183051 - DNA, 120 bp, Artificial Sequence
  ENSG00000111371_17 (sequence is synthesized)
ttaaaaatcacagaccaggatggagataaaggaactcaaagaatttgggctgcccttttcttgggcctgggggtgttgttctccttggtcagcattcccttggtcatctatgactgggcc

SEQ ID NO: 183052 - DNA, 120 bp, Artificial Sequence
  ENSG00000111371_18 (sequence is synthesized)
tgctcatcgagtagtgacgaaggccactgaaacccgccgagaaaaagaaacatccctgttgtctgctcagtcaagtccccacacatcagcaatctctcaccacttcttttgcaagtttac

SEQ ID NO: 183053 - DNA, 120 bp, Artificial Sequence
  ENSG00000111371_19 (sequence is synthesized)
agaagcaaacagaaatgtacaggatacttaaaatggaataactttttggttgcaaaacagagacatggttctataatgcttcatgtccctccaagatttgagatcaatttagggattgtg

SEQ ID NO: 183054 - DNA, 120 bp, Artificial Sequence
  ENSG00000111371_20 (sequence is synthesized)
aaatttttttttcaaatttcatacaatcatatttcccagtacttttcacaatcattttttacccatctaactctatgttttgtggcttcccggtctcttagaactttgaaaacatgatat

SEQ ID NO: 183055 - DNA, 120 bp, Artificial Sequence
  ENSG00000111371_21 (sequence is synthesized)
acaataatgtttatttattatacatccagattctgaaataattttcctactgatgttcagctcacactatctgtacctttttagaagagaaaagaatcttgaattgtatatatttatttt

SEQ ID NO: 183056 - DNA, 120 bp, Artificial Sequence
  ENSG00000111371_22 (sequence is synthesized)
gctttacagaaaaaaatggtttcgtaaataatttgcctattttggttaacatagcacatggagataatcatctgaaagttatagggcactgccactgctgaatcagagcatgcccaatat

SEQ ID NO: 183057 - DNA, 120 bp, Artificial Sequence
  ENSG00000111371_23 (sequence is synthesized)
ttgaggtggctctgatttcctggcagctgaactcgggtagtccagtggcctagctggtaccacatctattcccatccagagacattctctggcaagtgttctcagctgaaaagtggttgg

SEQ ID NO: 183058 - DNA, 120 bp, Artificial Sequence
  ENSG00000111371_24 (sequence is synthesized)
ggatgattcttaccttggtaattaaatgaagctacacatttgggtaatctagcaaatgaagtattttttccctcttggcaacttgtgtcagagttactctggtctgagtcaactttcgct

SEQ ID NO: 183059 - DNA, 120 bp, Artificial Sequence
  ENSG00000111371_25 (sequence is synthesized)
ggggaaaacctatggaacctactgcaaaaagattgtccaaaatgcctaagaaaatactcctctgatgcatttagccttcaaccctacctgtcttgctgaagggagaaaaatgttttagta

SEQ ID NO: 183060 - DNA, 120 bp, Artificial Sequence
  ENSG00000111371_26 (sequence is synthesized)
cattataggcccagcagcttttattcatgtccaccagctagttgcacagagaatcatgtgtacctaactaaggatgatctaggataagtaactcctgttttatattgagtattttaggga

SEQ ID NO: 183061 - DNA, 120 bp, Artificial Sequence
  ENSG00000111371_27 (sequence is synthesized)
agtctttaaaagacttgttttatatctataaatctaggttattacaaatacaagaattttgtaccttaaataagcctcatttctatttcttcttcattaattctccatctagtcttgtga

SEQ ID NO: 183062 - DNA, 120 bp, Artificial Sequence
  ENSG00000111371_28 (sequence is synthesized)
aaaaaaaaaaaaaaaaaccctcagagatagtctttgtgaagagcttctgacagaatcactgagtaccttccttcccccagatgaggaagacaagggggtctcagtgtctgtgctgtctcc

SEQ ID NO: 183063 - DNA, 120 bp, Artificial Sequence
  ENSG00000111371_29 (sequence is synthesized)
tcttctcttccccaaccaaggactgtgccattactgcccgtctcaactgtccatgcaggaggacagagttgcctggtactcttacccttgtccctctcctaaagggagcacaaggaaact

SEQ ID NO: 183064 - DNA, 120 bp, Artificial Sequence
  ENSG00000111371_30 (sequence is synthesized)
gaagagactgaaaaagaagagagtttgtagctgaaaaagaatagggatagcaaggaaacccagaactgcattcccctaagtggggccatcccatgtgattgaattgtccatagcttgcct

SEQ ID NO: 183065 - DNA, 120 bp, Artificial Sequence
  ENSG00000111371_31 (sequence is synthesized)
atggtgagaaatgtgcatgctccgtgagctggtctcttgaaacaggacttatgcttcctctatattctggttaaattttccaaacacataagttcactgagcacagatttcttatccaga

SEQ ID NO: 183066 - DNA, 120 bp, Artificial Sequence
  ENSG00000111371_32 (sequence is synthesized)
gacaagtagaatctaaccgcagactgttggcagagtttccaggcacttagccatgttcccttcctgactcaaatccccaaaggccttcactctcactgagaatcacactactgtcccata

SEQ ID NO: 183067 - DNA, 120 bp, Artificial Sequence
  ENSG00000111371_33 (sequence is synthesized)
atttcctgcattgcatcatcatagcttttaatataatgctacagaatcatatccacattaggttagagttcagatatttggatatgaatacctaacctagccatatccatggccatctct

SEQ ID NO: 183068 - DNA, 120 bp, Artificial Sequence
  ENSG00000111371_34 (sequence is synthesized)
gttcttttcagcaatgttttccatattatattagcaatgacagaaacagaacaagccaagatccagtcagttcttgggagcttgtctagagcaccaagtaatgaaatagccaggtagtgg

SEQ ID NO: 183069 - DNA, 120 bp, Artificial Sequence
  ENSG00000111371_35 (sequence is synthesized)
gatgactgtacctttaaaaatacataatttagtttgcaagctatattatgctactttctattttccttgttactttatagcaattcattttaccctcacaaagtcaatttagaaccttat

SEQ ID NO: 183070 - DNA, 120 bp, Artificial Sequence
  ENSG00000111371_36 (sequence is synthesized)
cattaactgggatgtgtagtgatatttttgggcctctgggtttcatgtgtcaatacaaggaatatttatttaaaatagatttatttagaggaggcacagtgttgttgatctgtgtgacac

SEQ ID NO: 183071 - DNA, 120 bp, Artificial Sequence
  ENSG00000111371_37 (sequence is synthesized)
cacccatatttttaaaaacctttgtatgtttctctaaatttgttgttgactgaatataatagaccctaccataattcgtcaaatatcactgattagttacatcctttgtgtgagattagc

SEQ ID NO: 183072 - DNA, 120 bp, Artificial Sequence
  ENSG00000111371_38 (sequence is synthesized)
tgtaaagtatactgctcttattcttattcagaatagttaattggtagccaaaaatacatgtatcacagatgttaggtcgaatttaaacagcacagtcaagtgctatggaagtttttctgc

SEQ ID NO: 183073 - DNA, 120 bp, Artificial Sequence
  ENSG00000111371_39 (sequence is synthesized)
taaattagtagattaaagaatactataccctaggcatggggagcagcacgttttcctttggtaggtaggatctctatactagtgaacagtgccagttccacactttggacttagaactgt

SEQ ID NO: 183074 - DNA, 120 bp, Artificial Sequence
  ENSG00000111371_40 (sequence is synthesized)
tctctagttattgtaacacagaatactgtcaatccctaatttacttaatgttacttattggaagtggggctgatgaaatacgcacaggagggaaatctactgtgtttaggcacaggcagc

SEQ ID NO: 183075 - DNA, 120 bp, Artificial Sequence
  ENSG00000111371_41 (sequence is synthesized)
cccagtgtataaggagatcatattccaaaaggttgtcagttggttgtttgcaacctggaatgtattttcctttagagaccaggttatccatggtggttaggcccctagagcagctggaaa

SEQ ID NO: 183076 - DNA, 120 bp, Artificial Sequence
  ENSG00000111371_42 (sequence is synthesized)
agatgatcaaaccaataggttagctgacatcgaataatgtaataggtttgctaaagaatctaaccatcaaatataatattgtttccagggagggtgtttgttcagagttgcctgttagta

SEQ ID NO: 183077 - DNA, 120 bp, Artificial Sequence
  ENSG00000111371_43 (sequence is synthesized)
gaatctggactgtccatcccagccacatcccacctactggacagtaggggtagagatgccaccagactacaggtgaccagattggcctgaaacatggtgtccagtaaaaacggggaggaa

SEQ ID NO: 183078 - DNA, 120 bp, Artificial Sequence
  ENSG00000111371_44 (sequence is synthesized)
taagtccatgactgctggagagcttggtggtaggaggagggtgaaggagggtgagggggcctctcatgggtcagaaacctccagggacatccctcagctggtaactctgctgttgtccgg

SEQ ID NO: 183079 - DNA, 120 bp, Artificial Sequence
  ENSG00000111371_45 (sequence is synthesized)
agggttcaggcttggtgtgccttcttctgtttgtctgacttttggctcctatggttcatctcctgccctgcccaccacagaaaaggatgctgctgcatagcttctccaatgtaccagtca

SEQ ID NO: 183080 - DNA, 120 bp, Artificial Sequence
  ENSG00000111371_46 (sequence is synthesized)
ttgaggccagcgcgcagcacttttaatgtttttagtgctagtaactgtgttttaactctccaggaataagctgggaggttagaaaacaagaaaaaagggggaaaaaaaaacctctccacc

SEQ ID NO: 183081 - DNA, 120 bp, Artificial Sequence
  ENSG00000111371_47 (sequence is synthesized)
cactttccttttttacagttacagaccctgttgagaaaaagaagcacccagatgggtgatggtgatagggcttgtggtggacacagggttgtggtaagattcctcagtgcttcggcgagc

SEQ ID NO: 183082 - DNA, 120 bp, Artificial Sequence
  ENSG00000111371_48 (sequence is synthesized)
acctaagactattaccctggaactgactgctttctagagcttgattcatgcctctaagccagtggttctcaaagtgtggcccctagaccagtagcatcagcatcatcggggacctcatta

SEQ ID NO: 183083 - DNA, 120 bp, Artificial Sequence
  ENSG00000111371_49 (sequence is synthesized)
gaatgcagattctcagccccctcccagacatggtgaagtcagaagctctcagggagggactcagcaaatgattctaaagcgcatcaagtttgagaaccaccctaagccaatgagtctccc

SEQ ID NO: 183084 - DNA, 120 bp, Artificial Sequence
  ENSG00000111371_50 (sequence is synthesized)
ttttacttcccattagtcctccctcaccagatgattcctaggactcatggtgcaacatacaggagccaggctttagggaggggaggaaaggagcctggcggcaggggtctctgcaatggc

SEQ ID NO: 183085 - DNA, 120 bp, Artificial Sequence
  ENSG00000111371_51 (sequence is synthesized)
aagaaagtgagtgaatccagcgctgccacctggttatccccttctcgttgaaaatagcagcgcaggtgcaaattcctaaacacaggctgcctgcactcggtgttacctcgggctgaggca

SEQ ID NO: 183086 - DNA, 120 bp, Artificial Sequence
  ENSG00000111371_52 (sequence is synthesized)
tgataatattttattttttaaagctgtgaggaaatgaaagtgaggctttggttggggcgaggcagttgtgaaagaaattaaaataaaagaccctttgtaaatgcagacttagaagaaata

SEQ ID NO: 183087 - DNA, 120 bp, Artificial Sequence
  ENSG00000111371_53 (sequence is synthesized)
ctgaatttgtgtcagaagttctccagtgtttgtgttaatcgtgtggtgataatcctgtcctccttttaaagcgaattctctactgaaaggtctgctctgcttaaggagctacaaactgct

SEQ ID NO: 183088 - DNA, 120 bp, Artificial Sequence
  ENSG00000111371_54 (sequence is synthesized)
ctcaaaagaatgaaatactgagttccaattcagtgaggcacagtgttggactatggcacatttagttggagtcggggggaggtcaggaatatgatcagataatggattttataccttaga

SEQ ID NO: 183089 - DNA, 120 bp, Artificial Sequence
  ENSG00000111371_55 (sequence is synthesized)
gcaaaatctattagtctctctcagtttatcaatttaaatggctttaggcttatagggggtgtaaactttaagaatataattctcccattcaagtttacagcaaacatctagccaccttca

SEQ ID NO: 183090 - DNA, 120 bp, Artificial Sequence
  ENSG00000111371_56 (sequence is synthesized)
aaacaaagaatatacagaccatcatttagcaatactaatacatgattttccttggggatggcaggtttgagaatcctttagcaacaggacatacttcccctaaattacagtgaattattt

SEQ ID NO: 183091 - DNA, 120 bp, Artificial Sequence
  ENSG00000111371_57 (sequence is synthesized)
ataacgagataaagctttcaggtacaagctgaaggtggggtgtctaacaactaaaaactatcactaaatctcaaagagaaagttcttgcaaaatatgtaaagttcacaaggtgcagacat

SEQ ID NO: 183092 - DNA, 120 bp, Artificial Sequence
  ENSG00000111371_58 (sequence is synthesized)
tttccttctttaggcttttatctaaggaagggctatgaaactgggcccatctgtatacaggctcaaatttacgtttttaaaggaagaatctatgcagctgaggcttattgcaggaaatac

SEQ ID NO: 183093 - DNA, 120 bp, Artificial Sequence
  ENSG00000111371_59 (sequence is synthesized)
ttcatttgtatgtaaatattattgtaaataaataggaggctgtatatttttgaagttgttgatctgcactgaaatagaagtctctaggatctgcatataaacaataaatgtttcctagaa

SEQ ID NO: 183094 - DNA, 120 bp, Artificial Sequence
  ENSG00000111371_60 (sequence is synthesized)
attagtggttttgtttgggaattagaaaaatttacattctctcccaggtaacatagttctctcaatgtaaacttggaacctgaaaccctacttaatttagagaaagaaatgtctgagaaa

SEQ ID NO: 183095 - DNA, 120 bp, Artificial Sequence
  ENSG00000111371_61 (sequence is synthesized)
tagttcccttgatttcttatgctggcattaagatcaattatttaacagatagtcctctgagatacaagtaaggaatatttagacacaaatccttgtcctatagaaacagatatacccaaa

SEQ ID NO: 183096 - DNA, 120 bp, Artificial Sequence
  ENSG00000111371_62 (sequence is synthesized)
tgacaaattgtttcttcataatgatcttccatttttaacactgataccactacacagtacatatgaaaacagaagctggggagaagaatgtttttttcacaattgaattgctgcatttct

SEQ ID NO: 183097 - DNA, 120 bp, Artificial Sequence
  ENSG00000111371_63 (sequence is synthesized)
caaactttgggatctatgaaagcggggagagggaacctgaatattaattatgagcacaaatttgaaggaaagaaaacaaagaaccattatctaatcaagctttgaaagtcctgcatgttt

SEQ ID NO: 183098 - DNA, 120 bp, Artificial Sequence
  ENSG00000111371_64 (sequence is synthesized)
gccttttattttagtgttgacgccaacatagactgtctaaggtatttttttccccaaacacttgaatcttggtcgttggtatgtaatccactctctagagtccagtgtactttagacttc

SEQ ID NO: 183099 - DNA, 120 bp, Artificial Sequence
  ENSG00000111371_65 (sequence is synthesized)
atctgagtccaatacatgtaccacactactgttttattaatgtaaaaaccttgtaaatgaatttcagatgggtgatttaagtgagtcacaagtcacaaaactttgctattcatagttaat

SEQ ID NO: 183100 - DNA, 120 bp, Artificial Sequence
  ENSG00000111371_66 (sequence is synthesized)
caaatagaactgggttttttttttcagagtgtggtgtaaataaagaaatataagaagttctgttctataactgctctgttaacatagtttttaaacattaaaaaatgtgaactaaaagta

SEQ ID NO: 183101 - DNA, 120 bp, Artificial Sequence
  ENSG00000111371_67 (sequence is synthesized)
aaacttttgagctatttacagcttgtagcaattatgtaaagtatactcctctgaacaaaatttggagcatgtttgtttctctctacctgatttccccagaatctggaaactatctatatt

SEQ ID NO: 183102 - DNA, 120 bp, Artificial Sequence
  ENSG00000111371_68 (sequence is synthesized)
ccctgttggctctcagaatgcatcatccttctccctgcagcgctctcactgaacatgctcaagcgcaaggaacttataatcttgtgttctctggattctggatttagtaatctgtattag

SEQ ID NO: 183103 - DNA, 120 bp, Artificial Sequence
  ENSG00000111371_69 (sequence is synthesized)
gaaaggaggcagaagccctgtagctttgctacttgggagatatttaaaatatcatatcagaatcttctcccatccctccaaatatcttttctggttttactctttttttttgagatggag

SEQ ID NO: 183104 - DNA, 120 bp, Artificial Sequence
  ENSG00000111371_70 (sequence is synthesized)
gcccagccagtgaaagggggctgtgtctgaaacaaagaccgcggtcgctgcatcgtcagagagctgcaagagggaggcagcaaggtgcggccgccagcagtgacaccatgtgaccggcac

SEQ ID NO: 183105 - DNA, 120 bp, Artificial Sequence
  ENSG00000111371_71 (sequence is synthesized)
gttgccgcagaggcctttaaacgcgtgggtcggtgccgggaggagagcgcatcttcgcccttgtgcgagccccttgccccctaaattatccacctcctggcgcatggggctccccagcac

SEQ ID NO: 183106 - DNA, 120 bp, Artificial Sequence
  ENSG00000111371_72 (sequence is synthesized)
ccactgggacccagtaggttacccggctgcctgggcaccgtttgcctgccaaatcgcccgcctgaggtttgtgctgaactgtagttagagaaggcacaagtgcatatggcagcaaaagga

SEQ ID NO: 183107 - DNA, 120 bp, Artificial Sequence
  ENSG00000111371_73 (sequence is synthesized)
atttcgcggtacccgcgtcacgccgctcccagtgcctttcacaggctgccttgggctggggaaggtggtgctacaattcagagtcctttgtcttgctctgcggcgcggacccggggtttg

SEQ ID NO: 183108 - DNA, 120 bp, Artificial Sequence
  ENSG00000111371_74 (sequence is synthesized)
tacaaaccctcgttctctgttagaaacctaactgccgccaggatcacgtactttctcggacgaatccgcggtgatgtgtgtagcaaaagtgaaaaaagacgcctctgctagaaaacgata

SEQ ID NO: 183109 - DNA, 77 bp, Artificial Sequence
  ENSG00000111371_75 (sequence is synthesized)
tgttctcacactgctaataaagaaatacctgaggttgcttccaagatgatgtagaagatgggtgatttctgcatttc

SEQ ID NO: 183110 - DNA, 120 bp, Artificial Sequence
  ENSG00000111371_76 (sequence is synthesized)
cagtgggtgcagcccatggaaggtgagctgaagcaaggtggggcgtcacctcacccaggaagcacaaggggtcaggggatttacctttcccagccaagggaagccatgacagactgtaac

SEQ ID NO: 183111 - DNA, 120 bp, Artificial Sequence
  ENSG00000111371_77 (sequence is synthesized)
tggagaaacggtacactcctgaccaaatactgcacttttcccacagtcttagcaactggcagaccaggtaataccctcccgtgcctggctcagtgggttccatgccaacggagccttgct

SEQ ID NO: 183112 - DNA, 120 bp, Artificial Sequence
  ENSG00000111371_78 (sequence is synthesized)
agttgcccctgctcccctccatgccgctccctcgtcccccggacttggagcgccccagctccgttaacctggacgcaccaggtccttcggtcgggaccacgtggggtctccaggccctcc

SEQ ID NO: 183113 - DNA, 120 bp, Artificial Sequence
  ENSG00000111371_79 (sequence is synthesized)
aagagctggcccccggctctttgcgcctaggccggtgctttctcggtgctcagcaaatccttctggttcacctcacacccagtccccaaagcagagctccacagggcagatctcaggaag

SEQ ID NO: 183114 - DNA, 120 bp, Artificial Sequence
  ENSG00000111404_0 (sequence is synthesized)
ggcagtgtagttccagaaaataggactgaccaagaagcagaaaagcaagatgaatgatgtgaagcttgctgtcttgggtggtgaaggaacaggcaaatctgcccttacagtgaggtttct

SEQ ID NO: 183115 - DNA, 120 bp, Artificial Sequence
  ENSG00000111404_1 (sequence is synthesized)
tactaagcgattcattggagaatatgcttctaattttgaatctatctataagaagcacttgtgtttggaaaggaaacaactaaatctagaaatatatgacccttgttctcaaacacagaa

SEQ ID NO: 183116 - DNA, 120 bp, Artificial Sequence
  ENSG00000111404_2 (sequence is synthesized)
agcaaaattctccctcacaagtgagcttcactgggcagatgggtttgttattgtgtatgacatcagtgataggtcttcatttgcttttgcaaaagcgctgatctacagaatccgggagcc

SEQ ID NO: 183117 - DNA, 120 bp, Artificial Sequence
  ENSG00000111404_3 (sequence is synthesized)
acaaactagtcattgtaaaagagctgtggaatcagcagtgtttttggttggcaacaaacgagatctttgtcatgtgcgagaggttggctgggaagaagggcaaaagctggcactggaaaa

SEQ ID NO: 183118 - DNA, 120 bp, Artificial Sequence
  ENSG00000111404_4 (sequence is synthesized)
tgtgaactgtctgcagcagagcagtctctggaggtggaaatgatgtttatcagaattatcaaggacatcctgataaacttcaaactcaaagaaaagagacgtcccagtggatctaaatca

SEQ ID NO: 183119 - DNA, 120 bp, Artificial Sequence
  ENSG00000111404_5 (sequence is synthesized)
atggccaaattgatcaataatgtatttggaaagagaaggaaatctgtttagtagacaggtaatcctgggagatttcctatatcagagagtttcaaacattcacatgataattaaactaac

SEQ ID NO: 183120 - DNA, 120 bp, Artificial Sequence
  ENSG00000111404_6 (sequence is synthesized)
ctttgtatgcaatttttttttggtaaaaagaattctcttggagatatgaaatgattgagtatgaaccacagctgtgttttcaaatatgtagtttgcctttttggttgttgtaccctgctc

SEQ ID NO: 183121 - DNA, 120 bp, Artificial Sequence
  ENSG00000111404_7 (sequence is synthesized)
actctccttcacacagaacctttcatttattgtacaacatcacactcaccctaacctactggcggacagcgatcccagtttgccttgccaaataaactctgtttatgtgaatttattaaa

SEQ ID NO: 183122 - DNA, 120 bp, Artificial Sequence
  ENSG00000111404_8 (sequence is synthesized)
attcggacagaaaacatcagaaggaaaaccttcatatggcccaatgtcaaagattccatctggtgtcattttccttgtaccagaagtatttaatttggcatttctcatgtgcctgctagc

SEQ ID NO: 183123 - DNA, 120 bp, Artificial Sequence
  ENSG00000111404_9 (sequence is synthesized)
tgactaatttctttcagcatctgtttacgaaatatatagctaaaatagaaatatttgaaaagaggaaaacctgaagatcagtaatctaaattaacagcaaaatataatcaaagaaaacaa

SEQ ID NO: 183124 - DNA, 120 bp, Artificial Sequence
  ENSG00000111404_10 (sequence is synthesized)
aagaagaaaaataataaagatctcaactgagatcctcccattgtcagattttgacctaggaccatcttggaaagggattcttctgtgattcagaggtgaagcccttacagtgaggtttct

SEQ ID NO: 183125 - DNA, 120 bp, Artificial Sequence
  ENSG00000111404_11 (sequence is synthesized)
acagggcagtgtagttccagaaaataggactgaccaagaagcagaaaagcaagatgaatgatgtgaagcttgctgtcttgggtggtgaaggaacaggcaaatctggtccctacatcctta

SEQ ID NO: 183126 - DNA, 120 bp, Artificial Sequence
  ENSG00000111404_12 (sequence is synthesized)
aataactgcaaatacttggtagtgtctttgtgactattacacatagtaccttgaagccagactgagtttgacagagaaaataaacagatgtcaaacttcttgcatctcaaatataatgag

SEQ ID NO: 183127 - DNA, 120 bp, Artificial Sequence
  ENSG00000111405_0 (sequence is synthesized)
gtctgagagctgtgacattcatctgactctagtgaaagtccaacagccactccctttttggcctccaactgggcaccatgagggcctgcatctccctggtattggccgtgctgtgtggcc

SEQ ID NO: 183128 - DNA, 120 bp, Artificial Sequence
  ENSG00000111405_1 (sequence is synthesized)
tggcctgggctggaaaaatagaatcctgtgcatctcgatgtaatgagaaatttaaccgggacgctgcctgccagtgtgaccgccggtgtctctggcatgggaactgctgtgaagactatg

SEQ ID NO: 183129 - DNA, 120 bp, Artificial Sequence
  ENSG00000111405_2 (sequence is synthesized)
aacatctgtgtactgaggaccacaaagagtcagagccattgccacagctggaggaagagacagaagaggccctcgccagcaacttgtactcggcacccacctcctgccagggccgctgct

SEQ ID NO: 183130 - DNA, 120 bp, Artificial Sequence
  ENSG00000111405_3 (sequence is synthesized)
acgaagcctttgacaagcaccaccaatgtcactgcaatgcccgctgccaagagtttgggaactgctgcaaggattttgagagcctgtgtagtgaccacgaggtctcccacagcagtgatg

SEQ ID NO: 183131 - DNA, 120 bp, Artificial Sequence
  ENSG00000111405_4 (sequence is synthesized)
ccataacaaaagaggagattcagagcatctctgagaagatctacagggcagacaccaacaaagcccagaaggaagacatcgttctcaatagccaaaactgcatctccccgtcagagacca

SEQ ID NO: 183132 - DNA, 120 bp, Artificial Sequence
  ENSG00000111405_5 (sequence is synthesized)
gaaaccaagtggatcgctgcccaaagccactcttcacttatgtcaatgagaagctgttctccaagcccacctatgcagccttcatcaacctcctcaacaactaccagcgggcaacaggcc

SEQ ID NO: 183133 - DNA, 120 bp, Artificial Sequence
  ENSG00000111405_6 (sequence is synthesized)
atggggagcacttcagtgcccaggagctggccgagcaggacgccttcctcagagagatcatgaagacagcagtcatgaaggagctctacagcttcctccatcaccagaatcgctatggct

SEQ ID NO: 183134 - DNA, 120 bp, Artificial Sequence
  ENSG00000111405_7 (sequence is synthesized)
cagagcaagagtttgtcgatgacttgaagaacatgtggtttgggctctattcaagaggcaatgaagagggggactcgagtggctttgaacatgtcttctcaggtgaggtaaaaaaaggca

SEQ ID NO: 183135 - DNA, 120 bp, Artificial Sequence
  ENSG00000111405_8 (sequence is synthesized)
aggttactggcttccataactggatccgcttctacctggaggagaaggagggtctggttgactattacagtcacatctacgatgggccttgggattcttaccccgatgtgctggcaatgc

SEQ ID NO: 183136 - DNA, 120 bp, Artificial Sequence
  ENSG00000111405_9 (sequence is synthesized)
aggccaggcaaagtgtgccagttaagcctgggaggatatcccttagctgtccggacatatacctgggacaagtccacctatgggaatggcaagaagtacatcgccacagcctacatagtg

SEQ ID NO: 183137 - DNA, 120 bp, Artificial Sequence
  ENSG00000111405_10 (sequence is synthesized)
tcttccacctaatagaacttcgagccagaaaggggcatgagggctcttgcgagactgaagtgctatcttctctggactagagagaagagggagaggactggaagggatcaccaaatctca

SEQ ID NO: 183138 - DNA, 120 bp, Artificial Sequence
  ENSG00000111405_11 (sequence is synthesized)
aagcaatgagaagcattcctaaatcccaaagtgcccacatgggaaagagataaaatgtacaaattagaaaaatgtggataaacagtcaaacctttatcctctagaattttggcaatgttg

SEQ ID NO: 183139 - DNA, 120 bp, Artificial Sequence
  ENSG00000111405_12 (sequence is synthesized)
actaagaaacagagtccaagcagagaaggtaggaaccctccatagctctctgccctgatgtgtgggggaactaggaagaagtcctttgacctcaccaggcctcatgcttccctttaatgt

SEQ ID NO: 183140 - DNA, 120 bp, Artificial Sequence
  ENSG00000111405_13 (sequence is synthesized)
aaagggaaggggtttgcccactttcctctttttggggttggtgagagggcaaaccctgatatttttactgtgaaggtgttttcagttgttcttaggaagaacagctgatagaaattcaag

SEQ ID NO: 183141 - DNA, 120 bp, Artificial Sequence
  ENSG00000111405_14 (sequence is synthesized)
attactataatggctgttattatacacagctctgtaaactaccactcagccctgtgttggggtcctcaaagaagtaaggccacagtaatcaagcaagggcctttggttttttccagagtt

SEQ ID NO: 183142 - DNA, 120 bp, Artificial Sequence
  ENSG00000111405_15 (sequence is synthesized)
agatcctctcagaacagagtctgggagaactccaatgctgaatggagaagggtaataggttggtgcagtgaatgggctgggggtggggtggccttctccaggcctgagtgtttttgtgtc

SEQ ID NO: 183143 - DNA, 120 bp, Artificial Sequence
  ENSG00000111405_16 (sequence is synthesized)
cagctcagtatctgcaacaagaagtttcccacttgtggatgtttagtgcagccacagacttgtattttgatccccaatttttttttgaaagagttctcctcataggaggatgattcagca

SEQ ID NO: 183144 - DNA, 120 bp, Artificial Sequence
  ENSG00000111405_17 (sequence is synthesized)
tcagaagaagaaggaacccatagcttggtgtcattaacataattattttaagccttatccagcagccataatttgaataactctacgagaccagagagactgtagttccctattttaacc

SEQ ID NO: 183145 - DNA, 120 bp, Artificial Sequence
  ENSG00000111405_18 (sequence is synthesized)
tcaattatgcatttgtcccccaaccccactgagaactaaatgctgtaccacagagccgggtgtgaactatggtttagaaggttcaagtttccaattaaagtcattgaagaaaacttgaaa

SEQ ID NO: 183146 - DNA, 120 bp, Artificial Sequence
  ENSG00000111405_19 (sequence is synthesized)
agaatgagaagattagaaaaacagcaggccagaaagtaaagttcggcatcagaaaggacttcctgactgtgaagggtgtgcacgaattaggtttgtttgttttccttccctggagatctt

SEQ ID NO: 183147 - DNA, 120 bp, Artificial Sequence
  ENSG00000111405_20 (sequence is synthesized)
tactgggcagagtgaagacagccaggctagggagcgacagcctgtggggcgttcagagcgacctctagaggtcagcccgggacacaccacccctctcttctcagacttgtactcggcacc

SEQ ID NO: 183148 - DNA, 80 bp, Artificial Sequence
  ENSG00000111412_0 (sequence is synthesized)
gtcacgtggggctgcgcccaaggctgccgggagcagactgggctgcgggcggcggggccggcgcctgcctggagggatgg

SEQ ID NO: 183149 - DNA, 120 bp, Artificial Sequence
  ENSG00000111412_1 (sequence is synthesized)
gcctgccgcgttccgcgccccggccgccgcgccccacgtccgcgccgggatggtgaacctggcggccatggtgtggcgccggcttctgcggaagaggtgggtgctcgccctggtcttcgg

SEQ ID NO: 183150 - DNA, 120 bp, Artificial Sequence
  ENSG00000111412_2 (sequence is synthesized)
gctgtcgctcgtctacttcctcagcagcaccttcaagcaggaggagagggcagtgagagataggaatctcctccaggttcatgaccataatcagcccatcccgtggaaagtgcagtttaa

SEQ ID NO: 183151 - DNA, 120 bp, Artificial Sequence
  ENSG00000111412_3 (sequence is synthesized)
cttgggcaatagcagtcgtccgagcaatcagtgccgcaactccattcaagggaagcacctcatcacggatgaactcggctacgtttgcgagaggaaggatttgctggtaaatggctgctg

SEQ ID NO: 183152 - DNA, 120 bp, Artificial Sequence
  ENSG00000111412_4 (sequence is synthesized)
taatgtcaacgtccctagcacgaagcagtactgctgtgatggctgctggcccaacggctgctgcagcgcctatgagtactgtgtctcctgctgcctgcagcccaacaagcaacttctcct

SEQ ID NO: 183153 - DNA, 120 bp, Artificial Sequence
  ENSG00000111412_5 (sequence is synthesized)
ggagcgcttcctcaaccgggcagccgtggcattccagaacctcttcatggcagtcgaagatcactttgagttgtgcctggccaaatgcaggacctcatctcagagcgtgcagcatgagaa

SEQ ID NO: 183154 - DNA, 120 bp, Artificial Sequence
  ENSG00000111412_6 (sequence is synthesized)
cacctaccgggaccccatagcaaagtattgctatggagaaagcccgcccgagctcttccccgcttgacgggtgcagcggacttgctccagcctgggtgaggaggccccgctgaagaactc

SEQ ID NO: 183155 - DNA, 120 bp, Artificial Sequence
  ENSG00000111412_7 (sequence is synthesized)
gcctcctgggacccagcttcagccatcgggccaggctgcaggaagaagacaaaggcagcgtgaggaaaccttggctttgaccccttctcgtgttgtcatctttggcttcgctcaccaccc

SEQ ID NO: 183156 - DNA, 120 bp, Artificial Sequence
  ENSG00000111412_8 (sequence is synthesized)
gggcttaccagatggaactcttctgtaaagcagcttggcccctccagccagtcccattcgggaaagatgaaaccggaggccgggctcacggtggtggtggagttcttggatgactcagcc

SEQ ID NO: 183157 - DNA, 120 bp, Artificial Sequence
  ENSG00000111412_9 (sequence is synthesized)
ctgggacctgcacagggacctgtgacttgtgttcatcgggggccggtgtcacttccagttttgatccaggctctttcactgtaaaattatttattggattcctttggagtaatgggaaca

SEQ ID NO: 183158 - DNA, 120 bp, Artificial Sequence
  ENSG00000111412_10 (sequence is synthesized)
ttctaatgttttatgtaggaaaatgccttgccattctagttgaatatgttcaaggaaattatttttgttgttgttctgtgttctcgagtttcaggagttaaatcattcttccacccagat

SEQ ID NO: 183159 - DNA, 120 bp, Artificial Sequence
  ENSG00000111412_11 (sequence is synthesized)
acaacattttctcttttaggacgtgaatattctctctaggcagttatttttgtttgtatttcgacagtatcaagcataggccctgaacgtgacctgttagccatatcctgacgtgtaaaa

SEQ ID NO: 183160 - DNA, 120 bp, Artificial Sequence
  ENSG00000111412_12 (sequence is synthesized)
ttatctaaaaactcagacactcttccattctaatctaactgcacgatttctaacagtgggcaccatgtgcctgccctcaggttattttccagtggtagtcgaatgtgctcatatacccta

SEQ ID NO: 183161 - DNA, 120 bp, Artificial Sequence
  ENSG00000111412_13 (sequence is synthesized)
tggagagcactgttttagcagaaatctaatttctcttcctggaggaatttgttctcatttcttttgccacttaaaattaactgtgggctactcagccagggtacagtgggagcctcagga

SEQ ID NO: 183162 - DNA, 120 bp, Artificial Sequence
  ENSG00000111412_14 (sequence is synthesized)
aggtcagaggcaacctcctcccctgttctatcaatagaaacccaacgttgaggcaattcctaaacagacgcacctcgtagcttgctgtatgtgtttattctttattgctttcagctttgg

SEQ ID NO: 183163 - DNA, 120 bp, Artificial Sequence
  ENSG00000111412_15 (sequence is synthesized)
ggctgtaacaggtacaaatatttggtttccctatgatttatagagaagaagaagaaacccagctttctatcagagcactgcaagagaagagtcttacacctgccctcagtgggagatgag

SEQ ID NO: 183164 - DNA, 120 bp, Artificial Sequence
  ENSG00000111412_16 (sequence is synthesized)
aatggtcattatgacttagagaatgctacacgtgtaggttgctggtgtgtcctgaatccacaggcataaagcactccccatttttcctactgtaatgcagattctccggctcaaggtcta

SEQ ID NO: 183165 - DNA, 120 bp, Artificial Sequence
  ENSG00000111412_17 (sequence is synthesized)
gaatatttgatcctaagatcaagacatcatgcccttcgaatagtactgctctttgttttcaggagtcacgtgaacacacaactctcctatattcctcacgaacctcaggattgagcaagg

SEQ ID NO: 183166 - DNA, 120 bp, Artificial Sequence
  ENSG00000111412_18 (sequence is synthesized)
tctttgtaatttttttggttcactttattgacctgggagcaaggtgctaattctgtggtcagtattcaatgtttttttcagtggagctttttctttgggccatatttgccttctaataca

SEQ ID NO: 183167 - DNA, 120 bp, Artificial Sequence
  ENSG00000111412_19 (sequence is synthesized)
ttcctgcaatatgtagtggtgatttcccttagcttcctcctactacctcttatactcatctccccaaattatttgcctcccttaaataagttttcctagaaggtaagctggtcaggcaat

SEQ ID NO: 183168 - DNA, 120 bp, Artificial Sequence
  ENSG00000111412_20 (sequence is synthesized)
ttgaaaaatattagatcccaagaaatctattccgtttgcattggacttctcggattccatgtgtttgcagcaggactacatcgaactctgatgtgccggattgtggcatgtctgcatgtc

SEQ ID NO: 183169 - DNA, 120 bp, Artificial Sequence
  ENSG00000111412_21 (sequence is synthesized)
tcatccatctattgtttttggtaactcagtttggaatttcagtgtctgtcttccctgggttgacattggaatcagcctctcctttgagcttattttaactcttgagcaacataacataga

SEQ ID NO: 183170 - DNA, 120 bp, Artificial Sequence
  ENSG00000111412_22 (sequence is synthesized)
tttaatgtgaacagtttataccaaagggcagcctgtgcctgtttatggatcctctctgcctttgtacttgaagagcgcattttacatttccagtcctttcacagacaggagctccaacct

SEQ ID NO: 183171 - DNA, 120 bp, Artificial Sequence
  ENSG00000111412_23 (sequence is synthesized)
tacgatggagaattaaacttgcttgtatttccactttgtggatgaggaactatgagaggtggagtgacttcctgggtccccgctgagacttagtgacagatcccagacaagaacttcatc

SEQ ID NO: 183172 - DNA, 120 bp, Artificial Sequence
  ENSG00000111412_24 (sequence is synthesized)
tctgactccaggtctagtcctcttccccctgtctcttgccaactccagccctgacaccgtgggcgtctcccctgagagcagatatatttcaattgtccaggccaaaagaggggcgaggcg

SEQ ID NO: 183173 - DNA, 120 bp, Artificial Sequence
  ENSG00000111412_25 (sequence is synthesized)
gcataaacacccaaattaggtggaggatccaaaagtcattttcatttggctgtggaatatgttttttgtatttcaatcagctaggggtgtgttcactgtttttggaaattcacagcgctt

SEQ ID NO: 183174 - DNA, 120 bp, Artificial Sequence
  ENSG00000111412_26 (sequence is synthesized)
gagcctccataatgaagctgggctgcagagcacctggcacgtgctccaggctcccagctcccaacctaggacctctccctgccctccactctggttggtttgtggttccctcgaccgagg

SEQ ID NO: 183175 - DNA, 120 bp, Artificial Sequence
  ENSG00000111412_27 (sequence is synthesized)
gtttctagaatcagggaccttgtctaagttttgtttgcccagagcccagcgaagtgtgtgatacaccttgggagtttaggagatcacaaaagggatgaaaacacctttagaaaacatttc

SEQ ID NO: 183176 - DNA, 89 bp, Artificial Sequence
  ENSG00000111412_28 (sequence is synthesized)
tgttttttattgttaataagtgagtgttttcggctcaagggaattgagtcatacgttgcatctcccccagttctgcatcttatttgctg

SEQ ID NO: 183177 - DNA, 120 bp, Artificial Sequence
  ENSG00000111412_29 (sequence is synthesized)
catacgttgcatctcccccagttctgcatcttatttgctgcgcttgctggagttgtaaagattggtcctaacagggaaagaagcacacaagagactgtgaaaagggctctgagacaagca

SEQ ID NO: 183178 - DNA, 120 bp, Artificial Sequence
  ENSG00000111412_30 (sequence is synthesized)
aagagactgtgaaaagggctctgagacaagcaaggacaaaagagggagggaaataccttccacagggcctgggatctggcaatgctagagccttttttttttttttttttttttgcgatg

SEQ ID NO: 183179 - DNA, 69 bp, Artificial Sequence
  ENSG00000111412_31 (sequence is synthesized)
tcaccatgttggccaggctggtcacggactcctgacctcagatgatctgcccgcctgagctgctattga

SEQ ID NO: 183180 - DNA, 120 bp, Artificial Sequence
  ENSG00000111412_32 (sequence is synthesized)
cggcatggagctgctattgatgggtgagctccacagcttttgcagaagcagaggatatgacttgagagcagtgctgtcacctctcagcatgtccccaagcccaactggggcctcctggag

SEQ ID NO: 183181 - DNA, 120 bp, Artificial Sequence
  ENSG00000111412_33 (sequence is synthesized)
ggaatcgtggggaacagttgcacaatttgcaagtttctgagtgcagcttttcccatccttgggatcagcagataagttgtaaacacagggaggtactgcttattggatatacttttcata

SEQ ID NO: 183182 - DNA, 120 bp, Artificial Sequence
  ENSG00000111412_34 (sequence is synthesized)
agtaggacagaattcttttgggactctagagttgggaactaccacttactagcggcgtggctgaggcagtcttcctcctctgtggctcaggcccttcatctgtgaaatggggtcacagca

SEQ ID NO: 183183 - DNA, 120 bp, Artificial Sequence
  ENSG00000111412_35 (sequence is synthesized)
tctgcctctcagggtcactgtgaggtgtcgatgtgagcaaggcctgaggcttggcaagaagtcaatgtctgcaactcagcagggagcaatggcaggggcagtcaggggtcggctcggata

SEQ ID NO: 183184 - DNA, 120 bp, Artificial Sequence
  ENSG00000111412_36 (sequence is synthesized)
ggggtgggtgggctcctgaggttggaagggtaggaattacagagctcttgttactattgttgttactgtttttaaagatacgatatttcagataattcaggagcacgtaaggatgaaact

SEQ ID NO: 183185 - DNA, 120 bp, Artificial Sequence
  ENSG00000111412_37 (sequence is synthesized)
taggataacctaaaatcacacaacctagagagaagcgcatttttgtcttcccccattttctaggcaaaaatgaaagtactttgtcctcttgaaaaacaattctctaatgaatatcctatg

SEQ ID NO: 183186 - DNA, 120 bp, Artificial Sequence
  ENSG00000111412_38 (sequence is synthesized)
ttacatagaggcctgtgtaatgcatttgtgtggccacatggtgtcaatttcatgaatatacaataatattattaattccctgctgaggacattaactggtttccaaggctgcttgttgtt

SEQ ID NO: 183187 - DNA, 120 bp, Artificial Sequence
  ENSG00000111412_39 (sequence is synthesized)
tttgctactacaaataatgcattgatgataaatacttttacatacatggttgtatgtttatctgaactattttcaccaatatattcacctagtgtgtatggaagtgtccatttttgtcat

SEQ ID NO: 183188 - DNA, 120 bp, Artificial Sequence
  ENSG00000111412_40 (sequence is synthesized)
acccctggtaaccctgtgatattatttttaaacattttgctaatggatctctgttcttgtttgaatgtatttaatttccagcagaatgagccccattccttattttgattggccatttat

SEQ ID NO: 183189 - DNA, 120 bp, Artificial Sequence
  ENSG00000111412_41 (sequence is synthesized)
catgtacatatggtgaaatgcctattcgtgacttagccaatgttgtttctttttcttactgattactacagtacatttttatatgaaagcagcctttgtccccttctcttgtttttcagc

SEQ ID NO: 183190 - DNA, 120 bp, Artificial Sequence
  ENSG00000111412_42 (sequence is synthesized)
cctgtgttagaaacaactaagctcacatattcacaaaccaacttttccagttcatctagggcagtggtgctcaacaggggcaattttgccccccagggaacatttggcaatgtctggaga

SEQ ID NO: 183191 - DNA, 120 bp, Artificial Sequence
  ENSG00000111412_43 (sequence is synthesized)
catttttgtcacaggtggggaggagggcagtactgtgggcactcgtggagggaggccagggatggtgcccaacagcccccacgacacagaattacctggctggaagtgggagccgggtgg

SEQ ID NO: 183192 - DNA, 120 bp, Artificial Sequence
  ENSG00000111412_44 (sequence is synthesized)
agggagggaagccctgctctggggtcatatctccccgttagattgaacagaggagctcctggtagctgagtgctgacttcattatttttccccgcccttgctttctaccctgctgaagtg

SEQ ID NO: 183193 - DNA, 120 bp, Artificial Sequence
  ENSG00000111412_45 (sequence is synthesized)
ctgctgattaaattaccctgaaatccccacaggacacattacttcctcacaggtctctactagcccagcgctgcctcaaggaatggcattattcctttgccactgtgtcctcaccgcact

SEQ ID NO: 183194 - DNA, 120 bp, Artificial Sequence
  ENSG00000111412_46 (sequence is synthesized)
cttggactccgccgaatgcagacaccctcctgtctgcagaaggatctggaggggtagaacgcttcccctctacgacggattgactccccagcacctcaccagcagttctttgaatggagt

SEQ ID NO: 183195 - DNA, 120 bp, Artificial Sequence
  ENSG00000111412_47 (sequence is synthesized)
ggctttggaggtgggagttgaggaagaaatgtgagcctgtcattacaggttctgtttagaaaactagtcattctactaaaaaggtatcacataagtaagtaggagcaataaaaacaaaga

SEQ ID NO: 183196 - DNA, 120 bp, Artificial Sequence
  ENSG00000111412_48 (sequence is synthesized)
agatagtgggactccgagaagctttccccgcctctggcctgttagtctatcgttcgttgggcaaggctcttccagtgtgtgaccttttgcgtgttatcacagcatgagtgcagttttgtg

SEQ ID NO: 183197 - DNA, 120 bp, Artificial Sequence
  ENSG00000111412_49 (sequence is synthesized)
tacaggcatccctatattcagcatgtatctgcaacatgccttacctcgtctgctgtcacagagcaaagtggagcaagtggtcgccgttggtctgcacctgagctgggagccgagtggtga

SEQ ID NO: 183198 - DNA, 120 bp, Artificial Sequence
  ENSG00000111412_50 (sequence is synthesized)
cgtgcatatgggccgactgcgtctccacagaacctactcagtgatcttcctgtgtacgactcagtccctgatgttggagttgaactgtaggactgtctgtaaaatgaaagtgcagacttt

SEQ ID NO: 183199 - DNA, 120 bp, Artificial Sequence
  ENSG00000111412_51 (sequence is synthesized)
aatgtagtaaagagaatgacttgccagttacaaccaatgagcaaagcagttaattattcaaatattttaccaagagtccaggtttattttttctcaggactacacattctgtgagaccag

SEQ ID NO: 183200 - DNA, 120 bp, Artificial Sequence
  ENSG00000111412_52 (sequence is synthesized)
agggaccaagacatatcactaccagaaatgtgttttcatcagcactgccagaggttttcatagggtagtttactcttggaatttttaaattcatacttttttttatgcaacgtggggtag

SEQ ID NO: 183201 - DNA, 120 bp, Artificial Sequence
  ENSG00000111412_53 (sequence is synthesized)
atttttaaattcatacttttttttatgcaacgtggggtaggtaagcttctgatcactgtgcacccagattatcccaaaatcgaaagtggtgttggcagccgggtgtggtggctcacacct

SEQ ID NO: 183202 - DNA, 120 bp, Artificial Sequence
  ENSG00000111412_54 (sequence is synthesized)
tgagtccaggaggtcaaggctgcagtgagccgtcattgcgccagtgtgctccaacctgggccacagagtgagaccctgtctgaggaggggaaaaaagtgttgtctaaatgagaaatcacc

SEQ ID NO: 183203 - DNA, 120 bp, Artificial Sequence
  ENSG00000111412_55 (sequence is synthesized)
taaatgagaaatcaccattatcagtaatttaagattccaggctatgttggtcacatctcactattcttttttttttgaaacggattctcgttccatcgcccaggctggagtgcagtggca

SEQ ID NO: 183204 - DNA, 120 bp, Artificial Sequence
  ENSG00000111412_56 (sequence is synthesized)
catctcactattcttaaggaagagagagagcgagagagagtgttgtcctgtcctgtggggattggggcattgtattaagttgtactgggggatgtcaagatagaaatgttgagtaagtta

SEQ ID NO: 183205 - DNA, 120 bp, Artificial Sequence
  ENSG00000111412_57 (sequence is synthesized)
ctacctgaataaatatttgaccagttgatgctaatttgaatagtaaatgtgatgacattatatattctcagggatgtttccatacattggctctgtgtgtgcgtgtgtgtgtgtgtgtgt

SEQ ID NO: 183206 - DNA, 120 bp, Artificial Sequence
  ENSG00000111412_58 (sequence is synthesized)
gtgtaacaaaagcagtatgaagtatgtgagcaatatcctaattttattgacaagagcactgaccttaatgaccttgagtaaattaccctctccggctttggtttcctcatttgtcaatta

SEQ ID NO: 183207 - DNA, 120 bp, Artificial Sequence
  ENSG00000111412_59 (sequence is synthesized)
agggtgatggctagcgtatcttgcagatccaaattccaatttttgtaacaagccaaaagtccccctggctgttaaagcaagaccagagccctcgtatcccagcggctgggtcccaggctt

SEQ ID NO: 183208 - DNA, 120 bp, Artificial Sequence
  ENSG00000111412_60 (sequence is synthesized)
ttgattttcacaggacaaatgtagcccagccatctggagcccgtttttctccaaaccagggcttcctccttctctcttgcagatttcaactggggctcaccattttctgcctcttcctcc

SEQ ID NO: 183209 - DNA, 120 bp, Artificial Sequence
  ENSG00000111412_61 (sequence is synthesized)
tccagttttaaagagacaccatatccttctctgctgggaccaacttcccatgtactgctgccctgcacctgtgaaaacagctgctgtgttttctgtcataaaaatagctgccttttggca

SEQ ID NO: 183210 - DNA, 120 bp, Artificial Sequence
  ENSG00000111412_62 (sequence is synthesized)
gagaagcacacaacggtactacgtttctgagccttaatgcagtgctcaattatttaggtgtgcttcacctgagatacacagagcatcttggaactcctactaagcagggcttctacaggc

SEQ ID NO: 183211 - DNA, 120 bp, Artificial Sequence
  ENSG00000111412_63 (sequence is synthesized)
attgctcagctcagtaaaaggttttcctttctctgcttttgtgattaccaggcagaaaccttaaaatgtatgaacttacaaagaaattaaattgtgccaaattagattcccagcccctag

SEQ ID NO: 183212 - DNA, 120 bp, Artificial Sequence
  ENSG00000111412_64 (sequence is synthesized)
agataaccactaattaaagttccgctggagcgttttgcctgtattttgtatataaacgtggattttgtatttgtatgtaaataaaggtaggaccctgctgtccatattattttaaaataa

SEQ ID NO: 183213 - DNA, 120 bp, Artificial Sequence
  ENSG00000111412_65 (sequence is synthesized)
gttcccagttgcttgaatggttcttttgcagaatggatcattgtattgctaatcacatatctaatgaataagatacccagggtgttttggcatgcacgtgtgtgcacgcgtgtgtccttt

SEQ ID NO: 183214 - DNA, 120 bp, Artificial Sequence
  ENSG00000111412_66 (sequence is synthesized)
cccctccctccttttctcctcctcttccccccttccctgtatcagcattctcttagtttaggagagatagccaaggtcaccttgtgctggcttaggtaatttattacaggcactaacttt

SEQ ID NO: 183215 - DNA, 120 bp, Artificial Sequence
  ENSG00000111424_0 (sequence is synthesized)
ggatggaggcaatggcggccagcacttccctgcctgaccctggagactttgaccggaacgtgccccggatctgtggggtgtgtggagaccgagccactggctttcacttcaatgctatga

SEQ ID NO: 183216 - DNA, 120 bp, Artificial Sequence
  ENSG00000111424_1 (sequence is synthesized)
cctgtgaaggctgcaaaggcttcttcaggcgaagcatgaagcggaaggcactattcacctgccccttcaacggggactgccgcatcaccaaggacaaccgacgccactgccaggcctgcc

SEQ ID NO: 183217 - DNA, 120 bp, Artificial Sequence
  ENSG00000111424_2 (sequence is synthesized)
ggctcaaacgctgtgtggacatcggcatgatgaaggagttcattctgacagatgaggaagtgcagaggaagcgggagatgatcctgaagcggaaggaggaggaggccttgaaggacagtc

SEQ ID NO: 183218 - DNA, 120 bp, Artificial Sequence
  ENSG00000111424_3 (sequence is synthesized)
tgcggcccaagctgtctgaggagcagcagcgcatcattgccatactgctggacgcccaccataagacctacgaccccacctactccgacttctgccagttccggcctccagttcgtgtga

SEQ ID NO: 183219 - DNA, 120 bp, Artificial Sequence
  ENSG00000111424_4 (sequence is synthesized)
atgatggtggagggagccatccttccaggcccaactccagacacactcccagcttctctggggactcctcctcctcctgctcagatcactgtatcacctcttcagacatgatggactcgt

SEQ ID NO: 183220 - DNA, 120 bp, Artificial Sequence
  ENSG00000111424_5 (sequence is synthesized)
ccagcttctccaatctggatctgagtgaagaagattcagatgacccttctgtgaccctagagctgtcccagctctccatgctgccccacctggctgacctggtcagttacagcatccaaa

SEQ ID NO: 183221 - DNA, 120 bp, Artificial Sequence
  ENSG00000111424_6 (sequence is synthesized)
aggtcattggctttgctaagatgataccaggattcagagacctcacctctgaggaccagatcgtactgctgaagtcaagtgccattgaggtcatcatgttgcgctccaatgagtccttca

SEQ ID NO: 183222 - DNA, 120 bp, Artificial Sequence
  ENSG00000111424_7 (sequence is synthesized)
ccatggacgacatgtcctggacctgtggcaaccaagactacaagtaccgcgtcagtgacgtgaccaaagccggacacagcctggagctgattgagcccctcatcaagttccaggtgggac

SEQ ID NO: 183223 - DNA, 120 bp, Artificial Sequence
  ENSG00000111424_8 (sequence is synthesized)
tgaagaagctgaacttgcatgaggaggagcatgtcctgctcatggccatctgcatcgtctccccagatcgtcctggggtgcaggacgccgcgctgattgaggccatccaggaccgcctgt

SEQ ID NO: 183224 - DNA, 120 bp, Artificial Sequence
  ENSG00000111424_9 (sequence is synthesized)
ccaacacactgcagacgtacatccgctgccgccacccgcccccgggcagccacctgctctatgccaagatgatccagaagctagccgacctgcgcagcctcaatgaggagcactccaagc

SEQ ID NO: 183225 - DNA, 120 bp, Artificial Sequence
  ENSG00000111424_10 (sequence is synthesized)
agtaccgctgcctctccttccagcctgagtgcagcatgaagctaacgccccttgtgctcgaagtgtttggcaatgagatctcctgactaggacagcctgtggcggtgcctgggtggggct

SEQ ID NO: 183226 - DNA, 120 bp, Artificial Sequence
  ENSG00000111424_11 (sequence is synthesized)
gctcctccagggccacgtgccaggcccggggctggcggctactcagcagccctcctcaccccgtctggggttcagcccctcctctgccacctcccctatccacccagcccattctctctc

SEQ ID NO: 183227 - DNA, 120 bp, Artificial Sequence
  ENSG00000111424_12 (sequence is synthesized)
ctgtccaacctaacccctttcctgcgggcttttccccggtcccttgagacctcagccatgaggagttgctgtttgtttgacaaagaaacccaagtgggggcagagggcagaggctggagg

SEQ ID NO: 183228 - DNA, 120 bp, Artificial Sequence
  ENSG00000111424_13 (sequence is synthesized)
cagggccttgcccagagatgcctccaccgctgcctaagtggctgctgactgatgttgagggaacagacaggagaaatgcatccattcctcagggacagagacacctgcacctccccccac

SEQ ID NO: 183229 - DNA, 120 bp, Artificial Sequence
  ENSG00000111424_14 (sequence is synthesized)
gcctactcacgataaataatcggcccacagctcccaccccacccccttcagtgcccaccaacatcccattgccctggttatattctcacgggcagtagctgtggtgaggtgggttttctt

SEQ ID NO: 183230 - DNA, 120 bp, Artificial Sequence
  ENSG00000111424_15 (sequence is synthesized)
cccatcactggagcaccaggcacgaacccacctgctgagagacccaaggaggaaaaacagacaaaaacagcctcacagaagaatatgacagctgtccctgtcaccaagctcacagttcct

SEQ ID NO: 183231 - DNA, 120 bp, Artificial Sequence
  ENSG00000111424_16 (sequence is synthesized)
cgccctgggtctaaggggttggttgaggtggaagccctccttccacggatccatgtagcaggactgaattgtccccagtttgcagaaaagcacctgccgacctcgtcctccccctgccag

SEQ ID NO: 183232 - DNA, 120 bp, Artificial Sequence
  ENSG00000111424_17 (sequence is synthesized)
tgccttacctcctgcccaggagagccagccctccctgtcctcctcggatcaccgagagtagccgagagcctgctcccccaccccctccccaggggagagggtctggagaagcagtgagcc

SEQ ID NO: 183233 - DNA, 120 bp, Artificial Sequence
  ENSG00000111424_18 (sequence is synthesized)
gcatcttctccatctggcagggtgggatggaggagaagaattttcagaccccagcggctgagtcatgatctccctgccgcctcaatgtggttgcaaggccgctgttcacccacagggcta

SEQ ID NO: 183234 - DNA, 120 bp, Artificial Sequence
  ENSG00000111424_19 (sequence is synthesized)
agagctagcgctgccgcaccccagagtgtgggaagggagagcggggcagtctcgggtggctagtcagagagagtgtttgggggttccgtgatgtagggtaaggtgccttcttattctcac

SEQ ID NO: 183235 - DNA, 120 bp, Artificial Sequence
  ENSG00000111424_20 (sequence is synthesized)
tccaccacccaaaagtcaaaaggtgcctgtgaggcaggggcggagtgatacaacttcaagtgcatgctctctgcagccagcccagcccagctggtgggaagcgtctgtccgtttactcca

SEQ ID NO: 183236 - DNA, 120 bp, Artificial Sequence
  ENSG00000111424_21 (sequence is synthesized)
aggtggggtctttgtgagagtgagctgtaggtgtgcgggaccggtacagaaaggcgttcttcgaggtggatcacagaggcttcttcagatcagtgcttgagtttggggaatgcggccgca

SEQ ID NO: 183237 - DNA, 120 bp, Artificial Sequence
  ENSG00000111424_22 (sequence is synthesized)
ttccctgagtcaccaggaatgttaaagtcagtgggaacgtgactgccccaactcctggaagctgtgtccttgcacctgcatccgtagttccctgaaaacccagagaggaatcagacttca

SEQ ID NO: 183238 - DNA, 120 bp, Artificial Sequence
  ENSG00000111424_23 (sequence is synthesized)
cactgcaagagccttggtgtccacctggccccatgtctctcagaattcttcaggtggaaaaacatctgaaagccacgttccttactgcagaatagcatatatatcgcttaatcttaaatt

SEQ ID NO: 183239 - DNA, 120 bp, Artificial Sequence
  ENSG00000111424_24 (sequence is synthesized)
tattagatatgagttgttttcagactcagactccatttgtattatagtctaatatacagggtagcaggtaccactgatttggagatatttatggggggagaacttacattgtgaaacttc

SEQ ID NO: 183240 - DNA, 120 bp, Artificial Sequence
  ENSG00000111424_25 (sequence is synthesized)
tgtacattaattattattgctgttgttattttacaagggtctagggagagacccttgtttgattttagctgcagaacgtattggtccagcttgctcttcagtgggagaaaacacttgtaa

SEQ ID NO: 183241 - DNA, 120 bp, Artificial Sequence
  ENSG00000111424_26 (sequence is synthesized)
gttgctaaacgagtcaatcccctcattcaggaaaactgacagaggagggcgtgactcacccaagcatatataactagctagaagtgggccaggacaggcccggcgcggtggctcacgcct

SEQ ID NO: 183242 - DNA, 120 bp, Artificial Sequence
  ENSG00000111424_27 (sequence is synthesized)
ggggacaggggtgaggccagagacggacggacgcaggggcccggcccaaggcgagggagaacagcggcactgaggcagaaaggaagagggcggtgtgttcacccgcagcccaatccatca

SEQ ID NO: 183243 - DNA, 120 bp, Artificial Sequence
  ENSG00000111424_28 (sequence is synthesized)
ctcagcaactcctagacgctggtagaaagttcctccgaggagcctgccatccagtcgtgcgtgcagaagcctttgggtctgaagtgtctgtgagacctcacagaagagcacccctgggct

SEQ ID NO: 183244 - DNA, 75 bp, Artificial Sequence
  ENSG00000111424_29 (sequence is synthesized)
ctgaggcagaaggttactctccaacctggacaacaagagcgaaactccgtcttagaagtggaccaggacaggacc

SEQ ID NO: 183245 - DNA, 120 bp, Artificial Sequence
  ENSG00000111424_30 (sequence is synthesized)
agagcgaaactccgtcttagaagtggaccaggacaggaccagattttggagtcatggtccggtgtccttttcactacaccatgtttgagctcagacccccactctcattccccaggtggc

SEQ ID NO: 183246 - DNA, 120 bp, Artificial Sequence
  ENSG00000111424_31 (sequence is synthesized)
tgacccagtccctgggggaagccctggatttcagaaagagcaagtctggatctgggaccctttccttccttccctggcttgtaactccaccaacccatcagaaggagaaggaaggagact

SEQ ID NO: 183247 - DNA, 120 bp, Artificial Sequence
  ENSG00000111424_32 (sequence is synthesized)
cacctctgcctcaatgtgaatcagaccctaccccaccacgatgtggccctggcctgctgggctctccacctcagccttggataatgctgttgcctcatctataacatgcatttgtctttg

SEQ ID NO: 183248 - DNA, 120 bp, Artificial Sequence
  ENSG00000111424_33 (sequence is synthesized)
taatgtcaccaccttcccagctctccctctggccctgccttcttcggggaactcctggaaatatcagttactcagccctgggccccaccacctaggccactcctccaaaggaagtctagg

SEQ ID NO: 183249 - DNA, 120 bp, Artificial Sequence
  ENSG00000111424_34 (sequence is synthesized)
agctgggaggaaaagaaaagaggggaaaatgagtttttatggggctgaacggggagaaaaggtcatcatcgattctactttagaatgagagtgtgaaatagacatttgtaaatgtaaaac

SEQ ID NO: 183250 - DNA, 120 bp, Artificial Sequence
  ENSG00000111424_35 (sequence is synthesized)
ttttaaggtatatcattataactgaaggagaaggtgccccaaaatgcaagattttccacaagattcccagagacaggaaaatcctctggctggctaactggaagcatgtaggagaatcca

SEQ ID NO: 183251 - DNA, 120 bp, Artificial Sequence
  ENSG00000111424_36 (sequence is synthesized)
agcgaggtcaacagagaaggcaggaatgtgtggcagatttagtgaaagctagagatatggcagcgaaaggatgtaaacagtgcctgctgaatgatttccaaagagaaaaaaagtttgcca

SEQ ID NO: 183252 - DNA, 120 bp, Artificial Sequence
  ENSG00000111424_37 (sequence is synthesized)
gaagtttgtcaagtcaaccaatgtagaaagctttgcttatggtaataaaaatggctcatacttatatagcacttactttgttgcaagtactgctgtaaataaatgctttatgcaaaccaa

SEQ ID NO: 183253 - DNA, 120 bp, Artificial Sequence
  ENSG00000111424_38 (sequence is synthesized)
aaaaggcggcagcggagccgtgtgcgccgggagcgcggaacagcttgtccacccgccggccggaccagaagcctttgggtctgaagtgtctgtgagacctcacagaagagcacccctggg

SEQ ID NO: 183254 - DNA, 120 bp, Artificial Sequence
  ENSG00000111424_39 (sequence is synthesized)
gtgtgcgccgggagcgcggaacagcttgtccacccgccggccggaccaggtgcgaacccgggagcagcgggaaagggggtctcaggatagggactcggggtcggggcgtctgggataccg

SEQ ID NO: 183255 - DNA, 120 bp, Artificial Sequence
  ENSG00000111424_40 (sequence is synthesized)
gggcctgagcgcccggctgcgagcattagagtctaagtctcagcggtaaacttggctactgaggtccgggctgtcgtgccatgaggctgggacactaaggggcactgaggtttgagaaag

SEQ ID NO: 183256 - DNA, 120 bp, Artificial Sequence
  ENSG00000111424_41 (sequence is synthesized)
ctgaagttcgtgccaggctggcgaggggagcagcgacatcctcggcgcttaggagaaatgctccgctaacacagtgcttagcacttgggcaacaagaagtatttgtttccttcttctgtc

SEQ ID NO: 183257 - DNA, 120 bp, Artificial Sequence
  ENSG00000111424_42 (sequence is synthesized)
ggggcgccttggcatggagtggaggaataagaaaaggagcgattggctgtcgatggtgctcagaactgctggagtggaggaagcctttgggtctgaagtgtctgtgagacctcacagaag

SEQ ID NO: 183258 - DNA, 120 bp, Artificial Sequence
  ENSG00000111424_43 (sequence is synthesized)
gatgacatggcatgcctgctcccaacaagccacttctgtttgcagtcactgatctggggactaaagtccctggaaagagcctctcgtgcccacttccttagagactggggaggcggtcag

SEQ ID NO: 183259 - DNA, 120 bp, Artificial Sequence
  ENSG00000111424_44 (sequence is synthesized)
gggctgtctctgcttgtcaaaaggcggcagcggagccgtgtgcgccgggagcgcggaacagcttgtccacccgccggccggaccagggctcctgaacctagcccagctggacggagaaat

SEQ ID NO: 183260 - DNA, 120 bp, Artificial Sequence
  ENSG00000111424_45 (sequence is synthesized)
ggactctagcctcctctgatagcctcatgccaggccccgtgcacattgctttgcttgcctccctcaatcctcatagcttctctttgggaagcctttgggtctgaagtgtctgtgagacct

SEQ ID NO: 183261 - DNA, 120 bp, Artificial Sequence
  ENSG00000111424_46 (sequence is synthesized)
ccagtggaaagggagggagaagaagcaaggtgtttccatgaagggagcccttgcatttttcacatctccttccttacaatgtccatggaacatgcggcgctcacagccacaggagcagga

SEQ ID NO: 183262 - DNA, 120 bp, Artificial Sequence
  ENSG00000111432_0 (sequence is synthesized)
cgagtcttctcatcccgggacgcaaacctcgaaacagctgccggctggtcccggccgaggccggcgcagggagggaggagccgcccgggctgtgggggcgccgcgagctgggccggcctc

SEQ ID NO: 183263 - DNA, 120 bp, Artificial Sequence
  ENSG00000111432_1 (sequence is synthesized)
ggtgtgcccgcgccgccagcccgctccagacgcgccacctgggcgctccaagaagaggccgaagtttgccgcggccgtgagttggagctcgcgccgggccgctgcgccgggagctccggg

SEQ ID NO: 183264 - DNA, 120 bp, Artificial Sequence
  ENSG00000111432_2 (sequence is synthesized)
ggcttccctcgcttcccggtattgtttgcaaactttgctgctctccgccgcggcccccaactcggcggacgccgggcgcggagagccgagccgggggcgctgtgcgcagcgctcgggcca

SEQ ID NO: 183265 - DNA, 80 bp, Artificial Sequence
  ENSG00000111432_3 (sequence is synthesized)
agccggggccagcagcagcccgtgcccgggagcggcggcgctgaggggcgcggagctccccgcgaggacacgtccaacgc

SEQ ID NO: 183266 - DNA, 120 bp, Artificial Sequence
  ENSG00000111432_4 (sequence is synthesized)
cagcatgcagcgcccgggcccccgcctgtggctggtcctgcaggtgatgggctcgtgcgccgccatcagctccatggacatggagcgcccgggcgacggcaaatgccagcccatcgagat

SEQ ID NO: 183267 - DNA, 120 bp, Artificial Sequence
  ENSG00000111432_5 (sequence is synthesized)
cccgatgtgcaaggacatcggctacaacatgactcgtatgcccaacctgatgggccacgagaaccagcgcgaggcagccatccagttgcacgagttcgcgccgctggtggagtacggctg

SEQ ID NO: 183268 - DNA, 120 bp, Artificial Sequence
  ENSG00000111432_6 (sequence is synthesized)
ccacggccacctccgcttcttcctgtgctcgctgtacgcgccgatgtgcaccgagcaggtctctacccccatccccgcctgccgggtcatgtgcgagcaggcccggctcaagtgctcccc

SEQ ID NO: 183269 - DNA, 120 bp, Artificial Sequence
  ENSG00000111432_7 (sequence is synthesized)
gattatggagcagttcaacttcaagtggcccgactccctggactgccggaaactccccaacaagaacgaccccaactacctgtgcatggaggcgcccaacaacggctcggacgagcccac

SEQ ID NO: 183270 - DNA, 120 bp, Artificial Sequence
  ENSG00000111432_8 (sequence is synthesized)
cctgttcccgccgctgttccggccgcagcggccccacagcgcgcaggagcacccgctgaaggacgggggccccgggcgcggcggctgcgacaacccgggcaagttccaccacgtggagaa

SEQ ID NO: 183271 - DNA, 120 bp, Artificial Sequence
  ENSG00000111432_9 (sequence is synthesized)
ccacgtggagaagagcgcgtcgtgcgcgccgctctgcacgcccggcgtggacgtgtactggagccgcgaggacaagcgcttcgcagtggtctggctggccatctgggcggtgctgtgctt

SEQ ID NO: 183272 - DNA, 120 bp, Artificial Sequence
  ENSG00000111432_10 (sequence is synthesized)
cttctccagcgccttcaccgtgctcaccttcctcatcgacccggcccgcttccgctaccccgagcgccccatcatcttcctctccatgtgctactgcgtctactccgtgggctacctcat

SEQ ID NO: 183273 - DNA, 120 bp, Artificial Sequence
  ENSG00000111432_11 (sequence is synthesized)
ccgcctcttcgccggcgccgagagcatcgcctgcgaccgggacagcggccagctctatgtcatccaggagggactggagagcaccggctgcacgctggtcttcctggtcctctactactt

SEQ ID NO: 183274 - DNA, 120 bp, Artificial Sequence
  ENSG00000111432_12 (sequence is synthesized)
cggcatggccagctcgctgtggtgggtggtcctcacgctcacctggttcctggccgccggcaagaagtggggccacgaggccatcgaagccaacagcagctacttccacctggcagcctg

SEQ ID NO: 183275 - DNA, 120 bp, Artificial Sequence
  ENSG00000111432_13 (sequence is synthesized)
gcagggtggcgggggacgagctcaccggggtctgctacgtgggcagcatggacgtcaacgcgctcaccggcttcgtgctcattcccctggcctgctacctggtcatcggcacgtccttca

SEQ ID NO: 183276 - DNA, 120 bp, Artificial Sequence
  ENSG00000111432_14 (sequence is synthesized)
tcctctcgggcttcgtggccctgttccacatccggagggtgatgaagacgggcggcgagaacacggacaagctggagaagctcatggtgcgtatcgggctcttctctgtgctgtacaccg

SEQ ID NO: 183277 - DNA, 120 bp, Artificial Sequence
  ENSG00000111432_15 (sequence is synthesized)
tgccggccacctgtgtgatcgcctgctacttttacgaacgcctcaacatggattactggaagatcctggcggcgcagcacaagtgcaaaatgaacaaccagactaaaacgctggactgcc

SEQ ID NO: 183278 - DNA, 120 bp, Artificial Sequence
  ENSG00000111432_16 (sequence is synthesized)
tgatggccgcctccatccccgccgtggagatcttcatggtgaagatctttatgctgctggtggtggggatcaccagcgggatgtggatttggacctccaagactctgcagtcctggcagc

SEQ ID NO: 183279 - DNA, 120 bp, Artificial Sequence
  ENSG00000111432_17 (sequence is synthesized)
aggtgtgcagccgtaggttaaagaagaagagccggagaaaaccggccagcgtgatcaccagcggtgggatttacaaaaaagcccagcatccccagaaaactcaccacgggaaatatgaga

SEQ ID NO: 183280 - DNA, 120 bp, Artificial Sequence
  ENSG00000111432_18 (sequence is synthesized)
tccctgcccagtcgcccacctgcgtgtgaacagggctggagggaagggcacaggggcgcccggagctaagatgtggtgcttttcttggttgtgtttttctttcttcttcttctttttttt

SEQ ID NO: 183281 - DNA, 120 bp, Artificial Sequence
  ENSG00000111432_19 (sequence is synthesized)
tttttataaaagcaaaagagaaatacataaaaaagtgtttaccctgaaattcaggatgctgtgatacactgaaaggaaaaatgtacttaaagggttttgttttgttttggttttccagcg

SEQ ID NO: 183282 - DNA, 120 bp, Artificial Sequence
  ENSG00000111432_20 (sequence is synthesized)
aagggaagctcctccagtgaagtagcctcttgtgtaactaatttgtggtaaagtagttgattcagccctcagaagaaaacttttgtttagagccctccctaaatatacatctgtgtattt

SEQ ID NO: 183283 - DNA, 120 bp, Artificial Sequence
  ENSG00000111432_21 (sequence is synthesized)
gagttggctttgctacccatttacaaataagaggacagataactgctttgcaaattcaagagcctcccctgggttaacaaatgagccatccccagggcccacccccaggaaggccacagt

SEQ ID NO: 183284 - DNA, 120 bp, Artificial Sequence
  ENSG00000111432_22 (sequence is synthesized)
gctgggcggcatccctgcagaggaaagacaggacccggggcccgcctcacaccccagtggatttggagttgcttaaaatagactccggccttcaccaatagtctctctgcaagacagaaa

SEQ ID NO: 183285 - DNA, 120 bp, Artificial Sequence
  ENSG00000111432_23 (sequence is synthesized)
cctccatcaaacctcacatttgtgaactcaaacgatgtgcaatacatttttttctctttccttgaaaataaaaagagaaacaagtattttgctatatataaagacaacaaaagaaatctc

SEQ ID NO: 183286 - DNA, 120 bp, Artificial Sequence
  ENSG00000111432_24 (sequence is synthesized)
ctaacaaaagaactaagaggcccagccctcagaaacccttcagtgctacattttgtggctttttaatggaaaccaagccaatgttatagacgtttggactgatttgtggaaaggaggggg

SEQ ID NO: 183287 - DNA, 120 bp, Artificial Sequence
  ENSG00000111432_25 (sequence is synthesized)
gaagagggagaaggatcattcaaaagttacccaaagggcttattgactctttctattgttaaacaaatgatttccacaaacagatcaggaagcactaggttggcagagacactttgtcta

SEQ ID NO: 183288 - DNA, 120 bp, Artificial Sequence
  ENSG00000111432_26 (sequence is synthesized)
gtgtattctcttcacagtgccaggaaagagtggtttctgcgtgtgtatatttgtaatatatgatatttttcatgctccactattttattaaaaataaaatatgttctttagtttgctgct

SEQ ID NO: 183289 - DNA, 120 bp, Artificial Sequence
  ENSG00000111445_0 (sequence is synthesized)
gagagttgcttttgcgcgcgaactgtaagtgccagggtctcagggtcaggtcgcggctggtcactgtgcaggcgcttgggtgacgcgacgatctcagcggatctggtcaccttcgtctcc

SEQ ID NO: 183290 - DNA, 120 bp, Artificial Sequence
  ENSG00000111445_1 (sequence is synthesized)
ccgccatggagacctcagcactcaagcagcaggagcagcccgcggcgaccaagatcaggaacctgccctgggttgaaaaataccggccacagaccctgaatgatctcatttctcatcagg

SEQ ID NO: 183291 - DNA, 120 bp, Artificial Sequence
  ENSG00000111445_2 (sequence is synthesized)
acattctgagtaccattcagaagtttatcaatgaagaccgactgccacacttgcttctctacggtcccccagggacaggcaagacatctaccatcctagcctgtgcgaaacagctatata

SEQ ID NO: 183292 - DNA, 120 bp, Artificial Sequence
  ENSG00000111445_3 (sequence is synthesized)
aagacaaagaatttggctccatggtcttggagctgaatgcttcagatgaccgaggaatagacatcattcgaggaccgatcctgagctttgctagcacaaggacaatatttaagaaaggct

SEQ ID NO: 183293 - DNA, 120 bp, Artificial Sequence
  ENSG00000111445_4 (sequence is synthesized)
ttaagctagtgatcttggatgaagcagacgccatgactcaggacgcccagaatgccttgagaagagtaattgagaaattcacagaaaataccagattctgcctcatctgtaactatctgt

SEQ ID NO: 183294 - DNA, 120 bp, Artificial Sequence
  ENSG00000111445_5 (sequence is synthesized)
caaagatcatccctgccttgcagtcccgctgcacgaggtttcggttcggtcccctgactcctgaactcatggttccccgcctggaacatgtcgtggaagaagagaaagttgatataagtg

SEQ ID NO: 183295 - DNA, 120 bp, Artificial Sequence
  ENSG00000111445_6 (sequence is synthesized)
aagatggaatgaaagcactagtcactctttccagtggagacatgcgtagggctctgaacattttgcagagcaccaatatggcctttgggaaggtgacagaggagactgtctacacctgca

SEQ ID NO: 183296 - DNA, 120 bp, Artificial Sequence
  ENSG00000111445_7 (sequence is synthesized)
ccgggcacccgctcaagtcagacattgccaacatcctggactggatgttgaatcaagatttcaccacagcctacagaaatattacagagttgaaaactctgaaggggttggcactgcatg

SEQ ID NO: 183297 - DNA, 120 bp, Artificial Sequence
  ENSG00000111445_8 (sequence is synthesized)
tttattgaccaaaatggcagacattgagtacaggctttctgttggcaccaacgagaagatccagctgagctccctcattgctgcatttcaagtcaccagagacctgattgttgcagaggc

SEQ ID NO: 183298 - DNA, 120 bp, Artificial Sequence
  ENSG00000111445_9 (sequence is synthesized)
ctagatgctctgagggccattcacaattctcagggctcagcagtgatgggagaacagaggacagttccaggataaactgctgcctggggctgtgggatgaatcagtcaccccgaatcttg

SEQ ID NO: 183299 - DNA, 120 bp, Artificial Sequence
  ENSG00000111445_10 (sequence is synthesized)
gaaaaacccccttccaggagaggatgggcaggcatttaaaaagtaccatttttgtggttgtttggagcagggatgtacaaaataattttaatgtattaactcatactgcctgtcttttat

SEQ ID NO: 183300 - DNA, 120 bp, Artificial Sequence
  ENSG00000111445_11 (sequence is synthesized)
aggggaaaaaaataaccttttttattttaaagttataaggtttttaccttttagttgcttggatgacagggaattagcctaccccattttggtctggaacagaagactttcaaatttaat

SEQ ID NO: 183301 - DNA, 120 bp, Artificial Sequence
  ENSG00000111445_12 (sequence is synthesized)
atggtccaagtgtcttcctactcaaggtaaacattatctccaaaattacatttatgattctaatatttggcattgtgtctgtatctaatttaaacagatgttaatggacgtctggccgaa

SEQ ID NO: 183302 - DNA, 120 bp, Artificial Sequence
  ENSG00000111445_13 (sequence is synthesized)
actattatacttttataagatgagctgaatcctcttactttaaaaactggtctttttatttaccctctgtggtagaagagtcaccagcaggttccaaattgatgtgtatgataggaaaaa

SEQ ID NO: 183303 - DNA, 120 bp, Artificial Sequence
  ENSG00000111445_14 (sequence is synthesized)
aaccttaattttaaatataatatagagccttaaactatgccactgggtggcagaggctgtataaaacgcacttgttttcatgcaggagcggggcaagtaaggttgagcctgactgtaaac

SEQ ID NO: 183304 - DNA, 120 bp, Artificial Sequence
  ENSG00000111445_15 (sequence is synthesized)
ctagaactgcggaaggactgggacttttgtacaaatttcacatttattttacagcaatcatgctgcatttgtgttagtgttctttataataaaaaacaaagcagcctcctggctggctgt

SEQ ID NO: 183305 - DNA, 120 bp, Artificial Sequence
  ENSG00000111445_16 (sequence is synthesized)
gttacaagtgactcttccttagacagctagaaagatgctgactttgtcaaacttgcatttatatgaaaaccttctgtctctaatatcacagaataaactttctttagatgctgttcttta

SEQ ID NO: 183306 - DNA, 120 bp, Artificial Sequence
  ENSG00000111445_17 (sequence is synthesized)
agctcaaggaggtggcagcatcatgcttctaatgcaaaggtccttagaaggatggttcttaccatgaatggctcgtaccatgatgggttgaaaaataccggccacagaccctgaatgatc

SEQ ID NO: 183307 - DNA, 120 bp, Artificial Sequence
  ENSG00000111445_18 (sequence is synthesized)
gccattctcctgcctcagcctccgaagaactgggacttttagagcccctggcaaccactaatctgctttctatctatggatttgcctattctggacatttcatggttgaaaaataccggc

SEQ ID NO: 183308 - DNA, 120 bp, Artificial Sequence
  ENSG00000111445_19 (sequence is synthesized)
gacctcctggccaccgagacctgaaggtggccccaggagttcaggttgcagccagcacccacaccttgctggcaaaggatgactggctgcaggcgactctggtcagcttgttgtgggagt

SEQ ID NO: 183309 - DNA, 120 bp, Artificial Sequence
  ENSG00000111445_20 (sequence is synthesized)
gagatgtctgtaggtggagtgggtacttgtctttagcactccagagttcttcttggagggctctgaccttcaagtcagggtaaggcttgaagcagcttcactcacagatgggagaaaagc

SEQ ID NO: 183310 - DNA, 120 bp, Artificial Sequence
  ENSG00000111445_21 (sequence is synthesized)
ttaggccttggcattgaagatgcaggaattttcaagtggtcatgatagtgatagctcttgtgctgtgaaatgaaaggctaggaatggtgacacaaagcctttttggaaatgcatttgggg

SEQ ID NO: 183311 - DNA, 120 bp, Artificial Sequence
  ENSG00000111445_22 (sequence is synthesized)
ttcaagccattctcctgcctcagcctccgaagaactgggacttttagaggcgagctaccaagcccatcctgtaaccattttaaaatgtacaattcagtggcattaagtacattcagaatg

SEQ ID NO: 183312 - DNA, 120 bp, Artificial Sequence
  ENSG00000111445_23 (sequence is synthesized)
tcagaatgcagtgtactgttgtggagtcttcccgctatctagttccaaaatttcatcaccccaaatggaaatcctttacccattgacagttactccccattctccccttcctctagcccc

SEQ ID NO: 183313 - DNA, 120 bp, Artificial Sequence
  ENSG00000111445_24 (sequence is synthesized)
tcgagcagttctcccacctcagcctcctgagtagccggaaccacagaaccacagcctctcattttgaaaagacatgtttttcttcaagcaacaaaggtggtagaggaaattcctcaactt

SEQ ID NO: 183314 - DNA, 120 bp, Artificial Sequence
  ENSG00000111445_25 (sequence is synthesized)
tctcaacgagtcatgtaacgttacactggcctccataaagcaccgattaagaaagctaaagaataagatgttgtatttcttttaaaataatttaaaatatattaaattttcctaaggcag

SEQ ID NO: 183315 - DNA, 80 bp, Artificial Sequence
  ENSG00000111450_0 (sequence is synthesized)
gcgccgggccgggaccgcggggcctgaggcggagaccggagagcccgaggcccggccggaggcagctcgggacaggcttg

SEQ ID NO: 183316 - DNA, 120 bp, Artificial Sequence
  ENSG00000111450_1 (sequence is synthesized)
agcggcggggcgcgctgcccggccggcggggatgcgggaccggctgccagacctgacggcgtgtaggaagaatgatgatggagacacagttgttgtggttgagaaagatcatttcatgga

SEQ ID NO: 183317 - DNA, 120 bp, Artificial Sequence
  ENSG00000111450_2 (sequence is synthesized)
tgatttcttccatcaggtggaggagattagaaacagtattgataaaataactcaatatgttgaagaagtaaagaaaaaccacagcatcattctttctgcaccaaacccggaaggaaaaat

SEQ ID NO: 183318 - DNA, 120 bp, Artificial Sequence
  ENSG00000111450_3 (sequence is synthesized)
aaaagaagagcttgaagatctgaacaaagaaatcaagaaaactgcgaataaaattcgagccaagttaaaggctattgaacaaagttttgatcaggatgagagtgggaaccggacttcagt

SEQ ID NO: 183319 - DNA, 120 bp, Artificial Sequence
  ENSG00000111450_4 (sequence is synthesized)
ggatcttcggatacgaagaacccagcattcggtgctgtctcggaagtttgtggaagccatggcggagtacaatgaggcacagactctgtttcgggagcggagcaaaggccgcatccagcg

SEQ ID NO: 183320 - DNA, 120 bp, Artificial Sequence
  ENSG00000111450_5 (sequence is synthesized)
ccagctggagataactgggagaaccaccacagacgacgagctagaagagatgctggagagcgggaagccatccatcttcacttccgacattatatcagattcacaaattactagacaagc

SEQ ID NO: 183321 - DNA, 120 bp, Artificial Sequence
  ENSG00000111450_6 (sequence is synthesized)
tctcaatgaaatcgagtcacgtcacaaggacatcatgaagctggagaccagcatccgagagttgcatgagatgttcatggacatggctatgtttgtggagactcagggtgaaatgatcaa

SEQ ID NO: 183322 - DNA, 120 bp, Artificial Sequence
  ENSG00000111450_7 (sequence is synthesized)
caacatagaaagaaatgttatgaatgccacagactatgtagaacacgctaaagaagaaacaaaaaaagctatcaaatatcagagcaaggcaagaaggaaaaagtggataattattgctgt

SEQ ID NO: 183323 - DNA, 120 bp, Artificial Sequence
  ENSG00000111450_8 (sequence is synthesized)
gtcagtggttctggttgccataatcgctctaattattggcttgtcagttggcaaatgatggtgtggataacgtcagtgtgcatgcctctctgccagggtgggaaaattgatgttcattat

SEQ ID NO: 183324 - DNA, 120 bp, Artificial Sequence
  ENSG00000111450_9 (sequence is synthesized)
tatttgtgtaattgttttgcttgtgatccttggaattatcctagcaacaacattgtcctagcaaccatatcccaagagccatttatccttgagactcagaccacatctgcaaccaaatca

SEQ ID NO: 183325 - DNA, 120 bp, Artificial Sequence
  ENSG00000111450_10 (sequence is synthesized)
gcatcctgtcatttcgtgaatgaatctcagacgctgtaacccggcatcgagtgctgaccttgtaatgtatgagttcacggaagaagcacaaccgaacgtcttgttcagtgacagcgccgt

SEQ ID NO: 183326 - DNA, 120 bp, Artificial Sequence
  ENSG00000111450_11 (sequence is synthesized)
aagcacagtgggtgtgatgcgtgaccctgaatgacacactacagaatgtgagcagtgtgagacttctctcactggccttgaaataagaaaatattgaacattttaatattaaaaatattt

SEQ ID NO: 183327 - DNA, 120 bp, Artificial Sequence
  ENSG00000111450_12 (sequence is synthesized)
aagaaaatattgaacattttaatattaaaaatatttcagtgttaacaaatgtgcatgaagtttaattaggaaggaatgctttatgttatgaaggcttttttttttttttttgagacggag

SEQ ID NO: 183328 - DNA, 120 bp, Artificial Sequence
  ENSG00000111450_13 (sequence is synthesized)
tgctgggattacaggcgtgagtcaccgggcaggctgttctgaagcttttagatctcaggtctaaggcttcctttccctccctctcccagctagtttgtgctaattaagagaccttttata

SEQ ID NO: 183329 - DNA, 120 bp, Artificial Sequence
  ENSG00000111450_14 (sequence is synthesized)
agaccttttatactgttttattgcctgtttgaagaaataatttttatcacgtttttgtaagatatctataattttaaatgtttataaattgtttaatttattagcatcttaatgtacccc

SEQ ID NO: 183330 - DNA, 120 bp, Artificial Sequence
  ENSG00000111450_15 (sequence is synthesized)
atactgaatgtggccttttgagtgaaataggaagcttcatggtgttggagccacctttgtacagttgtttaaagtttcccattgtcacggaaaacattggctgcaaagcccctcaaagcc

SEQ ID NO: 183331 - DNA, 120 bp, Artificial Sequence
  ENSG00000111450_16 (sequence is synthesized)
ctcaagtgccttctgtgagtttaaatgtgctggtgccctccagaaaagcctcggcctcagctccgtttccgcctgttccctcccccaggataatgaatggttactgcactgtaaagaccg

SEQ ID NO: 183332 - DNA, 120 bp, Artificial Sequence
  ENSG00000111450_17 (sequence is synthesized)
tggtctcttttcactaaataggagattcgagtttcccagtttacatgaatgaagtctgaatttaagacggtgatgaaactgaggttcagtactctcgggactcgaggaaattattcctga

SEQ ID NO: 183333 - DNA, 120 bp, Artificial Sequence
  ENSG00000111450_18 (sequence is synthesized)
gacatggagtaattcttacaaatttaaactattgtacagatccacatacatgttgttaagtacctaatgttttgctgaacttttaaaagttaatttccaaaatgtatagggattcatgat

SEQ ID NO: 183334 - DNA, 120 bp, Artificial Sequence
  ENSG00000111450_19 (sequence is synthesized)
aattaaacctttttattgctcatttttttagtagaagaatatcacttatttttagacttgtaaaatgtatgaactggtgagcggacatctgttaagagagtcactagtcagaatgttaaa

SEQ ID NO: 183335 - DNA, 120 bp, Artificial Sequence
  ENSG00000111450_20 (sequence is synthesized)
ggagtgcatgcaggatgccccaaatgtcgtgaactcttgttactcctgtatgtagtagtgtaagcatgtgacttttaacaccatttggtttgaaactaatgtagagatgcctgattccaa

SEQ ID NO: 183336 - DNA, 120 bp, Artificial Sequence
  ENSG00000111450_21 (sequence is synthesized)
acaggtgtggagaatattgaatggctcagaagccgcgtcccttacttaacacaattccgaatctccctcatccatgatgcgtccattggatcactcgctggtggtcactgtgtggcagtt

SEQ ID NO: 183337 - DNA, 120 bp, Artificial Sequence
  ENSG00000111450_22 (sequence is synthesized)
actaggggaattctgcctctgactgttctttttcttttggtctttaaacaccctgtcgtgggatgtgctcactgatttgtggctatgttgaaggtatcacttgtcttgagggttttcaat

SEQ ID NO: 183338 - DNA, 120 bp, Artificial Sequence
  ENSG00000111450_23 (sequence is synthesized)
atttcaggatcatgctggtggcaaaaggactccacgcctctgtggaatcatgtccacagggggacctgcctcccgtgatgtcccacctttccttcaaggtctgtcatatgagtcctcccc

SEQ ID NO: 183339 - DNA, 120 bp, Artificial Sequence
  ENSG00000111450_24 (sequence is synthesized)
ttttacaacacttattatggtatttttcaagttattcttcttagatttgcagtacctactgaaatttgtgtttttatagttgaagttaggaaaatgctatttgatttgtatttagatatt

SEQ ID NO: 183340 - DNA, 120 bp, Artificial Sequence
  ENSG00000111450_25 (sequence is synthesized)
taagtcacttgtccaatgatgtgtatgtctaagcctcatgtaccgatttgaagtcagacttaaaaatgtatttacagattcacttgagactttttaatcggttcttcaaatatttcatgt

SEQ ID NO: 183341 - DNA, 120 bp, Artificial Sequence
  ENSG00000111450_26 (sequence is synthesized)
ttacattaaaaatttccagagaagcataaaagtattcactttcctgccttgtcatttctggaaagattttggggagatattttattgcatattaattaataaattgttctactaggaaaa

SEQ ID NO: 183342 - DNA, 120 bp, Artificial Sequence
  ENSG00000111450_27 (sequence is synthesized)
tcgaagaattaagctgcgtttttctcttcatttggtttcaagttgtaatacattgatgtaagcctgcctaaaaggtattccaagaaataattaattaataaatgttttattttaaaatgg

SEQ ID NO: 183343 - DNA, 120 bp, Artificial Sequence
  ENSG00000111452_0 (sequence is synthesized)
actcactccccctccacccagagagcaggacggaggtgtgaacttgagccagaccagaaggagctcgagagcggccgcaggacaagcccgaggagcaggcgggcgctccaggggaaaacc

SEQ ID NO: 183344 - DNA, 120 bp, Artificial Sequence
  ENSG00000111452_1 (sequence is synthesized)
acgcacaaaaccttcttcagagaaaagggaagctccaaacctgactgagacaaacggaggctcttgaaataaaaagaaaataccgcaggacaaacagcctcccgtccccgggcgcaggtc

SEQ ID NO: 183345 - DNA, 120 bp, Artificial Sequence
  ENSG00000111452_2 (sequence is synthesized)
gcggtcacagtggtgacctgggattgctttcccaggactgcgagtcgggtttgggtttctcctccctgcattccacagctgctctggtcatcgcaacgtgtttattgatcactgaagaat

SEQ ID NO: 183346 - DNA, 120 bp, Artificial Sequence
  ENSG00000111452_3 (sequence is synthesized)
ctcaagttttgagacgaggaagaaacacccattaggtctccaagacagctgtgtttcacaaactttaaggagacagaaattttctcccctggaacctgtgaaaatgtcccttttccaagg

SEQ ID NO: 183347 - DNA, 120 bp, Artificial Sequence
  ENSG00000111452_4 (sequence is synthesized)
aagtgaaggttaagaggtcccgttctcacagaccctcaggaatttcacttggctccgagctttgacctccgagagagccatggaaaagctgctgcggctgtgctgctggtactcctggct

SEQ ID NO: 183348 - DNA, 120 bp, Artificial Sequence
  ENSG00000111452_5 (sequence is synthesized)
gctgctattttattacaactttcaggtgcgtggcgtctactccagatcgcaggaccatccaggatttcaggtgttggcgtctgcttcccattactggccactggagaatgtggatgggat

SEQ ID NO: 183349 - DNA, 120 bp, Artificial Sequence
  ENSG00000111452_6 (sequence is synthesized)
ccatgaacttcaggatacaactggagatattgtggaagggaaggtcaacaaaggcatttacctgaaagaggaaaagggagtcacgcttctctattacggcaggtacaacagctcctgcat

SEQ ID NO: 183350 - DNA, 120 bp, Artificial Sequence
  ENSG00000111452_7 (sequence is synthesized)
cagcaagccagagcagtgtggccctgaaggggtcacgttttcttttttctggaagacacaaggagaacagtctagaccaatcccttctgcgtatgggggacaggtcatctccaatgggtt

SEQ ID NO: 183351 - DNA, 120 bp, Artificial Sequence
  ENSG00000111452_8 (sequence is synthesized)
caaagtctgctccagcggtggcagaggctctgtggagctgtatacgcgggacaattccatgacatgggaggcctccttcagccccccaggcccctattggactcatgtcctatttacatg

SEQ ID NO: 183352 - DNA, 120 bp, Artificial Sequence
  ENSG00000111452_9 (sequence is synthesized)
gaaatccaaggagggcctgaaagtctacgtcaacgggaccctgagcacctctgatccgagtggaaaagtgtctcgtgactatggagagtccaacgtcaacctcgtgatagggtctgagca

SEQ ID NO: 183353 - DNA, 120 bp, Artificial Sequence
  ENSG00000111452_10 (sequence is synthesized)
ggaccaggccaagtgttatgagaacggtgctttcgatgagttcatcatctgggagcgggctctgactccggatgagatcgccatgtacttcactgctgccattggaaagcatgctttatt

SEQ ID NO: 183354 - DNA, 120 bp, Artificial Sequence
  ENSG00000111452_11 (sequence is synthesized)
gtcttcaacgctgccaagcctcttcatgacatccacagcaagccccgtgatgcccacagatgcctaccatcccatcataaccaacctgacagaagagagaaaaaccttccaaagtcccgg

SEQ ID NO: 183355 - DNA, 120 bp, Artificial Sequence
  ENSG00000111452_12 (sequence is synthesized)
agtgatactgagttacctccaaaatgtatccctcagcttacccagtaagtccctctcggagcagacagccttgaatctcaccaagaccttcttaaaagccgtgggagagatccttctact

SEQ ID NO: 183356 - DNA, 120 bp, Artificial Sequence
  ENSG00000111452_13 (sequence is synthesized)
gcctggttggattgctctgtcagaggacagcgccgtggtactgagtctcatcgacactattgacaccgtcatgggccatgtatcctccaacctgcacggcagcacgccccaggtcaccgt

SEQ ID NO: 183357 - DNA, 120 bp, Artificial Sequence
  ENSG00000111452_14 (sequence is synthesized)
ggagggctcctctgccatggcagagttttccgtggccaaaatcctgcccaagaccgtgaattcctcccattaccgcttcccggcccacgggcagagcttcatccagatcccccacgaggc

SEQ ID NO: 183358 - DNA, 120 bp, Artificial Sequence
  ENSG00000111452_15 (sequence is synthesized)
cttccacaggcacgcctggagcaccgtcgtgggtctgctgtaccacagcatgcactactacctgaacaacatctggcccgcccacaccaagatcgcggaggccatgcatcaccaggactg

SEQ ID NO: 183359 - DNA, 120 bp, Artificial Sequence
  ENSG00000111452_16 (sequence is synthesized)
cctgctgttcgccaccagccacctgatttccctggaggtgtccccaccacccaccctgtctcagaacctgtcgggctctccactcattacggtccacctcaagcacagattgacacgtaa

SEQ ID NO: 183360 - DNA, 120 bp, Artificial Sequence
  ENSG00000111452_17 (sequence is synthesized)
gcagcacagtgaggccaccaacagcagcaaccgagtcttcgtgtactgcgccttcctggacttcagctccggagaaggggtctggtcgaaccacggctgtgcgctcacgagaggaaacct

SEQ ID NO: 183361 - DNA, 120 bp, Artificial Sequence
  ENSG00000111452_18 (sequence is synthesized)
cacctactccgtctgccgctgcactcacctcaccaactttgccatcctcatgcaggtggtcccgctggagcttgcacgcggacaccaggtggcgctgtcgtctatcagctatgtgggctg

SEQ ID NO: 183362 - DNA, 120 bp, Artificial Sequence
  ENSG00000111452_19 (sequence is synthesized)
ctccctctccgtgctctgcctggtggccacgctggtcaccttcgccgtgctgtcctccgtgagcaccatccggaaccagcgctaccacatccacgccaacctgtccttcgccgtgctggt

SEQ ID NO: 183363 - DNA, 120 bp, Artificial Sequence
  ENSG00000111452_20 (sequence is synthesized)
ggcccaggtcctgctgctcattagtttccgcctcgagccgggcacgaccccctgccaagtgatggccgtgctcctacactacttcttcctgagtgccttcgcatggatgctggtggaggg

SEQ ID NO: 183364 - DNA, 120 bp, Artificial Sequence
  ENSG00000111452_21 (sequence is synthesized)
gctgcacctctacagcatggtgatcaaggtctttgggtcggaggacagcaagcaccgttactactatgggatgggatggggttttcctcttctgatctgcatcatttcactgtcatttgc

SEQ ID NO: 183365 - DNA, 120 bp, Artificial Sequence
  ENSG00000111452_22 (sequence is synthesized)
tcatcgctgtgaccagagtcatctcacagatcagcgccgacaactacaagatccatggagaccccagtgccttcaagttgacagccaaggcagtggccgtgctgctgcccatcctgggta

SEQ ID NO: 183366 - DNA, 120 bp, Artificial Sequence
  ENSG00000111452_23 (sequence is synthesized)
cctcgtgggtctttggcgtgcttgctgtcaacggttgtgctgtggttttccagtacatgtttgccacgctcaactccctgcagggactgttcatattcctctttcattgtctcctgaatt

SEQ ID NO: 183367 - DNA, 120 bp, Artificial Sequence
  ENSG00000111452_24 (sequence is synthesized)
cagaggtgagagccgccttcaagcacaaaaccaaggtctggtcgctcacgagcagctctgcccgcacctccaacgcgaagcccttccactcggacctcatgaatgggacccggccaggca

SEQ ID NO: 183368 - DNA, 120 bp, Artificial Sequence
  ENSG00000111452_25 (sequence is synthesized)
tggcctccaccaagctcagcccttgggacaagagcagccactctgcccaccgcgtcgacctgtcagccgtgtgagccgggaggctgccaaccaggccaggctgcgctcagaacacacccc

SEQ ID NO: 183369 - DNA, 120 bp, Artificial Sequence
  ENSG00000111452_26 (sequence is synthesized)
cccaaacagaatgaaatgccccacctttgcccatggaccctctccttgctgctgtctggacatgggtgttgtggccccgagacagctgtcctcccctgtgactctggctgtcggagcaca

SEQ ID NO: 183370 - DNA, 120 bp, Artificial Sequence
  ENSG00000111452_27 (sequence is synthesized)
ctgctcagcccagcagcctgatgcccaggccagcgtgggccctcctgccttgcatccacccgtgggctgagtgacttcctcgggggattcccaggacacagtggcctgactgtgatggtg

SEQ ID NO: 183371 - DNA, 120 bp, Artificial Sequence
  ENSG00000111452_28 (sequence is synthesized)
cccttgagcctcccttcatcactcagcatcagacccagcgaggccaggacactcggggccggtcccgcagcaccaggaggggatgttcagcctctgtgccttggtggggcttggggactc

SEQ ID NO: 183372 - DNA, 120 bp, Artificial Sequence
  ENSG00000111452_29 (sequence is synthesized)
agggccaaagaggtggttcaggtccccacgcaccctcagtcaggcgcaggcagctgggggtgtgtggggaagagcatgcggagtccccagtgtctgaatccactgagtggtgagttcccc

SEQ ID NO: 183373 - DNA, 120 bp, Artificial Sequence
  ENSG00000111452_30 (sequence is synthesized)
acagccggcgctagccgtggtgtgtgtctctgtaggtggtgccggcgtgggccaacctgtgctgtgtcatcagttgggggcccctgcccaagccgagctcgagccgtgggcgggagtcgt

SEQ ID NO: 183374 - DNA, 120 bp, Artificial Sequence
  ENSG00000111452_31 (sequence is synthesized)
tgactctccaggtgagggcgacccctctgccctgtccttgggggggtcccctctgctcacgtgaagagccgctctgggccttgaggctgcctgatggtgcctgtgcttgggggagcttct

SEQ ID NO: 183375 - DNA, 120 bp, Artificial Sequence
  ENSG00000111452_32 (sequence is synthesized)
cggccatccgctgtgagttttgcctctttggaccccaattcggccttaagatgccctcctccctcgtgtgccagcctccttggttgttcttgggccacaggagctggccgtgtccccgca

SEQ ID NO: 183376 - DNA, 120 bp, Artificial Sequence
  ENSG00000111452_33 (sequence is synthesized)
gtgcctggtgtccaggtggaaagtggagggcattttccagggcactgctttccccagaggcttcctcatggctcacaggcactctacgaagtttctaatgggcagaccacgcggcaggta

SEQ ID NO: 183377 - DNA, 120 bp, Artificial Sequence
  ENSG00000111452_34 (sequence is synthesized)
gcacagtgcgctccgtctggtcaccatgagaccgacctgcgctgagtccccactgacctggagagggagggctggtgacagccgtgtcttctgtgttgagggaaatttatggactcagat

SEQ ID NO: 183378 - DNA, 120 bp, Artificial Sequence
  ENSG00000111452_35 (sequence is synthesized)
tcagccccagaggagatgggataattgttatggacccatgtgtgggcatgatcctgtggaacacaggtttgggatcatagatgtgaattaagacaccaccgagatacgggctgtgaggtt

SEQ ID NO: 183379 - DNA, 120 bp, Artificial Sequence
  ENSG00000111452_36 (sequence is synthesized)
catactgtgctgatagcactcgtggtgtctgtgaaatgtgggtaagacattcaaacctggttttgatactggaaactcttcctttaaaactgtgaccatgatttcattcagcccctccac

SEQ ID NO: 183380 - DNA, 120 bp, Artificial Sequence
  ENSG00000111452_37 (sequence is synthesized)
acccctatgtctgccttgtttcagagtgagttttctatggagcctgtggcccttttgcagcccacctggtggcttcttaatgtaactcttcccctggtcgcctggagtggaccactcatc

SEQ ID NO: 183381 - DNA, 120 bp, Artificial Sequence
  ENSG00000111452_38 (sequence is synthesized)
tgcaggcctctcctgcatggggagggtaggcagggagcagcatgtctgcaggggtgaacctttgctcttctgtcaggcgaggcccaggctgcaccagccacctgccacatggtgacagtg

SEQ ID NO: 183382 - DNA, 120 bp, Artificial Sequence
  ENSG00000111452_39 (sequence is synthesized)
ccacgggccctgcgtatggcccctgcaaccgtgctctggcgggcacacctggctgctgcaggccaaggccgctgttcagtgaagagtcccatgtttagtatggactaaagtcccatgttt

SEQ ID NO: 183383 - DNA, 120 bp, Artificial Sequence
  ENSG00000111452_40 (sequence is synthesized)
agccactgccccaggctcccgtgaccccagaaaccaggtcacatggaccacagtgccagatcctcatcacgccggtgagcacctagaagtgagaacactgtattcctacaatgtacactt

SEQ ID NO: 183384 - DNA, 120 bp, Artificial Sequence
  ENSG00000111452_41 (sequence is synthesized)
ggatatttctccttatttagtttctagtgaaacaaatcaagtaaggaactatctttagtttagatggaattatttgtttttaattgttgccgtattcatctatatagctaatatttcaag

SEQ ID NO: 183385 - DNA, 120 bp, Artificial Sequence
  ENSG00000111452_42 (sequence is synthesized)
ataagtaatgaacaaaacctgtctaaaccttttgtttccaatgaatgaaagtcatgcactttatttataggctctatgttttggcttctgcagtacttttattatctatacataatttgg

SEQ ID NO: 183386 - DNA, 120 bp, Artificial Sequence
  ENSG00000111452_43 (sequence is synthesized)
ccaaaaataagaaattggaaagaatgaaatgtttagtttatagtagaagaaagatgatgacactaagttgtgaaaatatgttgtgatttttatgaaataaactcatgtcctgaaaagaaa

SEQ ID NO: 183387 - DNA, 120 bp, Artificial Sequence
  ENSG00000111452_44 (sequence is synthesized)
agaaaggcaggaagagaagcagtgaaggcagagctcactggcccagctcagcagggcttaagagaggcctctcccctggtgatgtgtgtctgaggatgagggccccctgctttcttgggg

SEQ ID NO: 183388 - DNA, 120 bp, Artificial Sequence
  ENSG00000111452_45 (sequence is synthesized)
gcagtgtctaccaggatcctctgctctggaactcagaaaggaaagagggctcttggagtagaaggcaagctcctgggaagtcaaggcagccagagatagctctgggtgccggcacctcgg

SEQ ID NO: 183389 - DNA, 120 bp, Artificial Sequence
  ENSG00000111452_46 (sequence is synthesized)
ccatgaacttcaggatacaactggaggtagagacgcgggtgctgagagcggctgtgggcgcgggaatcccagggccatcaggaggcgtgggtgctgagagtggctggccttgaaatccca

SEQ ID NO: 183390 - DNA, 120 bp, Artificial Sequence
  ENSG00000111452_47 (sequence is synthesized)
gggccattgggggacgtgggtgctgagagtgactgtgggccggggaatcccagggccatcggggagcagatgtggacacaatctgctttgaagccacggtgatagagatgaacaaatact

SEQ ID NO: 183391 - DNA, 83 bp, Artificial Sequence
  ENSG00000111452_48 (sequence is synthesized)
atctgctttgaagccacggtgatagagatgaacaaatacttgtgtaacttcccgtaatagttatttcaaagcaggctggtctc

SEQ ID NO: 183392 - DNA, 120 bp, Artificial Sequence
  ENSG00000111452_49 (sequence is synthesized)
gaattacaggcgtgagccactgtgccaggccacgaagcattttactagaatttttatagagagagctattgcgtattgaatgggagaatttctgattcaaaatatgattaaaatgtgcat

SEQ ID NO: 183393 - DNA, 120 bp, Artificial Sequence
  ENSG00000111452_50 (sequence is synthesized)
atgtgcattttccccaacaatcttgaaacagaagctggcctgaggatgcctctatgtgcaagtcaggcgtctgttttctacgttgaatggactagcgtcatctgcacactgaccacagca

SEQ ID NO: 183394 - DNA, 120 bp, Artificial Sequence
  ENSG00000111452_51 (sequence is synthesized)
ggggcctattgatgaagcagatgtcaaaggtcatgccaactaagaccaactcacatgtttgaagggcccccgtttcattcagcaaacgcatccccatctaccagtcagcttccccacaca

SEQ ID NO: 183395 - DNA, 120 bp, Artificial Sequence
  ENSG00000111452_52 (sequence is synthesized)
tcagctccatttgaaaagattaagcatcgcctaagacgtttccagtgaggcccaattccaaatagtctgtttgagttcattcagacatttgctggtaggagaaacctcacatctttctgg

SEQ ID NO: 183396 - DNA, 120 bp, Artificial Sequence
  ENSG00000111452_53 (sequence is synthesized)
gtatttttttcccctttctaataaggactttttaaaaaccgtaagctttgtatgacagttttccatttttatttttatttactgattgctcttgatcatgtcagatggctgacatgggcg

SEQ ID NO: 183397 - DNA, 120 bp, Artificial Sequence
  ENSG00000111452_54 (sequence is synthesized)
gcgagggtttaccgtacagcaatcctagcacgtgcttcggtcgtccctgttccgtgggaggcgttttatttttaaaaccatgtattgctggtgactgtgatttccacattgacacactgg

SEQ ID NO: 183398 - DNA, 120 bp, Artificial Sequence
  ENSG00000111452_55 (sequence is synthesized)
cattttccttactcctgtgatttaatgtgttgctggacatcaccgctgaagcttctgaaatgtttccttaaaatttgcaaactgagacccatcggtgctgcctctgttgctggtgttctc

SEQ ID NO: 183399 - DNA, 120 bp, Artificial Sequence
  ENSG00000111452_56 (sequence is synthesized)
agactggggcgccgttgaggagcacgcgctccgtgaagggcacctgcgtgggtgccacgcgctccctgcccagcatcgctctcatccgcctgcctgtagggcagcaacatggccacattt

SEQ ID NO: 183400 - DNA, 120 bp, Artificial Sequence
  ENSG00000111452_57 (sequence is synthesized)
ggaaaccaccctacagccagatgtcttttccaaagggtcggcctggcagggctgagaaagcccttgtgcaagtttgtttcaccactggctcgggttcaaacgaaccacgttcccttgttg

SEQ ID NO: 183401 - DNA, 120 bp, Artificial Sequence
  ENSG00000111452_58 (sequence is synthesized)
gcatccagttttcttttttcaaggcctttattttaaagccatggaaagggggtcatttcaccaagtggaaatgccttcttgaaacagctcactgttccaggacccagcaactaaaatgct

SEQ ID NO: 183402 - DNA, 120 bp, Artificial Sequence
  ENSG00000111452_59 (sequence is synthesized)
aggagttttttcaaacaaaagcttgaataactgtcagtgtctttctctcttcacccctatacctgaactcattgtggtggcttaaatcagtaactcttggtgctttgaaacctttaccta

SEQ ID NO: 183403 - DNA, 120 bp, Artificial Sequence
  ENSG00000111452_60 (sequence is synthesized)
tgaaaaattcttctcctaaggtgatatattcacacagatacagttacacactgtggctgaattttgctccctgaatatattgacttccagtaaagcactaatatatccgtgttagtcctg

SEQ ID NO: 183404 - DNA, 120 bp, Artificial Sequence
  ENSG00000111452_61 (sequence is synthesized)
gaacattgcaatgtggaaggtttctctgcacttccctactggatgcattctctaggttgtaatgctatgctggcatatttgaattgattacagccttcttaagggagaaaagaaaagaat

SEQ ID NO: 183405 - DNA, 120 bp, Artificial Sequence
  ENSG00000111452_62 (sequence is synthesized)
agaccccatcagcacattttgctgcggggaacaggtgaatagctttggcaagccttttgaggatgtgcggctttgtcgtttgttgccgaactctccgtcgttttgtccatttgtcatcat

SEQ ID NO: 183406 - DNA, 120 bp, Artificial Sequence
  ENSG00000111452_63 (sequence is synthesized)
ctcacgcagtcattttcatgcagagtgtctgtctcatcagttcttgtgacatcataaccattcatccttttgttgagcctgtgttatgagtggccaagttcaatttcatatctctcaact

SEQ ID NO: 183407 - DNA, 120 bp, Artificial Sequence
  ENSG00000111452_64 (sequence is synthesized)
aagtatctgcctatgtgttggagccagaaaattagaactatcgcttgcggccaaattcagcagccatcacgccctggtgtgggaactgagtggggccactggagtggccgagctgctgac

SEQ ID NO: 183408 - DNA, 120 bp, Artificial Sequence
  ENSG00000111452_65 (sequence is synthesized)
caaagtaaacaagggtggtggaggctgggggatgtgaggtccgaagagaaagtccagggtgctcttggatgaaagagcccctcctggtgcctgctgcaggttgagagatatgttggtccc

SEQ ID NO: 183409 - DNA, 120 bp, Artificial Sequence
  ENSG00000111452_66 (sequence is synthesized)
atttgtcttttgtctcactcacttgctgtgctttttctttttgttgtttcacccagcgtcccgaacccacaagctcactgtgcttccttcccgtaatgctacttttgtgtattccaatga

SEQ ID NO: 183410 - DNA, 120 bp, Artificial Sequence
  ENSG00000111452_67 (sequence is synthesized)
ttctgcctactcaaatctctctgcaactgtaggtgagcatttatgtacttttgttcttcgttctgtcaagtttggatctacgatgaattctaaggccaattctgtttggtagtatctgaa

SEQ ID NO: 183411 - DNA, 120 bp, Artificial Sequence
  ENSG00000111452_68 (sequence is synthesized)
ttcactatgtcttggctagcaagtgagcaaatgtcccagtcaagacagcagatccaaggtgttaaaaaataaccactagggttaagtctaaaggaagattgcaatacattagaacagggg

SEQ ID NO: 183412 - DNA, 120 bp, Artificial Sequence
  ENSG00000111452_69 (sequence is synthesized)
tgttaggaactgggctgcacagcaggaagtgagtggtgggtgagtgagtgaagcttcacctgtatttacagctgctccctatcgctcacattaccgcccgagctccacctcctgtcagat

SEQ ID NO: 183413 - DNA, 120 bp, Artificial Sequence
  ENSG00000111452_70 (sequence is synthesized)
cagctgctccctatcgctcacattaccgcccgagctccacctcctgtcagatcagcagcagcattaaattctcttgggagcacaaaccctactgtgaactgcacatgtgagggatctagg

SEQ ID NO: 183414 - DNA, 120 bp, Artificial Sequence
  ENSG00000111452_71 (sequence is synthesized)
ctgtcactgtctcccatcacccccagaggggaccgtctagttgcaggaaaataagctcagggctcccccgattctacgtgatggtgagttgtacaattatttcattacatattgtaatat

SEQ ID NO: 183415 - DNA, 67 bp, Artificial Sequence
  ENSG00000111452_72 (sequence is synthesized)
ggctcccccgattctacgtgatggtgagttgtacaattatttcattacatattgtaatagaaaccaa

SEQ ID NO: 183416 - DNA, 120 bp, Artificial Sequence
  ENSG00000111452_73 (sequence is synthesized)
ccggtccctggtgccaaaaatgctggggaccactgcactagaaggtatatatattctttcaagttcccaggattgtctaagccagctgcttgttttcagaacaaaacagacccaagatga

SEQ ID NO: 183417 - DNA, 120 bp, Artificial Sequence
  ENSG00000111452_74 (sequence is synthesized)
gaccttttctagacatagagattgtttggatttttaaatgaattgtcttctttgggggaggaaaagcatgccattttaatggaaaattaaagttaatttaaaaatacctcatcaaacatt

SEQ ID NO: 183418 - DNA, 120 bp, Artificial Sequence
  ENSG00000111452_75 (sequence is synthesized)
tgatttcttataaacattaaaatcagcatttcgtctgtagctggactttaaaaaaatcattaaaagctgtttgtgaaacatatacccacaagaatcatagttaaattattgtcttatctg

SEQ ID NO: 183419 - DNA, 120 bp, Artificial Sequence
  ENSG00000111452_76 (sequence is synthesized)
ataacctccagagcctacatggctcaacatgaagctcaaagcaaaaggggtagtagcaactgaggcatttattagatcagcatagaagccagttctgaccctgtcaatcttaccctgtga

SEQ ID NO: 183420 - DNA, 120 bp, Artificial Sequence
  ENSG00000111452_77 (sequence is synthesized)
tccttttcaacacaaaaactgactgctctttcaactgtaaggtgattggcttccaaaattaatgtttccagtcaagcagtctgacttaggggtttatacagcctagctcaattacgcaac

SEQ ID NO: 183421 - DNA, 120 bp, Artificial Sequence
  ENSG00000111452_78 (sequence is synthesized)
cactagtgatccatttaaccttgcaatatataggtgtccctcagcaaaaatgggataaaatttaaaaatgagtttaaaagcagtaaggaaaaacactgaggtcccttgagtcggttatcc

SEQ ID NO: 183422 - DNA, 120 bp, Artificial Sequence
  ENSG00000111452_79 (sequence is synthesized)
atgtgacaatatagctggaaagcctgagctggggttggggtcaggtccacagaccctgttagctctcccgtgtgtcttcagctgggctgacggctgccgggggctcagacattctccctg

SEQ ID NO: 183423 - DNA, 120 bp, Artificial Sequence
  ENSG00000111452_80 (sequence is synthesized)
acccatgtggtagcaaagatctctgagcgattatgaccccagttaacagtaaatcctactcgctcctgatttttacagtcttcacttatttattctgtaaacgatttaccccacacactc

SEQ ID NO: 183424 - DNA, 120 bp, Artificial Sequence
  ENSG00000111452_81 (sequence is synthesized)
accatcagataccctggccatgggaacgggacacaagatgattggacggggcagtgcccctcgggatttgcggccagctgggcttgtcacccacaggctctcctgggactatgcaaaatg

SEQ ID NO: 183425 - DNA, 120 bp, Artificial Sequence
  ENSG00000111452_82 (sequence is synthesized)
ttgctcggggttttcctcctggcgcctgaaaatgggttctgctaaaatcccgaatctacctgtccaggttcaggggatttcaattaaaactcaaaaggagaaggagttcagctgtagctt

SEQ ID NO: 183426 - DNA, 120 bp, Artificial Sequence
  ENSG00000111452_83 (sequence is synthesized)
cacgttcacacttgcactgaaacgttccacttggaacactcagcatgaggacgggagtggggagggctcgaaaagcaggtcggcacaaagtccaggacaggaggcggtcgccacgccacg

SEQ ID NO: 183427 - DNA, 120 bp, Artificial Sequence
  ENSG00000111452_84 (sequence is synthesized)
cttggtaacccatctgttggcaaatatcacaattatcacatcatcatacgatatgatatgcaatatgaaatccatatgcaaaggtctgtatgcatttgtatataatacatgcatattata

SEQ ID NO: 183428 - DNA, 120 bp, Artificial Sequence
  ENSG00000111452_85 (sequence is synthesized)
tgttataaatatatacttagataaataataatgcatacttacacataagttatttgtaggtctgacacacatcttcagacttttaatctcggaaggttattaacatatgatgttgtcatt

SEQ ID NO: 183429 - DNA, 120 bp, Artificial Sequence
  ENSG00000111452_86 (sequence is synthesized)
cgctgtctgttcccagggtcaccctggtatcggcctcctttctccccactctcccgttgcagctatcagcactgcaggcgtgagatgtgtcctaatgaaccttataaacacagttgtgtg

SEQ ID NO: 183430 - DNA, 120 bp, Artificial Sequence
  ENSG00000111452_87 (sequence is synthesized)
ttagaacacctgttccctgagatagaggagttaataatttactagagatgctttgagatgaatattgttctgttgatcatcacggggtttcaaggtatatgtgatggacgattatagaag

SEQ ID NO: 183431 - DNA, 120 bp, Artificial Sequence
  ENSG00000111452_88 (sequence is synthesized)
gctttggagagcaagtattccagatccattagtgtttttgatcaacaaatgttagccgtgtgcctcccaggggatgggcccttggaaagccccgaagatacctcttcctattcagcacag

SEQ ID NO: 183432 - DNA, 120 bp, Artificial Sequence
  ENSG00000111452_89 (sequence is synthesized)
ggcagttgttcggggcaggggcctgtgggtaggtggactggggttcaaatattcattgtgccataatgagccgtgagactttgggaagtcatttttaaaaactgaggtcaaattcatata

SEQ ID NO: 183433 - DNA, 120 bp, Artificial Sequence
  ENSG00000111452_90 (sequence is synthesized)
tcataaacataaccatttaaaaatgaacaagtcagtacacttggcacattcacggtgttatgcagctgccacctctacctggcttggaaacattttcatccccccaaaaggaaaccccgc

SEQ ID NO: 183434 - DNA, 120 bp, Artificial Sequence
  ENSG00000111452_91 (sequence is synthesized)
acccggtgagtacagtcactccccgccttcccctcccccagactctggcaaccacgaatctactttctgtctttacctattttggagattccacataaatggaaatgtgtaacgtataac

SEQ ID NO: 183435 - DNA, 120 bp, Artificial Sequence
  ENSG00000111452_92 (sequence is synthesized)
ctttttgtcttaatctctcagattttttttttgctctgttaaatggataaaaatactccctttctgggggaggtgttgataataaaggccattagcacaatgcctggcatatggcaagaa

SEQ ID NO: 183436 - DNA, 120 bp, Artificial Sequence
  ENSG00000111452_93 (sequence is synthesized)
acatttgcagggattaggaatgttgtatgactgccccaggtggaccctgtagctgagaaagacatcaccttagcaactacttttggatgaaggtacgctggcaggtggaacgaggttgtt

SEQ ID NO: 183437 - DNA, 120 bp, Artificial Sequence
  ENSG00000111452_94 (sequence is synthesized)
ggctggagctaagtcgcggtggccctggacttccgtctccagttcccctcagtccccaccagacttctcgactcttcaataatcttcaggtcgaacagagcctgtccgcagcatgagctc

SEQ ID NO: 183438 - DNA, 120 bp, Artificial Sequence
  ENSG00000111452_95 (sequence is synthesized)
tggggccagaaggcgtgggttccacttccggttccgacctgtttgtggggatcttgggcaaccactgcttccctttgaaaagcctcatctgtaaagtgagtgaataaaaggaccttccca

SEQ ID NO: 183439 - DNA, 120 bp, Artificial Sequence
  ENSG00000111452_96 (sequence is synthesized)
agggaaggacccgcggggtgttgggtggaaagagcgggtatagacaagctggaaggtccttatgcatgtatgcacaggaccgggcgtgaggccccgagacagggcttgaccttcttaaaa

SEQ ID NO: 183440 - DNA, 120 bp, Artificial Sequence
  ENSG00000111452_97 (sequence is synthesized)
aggcgggggagccagtggctattctaggaaaattccatctccagggcatgaaaagacagataaagatcagtgtaactcacctgtgctgagtaacatggtgggtcacggtggggctctgga

SEQ ID NO: 183441 - DNA, 120 bp, Artificial Sequence
  ENSG00000111452_98 (sequence is synthesized)
accaggatgtcttgacctgagtcctgaattggccccttcccagctccgtcacttgccgtgagtcctccaaccaccatgtggcttcgtggcttcatttgtaaagtggggcaagagtgtgcg

SEQ ID NO: 183442 - DNA, 120 bp, Artificial Sequence
  ENSG00000111452_99 (sequence is synthesized)
cagctggcaagggctgagcaattgaatgacttcactcatgtaaaacagagcaggaccaggcgcagggcaggtccgtggaaaaggttaactattgccatcattaggaaccatcaaggggct

SEQ ID NO: 183443 - DNA, 120 bp, Artificial Sequence
  ENSG00000111452_100 (sequence is synthesized)
cacacacatgatctcagtggaggcttctagcagcctgtgagggggtgttagagatgtctggatgccagcaacagacgctgactctggttctcctgagcagaaaggtagtttattggaagg

SEQ ID NO: 183444 - DNA, 120 bp, Artificial Sequence
  ENSG00000111452_101 (sequence is synthesized)
ataaggggagcacaatgtatcagagtgaagtcatgaaaacaagacaaaatccaaggtcttagaaaatatcttatatggtattattatatcatttttgtattcggcacaaaaagggcaggc

SEQ ID NO: 183445 - DNA, 120 bp, Artificial Sequence
  ENSG00000111452_102 (sequence is synthesized)
caaaaataagccctaatgagacaactgtataaaaacgttttgagtagcctaatgagtgaaaattatttaaaacgtgttaattattattgcatgtatgaaagaatacaggtcgccttgttg

SEQ ID NO: 183446 - DNA, 120 bp, Artificial Sequence
  ENSG00000111452_103 (sequence is synthesized)
cgatagaaatgccaaagtcccttgctttccaataacatgggcctgagaaaattcagtgtcactcatccacgacgatccgatgtggaggttcctattcccacggagatgaagccacaagca

SEQ ID NO: 183447 - DNA, 120 bp, Artificial Sequence
  ENSG00000111452_104 (sequence is synthesized)
aaggcctgtccgtgtgcaggtctgtcctgagcatgaacatcctgtcccagagagaaaatgctccctctgggaagagcctccctgggcaccccttgggtccttggagcccttctgggccac

SEQ ID NO: 183448 - DNA, 120 bp, Artificial Sequence
  ENSG00000111452_105 (sequence is synthesized)
atctctgcttagcgttgggggacctgtcacacccgagtggggtgaccacgggctcgcgacctgtatgaggcgagactccagcattctaggggatgaccgcaaaaccaggccctcagcaga

SEQ ID NO: 183449 - DNA, 120 bp, Artificial Sequence
  ENSG00000111452_106 (sequence is synthesized)
ggccgcctccttccagagccttctgtggctgggcgggggtctccaggcagctccgcagcccccgcaaataccccctggtgctgagtccgcttatacagacagagacgaagggcagcgaca

SEQ ID NO: 183450 - DNA, 120 bp, Artificial Sequence
  ENSG00000111452_107 (sequence is synthesized)
gcgtttttgttttctgaagtgggagggtctcgtgaccgcagctcaggaggaaaacgaggcgccggctttgcaggtgggtaggagtttgtgttgtactcggaggctgggagcccctggggc

SEQ ID NO: 183451 - DNA, 120 bp, Artificial Sequence
  ENSG00000111452_108 (sequence is synthesized)
ttctgtagggagaggcggtctgagacgcgctttagaagttgacctgctgctctgcggggactcggtgcgggagacgagtggaggctgctgcgtcatccaggtgagaggagagccaggtgc

SEQ ID NO: 183452 - DNA, 120 bp, Artificial Sequence
  ENSG00000111452_109 (sequence is synthesized)
gcagtgagcagaggtgggaggaaagctggttgccacggagatgagggcgtgtccatcactgcaaggctccacccacagcactatcctgggcggaaccttcctggccccacccacagcctt

SEQ ID NO: 183453 - DNA, 120 bp, Artificial Sequence
  ENSG00000111452_110 (sequence is synthesized)
agctgattggactgtggagtacatgtgacttcaggctgtgtccttataggttggctggcctctagtgccctgcccatgtggtcatggagtgtctgcacgggacgtcctggagagtcggac

SEQ ID NO: 183454 - DNA, 120 bp, Artificial Sequence
  ENSG00000111452_111 (sequence is synthesized)
ggccaggtgggccaaggagggcagagcagagtcgctgagcaggatggtggccgggcagaagggctgcatgatcacaaagcccagtgaccccttgatcgcaacgcccagtgaccccttgca

SEQ ID NO: 183455 - DNA, 120 bp, Artificial Sequence
  ENSG00000111452_112 (sequence is synthesized)
gtggatcccggtggcaggaaggcagtgcagccatggaagcccgcccgcccacccgcctgcctgcccaccacgcatttgtttatttgcttctctctcacactcaccccgggacattcattg

SEQ ID NO: 183456 - DNA, 120 bp, Artificial Sequence
  ENSG00000111452_113 (sequence is synthesized)
ctgagtgtgaggagcccagcagaggccactccacacccagcttccctggcctgcgatacaacctggctctgccccacagagcagcgatgcacagctcagctgtggagccagcagctccga

SEQ ID NO: 183457 - DNA, 120 bp, Artificial Sequence
  ENSG00000111452_114 (sequence is synthesized)
ctcatatttccaaatcccaacctccctcgcacatctggttccggagttgcaccggcacagactcctctggttacggctgttgcagcctctgaaattgctctcacgatcccttccccgctt

SEQ ID NO: 183458 - DNA, 120 bp, Artificial Sequence
  ENSG00000111452_115 (sequence is synthesized)
acttgcttgtgggcatttgaatttgtaactactatgttaaaataacaaggagtctccttgaactgcttctggaatttagggcataaggacaaaaagataacatccttcctgtgctccaaa

SEQ ID NO: 183459 - DNA, 120 bp, Artificial Sequence
  ENSG00000111452_116 (sequence is synthesized)
gtccgggtgctgagacacgcccatgcctgtgtttgctgtatgaatgagggtatggaggagtgagtctgttccacaagaggagaggaacttagggaaagagatgtgttctccttggaggcc

SEQ ID NO: 183460 - DNA, 120 bp, Artificial Sequence
  ENSG00000111452_117 (sequence is synthesized)
agaatgccacatgcgtgctggtttagtcggtggatcccagtcatgctggcacaactggtctgtactgccgcagcttgcacgcggacaccaggtggcgctgtcgtctatcagctatgtggg

SEQ ID NO: 183461 - DNA, 120 bp, Artificial Sequence
  ENSG00000111452_118 (sequence is synthesized)
aaggacccgcggggtgttgggtggaaagagcgggtatagacaagctggaaggtccttatgcatgtatgcacaggaccgggcgtgaggccccgagacagggcttggtatgcaaccttctta

SEQ ID NO: 183462 - DNA, 120 bp, Artificial Sequence
  ENSG00000111481_0 (sequence is synthesized)
gcggctccacgtcggcaccagctgcggggcaagatggaggcgctgattttggaaccttccctgtatactgtcaaagccatcctgattctggacaatgatggagatcgactttttgccaag

SEQ ID NO: 183463 - DNA, 120 bp, Artificial Sequence
  ENSG00000111481_1 (sequence is synthesized)
tactatgacgacacctaccccagtgtcaaggagcaaaaggcctttgagaagaacattttcaacaagacccatcggactgacagtgaaattgccctcttggaaggcctgacagtggtatac

SEQ ID NO: 183464 - DNA, 120 bp, Artificial Sequence
  ENSG00000111481_2 (sequence is synthesized)
aaaagcagtatagatctctatttctatgtgattggcagctcctatgaaaatgagctgatgcttatggctgttctgaactgtctcttcgactcattgagccagatgctgaggaaaaatgta

SEQ ID NO: 183465 - DNA, 120 bp, Artificial Sequence
  ENSG00000111481_3 (sequence is synthesized)
gaaaagcgagcactgctggagaacatggaggggctgttcttggctgtggatgaaattgtagatggaggggtgatcctagagagtgatccccagcaggtggtacaccgggtggcattaagg

SEQ ID NO: 183466 - DNA, 120 bp, Artificial Sequence
  ENSG00000111481_4 (sequence is synthesized)
ggtgaagatgtcccccttacggagcagaccgtgtctcaggtgctgcagtcagccaaagaacagatcaagtggtcactccttcggtgaagacctcactgttcctggctcttcatcctcttc

SEQ ID NO: 183467 - DNA, 120 bp, Artificial Sequence
  ENSG00000111481_5 (sequence is synthesized)
aaaaaatttgcatgtctgctgtgaattttcatctagttccccaatcgatgctctcagggtcatctcggggatcacagggatccttaaatctccattctgtttgtggttgccccctcaacc

SEQ ID NO: 183468 - DNA, 120 bp, Artificial Sequence
  ENSG00000111481_6 (sequence is synthesized)
tcccctacacccttcctattctttttcattcttcttgcagttctgggagtaaagctcccagcatatttagataatagggcaggggaagcaccctctttctttctagactggattatgctc

SEQ ID NO: 183469 - DNA, 120 bp, Artificial Sequence
  ENSG00000111481_7 (sequence is synthesized)
tgttttcctccctttgcctctacctggccctcatcccaacagcccagcaaggggagagagaaagagaattcttttctatagaacgagtgggggcggggatgggtagggatttatccaatc

SEQ ID NO: 183470 - DNA, 120 bp, Artificial Sequence
  ENSG00000111481_8 (sequence is synthesized)
taagccctaaccccacttagtgacctcagtgttttcttccattccttcttactgccctgtcctctgccttggaagaggctttgggaatagttcatagggaagggacaacatggaagaaac

SEQ ID NO: 183471 - DNA, 120 bp, Artificial Sequence
  ENSG00000111481_9 (sequence is synthesized)
agcgatttaaattgtattgaacagggcatataaaatgcattctgtaccctgatctggcatatagcttcaaaactgcagtggcgagtgtccatctcttagttagctaccttaactgtccac

SEQ ID NO: 183472 - DNA, 120 bp, Artificial Sequence
  ENSG00000111481_10 (sequence is synthesized)
ccttactacctgtgggatcgttgcctggtttgtcttctctgtgtcctggagcaaagccagttcctaaaactaaaactccattctagtcttgggaagaaaagtttctactcagaactgggg

SEQ ID NO: 183473 - DNA, 120 bp, Artificial Sequence
  ENSG00000111481_11 (sequence is synthesized)
aaggagtggaacttatgacttgggcctctaggctgtctctgtcccctcagctccccgacatgcatttactctctgccgtgggtctgcagtcgctgcaacctaccctctctctgcctcagc

SEQ ID NO: 183474 - DNA, 120 bp, Artificial Sequence
  ENSG00000111481_12 (sequence is synthesized)
cttacacccaagcagtaggtctgtgctctccctgtctctaggtcgctgagagaggtgcttttcttcataaaacctttggggtttggatttccccaggaagatggagaatggaatactcac

SEQ ID NO: 183475 - DNA, 120 bp, Artificial Sequence
  ENSG00000111481_13 (sequence is synthesized)
tcttgggtctaatctttccccttgacccagaacttcctccccacaaaaatgcctttaaaaaccttcctgagacttaagcattctgccccacttactaactgccagttctccagcactgag

SEQ ID NO: 183476 - DNA, 120 bp, Artificial Sequence
  ENSG00000111481_14 (sequence is synthesized)
gtggggcagataacggggcatatttaagggggcatctttgtgtaaaagatgcatggagtcaggagaaaaccaccttcataaactgctctgtgcaaagaggaataaaacattttttccaaa

SEQ ID NO: 183477 - DNA, 120 bp, Artificial Sequence
  ENSG00000111481_15 (sequence is synthesized)
accgggtgctgcagtcagccaaagaacagatcaagtggtcactccttcggtgaagacctcactgttcctggctcttcatcctcttcaaaaaatttgcatgtctgctgtgaattttcatct

SEQ ID NO: 183478 - DNA, 120 bp, Artificial Sequence
  ENSG00000111481_16 (sequence is synthesized)
cttttcagcccaggagtccagccaggtctgcgtttctcccatgcatttgacgaattccaacctgatggtccactcgaatgtgacctttaaactttatacaggttgtcgtcgccttgtgtc

SEQ ID NO: 183479 - DNA, 120 bp, Artificial Sequence
  ENSG00000111481_17 (sequence is synthesized)
ggcaccagctgcggggcaagatggaggcgctgattttggaaccttccctgtatactgtcaaagccatcctgattctggacaatgatggagatcgactttttgccaagctgatgcttatgg

SEQ ID NO: 183480 - DNA, 120 bp, Artificial Sequence
  ENSG00000111481_18 (sequence is synthesized)
ggagcagaccgtgtctcaggtatgactctcccttcttcctttccagatggactgggtcactaaagaggctagaacagcattccacccatacctctcaaatctgagtgaaactagagactc

SEQ ID NO: 183481 - DNA, 120 bp, Artificial Sequence
  ENSG00000111481_19 (sequence is synthesized)
aagacacatcttccttggctccctcttattccagagaactgggactcatacagccagccactccctacccctacttccaactcctttctcagttacctgtgagcagtggctgtcagcctt

SEQ ID NO: 183482 - DNA, 120 bp, Artificial Sequence
  ENSG00000111481_20 (sequence is synthesized)
cctgcctgcctgatgcctcattcagtgatttattccccagcagaggcttgccttaagcagatggtctgtgtgcatttgtgcacacacactctctttctcttattattcaattgagggcta

SEQ ID NO: 183483 - DNA, 120 bp, Artificial Sequence
  ENSG00000111481_21 (sequence is synthesized)
agctggaaatgcatattctagaatatgcaggttttgcagatccatcttgctaccttgactgcagatagattgtctacctgatgtagggggaagggaggggttccgttttctacccacttg

SEQ ID NO: 183484 - DNA, 120 bp, Artificial Sequence
  ENSG00000111481_22 (sequence is synthesized)
gaattctcaccaagaagtccatctggatttgttacccgccccctgcccgccgccccttttaacatatgtccagtaactccctttttttttttcttttataccaggtatacctcttctctc

SEQ ID NO: 183485 - DNA, 120 bp, Artificial Sequence
  ENSG00000111481_23 (sequence is synthesized)
ttcatcccctcagtgggtttgaatttttttggaattttccaaacaatctgctagggccttagagagcttcttcccatctctttacccttggggattttctattctccattcttctaagga

SEQ ID NO: 183486 - DNA, 120 bp, Artificial Sequence
  ENSG00000111481_24 (sequence is synthesized)
cagggaagacaagtgaggggaaggagatccccagccctcatccttaccctgccctgtcagcaagctttcctcaatgctgctcttatctctgcaggtgctgcagtcagccaaagaacagat

SEQ ID NO: 183487 - DNA, 120 bp, Artificial Sequence
  ENSG00000111481_25 (sequence is synthesized)
tgatggtttcccaagtttgactctccattgccgattccctgccacattccttcaggaaactgttttgtcttcggtttcctgttaatccctattatataggaaccttccctgtatactgtc

SEQ ID NO: 183488 - DNA, 120 bp, Artificial Sequence
  ENSG00000111481_26 (sequence is synthesized)
acttaccctgggtctttctcaatgggaaatatcaaaatctgaccaagttgaggtaagggacttacagaggtacctctgtatccccttgcagccccagtgggactaggggaaggtatctgg

SEQ ID NO: 183489 - DNA, 120 bp, Artificial Sequence
  ENSG00000111481_27 (sequence is synthesized)
ccgtgtctcaggtatacctcttctctcttcatcccctcagtgggtttgaatttttttggaattttccaaacaatctgctagggccttagagagcttcttcccatctctttacccttgggg

SEQ ID NO: 183490 - DNA, 120 bp, Artificial Sequence
  ENSG00000111481_28 (sequence is synthesized)
agagatgctgtggtgtccacaggggccgggagtcagggttcagcccgagtgggagacggggaaagagagttccgggaaccttccctgtatactgtcaaagccatcctgattctggacaat

SEQ ID NO: 183491 - DNA, 120 bp, Artificial Sequence
  ENSG00000111481_29 (sequence is synthesized)
ttgcggctccacgtcggcaccagctgcggggcaagatggaggcgctgattttgccccagtgggactaggggaaggtatctggtttaccagtggtgatgggaggcttcaggactgaaggta

SEQ ID NO: 183492 - DNA, 120 bp, Artificial Sequence
  ENSG00000111481_30 (sequence is synthesized)
ctttttttttccttcttccccttgtataataaactcttcagaatgtaatggggaggtgagtgtacctcacgcgggaataccatgctggaaggttggctgttagctacctgtctagtccct

SEQ ID NO: 183493 - DNA, 120 bp, Artificial Sequence
  ENSG00000111481_31 (sequence is synthesized)
ggatttatgagcctcacttgacaaatttaattgcagctctgcttattgtaccgcatccattagggcaggtaaatggaagtctgtaaaggtgaccgctctgcattttcacctccgaaggat

SEQ ID NO: 183494 - DNA, 120 bp, Artificial Sequence
  ENSG00000111481_32 (sequence is synthesized)
tctgacctgccttgatcttgggtgaggtggcgggataactgcccctgtcctaagtcaagcaggctcagtggccagaggtcctgttccccgacagtgagttgggccttcgggacagagtga

SEQ ID NO: 183495 - DNA, 120 bp, Artificial Sequence
  ENSG00000111490_0 (sequence is synthesized)
agccttgcaggctccgcactgcagatgcctgctggcttccctgcgctcggcggctcccgcggtgccccgtaagtccccgtgaccctccagcaccagccggctgtgcgctccctgctccca

SEQ ID NO: 183496 - DNA, 120 bp, Artificial Sequence
  ENSG00000111490_1 (sequence is synthesized)
cgggccggtcagccgcagacactcacccagctccgcgagctcagccgctcagcgagtggggtagcggggaccgagacggacggtagccgtgccagagcccggggcgctctcggatgcggc

SEQ ID NO: 183497 - DNA, 120 bp, Artificial Sequence
  ENSG00000111490_2 (sequence is synthesized)
aggacaagctgaccgggtctctgaggcgcggggggagatgcctgaagcggcagggcggcggcgtgggcaccatcctgagcaatgtgctcaagaagcgcagctgcatttcccggaccgcgc

SEQ ID NO: 183498 - DNA, 120 bp, Artificial Sequence
  ENSG00000111490_3 (sequence is synthesized)
cccggctgctgtgcaccctggagccgggagttgataccaagttgaaattcactcttgagccatctttaggtcaaaatggttttcagcagtggtacgatgctctcaaggcagttgccaggc

SEQ ID NO: 183499 - DNA, 120 bp, Artificial Sequence
  ENSG00000111490_4 (sequence is synthesized)
tatccacaggaataccaaaggaatggaggagaaaggtttggttgaccttggcagatcattatttgcacagtatagccattgactgggacaaaaccatgcgcttcactttcaatgaaagga

SEQ ID NO: 183500 - DNA, 120 bp, Artificial Sequence
  ENSG00000111490_5 (sequence is synthesized)
gtaatcctgatgatgactccatgggaattcagatagtcaaggaccttcaccgcacaggctgtagttcttactgtggccaggaggctgagcaggacagggttgtgttgaagcgggtgctgc

SEQ ID NO: 183501 - DNA, 120 bp, Artificial Sequence
  ENSG00000111490_6 (sequence is synthesized)
tggcctatgcccgatggaacaaaactgttgggtactgccaaggctttaacatcctggctgcactaattctggaagtgatggaaggcaatgaaggggatgccctgaaaattatgatttacc

SEQ ID NO: 183502 - DNA, 120 bp, Artificial Sequence
  ENSG00000111490_7 (sequence is synthesized)
ttattgataaggtacttcccgaaagctatttcgtcaataatctccgggcattgtctgtggatatggctgtcttcagagaccttttaagaatgaagctgccggaattatctcagcacctgg

SEQ ID NO: 183503 - DNA, 120 bp, Artificial Sequence
  ENSG00000111490_8 (sequence is synthesized)
atactcttcagagaactgcaaacaaagaaagtggaggtggatatgagcccccacttacaaatgtcttcacgatgcagtggtttctgactctctttgccacatgcctccctaatcagaccg

SEQ ID NO: 183504 - DNA, 120 bp, Artificial Sequence
  ENSG00000111490_9 (sequence is synthesized)
ttttaaagatctgggattcagtcttctttgaaggttcagaaatcatcctaagggtgtcgctggctatctgggcaaaattaggagagcagatagaatgttgtgaaacagcagatgaattct

SEQ ID NO: 183505 - DNA, 120 bp, Artificial Sequence
  ENSG00000111490_10 (sequence is synthesized)
acagcaccatggggcgccttacccaggagatgctagagaatgatcttctgcaaagccatgaactcatgcagactgtttattccatggctccgttccctttcccacaattggcagagttga

SEQ ID NO: 183506 - DNA, 120 bp, Artificial Sequence
  ENSG00000111490_11 (sequence is synthesized)
gggaaaaatacacctacaacattacaccgttcccagccacagttaaacccacctcagtttctggacgacatagtaaggccagagacagtgatgaagagaatgacccagacgatgaggatg

SEQ ID NO: 183507 - DNA, 120 bp, Artificial Sequence
  ENSG00000111490_12 (sequence is synthesized)
ctgtcgttaatgcagtggggtgtcttggaccttttagtgggttcctggctcctgaactgcagaagtaccaaaaacaaattaaagagccaaatgaggagcagagtctgagatctaataaca

SEQ ID NO: 183508 - DNA, 120 bp, Artificial Sequence
  ENSG00000111490_13 (sequence is synthesized)
ttgcagagctgagtccaggagcaatcaattcctgtcgaagtgaataccatgcagcttttaacagtatgatgatggaacgcatgaccacagatatcaatgcactgaagcggcagtactctc

SEQ ID NO: 183509 - DNA, 120 bp, Artificial Sequence
  ENSG00000111490_14 (sequence is synthesized)
gaattaaaaagaagcaacagcagcaggttcatcaggtgtacatcagggcagacaaagggccagtgaccagcattctcccgtctcaggtaaacagttctccagttataaaccaccttcttt

SEQ ID NO: 183510 - DNA, 120 bp, Artificial Sequence
  ENSG00000111490_15 (sequence is synthesized)
taggaaagaagatgaaaatgactaacagagctgccaagaatgctgtcatccacatccctggtcacacaggagggaaaatatctcctgtcccctacgaagaccttaagacgaagctcaact

SEQ ID NO: 183511 - DNA, 120 bp, Artificial Sequence
  ENSG00000111490_16 (sequence is synthesized)
ccccgtggcgaactcacatccgagtccacaaaaagaacatgccaaggaccaagagtcatccgggctgtggggacaccgtagggctgatagatgagcagaacgaggccagcaagaccaatg

SEQ ID NO: 183512 - DNA, 120 bp, Artificial Sequence
  ENSG00000111490_17 (sequence is synthesized)
ggctgggggcagcagaggcattcccctctggttgtacagcgacagctgggagagaaggcagcagccctgaaggcagtaccaggaggacgatcgaggggcagtctccggagccggtgttcg

SEQ ID NO: 183513 - DNA, 120 bp, Artificial Sequence
  ENSG00000111490_18 (sequence is synthesized)
gagatgctgatgtggatgtgtctgcagttcaggcgaagttgggagccctggaactgaaccagagggatgctgcagctgaaactgagctcagggtgcacccaccctgccagcggcactgcc

SEQ ID NO: 183514 - DNA, 120 bp, Artificial Sequence
  ENSG00000111490_19 (sequence is synthesized)
cagagccgccgagtgcacccgaagaaaacaaagccaccagcaaagctccccaaggcagcaactcaaaaacccccatctttagcccttttcccagcgtcaagcccctgcggaaatctgcta

SEQ ID NO: 183515 - DNA, 120 bp, Artificial Sequence
  ENSG00000111490_20 (sequence is synthesized)
ctgccaggaacttgggattatatggccctacagaaagaaccccaactgtgcactttcctcaaatgagtaggagcttcagcaaacccggcggtggaaacagtggcactaaaaaacgatgat

SEQ ID NO: 183516 - DNA, 120 bp, Artificial Sequence
  ENSG00000111490_21 (sequence is synthesized)
gtctccccgaaactttgtatctggactcaccttttcacagtagtataagggttgcagctgaatggctctaaaagagttttatttgtccagtgaaaatgaataggttcagggatgagcaac

SEQ ID NO: 183517 - DNA, 120 bp, Artificial Sequence
  ENSG00000111490_22 (sequence is synthesized)
agcccataaaaaatgggaactggaagttttataataggagttagaacagggctgttttcccagctacttgctaactgacgaagtggattcttgtggcaaaataaatattgtggttttata

SEQ ID NO: 183518 - DNA, 120 bp, Artificial Sequence
  ENSG00000111490_23 (sequence is synthesized)
gtgtgaagttttcccaatttttcattgtgagctgtttaaaaaagactatatctagattgttaactctcgtccatccttctgttctgggggccttcagagtccctgtgacagcacccccaa

SEQ ID NO: 183519 - DNA, 120 bp, Artificial Sequence
  ENSG00000111490_24 (sequence is synthesized)
accttccagttctctgggtgttactaatactcaagcatgcacataccagcttgctaggacagaaactgtaaaaagaaagtaagtttcttcgttacaaaaaacttcctgattttccttttc

SEQ ID NO: 183520 - DNA, 120 bp, Artificial Sequence
  ENSG00000111490_25 (sequence is synthesized)
atgctttacggaggggattgtgtcgtgtgagatttcccacagtaccagtttcaaattttttttttattcttatgctaaatcataggagaaaaatctagatagcctttctttaactgtcta

SEQ ID NO: 183521 - DNA, 120 bp, Artificial Sequence
  ENSG00000111490_26 (sequence is synthesized)
tttctacctgcaaaatgaagaaaacctttcatctgttgaaatttcaatcgataacccagctgaagatcttatgcacaggacacacttggcatatgctttacgcagttgctccggacagct

SEQ ID NO: 183522 - DNA, 120 bp, Artificial Sequence
  ENSG00000111490_27 (sequence is synthesized)
tgctcgcgccactgagcttttcctgaggtttgtgttcgcctctcaaggagagctttgatcctcagtggtacggatgacttgatgggctccatgcggagcctggcctgcatcccccaccac

SEQ ID NO: 183523 - DNA, 120 bp, Artificial Sequence
  ENSG00000111490_28 (sequence is synthesized)
acagctcactcacccaccagctctagactgcagacgcacaaggcctctgctcagaagccagaacacagcacctgtgactctgttacttgaattttgtgctttttgattggagtcctttgt

SEQ ID NO: 183524 - DNA, 120 bp, Artificial Sequence
  ENSG00000111490_29 (sequence is synthesized)
tgagtactttgttaattgaacactgcctttctctggagaaggccccagtgctttctagctccctctcactcctgccctttctagctctctctcacccagcgggtcagggatagcacctct

SEQ ID NO: 183525 - DNA, 120 bp, Artificial Sequence
  ENSG00000111490_30 (sequence is synthesized)
tgtctccactatgcagatgggaactctgagccacacagaggtgaagtagcacttcagttactcaaggtcagtactctcggtattccaagtgacttagccacatttccttcagtgcaatag

SEQ ID NO: 183526 - DNA, 120 bp, Artificial Sequence
  ENSG00000111490_31 (sequence is synthesized)
gtgggtttaatgctctttgtacacagatgtattggctacatagcgtgtaaaaaccaagactgggaagccattcactaaaatccctcctgactcaaaggacctgtctccagatggtacaga

SEQ ID NO: 183527 - DNA, 120 bp, Artificial Sequence
  ENSG00000111490_32 (sequence is synthesized)
ttatttggctgaacagaaggctcactcctcaatccccttctcctcgccatcattagaggaatagactcagccttcatgtttgtctctggaagacgattggcgatacttgcaggaatattg

SEQ ID NO: 183528 - DNA, 120 bp, Artificial Sequence
  ENSG00000111490_33 (sequence is synthesized)
ttgatgcagccaatattaatttgagctaatggattgttaattctgaaacgaaaactgtaactgtagagcaggcttttactatgagaggtactactttttataatagagaatgtggttgtg

SEQ ID NO: 183529 - DNA, 120 bp, Artificial Sequence
  ENSG00000111490_34 (sequence is synthesized)
tgggctttttttgaacagaaaacacaacaatgacctataccgtgagaaaagccattttatcttcttcgtggtatttttacccccaaaggaactgaagatggaaaatatgactaataagtt

SEQ ID NO: 183530 - DNA, 120 bp, Artificial Sequence
  ENSG00000111490_35 (sequence is synthesized)
attgcagttttggtcttgaattctgtgccatctgaagttagcatccagcttcttaaaaagcagccacgcctacagcctgttttttgggaaggctgtaggtggagagatgggcttattttg

SEQ ID NO: 183531 - DNA, 120 bp, Artificial Sequence
  ENSG00000111490_36 (sequence is synthesized)
cataccaccctcagggcccagagacccactgcattttccaaagttaagcaaatgacaccattttcttccatcagctaaactttacagataatagtgtttccacctcatatccttttcttt

SEQ ID NO: 183532 - DNA, 120 bp, Artificial Sequence
  ENSG00000111490_37 (sequence is synthesized)
gccccttctcaaatgagtcagaatagtcatgttccccttgagggatgtctgacttgaatggagaattgttctttcctctcttgaatcagctcactagctccctgatggtctgggttcaag

SEQ ID NO: 183533 - DNA, 120 bp, Artificial Sequence
  ENSG00000111490_38 (sequence is synthesized)
gaaatggttaatgaggtagaggccacttatacaagtccttgggattgtaccattgctgtccacaaacttagtatcaacaacacatgctgtgccctgtgaacactctcctctcacctattt

SEQ ID NO: 183534 - DNA, 120 bp, Artificial Sequence
  ENSG00000111490_39 (sequence is synthesized)
ccagggttggtcttcctgagaaggggatggatgaggtaacacacagtttgggatacgtatctgttgaatgaatgaataagtgaaaggataatagtcctctgaggtaaaaatggccttgtc

SEQ ID NO: 183535 - DNA, 120 bp, Artificial Sequence
  ENSG00000111490_40 (sequence is synthesized)
agaattttgaaaatccaacagattcctattaaagcactctgtgtaccaataacatgcatgcattgtaccaagtaatcacaatgtgaattggtcaatttatgagccttgcctactttagaa

SEQ ID NO: 183536 - DNA, 120 bp, Artificial Sequence
  ENSG00000111490_41 (sequence is synthesized)
aataaagaaacctgcagtagcctctaccacacagcatgtacaaagaccagtatggacttgctatcttccctatgtattggacactgtatgcaaacaccagaagtacttaacaagtagtgg

SEQ ID NO: 183537 - DNA, 120 bp, Artificial Sequence
  ENSG00000111490_42 (sequence is synthesized)
tttcttgatttttagatatgtctgtagcctcttagcccttttgccgggaatcaactcattctgatgcctctgcacctcagttcctcttacaaaagcctccagatgatctaaatctagtta

SEQ ID NO: 183538 - DNA, 120 bp, Artificial Sequence
  ENSG00000111490_43 (sequence is synthesized)
gcaatgtcagcctgtggactgcagctgtttgggacattgtattcctttgtttgtctcttgttgttctgaaggattgtattgatcacaaagctatatgcataaagattctcattgttgtaa

SEQ ID NO: 183539 - DNA, 120 bp, Artificial Sequence
  ENSG00000111490_44 (sequence is synthesized)
ctgttctgccattttctgagtgcaagcatggaacactgttgtgacagtcccttctcccttcttccttcttccttcacccccaaccccagaccccccttggtcacatgaaccagggaaaca

SEQ ID NO: 183540 - DNA, 120 bp, Artificial Sequence
  ENSG00000111490_45 (sequence is synthesized)
gcccaataagctctatctcccccagtctaatcgctgggttgcagggtggcctgtgacctgcccagcatttgcagactcgctggttcctgaatatgagtaagcacagagtttacctagaga

SEQ ID NO: 183541 - DNA, 120 bp, Artificial Sequence
  ENSG00000111490_46 (sequence is synthesized)
gtttacctaaaattaacctttagatctactatttatttttgtcttaataaaatgaacaataaatatagtttagctgcatggcattaaggattctgtatgaatagatgtatagttgctgcc

SEQ ID NO: 183542 - DNA, 120 bp, Artificial Sequence
  ENSG00000111490_47 (sequence is synthesized)
atctccccatataaaaactctctttacatcgtttctgagccactttctttgctgtctgcagcatttaaaatatattatttttcctaattagaaaagtcacaggttttagaaaattgggaa

SEQ ID NO: 183543 - DNA, 120 bp, Artificial Sequence
  ENSG00000111490_48 (sequence is synthesized)
aacaaaaagagcataaagaatcatcaatactctgatatagatatagatctttccagtacgtttgtgtatgtgtgtacacgccattatctacaaaaaagttatgttgaacatggtagttta

SEQ ID NO: 183544 - DNA, 120 bp, Artificial Sequence
  ENSG00000111490_49 (sequence is synthesized)
agctgtctttctggtaaatgctcttatacaatatgatttttagtgactaatattccctaatgtgttcatgccagaattcacataaccagtaccttgtcaaataggaggtttctgattaga

SEQ ID NO: 183545 - DNA, 120 bp, Artificial Sequence
  ENSG00000111490_50 (sequence is synthesized)
tagtagtagagacagtatcctgttacatgtatgtacatagcccgaattattttcttaggatatgcgtatagaagtggagttgaagggtcaggaaatatgtccatttttaagatacatata

SEQ ID NO: 183546 - DNA, 120 bp, Artificial Sequence
  ENSG00000111490_51 (sequence is synthesized)
tctccaaattgccattcttaaaggttggagttatacaagtagtgaatgagaatgcctgcttctctacatcctggaagaggcagcagtctctttccttttttttcctttctatgacttcta

SEQ ID NO: 183547 - DNA, 120 bp, Artificial Sequence
  ENSG00000111490_52 (sequence is synthesized)
gtgtggaagtgccaacagaagtgttttagaagcagtgataatgaacactcataacacccatacctcattcctgacttttaaaagaagcattaagtaagatgttgaggtttctggtaggtg

SEQ ID NO: 183548 - DNA, 120 bp, Artificial Sequence
  ENSG00000111490_53 (sequence is synthesized)
cctattattaggttaagaaaattcccttttattctttgcttgctaagagttttcttcatcaacaggtattgaatttcataaaaagaactttaattgtatcttttgagaagggaatagtac

SEQ ID NO: 183549 - DNA, 120 bp, Artificial Sequence
  ENSG00000111490_54 (sequence is synthesized)
ttgagacttggtatcctgaactcaaagaaatagccattactaggttttgtcaaagaataccagatattttagagttggaagttatgcagtaaaagctttatgtgcaaatgttcattgaag

SEQ ID NO: 183550 - DNA, 120 bp, Artificial Sequence
  ENSG00000111490_55 (sequence is synthesized)
tattaaatgtactaatggaaacctgaaaacaatataaacatctgggaataggggagatgtttggatgaattatgattcatccccaggatggaaatgtgaaggccggtgagtatttggacc

SEQ ID NO: 183551 - DNA, 120 bp, Artificial Sequence
  ENSG00000111490_56 (sequence is synthesized)
attgaagtgggagttatctgttatccacatcaggcagctcagagtaaagtcagcaagtctacagtcatagagccaccaggatacagtgatggatgggaggcctttgctggacagtggctg

SEQ ID NO: 183552 - DNA, 120 bp, Artificial Sequence
  ENSG00000111490_57 (sequence is synthesized)
aaggcagaactgttggagtggttcttccacaaaggcagccagtgctcacctgaatggggactggtactgtaggtattgggtcagctttcatgccgttccctgctggccatctcccaatgc

SEQ ID NO: 183553 - DNA, 120 bp, Artificial Sequence
  ENSG00000111490_58 (sequence is synthesized)
tgaatgtctgactcagttcaggctgctgtaacaaagtaccatagactgaggtggcttaaacacagacatttctttctcacagttctggaggctgagaagtcaaagatcaacgtgtctgca

SEQ ID NO: 183554 - DNA, 120 bp, Artificial Sequence
  ENSG00000111490_59 (sequence is synthesized)
aatttggtatctggtgaggaagggccctcttcctggtttgcagatggctaccttctcactgtgtcctcacacaatggagaaagggagtatgttttggtctcttcctcttctgataagggc

SEQ ID NO: 183555 - DNA, 120 bp, Artificial Sequence
  ENSG00000111490_60 (sequence is synthesized)
actaacctcatcatgagggtcccatcctcctggtgtcatctaaacctaattacctcccaatggccccgccttcaaataccatcacgttgaaggttgcttccttcctggtcgtttgctctg

SEQ ID NO: 183556 - DNA, 120 bp, Artificial Sequence
  ENSG00000111490_61 (sequence is synthesized)
gtgagaccaaatgacctgcaaagtgtcacttgattccattctctccatcccttccatcccaggcaatctttatctagctacaccaacctgtgccccaggggcttcaagagttgttgttgt

SEQ ID NO: 183557 - DNA, 120 bp, Artificial Sequence
  ENSG00000111490_62 (sequence is synthesized)
tttaacattaaaaaaccagaaagttcacttgtttcttagtgtttacatccttgctataacaattctagttttcctttaggcaatgctgatcactgggaaggaggtggatcaattctccta

SEQ ID NO: 183558 - DNA, 120 bp, Artificial Sequence
  ENSG00000111490_63 (sequence is synthesized)
tgggaccaacagttttctgggaagaaacttcctgatacctcagcctaggaatctccctatccctggagagtccaggaatctatattaaaacatgaaacaaagcaaaaaataaaaaaaaac

SEQ ID NO: 183559 - DNA, 120 bp, Artificial Sequence
  ENSG00000111490_64 (sequence is synthesized)
ctgcgccttctcgcgcacgggagagcgctctgggtagaggccgggcccgggcagcaggtggccccaggtagctcagtggcgtggcagtctccttctcgcccggtccggagcggaggggag

SEQ ID NO: 183560 - DNA, 80 bp, Artificial Sequence
  ENSG00000111490_65 (sequence is synthesized)
ggatccagagcccgctggcgccgcgcccgggagggcaccaccggcgaggacgaagccgcgcctcctcccggaactggccg

SEQ ID NO: 183561 - DNA, 120 bp, Artificial Sequence
  ENSG00000111490_66 (sequence is synthesized)
ggcagccgcgcgccggggaccatggacgtccttcccaccggcgggggccgcccggggctccggacggagctggaattccgcggcggcggtggcgaggcgaggctggagagtcaggaggaa

SEQ ID NO: 183562 - DNA, 120 bp, Artificial Sequence
  ENSG00000111490_67 (sequence is synthesized)
gtggcgaggcgaggctggagagtcaggaggaagaaacgattcctgcagctcccccagccccgcgcctccggggagcggcggagcggccgcggcgctcccgggacacgtgggacggcgatg

SEQ ID NO: 183563 - DNA, 120 bp, Artificial Sequence
  ENSG00000111490_68 (sequence is synthesized)
gagggccgccggcggcgccgcgacagcctcgacagctccaccgaggcctcgggctccgacgtggtcctgggcggccgcagcggtgccggcgactcccgcgtgctgcaggagctgcaggag

SEQ ID NO: 183564 - DNA, 120 bp, Artificial Sequence
  ENSG00000111490_69 (sequence is synthesized)
tgctgcaggagctgcaggagcgaccgagccagcggcatcagatgctgtacctgcggcagaaagacgctaatgaactgaagacgatccttcgagagctaaagtacagaattggcatccagt

SEQ ID NO: 183565 - DNA, 120 bp, Artificial Sequence
  ENSG00000111490_70 (sequence is synthesized)
cggccaagttacttcggcatctgaagcagaaagataggcttctgcataaagtgcagaggaactgtgatattgtgactgcctgcttgcaggctgtgtcacagaagagaagagttgatacca

SEQ ID NO: 183566 - DNA, 120 bp, Artificial Sequence
  ENSG00000111490_71 (sequence is synthesized)
tccacaggaataccaaaggaatggaggagaaaggaccttcaccgcacaggctgtagttcttactgtggccaggaggctgagcaggacagggttgtgttgaagcgggtgctgctggcctat

SEQ ID NO: 183567 - DNA, 120 bp, Artificial Sequence
  ENSG00000111490_72 (sequence is synthesized)
gatgcctgctggcttccctgcgctcggcggctcccgcggtgccccgctcgcaggaagccagaccttgcgagaggtgtgtgggggcggagagtggcacaggtttgacactgcaggtcggag

SEQ ID NO: 183568 - DNA, 120 bp, Artificial Sequence
  ENSG00000111490_73 (sequence is synthesized)
gaggaagacagtggctgcaaaggcaaaatcgggtgttattttcccaagagtcccttcagcgtgagtgccggggtcagctcgaactggagcctgtaatttgtgagtgcgagtggggagcag

SEQ ID NO: 183569 - DNA, 120 bp, Artificial Sequence
  ENSG00000111530_0 (sequence is synthesized)
cttttgccctagggagcgagtgcggagcgagtgggagcgagacggccctgagtggaagtgtctggctccccgtagaggcccttctgtacgccccgccgcccatgagctcgttctcacgcg

SEQ ID NO: 183570 - DNA, 120 bp, Artificial Sequence
  ENSG00000111530_1 (sequence is synthesized)
aacagcgccgtcgttaggctggctctgtagcctcggcttaccccgggacaggcccacgcctcgccagggagggggcagcccgtcgaggcgcctccctagtcagcgtcggcgtcgcgctgc

SEQ ID NO: 183571 - DNA, 120 bp, Artificial Sequence
  ENSG00000111530_2 (sequence is synthesized)
gaccctggaagcgggagccgccgcgagcgagaggaggagctccagtggcggcggcggcggcggcagcggcagcgggcagcagctccagcagcgccagcaggcgggatcgaggccgtcaac

SEQ ID NO: 183572 - DNA, 120 bp, Artificial Sequence
  ENSG00000111530_3 (sequence is synthesized)
atggcgagcgcctcgtaccacatttccaatttgctggaaaaaatgacatccagcgacaaggactttaggtttatggctacaaatgatttgatgacggaactgcagaaagattccatcaag

SEQ ID NO: 183573 - DNA, 120 bp, Artificial Sequence
  ENSG00000111530_4 (sequence is synthesized)
ttggatgatgatagtgaaaggaaagtagtgaaaatgattttgaagttattggaagataaaaatggagaggtacagaatttagctgtcaaatgtcttggtcctttagtgagtaaagtgaaa

SEQ ID NO: 183574 - DNA, 120 bp, Artificial Sequence
  ENSG00000111530_5 (sequence is synthesized)
gaataccaagtagagacaattgtagataccctctgcactaacatgctttctgataaagaacaacttcgagacatttcaagtattggtcttaaaacagtaattggagaacttcctccagct

SEQ ID NO: 183575 - DNA, 120 bp, Artificial Sequence
  ENSG00000111530_6 (sequence is synthesized)
tccagtggctctgcattagctgctaatgtatgtaaaaagattactggacgtcttacaagtgcaatagcaaaacaggaagatgtctctgttcagctagaagccttggatattatggctgat

SEQ ID NO: 183576 - DNA, 120 bp, Artificial Sequence
  ENSG00000111530_7 (sequence is synthesized)
atgttgagcaggcaaggaggacttcttgttaatttccatccttcaattctgacctgtctacttccccagttgaccagccctagacttgcagtgaggaaaagaaccattatcgctcttggc

SEQ ID NO: 183577 - DNA, 120 bp, Artificial Sequence
  ENSG00000111530_8 (sequence is synthesized)
catctggttatgagctgtggaaatatagtttttgtagatcttattgaacatctgttgtcagagttgtccaaaaatgattctatgtcaacaacaagaacctacatacaatgtattgctgct

SEQ ID NO: 183578 - DNA, 120 bp, Artificial Sequence
  ENSG00000111530_9 (sequence is synthesized)
attagtaggcaagctggtcatagaataggtgaataccttgagaagataattcctttggtggtaaaattttgcaatgtagatgatgatgaattaagagagtactgtattcaagcctttgaa

SEQ ID NO: 183579 - DNA, 120 bp, Artificial Sequence
  ENSG00000111530_10 (sequence is synthesized)
tcatttgtaagaagatgtcctaaggaagtatatcctcatgtttctaccattataaatatttgtcttaaatatcttacctatgatccaaattataattacgatgatgaagatgaagatgaa

SEQ ID NO: 183580 - DNA, 120 bp, Artificial Sequence
  ENSG00000111530_11 (sequence is synthesized)
aatgcaatggatgctgatggtggtgatgatgatgatcaagggagtgatgatgaatacagtgatgatgatgacatgagttggaaagtgagacgtgcagctgcgaagtgcttggatgctgta

SEQ ID NO: 183581 - DNA, 120 bp, Artificial Sequence
  ENSG00000111530_12 (sequence is synthesized)
gttagcacaaggcatgaaatgcttccagaattctacaagaccgtctctcctgcactaatatccagatttaaagagcgtgaagagaatgtaaaggcagatgtttttcacgcatacctttct

SEQ ID NO: 183582 - DNA, 120 bp, Artificial Sequence
  ENSG00000111530_13 (sequence is synthesized)
cttttgaagcaaactcgtcctgtacaaagttggctatgtgaccctgatgcaatggagcagggagaaacacctttaacaatgcttcagagtcaggttcccaacattgttaaagctcttcac

SEQ ID NO: 183583 - DNA, 120 bp, Artificial Sequence
  ENSG00000111530_14 (sequence is synthesized)
aaacagatgaaagaaaaaagtgtgaagacccgacagtgttgttttaacatgttaactgagctggtaaatgtattacctggggccctaactcaacacattcctgtacttgtaccaggaatc

SEQ ID NO: 183584 - DNA, 120 bp, Artificial Sequence
  ENSG00000111530_15 (sequence is synthesized)
attttctcactgaatgataaatcaagctcatcgaatttgaagatcgatgctttgtcatgtctatacgtaatcctctgtaaccattctcctcaagtcttccatcctcacgttcaggctttg

SEQ ID NO: 183585 - DNA, 120 bp, Artificial Sequence
  ENSG00000111530_16 (sequence is synthesized)
gttcctccagtggtggcttgtgttggagacccattttacaaaattacatctgaagcacttcttgttactcaacagcttgtcaaagtaattcgtcctttagatcagccttcctcgtttgat

SEQ ID NO: 183586 - DNA, 120 bp, Artificial Sequence
  ENSG00000111530_17 (sequence is synthesized)
gcaactccttatatcaaagatctatttacctgtaccattaagagattaaaagcagctgacattgatcaggaagtcaaggaaagggctatttcctgtatgggacaaattatttgcaacctt

SEQ ID NO: 183587 - DNA, 120 bp, Artificial Sequence
  ENSG00000111530_18 (sequence is synthesized)
ggagacaatttgggttctgacttgcctaatacacttcagattttcttggagagactaaagaatgaaattaccaggttaactacagtaaaggcattgacactgattgctgggtcacctttg

SEQ ID NO: 183588 - DNA, 120 bp, Artificial Sequence
  ENSG00000111530_19 (sequence is synthesized)
aagatagatttgaggcctgttctgggagaaggggttcctatccttgcttcatttcttagaaaaaaccagagagctttgaaactgggtactctttctgcccttgatattctaataaaaaac

SEQ ID NO: 183589 - DNA, 120 bp, Artificial Sequence
  ENSG00000111530_20 (sequence is synthesized)
tatagtgacagcttgacagctgccatgattgatgcagttctagatgagctcccacctcttatcagcgaaagtgatatgcatgtttcacaaatggccatcagttttcttaccactttggca

SEQ ID NO: 183590 - DNA, 120 bp, Artificial Sequence
  ENSG00000111530_21 (sequence is synthesized)
aaagtatatccctcctccctttcaaagataagtggatccattctcaatgaacttattggacttgtgagatcacccttattgcaggggggagctcttagtgccatgctagactttttccaa

SEQ ID NO: 183591 - DNA, 120 bp, Artificial Sequence
  ENSG00000111530_22 (sequence is synthesized)
gctctggttgtcactggaacaaataatttaggatacatggatttgttgcgcatgctgactggtccagtttactctcagagcacagctcttactcataagcagtcttattattccattgcc

SEQ ID NO: 183592 - DNA, 120 bp, Artificial Sequence
  ENSG00000111530_23 (sequence is synthesized)
aaatgtgtagctgcccttactcgagcatgccctaaagagggaccagctgtagtaggtcagtttattcaagatgtcaagaactcaaggtctacagattccattcgtctcttagctctactt

SEQ ID NO: 183593 - DNA, 120 bp, Artificial Sequence
  ENSG00000111530_24 (sequence is synthesized)
tctcttggagaagttgggcatcatattgacttaagtggacagttggaactaaaatctgtaatactagaagctttctcatctcctagtgaagaagtcaaatcagctgcatcctatgcatta

SEQ ID NO: 183594 - DNA, 120 bp, Artificial Sequence
  ENSG00000111530_25 (sequence is synthesized)
ggcagcattagtgtgggcaaccttcctgaatatctgccgtttgtcctgcaagaaataactagtcaacccaaaaggcagtatcttttacttcattccttgaaggaaattattagctctgca

SEQ ID NO: 183595 - DNA, 120 bp, Artificial Sequence
  ENSG00000111530_26 (sequence is synthesized)
tcagtggtgggccttaaaccatatgttgaaaacatctgggccttattactaaagcactgtgagtgtgcagaggaaggaaccagaaatgttgttgctgaatgtctaggaaaactcactcta

SEQ ID NO: 183596 - DNA, 120 bp, Artificial Sequence
  ENSG00000111530_27 (sequence is synthesized)
attgatccagaaactctccttccacggcttaaggggtacttgatatcaggctcatcatatgcccgaagctcagtggttacggctgtgaaatttacaatttctgaccatccacaacctatt

SEQ ID NO: 183597 - DNA, 120 bp, Artificial Sequence
  ENSG00000111530_28 (sequence is synthesized)
gatccactgttaaagaactgcataggtgatttcctaaaaactttggaagacccagatttgaatgtgagaagagtagccttggtcacatttaattcagcagcacataacaagccatcatta

SEQ ID NO: 183598 - DNA, 120 bp, Artificial Sequence
  ENSG00000111530_29 (sequence is synthesized)
ataagggatctattggatactgttcttccacatctttacaatgaaacaaaagttagaaaggagcttataagagaggtagaaatgggtccatttaaacatacggttgatgatggtctggat

SEQ ID NO: 183599 - DNA, 120 bp, Artificial Sequence
  ENSG00000111530_30 (sequence is synthesized)
attagaaaggcagcatttgagtgtatgtacacacttctagacagttgtcttgatagacttgatatctttgaatttctaaatcatgttgaagatggtttgaaggaccattatgatattaag

SEQ ID NO: 183600 - DNA, 120 bp, Artificial Sequence
  ENSG00000111530_31 (sequence is synthesized)
atgctgacatttttaatgttggtgagactgtctaccctttgtccaagtgcagtactgcagaggttggaccgacttgttgagccattacgtgcaacatgtacaactaaggtaaaggcaaac

SEQ ID NO: 183601 - DNA, 120 bp, Artificial Sequence
  ENSG00000111530_32 (sequence is synthesized)
tcagtaaagcaggagtttgaaaaacaagatgaattaaagcgatctgccatgagagcagtagcagcactgctaaccattccagaagcagagaagagtccactgatgagtgaattccagtca

SEQ ID NO: 183602 - DNA, 120 bp, Artificial Sequence
  ENSG00000111530_33 (sequence is synthesized)
cagatcagttctaaccctgagctggcggctatctttgaaagtatccagaaagattcatcatctactaacttggaatcaatggacactagttagatgtttgttcaccatggggaccattac

SEQ ID NO: 183603 - DNA, 120 bp, Artificial Sequence
  ENSG00000111530_34 (sequence is synthesized)
atatgaccatacaatgcactgaattgacaggttaatcataagacatggaaagagaagtgtctaaaagcttcaaaatgttccacttttttttccttcatggagactgtttgtttggctttc

SEQ ID NO: 183604 - DNA, 120 bp, Artificial Sequence
  ENSG00000111530_35 (sequence is synthesized)
ttccattgttgtttttgtagcatttatttcagaaatgtgtatttccataatccagaggttgtaaaaccactagtgttttagtggttacagcaacatttgaaatggaaactaaaagttagg

SEQ ID NO: 183605 - DNA, 120 bp, Artificial Sequence
  ENSG00000111530_36 (sequence is synthesized)
attttatggagtatggagatagggtccagtatctatttaccctgtaatgtttaggattaaaatgttaaaattttgtgaccatgaatttctttcttttataaattttctcatttaaaaatc

SEQ ID NO: 183606 - DNA, 120 bp, Artificial Sequence
  ENSG00000111530_37 (sequence is synthesized)
aaaaatcttgcaaaacaaaaaccatgtttctttttcttgtataactttttgttttcagcaacataaattgatttttagctggcagacaagaatatccatataagatttgttaaccatttc

SEQ ID NO: 183607 - DNA, 120 bp, Artificial Sequence
  ENSG00000111530_38 (sequence is synthesized)
agagagtttggcaatttttaaaagataataaggtatcatttttaagtatgaaaattaacaatatccctgttgcgcacactaattttgcatgagtaagtttacaaatatgtatcgtctgta

SEQ ID NO: 183608 - DNA, 120 bp, Artificial Sequence
  ENSG00000111530_39 (sequence is synthesized)
aagcagcatgtgcagattattcataatatagaagttaaaataagtattagtgcaattttcagatatttatttttgcacagaaaacacattatctggagagaaagaaaggagaatttttga

SEQ ID NO: 183609 - DNA, 120 bp, Artificial Sequence
  ENSG00000111530_40 (sequence is synthesized)
gacttgggttttcttaatgccagtgtgaatttgcagatgttttcagaaaatcaagtcacagtaacaatttgccacttttttctattataaatcttcttacttaaattttgaatatttagt

SEQ ID NO: 183610 - DNA, 120 bp, Artificial Sequence
  ENSG00000111530_41 (sequence is synthesized)
ttttctcagttacccatttgtgtgtgtgtgattccacttagaaattcttaaaaccagatttttctttcattccgtttggatgtctacattccttatcaaaggatataaatactgtgtatg

SEQ ID NO: 183611 - DNA, 120 bp, Artificial Sequence
  ENSG00000111530_42 (sequence is synthesized)
cttttgaattttatttttaggaaaattctgaagccagctatcacaggtttgttagctaataatagtattttcttttagttgagttaggtttttccccatctcctgtagagcgaatttaca

SEQ ID NO: 183612 - DNA, 120 bp, Artificial Sequence
  ENSG00000111530_43 (sequence is synthesized)
tattgtattgggtaagtgttcactacttttcctgattaagggatctgtgctggggaacaaagcttttgcagtaccttatattgtagttaaaattttatttaacatatccttcagtgagct

SEQ ID NO: 183613 - DNA, 120 bp, Artificial Sequence
  ENSG00000111530_44 (sequence is synthesized)
catttcacactgtagcctcttccttaaaatttgtggtgctcctgtaacagtaagaactaattctgaaataaaagacatctcctaatgctgtgcaaacatagtttacatgtattgaaggag

SEQ ID NO: 183614 - DNA, 120 bp, Artificial Sequence
  ENSG00000111530_45 (sequence is synthesized)
gcagttgttaaattgagtgaccaatttaagcaatcagatatttgaaaactgcaccctttagttttgaaactgtgaattagaaacacttttcctgctgtattactacctgctttaacatcc

SEQ ID NO: 183615 - DNA, 120 bp, Artificial Sequence
  ENSG00000111530_46 (sequence is synthesized)
taaatgataacatactgtggttattagattaacagcttgattttgaatgttcagatgataatgcagaagacatcacttctagtaaggattttgactagtgcattgatgttgaagttggtg

SEQ ID NO: 183616 - DNA, 120 bp, Artificial Sequence
  ENSG00000111530_47 (sequence is synthesized)
ccatttcaaaatgtggcaggtgataatcttttaccataatttgcataaaactgtaatagaagtttattttgagatgttagtatattatgtactatgcatttctgtggtatagatgttgtg

SEQ ID NO: 183617 - DNA, 120 bp, Artificial Sequence
  ENSG00000111530_48 (sequence is synthesized)
gatatatttaagtatttggttacatggttttacaataaattacaatactgcaggctctaggactgaacaggagactgacatgcatatgttgtgtgaatgtcttagttgggtaaagttaaa

SEQ ID NO: 183618 - DNA, 120 bp, Artificial Sequence
  ENSG00000111530_49 (sequence is synthesized)
tccaaatacttcaactggctttttcttcagtttgtttgtttttaactttcaagatgcatgttttgttttgttttgctttgtttttgtctcttaagccaattcatttttctaacagttgaa

SEQ ID NO: 183619 - DNA, 120 bp, Artificial Sequence
  ENSG00000111530_50 (sequence is synthesized)
attcttttagtactaaagaaatagatactgctcttttatggctttagtgtttatatacctgtttatatgcatacattaacaaaattagtaacagcagtgcttagaatttcaatgctgtgt

SEQ ID NO: 183620 - DNA, 120 bp, Artificial Sequence
  ENSG00000111530_51 (sequence is synthesized)
catactgatgattaactccatactcctagtggtgatgtggtccagatactggaatggaagtggcaggatgtggagtccagacatagtctaccactcatgctacttactagtaatattaag

SEQ ID NO: 183621 - DNA, 120 bp, Artificial Sequence
  ENSG00000111530_52 (sequence is synthesized)
gtgttaaacttaggaatttgtcacatgtaggttcctgaggagatctaaaagttaatacaaaaccaagctgtttactgattttcatgagaacatttaagttagtttaggtctacctgattt

SEQ ID NO: 183622 - DNA, 63 bp, Artificial Sequence
  ENSG00000111530_53 (sequence is synthesized)
ttcatgagaacatttaagttagtttaggtctacctgatttattttaaaagaaggcagagggct

SEQ ID NO: 183623 - DNA, 80 bp, Artificial Sequence
  ENSG00000111530_54 (sequence is synthesized)
aggaaggaaatttggtatggcagggcctaacctaaaaggttatttataaaatcaatagcactgaatgataatttttttaa

SEQ ID NO: 183624 - DNA, 120 bp, Artificial Sequence
  ENSG00000111530_55 (sequence is synthesized)
tatttataaaatcaatagcactgaatgataatttttttaatgacagtcatgtattttattaatgatatctgaaagctgcttaaccattaggaattacaattctttatggttggagtatga

SEQ ID NO: 183625 - DNA, 120 bp, Artificial Sequence
  ENSG00000111530_56 (sequence is synthesized)
tgatttcatcaaatgtttgaatatttacataatttttatgtaaccataattaaaccaaattagtctttttttcttcatacttttcttcggtaaatagtgaagaaataatgggcatatcta

SEQ ID NO: 183626 - DNA, 120 bp, Artificial Sequence
  ENSG00000111530_57 (sequence is synthesized)
attaaccagttctagtgggtgttgtgatatctttatatctagttcagtctcagatgtatgaatatgattatatagtcatgattgaagttcaaaatgaggaagtatacaaaatcctcagcc

SEQ ID NO: 183627 - DNA, 120 bp, Artificial Sequence
  ENSG00000111530_58 (sequence is synthesized)
actgaaaaattcagttaacttgtttatactcctgtaagctctagttagtcacaagacaaagtatatagtaacactttgtaatgaagtaacattttctgcccacattaattttactaaaga

SEQ ID NO: 183628 - DNA, 120 bp, Artificial Sequence
  ENSG00000111530_59 (sequence is synthesized)
cctaaattgttaaaattaattgccaatctctggatatattatgcttagtaagtgttttgaaattaaagaccttaaacatttcagcaagtaaattttggattctagctctgttttaaattg

SEQ ID NO: 183629 - DNA, 120 bp, Artificial Sequence
  ENSG00000111530_60 (sequence is synthesized)
aatcctaattttcaaaccactgctaccccagattcatacctgtttttgaaatcttgtttatggaatggaaaattgacagtatggtaatagtttattgactgattggacaaaggatattct

SEQ ID NO: 183630 - DNA, 120 bp, Artificial Sequence
  ENSG00000111530_61 (sequence is synthesized)
ggttttaactgacttttccatttaaataaaattcatttgataattttggttgcaaaagtggaacacagtggaagtatttggctacaggctacccaaatctcatcagataaggctgttttc

SEQ ID NO: 183631 - DNA, 120 bp, Artificial Sequence
  ENSG00000111530_62 (sequence is synthesized)
ttaaaggaaatgcaaaatgaaatcatatgttttccttttccaatacagtaaattgcttgttttcctatgaatatcagaaaagattttgtaaacacctttgctgtagtttcaggcaagatc

SEQ ID NO: 183632 - DNA, 120 bp, Artificial Sequence
  ENSG00000111530_63 (sequence is synthesized)
tttcagcaacatgtttttgctctttgtaacttagaaagttagctctgaatccaaaaactactgaagtgagtaatgcatataattttacttttttggaccctataatgccagtgtgtcagg

SEQ ID NO: 183633 - DNA, 120 bp, Artificial Sequence
  ENSG00000111530_64 (sequence is synthesized)
tttcagaatgatatttagtagacagaaatacctaattttgttttggaatcttaataccctgtcctcttcataactttctagtggtgattttagcaagtttaattattttgctgaggtctt

SEQ ID NO: 183634 - DNA, 120 bp, Artificial Sequence
  ENSG00000111530_65 (sequence is synthesized)
agaagacagaaagcttatgctatgtaaagtgacattgtttccagattaggaagtattggaattaatttgctattgccagtaagtaatggttgatggatattaagtgattttagtctagaa

SEQ ID NO: 183635 - DNA, 85 bp, Artificial Sequence
  ENSG00000111530_66 (sequence is synthesized)
aagtaatggttgatggatattaagtgattttagtctagaatgctctcaaaaaaatagtaaagaattgtacttcagggccagatgg

SEQ ID NO: 183636 - DNA, 120 bp, Artificial Sequence
  ENSG00000111530_67 (sequence is synthesized)
tagtgagaccctgtctctaccaaaaagaagaaaaaagaaatcaacaacatgcaaccataagaatggatgagatggccctaaaagaataaggattacatataatgagaagacgtgtgggct

SEQ ID NO: 183637 - DNA, 120 bp, Artificial Sequence
  ENSG00000111530_68 (sequence is synthesized)
gacgtgtgggctgaaatacctagtgaacaatatttaagggaaactgaagtgcaaatggcctcacaggtttgtttttgtgtttaagacaaggtctcactctgttgcctggactggagtaca

SEQ ID NO: 183638 - DNA, 81 bp, Artificial Sequence
  ENSG00000111530_69 (sequence is synthesized)
gtataggtgtgtgccaccacgtccagctaatttttttatttccttgtggagatggggtctcatgaccttgtccaggatgat

SEQ ID NO: 183639 - DNA, 120 bp, Artificial Sequence
  ENSG00000111530_70 (sequence is synthesized)
ctcaaactcctgggctcaagcaatcctgtgttggcctcctaaactgctgagattattgcaagtgcctccttgcccagccacatgttgttgatttcttttttctttttttttctttcttaa

SEQ ID NO: 183640 - DNA, 64 bp, Artificial Sequence
  ENSG00000111530_71 (sequence is synthesized)
aaactgctgagattattgcaagtgcctccttgcccagccacatgttgttgatttctggagtctt

SEQ ID NO: 183641 - DNA, 62 bp, Artificial Sequence
  ENSG00000111530_72 (sequence is synthesized)
ctcccccagccagtttcttaatctatacatctagcccagtccatgcccctgtttcagactat

SEQ ID NO: 183642 - DNA, 120 bp, Artificial Sequence
  ENSG00000111530_73 (sequence is synthesized)
ctatacatctagcccagtccatgcccctgtttcagactattatatccaaccacctgctatacatctcataaaggtatctcaaacacagcatatctaaagctgaagtcatcatcttgccct

SEQ ID NO: 183643 - DNA, 120 bp, Artificial Sequence
  ENSG00000111530_74 (sequence is synthesized)
ggtttttcctgtctctttgctgatggcatcccatttacccagtcattcaaactggaaatctaaaagcctcacttagcaagagtttggaggcagaatatgataaagaacaaggactctggg

SEQ ID NO: 183644 - DNA, 88 bp, Artificial Sequence
  ENSG00000111530_75 (sequence is synthesized)
ttgctaaaaaaacacaaagaaattagctagacgtggtggcacatgcctgtagtcccagctgtgtgggaggctgaggcaggggaattgc

SEQ ID NO: 183645 - DNA, 120 bp, Artificial Sequence
  ENSG00000111530_76 (sequence is synthesized)
ctgtctcaaaaaaaacaaggactctacagatagatagacatcatatatcatattagtttgaatcctggctgttagctgttagacttgggcaaataatttaacctcaactttccctatcta

SEQ ID NO: 183646 - DNA, 120 bp, Artificial Sequence
  ENSG00000111530_77 (sequence is synthesized)
taaaatgggaattaaaatatttgcaccttatagggttattgtgaggattaaataggaacattgtataaagcacttaaaacagtacctgggacatactaagtaatataattgttaactctt

SEQ ID NO: 183647 - DNA, 120 bp, Artificial Sequence
  ENSG00000111530_78 (sequence is synthesized)
actagcattctgtcccttttatttcctaaatatctctcatgcccatctcctaaatatctctttcctaaatatctctcatgcttttggcttaagacctcttttcctccttatctattgact

SEQ ID NO: 183648 - DNA, 120 bp, Artificial Sequence
  ENSG00000111530_79 (sequence is synthesized)
ggactgcggcaaatgcctgctaatcgttatttttgtgttcattcatttagcaagccaatttattacgcgcttagggtgctgccagggctacaaaagctgttgagactgtacttgatatga

SEQ ID NO: 183649 - DNA, 120 bp, Artificial Sequence
  ENSG00000111530_80 (sequence is synthesized)
agaagcttgctgattatcatgggaagactgacataaggaagcaccataaaattctgctgtatgagaggtatacacgggatactgggggttaataattgagggtatggtccattcaacatg

SEQ ID NO: 183650 - DNA, 120 bp, Artificial Sequence
  ENSG00000111530_81 (sequence is synthesized)
agtgagacagaaacaattcataaaggagatgaaatgtcttgaggaatgagctcttagaagaatagttttcaaatgagtgtgcatcacagtcacctgtaagacttattaaaacagatcgct

SEQ ID NO: 183651 - DNA, 120 bp, Artificial Sequence
  ENSG00000111530_82 (sequence is synthesized)
gggccctacacccagaggctgtggttcagtaggctgtagtaaaccagtaatttgtatttctatgacgttcccaggttctaatgctgttccccaaggccacaccttggaaaccaccacatt

SEQ ID NO: 183652 - DNA, 120 bp, Artificial Sequence
  ENSG00000111530_83 (sequence is synthesized)
aaaatacccagaaggcattaattcccagtccttcctctacacagctgcaaaacaatggtcctgaccatttcatctttgcactacatccttcactgtctctcttttgcccataggataagt

SEQ ID NO: 183653 - DNA, 120 bp, Artificial Sequence
  ENSG00000111530_84 (sequence is synthesized)
acaaactagatctggttactgcctgccccaccagcctcagcatctctcacaactaggactaactttttcttctgacaactataaaatatttcccttgccttctcaagtttgctcaaggtc

SEQ ID NO: 183654 - DNA, 120 bp, Artificial Sequence
  ENSG00000111530_85 (sequence is synthesized)
aagttatgccttttgcctggaatgacttgacttctcttttgttttacttagctggctgcttttcatcttgtaggttaggtcaaggactccaggaagtcttccctggacaagtaatgaaga

SEQ ID NO: 183655 - DNA, 120 bp, Artificial Sequence
  ENSG00000111530_86 (sequence is synthesized)
gggcataatccaagggccaactcccatgtttggaacctgactccattttcaggcacgtaatattgtcaaattccttttaaaagcacctgtctgtctgttaacgttggtgcagatactgct

SEQ ID NO: 183656 - DNA, 120 bp, Artificial Sequence
  ENSG00000111530_87 (sequence is synthesized)
attcccctcctccataccattgctgatggttactgagggtatgggaagggccgactagtccagctgttcacaaacagcccttaatgtcaaactgaatactgccaacgtagttccagtttc

SEQ ID NO: 183657 - DNA, 120 bp, Artificial Sequence
  ENSG00000111530_88 (sequence is synthesized)
tgtatctaaagactcagcttggagtcacttgtctggactaaaagtaacccctccttgtctggtttgtgactttctgtactctgatgcccccagctttctgccttctagaaatttgtcaga

SEQ ID NO: 183658 - DNA, 120 bp, Artificial Sequence
  ENSG00000111530_89 (sequence is synthesized)
atttccaaaattcttgggccttccttcttgctctatatatggttttggattcattccttttaaaaaatatttactgtcatttcagtagaattttgacacaataaatataagcacatcaga

SEQ ID NO: 183659 - DNA, 120 bp, Artificial Sequence
  ENSG00000111530_90 (sequence is synthesized)
cccacccttttttccccttctggccaaggagggagggaggtggctgtccttacagatgttcataggaatccctttggacaattaagaaaattaaagcgtgaagccttattttccttagaa

SEQ ID NO: 183660 - DNA, 120 bp, Artificial Sequence
  ENSG00000111530_91 (sequence is synthesized)
ataaatgttaaatgaatattttgattgaacttgtatgtaatatgaatttcagtgaaggatttttatatgttggagcaagattttatactgtgtgtaccatgactgcagactagagttatg

SEQ ID NO: 183661 - DNA, 120 bp, Artificial Sequence
  ENSG00000111530_92 (sequence is synthesized)
ccaacctatgcagtgagggaagagataaccaaaatattgcatcctgattagttcactgtttccagtattaattttactttgcgtcagtatttgctatgtaaaatgtaacaccattcagac

SEQ ID NO: 183662 - DNA, 120 bp, Artificial Sequence
  ENSG00000111530_93 (sequence is synthesized)
agttgttttttactggttgagtctttcttcctgctcccccaaccctgtttttaaaaactctatgataagtagtaaattatcttagccttgtactatctctttctagtgtgtgtgtgtaga

SEQ ID NO: 183663 - DNA, 120 bp, Artificial Sequence
  ENSG00000111530_94 (sequence is synthesized)
gtgaagattttgataagcatattgtaaactataaagtgcaaaagtaataggcagtgtaacaccagttgacgtgtaagaaagatccagagccctttttattggaggaggaagtggcagtgg

SEQ ID NO: 183664 - DNA, 120 bp, Artificial Sequence
  ENSG00000111530_95 (sequence is synthesized)
atgcaaaatgctgtgtgcccacttgcttagtgaatagtccctagatcctttccctcaaaaaagtcccgacagattttgctgtttaaagtataaatctgtaactttttggcctgtcttaac

SEQ ID NO: 183665 - DNA, 120 bp, Artificial Sequence
  ENSG00000111530_96 (sequence is synthesized)
attggaccatagttgctacccatggagggttttcttagcattgtcttgattaagtctcctgagctacctttggggctagtctgaattgtaactgtatcatttacctgaatgaggaatttt

SEQ ID NO: 183666 - DNA, 120 bp, Artificial Sequence
  ENSG00000111530_97 (sequence is synthesized)
tgtttttcaatataatatactgtgtttaatatcaagaattttgttataggacatggaacttttcagatatacaaaacaatctgtagaagctacttgagagaaatcatactgcgtcttatg

SEQ ID NO: 183667 - DNA, 120 bp, Artificial Sequence
  ENSG00000111530_98 (sequence is synthesized)
tttggataatgaattttgcatataagtgttctttgttttcctgtgtgttcgtctccatttaaaatgtgaacagtaaaagggtgatttgaaaaatgaaaaatatatgcattgtgtcttttt

SEQ ID NO: 183668 - DNA, 120 bp, Artificial Sequence
  ENSG00000111530_99 (sequence is synthesized)
catctactcttccatttagggcttttggccaagcaggacaaaagtggtaactcagcagtaattgagccatactacccgaactcctactcttaggtttccatgtgtggtagtgacctgagc

SEQ ID NO: 183669 - DNA, 120 bp, Artificial Sequence
  ENSG00000111530_100 (sequence is synthesized)
ctctcaaagttcaatgaagagggcctccccaccaagaagtaaaaggatgtgcttgtttaattctatgagtttatagtccaagagaaaaaggtttatgggttatcaggttttacatggatt

SEQ ID NO: 183670 - DNA, 120 bp, Artificial Sequence
  ENSG00000111530_101 (sequence is synthesized)
aatctgaataactggtcaactctgttatgatagtggaaacttattatgaaattgtgttccagttcagtaattttctagttctatgattctcaattctggtgcacatgagctttaaaaaat

SEQ ID NO: 183671 - DNA, 120 bp, Artificial Sequence
  ENSG00000111530_102 (sequence is synthesized)
atggcgagcgcctcgtaccacatttccaatttgctggaaaaaatgacatccagcgacaaggactttagttcctcttgtcaggtaaaaccaacttaggaactcggggtttcagtctcatgt

SEQ ID NO: 183672 - DNA, 120 bp, Artificial Sequence
  ENSG00000111530_103 (sequence is synthesized)
agagatgtttaatacggacctggtgaatatgaagctttattacagcagttctgttcaggagatcggtactgttggttccaaagtgttgtaatatgcatagtgaagatttgttatattttt

SEQ ID NO: 183673 - DNA, 120 bp, Artificial Sequence
  ENSG00000111530_104 (sequence is synthesized)
ttttacaggttatctttgtttttatttttccttgcacgcttcggtgattgttgcattctttcccgcctcccatctcttcacaaataagttctcaatctaaaaaaaaaaaaaaaaagaaaa

SEQ ID NO: 183674 - DNA, 120 bp, Artificial Sequence
  ENSG00000111530_105 (sequence is synthesized)
agtctccagcccaccggtccgctggcctcccgatccctgcggagcccctttcctctcccctcttgcaaccccctccccccattctttctcctaggcagttgcccgccgcggtctctaggc

SEQ ID NO: 183675 - DNA, 120 bp, Artificial Sequence
  ENSG00000111530_106 (sequence is synthesized)
cccgtttgcttgtctcagcgcccccacatccttccctgccccaccaggaggcgattcttgcgtctcaggtagcgcgaaggggctaaaccacccaccattgtggagaagggagttgctcta

SEQ ID NO: 183676 - DNA, 120 bp, Artificial Sequence
  ENSG00000111530_107 (sequence is synthesized)
ctaggccgccttgctcgctggggcccaagctgctgcccactcggggacccggcagcctcctctctgcccgcaggtttatggctacaaatgatttgatgacggaactgcagaaagattcca

SEQ ID NO: 183677 - DNA, 120 bp, Artificial Sequence
  ENSG00000111536_0 (sequence is synthesized)
attagtatctcttgggctgctgtgagtgacacacgctgagtggggtgaagggaaatgctggtgaatttcattttgaggtgtgggttgctgttagtcactctgtctcttgccattgccaag

SEQ ID NO: 183678 - DNA, 120 bp, Artificial Sequence
  ENSG00000111536_1 (sequence is synthesized)
cacaagcaatcttccttcaccaaaagttgttacccaaggggaacattgtcccaagctgttgacgctctctatatcaaagcagcatggctcaaagcaacgattccagaagaccgcataaaa

SEQ ID NO: 183679 - DNA, 120 bp, Artificial Sequence
  ENSG00000111536_2 (sequence is synthesized)
aatatacgattattaaaaaagaaaacaaaaaagcagtttatgaaaaactgtcaatttcaagaacagcttctgtccttcttcatggaagacgtttttggtcaactgcaattgcaaggctgc

SEQ ID NO: 183680 - DNA, 120 bp, Artificial Sequence
  ENSG00000111536_3 (sequence is synthesized)
aagaaaatacgctttgtggaggactttcatagccttaggcagaaattgagccactgtatttcctgtgcttcatcagctagagagatgaaatccattaccaggatgaaaagaatattttat

SEQ ID NO: 183681 - DNA, 120 bp, Artificial Sequence
  ENSG00000111536_4 (sequence is synthesized)
ttgattttacagttattttgaaatacaataagaactgctagaaatatgtttataacagtctatttcttttaaaaactttttaacataatactgacggcatgttaggtgattcagaataga

SEQ ID NO: 183682 - DNA, 120 bp, Artificial Sequence
  ENSG00000111536_5 (sequence is synthesized)
caagaaggatttagtaaattaacgttttggatataagttgtcactaatttgcacattttctgtgttttcaaataatgtttccattctgaacatgttttgtcattcacaagtacattgtgt

SEQ ID NO: 183683 - DNA, 120 bp, Artificial Sequence
  ENSG00000111536_6 (sequence is synthesized)
caacttaatttaaagtatgtaacctgaattaactcgtgtaatatttgtgtgtggagtgggatgtggggggtggagggggaatgacagatttctggaatgcaatgtaatgttactgagact

SEQ ID NO: 183684 - DNA, 120 bp, Artificial Sequence
  ENSG00000111536_7 (sequence is synthesized)
taaatagatgttatgtatatgattgtctgtttaagtgtttgaaaattgttaattatgcccagtgtgaacttagtacttaacacattttgattttaattaaataaattgggtttccttctc

SEQ ID NO: 183685 - DNA, 120 bp, Artificial Sequence
  ENSG00000111537_0 (sequence is synthesized)
acattgttctgatcatctgaagatcagctattagaagagaaagatcagttaagtcctttggacctgatcagcttgatacaagaactactgatttcaacttctttggcttaattctctcgg

SEQ ID NO: 183686 - DNA, 120 bp, Artificial Sequence
  ENSG00000111537_1 (sequence is synthesized)
aaacgatgaaatatacaagttatatcttggcttttcagctctgcatcgttttgggttctcttggctgttactgccaggacccatatgtaaaagaagcagaaaaccttaagaaatatttta

SEQ ID NO: 183687 - DNA, 120 bp, Artificial Sequence
  ENSG00000111537_2 (sequence is synthesized)
atgcaggtcattcagatgtagcggataatggaactcttttcttaggcattttgaagaattggaaagaggagagtgacagaaaaataatgcagagccaaattgtctccttttacttcaaac

SEQ ID NO: 183688 - DNA, 120 bp, Artificial Sequence
  ENSG00000111537_3 (sequence is synthesized)
tttttaaaaactttaaagatgaccagagcatccaaaagagtgtggagaccatcaaggaagacatgaatgtcaagtttttcaatagcaacaaaaagaaacgagatgacttcgaaaagctga

SEQ ID NO: 183689 - DNA, 120 bp, Artificial Sequence
  ENSG00000111537_4 (sequence is synthesized)
ctaattattcggtaactgacttgaatgtccaacgcaaagcaatacatgaactcatccaagtgatggctgaactgtcgccagcagctaaaacagggaagcgaaaaaggagtcagatgctgt

SEQ ID NO: 183690 - DNA, 120 bp, Artificial Sequence
  ENSG00000111537_5 (sequence is synthesized)
agagcatcccagtaatggttgtcctgcctgcaatatttgaattttaaatctaaatctatttattaatatttaacattatttatatggggaatatatttttagactcatcaatcaaataag

SEQ ID NO: 183691 - DNA, 120 bp, Artificial Sequence
  ENSG00000111537_6 (sequence is synthesized)
tatttataatagcaacttttgtgtaatgaaaatgaatatctattaatatatgtattatttataattcctatatcctgtgactgtctcacttaatcctttgttttctgactaattaggcaa

SEQ ID NO: 183692 - DNA, 120 bp, Artificial Sequence
  ENSG00000111537_7 (sequence is synthesized)
ggctatgtgattacaaggctttatctcaggggccaactaggcagccaacctaagcaagatcccatgggttgtgtgtttatttcacttgatgatacaatgaacacttataagtgaagtgat

SEQ ID NO: 183693 - DNA, 120 bp, Artificial Sequence
  ENSG00000111537_8 (sequence is synthesized)
actatccagttactgccggtttgaaaatatgcctgcaatctgagccagtgctttaatggcatgtcagacagaacttgaatgtgtcaggtgaccctgatgaaaacatagcatctcaggaga

SEQ ID NO: 183694 - DNA, 120 bp, Artificial Sequence
  ENSG00000111537_9 (sequence is synthesized)
tttcatgcctggtgcttccaaatattgttgacaactgtgactgtacccaaatggaaagtaactcatttgttaaaattatcaatatctaatatatatgaataaagtgtaagttcacaacta

SEQ ID NO: 183695 - DNA, 120 bp, Artificial Sequence
  ENSG00000111540_0 (sequence is synthesized)
gagctgcagctgtttgtctgttcgacacaggcttggggccgacgggggagacggagccccaggagtgttgaagcctggaaatcccctccccttccccctcccccctttacagtatccccc

SEQ ID NO: 183696 - DNA, 120 bp, Artificial Sequence
  ENSG00000111540_1 (sequence is synthesized)
tccctccaccctttcccattctgataatctggccatgactagcagaagcacagctaggcccaatgggcaaccccaggccagcaaaatttgccagttcaaattggtcctgctgggagaatc

SEQ ID NO: 183697 - DNA, 120 bp, Artificial Sequence
  ENSG00000111540_2 (sequence is synthesized)
tgcagtgggaaagtcaagcctggtattacgttttgtcaaagggcagttccatgagtaccaggagagcaccattggagcggccttcctcacccagtccgtttgtctagatgacacaacagt

SEQ ID NO: 183698 - DNA, 120 bp, Artificial Sequence
  ENSG00000111540_3 (sequence is synthesized)
gaagtttgagatctgggacacagctgggcaggagcgatatcacagcttagcccccatgtactacaggggtgcccaagctgcaatcgtggtttacgacattactaatcaggaaacctttgc

SEQ ID NO: 183699 - DNA, 120 bp, Artificial Sequence
  ENSG00000111540_4 (sequence is synthesized)
ccgagcaaagacatgggtgaaggaactacagcgacaggccagtcctagcatcgttattgccctggcagggaacaaagctgacctggccaacaaacgtatggtggagtatgaagaggccca

SEQ ID NO: 183700 - DNA, 120 bp, Artificial Sequence
  ENSG00000111540_5 (sequence is synthesized)
ggcatatgcagatgacaacagcttattgttcatggagacttcagccaagacagctatgaacgtgaatgatctcttcctggcaatagctaagaagttgccaaagagtgaaccccagaatct

SEQ ID NO: 183701 - DNA, 120 bp, Artificial Sequence
  ENSG00000111540_6 (sequence is synthesized)
gggaggtgcagcaggccgaagccggggtgtggatctccatgaacagtcccagcagaacaagagccagtgttgtagcaactgagggggtggctagcagcaaacaagtatggagctagcaca

SEQ ID NO: 183702 - DNA, 120 bp, Artificial Sequence
  ENSG00000111540_7 (sequence is synthesized)
agagctaagaaataacctccatccctacccctcagcacacaacccctacggtaacagcacactgagccctggctcccaagggctgcctcctgacagctccgtcatggcactttttaacgc

SEQ ID NO: 183703 - DNA, 120 bp, Artificial Sequence
  ENSG00000111540_8 (sequence is synthesized)
ttcagcaacaaacaccaggcagctgttgccactggcctcctaccccctactctggggcttgggggtcaactccccccaggacttaccttccaaaacaaactttcttcactttgtattata

SEQ ID NO: 183704 - DNA, 120 bp, Artificial Sequence
  ENSG00000111540_9 (sequence is synthesized)
ggtacaagacagcgacttacgtatcttttctcctcctccctagtgttcctccccattttttcagaaaacacttctgactcctgtcccttccccttctgcttttggtcagtccctgttctt

SEQ ID NO: 183705 - DNA, 120 bp, Artificial Sequence
  ENSG00000111540_10 (sequence is synthesized)
gagcctcttttctcctctccccaggatgcagaaagtggtgaacccaggaactgaggaaggaggtttccagttcatttacattaagggccctgggggagaataaagctcagagcaggaggg

SEQ ID NO: 183706 - DNA, 120 bp, Artificial Sequence
  ENSG00000111540_11 (sequence is synthesized)
agtaaggaaacatttcctttttgtttttatttggttggagtttctcatatttgaaaacattgcggtatccatgatttggccttgtggagggtgttcctaggtagaggtgagaatggggag

SEQ ID NO: 183707 - DNA, 120 bp, Artificial Sequence
  ENSG00000111540_12 (sequence is synthesized)
gcaagatctcaggcaccaggcaggaggtgccttgtaagctaactgggcggaggtggaggtgcagtgtcaactgtggctctgtaactcttcaaaggcccagtttcccctcacgcagcctct

SEQ ID NO: 183708 - DNA, 120 bp, Artificial Sequence
  ENSG00000111540_13 (sequence is synthesized)
taggtagcgtttcccctaatcgtgggggttggaccccagagtcttccaaagaattttcactggttgcctgcatctttggctctgctgtgatctgattggaggagggacagtttctggtac

SEQ ID NO: 183709 - DNA, 120 bp, Artificial Sequence
  ENSG00000111540_14 (sequence is synthesized)
ccatcctctgatttatacatatgcattttttcccctctggcctttagatggcctcagccccagccaccatatacccctgcagtttgcactttaattgatggtagttcagttggggtactt

SEQ ID NO: 183710 - DNA, 120 bp, Artificial Sequence
  ENSG00000111540_15 (sequence is synthesized)
gttttatggaagttttgattgatttacttgccctcccaccttctttttaattcaatgaaatctgaggttaatgcgaggttcgaggagaggttatagataaaactaccagtggcagctact

SEQ ID NO: 183711 - DNA, 120 bp, Artificial Sequence
  ENSG00000111540_16 (sequence is synthesized)
caagtcctatctccactgttagcttcctccaactctaattattaacctatattcttgccaagctaactattgactataggtttgcctttcctggagaattaattgagcaattgaggagtg

SEQ ID NO: 183712 - DNA, 120 bp, Artificial Sequence
  ENSG00000111540_17 (sequence is synthesized)
tctcaggatagcacaggccaaggtaggggagtaaaaaggaggtcaggcaaaagggaggagttttctgtcctttcccaggtttcacactcaatttgatatccattaccatgtcttttctac

SEQ ID NO: 183713 - DNA, 120 bp, Artificial Sequence
  ENSG00000111540_18 (sequence is synthesized)
ttccttgtaaataggtatgatctttattcccactgtacagtctgttctatcctctgcctcccatcaggccctgtttctttgttcctttgttaatatcttgaatttagtccctccatcctt

SEQ ID NO: 183714 - DNA, 120 bp, Artificial Sequence
  ENSG00000111540_19 (sequence is synthesized)
aatccccccatccctccccatcatgcaaccagtggtttaatccatgtaccaataggggctagtaccacagaggcctcctgtggtgccctcgtatcataccacctgttcctgtggagaggg

SEQ ID NO: 183715 - DNA, 120 bp, Artificial Sequence
  ENSG00000111540_20 (sequence is synthesized)
aatgaccggcactgaaggtaccttacaactggctcatattatcagaggaccttggtcctttctaaatctctagtctctcttcatatccttcatcaggtgttttaagatgtctctgagaag

SEQ ID NO: 183716 - DNA, 120 bp, Artificial Sequence
  ENSG00000111540_21 (sequence is synthesized)
gcagactgccttctatcccagaacagctgagaaatctatgaagctgagattctgaaggacccagcttaggttcttccacttaggcctcaattcccttccttttccaggggcagccttagt

SEQ ID NO: 183717 - DNA, 120 bp, Artificial Sequence
  ENSG00000111540_22 (sequence is synthesized)
tcccatggccctgaaacacacacatttcccccttcctttcccagaagccactggccccccatagcacccagtgcatcctttttacaagtggaagaactaggatggctttccaaagtcttc

SEQ ID NO: 183718 - DNA, 120 bp, Artificial Sequence
  ENSG00000111540_23 (sequence is synthesized)
tagaaatgaagttctttctctgtgcagctttcccccttggagcaggagtgaagatgtttcattatcttgggcctgggaaaccacttccccaggcttctccctccccccacccccatagga

SEQ ID NO: 183719 - DNA, 120 bp, Artificial Sequence
  ENSG00000111540_24 (sequence is synthesized)
acaggatttggccttagcttctgggcctatcggctgccttccctctacttcctaccacctcttctgccttcctttgagctctgttgggcttggggatcttagttttcttttgtttatttc

SEQ ID NO: 183720 - DNA, 120 bp, Artificial Sequence
  ENSG00000111540_25 (sequence is synthesized)
ccagctcatttttttcttctggtcagtttttttaagggggggtgttgtggttttttgtttttgttttgcttctgagaaagcatttgcctttcttcctctcccaacataacaatcgtggta

SEQ ID NO: 183721 - DNA, 120 bp, Artificial Sequence
  ENSG00000111540_26 (sequence is synthesized)
acagaatgcgactgctgatttaccgatgtatttaatgtaagtaaaaaaaggaaaaaaagaaaagggcattggagtgttgcttttttttattttattgttattattattattatttttgct

SEQ ID NO: 183722 - DNA, 120 bp, Artificial Sequence
  ENSG00000111540_27 (sequence is synthesized)
atttgtcaggtactaggaatttggaagaaaggatacccagtaatgttctactgaatcagaaacacacctttccctgcatcttgatacatctttattccctttaatcttttcttaaacatc

SEQ ID NO: 183723 - DNA, 120 bp, Artificial Sequence
  ENSG00000111540_28 (sequence is synthesized)
tagtttagaaaatagcccttctattgctatttaatcacccctcttctaaggccactagattgttcatcaaatcaaaccctattatatctttttaggccctcttaacagaatgtatatgtg

SEQ ID NO: 183724 - DNA, 120 bp, Artificial Sequence
  ENSG00000111540_29 (sequence is synthesized)
tagggtatggtctgtggatctttgggcccactgatcagattagagagaggggtgctatttgaagtagtatacaaaaatgtatgtgcatatttctttttttttttttaattgagacggagt

SEQ ID NO: 183725 - DNA, 120 bp, Artificial Sequence
  ENSG00000111540_30 (sequence is synthesized)
cgggcgtgagccactgcgcccggccgtatgtgcatatttctaggatccatttctatatgtttctcaaaggggtccatgacccaaaggttgaaaaacatcactgagttagttttcttgtag

SEQ ID NO: 183726 - DNA, 120 bp, Artificial Sequence
  ENSG00000111540_31 (sequence is synthesized)
cttccacctcaacgggaaaatttcctctggatctgctcttgactcctagtgtacttcaaacccttcagtccaccacagtctaaaggtcgagggaagggaaatgaaataggattatgtgtg

SEQ ID NO: 183727 - DNA, 120 bp, Artificial Sequence
  ENSG00000111540_32 (sequence is synthesized)
gttgcagtaggctttaaattccaaagaatctgaaggtggataggaaagaggactggtgccagacaaatctgacattctaggcctgtctctgtcaacttaaccagctgtggccttgatcaa

SEQ ID NO: 183728 - DNA, 120 bp, Artificial Sequence
  ENSG00000111540_33 (sequence is synthesized)
gttagttagtgccttccgcctcgtttcttcatctgtaaagtaaaagctgaagattaaggtcaattatgtaaagtatgtgtgtcacacaaaagtagatgacactattaggaaggaggcttt

SEQ ID NO: 183729 - DNA, 120 bp, Artificial Sequence
  ENSG00000111540_34 (sequence is synthesized)
tagatagtccctaactgacttctctgtatcttcctttggctgagacttttttttttttaggttgaagctcgctttctctctctctccctctttctccctctctctctctctctcactctc

SEQ ID NO: 183730 - DNA, 120 bp, Artificial Sequence
  ENSG00000111540_35 (sequence is synthesized)
tatatatatatatatattttttttttaacaactggtaggataggttgggcattagccttcttcagtgatttgattgtatacagattgaaatcctttccatttccaaacacttaagagcca

SEQ ID NO: 183731 - DNA, 120 bp, Artificial Sequence
  ENSG00000111540_36 (sequence is synthesized)
ccatttccaaacacttaagagccaaagccaacttgccaacttttcactgtcggttcccttaccttatatctcttggtaataccccccacccccgttccctgattcctggtaaaagctcta

SEQ ID NO: 183732 - DNA, 120 bp, Artificial Sequence
  ENSG00000111540_37 (sequence is synthesized)
gttggagagccgaaaggaaaggaaatgatctttcaaaattaaaggtgaacaccttcacttaaactgattaaaattgcagctccaccgtccggcctctagagggcagtgtatggatacatt

SEQ ID NO: 183733 - DNA, 120 bp, Artificial Sequence
  ENSG00000111540_38 (sequence is synthesized)
tgtccagattgggggactaggtttgataaattttgtcctgcatcaaatgacaaaagggtaataggaaatgtattatatttatgccccttactttgagataagagactacaaccttcatac

SEQ ID NO: 183734 - DNA, 120 bp, Artificial Sequence
  ENSG00000111540_39 (sequence is synthesized)
cccttactttgagataagagactacaaccttcatacttcggggtgttaagctgccattgctcttgttaaggggcagtttgttttttaagagatggggtcttgctctgttgtccaggctgg

SEQ ID NO: 183735 - DNA, 120 bp, Artificial Sequence
  ENSG00000111540_40 (sequence is synthesized)
aactcctgggcttaagcgatcctcccgcctcagcctcccgagtactgggactacaggcgtgtgccaccaaggggcgattattattttttttttctacgcaaaataaaagacggctattca

SEQ ID NO: 183736 - DNA, 120 bp, Artificial Sequence
  ENSG00000111540_41 (sequence is synthesized)
gctcgtacttgttggtgacagcgcccaaagagactcgcctttctccagaggattggtggatgagtgcacatatagcccaccctcgaaggagtgttgaagcctggaaatcccctccccttc

SEQ ID NO: 183737 - DNA, 120 bp, Artificial Sequence
  ENSG00000111540_42 (sequence is synthesized)
ctttttttccaaaccagccctctctgaaaacgtcaacagaggacattcattgtctcattccccagttctacaccaagttaaatacagcaacactgtgaccctaatgacagccaggagatt

SEQ ID NO: 183738 - DNA, 120 bp, Artificial Sequence
  ENSG00000111540_43 (sequence is synthesized)
ttcaaaggagtcaggagaaaactccagagcagagggttagggaggtaccagctgtgggggtaccagtgtgaaaacaggaaggagggagcaattaaatttgtggtaagggactattcaagt

SEQ ID NO: 183739 - DNA, 120 bp, Artificial Sequence
  ENSG00000111540_44 (sequence is synthesized)
gacacaggcttggggccgacgggggagacggagccccaggtaacactggatcaacaaaatgaagagctgagccaagtggtagaactctcatttcaagattttggtgacttgggtttaaac

SEQ ID NO: 183740 - DNA, 120 bp, Artificial Sequence
  ENSG00000111540_45 (sequence is synthesized)
ctaatcaggtaagtgagctaagaagactgtccttgttggctggacatggtggcttacgcctataatcccaacactttaggatgccaaggcgggaggatcatgaggtcaagagattgagac

SEQ ID NO: 183741 - DNA, 120 bp, Artificial Sequence
  ENSG00000111540_46 (sequence is synthesized)
aggtatggaaataccttaactttctgttatgacctccatccttggctgcagctttagctcccttgtcttcaatgtgtaagtttgccggccaggtgtggtggctaacacctgtaatcccag

SEQ ID NO: 183742 - DNA, 120 bp, Artificial Sequence
  ENSG00000111554_0 (sequence is synthesized)
gctagggaacactgttatcgccccgccccctcggagctttttctccagttaactgtcggagtagcgggggctccggcgccgggcgacatgccggtgcgcttcaaggggctgagtgaatac

SEQ ID NO: 183743 - DNA, 120 bp, Artificial Sequence
  ENSG00000111554_1 (sequence is synthesized)
cagaggaacttcctgtggaaaaagtcttatttgtccgagtcttgtaattcctccgtggggcgaaagtacccatgggctggacttagatcagatcaattaggcatcacgaaagagccaagt

SEQ ID NO: 183744 - DNA, 120 bp, Artificial Sequence
  ENSG00000111554_2 (sequence is synthesized)
tttatttcaaaaagaagagtcccttaccatgacccacagatttcaaaatctctggagtggaatggagctatctcagagagcaatgtggttgcatcaccagaaccagaagccccggaaaca

SEQ ID NO: 183745 - DNA, 120 bp, Artificial Sequence
  ENSG00000111554_3 (sequence is synthesized)
ccaaaatcacaagaagcagaacaaaaggatgttactcaagaaagagttcactcactagaagcttccagggttcccaaaagaaccagatctcactctgcagactccagagctgaaggggct

SEQ ID NO: 183746 - DNA, 120 bp, Artificial Sequence
  ENSG00000111554_4 (sequence is synthesized)
tcagatgtggaaaataatgagggtgtaacaaaccatacaccagttaatgaaaatgtggaactggaacattctaccaaggttctttcagaaaatgtagataatgggttggatagacttctg

SEQ ID NO: 183747 - DNA, 120 bp, Artificial Sequence
  ENSG00000111554_5 (sequence is synthesized)
cgtaagaaagctggattgactgttgttccttcatataatgccttgagaaattctgaatatcaaaggcagtttgtttggaagacttctaaagaaactgctccagcttttgcagccaatcag

SEQ ID NO: 183748 - DNA, 120 bp, Artificial Sequence
  ENSG00000111554_6 (sequence is synthesized)
gttttccacaataaaagccagtttgttccaccattcaaaggtaactcagtcatccatgaaactgaatacaaaagaaatttcaagggtttatctccagtgaaagaaccaaaattaagaaat

SEQ ID NO: 183749 - DNA, 120 bp, Artificial Sequence
  ENSG00000111554_7 (sequence is synthesized)
gatttgagagaaaacagaaatcttgaaacagtgtctcctgaaaggaagagtaataaaatagacgatcgtttaaaattggaagcagagatggaattaaaagacttacaccagcctaaaagg

SEQ ID NO: 183750 - DNA, 120 bp, Artificial Sequence
  ENSG00000111554_8 (sequence is synthesized)
aagcttactccttggaaacatcaaaggcttgggaaggtgaattccgaatatagagcaaaatttctgagcccagctcagtatttatataaagctggggcttggacacatgtaaagggaaac

SEQ ID NO: 183751 - DNA, 120 bp, Artificial Sequence
  ENSG00000111554_9 (sequence is synthesized)
atgccaaatcaggttaaagaactccgagaaaaggctgagttttataggaagcgagttcaggggacgcatttttctcgggaccatctgaatcagattttatctgatagcaactgctgttgg

SEQ ID NO: 183752 - DNA, 120 bp, Artificial Sequence
  ENSG00000111554_10 (sequence is synthesized)
gatgtctcctcaaccacaagctcagaaggaaccgttagtagcaacatcagagcattagatcttgctggagatcctacaagccataagactttgcagaaatgtccttctacagaaccagaa

SEQ ID NO: 183753 - DNA, 120 bp, Artificial Sequence
  ENSG00000111554_11 (sequence is synthesized)
gaaaaaggaaatatcgtggaagaacagccccagaaaaataccacggagaaattgggtgtgtcagctcccaccatacccgttagaaggcggctggcttgggatacagagaacacaagtgaa

SEQ ID NO: 183754 - DNA, 120 bp, Artificial Sequence
  ENSG00000111554_12 (sequence is synthesized)
cgacaatgaagaggaaggggacaggaaaacgggcaagcaggcttttatgggagagcaagagaagttggatgtacgtgagaaatctaaggcagataagatgaaagaagggtcagattcttc

SEQ ID NO: 183755 - DNA, 120 bp, Artificial Sequence
  ENSG00000111554_13 (sequence is synthesized)
tgtatcctcagaaaaaggaggccggcttcctactcccaagctgagagaacttggtggaatccagaggactcatcatgatctcactactccagctgttggtggtgctgttttagtgtctcc

SEQ ID NO: 183756 - DNA, 120 bp, Artificial Sequence
  ENSG00000111554_14 (sequence is synthesized)
atctaagatgaagcctccagccccagaacagaggaaaagaatgacctctcaggattgtttagaaacttcaaagaatgattttactaagaaagaaagtcgtgctgtatccctactgacttc

SEQ ID NO: 183757 - DNA, 120 bp, Artificial Sequence
  ENSG00000111554_15 (sequence is synthesized)
tccagctgctggtataaaaacagttgatcctctgcctttgcgggaagattctgaagacaatatccacaaatttgctgaggcaactcttccagtttcaaaaattccaaaatacccaacaaa

SEQ ID NO: 183758 - DNA, 120 bp, Artificial Sequence
  ENSG00000111554_16 (sequence is synthesized)
tccccctggacagttgccttctccaccacatgttccatcctactggcatccctctcgacgaattcagggctctcttagagatccagagtttcagcacaatgtgggaaaagcaaggatgaa

SEQ ID NO: 183759 - DNA, 120 bp, Artificial Sequence
  ENSG00000111554_17 (sequence is synthesized)
caatttgcagttacctcaacatgaagcctttaatgatgaagatgaggacagattgtctgagatttctgctcgctctgcagcttctagtctccgggcttttcaaactctggcacgagctaa

SEQ ID NO: 183760 - DNA, 120 bp, Artificial Sequence
  ENSG00000111554_18 (sequence is synthesized)
gaaaaggaaggagaatttctggggtaaaacataaacctagctgagttgcctttatctaaggaaacattggcataatttttctttattgcttactgtgttaaaattttttgagtgaagttt

SEQ ID NO: 183761 - DNA, 120 bp, Artificial Sequence
  ENSG00000111554_19 (sequence is synthesized)
ttcctaacgttttctactttgaaatatttaatttccaatagaacagtttacttggaaattgttaacataggcttatacaaatttaacttttaaagaattctttttacatctatcccagag

SEQ ID NO: 183762 - DNA, 120 bp, Artificial Sequence
  ENSG00000111554_20 (sequence is synthesized)
tacaaagacctagattattgaattcttcacatgtaactttcgtaataggtgtcatggatagattttcacctatccagagagtattctaaaaaaataaacaaagtgaagtaaaagttaaga

SEQ ID NO: 183763 - DNA, 120 bp, Artificial Sequence
  ENSG00000111554_21 (sequence is synthesized)
tcccagtgtgaagtatatattcccctaagatttgatatatgtatctttataattgatgatgttgtaaaatgaatttgttgttcctttaacctttgctgtagtgtttctttttattttagt

SEQ ID NO: 183764 - DNA, 120 bp, Artificial Sequence
  ENSG00000111554_22 (sequence is synthesized)
tccttctatacatgtttgcagtgttaagataattgtactttgaaaacaccagctgtatatatttttcttatttatgtaacaaagtttgctgaaagatatgtatatttttgatctttgagt

SEQ ID NO: 183765 - DNA, 120 bp, Artificial Sequence
  ENSG00000111554_23 (sequence is synthesized)
gtattctatttgtgtaaggactttggcttacatttgaataatgtctagattttgaaaaattacctgtataatggagaattaaaactttgtagacattttgaaataaaaatggatcaagtg

SEQ ID NO: 183766 - DNA, 120 bp, Artificial Sequence
  ENSG00000111554_24 (sequence is synthesized)
ccagcacagtgacatctcatcccttctcatcttggtctgctccacataagagaagctttgtgaaaagttccaaattttgacagtaccagggcccattgttctgttaagtagcacaggaaa

SEQ ID NO: 183767 - DNA, 120 bp, Artificial Sequence
  ENSG00000111554_25 (sequence is synthesized)
gtaattagaaacgaggcagcatgtactgcctggcctgccaggtctatcacgttgcaattctagtgacttttgttaggataactggaacattttgtgaccccctgatttttaattttttgt

SEQ ID NO: 183768 - DNA, 120 bp, Artificial Sequence
  ENSG00000111554_26 (sequence is synthesized)
tatggtcaaatttttaatgcttttaaaagcaaaattaaatattttatgttgaaaagctgtacttttaaaatcctataatctgaaggatattgtgtgtatatataggtacatatatctgaa

SEQ ID NO: 183769 - DNA, 120 bp, Artificial Sequence
  ENSG00000111554_27 (sequence is synthesized)
ctaaatttaaaatttcatttctcctccacaagtgttcttaaaagttgtctttgtaactttttgctttagtagctactatttttgtataccgtgttttgtaggcatcacgaaagagccaag

SEQ ID NO: 183770 - DNA, 120 bp, Artificial Sequence
  ENSG00000111554_28 (sequence is synthesized)
tgcatttcttttcaaaagcatagaattcttcattggtttcattgtcatttctgtaatattacattttgtgtttcagaattttccattgttgttttcttgtctaatgtctataagaatagt

SEQ ID NO: 183771 - DNA, 120 bp, Artificial Sequence
  ENSG00000111554_29 (sequence is synthesized)
tgataacaggctgttgactttagttattgtgaattagttctattctgactactcgctattttgtagtagttgtactatgataatctgtttattggatggacctcctgcgtctggatttta

SEQ ID NO: 183772 - DNA, 120 bp, Artificial Sequence
  ENSG00000111554_30 (sequence is synthesized)
cagggtgctgagctgacttctacctagccccttttcagtttcttatcgtgtacaagaagacaaacagaaattcaattgatgaaatgcaaaaggaaggagagctctggctgtctctcagag

SEQ ID NO: 183773 - DNA, 120 bp, Artificial Sequence
  ENSG00000111554_31 (sequence is synthesized)
atcttgcatttctgctctcttatgtcacagctggcctgcagcaggtccctgtgagcacataagcagaggctgcaggaacttgtgtggggatctcaatgctttccacatttctttctccat

SEQ ID NO: 183774 - DNA, 120 bp, Artificial Sequence
  ENSG00000111554_32 (sequence is synthesized)
tctgttccactgctcttctctggttcatgtccaccactgactgggaccctgaagaggcatttcagagtgttggagaagaatctgtagcttgttgaaaaagctgggggtgaaagggaacaa

SEQ ID NO: 183775 - DNA, 120 bp, Artificial Sequence
  ENSG00000111554_33 (sequence is synthesized)
ggaaggtgatgtgtgagtctggcaggcaggagaaggggtgttcatagaagcagtgtgcaggtgaggcaaagtgctgggactttttggtaatagatttaattatgaatgattagtaggaaa

SEQ ID NO: 183776 - DNA, 120 bp, Artificial Sequence
  ENSG00000111554_34 (sequence is synthesized)
ggactgagagtattatatttttcctgggatgcctaatagtcctttgatagaaaggaattttaaatagtttgacacttgaaaaaagatactatttataagttgaagaaagtttgctgtacc

SEQ ID NO: 183777 - DNA, 120 bp, Artificial Sequence
  ENSG00000111554_35 (sequence is synthesized)
acaatgcgcatgtagttaacaattttgcactgtagatttaacattttgttaagaggatagatttcatgttatgcattttttaccacaatttttaaaaagtttgaatagaaatttttaatg

SEQ ID NO: 183778 - DNA, 120 bp, Artificial Sequence
  ENSG00000111554_36 (sequence is synthesized)
tgaaagaaattaagtacttaagtagcctggaggtaggttctagaaaaccaaaatgagagttttgctaaaatcatcctattacttatgatttatggtagtaatattatactgtcctaggct

SEQ ID NO: 183779 - DNA, 120 bp, Artificial Sequence
  ENSG00000111554_37 (sequence is synthesized)
tctgatgatcattgttgccagatgcagcacatatactaaatatgagacagggtaatgaaaacttggggaactggtaagtttttgcatgctacaagatttttttacttattaaaaaattat

SEQ ID NO: 183780 - DNA, 120 bp, Artificial Sequence
  ENSG00000111554_38 (sequence is synthesized)
taaattgattttattctaaaatgttgtgttttgttgactaatatattgcgtgtttcctgtattctaagaaaggcgtaactgctttgaatatttaataaatacaaaatatgttgacagtaa

SEQ ID NO: 183781 - DNA, 120 bp, Artificial Sequence
  ENSG00000111554_39 (sequence is synthesized)
cctcaataagcctacatgttctttcagcctctgttaacactttaatttcacaacgagttccttttggtaatagagaccacaatttaaagaagtatgatataataatagcactaatagtat

SEQ ID NO: 183782 - DNA, 120 bp, Artificial Sequence
  ENSG00000111554_40 (sequence is synthesized)
caggaacttatgtattagaatgtaaattatcattttttttaatgccactggctcttcagaaattaatatttattgaggtcttttaagtttaatgctttttaccatcaaacatttgattgt

SEQ ID NO: 183783 - DNA, 120 bp, Artificial Sequence
  ENSG00000111554_41 (sequence is synthesized)
gttaatagtcaatttatagaattgtatcattatagattcgattatttcataacctccagacctccactgtctcaactgaagattaattttcaagatgaaataatttatctgatagtgatg

SEQ ID NO: 183784 - DNA, 120 bp, Artificial Sequence
  ENSG00000111554_42 (sequence is synthesized)
tctgatgactgtatgtggctaattttgccttcctttgtctttggtccctggctgtatttgtgcaatgtctttgatatgctacttggtgctgtttgtaaagaagcatttacaatagtatat

SEQ ID NO: 183785 - DNA, 120 bp, Artificial Sequence
  ENSG00000111554_43 (sequence is synthesized)
ttggatgttaataatatatgtgaaatgaaattaaaatcatatataactttgctatttttttgtcctgtaattcaactttatgttttgttaagtaattgaagaccaaagttccgcatattt

SEQ ID NO: 183786 - DNA, 120 bp, Artificial Sequence
  ENSG00000111554_44 (sequence is synthesized)
aatgattaacatggtgaaatatttactttcatttcatttctattaggaaggtgaattccgaatatagagcaaaatttctgagcccagctcagtatttatataaagctggggcttggacac

SEQ ID NO: 183787 - DNA, 120 bp, Artificial Sequence
  ENSG00000111554_45 (sequence is synthesized)
ttactatgagccaggactattcccagcagctagtgtggcaggccaggtttcactaatggaggcctccatcacaactgtttcggtactgactgagcggttaagttaaatattgaaagctaa

SEQ ID NO: 183788 - DNA, 120 bp, Artificial Sequence
  ENSG00000111554_46 (sequence is synthesized)
aaaaagccagtgcccttacacaaaggctgggatgtcacaaaagcccatcaagagtattgcctaggcctttcctgggccataaagcatgacaaaataaggaattcttaacaggatccgttt

SEQ ID NO: 183789 - DNA, 120 bp, Artificial Sequence
  ENSG00000111554_47 (sequence is synthesized)
tagtctccgggcttttcaaactctggcacgagctaagaaaaggaaggagaatttctgggatgaggaaactgaggtttacagaaactgagtaacttcgccaagtccatatccttcataaat

SEQ ID NO: 183790 - DNA, 120 bp, Artificial Sequence
  ENSG00000111554_48 (sequence is synthesized)
gccttggagaccagattgctctgatgtttgaaggaagcttccatggctgttccggggtgtggcaggcgacctcacaaaacttgttctacatgttggccaaagatctgctaatttcctact

SEQ ID NO: 183791 - DNA, 120 bp, Artificial Sequence
  ENSG00000111554_49 (sequence is synthesized)
taggcaacattgtacaatccagttctaacaatattcttctttcctcctggcaaagctaaccatacggtcggaggacttgaatgcccagtgacgtttggtgacaatctgaagccaccaagg

SEQ ID NO: 183792 - DNA, 120 bp, Artificial Sequence
  ENSG00000111581_0 (sequence is synthesized)
gaagggcttgcttccggagagcgggaaggctaaaacgcggtagctaaactgcagccaactttggttgtgtgtggaaaaggctttagccatggacaggagtggctttggagagatatcatc

SEQ ID NO: 183793 - DNA, 120 bp, Artificial Sequence
  ENSG00000111581_1 (sequence is synthesized)
ccctgtaatccgggaggcagaggtgacacggactgcacggaaacagagtgctcagaaaagagttttacttcaggcatctcaagatgaaaattttggtaatactacaccaagaaaccaggt

SEQ ID NO: 183794 - DNA, 120 bp, Artificial Sequence
  ENSG00000111581_2 (sequence is synthesized)
tatccctcgaactcctagctcatttcgacagccttttaccccaacaagccgaagcttactaaggcagccagatatttcctgcattcttggaacaggagggaagtcgccccgacttacgca

SEQ ID NO: 183795 - DNA, 120 bp, Artificial Sequence
  ENSG00000111581_3 (sequence is synthesized)
gtcttcagggttctttggaaatctctccatggttactaatctggatgacagtaactgggcagctgcattttcatcacagcgttccgggctgttcacaaacacagagccccacagtataac

SEQ ID NO: 183796 - DNA, 120 bp, Artificial Sequence
  ENSG00000111581_4 (sequence is synthesized)
agaagatgtaactatcagtgctgttatgttacgtgaggatgatcctggagaagctgcatccatgagtatgttttctgatttcctgcagtcttttctgaagcactcttcgagtacagtttt

SEQ ID NO: 183797 - DNA, 120 bp, Artificial Sequence
  ENSG00000111581_5 (sequence is synthesized)
tgatcttgtggaagagtatgaaaacatctgtggtagtcaggtgaatatactgagtaaaatagtgagtcgagcaacacctggacttcaaaaattttcaaaaacagccagtatgctctggct

SEQ ID NO: 183798 - DNA, 120 bp, Artificial Sequence
  ENSG00000111581_6 (sequence is synthesized)
tcttcaacaggagatggtcacatggaggctgctggcttctttgtatagagacagaatacagtctgcattagaagaggaaagtgtattcgcagttactgctgttaatgccagtgaaaaaac

SEQ ID NO: 183799 - DNA, 120 bp, Artificial Sequence
  ENSG00000111581_7 (sequence is synthesized)
agttgtggaagcgttatttcagagggattcacttgttcgacaaagtcagctggtggtagattggttagagagtattgccaaagatgaaattggagaattttctgataatattgagtttta

SEQ ID NO: 183800 - DNA, 120 bp, Artificial Sequence
  ENSG00000111581_8 (sequence is synthesized)
tgcaaaatcagtatattgggaaaatactctgcataccttaaaacaacggcagctgacttcttacgttggaagtgttcgtccgcttgtcactgaattggaccctgatgctcccataagaca

SEQ ID NO: 183801 - DNA, 120 bp, Artificial Sequence
  ENSG00000111581_9 (sequence is synthesized)
gaaaatgccccttgatgatctggatagagaagatgaagttagattactcaaatatctctttactctaatccgtgctggaatgacagaagaggcacaacgactctgtaaacgctgtggtca

SEQ ID NO: 183802 - DNA, 120 bp, Artificial Sequence
  ENSG00000111581_10 (sequence is synthesized)
agcatggagagctgcaacacttgaaggctggaaactgtaccatgaccctaatgttaatggaggaacagaattagaacctgttgaagggaatccatatagacgcatttggaaaataagttg

SEQ ID NO: 183803 - DNA, 120 bp, Artificial Sequence
  ENSG00000111581_11 (sequence is synthesized)
ctggagaatggcagaagatgagctttttaatagatacgagagagcaatttatgcagctttaagtgggaatcttaagcagctgcttcctgtctgtgacacctgggaagacacagtttgggc

SEQ ID NO: 183804 - DNA, 120 bp, Artificial Sequence
  ENSG00000111581_12 (sequence is synthesized)
ctacttccgggtgatggtggacagtctggtagaacaggagatccagacatcagtagcaactctggatgaaactgaagaactccctagagaatatctgggagcaaactggacgttagaaaa

SEQ ID NO: 183805 - DNA, 120 bp, Artificial Sequence
  ENSG00000111581_13 (sequence is synthesized)
ggtttttgaggaacttcaagctactgacaaaaagagagttctggaagagaatcaagaacattatcatatagttcaaaagtttcttatcctgggagacattgatggtttgatggatgagtt

SEQ ID NO: 183806 - DNA, 120 bp, Artificial Sequence
  ENSG00000111581_14 (sequence is synthesized)
tagcaaatggctttccaaaagcagaaacaatctacctggacacctgcttcgctttatgactcaccttattttgtttttccgtactctgggactacagaccaaggaggaagtttctattga

SEQ ID NO: 183807 - DNA, 120 bp, Artificial Sequence
  ENSG00000111581_15 (sequence is synthesized)
agttttaaagacatacatacagcttttaataagagagaaacatacaaatcttatagcattttatacctgtcatttgcctcaagacctagctgttgcccagtatgcattatttttggaaag

SEQ ID NO: 183808 - DNA, 120 bp, Artificial Sequence
  ENSG00000111581_16 (sequence is synthesized)
tgttacagaatttgaacagcgccaccattgcctggagttggctaaagaagcagatttggatgttgcaacaataacaaaaactgtagttgagaatattcgaaagaaagataatggtgaatt

SEQ ID NO: 183809 - DNA, 120 bp, Artificial Sequence
  ENSG00000111581_17 (sequence is synthesized)
tagtcatcatgacctggccccagccctagatactggcactactgaggaggatcgtttaaaaattgatgtaattgactggttggtatttgacccagcgcagagggcagaagcactgaaaca

SEQ ID NO: 183810 - DNA, 120 bp, Artificial Sequence
  ENSG00000111581_18 (sequence is synthesized)
aggcaatgcaattatgagaaaattcttggcatcaaaaaagcacgaagctgcaaaagaagtatttgtgaaaattcctcaggattctatagcagaaatctataatcagtgcgaggaacaagg

SEQ ID NO: 183811 - DNA, 120 bp, Artificial Sequence
  ENSG00000111581_19 (sequence is synthesized)
aatggaaagtccacttcctgctgaagatgataatgctatccgagaacatttgtgcatcagagcttatttggaagcccatgaaacctttaatgagtggtttaagcatatgaattcagttcc

SEQ ID NO: 183812 - DNA, 120 bp, Artificial Sequence
  ENSG00000111581_20 (sequence is synthesized)
acaaaaacctgctttgatacctcaaccaacttttactgagaaagtggctcatgaacacaaagaaaagaaatatgaaatggattttggtatttggaaagggcatttggatgccctaactgc

SEQ ID NO: 183813 - DNA, 120 bp, Artificial Sequence
  ENSG00000111581_21 (sequence is synthesized)
tgatgtgaaggagaaaatgtataacgtcttgttgtttgttgatggagggtggatggtggatgttagagaggatgccaaagaagaccatgaaagaacacatcaaatggtcttactgagaaa

SEQ ID NO: 183814 - DNA, 120 bp, Artificial Sequence
  ENSG00000111581_22 (sequence is synthesized)
gctttgtctgccaatgttgtgttttctgcttcatacgatattgcacagtactggtcagtatcaggaatgcctacagttagcagatatggtatcctctgagcgccacaaactgtacctggt

SEQ ID NO: 183815 - DNA, 120 bp, Artificial Sequence
  ENSG00000111581_23 (sequence is synthesized)
attttctaaggaagagctaaggaagttgctgcagaagctcagagagtcctctctaatgctcctagaccagggacttgacccattagggtatgaaattcagttatagtttaatctttgtaa

SEQ ID NO: 183816 - DNA, 120 bp, Artificial Sequence
  ENSG00000111581_24 (sequence is synthesized)
tcatgataaatgaagtttttaataaaatatacttgttattagtaattttttcttttgcattaccatgtaaaatttagacatttgaattttgtacttttcagaatattatcgtgacacttt

SEQ ID NO: 183817 - DNA, 120 bp, Artificial Sequence
  ENSG00000111581_25 (sequence is synthesized)
tccagggttgtctctttttcatgtaataagaaaattaaattttctgttctagttttttctgtaatcataagcattctgatattttaaaatcataaagatgatggaaagtagatttatttt

SEQ ID NO: 183818 - DNA, 120 bp, Artificial Sequence
  ENSG00000111581_26 (sequence is synthesized)
ttgaagacatttctagtttaactttcatttagcaaacttcctatcaaaataagagcatataaagacttagcgtagtacctggcacacagtaagcactgaatatattggagattacagatc

SEQ ID NO: 183819 - DNA, 120 bp, Artificial Sequence
  ENSG00000111581_27 (sequence is synthesized)
ccgctcttctaataggggaaataccataagtacatttaaaaggtgtcatttaaaaatacaagtagtggctgggtgcagtggctcacgtctgtaaccccagcacttcgggaggccgaggca

SEQ ID NO: 183820 - DNA, 70 bp, Artificial Sequence
  ENSG00000111581_28 (sequence is synthesized)
ggacagagcgagacactgtctccaaaaaaagaaagaattacaagtagtctgagcaggaagaacctctctc

SEQ ID NO: 183821 - DNA, 120 bp, Artificial Sequence
  ENSG00000111581_29 (sequence is synthesized)
gaaagaattacaagtagtctgagcaggaagaacctctctccagctgaaaagactctcaggaagtagtattggtttggggtttgagtaatgcactgaatttgcaaaggcaaagagtgacac

SEQ ID NO: 183822 - DNA, 120 bp, Artificial Sequence
  ENSG00000111581_30 (sequence is synthesized)
aagaaggatgaggctctatagattaagaaatcagtatgagcaagaaatgataaatgctgggcattattatgaaccaacaaatacaccaaataggctagagtgtagggcttataaacagga

SEQ ID NO: 183823 - DNA, 120 bp, Artificial Sequence
  ENSG00000111581_31 (sequence is synthesized)
gacaactaaaagaatgtgattctaatagaaaacagtaattccccaaacttgctaatcatctaaggaatttcttgaatatgtatttatagatgccacccctagagacagctggcttgggaa

SEQ ID NO: 183824 - DNA, 120 bp, Artificial Sequence
  ENSG00000111581_32 (sequence is synthesized)
gcctgagatgggatcatagaatttgatcagttctatattatgtgctttttttgttttatttctctaaagaattcatcttgtcttcctgttttctttattcttactaatatgcaaatgatt

SEQ ID NO: 183825 - DNA, 120 bp, Artificial Sequence
  ENSG00000111581_33 (sequence is synthesized)
tttacagctcatgcagtcctgtaatcatgattattgctatgctactttgcaaaaaataaaaacaaaaaattcataccaaaacaaatacagactagatttggggtggggaggggaaataag

SEQ ID NO: 183826 - DNA, 120 bp, Artificial Sequence
  ENSG00000111581_34 (sequence is synthesized)
tgagtcttaaaagtagttttgttacttgcaacaaactgtatatatagaaactttgtacaacccagggtgactatttccaaagactgttacctatttgttgaacaacagtgggaaaactac

SEQ ID NO: 183827 - DNA, 120 bp, Artificial Sequence
  ENSG00000111581_35 (sequence is synthesized)
ttagcctaaatgaggaggaggaatattgtatgcttccatcgtaaccgtatgtgggtaaatggacaaggtctgtcatctatttaggaacttgttttgcatgtcccccactctgtatttgtc

SEQ ID NO: 183828 - DNA, 120 bp, Artificial Sequence
  ENSG00000111581_36 (sequence is synthesized)
ttttgttgtgccttgttttttgaatgtcctttaaaaaacacagcacagaaacccactaaggttgtggaattacaaaattccttcaaccttagactcttaattaggatgccctcaaatgga

SEQ ID NO: 183829 - DNA, 90 bp, Artificial Sequence
  ENSG00000111581_37 (sequence is synthesized)
cttgtttttatggtcttgctctgtctcccaggccggagtgcagtggcatgatatctcactgcaaacctccgcctcctgggttcaagcgat

SEQ ID NO: 183830 - DNA, 84 bp, Artificial Sequence
  ENSG00000111581_38 (sequence is synthesized)
ttggactcctttgagtccttagggagtcaatgtgtgtgttgctgcttatttaaatacagttcagttggagccccaagagtgcca

SEQ ID NO: 183831 - DNA, 120 bp, Artificial Sequence
  ENSG00000111581_39 (sequence is synthesized)
cttatttaaatacagttcagttggagccccaagagtgccaatgtgctcctcacaattcccaaatgcctctcttcctgaacaccagaagtggtgggcacctgagtgggaaatttcaggcaa

SEQ ID NO: 183832 - DNA, 120 bp, Artificial Sequence
  ENSG00000111581_40 (sequence is synthesized)
cttaatttagttcctcagtgcctactcttgaagaactgggttttcattctagagaggaaactcagggaagggcgtgttgcctatcacaggttcgcatactaagttttaaaaacttttctt

SEQ ID NO: 183833 - DNA, 120 bp, Artificial Sequence
  ENSG00000111581_41 (sequence is synthesized)
ggtgtgacttatgccaaggaattatgaagactttttccttgagcattgcatgaaggctacaaagttggaacaggcatgtcctgggtgtgaaagttttaatttccctacctcatttattta

SEQ ID NO: 183834 - DNA, 89 bp, Artificial Sequence
  ENSG00000111581_42 (sequence is synthesized)
ggctgtcagtctctcaaatagctgggactacaggcccacgccaccatgccctacttcctcatttattttaaattttttgtaccacagtc

SEQ ID NO: 183835 - DNA, 120 bp, Artificial Sequence
  ENSG00000111581_43 (sequence is synthesized)
cctacttcctcatttattttaaattttttgtaccacagtctctctttttaattttatgactgctgaattaatcctagactctgtcttaaaactaagaattgatgtattggcaggaacagc

SEQ ID NO: 183836 - DNA, 120 bp, Artificial Sequence
  ENSG00000111581_44 (sequence is synthesized)
tggacattcaagatgtttttgtgattccttttttaaaaatctccttttgtacctgtaatatctacaatatataatctttctttatcgacttaaggaggaaggagaaaggaagaacctgac

SEQ ID NO: 183837 - DNA, 120 bp, Artificial Sequence
  ENSG00000111581_45 (sequence is synthesized)
ttctgtgtgaaggaccttactgtcgatcaagactgttactcaaagttctatctcttagtcattgcacctgacctgatccaaaacatatatatatatttgtatgcacccctagagacagct

SEQ ID NO: 183838 - DNA, 120 bp, Artificial Sequence
  ENSG00000111581_46 (sequence is synthesized)
gtatatatatacggttttgccaggttgtacgtttttttctcgagttgtaagtgaacacagtagcactcgtttacattgtcaaggggacatctttagagaacacattttctcactgttgag

SEQ ID NO: 183839 - DNA, 120 bp, Artificial Sequence
  ENSG00000111581_47 (sequence is synthesized)
ctaataatgctttgtgaatgtatgatctaaggagaaacccttgtagttatacccgatgatgctgtctgttggaaagtaaattttgaatgtctttttccaaaaataaaaaataaaaacatg

SEQ ID NO: 183840 - DNA, 120 bp, Artificial Sequence
  ENSG00000111581_48 (sequence is synthesized)
cttgtcactgaattggtaaatgttctttgaaatgaaagttgccttcaaagttaactgattttttttttcaggctgagaattttttctcgtggatctttgttttgctcttctaaaggtttg

SEQ ID NO: 183841 - DNA, 120 bp, Artificial Sequence
  ENSG00000111581_49 (sequence is synthesized)
agtatacttaacttgacagcattaaaaacaaattaattttggtcttatcttaagatttgactgcctatataaggtagtgactgacctatgaaagctcttttatgttgaaagcaagtgaaa

SEQ ID NO: 183842 - DNA, 120 bp, Artificial Sequence
  ENSG00000111581_50 (sequence is synthesized)
aaaaactaaagccttattggtttgaggttagaacggttatttgaaaagtggatttgaaaagaactgaagctgaattattctaaaaacaaaggaatgaagctttatgacagggcacgtgaa

SEQ ID NO: 183843 - DNA, 120 bp, Artificial Sequence
  ENSG00000111581_51 (sequence is synthesized)
atgtttatagtgaaaagagagaaataagtaacaattgaaaaaaacttctagaattccatttagtaacaaagaggtttttgatgaaaattgtttgggaaaaagaaaaagaaaattgtttgg

SEQ ID NO: 183844 - DNA, 120 bp, Artificial Sequence
  ENSG00000111581_52 (sequence is synthesized)
aactaacatttattgtaacataattagtatagtatttggttacgatatcaataagcactaataataatgattgcagttattattcgtttgaactcttgccatgtacaaggtactgtactt

SEQ ID NO: 183845 - DNA, 120 bp, Artificial Sequence
  ENSG00000111581_53 (sequence is synthesized)
tccataaacacacggtaactatgacatgggtattgttggccctgttttaccaaaactgaaagtgagacttagagaagttaactaatatatacaataagtatgtaaataggctggatgcag

SEQ ID NO: 183846 - DNA, 120 bp, Artificial Sequence
  ENSG00000111581_54 (sequence is synthesized)
gtagaatatctttaaaaaaaaaactctgatattcctttttctttttttcccctttaataaataggaggatcgtttaaaaattgatgtaattgactggttggtatttgacccagcgcagag

SEQ ID NO: 183847 - DNA, 120 bp, Artificial Sequence
  ENSG00000111581_55 (sequence is synthesized)
ggcagaagcactgaaacaaggcaatgcaattatgagaaaattcttgggtatagtatatttttatgcagcttcaaactcctgggctccattcttcttcctacctcagcctcccaactactc

SEQ ID NO: 183848 - DNA, 120 bp, Artificial Sequence
  ENSG00000111581_56 (sequence is synthesized)
atatccctagtggaaataatccgtctgttttacatatttaccggctatttcaaagcttttgttcattcagatgagaaaaatgtcttcagttgtagcagagctgtttatttgcttttcctt

SEQ ID NO: 183849 - DNA, 120 bp, Artificial Sequence
  ENSG00000111581_57 (sequence is synthesized)
gtagcaatttgctgggtctgtcagccattaccctggatagttgctggcagcccgcccgctagtatcggaattcattataattagcagaagagattgtctgcagcacactctgatattatg

SEQ ID NO: 183850 - DNA, 120 bp, Artificial Sequence
  ENSG00000111581_58 (sequence is synthesized)
gcagcaaaaggatttagtaaaagcaagtctgggtccatcctgtgagataagaaagtaacctgctgcttttcgggcaacaaggagtcagaagccaggggcacccggcctctttaacataga

SEQ ID NO: 183851 - DNA, 120 bp, Artificial Sequence
  ENSG00000111581_59 (sequence is synthesized)
agcatcagattctgagttccctctatgatctgggtactgtgctagccgcctacaacaaagatcagttattcaagatccttcccctcggggaattagttgtgtaatggagacaaccaagca

SEQ ID NO: 183852 - DNA, 120 bp, Artificial Sequence
  ENSG00000111581_60 (sequence is synthesized)
aatccttgtatcatggaaatgttaacatttaaagtatttatttggttagagtctaaataatggaaaactgaaaaatttattcttcattgtttgtttgcttactttgttttgataatgaat

SEQ ID NO: 183853 - DNA, 120 bp, Artificial Sequence
  ENSG00000111596_0 (sequence is synthesized)
acaaacacaaacacaaacacgaacacgaacacgctcagcgtccccggggagggcggactgaagccacctcaccattcatcgcccctggaccccgcagtccccctcggactcagggccaga

SEQ ID NO: 183854 - DNA, 120 bp, Artificial Sequence
  ENSG00000111596_1 (sequence is synthesized)
gccttctgcgaagcaacctagccccagggaaacggtagcggccgcagaagccccgctctctgtaacggccgcggaggagcagcaagcctccctgtgagtcggtgggagacaagacggagc

SEQ ID NO: 183855 - DNA, 120 bp, Artificial Sequence
  ENSG00000111596_2 (sequence is synthesized)
ggcggtaagggcggtagggaagtgaagcgcctctctccaccttgttagaagcgcgctgaaagcggcctgcctacccaccccatcgctgccgttttgcagtcgtcgctcccaccttccgct

SEQ ID NO: 183856 - DNA, 120 bp, Artificial Sequence
  ENSG00000111596_3 (sequence is synthesized)
gccgcctggagggaagccggagcgacgggggtcacggcggcggtcagagggtaaaggtcttgctcccagcagcctccgcggtggatacgtcgccatcttggatccgcgggacaagaaaat

SEQ ID NO: 183857 - DNA, 120 bp, Artificial Sequence
  ENSG00000111596_4 (sequence is synthesized)
tcatgcgagggagacgtggtgggcggtccttcctgtgacacgacccttgagtgacagttctatttgattgcctccggtactgtgaggaaaggacacgactctatggtgaggactgatgga

SEQ ID NO: 183858 - DNA, 120 bp, Artificial Sequence
  ENSG00000111596_5 (sequence is synthesized)
catacattatctgagaaaagaaactaccaggtgacaaacagcatgtttggtgcttcaagaaagaagtttgtagagggggtcgacagtgactaccatgacgaaaacatgtactacagccag

SEQ ID NO: 183859 - DNA, 120 bp, Artificial Sequence
  ENSG00000111596_6 (sequence is synthesized)
tcttctatgtttccacatcggtcagaaaaagatatgctggcatcaccatctacatcaggtcagctgtctcagtttggggcaagtttatacgggcaacaaagtgcactaggccttccaatg

SEQ ID NO: 183860 - DNA, 120 bp, Artificial Sequence
  ENSG00000111596_7 (sequence is synthesized)
agggggatgagcaacaatacccctcagttaaatcgcagcttatcacaaggcactcagttaccgagccacgtcacgccaacaacaggggtaccaacaatgtcacttcacacgcctccatct

SEQ ID NO: 183861 - DNA, 120 bp, Artificial Sequence
  ENSG00000111596_8 (sequence is synthesized)
ccaagcaggggtattttgcctatgaatcctaggaatatgatgaaccactcccaggttggtcagggcattggaattcctagcaggacaaatagcatgagcagttcagggttaggtagcccc

SEQ ID NO: 183862 - DNA, 120 bp, Artificial Sequence
  ENSG00000111596_9 (sequence is synthesized)
aacagaagctcgccaagcataatatgtatgccaaagcagcagccttctcgacagccttttactgtgaacagtatgtctggatttggaatgaacaggaatcaggcatttggaatgaataac

SEQ ID NO: 183863 - DNA, 120 bp, Artificial Sequence
  ENSG00000111596_10 (sequence is synthesized)
tccttatcaagtaacatttttaatggaacagacggaagtgaaaatgtgacaggattggacctttcagatttcccagcattagcagaccgaaacaggagggaaggaagtggtaacccaact

SEQ ID NO: 183864 - DNA, 120 bp, Artificial Sequence
  ENSG00000111596_11 (sequence is synthesized)
ccattaataaaccccttggctggaagagctccttatgttggaatggtaacaaaaccagcaaatgaacaatcccaggacttctcaatacacaatgaagattttccagcattaccaggctcc

SEQ ID NO: 183865 - DNA, 120 bp, Artificial Sequence
  ENSG00000111596_12 (sequence is synthesized)
agctataaagatccaacatcaagtaatgatgacagtaaatctaatttgaatacatctggcaagacaacttcaagtacagatggacccaaattccctggagataaaagttcaacaacacaa

SEQ ID NO: 183866 - DNA, 120 bp, Artificial Sequence
  ENSG00000111596_13 (sequence is synthesized)
ggtcgggttactaacattcctcaagggatggtgacggaccaatttggaatgattggcctgttaacatttatcagggcagcagagacagacccaggaatggtacatcttgcattaggaagt

SEQ ID NO: 183867 - DNA, 120 bp, Artificial Sequence
  ENSG00000111596_14 (sequence is synthesized)
gacttaacaacattaggcctcaatctgaactctcctgaaaatctctaccccaaatttgcgtcaccctgggcatcttcaccttgtcgacctcaagacatagacttccatgttccatctgag

SEQ ID NO: 183868 - DNA, 120 bp, Artificial Sequence
  ENSG00000111596_15 (sequence is synthesized)
tacttaacgaacattcacattagggataagctggctgcaataaaacttggccgatatggtgaagaccttctcttctatctctattacatgaatggaggagacgtattacaacttttagct

SEQ ID NO: 183869 - DNA, 120 bp, Artificial Sequence
  ENSG00000111596_16 (sequence is synthesized)
gcagtggagctttttaaccgtgattggagataccacaaagaagaacgagtatggattaccagggcaccaggcatggagccaacaatgaaaaccaatacctatgagaggggaacatattac

SEQ ID NO: 183870 - DNA, 120 bp, Artificial Sequence
  ENSG00000111596_17 (sequence is synthesized)
ttctttgactgtcttaactggaggaaagtagctaaggagttccatctggaatatgacaaattagaagaacggcctcacctgccatccaccttcaactacaaccctgctcagcaagccttc

SEQ ID NO: 183871 - DNA, 120 bp, Artificial Sequence
  ENSG00000111596_18 (sequence is synthesized)
aaaaaaaaaaaaaaaaaaaaaagacttcccttttcttggggtatggctgtctcagcacaatactcaacataactgcagaactgatgtggctcaggcaccctggttttaattccttgagga

SEQ ID NO: 183872 - DNA, 120 bp, Artificial Sequence
  ENSG00000111596_19 (sequence is synthesized)
aggatctggcaattggcttacgcaaaaggtcaccatttgaggtcctgccttactaattatgtgctgcccaacaactaaatttgtaatttgtttttctctagtttgagcagggtctgaatt

SEQ ID NO: 183873 - DNA, 120 bp, Artificial Sequence
  ENSG00000111596_20 (sequence is synthesized)
ttttcatttatttccttttttgccagcagacagacttgagtctgtaaagacaagcaaatacactgacagaagtttaccatagtttctaaaatgtaaaaaagaaaacccccaaaagactca

SEQ ID NO: 183874 - DNA, 120 bp, Artificial Sequence
  ENSG00000111596_21 (sequence is synthesized)
agaaaattagaccacaaattttgcattgttcattgtagcactattggtaataaaataacaaatgtttgtgcatttttatgtgaagatccttctcgtatttcatttggaaagatgagcaag

SEQ ID NO: 183875 - DNA, 120 bp, Artificial Sequence
  ENSG00000111596_22 (sequence is synthesized)
aggtctgcttccttcattttacttccccttctgtttttgaaaggcagtttcgccaagcttaatgcaagaatatctgactgtttagaagaaagatattgccacaatctctggatggttttc

SEQ ID NO: 183876 - DNA, 120 bp, Artificial Sequence
  ENSG00000111596_23 (sequence is synthesized)
cagggttgtgttattactgagcttcatctttccagaatgagcaaaacactgtccagtctttgttacgattttgtaataaatgtgtacattttttttaaatttttggacatcacatgaata

SEQ ID NO: 183877 - DNA, 120 bp, Artificial Sequence
  ENSG00000111596_24 (sequence is synthesized)
aaggtatgtatgtacgaatgtgtatatattatatatatgacatctattttggaaaatgtttgccctgctgtacctcatttttaggaggtgtgcatggatgcaatatatgaaaatgggaca

SEQ ID NO: 183878 - DNA, 120 bp, Artificial Sequence
  ENSG00000111596_25 (sequence is synthesized)
ttctggaactgctggtcaggggactttgtcgccctgtgcactaaaagggccagattttcagcagccaaggacatccatacccaagtgaatgtgatgggacttaaaagaagtgaactgaga

SEQ ID NO: 183879 - DNA, 120 bp, Artificial Sequence
  ENSG00000111596_26 (sequence is synthesized)
caattcactctggctgtttgaacagcagcgtttcataggaagagaaaaaaagatcaatcttgtattttctgaccacataaaggcttcttctctttgtaataaagtagaaaagctctcctc

SEQ ID NO: 183880 - DNA, 120 bp, Artificial Sequence
  ENSG00000111596_27 (sequence is synthesized)
caagatgctgggattacagagcggaagaatcccatcgtttatcatgttctggttggactttcttactgtttgctggagttgaacttcagagctatggcgtcaaccctgctgtaatatctc

SEQ ID NO: 183881 - DNA, 120 bp, Artificial Sequence
  ENSG00000111596_28 (sequence is synthesized)
tacaggcgtgagccaccgcacctggccgcaaagttatcttttaagaggttatcttaggtcttgcgtggagtctaggatgatagcactgatggtggcaggtgacaaacagcatgtttggtg

SEQ ID NO: 183882 - DNA, 120 bp, Artificial Sequence
  ENSG00000111596_29 (sequence is synthesized)
aatgaggaaattcccttttagaatcttaactacctatctgtgtaatcatgtaataacagttatctactacaaagtggggagtttctgtttatctctccattttttctttagtagtagcaa

SEQ ID NO: 183883 - DNA, 120 bp, Artificial Sequence
  ENSG00000111596_30 (sequence is synthesized)
gtcaacaaagtaatcttgagataacagttactgtttgagattcttacagttgtgaaatttggagaaaactaaaaattaattgggaagtggcaaaataaattgaaaatggtaaaacaaaaa

SEQ ID NO: 183884 - DNA, 120 bp, Artificial Sequence
  ENSG00000111596_31 (sequence is synthesized)
ttaaaagctatagcgcaggctaaaaggacggtagaaagttttcttcaaaaattaagaacccaaggttataagaatactaaaaagttaagaaattgagatgattaaaatagacaaagtaga

SEQ ID NO: 183885 - DNA, 120 bp, Artificial Sequence
  ENSG00000111596_32 (sequence is synthesized)
gaagttgggttaaattttaatttttaaaggaagccagctgattgttttaacttaaaatgaacaaaaatacatttaatttattctatatatatttattgagcgcctactgtgtaataggta

SEQ ID NO: 183886 - DNA, 120 bp, Artificial Sequence
  ENSG00000111596_33 (sequence is synthesized)
atataaacttctgggctttgtatcatatttctatatttcctatccatttaccatatatgggaaccctactgccaccctgttgtaccccaccctcaaaatgcgcacatgcgcacgcacaca

SEQ ID NO: 183887 - DNA, 120 bp, Artificial Sequence
  ENSG00000111596_34 (sequence is synthesized)
cgtttgtatatgaaagcggtcaattacaggtggaagtcctcagggcttctgcttcactgcctgtgcctcagctatatctttctggccatttgcaggaggcactatcattgtcaccatttg

SEQ ID NO: 183888 - DNA, 120 bp, Artificial Sequence
  ENSG00000111596_35 (sequence is synthesized)
tgtgtaaccgaagcttcaagcattctagatataacctccatctgagcataatgaaaagacaagttatatcgtaacaatctccctcttgttagctcacaagctataattttaggttaccat

SEQ ID NO: 183889 - DNA, 120 bp, Artificial Sequence
  ENSG00000111596_36 (sequence is synthesized)
cttccatgggggaaatatatgctttttattctctttgttacatctctaggatttggggtttctattatgctggttgcgtattcctttgctaaattgttcatggaattctttgacatgaaa

SEQ ID NO: 183890 - DNA, 120 bp, Artificial Sequence
  ENSG00000111596_37 (sequence is synthesized)
tcaatctgcaagtatcttttgagcacctacatacacctagtacagtgccgtgcattatttaggaagaaggcgcaatcatttcgaattatattatggttggtttttataatctcttaaaaa

SEQ ID NO: 183891 - DNA, 120 bp, Artificial Sequence
  ENSG00000111596_38 (sequence is synthesized)
tacgtatacatatgcttgtgtgtgtacacatgtatgtttgcattttctaatcaggttagtgtaattttttcagaattgatatattagaagtgatttttcttcccagaataccatgatagc

SEQ ID NO: 183892 - DNA, 120 bp, Artificial Sequence
  ENSG00000111596_39 (sequence is synthesized)
aaagttaaatgggaaaactttgtacaaaaacccaagaggaagtcctcattggtattcagaagttattttcttctgttatccctgccttagtttaccttaagtgttttattttgtggtctg

SEQ ID NO: 183893 - DNA, 120 bp, Artificial Sequence
  ENSG00000111596_40 (sequence is synthesized)
ccttttctctccttaattgatcacacattttttcaaaataatatattcctggtgattaataatgactgactatacattgaagatgtttttctgagccaaggtttttctcaacctccacac

SEQ ID NO: 183894 - DNA, 120 bp, Artificial Sequence
  ENSG00000111596_41 (sequence is synthesized)
tgttgacatttgggccaggtaattctttgtagagaggagatgtggggggctattgtgtttatacagaatgttaagcaatattcctggccttggcctacaagatgctagtagcactttctg

SEQ ID NO: 183895 - DNA, 120 bp, Artificial Sequence
  ENSG00000111596_42 (sequence is synthesized)
tttctaacccccatagcctctattgtgacagacacaaatgttttcagacattggcagatgtcacctggggaaaaaaaattgccccctgttgaaaaccattgctcatgggtcatgtatagc

SEQ ID NO: 183896 - DNA, 120 bp, Artificial Sequence
  ENSG00000111596_43 (sequence is synthesized)
ttatgcagactcttggtctccgttaatatccttcatcaccctttttcactgtctctaatagataagaaatttggctaatcagggataaatggaaataaaggaggggaaacatatgcaata

SEQ ID NO: 183897 - DNA, 120 bp, Artificial Sequence
  ENSG00000111596_44 (sequence is synthesized)
acaatataacaatgtagatatgaaaattctgtgacagcaatgtagctatactatttttatcacatagtttttttcttttgggaaaacctgatagagaccagtaacaaaacggtgaattta

SEQ ID NO: 183898 - DNA, 120 bp, Artificial Sequence
  ENSG00000111596_45 (sequence is synthesized)
aaagaatcagttcatccattattttaagatagaattaatatttgatcacattttcaaccaagaaggatttctgtgccattcagatatgaatacaaataacagtatatgaagaagggaaac

SEQ ID NO: 183899 - DNA, 120 bp, Artificial Sequence
  ENSG00000111596_46 (sequence is synthesized)
atttattgtttatattctaaagtttccaaattagtctccccaaaataaaaaaaaaaatgatctgccctggaagttgagtacctagctacttgattctcagttcagactctaatgttttta

SEQ ID NO: 183900 - DNA, 120 bp, Artificial Sequence
  ENSG00000111596_47 (sequence is synthesized)
tccatatcgttcttgaattgtggagccccaaactggatattgttctccaataagggcccgactaatgccaagtatagtgggaggattatttcccagttcttgcatgttttacatctataa

SEQ ID NO: 183901 - DNA, 120 bp, Artificial Sequence
  ENSG00000111596_48 (sequence is synthesized)
catggagtccaagaaaatctgaaataatatggagttgttttataattgattgcaatttgctcactctgtaagtcgctttcaagtagaatactgacatattcttttaaattttattttgtt

SEQ ID NO: 183902 - DNA, 120 bp, Artificial Sequence
  ENSG00000111596_49 (sequence is synthesized)
tgtatttgagagttaactggtatttataatatctagtcaaatatttaaataaaacaagcttttaaaccaaaattgttaataattaatccaatatcaaattaaatttttaagcacctacgc

SEQ ID NO: 183903 - DNA, 120 bp, Artificial Sequence
  ENSG00000111596_50 (sequence is synthesized)
acgcatgacatggattactgttgatttcccttgtattattttgtatgttgagttattaatcagtaaatgaaaatttagttcttcattgttaccctggatactaattttttgaagtacgct

SEQ ID NO: 183904 - DNA, 120 bp, Artificial Sequence
  ENSG00000111596_51 (sequence is synthesized)
ttcatagcattaaaaaaaagaaaccttttggtgtattatcatgaggaaagttaactttataatctgtagcaaaatatcataaatatcaattgcaattctccggattattttcattacata

SEQ ID NO: 183905 - DNA, 120 bp, Artificial Sequence
  ENSG00000111596_52 (sequence is synthesized)
aaatctgtaagtaactgagaagtgtgtatgtgagtgatgtagtttttcccttcagatttctcttatattaacaattacttactaaatactattacaaaactgttttatcttgatatctgt

SEQ ID NO: 183906 - DNA, 120 bp, Artificial Sequence
  ENSG00000111596_53 (sequence is synthesized)
aataacctaacttctgaagaatgtggaaaagctttataacttagaagatagcctatttttttcctatttcatataggtttgcaaatttctgttgaacttctcagagttaatttagacttt

SEQ ID NO: 183907 - DNA, 120 bp, Artificial Sequence
  ENSG00000111596_54 (sequence is synthesized)
tattgtagtccctgtcagctggatcccatgaagtttgataatatagccttctaaggagctgtgtttttcttgagtaagttttctccttgaagaatttatacacatttttatacctgtgtt

SEQ ID NO: 183908 - DNA, 120 bp, Artificial Sequence
  ENSG00000111596_55 (sequence is synthesized)
gattcaaccaactcagcttcttctttctgacttaacaaatatgtttatttcttccacatttcactgaaaatagcttttctctgtgtgtgatgggagtttatatattattaaaataattga

SEQ ID NO: 183909 - DNA, 120 bp, Artificial Sequence
  ENSG00000111596_56 (sequence is synthesized)
taaagaagatcggtaagaattaaaataagtacaaagttttaaagcttgtatgtctaacttatcttcaaggtagctttggtgattttaggtaatatactatatttagtttctcttttacat

SEQ ID NO: 183910 - DNA, 120 bp, Artificial Sequence
  ENSG00000111596_57 (sequence is synthesized)
gaaagcattgaggagtgtaacttcaagtgtatcccaaagcataaagacctgagaaagagatagatttttttttttctgtgactgaagatctgagataaataagatattttcccttgattt

SEQ ID NO: 183911 - DNA, 120 bp, Artificial Sequence
  ENSG00000111596_58 (sequence is synthesized)
ctttttctttaaatactcaaatgtggatgatataggatttatttgtataccatggaacaatgatggaaacaattttctatagaacttgaaaaacaggtaataatttaactaccaatttaa

SEQ ID NO: 183912 - DNA, 120 bp, Artificial Sequence
  ENSG00000111596_59 (sequence is synthesized)
atgtaataaagaataaatagcaaggtattaatatgtgaacttgaatttgtatacttaacaaattttaatgtcacatttaatttttttcatgctagaatttgaatacatctggcaagacaa

SEQ ID NO: 183913 - DNA, 120 bp, Artificial Sequence
  ENSG00000111596_60 (sequence is synthesized)
ccgtctcaaaaaaaaaaaaacaaaaacagatgtcccctaacagacaacaccaaataagatccacataagaaattaaatctttttttttagatgtttctcagtggtaaatgtctttacttc

SEQ ID NO: 183914 - DNA, 120 bp, Artificial Sequence
  ENSG00000111596_61 (sequence is synthesized)
agatgtttctcagtggtaaatgtctttacttctcagaccaagtccacatactgtattttgtatctgaattattttaacagttccaattcatgtgactattgtgttttcagaaggtgtatt

SEQ ID NO: 183915 - DNA, 120 bp, Artificial Sequence
  ENSG00000111596_62 (sequence is synthesized)
tgctttttaagatatgtagtatacagtagaaagctatagcctttgtatcatggatttgaatttaactcctattgctgttatttatgctttgaccttctacaattttctttttcatgcctg

SEQ ID NO: 183916 - DNA, 120 bp, Artificial Sequence
  ENSG00000111596_63 (sequence is synthesized)
tttcctcttttgtaaaattgaggagttccatctggaatatgacaaattagaagaacggcctcacctgccatccaccttcaactacaaccctgctcagcaagccttctaaaaaaaaaaaaa

SEQ ID NO: 183917 - DNA, 120 bp, Artificial Sequence
  ENSG00000111596_64 (sequence is synthesized)
ttcaaatgtgttatatgtaattggaaccagcaaattggttacacctcaatttgaaaatttgggtttataattttaaattaagtactggatttgatagttgaaatagttgggaacactttt

SEQ ID NO: 183918 - DNA, 62 bp, Artificial Sequence
  ENSG00000111596_65 (sequence is synthesized)
ggttggtgacaaacagcatgtttggtgcttcaagaaagaagtttgtagagggggtcgacagt

SEQ ID NO: 183919 - DNA, 120 bp, Artificial Sequence
  ENSG00000111596_66 (sequence is synthesized)
tctctaccccaaatttgcgtcaccctgggcatcttcaccttgtcgacctcaagacatagacttccatgttccatctgagtacttaacgaacattcacattagggataagttatttttctt

SEQ ID NO: 183920 - DNA, 120 bp, Artificial Sequence
  ENSG00000111596_67 (sequence is synthesized)
gaaagagtagtgctgctgtaactcaagttagtgtgacttttagaaaacttatagtattaaaaattaatttcatttctacagtttggttttatcgaattgtgatattctcttaagaaacat

SEQ ID NO: 183921 - DNA, 120 bp, Artificial Sequence
  ENSG00000111596_68 (sequence is synthesized)
ggaatatattatagaatgtttgttttatgtttttctgaagaatgagaaaatgttagattttcacatttatggtatgatttacagatttgtggagtgtaaatgcaatgctctgctctgttt

SEQ ID NO: 183922 - DNA, 120 bp, Artificial Sequence
  ENSG00000111596_69 (sequence is synthesized)
ctatctttaaatggaactatttctccatcaagaaatttatttttacattattaaagtgaatttaatttagattaaaaccgtatcttaaccatggcttcataatctatatacctaaaaaga

SEQ ID NO: 183923 - DNA, 120 bp, Artificial Sequence
  ENSG00000111596_70 (sequence is synthesized)
ggctcacacttgtaatcccagcactttggtgaggtggacagatcacttgaggccagaagttagggacagcctgggcaacacagcaaaccacatttctacaaaaaataaaggaaaatatta

SEQ ID NO: 183924 - DNA, 120 bp, Artificial Sequence
  ENSG00000111596_71 (sequence is synthesized)
cagcaaaccacatttctacaaaaaataaaggaaaatattagctaggtgtggtggcacacatctatatagtcctagctacttgggaggctacagcaggaggatcgcttgagcccaggagtt

SEQ ID NO: 183925 - DNA, 120 bp, Artificial Sequence
  ENSG00000111596_72 (sequence is synthesized)
cagtgagctatgattgtgccattgcactctagtgtggctgacagtgcaagaccctgtctctaaaaataactaataagtgccaaatttgtaagaagacagaattgacataactcatggatt

SEQ ID NO: 183926 - DNA, 120 bp, Artificial Sequence
  ENSG00000111596_73 (sequence is synthesized)
taaataattcgatactgaatttaatcatttcataaacattattacttataagcaaggcagtgtgcatatttgttgtacgttttgaagtgctgattaaagtccacattttcattatcagca

SEQ ID NO: 183927 - DNA, 120 bp, Artificial Sequence
  ENSG00000111596_74 (sequence is synthesized)
gtctattggccagtttaaacaaatattaatgtaaagaaattggttcattgatattttttccctgagcagttctgtatttacctgatgctctaaaattaagttttctgtcgttactcaaat

SEQ ID NO: 183928 - DNA, 120 bp, Artificial Sequence
  ENSG00000111596_75 (sequence is synthesized)
gtacagttggcaacacattttgttatcaatagacaattatgtttactatagagtaaactattagtaattatttatgaccttatgattgggagaccttttcacaaatttaagtatttcata

SEQ ID NO: 183929 - DNA, 120 bp, Artificial Sequence
  ENSG00000111596_76 (sequence is synthesized)
acatttctaataacatttctataaatggctttggatcaaatagtttaaagtatataattcagtatgttgataatgaattgtttcgtttcatttcacaactgagaggatttttcccttatg

SEQ ID NO: 183930 - DNA, 120 bp, Artificial Sequence
  ENSG00000111596_77 (sequence is synthesized)
tttttccttcatttttgtgagaatagagattattacctgttgttccttttaattgttcataagtaaataaatacattcaggcactcattcatctatcactggcagttctgttttcatatt

SEQ ID NO: 183931 - DNA, 120 bp, Artificial Sequence
  ENSG00000111596_78 (sequence is synthesized)
ttatttatgtcttaaaaactacctcatgacgttggtaggaaagcatttctttacatggaggtttattttgtgggacattacctcctctggatgttacttcctcagtttacaagtagtgta

SEQ ID NO: 183932 - DNA, 120 bp, Artificial Sequence
  ENSG00000111596_79 (sequence is synthesized)
aattctcattgattcttttatgaattgtaatggattttctcttagcttttgagaatttagaatctgaaatttgaataaaaagtaaatatattcagtataatttttcaaaatgctctagtt

SEQ ID NO: 183933 - DNA, 120 bp, Artificial Sequence
  ENSG00000111596_80 (sequence is synthesized)
tcaagatagttaaaaaattatgtggaatttacataattaattcaaatatagtttgtatttagttccttatcaaataatgcaaatagttggagatacctcaatttcttttgagtgttaaga

SEQ ID NO: 183934 - DNA, 120 bp, Artificial Sequence
  ENSG00000111596_81 (sequence is synthesized)
agagcaagaaaggagtgaagtttttgcaacacattgtgtctttatttggtctgcctatgtttttatcacattgcttataaaacttttaaaatccttgtttgtataaaaagtttctttagt

SEQ ID NO: 183935 - DNA, 120 bp, Artificial Sequence
  ENSG00000111596_82 (sequence is synthesized)
taaataaaagtgtgtgtattaattagtgtgccttctggacaaattaagaaatattttttctatatttcaatgcggttgtatttaataacttataataaatgagtaggaagcattcatatt

SEQ ID NO: 183936 - DNA, 120 bp, Artificial Sequence
  ENSG00000111596_83 (sequence is synthesized)
attgtctttctgggtatactcagatttgccttttcatattttcactttgttcttgaggtgtggcttctctctaataagtgtgtttcatcatgcatttatgtccaaagattctgttaccca

SEQ ID NO: 183937 - DNA, 120 bp, Artificial Sequence
  ENSG00000111596_84 (sequence is synthesized)
tcacaaaacgatacgttttcttgaaaatcaggttgattttggaaagcacattaaaacattttgttgttgtggttgttagaaaaggattgttcttggattcgccaccaggcaaattttggt

SEQ ID NO: 183938 - DNA, 120 bp, Artificial Sequence
  ENSG00000111596_85 (sequence is synthesized)
tgatatgtcctctctttataaaataagttgattacctgtgtggtaagagttctaggtttatgaatagaactggagacatgtttgactattactactttgctttagttatactttgagtac

SEQ ID NO: 183939 - DNA, 120 bp, Artificial Sequence
  ENSG00000111596_86 (sequence is synthesized)
tctcaagtaagatttggttttgtgcattggagacttaccaacaaaagactttttaagatcacatctatagtatttgaaaaccgtatcatgtttagggattcaaaacaaaaaaacgggttt

SEQ ID NO: 183940 - DNA, 120 bp, Artificial Sequence
  ENSG00000111596_87 (sequence is synthesized)
ttgtactttttcacttctctttgtactgtctgttgcatatactttgcgaataagaggagttactcattttgttaggattttcaagctgtttgggtaatttgtatgagaattatgtctgaa

SEQ ID NO: 183941 - DNA, 120 bp, Artificial Sequence
  ENSG00000111596_88 (sequence is synthesized)
atataacactttcttgcaaaagtagtatttaagcttgattgcctacatgtatatatatgtattttttaaatggagaaatgtaggggcaaaactaccttgatctagttgttatcatcatac

SEQ ID NO: 183942 - DNA, 120 bp, Artificial Sequence
  ENSG00000111596_89 (sequence is synthesized)
ctgtttgattcactttattctgtctagtaaaatctgaattaaaataggtttagcacatttactgtttaatcctcattccataaactccaggttttgcttttatttagatatctataattt

SEQ ID NO: 183943 - DNA, 120 bp, Artificial Sequence
  ENSG00000111596_90 (sequence is synthesized)
tactgctcttttaaattttaaaaaacttatttgtgaagggttatcaaaattctcatctccttgatacctttctaaccttatatctttatcataactttatcatatctttgtgcgttctca

SEQ ID NO: 183944 - DNA, 120 bp, Artificial Sequence
  ENSG00000111596_91 (sequence is synthesized)
tagtattgggcattgaatgtataaatttttacctttccatagtttttcacattttgtttttaaaatacactttgcttaaattgtcaatgtaacatggatctctaaaaccctgcttatttc

SEQ ID NO: 183945 - DNA, 120 bp, Artificial Sequence
  ENSG00000111596_92 (sequence is synthesized)
tactattgacagattgtatttattataaattgttttcatctctgagcacttattccatgtttgatggtacctgtaatagcatcagcaattctaatatgctattaaacaaaaatttccatt

SEQ ID NO: 183946 - DNA, 120 bp, Artificial Sequence
  ENSG00000111596_93 (sequence is synthesized)
gtgtatgggggtggtggtggaccggacgtaaagcgtcgctgtactcgggccgctgcagcagcagcagctccagatcctaggcccggtcccatccgcgagtggtggggcttccccagactc

SEQ ID NO: 183947 - DNA, 120 bp, Artificial Sequence
  ENSG00000111596_94 (sequence is synthesized)
cactcccctaggctcccgccagcgcggaggagccgctgccgccgcgctgcttcctgggggagaagagaaggcggcagcggccgtggccgtggccgacgagctcgagcccgctttagacgg

SEQ ID NO: 183948 - DNA, 120 bp, Artificial Sequence
  ENSG00000111596_95 (sequence is synthesized)
ctctgccgccttcccggcagctggtgctgtctgtggcttcttaccttctctcaatacacgtatatcatctgccagttatgtgtatttctgttagtgtgtttgcaagtgtcagatgggaga

SEQ ID NO: 183949 - DNA, 120 bp, Artificial Sequence
  ENSG00000111596_96 (sequence is synthesized)
cactggactggctaacgggtgtcaggatcctgcaggccctgggataccgaaggctgtgcatggtggagggagaaggaatgcaactgcgatgccgcctctgccaccgcaccaggaaggtga

SEQ ID NO: 183950 - DNA, 120 bp, Artificial Sequence
  ENSG00000111596_97 (sequence is synthesized)
agcttccgtagtgtcgtagactgagtccggatgatcctggggcggcggaggaaccacagacgcttctgtctgtgaagttgcaagtcctgggtttctacttccgcaggggcctctccacct

SEQ ID NO: 183951 - DNA, 120 bp, Artificial Sequence
  ENSG00000111596_98 (sequence is synthesized)
agttaacttacatgaggctcaggttccttacctgtgtgtaaaatgggaacattgaactaggtgatctttaagatcccttccggctctaaaattgtttgacattatcttggtggtcagtaa

SEQ ID NO: 183952 - DNA, 120 bp, Artificial Sequence
  ENSG00000111596_99 (sequence is synthesized)
atctgtttataagtaccaatacatccagttccagtaatgtgccacatatttgccaactgtttaattccatctccttggcttgacactcttagaagagtgtcccaaaacaattggtttcac

SEQ ID NO: 183953 - DNA, 120 bp, Artificial Sequence
  ENSG00000111596_100 (sequence is synthesized)
tgatagttacattattgaatttggtaagaggttttgtaattttgcataagccttggtaacatttgaaatattttttgtgtctactgctttgtaaaataaagatactctcttgcaacccca

SEQ ID NO: 183954 - DNA, 120 bp, Artificial Sequence
  ENSG00000111596_101 (sequence is synthesized)
agcagcagccttctcgacagccttttactgtgaacaggaatcaggcatttggaatgaataactccttatcaagtaacatttttaatggaacagacggaagtgaaaatgtgacaggattgg

SEQ ID NO: 183955 - DNA, 120 bp, Artificial Sequence
  ENSG00000111596_102 (sequence is synthesized)
cctagggtggggctggtgccatggctcaccctccaacctttccttcttcacttcagcctccagctctgagctttccaatccccagagtagcaaatgttgaaagaagttgcacaggctttg

SEQ ID NO: 183956 - DNA, 120 bp, Artificial Sequence
  ENSG00000111596_103 (sequence is synthesized)
taagggaattagaagtaaagatggtcattttacagttggagtctttgtttttcctgaaataaaattagaaatctctttttctggatttcaaaatgttttcttttcctccttattcagaaa

SEQ ID NO: 183957 - DNA, 120 bp, Artificial Sequence
  ENSG00000111596_104 (sequence is synthesized)
tccccagagtagcaaatgttgaaagaagttgcacagggagaagatgggtatagtttaaccctttcatatcatccatccatccattcctactagttctgcctcagagtatatcctttattc

SEQ ID NO: 183958 - DNA, 120 bp, Artificial Sequence
  ENSG00000111596_105 (sequence is synthesized)
aactactactcaccaccctattaggccatcattatctatcactggcctcctaatgcattttcctgctttcgttttataccctctttagcccattcctcatggagtagctaggacctttaa

SEQ ID NO: 183959 - DNA, 120 bp, Artificial Sequence
  ENSG00000111596_106 (sequence is synthesized)
tagcaagaataatcttaacactaacctgcatatttttgaggttaggtaattcaggtatccaggaagttggctcttcaagtacacaaaatggtgccctgaatctgttttcctcaaggttca

SEQ ID NO: 183960 - DNA, 120 bp, Artificial Sequence
  ENSG00000111596_107 (sequence is synthesized)
tatataaatttttgagtttttgttttttaactaatctgcctaaaatgttctggttctcatttgttcatggaaggactttagagaagttttcaagtaaagataaagaatagattcagaaaa

SEQ ID NO: 183961 - DNA, 120 bp, Artificial Sequence
  ENSG00000111596_108 (sequence is synthesized)
ataatattagtgttggttttgaaacatattgttattttatatggagaccaaaaatacacacttctgtttttcttcatctgaaagttagtgttcttactgtatatctaaaactattttcta

SEQ ID NO: 183962 - DNA, 120 bp, Artificial Sequence
  ENSG00000111596_109 (sequence is synthesized)
ccagacttccatgttccatctgagtacttaacgaacattcacattagggataaggtgagtgtagtttattattctactcagtcagcatgaatttatctatttttcacatgtttttcagtt

SEQ ID NO: 183963 - DNA, 120 bp, Artificial Sequence
  ENSG00000111602_0 (sequence is synthesized)
gcctcgctcttcgcgcaggcggggaccggtccagctgagcctggtggcggaaaggctgcggccccgcgccagagggccggtggctcctccgggcttctgaggacccgcagggagcgggcc

SEQ ID NO: 183964 - DNA, 120 bp, Artificial Sequence
  ENSG00000111602_1 (sequence is synthesized)
tcatcatttctgtctcctgtttctccacttccttctctgttggttggtccactgatgtatggacttgcacatgatgaactgtgaacttctagccacatgtagtgcccttgggtacttgga

SEQ ID NO: 183965 - DNA, 120 bp, Artificial Sequence
  ENSG00000111602_2 (sequence is synthesized)
gggagacacttaccataaggaaccagattgcttagagagcgtgaaggatctgatccgctatttgaggcatgaggatgagacacgagatgtgcggcagcagctgggggcagcccagatcct

SEQ ID NO: 183966 - DNA, 120 bp, Artificial Sequence
  ENSG00000111602_3 (sequence is synthesized)
acagagcgaccttctgcccatcctcacccagcaccaccaggacaagcctctctttgatgctgttatcagactgatggtgaacttgacacaaccagccttgctctgttttggcaatctgcc

SEQ ID NO: 183967 - DNA, 120 bp, Artificial Sequence
  ENSG00000111602_4 (sequence is synthesized)
taaggagcccagctttcggcaccattttttgcaggtgctaacttatttgcaggcctacaaagaggcctttgccagtgagaaggcttttggagtcctcagtgaaaccttgtatgagctgct

SEQ ID NO: 183968 - DNA, 120 bp, Artificial Sequence
  ENSG00000111602_5 (sequence is synthesized)
gcagctgggctgggaggaacggcaggaggaagacaacttgctgattgaacggatcctactgctggtcagaaatattctccatgtcccagctgaccttgatcaggagaagaagattgatga

SEQ ID NO: 183969 - DNA, 120 bp, Artificial Sequence
  ENSG00000111602_6 (sequence is synthesized)
tgacgccagtgcccatgaccagctcctctgggcgattcacctcagcggcctggatgacctgctcctctttctggccagctcgtctgctgaggagcaatggagcctacatgtgctagagat

SEQ ID NO: 183970 - DNA, 120 bp, Artificial Sequence
  ENSG00000111602_7 (sequence is synthesized)
tgtctcccttatgtttcgtgaccagaaccccgagcagctggcgggagtagggcagggacgcttagctcaggagcggagtgcagattttgcagaactggaggtgttgcgccagcgagagat

SEQ ID NO: 183971 - DNA, 120 bp, Artificial Sequence
  ENSG00000111602_8 (sequence is synthesized)
ggcagaaaagaagactcgagccctccagcgaggcaacaggcattctcgatttgggggctcctatattgtccaggggttgaaatccattggggagagggacctcatctttcacaaaggcct

SEQ ID NO: 183972 - DNA, 120 bp, Artificial Sequence
  ENSG00000111602_9 (sequence is synthesized)
tcacaacctacgaaactacagttcagatttgggaaagcagccgaaaaaggtgcctaaacgtcgccaggccgcccgagagctgtccattcagcgccgttctgccctcaatgtgaggctctt

SEQ ID NO: 183973 - DNA, 120 bp, Artificial Sequence
  ENSG00000111602_10 (sequence is synthesized)
cctcagagacttctgctctgagttcctggagaactgttacaaccggctcatgggatcagtaaaggatcacctgcttcgggagaaagctcagcagcatgatgagacctattatatgtgggc

SEQ ID NO: 183974 - DNA, 120 bp, Artificial Sequence
  ENSG00000111602_11 (sequence is synthesized)
cttggctttcttcatggccttcaaccgagctgcctccttccggccaggcctggtttctgagaccctcagtgtccgtaccttccacttcattgagcagaacctcaccaactactatgagat

SEQ ID NO: 183975 - DNA, 120 bp, Artificial Sequence
  ENSG00000111602_12 (sequence is synthesized)
gatgctgactgaccgcaaggaagctgcctcctgggcacgccggatgcacttggctctgaaggcctatcaggagctgctggcaacagtgaatgagatggacatatctccagatgaggctgt

SEQ ID NO: 183976 - DNA, 120 bp, Artificial Sequence
  ENSG00000111602_13 (sequence is synthesized)
gagggagagcagccgcatcatcaagaacaatattttctatgtgatggagtaccgagaactattcctggcactttttcgaaagtttgatgagagatgccagccccgctctttccttcgtga

SEQ ID NO: 183977 - DNA, 120 bp, Artificial Sequence
  ENSG00000111602_14 (sequence is synthesized)
cctggtggagaccacccacctcttcctcaaaatgttggagcgattctgtcggagccgtgggaacctggtggtgcagaacaaacaaaagaagagaaggaagaagaagaagaaggtcctaga

SEQ ID NO: 183978 - DNA, 120 bp, Artificial Sequence
  ENSG00000111602_15 (sequence is synthesized)
ccaggccattgtttctggtaatgtcccatctagcccagaagaagtggaggctgtgtggccagccctggctgagcagctacagtgctgtgcccagaattctgagctcagcatggactccgt

SEQ ID NO: 183979 - DNA, 120 bp, Artificial Sequence
  ENSG00000111602_16 (sequence is synthesized)
ggttccctttgatgcggcctcagaggtgccagtggaggagcagcgggcagaagctatggtacggatccaagactgtctcctggctggccaggccccacaggccctgactctcctgaggtc

SEQ ID NO: 183980 - DNA, 120 bp, Artificial Sequence
  ENSG00000111602_17 (sequence is synthesized)
tgctcgggaggtgtggcctgaaggagatgtgtttggctctcaagacatttctccagaggaagagatccagttgctgaaacaaatcctctctgctccacttccccggcagcagggcccaga

SEQ ID NO: 183981 - DNA, 120 bp, Artificial Sequence
  ENSG00000111602_18 (sequence is synthesized)
agaggaggaggaggaggaagaggaggagttgcaagtggtccaggtgtcggagaaagaatttaattttctggactacctgaaacgctttgcatgttcaactgtcgttcgagcctatgtgct

SEQ ID NO: 183982 - DNA, 120 bp, Artificial Sequence
  ENSG00000111602_19 (sequence is synthesized)
aactgtcgttcgagcctatgtgctgctactaaggagctaccagcagaatagtgcccacactaaccattgcattgtgaagatgctgcaccggctggcccatgacctcaaaatggaagccct

SEQ ID NO: 183983 - DNA, 120 bp, Artificial Sequence
  ENSG00000111602_20 (sequence is synthesized)
actttttcagctgtcagtcttctgcctcttcaatcgtctgcttagtgaccctgctgctggagcctacaaagagctagtgacttttgccaaatacatcctgggcaaattttttgcactggc

SEQ ID NO: 183984 - DNA, 120 bp, Artificial Sequence
  ENSG00000111602_21 (sequence is synthesized)
acatggagccccgaagaagaggctcatcttcgggagctgtacctcgccaataaggacgtggaagggcaggatgtggtggaagccatcttggcccacctgaatactgttcctcgaacacgc

SEQ ID NO: 183985 - DNA, 120 bp, Artificial Sequence
  ENSG00000111602_22 (sequence is synthesized)
aagcagatcatccaccatctggtacagatgggactggctgacagtgtcaaggacttccaaaggaaaggaacccatattgtactgtggacgggggatcaggagttggagctgcagcggctt

SEQ ID NO: 183986 - DNA, 120 bp, Artificial Sequence
  ENSG00000111602_23 (sequence is synthesized)
tttgaggaattccgggactcagatgatgtcctgggtcatatcatgaagaatatcacagccaaacgctcacgggcccgaatagtggataaactcttggctctggggctggtggctgagcgg

SEQ ID NO: 183987 - DNA, 120 bp, Artificial Sequence
  ENSG00000111602_24 (sequence is synthesized)
cgggagctgtacaagaaacggcagaaaaagttggcatcctccatcttgccaaatggagcggagtccctgaaagatttttgccaggaagatctggaagaagaggaaaacctgcctgaggaa

SEQ ID NO: 183988 - DNA, 120 bp, Artificial Sequence
  ENSG00000111602_25 (sequence is synthesized)
gacagcgaagaggaagaagaagggggctcagaagcagaacaagtccagggtagcttagtcctttcaaatgaaaaccttggtcaaagcctgcatcaggaaggcttttctatcccgctccta

SEQ ID NO: 183989 - DNA, 120 bp, Artificial Sequence
  ENSG00000111602_26 (sequence is synthesized)
tggctccagaactgcctgatccgagcagctgatgatcgggaagaggatggctgctcccaggccgttccattggtgccactcacagaggaaaatgaggaagccatggaaaacgaacagttt

SEQ ID NO: 183990 - DNA, 120 bp, Artificial Sequence
  ENSG00000111602_27 (sequence is synthesized)
cagcagctgttgcgcaagctaggggttcggccccctgcctctgggcaggaaaccttctggcgaattccagccaagctgagtcctacccagctccggagggcagcagcttctttgagtcaa

SEQ ID NO: 183991 - DNA, 120 bp, Artificial Sequence
  ENSG00000111602_28 (sequence is synthesized)
ccagaggaggaacagaagctgcagccagagctgcagcctaaagtccctggagagcaaggctctgatgaggagcactgtaaagagcaccgagcacaagccctgagggccctcttgctagcc

SEQ ID NO: 183992 - DNA, 120 bp, Artificial Sequence
  ENSG00000111602_29 (sequence is synthesized)
cacaagaagaaagcgggcctggcatccccagaggaggaagacgctgttggtaaagagccgctgaaggcagcacccaagaaacgacaattgctggacagcgacgaggaacaggaagaagat

SEQ ID NO: 183993 - DNA, 120 bp, Artificial Sequence
  ENSG00000111602_30 (sequence is synthesized)
gagggcaggaacagagcaccagagttgggagctccaggaatccaaaagaagaaacgataccagattgaggatgatgaggatgactgaagagctaagaagcctaggggtagagatagacac

SEQ ID NO: 183994 - DNA, 120 bp, Artificial Sequence
  ENSG00000111602_31 (sequence is synthesized)
gtttttagatggtgcattcaagtcagagttggaagggtcatacaggacccagaagctcctcttactggacagagcagtagaatcccaggctctttcacggatttaggctgagaaacttca

SEQ ID NO: 183995 - DNA, 120 bp, Artificial Sequence
  ENSG00000111602_32 (sequence is synthesized)
gcagcagtattggacttctctgctgtcagtctttgtttctcccagtttttatcggtatgccccagcagctctctggagatttagttctcttcttctaggaaccatttcttttggttattg

SEQ ID NO: 183996 - DNA, 120 bp, Artificial Sequence
  ENSG00000111602_33 (sequence is synthesized)
gagctccttagcaaataagaggagtgagtgaaatagagaaagcaccccggaccccttttattggtctgttcctttggctttctcttggaggtgggtcgcagcaccagatggggagcttta

SEQ ID NO: 183997 - DNA, 120 bp, Artificial Sequence
  ENSG00000111602_34 (sequence is synthesized)
tgacatgacaggcgggagttttgtaccacttttagaagataccagatgcctctgtcctcattttgtttcctatgatcatcctctagataccagatagaggcccattcctgcatttgagat

SEQ ID NO: 183998 - DNA, 120 bp, Artificial Sequence
  ENSG00000111602_35 (sequence is synthesized)
agggttggaatatagtactctagatgatgaatgtgtttgctttgtgtttggtattaaacatgtaagattagaagttctcatctcagtctgacttggcgatatgtctaagttccccagccc

SEQ ID NO: 183999 - DNA, 120 bp, Artificial Sequence
  ENSG00000111602_36 (sequence is synthesized)
cccagcccttcccctgctgtgctcttgaaagaagaacttaacaattttagggtaaaaagagaccaacagaccggcacagtggctcaaacctgttgtcctagcactttgggaggctgaggc

SEQ ID NO: 184000 - DNA, 72 bp, Artificial Sequence
  ENSG00000111602_37 (sequence is synthesized)
cggcctggacaatatggcatgcgcctgtaatcccagccactcgggtggctgaggcaggagaattgcctgaac

SEQ ID NO: 184001 - DNA, 64 bp, Artificial Sequence
  ENSG00000111602_38 (sequence is synthesized)
ctgtaatcccagccactcggggtcacgccagtgcatatgcctgggcgacagagcaagactctgt

SEQ ID NO: 184002 - DNA, 120 bp, Artificial Sequence
  ENSG00000111602_39 (sequence is synthesized)
agaccaacaaccttcccttttcttccgctttccctacagaagacacagaaaagcatttttgcctctagatccttttgtctagggtaaattcttagggtgacaagagtatgcggcaggaag

SEQ ID NO: 184003 - DNA, 120 bp, Artificial Sequence
  ENSG00000111602_40 (sequence is synthesized)
aaggaggagccataaaggaagagaagccagcttgttggcatggggcatagaaaaggacaaaatctaggcatgaaaaggatggataaatactgcaaatattatgttcttacccattcttgg

SEQ ID NO: 184004 - DNA, 120 bp, Artificial Sequence
  ENSG00000111602_41 (sequence is synthesized)
aaacgtcagctttcttgcttcctgtgcttccagccgaggtagggcaaaggtgagattgagaaaatagccattcagctcaggaaggcttctaagtaaaggatggatttggattgccctgtt

SEQ ID NO: 184005 - DNA, 120 bp, Artificial Sequence
  ENSG00000111602_42 (sequence is synthesized)
attttggggctgccttttattcccaaggaaagattctcccatcccttctgttcacttactatatttgtaagtgtcatttttggatgaattgaggtaccctctttccagagacctctgatt

SEQ ID NO: 184006 - DNA, 120 bp, Artificial Sequence
  ENSG00000111602_43 (sequence is synthesized)
agttggcatcctccatcttggtaacaatctgaccctagctctgctggcatgggctcacttcccttgaagtggtccttaggagcagtccacctggattcttcctgcctgaggctgttctga

SEQ ID NO: 184007 - DNA, 120 bp, Artificial Sequence
  ENSG00000111602_44 (sequence is synthesized)
gcgggggggtgcggtggtcaggaacgaggagactccactaagttccttgtgttgccttcattttcattcccccaacccccaatgaattttagccaaatggagcggagtccctgaaagatt

SEQ ID NO: 184008 - DNA, 120 bp, Artificial Sequence
  ENSG00000111605_0 (sequence is synthesized)
gctagatccgctgctgctgccgcggcgggcagacctgcaggaggcggcggcggcggcggcggccgaggctgaaggaagatggcggacggcgtggaccacatagacatttacgcggatgtc

SEQ ID NO: 184009 - DNA, 120 bp, Artificial Sequence
  ENSG00000111605_1 (sequence is synthesized)
ggcgaagagttcaaccaggaagctgaatatggtgggcatgatcagatagatttgtatgacgatgtcatatctccatctgcaaataatggagatgccccagaagaccgagattacatggat

SEQ ID NO: 184010 - DNA, 120 bp, Artificial Sequence
  ENSG00000111605_2 (sequence is synthesized)
actctcccaccaactgttggtgatgatgtgggtaaaggagcagcaccaaatgttgtctatacatatactggaaagagaattgcattatatattggaaatctaacatggtggacaacagat

SEQ ID NO: 184011 - DNA, 120 bp, Artificial Sequence
  ENSG00000111605_3 (sequence is synthesized)
gaagacttaactgaagcagttcattctttgggagtaaatgatattttggagataaaattttttgaaaatcgggcaaatggccagtcaaaggggtttgcccttgttggtgttggatctgaa

SEQ ID NO: 184012 - DNA, 120 bp, Artificial Sequence
  ENSG00000111605_4 (sequence is synthesized)
gcatcttcaaaaaagttaatggatctgttacctaaaagagaacttcatggtcagaatcctgttgtaactccatgcaataaacagttcctgagtcaatttgaaatgcagtccaggaaaact

SEQ ID NO: 184013 - DNA, 120 bp, Artificial Sequence
  ENSG00000111605_5 (sequence is synthesized)
acacaatcaggacaaatgtctggggaaggtaaagctggtcctccaggaggcagttcccgtgcagcatttccacaaggtggtagaggacggggccgttttccaggggctgttcctggtggg

SEQ ID NO: 184014 - DNA, 120 bp, Artificial Sequence
  ENSG00000111605_6 (sequence is synthesized)
gacagatttcctgggccagcaggaccaggagggccacccccaccttttccagctggacagactccaccacgtccacccttaggtcctccaggcccacctggtccaccaggtcctccacct

SEQ ID NO: 184015 - DNA, 120 bp, Artificial Sequence
  ENSG00000111605_7 (sequence is synthesized)
cctggtcaggttctgcctcctcctctagctgggcctcctaatcgaggagatcgccctccaccaccagttctttttcctggacaaccttttgggcagcctccattgggtccacttcctcct

SEQ ID NO: 184016 - DNA, 120 bp, Artificial Sequence
  ENSG00000111605_8 (sequence is synthesized)
ggccctccacctccagttccaggctacggcccccctcctggcccaccacctccacaacagggaccacctccacctccaggcccctttccacctcgtccacccggtccacttgggccaccc

SEQ ID NO: 184017 - DNA, 120 bp, Artificial Sequence
  ENSG00000111605_9 (sequence is synthesized)
cttacactagctcctcctccgcatcttcctggaccacctccaggtgccccaccgccagctccgcatgtgaacccagctttctttcctccaccaactaacagtggcatgcctacatcagat

SEQ ID NO: 184018 - DNA, 120 bp, Artificial Sequence
  ENSG00000111605_10 (sequence is synthesized)
agccgaggtccaccaccaacagatccatatgggcgacctccaccatatgataggggtgactatggcccccctggaagggaaatggatactgcaagaacgccattgagtgaagctgaattt

SEQ ID NO: 184019 - DNA, 120 bp, Artificial Sequence
  ENSG00000111605_11 (sequence is synthesized)
gaagaaatcatgaatagaaatagggcaatctcaagcagtgctatttcgagagctgtgtctgatgccagtgctggtgattatgggagtgctattgagacactggtaactgcaatttcttta

SEQ ID NO: 184020 - DNA, 120 bp, Artificial Sequence
  ENSG00000111605_12 (sequence is synthesized)
attaaacaatccaaagtatctgctgatgatcgttgcaaagttcttattagttctttgcaagattgccttcatggaattgagtccaagtcttatggttctggatcaagacgtgaacgatca

SEQ ID NO: 184021 - DNA, 120 bp, Artificial Sequence
  ENSG00000111605_13 (sequence is synthesized)
agagagagggaccatagtagatcacgagaaaagagtcgacgtcataaatcccgtagtagagaccgtcatgacgattattacagagagagaagcagagaacgagagaggcaccgggatcgt

SEQ ID NO: 184022 - DNA, 120 bp, Artificial Sequence
  ENSG00000111605_14 (sequence is synthesized)
gaccgagaccgtgaccgagagcgtgaccgagagcgcgaatatcgtcatcgttagaagctgaaggaagaggatcaccttccaagacaaaacagtcttcatgggggaaaaatgacgcttgtc

SEQ ID NO: 184023 - DNA, 120 bp, Artificial Sequence
  ENSG00000111605_15 (sequence is synthesized)
cagcagtttgcttcttgtgattgaactgaacctgtaaggattcatggataaaatgaacaggaatagatctgaataaagcaaatctgcataaatggtaaccagtagctctacttttatttt

SEQ ID NO: 184024 - DNA, 120 bp, Artificial Sequence
  ENSG00000111605_16 (sequence is synthesized)
ttatgttgcttaactgttttatttgaaggaaacctgtgtgatttaaaaagttatagcttttgcaactttattactggttatatacatttggccattatgatgtgcaagcaattggaaaaa

SEQ ID NO: 184025 - DNA, 120 bp, Artificial Sequence
  ENSG00000111605_17 (sequence is synthesized)
aagtcaagtaaatgcttgtttttgtagtagtttgttcttgttaaaaatgtttatatgataatgtctgtaaacagcatcactttgattacaatagatgtagtgttgtaataaactgtttaa

SEQ ID NO: 184026 - DNA, 120 bp, Artificial Sequence
  ENSG00000111605_18 (sequence is synthesized)
tggggctgatgtgtaaagctgttcaagttatttgatgtttacacctcagggaaagtcttgtgttcagcaatatctaaagataatgttactatgacaacatttttactgtcctttaaagca

SEQ ID NO: 184027 - DNA, 120 bp, Artificial Sequence
  ENSG00000111605_19 (sequence is synthesized)
ttgcaatagcgtttttggatatgcctcaatctaatcttgcgttcagtgaattaaacatagtaattaagtgtcttttgcccttgattttgatattagaataggtgattacatggatattta

SEQ ID NO: 184028 - DNA, 120 bp, Artificial Sequence
  ENSG00000111605_20 (sequence is synthesized)
atatttctatattctgcttttctagctgtttttacctagttagcttgtgactttgctgaatggtatgtaaacttgtaaaaatagagatttgacagacatagcaatctagtcaatgtgtaa

SEQ ID NO: 184029 - DNA, 120 bp, Artificial Sequence
  ENSG00000111605_21 (sequence is synthesized)
ggggtcaaaaaaacagaggttttaacacataagtaaaaacccgtacatatttgatgtgtaatgcaggttaattacaacacagatgtaccgaaacacttaattgtgaaccgctaacattga

SEQ ID NO: 184030 - DNA, 120 bp, Artificial Sequence
  ENSG00000111605_22 (sequence is synthesized)
agaaattttgacaattccgatttgatgctgcaattacttgctgtttttattgatcttatggtttatttcttaagccatagtcagtgtaaatacagccctgcagcaggtaaatgtgagtaa

SEQ ID NO: 184031 - DNA, 120 bp, Artificial Sequence
  ENSG00000111605_23 (sequence is synthesized)
agagagccttatattttccaattggtataaatttttgaaggatgtgatgttcattaacattcggttgtattccccagtatttgtaatgggaaattacagataaaccgtgtctgcacagtt

SEQ ID NO: 184032 - DNA, 120 bp, Artificial Sequence
  ENSG00000111605_24 (sequence is synthesized)
taaggaatactatgtatattcatgcaccgtattgattcatgctatagttacttaatcaaagatttttttcaaacctgccttacatataggcccactttaaaagcacctgactagcatgtg

SEQ ID NO: 184033 - DNA, 120 bp, Artificial Sequence
  ENSG00000111605_25 (sequence is synthesized)
ttcttgattgcaaaattggcagaggcagggtgtcaacttgattaggtgtttttatgggaatgtaatttgaaatcactacttcagaaatttgacttaaaattcttgagcacgttaatatgt

SEQ ID NO: 184034 - DNA, 120 bp, Artificial Sequence
  ENSG00000111605_26 (sequence is synthesized)
ttttaagatctgattatctttgagagatcttctgttaatacacattggttgttaaagagtacccaaattctaggacaatgcttaaagtgttaaaataccctagatactgtgttatgtgca

SEQ ID NO: 184035 - DNA, 120 bp, Artificial Sequence
  ENSG00000111605_27 (sequence is synthesized)
ctgccagttttattttaaaatattttgtgtttgaagtatctgtgcatgggatcgttgatgtttatcagaactgttcactttcagaaatgattttttaaagcattttgttgaaaatgcggt

SEQ ID NO: 184036 - DNA, 120 bp, Artificial Sequence
  ENSG00000111605_28 (sequence is synthesized)
tgcttttttaacattattttagagttgtatcaaaattttcctgttttctgtatattgttgtgtcatttcttggctttttaatattttgactacaatgccctaatgcgaagaagtatggac

SEQ ID NO: 184037 - DNA, 120 bp, Artificial Sequence
  ENSG00000111605_29 (sequence is synthesized)
atataaatattacaagagaaattagttaatagtaaagggttaaaaggtaagtaaaatgtccatgaaaataaaattttctttgaacagtttaaaaatggaatcacaaaaatctaactgcac

SEQ ID NO: 184038 - DNA, 120 bp, Artificial Sequence
  ENSG00000111605_30 (sequence is synthesized)
ttgaaatgaaactggaaattttatactaattaaatcctttatttaccttttcatattttatcaatggaaccttttaattgctccttctatatcactcttctccttgcttggctgatctca

SEQ ID NO: 184039 - DNA, 120 bp, Artificial Sequence
  ENSG00000111605_31 (sequence is synthesized)
ttacatgactttcgttacagacagtgtgagtgtactagatttgtttgctgctaatccgttattttaagtgttgtcagaaggaaataacttcttggtttgaccaagtaattttgcaaagtc

SEQ ID NO: 184040 - DNA, 120 bp, Artificial Sequence
  ENSG00000111605_32 (sequence is synthesized)
cttctctacctgataacacgtgaatgtatagcagtaaaggtgaaaattgcaggccttgttttgttcttcatacccccttcagttgtttatgggttaatgttatttgaaaactcttccttt

SEQ ID NO: 184041 - DNA, 120 bp, Artificial Sequence
  ENSG00000111605_33 (sequence is synthesized)
ttttaatgtgtaaaaacaatccaaagagataaatccttgcatagacaccaaaaacagtgtctcagagaccttttcattttttccttagttaataactgtagtggatgtgaaaacaaacga

SEQ ID NO: 184042 - DNA, 120 bp, Artificial Sequence
  ENSG00000111605_34 (sequence is synthesized)
gttgaattttaaaacatagcatttattagtgctatacagtcacattcctttcagccagtagtaaagttaaacagatgagtgatacagtacctgaatggtactgcttctgaggcaacactt

SEQ ID NO: 184043 - DNA, 120 bp, Artificial Sequence
  ENSG00000111605_35 (sequence is synthesized)
tggattgaaagtgctgcttttggttaaaggaactatgttgtggaaagcatattccagtgtaaatttgcagatgtgtgttttttttttttgtcacttttcataaggtttggagtaagttgc

SEQ ID NO: 184044 - DNA, 120 bp, Artificial Sequence
  ENSG00000111605_36 (sequence is synthesized)
agtggcttttgatcatagtttagcccatttaatggtccttttacctagaatgttcttaagcagttaatgacaatttggaatacacagataacttgtagcttaagatactattttcattta

SEQ ID NO: 184045 - DNA, 120 bp, Artificial Sequence
  ENSG00000111605_37 (sequence is synthesized)
attctcctgtggagaatattgctttattttttactagtttcaggtcagttattaaaataaacatggaggttttaatgaatgttgtataatattttatagtgaaggaaaattgtggaaagg

SEQ ID NO: 184046 - DNA, 120 bp, Artificial Sequence
  ENSG00000111605_38 (sequence is synthesized)
gcaaagactttctctttcccttatgtatttaactgtgccaatctaaatacatactgttttatacaatgagatgcattacaagacttttctgttggagtgctctcgacattttggttttca

SEQ ID NO: 184047 - DNA, 120 bp, Artificial Sequence
  ENSG00000111605_39 (sequence is synthesized)
tacctgaatgatcattgcattttctgtattttctaaaatggctccaattttgtgttttaagcttcagcttaagaggaagtttatgttctaattcttgactgagaatacagtattgagatt

SEQ ID NO: 184048 - DNA, 120 bp, Artificial Sequence
  ENSG00000111605_40 (sequence is synthesized)
ctctgttttacagataacaactggtttttattactcattaagttcatttgcatcccgtagccctctgtaaatgtttcccctagttgtatgtacgtaaatgcacgcttatccagtgtatat

SEQ ID NO: 184049 - DNA, 120 bp, Artificial Sequence
  ENSG00000111605_41 (sequence is synthesized)
aatgcacgcttatccagtgtatattagacatttttgtgctaaaatatattaagtgggatttttgtagcaaagcattctatttttctgttcttacagtgtgtgtgtgtgtgtgtgtgtgtg

SEQ ID NO: 184050 - DNA, 120 bp, Artificial Sequence
  ENSG00000111605_42 (sequence is synthesized)
ttcagtttaaacactggtgtatttatttttttaagcaacttgactcttagaagccttagactgattttttcaataaatattcaaccaaaaattataaatttattaagatgtggccttaca

SEQ ID NO: 184051 - DNA, 120 bp, Artificial Sequence
  ENSG00000111605_43 (sequence is synthesized)
tatggcattccttgtgttcgtaatgtgagatttttgatttagataaatcaagattcaggattaaagtttcattgtaagttgaaatagaaaatgtattaaaatgtctaggcttctgggagg

SEQ ID NO: 184052 - DNA, 120 bp, Artificial Sequence
  ENSG00000111605_44 (sequence is synthesized)
aagttcttatactcttctttcttggcattagaaagaagcaatatgaatttttgtgaatattctaaatattcaggcaacactgttcagattgatttaggtttgtcttaaccaatgttcttt

SEQ ID NO: 184053 - DNA, 120 bp, Artificial Sequence
  ENSG00000111605_45 (sequence is synthesized)
ttttagaatttcaggttgtggcattcactgagtatgcagctactatggtttttgtatgggacgtataaatacttgattatatacgacagattttaatgtctttaaagacttcctgctgta

SEQ ID NO: 184054 - DNA, 120 bp, Artificial Sequence
  ENSG00000111605_46 (sequence is synthesized)
ttaacatattgtaatggagtcttttaaatactaggttgaatttaattgaagtcacacacatcttgaagtggtaactgcatagtaaatactaccaagagtttttttcacgtgggagtatcc

SEQ ID NO: 184055 - DNA, 120 bp, Artificial Sequence
  ENSG00000111605_47 (sequence is synthesized)
taaaactctgccatgggtgtaaatgttttacattaatttcataattggacagaccctgcatttagcgaaaacattttgttttgaaagtgtgttctttttgtcgcactgttactgcgtaac

SEQ ID NO: 184056 - DNA, 120 bp, Artificial Sequence
  ENSG00000111605_48 (sequence is synthesized)
acttctcaacattctgtaagttaaattattttaaaataactatggtgaattcatgtttatttttttactttgaaaattgtagtactcaggtggtatttaatgggaaaggatcctttgggt

SEQ ID NO: 184057 - DNA, 120 bp, Artificial Sequence
  ENSG00000111605_49 (sequence is synthesized)
ataaatcataatgtattttaaggaatgcatctataacattgataactttagccttaaaaaaaaggtctattattccttcctctgcatcccatggtatattagcaaagtagtttacagccc

SEQ ID NO: 184058 - DNA, 120 bp, Artificial Sequence
  ENSG00000111605_50 (sequence is synthesized)
tgtacagccttacaaagttgttttacaatttttaatggaaagcccttaacaacaacaacaaaaaattgtatcattttaccaatatccacgaattactgatcacagtttgtaaataatttg

SEQ ID NO: 184059 - DNA, 120 bp, Artificial Sequence
  ENSG00000111605_51 (sequence is synthesized)
tttaatatcagaaggccaaagaaagtcttaaaattttagctattgactctatggtgacttcacaataagatttctgtgcaaaaaggtaaggtgataattgatctaatagacttttttttt

SEQ ID NO: 184060 - DNA, 120 bp, Artificial Sequence
  ENSG00000111605_52 (sequence is synthesized)
tttttttttgctgtccatgagaattagacttcatattagcttcaattaaaaagctcattccattttattaaaatgtttgtaattgcaattttgtgtttaatgtttactttgtctttcctt

SEQ ID NO: 184061 - DNA, 120 bp, Artificial Sequence
  ENSG00000111605_53 (sequence is synthesized)
tctttagcatttaggtgactgttcggcagtttgatatatggccattgtcggccttaaactgcactagtaacaagcatggtatttatcttgtattgaaaataaaacaaacttttgataaga

SEQ ID NO: 184062 - DNA, 120 bp, Artificial Sequence
  ENSG00000111605_54 (sequence is synthesized)
tccaggaaatttgatcaagcatcttgttaaaggaactcggcctttgttcctggaaactaggattccatggcatatggggcacagcatagaggaaatacccatttttggcctaaaagctgg

SEQ ID NO: 184063 - DNA, 120 bp, Artificial Sequence
  ENSG00000111605_55 (sequence is synthesized)
atacctcttttccttttctctctttttcaagtaatgcattattaatgtgacttactctccttgttatgctatttttggaatccaggaaatttgatcaagcatcttgttaaaggaactcgg

SEQ ID NO: 184064 - DNA, 120 bp, Artificial Sequence
  ENSG00000111605_56 (sequence is synthesized)
cctttgttcctggaaactaggattccatggcatatggggcacagcatagaggaaatacccatttttggcctaaaaggtctttatttttctccaaacttgcttgacttatatatagaatat

SEQ ID NO: 184065 - DNA, 120 bp, Artificial Sequence
  ENSG00000111605_57 (sequence is synthesized)
ctcttcctatctgctggcaactgctaacgtgctctggatatgcctgttctggacatttcatctaaatggaatcataaaatacgtagtcctatgtgactggcttttttccttagcataatg

SEQ ID NO: 184066 - DNA, 120 bp, Artificial Sequence
  ENSG00000111605_58 (sequence is synthesized)
attttaaggttcatccatgttgaagcatgcatcagcatttctttttatggctgagtaatattccactacatggatatagcacttttttcttttaatctatcagtcgatggacgtctaggt

SEQ ID NO: 184067 - DNA, 120 bp, Artificial Sequence
  ENSG00000111605_59 (sequence is synthesized)
tatttccacttttggctattaaggaaaatgcccctgtgaatatttgtgtacccattttgtgtgaacatgtattttcagttctgttggatgtgtacctaggaatggaattactgggttaat

SEQ ID NO: 184068 - DNA, 120 bp, Artificial Sequence
  ENSG00000111605_60 (sequence is synthesized)
atagtaactctatgtttaaatgtttgaggaattaccagattatttgccagaggcattgtgccattttattaatacgtgctcatcagcaatgtgcaatggttccagtttctccacatattt

SEQ ID NO: 184069 - DNA, 120 bp, Artificial Sequence
  ENSG00000111605_61 (sequence is synthesized)
ttataggcgtgagccactgcacccggcctctccacatctttaatacttgtctttttgattatagccaccctagtgggtatggggtggtatcttgtggttttgatttgcacttccccaata

SEQ ID NO: 184070 - DNA, 120 bp, Artificial Sequence
  ENSG00000111605_62 (sequence is synthesized)
tgtggttttgatttgcacttccccaatagttaatgatattgtacatctttttattgtagcaaaaagtggaagcaacccaaatgtccatgaactgatggatacatttcttttaatgttgta

SEQ ID NO: 184071 - DNA, 120 bp, Artificial Sequence
  ENSG00000111605_63 (sequence is synthesized)
aactcctgggctgaagtgattctcctgtgtcagcctccaagtagctaggaccacagtggacaacagatgaagacttaactgaagcagttcattctttgggagtaaatgatattttggaga

SEQ ID NO: 184072 - DNA, 120 bp, Artificial Sequence
  ENSG00000111615_0 (sequence is synthesized)
agcagcttgcaaatggcgtctccctcgctggagcggccagaaaaaggcgctggaaaaagtgaatttcgtaaccagaagccgaagccggagaaccaagatgaatcagaactccttacggtt

SEQ ID NO: 184073 - DNA, 120 bp, Artificial Sequence
  ENSG00000111615_1 (sequence is synthesized)
cctgatggttggaaggaaccagctttttccaaagaggacaatcccagaggacttttggaggagagcagtttcgcaactttgttcccaaaatacagggaagcttacttgaaagagtgttgg

SEQ ID NO: 184074 - DNA, 120 bp, Artificial Sequence
  ENSG00000111615_2 (sequence is synthesized)
ccattggtgcagaaagccttaaatgaacatcatgttaatgcaaccctggacctgatcgaaggcagcatgactgtttgtactacaaagaagacttttgatccatatatcatcattagggcc

SEQ ID NO: 184075 - DNA, 120 bp, Artificial Sequence
  ENSG00000111615_3 (sequence is synthesized)
agagatctgataaaactgttagcaaggagtgtttcatttgaacaggcagtacgaattcttcaggatgatgttgcatgtgacatcattaaaataggttctttagtaaggaataaagagaga

SEQ ID NO: 184076 - DNA, 120 bp, Artificial Sequence
  ENSG00000111615_4 (sequence is synthesized)
tttgtaaaacgaagacaacggcttattggtcccaaaggatctacattgaaggcattggaactcttaactaattgttacattatggttcagggaaacacagtttcagccattggacctttt

SEQ ID NO: 184077 - DNA, 120 bp, Artificial Sequence
  ENSG00000111615_5 (sequence is synthesized)
agtggcttaaaagaggttagaaaagtagtccttgatactatgaagaatattcatccaatttataacattaaaagcttaatgattaagagagagttggcaaaagattctgaattacgatca

SEQ ID NO: 184078 - DNA, 120 bp, Artificial Sequence
  ENSG00000111615_6 (sequence is synthesized)
caaagttgggagagatttttgccacagttcaaacacaaaaatgtgaataaacgcaaggaaccaaagaaaaaaactgttaagaaagaatatacgccattcccaccaccacaaccagaaagt

SEQ ID NO: 184079 - DNA, 120 bp, Artificial Sequence
  ENSG00000111615_7 (sequence is synthesized)
cagatcgataaagaattggctagtggtgaatactttttgaaggcaaatcagaagaagcggcagaaaatggaagcaataaaggctaaacaagcagaagccatcagtaagagacaagaggaa

SEQ ID NO: 184080 - DNA, 120 bp, Artificial Sequence
  ENSG00000111615_8 (sequence is synthesized)
agaaacaaagcatttattccacctaaggaaaaaccaattgtgaaacctaaggaagcttctactgaaactaaaattgatgtggccagcatcaaggaaaaggttaagaaagcaaagaataag

SEQ ID NO: 184081 - DNA, 120 bp, Artificial Sequence
  ENSG00000111615_9 (sequence is synthesized)
aaactgggagctcttacagctgaagaaattgcacttaagatggaggcagatgaaaagaaaaagaagaaaaaaaagtaacatacccaaaactccttgactagaactatctccttttgtaaa

SEQ ID NO: 184082 - DNA, 120 bp, Artificial Sequence
  ENSG00000111615_10 (sequence is synthesized)
ggattttgagatatcaggcattagttgccttatttgtgagaaattttctgagggctttttttttttttggtggtggtggttgttcatagaagagtgttctttataaattatattattatt

SEQ ID NO: 184083 - DNA, 120 bp, Artificial Sequence
  ENSG00000111615_11 (sequence is synthesized)
gtattttttgaaaaatttatacgagaaagtggtatataagtctttgtatacattacgaccattgtgattatccattaaatccagtgtctgatgctattggttagtaatgatgtcccagca

SEQ ID NO: 184084 - DNA, 120 bp, Artificial Sequence
  ENSG00000111615_12 (sequence is synthesized)
tttgatgttccctctctaatgataacaagtaaatatttaggtttatcccttttgaaagtttggttttacttttaacagtccatgaacagaaaattaaggcctctaaaatcagatccccta

SEQ ID NO: 184085 - DNA, 120 bp, Artificial Sequence
  ENSG00000111615_13 (sequence is synthesized)
gttactcctctgttctgaatctggggaagtagtaaaccaaaaagacagggaaaaccagatatttagagtcgaagcagcatgcaaaaaataataatgtttttaactaatgaaggctactgg

SEQ ID NO: 184086 - DNA, 120 bp, Artificial Sequence
  ENSG00000111615_14 (sequence is synthesized)
agttactaagaatcacctaaaaatgtgctactgtaccttgctcattttgcagatttagaagctgaaacatgggttaggttacttactaaaagtccacctgtggcaacctgcaaataatgc

SEQ ID NO: 184087 - DNA, 120 bp, Artificial Sequence
  ENSG00000111615_15 (sequence is synthesized)
ttatttatactaaagatgagtttatctgatagagttaggaaatttcttcttttgagtaagagtattgctataacatatatttttttctgaaatgttttaaaatagaagtacacctaattg

SEQ ID NO: 184088 - DNA, 120 bp, Artificial Sequence
  ENSG00000111615_16 (sequence is synthesized)
ttattggttaaaaaaaaagccatatgtgaatgaggttggtttttgggttttttctttcctgaattgtattagtccaaaagaactaaattagggtacttgtgctgtaccaaaatggtaatt

SEQ ID NO: 184089 - DNA, 120 bp, Artificial Sequence
  ENSG00000111615_17 (sequence is synthesized)
ataacagacagtattagaattactgaattaacaatgagaaagagagaagtgtatctgttacgtggatatatgggccagcctggatatacaacagagtagtaacctgtgaaacaaacatag

SEQ ID NO: 184090 - DNA, 120 bp, Artificial Sequence
  ENSG00000111615_18 (sequence is synthesized)
aatatcctcttagacattgttcctcataatgcactgacagaattcacatagctcttaatgaaacaatttaagattgatgtacgtacgtttgacttggtctcgctgtcggttaactgtaaa

SEQ ID NO: 184091 - DNA, 120 bp, Artificial Sequence
  ENSG00000111615_19 (sequence is synthesized)
gttagggggaagaaagaaaaaaaattaaaagggtagacacagttgagagttttattttaaaaagctaagtcttataattatgaccattaacttgctttggctttattgcagtgactttcc

SEQ ID NO: 184092 - DNA, 120 bp, Artificial Sequence
  ENSG00000111615_20 (sequence is synthesized)
aagtttaattattcaaaactttttgaactgactgaattaacttggtatttttaagttgactttttacataaactttataaaccttttataaaaaggaaactataccattactataaatgg

SEQ ID NO: 184093 - DNA, 80 bp, Artificial Sequence
  ENSG00000111615_21 (sequence is synthesized)
taaaatatagttctaaaaataagtttcttcctgagaagaatgatactgtttatgatgaatccatagtgaaaagacagtga

SEQ ID NO: 184094 - DNA, 120 bp, Artificial Sequence
  ENSG00000111615_22 (sequence is synthesized)
tgatactgtttatgatgaatccatagtgaaaagacagtgacctctctttcatccagtctagtatatcactaaatcatcattacgatgtttggctatcaagtcattaattactgtcctcct

SEQ ID NO: 184095 - DNA, 120 bp, Artificial Sequence
  ENSG00000111615_23 (sequence is synthesized)
ttcactgagctttattcaaattttgacaatcagagcactgggaagaaataaattccacaactgcctttagccttctggatactttcttttataaaatagaaaccttttccacaccagttc

SEQ ID NO: 184096 - DNA, 120 bp, Artificial Sequence
  ENSG00000111615_24 (sequence is synthesized)
tgcagcagtcgctattagatgctcgtggtagaacccatcaatcatctggtcctctgggtactggtgagcatccctggtcttcatacctgtgagtgggctttgtggtgaattactgtaaat

SEQ ID NO: 184097 - DNA, 120 bp, Artificial Sequence
  ENSG00000111615_25 (sequence is synthesized)
atgctaccctcacttttcttggcagttatgtcgatgaaatcaagagtgtgatgttctagttatttttttttatatatatttttaaatgttcaatattcaactattgaaacaaatgtacat

SEQ ID NO: 184098 - DNA, 120 bp, Artificial Sequence
  ENSG00000111615_26 (sequence is synthesized)
ctgtgaactagctaaaatcatcttatgtaccactaatatgcccagcacattttgtaaaacagtcctgatttggcctccaagggtatttattgaactaccagcagtatctaggagaccacg

SEQ ID NO: 184099 - DNA, 120 bp, Artificial Sequence
  ENSG00000111615_27 (sequence is synthesized)
aaggaataccacgaaggaatttatgctccagtgcttgccataatttgtctgagaaggaatctgttaaataaaagcttttatcctctaacctttaccttcatcagaccttataaaaggtca

SEQ ID NO: 184100 - DNA, 120 bp, Artificial Sequence
  ENSG00000111615_28 (sequence is synthesized)
aatggtgattcttaagttttttagtcacaaatcttacttattcagtattagtgcgaagagtagaatactttcaagtaagcctaaacttacatgaaaacaaattacataaatctagctctg

SEQ ID NO: 184101 - DNA, 120 bp, Artificial Sequence
  ENSG00000111615_29 (sequence is synthesized)
agaataggaaattagtgacaagatcaatctgtaagatgttgagcacttatctgaagtaaatgggtaatgagtttcacatcttataaatacaagttagcatgtgttttctcaagagtccaa

SEQ ID NO: 184102 - DNA, 120 bp, Artificial Sequence
  ENSG00000111615_30 (sequence is synthesized)
gggttttcattattggactacagctttaatcttctaaatgttattccccaagattaaagagcatctcaagttagatcaccaaagatcaaaagctaaaaccagaagtatttttgtcattgt

SEQ ID NO: 184103 - DNA, 120 bp, Artificial Sequence
  ENSG00000111615_31 (sequence is synthesized)
ggtggtggtagtgttactaattgcctagatttttaaagggaaacatttttttcactgggttgtttcgttgaaaaaaatagaagcagaaacttgcccaaagtcacagtggtcaaactggaa

SEQ ID NO: 184104 - DNA, 120 bp, Artificial Sequence
  ENSG00000111615_32 (sequence is synthesized)
attgcaccaaaacttggcatactggttctgaaatccatagttttagcccttatgtatactggttaatttggaaggaagaaatatatacgttctgaagtgaagagtgagtgaaaggaagaa

SEQ ID NO: 184105 - DNA, 120 bp, Artificial Sequence
  ENSG00000111615_33 (sequence is synthesized)
ttcagtgaatacattgataccttgatattatctgcattgtggctacatgttacttttcttcacaagagtgatataagtgaaataaagaatgattggactgggagaaaaatggctcagaaa

SEQ ID NO: 184106 - DNA, 120 bp, Artificial Sequence
  ENSG00000111615_34 (sequence is synthesized)
actttgcaaaagtacgactgtatgtaaagataagtattcaacattaaatgggaaggaggagagcaagcagtttaatatatagaattttataattttaggcctgcaagggaccttataaaa

SEQ ID NO: 184107 - DNA, 120 bp, Artificial Sequence
  ENSG00000111615_35 (sequence is synthesized)
catgagcaatggaacacttttttccaaactaaatttcgtgcagtggaacttggccgactctgtccttcctctattctaagcaccctactctagcccggctgctctgagttcagtttgtta

SEQ ID NO: 184108 - DNA, 120 bp, Artificial Sequence
  ENSG00000111615_36 (sequence is synthesized)
caaatatggacacgaaagtaccacaggctttgcacagcttaattgaagtttccccttcacaccatggtaaaaaaacatactgggatggaagggtttgtgtctagaacaagaacaagaaat

SEQ ID NO: 184109 - DNA, 120 bp, Artificial Sequence
  ENSG00000111615_37 (sequence is synthesized)
aaactcttggtcacttactaatatttcaaaatcacaaagcagaattttgcttggatgtttagtaaaacatccttggaaatttaactgcttgcagcttctacacttcttcattaaatgctg

SEQ ID NO: 184110 - DNA, 120 bp, Artificial Sequence
  ENSG00000111615_38 (sequence is synthesized)
ttgcagcttctacacttcttcattaaatgctgtctggctaataaaaagtgccatgttgcagctttattttattttcattttttggagatagaccctcactgtgtcacccaggctggagtg

SEQ ID NO: 184111 - DNA, 79 bp, Artificial Sequence
  ENSG00000111615_39 (sequence is synthesized)
agtagctggggttacgggcgggggtttttgccatgttggccaggctgggcatggtggcatggtaatctcagctacttgg

SEQ ID NO: 184112 - DNA, 76 bp, Artificial Sequence
  ENSG00000111615_40 (sequence is synthesized)
gtttttgtatttttagtagagggggtttttgccatgttggccaggctgggcatggtggcatgacccgtgagatgga

SEQ ID NO: 184113 - DNA, 120 bp, Artificial Sequence
  ENSG00000111615_41 (sequence is synthesized)
aaaaacaaaaaaaaaaacgaaaacagaattctgtttgtttggatgacctgttatacttatttttgatcttgctgaaataagcaaatcttaggaatcttagtctacagtttctgacagttt

SEQ ID NO: 184114 - DNA, 120 bp, Artificial Sequence
  ENSG00000111615_42 (sequence is synthesized)
gacagttttttttgttgttgttgtttgaccaattagaactaaataaaaagaacgtgattttcacatttaaatttctcttaaatgtattcctagaacagtaagccattggtttaattgcta

SEQ ID NO: 184115 - DNA, 120 bp, Artificial Sequence
  ENSG00000111615_43 (sequence is synthesized)
cttgatgccagtttccttgaagatagccgttaagataaaacatggtttcattgttaattctgtagaaagttacatgttactattatgttattctattggtgtattgttccttttactcac

SEQ ID NO: 184116 - DNA, 120 bp, Artificial Sequence
  ENSG00000111615_44 (sequence is synthesized)
cacagagattgtccaaacacttgtcattattggggcaggcactgcaggtggctcctctcttatatggccaagttgggtaattccctctgtaaagcagaagaaggatgtccattagaagtt

SEQ ID NO: 184117 - DNA, 120 bp, Artificial Sequence
  ENSG00000111615_45 (sequence is synthesized)
tttcggttttttaaaattgcaatttactatgaatccttaactaaatccagaagaatagtggagtgaagtacaaaggtccagagagttggtaatagaagtgaagacaggaaggcagaaatg

SEQ ID NO: 184118 - DNA, 120 bp, Artificial Sequence
  ENSG00000111615_46 (sequence is synthesized)
gaaggctgctaatatttgcatagttcattctatgtacctgtgtctatgcacctgttttaatctgcatcccatttaattgtgacagctctgagaggaagttattcttgttttacagatgag

SEQ ID NO: 184119 - DNA, 120 bp, Artificial Sequence
  ENSG00000111615_47 (sequence is synthesized)
acaaaagatgtaagagatacctttaatcacaatttatacacttcagagtcagaggaaacctggatttaactccagggctgtgctccctctctttacctaccctctggcctatatgattac

SEQ ID NO: 184120 - DNA, 120 bp, Artificial Sequence
  ENSG00000111615_48 (sequence is synthesized)
tgccatttaaaaaactgtccatcttagaaaagctatggtgacccacattcaatattctcagttggtcagccctccataattttcactggataggagccatttggctggtgccttccaaaa

SEQ ID NO: 184121 - DNA, 120 bp, Artificial Sequence
  ENSG00000111615_49 (sequence is synthesized)
aaataataaataatggtatgggggaatttctaaagtacaaattgttttcacatacaagatgtgatatgaataatagctgctaattagtgagcactaccatgtgcttgtctttgttctaaa

SEQ ID NO: 184122 - DNA, 120 bp, Artificial Sequence
  ENSG00000111615_50 (sequence is synthesized)
caaccttgaatgaaataatcttcacaaaaaccctatgaggaagttactgttgtctatttatacccattatatagctagaggctgagtcacagagtataagtaattgaccaaggtcacaga

SEQ ID NO: 184123 - DNA, 120 bp, Artificial Sequence
  ENSG00000111615_51 (sequence is synthesized)
ctagaaagtgaaataatatccaagcattttatatccccataaatatcctcatagtagtaatggggagagggggcacatttatctcaatgaacctgccattgcactaattttttttggaac

SEQ ID NO: 184124 - DNA, 120 bp, Artificial Sequence
  ENSG00000111615_52 (sequence is synthesized)
tctgcttttggaaaaagttctaaacttttttgtgtaatcgtaccctttggcagtctggtgaggcctatgggctctttctcaacatagtttgttgttaaatgcataaaatacataggatta

SEQ ID NO: 184125 - DNA, 120 bp, Artificial Sequence
  ENSG00000111615_53 (sequence is synthesized)
taaaggaaaccaattaaattgaaatagttatcaaaatgtttaaaacaagatttgtgataaagtaatatgtgcttctctattaagatctaccgggggctattagtttcaatgcagtgatga

SEQ ID NO: 184126 - DNA, 120 bp, Artificial Sequence
  ENSG00000111615_54 (sequence is synthesized)
acacaaactatattttgagttctctgcagcaagtggaatgtggtatgaaaatatctgatatttacaaagatgatactgctaagtcagagtcacgtttattgctaatatgatggtggagtg

SEQ ID NO: 184127 - DNA, 120 bp, Artificial Sequence
  ENSG00000111615_55 (sequence is synthesized)
ttgtcttcattcataatgaaaggaaatgttatttttaatagaggttagtgaaaataaaaataaaactattttctaatcaaagtttatggtcctcctctccccagcactctacaattacct

SEQ ID NO: 184128 - DNA, 120 bp, Artificial Sequence
  ENSG00000111615_56 (sequence is synthesized)
ccaaagttgagaactctcaccttagacacacaactttataacgataccttatttccaaccccaaatctatgttcttatctcattttgctccaaattttaagttgcttcagaaatttaatt

SEQ ID NO: 184129 - DNA, 120 bp, Artificial Sequence
  ENSG00000111615_57 (sequence is synthesized)
agccctctgcttactctacaccatggaaaaaaggtaatatagtagaaattctgatagcaatttcaaaagatgtccaaaatagacattaatcattggaatgtctttcattgttaataagca

SEQ ID NO: 184130 - DNA, 120 bp, Artificial Sequence
  ENSG00000111615_58 (sequence is synthesized)
cagtattaagtggtttaagttctagaatgattttaataaagtcatttatgatacttagttgtgcattccaaactgtaaaggaaaaggtaaaaaatgctacttaaaaataagctaaaaacc

SEQ ID NO: 184131 - DNA, 120 bp, Artificial Sequence
  ENSG00000111615_59 (sequence is synthesized)
aagacagtcggtgaggtctgtggaaatggtagtattcatcttgggagaaacatgctactggaaaggcctggatttgtctagatgggagtcattaagactgtgggacctaaagtattcagc

SEQ ID NO: 184132 - DNA, 120 bp, Artificial Sequence
  ENSG00000111615_60 (sequence is synthesized)
acaataaagcaacaggacatttcaatgttttccctggtagcctgagagagaagagggttggggttatgggacccaggggaagaccgaagacaaatctttaaagaaaaagataaatatggg

SEQ ID NO: 184133 - DNA, 120 bp, Artificial Sequence
  ENSG00000111615_61 (sequence is synthesized)
taagggtccctaaggcagtgacggcctaagcacactggtactatcttgactatcttgtggtcaaagttatttcctcttctgtgctataatcctctcctccactaatccactctgagtaaa

SEQ ID NO: 184134 - DNA, 120 bp, Artificial Sequence
  ENSG00000111615_62 (sequence is synthesized)
gatctgttacacaccatacccttgttcatggtgcccaggggaaatgaagaggagagtattacaggcaactggaagattaagcatcccagaccccattctgaggtatcagaaatattgagg

SEQ ID NO: 184135 - DNA, 120 bp, Artificial Sequence
  ENSG00000111615_63 (sequence is synthesized)
aggatactggacttcctaagattatgtggaatgggggcctacaactttttgtgtataggaaaataatacctcagagggcagagggcaaagggaaatgaggacattcctaactggtctctc

SEQ ID NO: 184136 - DNA, 120 bp, Artificial Sequence
  ENSG00000111615_64 (sequence is synthesized)
tgttttaccttttatgctcctctaatccattttccatccagactgatgtccaaatttaaaggtctcatcgctcccctgcttaatatacttgaatgacttcttatgtaaactttgtcatga

SEQ ID NO: 184137 - DNA, 120 bp, Artificial Sequence
  ENSG00000111615_65 (sequence is synthesized)
tctaaaagttcccgctagatctgcaactgccttcctccccccgtttcatctgtttagcagaccgagggcaccagtctctgtggtttaaacttgccaaacttttcttcacggaagttttgc

SEQ ID NO: 184138 - DNA, 120 bp, Artificial Sequence
  ENSG00000111615_66 (sequence is synthesized)
tgttcttttctccactagacagctgttccagaagttcttatgtctgattccttctcattcttcatgcctaagcttaaatataacacaagaagcccttccctgattattctaaacaggggc

SEQ ID NO: 184139 - DNA, 120 bp, Artificial Sequence
  ENSG00000111615_67 (sequence is synthesized)
cttgcctattgatagtttctattacagtattatttatagttccttaattgccccataatgatgcagttattttacttgtatttttattatctgtttgccccataaatattactctcataa

SEQ ID NO: 184140 - DNA, 120 bp, Artificial Sequence
  ENSG00000111615_68 (sequence is synthesized)
agacagagactgccctgttctcctttggagctcagtaaaacaaatatttgttgaataaatgaatatttgaagttagtctttatggaagcattataactttggttgtaagttttataattt

SEQ ID NO: 184141 - DNA, 120 bp, Artificial Sequence
  ENSG00000111615_69 (sequence is synthesized)
aatattgtttataactctgaagataagtgagtctaaaccaggaaaatttacatttatactttaatgaataaaaatcatgaatacttacaaaacattcactattgccaagcattatatata

SEQ ID NO: 184142 - DNA, 120 bp, Artificial Sequence
  ENSG00000111615_70 (sequence is synthesized)
cctagtattttacaaagccttctcttgtcactttcatagctactctaagtgatgggtcctgtaaccctgatctattggaggttaaactgagattcagagttaacttgtccagggtcacac

SEQ ID NO: 184143 - DNA, 85 bp, Artificial Sequence
  ENSG00000111615_71 (sequence is synthesized)
gttaaactgagattcagagttaacttgtccagggtcacacagtaaattaattgtatcttaaccattaaaaatgtcatatgaggcc

SEQ ID NO: 184144 - DNA, 120 bp, Artificial Sequence
  ENSG00000111615_72 (sequence is synthesized)
tgggaggctgaggcaggtggatcactttagcccaggagttggagatgagcctgggcaatatggcaaaactctgtctctacaaaaaaattaactgggcatggtggcatgtgcctgtagtct

SEQ ID NO: 184145 - DNA, 86 bp, Artificial Sequence
  ENSG00000111615_73 (sequence is synthesized)
caggtactaggaaggctgagttgggaggattgcttgagcctgggaggttaagcctgcagtgaaccgtaagcgagaccctgtctcaa

SEQ ID NO: 184146 - DNA, 120 bp, Artificial Sequence
  ENSG00000111615_74 (sequence is synthesized)
ttatggctttgtctagttttttctgggttttctttattttccaactcttaagatattaagtcaaagctgtcatcttcagaatgacgctttgtctcctccttcacacctacagcactcagt

SEQ ID NO: 184147 - DNA, 120 bp, Artificial Sequence
  ENSG00000111615_75 (sequence is synthesized)
cagagtatcgagcatgtcttctgcacattacaccagggaaatggctttctttcagccaatctccaggaatccaaaaattcaaaggcaacaaattaaagatcattatatatattgcaaatg

SEQ ID NO: 184148 - DNA, 120 bp, Artificial Sequence
  ENSG00000111615_76 (sequence is synthesized)
gttaaaaacctttaaaatataaaaacttttataaataagaaaatctagtagaaaaatggtcagcccacatgattcacagaaaaaggaatataaatagacaattatgtgaagaaatttata

SEQ ID NO: 184149 - DNA, 120 bp, Artificial Sequence
  ENSG00000111615_77 (sequence is synthesized)
attactagtaatcacagagatgcaaaagaaagcaaatgaaatgccatttccatcaaattagaaaatactaagaaattataatacctagtactgatggtgaaatacaaattgatataatgg

SEQ ID NO: 184150 - DNA, 120 bp, Artificial Sequence
  ENSG00000111615_78 (sequence is synthesized)
tggaatgtaatttggcaatatgtacttaaaacaaaaatggtcacagtctttacgtgctagtatctcaaggaattatagggaaatagaagtgactgaagatacatatatgaggttgttcat

SEQ ID NO: 184151 - DNA, 120 bp, Artificial Sequence
  ENSG00000111615_79 (sequence is synthesized)
catatattaaatgaaaatatagtgaacaatctaaattcttcaacaggatggtggtaccatcaagagcatggactctggagctagacagccagatcaaagtccatcagtgatagtcactaa

SEQ ID NO: 184152 - DNA, 120 bp, Artificial Sequence
  ENSG00000111615_80 (sequence is synthesized)
ctgtagaactttgggcaggttgctgacccgtgtgtgccttgctgttctcatttgccaaacaggggtagtaataggagccatctcataaacttctggtgaagattaagttaatatatgtga

SEQ ID NO: 184153 - DNA, 120 bp, Artificial Sequence
  ENSG00000111615_81 (sequence is synthesized)
agcactttaacagtgctgagagcattgtaagcattatataaacaatctatcatttttatgattaaaatcacttaaaattttgaaaaggaaaatttttcacagcataattttaagtgaaaa

SEQ ID NO: 184154 - DNA, 120 bp, Artificial Sequence
  ENSG00000111615_82 (sequence is synthesized)
atagaaaatgtatattttcagtatgatcagatttctaaatatgtgtatgacacaagcacacatatgtaagtttaaagaaagtaggaggaaggtgtttgccctgtttcccaaagtgggaac

SEQ ID NO: 184155 - DNA, 120 bp, Artificial Sequence
  ENSG00000111615_83 (sequence is synthesized)
tatatctgttttaaaaacaactgtcaaaagtaaatgaaataggttatataagttgaggaatctgttttgctttgaaaattgtgtaaaattgccaagtttctaataaaccaataaatataa

SEQ ID NO: 184156 - DNA, 120 bp, Artificial Sequence
  ENSG00000111615_84 (sequence is synthesized)
cattttgtaattaaatttctaatggttttctaataattatacatgtttgtgataacctacctttttgcttatgtaattggtttaatttcaccaaagaaactaggaactgtttcttttatt

SEQ ID NO: 184157 - DNA, 120 bp, Artificial Sequence
  ENSG00000111615_85 (sequence is synthesized)
atttatagaagcaatatttataatgtctgagtctgacaaatgtgtgactttggaaagtaaaaatttttactttgttgcatgactaaagagcttaatgattaagagagagttggcaaaaga

SEQ ID NO: 184158 - DNA, 120 bp, Artificial Sequence
  ENSG00000111615_86 (sequence is synthesized)
aagacaacggcttattggtcccaaaggatctacattgaaggtattttttaattagtggaaaacttgagtctcttccttaatactttttcagagtaatgaattttaacttgatctcttgat

SEQ ID NO: 184159 - DNA, 120 bp, Artificial Sequence
  ENSG00000111615_87 (sequence is synthesized)
acaggcattggaactcttaactaattgttacattatggttcagggaaacacagtttcagccattggaccttttagtggcttaaaagaggtgagaactatgtattatcttcgattcatttt

SEQ ID NO: 184160 - DNA, 120 bp, Artificial Sequence
  ENSG00000111615_88 (sequence is synthesized)
cagcagagaacaaataatttggttataatatagtttattggataatgctttataattttatttctttagaatgtgctttgatttcccattagtaaatactttttatgtcatataattcaa

SEQ ID NO: 184161 - DNA, 120 bp, Artificial Sequence
  ENSG00000111615_89 (sequence is synthesized)
tttgctttgtttgcatcagtgttaacctataacatcccaccatcaagttttcatatttgtgcttaggtaacaatagcgtgggcctggaaaatgaatgtaattgtaaaaaatgttgataat

SEQ ID NO: 184162 - DNA, 120 bp, Artificial Sequence
  ENSG00000111615_90 (sequence is synthesized)
gtcttctttttttttttttttttgcaaaaggcagtacgaattcttcaggatgatgttgcatgtgacatcattaaaataggttctttagtaaggaataaagagagatttgtaaaacgaaga

SEQ ID NO: 184163 - DNA, 120 bp, Artificial Sequence
  ENSG00000111639_0 (sequence is synthesized)
acagctgcctgggtaaggcccaagatggctgtcttcgccttagtactcgtgtgaagttggcggggacggttcctgtcatcttcttgggcttatttggtgtgctgttgaaggggggagact

SEQ ID NO: 184164 - DNA, 120 bp, Artificial Sequence
  ENSG00000111639_1 (sequence is synthesized)
agagaaatggcagggaacctcttatccggggcaggtaggcgcctgtgggactgggtgcctctggcgtgcagaagcttctctcttggtgtgcctagattgatcggtataaggctcactctc

SEQ ID NO: 184165 - DNA, 120 bp, Artificial Sequence
  ENSG00000111639_2 (sequence is synthesized)
ccgccccccaaagtggttgatcgttggaacgagaaaagggccatgttcggagtgtatgacaacatcgggatcctgggaaactttgaaaagcaccccaaagaactgatcagggggcccata

SEQ ID NO: 184166 - DNA, 120 bp, Artificial Sequence
  ENSG00000111639_3 (sequence is synthesized)
ttggaagtagaatgttcgctgatgacctgcacaaccttaataaacgcatccgctatctctacaaacactttaaccgacatgggaagtttcgatagaagagaaagctgagaacttcggaaa

SEQ ID NO: 184167 - DNA, 120 bp, Artificial Sequence
  ENSG00000111639_4 (sequence is synthesized)
aggctcatctgtcaccctggagaagggaaactgtacttttccctgtgaggaaacggctttgtattttctctgtaataaaatggggcttctttggaatttgatagccacatacttttgttt

SEQ ID NO: 184168 - DNA, 120 bp, Artificial Sequence
  ENSG00000111639_5 (sequence is synthesized)
tcctctagatgctgcctctactcatgtagactatgaagtcttgactcatcctagatcttaggatcttaggtttgggcttcacaccacttgccttttacagtctagctatacctaattcct

SEQ ID NO: 184169 - DNA, 120 bp, Artificial Sequence
  ENSG00000111639_6 (sequence is synthesized)
ttaaaaagaaaagttggtgagaatgttattggcgctttttgacataatgctgttatgttaatagtgtttctaaagagccttccacactgaaatgaaatataagagaaaaatggagtcata

SEQ ID NO: 184170 - DNA, 120 bp, Artificial Sequence
  ENSG00000111639_7 (sequence is synthesized)
gcctgcgaatccctccttggccgcaaggtccccctttgcccagtcggcggggaggaggccgtatttctgctggccagagacgtcgcgtccctggctgggcattcagtcacccccaggaaa

SEQ ID NO: 184171 - DNA, 120 bp, Artificial Sequence
  ENSG00000111639_8 (sequence is synthesized)
ggaggcaagtccacgctgggagttagaaggcatcgcctctaatccaggtttcgccatctcctctgctaagtgacgtccagcaagtcacttcactttcaggacctcaaatctcctccccag

SEQ ID NO: 184172 - DNA, 120 bp, Artificial Sequence
  ENSG00000111639_9 (sequence is synthesized)
tagtaaaataggggtaataaaaacagctacagcggaagactgttgtgaggcacagagaaagggcttggtcattggaagcgggttccaggttctcaaccttcatttccttcacggttgaag

SEQ ID NO: 184173 - DNA, 120 bp, Artificial Sequence
  ENSG00000111640_0 (sequence is synthesized)
gctctctgctcctcctgttcgacagtcagccgcatcttcttttgcgtcgccagccgagccacatcgctcagacaccatggggaaggtgaaggtcggagtcaacggatttggtcgtattgg

SEQ ID NO: 184174 - DNA, 120 bp, Artificial Sequence
  ENSG00000111640_1 (sequence is synthesized)
gcgcctggtcaccagggctgcttttaactctggtaaagtggatattgttgccatcaatgaccccttcattgacctcaactacatggtttacatgttccaatatgattccacccatggcaa

SEQ ID NO: 184175 - DNA, 120 bp, Artificial Sequence
  ENSG00000111640_2 (sequence is synthesized)
attccatggcaccgtcaaggctgagaacgggaagcttgtcatcaatggaaatcccatcaccatcttccaggagcgagatccctccaaaatcaagtggggcgatgctggcgctgagtacgt

SEQ ID NO: 184176 - DNA, 120 bp, Artificial Sequence
  ENSG00000111640_3 (sequence is synthesized)
cgtggagtccactggcgtcttcaccaccatggagaaggctggggctcatttgcaggggggagccaaaagggtcatcatctctgccccctctgctgatgcccccatgttcgtcatgggtgt

SEQ ID NO: 184177 - DNA, 120 bp, Artificial Sequence
  ENSG00000111640_4 (sequence is synthesized)
gaaccatgagaagtatgacaacagcctcaagatcatcagcaatgcctcctgcaccaccaactgcttagcacccctggccaaggtcatccatgacaactttggtatcgtggaaggactcat

SEQ ID NO: 184178 - DNA, 120 bp, Artificial Sequence
  ENSG00000111640_5 (sequence is synthesized)
cagaacatcatccctgcctctactggcgctgccaaggctgtgggcaaggtcatccctgagctgaacgggaagctcactggcatggccttccgtgtccccactgccaacgtgtcagtggtg

SEQ ID NO: 184179 - DNA, 120 bp, Artificial Sequence
  ENSG00000111640_6 (sequence is synthesized)
gacctgacctgccgtctagaaaaacctgccaaatatgatgacatcaagaaggtggtgaagcaggcgtcggagggccccctcaagggcatcctgggctacactgagcaccaggtggtctcc

SEQ ID NO: 184180 - DNA, 120 bp, Artificial Sequence
  ENSG00000111640_7 (sequence is synthesized)
tctgacttcaacagcgacacccactcctccacctttgacgctggggctggcattgccctcaacgaccactttgtcaagctcatttcctggtatgacaacgaatttggctacagcaacagg

SEQ ID NO: 184181 - DNA, 120 bp, Artificial Sequence
  ENSG00000111640_8 (sequence is synthesized)
gtggtggacctcatggcccacatggcctccaaggagtaagacccctggaccaccagccccagcaagagcacaagaggaagagagagaccctcactgctggggagtccctgccacactcag

SEQ ID NO: 184182 - DNA, 120 bp, Artificial Sequence
  ENSG00000111640_9 (sequence is synthesized)
tcccccaccacactgaatctcccctcctcacagttgccatgtagaccccttgaagaggggaggggcctagggagccgcaccttgtcatgtaccatcaataaagtaccctgtgctcaacca

SEQ ID NO: 184183 - DNA, 120 bp, Artificial Sequence
  ENSG00000111640_10 (sequence is synthesized)
ttcgacagtcagccgcatcttcttttgcgtcgccaggtgaagacgggcggagagaaacccgggaggctagggacggcctgaaggcggcaggggcgggcgcaggccggatgtgttcgcgcc

SEQ ID NO: 184184 - DNA, 120 bp, Artificial Sequence
  ENSG00000111640_11 (sequence is synthesized)
ttgtcatcaatggaaatcccatcaccatcttccaggagtgagtggaagacagaatggaagaaatgtgctttggggaggcaactaggatggtgtggctcccttgggtatatggtaaccttg

SEQ ID NO: 184185 - DNA, 120 bp, Artificial Sequence
  ENSG00000111640_12 (sequence is synthesized)
ccatggagaaggctggggtgagtgcaggagggcccgcgggaggggaagctgactcagccctgcaaaggcaggacccgggttcataactgtctgcttctctgctgtaggctcatttgcagg

SEQ ID NO: 184186 - DNA, 120 bp, Artificial Sequence
  ENSG00000111640_13 (sequence is synthesized)
ggggagccaaaagggtcatcatctctgccccctctgctgatgcccccatgttcgtcatgggtgtgaaccatgagaagtatgacaacagcctcaagatcatcaggtgaggaaggcagggcc

SEQ ID NO: 184187 - DNA, 120 bp, Artificial Sequence
  ENSG00000111640_14 (sequence is synthesized)
cgtggagaagcggccagcctggcaccctatggacacgctcccctgacttgcgccccgctccctctttctttgcagcaatgcctcctgcaccaccaactgcttagcacccctggccaaggt

SEQ ID NO: 184188 - DNA, 120 bp, Artificial Sequence
  ENSG00000111640_15 (sequence is synthesized)
tgagagctggggaatgggactgaggctcccacctttctcatccaagactggctcctccctgccggggctgcgtgcaaccctggggttgggggttctggggactggctttcccataatttc

SEQ ID NO: 184189 - DNA, 120 bp, Artificial Sequence
  ENSG00000111640_16 (sequence is synthesized)
ctttcaaggtggggagggaggtagaggggtgatgtggggagtacgctgcagggcctcactccttttgcagaccacagtccatgccatcactgccacccagaagactgtggatggcccctc

SEQ ID NO: 184190 - DNA, 120 bp, Artificial Sequence
  ENSG00000111640_17 (sequence is synthesized)
gttcgacagtcagccgcatcttcttttgcgtcgccagccgagccacatcgctcagacaccatggggaaggtgaaggtcggagtcaacgggtgagttcgcgggtggctggggggccctggg

SEQ ID NO: 184191 - DNA, 120 bp, Artificial Sequence
  ENSG00000111640_18 (sequence is synthesized)
tgcaaccgggaaggaaatgaatgggcagccgttaggaaagcctgccggtgactaaccctgcgctcctgcctcgatgggtggagtcgcgtgtggcggggaagtcaggtggagcgaggctag

SEQ ID NO: 184192 - DNA, 120 bp, Artificial Sequence
  ENSG00000111640_19 (sequence is synthesized)
cccccgaaccgcgtctacgagccttgcgggctccgggtctttgcagtcgtatgggggcagggtagctgttccccgcaaggagagctcaaggtcagcgctcggacctggcggagccccgca

SEQ ID NO: 184193 - DNA, 120 bp, Artificial Sequence
  ENSG00000111640_20 (sequence is synthesized)
cccaggctgtggcgccctgtgcagctccgcccttgcggcgccatctgcccggagcctccttcccctagtccccagaaacaggaggtccctactcccgcccgagatcccgacccggacccc

SEQ ID NO: 184194 - DNA, 120 bp, Artificial Sequence
  ENSG00000111641_0 (sequence is synthesized)
gagtgccggccgaaagctaggtccggattgcacgtggagggccgcccgaagggcactctcggacattaacccgcattctggtgggtctagaggaaattgggggacgaagagtggcagcac

SEQ ID NO: 184195 - DNA, 120 bp, Artificial Sequence
  ENSG00000111641_1 (sequence is synthesized)
tgacctggtctgggacgtggggagaaggtaccatggggcgcaagttggaccctacgaaggagaagcgggggccaggccgaaaggcccggaagcagaagggtgccgagacagaactcgtca

SEQ ID NO: 184196 - DNA, 120 bp, Artificial Sequence
  ENSG00000111641_2 (sequence is synthesized)
gattcttgcctgcagtaagtgacgaaaattccaagaggctgtctagtcgtgctcgaaagagggcagccaagaggagattgggctctgttgaagcccctaagacaaataagtctcctgagg

SEQ ID NO: 184197 - DNA, 120 bp, Artificial Sequence
  ENSG00000111641_3 (sequence is synthesized)
ccaaaccattgcctggaaagctaccaaaaggagctgtccagacagctggtaagaagggaccccagtccctatttaatgctcctcgaggcaagaagcgcccagcacctggcagtgatgagg

SEQ ID NO: 184198 - DNA, 120 bp, Artificial Sequence
  ENSG00000111641_4 (sequence is synthesized)
aagaggaggaggaagactctgaagaagatggtatggtgaaccacggggacctctggggctccgaggacgatgctgatacggtagatgactatggagctgactccaactctgaggatgagg

SEQ ID NO: 184199 - DNA, 120 bp, Artificial Sequence
  ENSG00000111641_5 (sequence is synthesized)
aggaaggtgaagcgttgctgcccattgaaagagctgctcggaagcagaaggcccgggaagctgctgctgggatccagtggagtgaagaggagaccgaggacgaggaggaagagaaagaag

SEQ ID NO: 184200 - DNA, 120 bp, Artificial Sequence
  ENSG00000111641_6 (sequence is synthesized)
tgacccctgagtcaggccccccaaaggtggaagaggcagatgggggcctgcagatcaatgtggatgaggaaccatttgtgctgccccctgctggggagatggagcaggatgcccaggctc

SEQ ID NO: 184201 - DNA, 120 bp, Artificial Sequence
  ENSG00000111641_7 (sequence is synthesized)
cagacctgcaacgagttcacaagcggatccaggatattgtgggaattctgcgtgattttggggctcagcgggaggaagggcggtctcgttctgaatacctgaaccggctcaagaaggatc

SEQ ID NO: 184202 - DNA, 120 bp, Artificial Sequence
  ENSG00000111641_8 (sequence is synthesized)
tggccatttactactcctatggagacttcctgcttggcaagctcatggacctcttccctctgtctgagctggtggagttcttagaagctaatgaggtgcctcggcccgtcaccctccgga

SEQ ID NO: 184203 - DNA, 120 bp, Artificial Sequence
  ENSG00000111641_9 (sequence is synthesized)
ccaataccttgaaaacccgacgccgagaccttgcacaggctctaatcaatcgtggggttaacctggatcccctgggcaagtggtcaaagactggactagtggtgtatgattcttctgtgc

SEQ ID NO: 184204 - DNA, 120 bp, Artificial Sequence
  ENSG00000111641_10 (sequence is synthesized)
ccattggtgctacccccgagtacctggctgggcactacatgctgcagggagcctccagcatgttgcccgtcatggccttggcaccccaggaacatgagcggatcctggacatgtgttgtg

SEQ ID NO: 184205 - DNA, 120 bp, Artificial Sequence
  ENSG00000111641_11 (sequence is synthesized)
caatgacgccaatgctgagcggctcaagagtgttgtgggcaacttgcatcggctgggagtcaccaacaccattatcagccactatgatgggcgccagttccccaaggtggtggggggctt

SEQ ID NO: 184206 - DNA, 120 bp, Artificial Sequence
  ENSG00000111641_12 (sequence is synthesized)
tgaccgagtactgctggatgctccctgcagtggcactggggtcatctccaaggatccagccgtgaagactaacaaggatgagaaggacatcctgcgctgtgctcacctccagaaggagtt

SEQ ID NO: 184207 - DNA, 120 bp, Artificial Sequence
  ENSG00000111641_13 (sequence is synthesized)
gctcctgagtgctattgactctgtcaatgcgacctccaagacaggaggctacctggtttactgcacctgttctatcacagtagaagagaatgagtgggtggtagactatgctctgaaaaa

SEQ ID NO: 184208 - DNA, 120 bp, Artificial Sequence
  ENSG00000111641_14 (sequence is synthesized)
gaggaatgtgcgactggtgcccacgggcctagactttggccaggaaggttttacccgctttcgagaaaggcgcttccaccccagtctgcgttctacccgacgcttctaccctcataccca

SEQ ID NO: 184209 - DNA, 120 bp, Artificial Sequence
  ENSG00000111641_15 (sequence is synthesized)
caatatggatgggttcttcattgccaagttcaagaaattttccaattctatccctcagtcccagacaggaaattctgaaacagccacacctacaaatgtagacttgcctcaggtcatccc

SEQ ID NO: 184210 - DNA, 120 bp, Artificial Sequence
  ENSG00000111641_16 (sequence is synthesized)
caagtctgagaacagcagccagccagccaagaaagccaagggggctgcaaagacaaagcagcagctgcagaaacagcaacatcccaagaaggcctccttccagaagctgaatggcatctc

SEQ ID NO: 184211 - DNA, 120 bp, Artificial Sequence
  ENSG00000111641_17 (sequence is synthesized)
caaaggggcagactcagaattgtccactgtaccttctgtcacaaagacccaagcttcctccagcttccaggatagcagtcagccagctggaaaagccgaagggatcagggagccaaaggt

SEQ ID NO: 184212 - DNA, 120 bp, Artificial Sequence
  ENSG00000111641_18 (sequence is synthesized)
gactgggaagctaaagcaacgatcacctaaattacagtcctccaagaaagttgctttcctcaggcagaatgcccctcccaagggcacagacacacaaacaccggctgtgttatccccatc

SEQ ID NO: 184213 - DNA, 120 bp, Artificial Sequence
  ENSG00000111641_19 (sequence is synthesized)
caagactcaggccaccctgaaacctaaggaccatcatcagccccttggaagggccaagggggttgagaagcagcagttgccagagcagccttttgagaaagctgccttccagaaacagaa

SEQ ID NO: 184214 - DNA, 120 bp, Artificial Sequence
  ENSG00000111641_20 (sequence is synthesized)
tgatacccccaaggggcctcagcctcccactgtgtctcccatccgttccagccgccccccaccagcaaagaggaagaaatctcagtccaggggcaacagccagctgctgctatcttagat

SEQ ID NO: 184215 - DNA, 120 bp, Artificial Sequence
  ENSG00000111641_21 (sequence is synthesized)
ggttgaaaactagacgggtggctcactgccattgtcaccaggttggaactcttgcctctgtgaggatgccttctctactgtgcatacccatgaaatttaatacacattttaaaacctctg

SEQ ID NO: 184216 - DNA, 120 bp, Artificial Sequence
  ENSG00000111641_22 (sequence is synthesized)
aggcgtgagccactgcgcccagcctggaattccgtgatcttgacgctggactagggcagtggatgcgagggagagggctccaatgtcgggccctggttcgaggagaaggtgcggctttca

SEQ ID NO: 184217 - DNA, 120 bp, Artificial Sequence
  ENSG00000111641_23 (sequence is synthesized)
gaaggtgcggctttcacccaacagaaaccggccgtgaggctaaaagccaactccatgagggaaggtcggtcaagctcaatggtttcgtcacattgctccctccacccgccgcgggtgtaa

SEQ ID NO: 184218 - DNA, 120 bp, Artificial Sequence
  ENSG00000111641_24 (sequence is synthesized)
gctgcgcgtctccttcgaattgccccctactcgccgccgccggctccgctggcgttcccagggcgagcgtaagttccgggtgcggcggccgactaggcgcaacaggaagaggcggggccg

SEQ ID NO: 184219 - DNA, 120 bp, Artificial Sequence
  ENSG00000111641_25 (sequence is synthesized)
cgaggctagcgctacccgtgcgcctgcgtggaacgattctgtggcgagtgccggccgaaagctaggtccggattgcacgtggagggccgcccgaagggcactctcggacattaacccgca

SEQ ID NO: 184220 - DNA, 120 bp, Artificial Sequence
  ENSG00000111641_26 (sequence is synthesized)
gcctcagcttcccaagtagctgggatttacaggtgtgtgccaccatgccctcattacttagtttcaacagtgagcaatgctgcgcccatcttattttcatttctttgctcctctatttcc

SEQ ID NO: 184221 - DNA, 120 bp, Artificial Sequence
  ENSG00000111641_27 (sequence is synthesized)
acatttccggagtgaaaggaacagccaaaggacattctgaggggtagaaagtacaggctcccagggtgtggggccagggaatgtgtggctgccattagtccaggactcttcaaaccctta

SEQ ID NO: 184222 - DNA, 87 bp, Artificial Sequence
  ENSG00000111641_28 (sequence is synthesized)
cattgccaagttcaagaaattttccaattctatccctcagtcccagacagacggtgtcttgctttgtcgctttgcaacctccacctt

SEQ ID NO: 184223 - DNA, 120 bp, Artificial Sequence
  ENSG00000111641_29 (sequence is synthesized)
tctgttcattttatatttaagtggaatcttctctgtatgagttactaggaggtatgaatgaaacagccgtttagattgtagggaactgtttaggtcgtagagatgtgaagacacggacac

SEQ ID NO: 184224 - DNA, 120 bp, Artificial Sequence
  ENSG00000111641_30 (sequence is synthesized)
aactattattcatgcaagggaaaagtgtgatttaaaacaattgtgagttcagaggaagggggagcccatgcagaactgtaaaagtttttgttaagctgggttttgaaaaatgggtaacat

SEQ ID NO: 184225 - DNA, 120 bp, Artificial Sequence
  ENSG00000111641_31 (sequence is synthesized)
ccagccgtgaagactaacaaggtgaggagtcaggtggtgggcccctgagaggccttggctgggtctcgtagagctggaaactgagatggggacaccctctgggctcccctctcctcctga

SEQ ID NO: 184226 - DNA, 120 bp, Artificial Sequence
  ENSG00000111641_32 (sequence is synthesized)
aggctacctggtttactgcacctgttctatcacagtgagacctctgccatggcagagcaggggaggctgggctggggggctctttgccccttagagctcccttcagctccagctctgctt

SEQ ID NO: 184227 - DNA, 120 bp, Artificial Sequence
  ENSG00000111642_0 (sequence is synthesized)
atgggctgtccgtgggggggcggggcctgtgcggtgggatttcccggccggtgtttcaggccctttaagaggcgacgctggagccggagccattttccccccttcggccgcggcgaggag

SEQ ID NO: 184228 - DNA, 120 bp, Artificial Sequence
  ENSG00000111642_1 (sequence is synthesized)
gagccggagcgggagtgacaccgagccggacccagcgcgacctgcggcggctccgggtgactcgggccagtgtagaggtcctcaggccgccggcaggagcagctgggccaattccctggc

SEQ ID NO: 184229 - DNA, 120 bp, Artificial Sequence
  ENSG00000111642_2 (sequence is synthesized)
cgggagcggaaggggatggcgtcgggcctgggctccccgtccccctgctcggcgggcagtgaggaggaggatatggatgcacttttgaacaacagcctgcccccaccccacccagaaaat

SEQ ID NO: 184230 - DNA, 120 bp, Artificial Sequence
  ENSG00000111642_3 (sequence is synthesized)
gaagaggacccagaagaggatttgtcagaaacagagactccaaagctcaagaagaagaaaaagcctaagaaacctcgggaccctaaaatccctaagagcaagcgccaaaaaaaggagcgt

SEQ ID NO: 184231 - DNA, 120 bp, Artificial Sequence
  ENSG00000111642_4 (sequence is synthesized)
atgctcttatgccggcagctgggggacagctctggggaggggccagagtttgtggaggaggaggaagaggtggctctgcgctcagacagtgagggcagcgactatactcctggcaagaag

SEQ ID NO: 184232 - DNA, 120 bp, Artificial Sequence
  ENSG00000111642_5 (sequence is synthesized)
aagaagaagaagcttggacctaagaaagagaagaagagcaaatccaagcggaaggaggaggaggaggaggaggatgatgatgatgattcaaaggagcctaaatcatctgctcagctcctg

SEQ ID NO: 184233 - DNA, 120 bp, Artificial Sequence
  ENSG00000111642_6 (sequence is synthesized)
gaagactggggcatggaagacattgaccacgtgttctcagaggaggattatcgaaccctcaccaactacaaggccttcagccagtttgtcagacccctcattgctgccaaaaatcccaag

SEQ ID NO: 184234 - DNA, 120 bp, Artificial Sequence
  ENSG00000111642_7 (sequence is synthesized)
attgctgtctccaagatgatgatggttttgggtgcaaaatggcgggagttcagtaccaataaccccttcaaaggcagttctggggcatcagtggcagctgcggcagcagcagcggtagct

SEQ ID NO: 184235 - DNA, 120 bp, Artificial Sequence
  ENSG00000111642_8 (sequence is synthesized)
gtggtggagagcatggtgacagccactgaggttgcaccaccacctccccctgtggaggtgcctatccgcaaggccaagaccaaggagggcaaaggtcccaatgctcggaggaagcccaag

SEQ ID NO: 184236 - DNA, 120 bp, Artificial Sequence
  ENSG00000111642_9 (sequence is synthesized)
ggcagccctcgtgtacctgatgccaagaagcctaaacccaagaaagtagctcccctgaaaatcaagctgggaggttttggttccaagcgtaagagatcctcgagtgaggatgatgactta

SEQ ID NO: 184237 - DNA, 120 bp, Artificial Sequence
  ENSG00000111642_10 (sequence is synthesized)
gatgtggaatctgacttcgatgatgccagtatcaatagctattctgtttctgatggttccaccagccgtagtagccgcagccgcaagaaactccgaaccactaaaaagaaaaagaaaggc

SEQ ID NO: 184238 - DNA, 120 bp, Artificial Sequence
  ENSG00000111642_11 (sequence is synthesized)
gaggaggaggtgactgctgtggatggttatgagacagaccaccaggactattgcgaggtgtgccagcaaggcggtgagatcatcctgtgtgatacctgtccccgtgcttaccacatggtc

SEQ ID NO: 184239 - DNA, 120 bp, Artificial Sequence
  ENSG00000111642_12 (sequence is synthesized)
tgcctggatcccgacatggagaaggctcccgagggcaagtggagctgcccacactgcgagaaggaaggcatccagtgggaagctaaagaggacaattcggagggtgaggagatcctggaa

SEQ ID NO: 184240 - DNA, 120 bp, Artificial Sequence
  ENSG00000111642_13 (sequence is synthesized)
gaggttgggggagacctcgaagaggaggatgaccaccatatggaattctgtcgggtctgcaaggatggtggggaactgctctgctgtgatacctgtccttcttcctaccacatccactgc

SEQ ID NO: 184241 - DNA, 120 bp, Artificial Sequence
  ENSG00000111642_14 (sequence is synthesized)
ctgaatcccccacttccagagatccccaacggtgaatggctctgtccccgttgtacgtgtccagctctgaagggcaaagtgcagaagatcctaatctggaagtggggtcagccaccatct

SEQ ID NO: 184242 - DNA, 120 bp, Artificial Sequence
  ENSG00000111642_15 (sequence is synthesized)
cccacaccagtgcctcggcctccagatgctgatcccaacacgccctccccaaagcccttggaggggcggccagagcggcagttctttgtgaaatggcaaggcatgtcttactggcactgc

SEQ ID NO: 184243 - DNA, 120 bp, Artificial Sequence
  ENSG00000111642_16 (sequence is synthesized)
tcctgggtttctgaactgcagctggagctgcactgtcaggtgatgttccgaaactatcagcggaagaatgatatggatgagccaccttctggggactttggtggtgatgaagagaaaagc

SEQ ID NO: 184244 - DNA, 120 bp, Artificial Sequence
  ENSG00000111642_17 (sequence is synthesized)
cgaaagcgaaagaacaaggaccctaaatttgcagagatggaggaacgcttctatcgctatgggataaaacccgagtggatgatgatccaccgaatcctcaaccacagtgtggacaagaag

SEQ ID NO: 184245 - DNA, 120 bp, Artificial Sequence
  ENSG00000111642_18 (sequence is synthesized)
ggccacgtccactacttgatcaagtggcgggacttaccttacgatcaggcttcttgggagagtgaggatgtggagatccaggattacgacctgttcaagcagagctattggaatcacagg

SEQ ID NO: 184246 - DNA, 120 bp, Artificial Sequence
  ENSG00000111642_19 (sequence is synthesized)
gagttaatgaggggtgaggaaggccgaccaggcaagaagctcaagaaggtgaagcttcggaagttggagaggcctccagaaacgccaacagttgatccaacagtgaagtatgagcgacag

SEQ ID NO: 184247 - DNA, 120 bp, Artificial Sequence
  ENSG00000111642_20 (sequence is synthesized)
ccagagtacctggatgctacaggtggaaccctgcacccctatcaaatggagggcctgaattggttgcgcttctcctgggctcagggcactgacaccatcttggctgatgagatgggcctt

SEQ ID NO: 184248 - DNA, 120 bp, Artificial Sequence
  ENSG00000111642_21 (sequence is synthesized)
gggaaaactgtacagacagcagtcttcctgtattccctttacaaggagggtcattccaaaggccccttcctagtgagcgcccctctttctaccatcatcaactgggagcgggagtttgaa

SEQ ID NO: 184249 - DNA, 120 bp, Artificial Sequence
  ENSG00000111642_22 (sequence is synthesized)
atgtgggctccagacatgtatgtcgtaacctatgtgggtgacaaggacagccgtgccatcatccgagagaatgagttctcctttgaagacaatgccattcgtggtggcaagaaggcctcc

SEQ ID NO: 184250 - DNA, 120 bp, Artificial Sequence
  ENSG00000111642_23 (sequence is synthesized)
cgcatgaagaaagaggcatctgtgaaattccatgtgctgctgacatcctatgaattgatcaccattgacatggctattttgggctctattgattgggcctgcctcatcgtggatgaagcc

SEQ ID NO: 184251 - DNA, 120 bp, Artificial Sequence
  ENSG00000111642_24 (sequence is synthesized)
catcggctgaagaacaatcagtctaagttcttccgggtattgaatggttactcactccagcacaagctgttgctgactgggacaccattacaaaacaatctggaagagttgtttcatctg

SEQ ID NO: 184252 - DNA, 120 bp, Artificial Sequence
  ENSG00000111642_25 (sequence is synthesized)
ctcaactttctcacccccgagaggttccacaatttggaaggttttttggaggagtttgctgacattgccaaggaggaccagataaaaaaactgcatgacatgctggggccgcacatgttg

SEQ ID NO: 184253 - DNA, 120 bp, Artificial Sequence
  ENSG00000111642_26 (sequence is synthesized)
cggcggctcaaagccgatgtgttcaagaacatgccctccaagacagaactaattgtgcgtgtggagctgagccctatgcagaagaaatactacaagtacatcctcactcgaaattttgaa

SEQ ID NO: 184254 - DNA, 120 bp, Artificial Sequence
  ENSG00000111642_27 (sequence is synthesized)
atggaagctcctaagatgcctaatggcatgtatgatggcagtgccctaatcagagcatctgggaaattattgctgctgcagaaaatgctcaagaaccttaaggagggtgggcatcgtgta

SEQ ID NO: 184255 - DNA, 120 bp, Artificial Sequence
  ENSG00000111642_28 (sequence is synthesized)
ctcatcttttcccagatgaccaagatgctagacctgctagaggatttcttggaacatgaaggttataaatacgaacgcatcgatggtggaatcactgggaacatgcggcaagaggccatt

SEQ ID NO: 184256 - DNA, 120 bp, Artificial Sequence
  ENSG00000111642_29 (sequence is synthesized)
gaccgcttcaatgcaccgggtgctcagcagttctgcttcttgctttccactcgagctgggggccttggaatcaatctggccactgctgacacagttattatctatgactctgactggaac

SEQ ID NO: 184257 - DNA, 120 bp, Artificial Sequence
  ENSG00000111642_30 (sequence is synthesized)
ccccataatgacattcaggcctttagcagagctcaccggattgggcaaaataaaaaggtaatgatctaccggtttgtgacccgtgcgtcagtggaggagcgcatcacgcaggtggcaaag

SEQ ID NO: 184258 - DNA, 120 bp, Artificial Sequence
  ENSG00000111642_31 (sequence is synthesized)
aagaaaatgatgctgacgcatctagtggtgcggcctgggctgggctccaagactggatctatgtccaaacaggagcttgatgatatcctcaaatttggcactgaggaactattcaaggat

SEQ ID NO: 184259 - DNA, 120 bp, Artificial Sequence
  ENSG00000111642_32 (sequence is synthesized)
gaagccactgatggaggaggagacaacaaagagggagaagatagcagtgttatccactacgatgataaggccattgaacggctgctagaccgtaaccaggatgagactgaagacacagaa

SEQ ID NO: 184260 - DNA, 120 bp, Artificial Sequence
  ENSG00000111642_33 (sequence is synthesized)
ttgcagggcatgaatgaatatttgagctcattcaaagtggcccagtatgtggtacgggaagaagaaatgggggaggaagaggaggtagaacgggaaatcattaaacaggaagaaagtgtg

SEQ ID NO: 184261 - DNA, 120 bp, Artificial Sequence
  ENSG00000111642_34 (sequence is synthesized)
gatcctgactactgggagaaattgctgcggcaccattatgagcagcagcaagaagatctagcccgaaatctgggcaaaggaaaaagaatccgtaaacaggtcaactacaatgatggctcc

SEQ ID NO: 184262 - DNA, 120 bp, Artificial Sequence
  ENSG00000111642_35 (sequence is synthesized)
caggaggaccgagattggcaggacgaccagtccgacaaccagtccgattactcagtggcttcagaggaaggtgatgaagactttgatgaacgttcagaagctccccgtaggcccagtcgt

SEQ ID NO: 184263 - DNA, 120 bp, Artificial Sequence
  ENSG00000111642_36 (sequence is synthesized)
aagggcctgcggaatgataaagataagccattgcctcctctgttggcccgtgttggtgggaatattgaagtacttggttttaatgctcgtcagcgaaaagcctttcttaatgcaattatg

SEQ ID NO: 184264 - DNA, 120 bp, Artificial Sequence
  ENSG00000111642_37 (sequence is synthesized)
cgatatggtatgccacctcaggatgcttttactacccagtggcttgtaagagacctgcgaggcaaatcagagaaagagttcaaggcatatgtctctcttttcatgcggcatttatgtgag

SEQ ID NO: 184265 - DNA, 120 bp, Artificial Sequence
  ENSG00000111642_38 (sequence is synthesized)
ccgggggcagatggggctgagacctttgctgatggtgtcccccgagaaggcctgtctcgccagcatgtccttactagaattggtgttatgtctttgattcgcaagaaggttcaggagttt

SEQ ID NO: 184266 - DNA, 120 bp, Artificial Sequence
  ENSG00000111642_39 (sequence is synthesized)
gaacatgttaatgggcgctggagcatgcctgaactggctgaggtggaggaaaacaagaagatgtcccagccagggtcaccctccccaaaaactcctacaccctccactccaggggacacg

SEQ ID NO: 184267 - DNA, 120 bp, Artificial Sequence
  ENSG00000111642_40 (sequence is synthesized)
cagcccaacactcctgcacctgtcccacctgctgaagatgggataaaaatagaggaaaatagcctcaaagaagaagagagcatagaaggagaaaaggaggttaaatctacagcccctgag

SEQ ID NO: 184268 - DNA, 120 bp, Artificial Sequence
  ENSG00000111642_41 (sequence is synthesized)
actgccattgagtgtacacaggcccctgcccctgcctcagaggatgaaaaggtcgttgttgaaccccctgagggagaggagaaagtggaaaaggcagaggtgaaggagagaacagaggaa

SEQ ID NO: 184269 - DNA, 120 bp, Artificial Sequence
  ENSG00000111642_42 (sequence is synthesized)
cctatggagacagagcccaaaggtgctgctgatgtagagaaggtggaggaaaagtcagcaatagatctgacccctattgtggtagaagacaaagaagagaagaaagaagaagaagagaaa

SEQ ID NO: 184270 - DNA, 120 bp, Artificial Sequence
  ENSG00000111642_43 (sequence is synthesized)
aaagaggtgatgcttcagaatggagagacccccaaggacctgaatgatgagaaacagaagaaaaatattaaacaacgtttcatgtttaacattgcagatggtggttttactgagttgcac

SEQ ID NO: 184271 - DNA, 120 bp, Artificial Sequence
  ENSG00000111642_44 (sequence is synthesized)
tccctttggcagaatgaagagcgggcagccacagttaccaagaagacttatgagatctggcatcgacggcatgactactggctgctagccggcattataaaccatggctatgcccggtgg

SEQ ID NO: 184272 - DNA, 120 bp, Artificial Sequence
  ENSG00000111642_45 (sequence is synthesized)
caagacatccagaatgacccacgctatgccatcctcaatgagcctttcaagggtgaaatgaaccgtggcaatttcttagagatcaagaataaatttctagctcgaaggtttaagctctta

SEQ ID NO: 184273 - DNA, 120 bp, Artificial Sequence
  ENSG00000111642_46 (sequence is synthesized)
gaacaagctctggtgattgaggaacagctgcgccgggctgcttacttgaacatgtcagaagacccttctcacccttccatggccctcaacacccgctttgctgaggtggagtgtttggcg

SEQ ID NO: 184274 - DNA, 120 bp, Artificial Sequence
  ENSG00000111642_47 (sequence is synthesized)
gaaagtcatcagcacctgtccaaggagtcaatggcaggaaacaagccagccaatgcagtcctgcacaaagttctgaaacagctggaagaactgctgagtgacatgaaagctgatgtgact

SEQ ID NO: 184275 - DNA, 120 bp, Artificial Sequence
  ENSG00000111642_48 (sequence is synthesized)
cgactcccagctaccattgcccgaattcccccagttgctgtgaggttacagatgtcagagcgtaacattctcagccgcctggcaaaccgggcacccgaacctaccccacagcaggtagcc

SEQ ID NO: 184276 - DNA, 120 bp, Artificial Sequence
  ENSG00000111642_49 (sequence is synthesized)
cagcagcagtgaagatgcagactgataccacctccaccgctgagcagtgaccttcctcactttctcttgtcccagcttctcccctgggggcctgagagaccctcaccttccttctgccca

SEQ ID NO: 184277 - DNA, 120 bp, Artificial Sequence
  ENSG00000111642_50 (sequence is synthesized)
tcttccatgttgtaaaggaacagccccagtgcactgggggaggggagggagtgaggggcagtggtgcccttcctgcagaagagacatgcagcagtagcgctggcgccatctgcaggagct

SEQ ID NO: 184278 - DNA, 120 bp, Artificial Sequence
  ENSG00000111642_51 (sequence is synthesized)
ggcgggctggccttctggaccctggcttctccccactgtaacgcctgttacacacaaactgttgtgggttcctgccaggcttgaagaaaatgatctgaattttttcctccttttggtttt

SEQ ID NO: 184279 - DNA, 120 bp, Artificial Sequence
  ENSG00000111642_52 (sequence is synthesized)
attttgttggtttattttgtgttttcttttctcctttttggggggtattcagagtgggctgggcccctgggcgagacacagctacctctgttggcatctttttaataccaggaacccagc

SEQ ID NO: 184280 - DNA, 120 bp, Artificial Sequence
  ENSG00000111642_53 (sequence is synthesized)
ggctctagccactgagcggctaaatgaaataaagtggaaaaaaaaaaaaaggaaaaaaccaaaagcataaaaaaccacagcaaatttcttgatgaaaattgaaaataaaagtttccttgt

SEQ ID NO: 184281 - DNA, 82 bp, Artificial Sequence
  ENSG00000111642_54 (sequence is synthesized)
attactgtaattgcagacatttagatgtgggtctatccaattggataatagtgtgcaacagaggagaatgttcttcctttag

SEQ ID NO: 184282 - DNA, 120 bp, Artificial Sequence
  ENSG00000111642_55 (sequence is synthesized)
ctcttcctgcagaaccattctggagcttgtaactttgctgtatgtccctagctttacatactgggtgggtggcctatcagtgaattcccttgagattgggtggattcctatcatctggaa

SEQ ID NO: 184283 - DNA, 120 bp, Artificial Sequence
  ENSG00000111642_56 (sequence is synthesized)
aaaccacggtacagggactttacctctttacctctgtttgatgagggaatgccaaactgatagtgggttctgtggagaaagccagaagcaaattatatgaaatggatccaggggtagggg

SEQ ID NO: 184284 - DNA, 120 bp, Artificial Sequence
  ENSG00000111642_57 (sequence is synthesized)
ctgaaaattggcattgagaccaaggtggtatttgagacaagtggaaaatatctgtaggcaaattcttatgttgatgaattgatcctcttcctttgaaaacaaagctgataacatgactaa

SEQ ID NO: 184285 - DNA, 120 bp, Artificial Sequence
  ENSG00000111642_58 (sequence is synthesized)
acttacaaccaaatatcatgctcacaacagttattttggctctttaccagaatgtcattttctcctatgtgttttattaaaccttacaaatgaaattttgaatgctacctcatctctcta

SEQ ID NO: 184286 - DNA, 120 bp, Artificial Sequence
  ENSG00000111642_59 (sequence is synthesized)
aatgctacctcatctctctagagaaaaggcagaagatcctaggtaatctatctctttgtgttttctggtttttatttaagagacagggtctctaccaggtgcagtggctcacatctgtaa

SEQ ID NO: 184287 - DNA, 120 bp, Artificial Sequence
  ENSG00000111642_60 (sequence is synthesized)
agggagaagaggctgctgacccaggagaagctgaggaggaacattagggttggagatggggaaaggaaattgtattttagaagtgggcatgagattgagctggcacctgaacctaggact

SEQ ID NO: 184288 - DNA, 120 bp, Artificial Sequence
  ENSG00000111642_61 (sequence is synthesized)
gtggcaaccaggtgtctctgctgaatgtggtgatggatcttaagaagtgctgcaaccatccatacctcttccctgtggctgcaatggtatgtagtgccatctcctgttcctccctgggtt

SEQ ID NO: 184289 - DNA, 120 bp, Artificial Sequence
  ENSG00000111642_62 (sequence is synthesized)
gggtcttctccatgtgggctttcttttaatacttttttctttgcatttgttctcaggaagctcctaagatgcctaatggcatgtatgatggcagtgccctaatcagagcatctgggaaat

SEQ ID NO: 184290 - DNA, 120 bp, Artificial Sequence
  ENSG00000111642_63 (sequence is synthesized)
tcatttgagatggagtaaagcttttgaatgtctcaattggacgaatgtattggactattcctaggagattttttcttttggggtatttgttctttctgctagaaagaagaaagcattgta

SEQ ID NO: 184291 - DNA, 120 bp, Artificial Sequence
  ENSG00000111642_64 (sequence is synthesized)
atgagctgtccatgaagttcttcataggttcttattaccatctgaaacaatgagaggtgagctgagaggccagtcagaagtgagtaaagtgagttatcagtcgaactcccgtttcctctt

SEQ ID NO: 184292 - DNA, 120 bp, Artificial Sequence
  ENSG00000111642_65 (sequence is synthesized)
ggccggtatccatattaagcactacagatccctgtgtgaaccatggtcactcgtgaatttttgctggggctgtagagatatcaggaggaagcgacacactgaagaatcctgcacccttga

SEQ ID NO: 184293 - DNA, 90 bp, Artificial Sequence
  ENSG00000111642_66 (sequence is synthesized)
tcagctaattttgtattttttagtagagagggggtttctccatattggtcaggccagtctccaactcctaacctcaggtgatccacctgc

SEQ ID NO: 184294 - DNA, 120 bp, Artificial Sequence
  ENSG00000111642_67 (sequence is synthesized)
agtacagacataattttgttttttctctgaatattttccatctatggttgtttgaatccacaggtgcggaacccgtggatacagagggccgattgtaatttatttaattagttccataat

SEQ ID NO: 184295 - DNA, 120 bp, Artificial Sequence
  ENSG00000111642_68 (sequence is synthesized)
gatgggcttttaggttgtttctaatgttatgctattagcagctgtttaattccaatataagggatgtggaatcagtgagtggtcctcaagtgtctgaaaaaaattcacttttagaggagt

SEQ ID NO: 184296 - DNA, 120 bp, Artificial Sequence
  ENSG00000111642_69 (sequence is synthesized)
atcaacgtttttgggacataagaggctatatagaattcttttcgttctgcagacagttggtaagcttttatgaagtttatgaagaatagaaaggcttatagtcatcctctccttccttct

SEQ ID NO: 184297 - DNA, 120 bp, Artificial Sequence
  ENSG00000111642_70 (sequence is synthesized)
ctcttatgaaaatcttttacagtacttcagaagtttctccattctgccttgctaaggctctgacctcttttctttttgctatctttcaattgtatatgcatcagtgcaaggggttagaag

SEQ ID NO: 184298 - DNA, 120 bp, Artificial Sequence
  ENSG00000111642_71 (sequence is synthesized)
aaagcattctgtctcttcatccttacctgtgataatagctctatcccatgtttttcttgagttatgctgactgctaatctatatgtaattatgaggagctgtgtactctcaatcaaattt

SEQ ID NO: 184299 - DNA, 120 bp, Artificial Sequence
  ENSG00000111642_72 (sequence is synthesized)
cttctaagttcttaggtccaaacaggcacaccaagtatttaagagtccagtcatgaaaaggagctagcagagtgggaactgtgaggaccaggggtagctggtggtgctgacttcagcact

SEQ ID NO: 184300 - DNA, 120 bp, Artificial Sequence
  ENSG00000111642_73 (sequence is synthesized)
gtccagccccgcgtctcccctccccgcgcttgcaccagcctgccctcggaggcgtcgctccctcgctccgtgggggcgcctgccggggagccggcttccgggctgcccccgaggagtgtg

SEQ ID NO: 184301 - DNA, 120 bp, Artificial Sequence
  ENSG00000111642_74 (sequence is synthesized)
aagccagccaatgcagtcctgcacaaagagctcctttgtctgggagtttaggaggtgctagggatctttgccatccttgggagttctgaaacagctggaagaactgctgagtgacatgaa

SEQ ID NO: 184302 - DNA, 67 bp, Artificial Sequence
  ENSG00000111642_75 (sequence is synthesized)
gattataggcatgagccactgcgcctagtcttgtactcccgacctcaggtgacccgcctgccttggc

SEQ ID NO: 184303 - DNA, 120 bp, Artificial Sequence
  ENSG00000111642_76 (sequence is synthesized)
tgtgagccactgcacccggccacctcttttaactttaaacatattcaggttcttgagatggaaagcaaagcagaataatacagtgtcatttgcgatactttagaggtaacttcaggtgat

SEQ ID NO: 184304 - DNA, 120 bp, Artificial Sequence
  ENSG00000111642_77 (sequence is synthesized)
aaaagatcccttcaaattctagacccctttcaacattttgtttctaattaaagtaaaaggttatgaggaggcggagggtgaaataaggaaaagaatgctgttataatggaggtggggaga

SEQ ID NO: 184305 - DNA, 120 bp, Artificial Sequence
  ENSG00000111642_78 (sequence is synthesized)
tgactttaaaaagcacaaaatcatggacagttggaactggaatatgaggagtaggaatttgaacatggtggaggtcaggtcagatgacagaagacaatacatcacagttacttggtcact

SEQ ID NO: 184306 - DNA, 120 bp, Artificial Sequence
  ENSG00000111642_79 (sequence is synthesized)
gagaagtgatggggggctggtccactagggtagagggagctcagtctgggccaccacagctcaccacctctttttctccctatgcagttctgaaacagctggaagaactgctgagtgaca

SEQ ID NO: 184307 - DNA, 78 bp, Artificial Sequence
  ENSG00000111642_80 (sequence is synthesized)
aggaacctatggagacagagcccaaaggttcgagcgattctcctgcctcaccctcccgaggagctgggattacagaca

SEQ ID NO: 184308 - DNA, 120 bp, Artificial Sequence
  ENSG00000111642_81 (sequence is synthesized)
ccggtgggacgctttcgccccccgcgtccctgcctccggccccccgcagcgcccgagcctccacgccccctcgtccccgcagctcttgaggagaacctgagttgtcccagaggacagcct

SEQ ID NO: 184309 - DNA, 120 bp, Artificial Sequence
  ENSG00000111642_82 (sequence is synthesized)
gcctttggagagctgccctgtctggggactggcccctccccgggcgcagggaggcgcccccccacccccaagtgaccttgtgtccccgagcgcctcgccgcctgcggcctcccctggccc

SEQ ID NO: 184310 - DNA, 120 bp, Artificial Sequence
  ENSG00000111642_83 (sequence is synthesized)
tcagcctgagcggttcgggtgccctgctagggtggctggggtggggggcggaaagagcgggtgggtgtgggggagggggacagtgcgcgtcactgactgttctgtgtttctcccccctcc

SEQ ID NO: 184311 - DNA, 120 bp, Artificial Sequence
  ENSG00000111644_0 (sequence is synthesized)
ctctctgcggcttggcccgttagaggcggcttgtgtccacgggacgcgggcggatcttctccggccatgaggaagccagccgctggcttccttccctcactcctgaaggtgctgctcctg

SEQ ID NO: 184312 - DNA, 120 bp, Artificial Sequence
  ENSG00000111644_1 (sequence is synthesized)
cctctggcacctgccgcagcccaggattcgactcaggcctccactccaggcagccctctctctcctaccgaatacgaacgcttcttcgcactgctgactccaacctggaaggcagagact

SEQ ID NO: 184313 - DNA, 120 bp, Artificial Sequence
  ENSG00000111644_2 (sequence is synthesized)
acctgccgtctccgtgcaacccacggctgccggaatcccacactcgtccagctggaccaatatgaaaaccacggcttagtgcccgatggtgctgtctgctccaacctcccttatgcctcc

SEQ ID NO: 184314 - DNA, 120 bp, Artificial Sequence
  ENSG00000111644_3 (sequence is synthesized)
tggtttgagtctttctgccagttcactcactaccgttgctccaaccacgtctactatgccaagagagtcctgtgttcccagccagtctctattctctcacctaacactctcaaggagata

SEQ ID NO: 184315 - DNA, 120 bp, Artificial Sequence
  ENSG00000111644_4 (sequence is synthesized)
gaagcttcagctgaagtctcacccaccacgatgacctcccccatctcaccccacttcacagtgacagaacgccagaccttccagccctggcctgagaggctcagcaacaacgtggaagag

SEQ ID NO: 184316 - DNA, 120 bp, Artificial Sequence
  ENSG00000111644_5 (sequence is synthesized)
ctcctacaatcctccttgtccctgggaggccaggagcaagcgccagagcacaagcaggagcaaggagtggagcacaggcaggagccgacacaagaacacaagcaggaagaggggcagaaa

SEQ ID NO: 184317 - DNA, 120 bp, Artificial Sequence
  ENSG00000111644_6 (sequence is synthesized)
caggaagagcaagaagaggaacaggaagaggagggaaagcaggaagaaggacaggggactaaggagggacgggaggctgtgtctcagctgcagacagactcagagcccaagtttcactct

SEQ ID NO: 184318 - DNA, 120 bp, Artificial Sequence
  ENSG00000111644_7 (sequence is synthesized)
gaaatagatgaaatgaatgaaatatatgatgagaactcctactggagaaaccaaaaccctggcagcctcctgcagctgccccacacagaggccttgctggtgctgtgctattcgatcgtg

SEQ ID NO: 184319 - DNA, 120 bp, Artificial Sequence
  ENSG00000111644_8 (sequence is synthesized)
gagaatacctgcatcataacccccacagccaaggcctggaagtacatggaggaggagatccttggtttcgggaagtcggtctgtgacagccttgggcggcgacacatgtctacctgtgcc

SEQ ID NO: 184320 - DNA, 120 bp, Artificial Sequence
  ENSG00000111644_9 (sequence is synthesized)
ctctgtgacttctgctccttgaagctggagcagtgccactcagaggccagcctgcagcggcaacaatgcgacacctcccacaagactccctttgtcagccccttgcttgcctcccagagc

SEQ ID NO: 184321 - DNA, 120 bp, Artificial Sequence
  ENSG00000111644_10 (sequence is synthesized)
ctgtccatcggcaaccaggtagggtccccagaatcaggccgcttttacgggctggatttgtacggtgggctccacatggacttctggtgtgcccggcttgccacgaaaggctgtgaagat

SEQ ID NO: 184322 - DNA, 120 bp, Artificial Sequence
  ENSG00000111644_11 (sequence is synthesized)
gtccgagtctctgggtggctccagactgagttccttagcttccaggatggggatttccctaccaagatttgtgacacagactatatccagtacccaaactactgttccttcaaaagccag

SEQ ID NO: 184323 - DNA, 120 bp, Artificial Sequence
  ENSG00000111644_12 (sequence is synthesized)
cagtgtctgatgagaaaccgcaatcggaaggtgtcccgcatgagatgtctgcagaatgagacttacagtgcgctgagccctggcaaaagtgaggacgttgtgcttcgatggagccaggag

SEQ ID NO: 184324 - DNA, 120 bp, Artificial Sequence
  ENSG00000111644_13 (sequence is synthesized)
ttcagcaccttgactctaggccagttcggatgagctggcgtctattctgcccacaccccagcccaacctgcccacgttctctattgttttgagaccccattgctttcaggctgccccttc

SEQ ID NO: 184325 - DNA, 120 bp, Artificial Sequence
  ENSG00000111644_14 (sequence is synthesized)
tgggtctgttactcggcccctactcacatttccttgggttggagcaacagtcccagagagggccacggtgggagctgcgccctccttaaaagatgactttacataaaatgttgatcttca

SEQ ID NO: 184326 - DNA, 120 bp, Artificial Sequence
  ENSG00000111644_15 (sequence is synthesized)
gatgagaactcctactggagaaaccaaaaccctggcaggtataggaagttttgactctgtcatccaccctgccctcccttctgcctttcttgggagtgagaagcccattttcctagcttc

SEQ ID NO: 184327 - DNA, 120 bp, Artificial Sequence
  ENSG00000111644_16 (sequence is synthesized)
tagtcctctccctcccgagagctctgcttttacggtttctggatcgcttcctcatggtggtcgcgctgggtcggctccctaggtcctgggatactcccatctccccccgcccgcggccgg

SEQ ID NO: 184328 - DNA, 120 bp, Artificial Sequence
  ENSG00000111644_17 (sequence is synthesized)
acctttgcctctgtctctagactccccccgccctggtcagcagggataaccctcaccccgttcctaatttgccagtctgggtctgtctgtcctggtctcggagcgggttttggggttcgg

SEQ ID NO: 184329 - DNA, 120 bp, Artificial Sequence
  ENSG00000111644_18 (sequence is synthesized)
gaaaaccacggcttagtgcccgatggtgagggccagactaggggggaaaccgaggcacccagagtgttcacccaaacctcagggcaaaaacccctgtgctcatgtgaggcggggaagggc

SEQ ID NO: 184330 - DNA, 120 bp, Artificial Sequence
  ENSG00000111644_19 (sequence is synthesized)
atggctggcaccacaccatgagctcgtactctccaccctccccatggcgtggagtccattgcccacagccccaccccaagctccccacgggttcatcttctccacccctgccctttctca

SEQ ID NO: 184331 - DNA, 120 bp, Artificial Sequence
  ENSG00000111644_20 (sequence is synthesized)
gataacagaggagggtcctaagagcaccacaggaagaacccttggctgggccaggacttggacgttgaggtctcggtctgtctcctcttcttactcaccaagtagcctgggatgaggcac

SEQ ID NO: 184332 - DNA, 120 bp, Artificial Sequence
  ENSG00000111644_21 (sequence is synthesized)
ttccccctctgagcctcagccgcctgtttctgcatgaaaggggttgggctgcttgatgtctcctctggctttaaaaacccacatttgagtttcctccttccctctactgccctgtgccca

SEQ ID NO: 184333 - DNA, 120 bp, Artificial Sequence
  ENSG00000111644_22 (sequence is synthesized)
aagcggttcctgcttgcatctctggggcagaggcctccaccagcaggctctcctccattcctccagtcctggcggaagcaaggccctcctaggcagctggtggataacagaggagggtcc

SEQ ID NO: 184334 - DNA, 120 bp, Artificial Sequence
  ENSG00000111647_0 (sequence is synthesized)
gagtctcttaggtgatgctgcagccaagatggcgcccgcggcggccgtggcggcctgagcgtgatgctccgggttctcggcggcggctgtggccttggccggggccttgggtctctcccg

SEQ ID NO: 184335 - DNA, 120 bp, Artificial Sequence
  ENSG00000111647_1 (sequence is synthesized)
gtcgtgagcgatcagcgcctctccgccggccgggctagccgggacagagaggagacggccacgaagagaggaggcagtgagcaacaggacgagaccgcggcgtctccagcctcggtacca

SEQ ID NO: 184336 - DNA, 120 bp, Artificial Sequence
  ENSG00000111647_2 (sequence is synthesized)
tggccgggatcatcaagaaacaaatcttgaagcacctctccagatttaccaaaaatttatctcctgacaagataaatctaagtacccttaaaggagaaggtgaactgaagaatttggagt

SEQ ID NO: 184337 - DNA, 120 bp, Artificial Sequence
  ENSG00000111647_3 (sequence is synthesized)
tggatgaagaagtactccagaatatgttggatttgccaacatggcttgctatcaacaaagttttttgtaataaagcgtccattaggatcccatggacaaaactgaaaacacatcccatct

SEQ ID NO: 184338 - DNA, 120 bp, Artificial Sequence
  ENSG00000111647_4 (sequence is synthesized)
gtttgtccctggataaagtaataatggaaatgagtacatgtgaagaaccaagaagccctaatggcccatcaccaattgcaactgcttcaggacaaagtgaatacggctttgctgaaaaag

SEQ ID NO: 184339 - DNA, 120 bp, Artificial Sequence
  ENSG00000111647_5 (sequence is synthesized)
tagttgagggaatttctgtttctgtaaattctatagtcatcagaattggagcaaaagccttcaatgcatcatttgaactttctcagcttcggatctatagtgtaaatgcacactgggaac

SEQ ID NO: 184340 - DNA, 120 bp, Artificial Sequence
  ENSG00000111647_6 (sequence is synthesized)
atggagatttgagatttactcgtattcaggatccacagagaggagaggttttgacttttaaagaaataaattggcagatgataagaatagaggcagatgccacccaaagttcacatcttg

SEQ ID NO: 184341 - DNA, 120 bp, Artificial Sequence
  ENSG00000111647_7 (sequence is synthesized)
aaattatgtgtgctcctgttcgattaataaccaaccaatcaaaaatcagagtcacacttaaaagaaggttaaaggactgcaatgtcatagcaacaaagttagttctaatattggatgact

SEQ ID NO: 184342 - DNA, 120 bp, Artificial Sequence
  ENSG00000111647_8 (sequence is synthesized)
tattatgggttttgactgattcccagttgaaagctatggtacaatatgcaaagtctcttagtgaagcaatagaaaaatcaacagaacaaaggaagagtatggctcctgaacctacacaga

SEQ ID NO: 184343 - DNA, 120 bp, Artificial Sequence
  ENSG00000111647_9 (sequence is synthesized)
gctctacagtagtcgcatctgcccagcaagtgaagacaacgcaaacttcaaatgctcctgatgtaaatgatgcaattgtgaaactattcaatgattttgatgttaaggaaacctcccatc

SEQ ID NO: 184344 - DNA, 120 bp, Artificial Sequence
  ENSG00000111647_10 (sequence is synthesized)
atttagtgatttctcatctagatctacacatatgtgatgacattcatgctaaagaaaaagagtcaaacagacgtattactggaggggcaatgcaactctcttttacacagctaactatag

SEQ ID NO: 184345 - DNA, 120 bp, Artificial Sequence
  ENSG00000111647_11 (sequence is synthesized)
attattatccttatcataaagcaggagatagttgtaatcattggatgtattttagtgatgcaaccaaaacaaaaaatggatgggccaatgagttattgcatgaatttgagtgcaacgttg

SEQ ID NO: 184346 - DNA, 120 bp, Artificial Sequence
  ENSG00000111647_12 (sequence is synthesized)
aaatgcttaaacaggctgtgaaggatcataatgtaggttcacctcctaaatccccaacacatgcctctccccagcacacacaaacagagaaggactaccctctgaaagggacatgcagaa

SEQ ID NO: 184347 - DNA, 120 bp, Artificial Sequence
  ENSG00000111647_13 (sequence is synthesized)
caccttcagtattatctcaacaatcaaaagctaagctaatgtctagttctgttgtggttagacttgcagatttcaatatataccaggtctctacagcggaacaatgtcgttcttccccca

SEQ ID NO: 184348 - DNA, 120 bp, Artificial Sequence
  ENSG00000111647_14 (sequence is synthesized)
aaagcatgatttgctgcaataaaaaatccctatatcttccacaagaaatgtcagctgtctatatagaattcacagaatattactatccagatggaaaggattttccaattccatctccca

SEQ ID NO: 184349 - DNA, 120 bp, Artificial Sequence
  ENSG00000111647_15 (sequence is synthesized)
acctctatagccagctgaatgcactacagtttactgtggatgaaagaagcattctatggttaaatcaatttctgttggatttaaaacagagtcttaatcagttcatggctgtgtacaagt

SEQ ID NO: 184350 - DNA, 120 bp, Artificial Sequence
  ENSG00000111647_16 (sequence is synthesized)
tgaatgacaattcaaaatctgacgagcatgttgatgttcgagttgatggcttaatgctaaagtttgtcattccttctgaagtgaaatctgaatgtcatcaagatcagccacgtgcaattt

SEQ ID NO: 184351 - DNA, 120 bp, Artificial Sequence
  ENSG00000111647_17 (sequence is synthesized)
ctattcagagttctgaaatgattgccacaaatacaaggcactgtccaaactgtcgacattctgacctagaagctttgtttcaagactttaaagattgtgatttttttagtaaaacatata

SEQ ID NO: 184352 - DNA, 120 bp, Artificial Sequence
  ENSG00000111647_18 (sequence is synthesized)
ccagcttccccaaatcttgtgacaattttaatcttctacatccaattttccagagacatgctcatgaacaagataccaaaatgcatgaaatttataaaggaaatattactccccaattga

SEQ ID NO: 184353 - DNA, 120 bp, Artificial Sequence
  ENSG00000111647_19 (sequence is synthesized)
ataaaaacactcttaaaacttctgctgccacggatgtttgggctgtgtacttttctcaattttggatagattatgaagggatgaaaagtggaaaaggacggccaataagttttgtagact

SEQ ID NO: 184354 - DNA, 120 bp, Artificial Sequence
  ENSG00000111647_20 (sequence is synthesized)
cattccctctttccatttggatttgtcaaccaacaagatatgcagagtcacaaaaagagccgcagacttgtaatcaggtatctctaaatacatcacaaagtgaatctagtgatctggctg

SEQ ID NO: 184355 - DNA, 120 bp, Artificial Sequence
  ENSG00000111647_21 (sequence is synthesized)
agtacagagtctgagcctttgacaaatggtggtcagaagccttcttcatcagatacatttttcagattttccccttcctcgtcagaggcagatattcatctcctagttcatgttcataaa

SEQ ID NO: 184356 - DNA, 120 bp, Artificial Sequence
  ENSG00000111647_22 (sequence is synthesized)
catgtcagtatgcagattaatcactaccagtatctgcttctacttttcctgcatgagtcacttatcctgctttcagagaacttaaggaaagatgtagaagctgtaactggcagtcctgct

SEQ ID NO: 184357 - DNA, 120 bp, Artificial Sequence
  ENSG00000111647_23 (sequence is synthesized)
agtcagacatccatttgtattggaattttacttagaagtgcagaactggctcttttgctccatccagtggatcaagcaaatactcttaagtctcctgtttctgaaagtgtgagcccagtg

SEQ ID NO: 184358 - DNA, 120 bp, Artificial Sequence
  ENSG00000111647_24 (sequence is synthesized)
gtacctgattatttgcctacagaaaatggggattttttgtcttcaaaaagaaaacaaattagtagggatataaatagaattagaagtgtaactgttaatcatatgtcagacaacagatct

SEQ ID NO: 184359 - DNA, 120 bp, Artificial Sequence
  ENSG00000111647_25 (sequence is synthesized)
atgagtgttgaccttagccatatccctttaaaggatcctttgctttttaaatcagctagtgatacaaatctgcaaaaaggcatttcttttatggactatttatcagataaacatttaggg

SEQ ID NO: 184360 - DNA, 120 bp, Artificial Sequence
  ENSG00000111647_26 (sequence is synthesized)
aaaataagtgaagatgaaagtagtggacttgtttacaaaagtggctcaggagaaattggatcagaaacaagtgacaaaaaggattcattttatacagattcaagtagtatcttaaactac

SEQ ID NO: 184361 - DNA, 120 bp, Artificial Sequence
  ENSG00000111647_27 (sequence is synthesized)
agagaagattcgaatatactttcatttgatagtgatggtaatcaaaacatactttcaagtactttaactagtaaaggaaatgaaaccatagagtccatctttaaagctgaagatttgctt

SEQ ID NO: 184362 - DNA, 120 bp, Artificial Sequence
  ENSG00000111647_28 (sequence is synthesized)
ccagaagcagcttcactctctgaaaacctggatatcagtaaagaagagacccccccagttagaacacttaaatcacagtcatctttaagtggaaagcctaaggaacgttgcccacccaac

SEQ ID NO: 184363 - DNA, 120 bp, Artificial Sequence
  ENSG00000111647_29 (sequence is synthesized)
ctggctcctctctgtgtttcttataagaatatgaaaagaagctcttcacaaatgtcattggataccatttcacttgacagcatgatattggaagaacagttattagaaagtgatggaagt

SEQ ID NO: 184364 - DNA, 120 bp, Artificial Sequence
  ENSG00000111647_30 (sequence is synthesized)
gatagccatatgtttttggaaaaaggaaataaaaagaactcaactacaaattacaggggcacagcagaaagtgtgaatgctggtgcaaacctacagaattatggtgaaacttctccagat

SEQ ID NO: 184365 - DNA, 120 bp, Artificial Sequence
  ENSG00000111647_31 (sequence is synthesized)
gccatcagtacaaattcagagggtgctcaggaaaatcatgatgacctgatgtccgttgtggtatttaaaattactggtgttaatggggaaattgacatccgaggggaagatacagaaatc

SEQ ID NO: 184366 - DNA, 120 bp, Artificial Sequence
  ENSG00000111647_32 (sequence is synthesized)
tgtcttcaagtgaaccaggtgacaccagaccaattaggcaatatcagccttcggcattacctttgtaatcgtccagttggttccgatcagaaagctgtaattcattccaaatcctctcct

SEQ ID NO: 184367 - DNA, 120 bp, Artificial Sequence
  ENSG00000111647_33 (sequence is synthesized)
gagatttctctgagatttgaaagtgggcctggtgctgtaatacactctttacttgcagaaaaaaatggatttctgcagtgccacatagaaaacttcagcactgagtttcttacatcttct

SEQ ID NO: 184368 - DNA, 120 bp, Artificial Sequence
  ENSG00000111647_34 (sequence is synthesized)
cttatgaatattcaacattttttggaagatgaaactgttgcaacagtaatgccaatgaagatacaagtttctaacacgaaaataaatttaaaagatgatagtccccggagtagtacagta

SEQ ID NO: 184369 - DNA, 120 bp, Artificial Sequence
  ENSG00000111647_35 (sequence is synthesized)
tcccttgaaccagctcctgtaactgtacatattgatcatcttgtggtagagagaagtgacgatggctcttttcatatcagagattctcacatgcttaacactggaaatgatttgaaagaa

SEQ ID NO: 184370 - DNA, 120 bp, Artificial Sequence
  ENSG00000111647_36 (sequence is synthesized)
aatgtcaaaagcgattcagtgctgctgaccagtggaaagtatgatctgaagaaacaacgcagtgtcacgcaagccactcagacaagcccaggggttccttggccttctcagtcagctaac

SEQ ID NO: 184371 - DNA, 120 bp, Artificial Sequence
  ENSG00000111647_37 (sequence is synthesized)
tttcctgagttctcctttgacttcactagggaacagctcatggaagagaatgaatctcttaaacaggaactggctaaagctaaaatggctcttgcagaggctcacttggaaaaagatgct

SEQ ID NO: 184372 - DNA, 120 bp, Artificial Sequence
  ENSG00000111647_38 (sequence is synthesized)
cttcttcatcatataaagaagatgacagttgaatagcaggagtggcagtcaaaactgaaattatagctctggagtaggaaggttatatttataatgtggatgttaccagttaggggaaga

SEQ ID NO: 184373 - DNA, 120 bp, Artificial Sequence
  ENSG00000111647_39 (sequence is synthesized)
cttttattttcatgaaaagacaataaaacaaaatggaatgtgatgaagtggtgactatttcaaagccagtttagaaagtattagtacgggcattacaatcttttggttgttttgtgtttt

SEQ ID NO: 184374 - DNA, 120 bp, Artificial Sequence
  ENSG00000111647_40 (sequence is synthesized)
ggggcttaaccctcttttaagctgttgtgatctagggaagtcaacacatagtgtaaaataattacatgcctaatgaaaagaagatgtcatttcctaattttgatatctcattttcggcat

SEQ ID NO: 184375 - DNA, 120 bp, Artificial Sequence
  ENSG00000111647_41 (sequence is synthesized)
tttttaaaatgtaaaaggaaaacctcttgtgttcacacagattgctgaattgatttctccatatttgttaataatttactattatttacaaagattcaaatgcttttatgactaatgtaa

SEQ ID NO: 184376 - DNA, 120 bp, Artificial Sequence
  ENSG00000111647_42 (sequence is synthesized)
aaactcaagatagatgaaggaagacatctgctctgcatctcatagggagtaaaatggcacagttgaaactcaagcattgtcttgtaaatctaaattcattgttttttctccactgtatta

SEQ ID NO: 184377 - DNA, 120 bp, Artificial Sequence
  ENSG00000111647_43 (sequence is synthesized)
cactgctcccctttgcccctgtattcaccacggccattgtctgttattgcataatcatagtattccagccatgcccccataattgtttttcttaaataaaatatatcattgaacaagtaa

SEQ ID NO: 184378 - DNA, 120 bp, Artificial Sequence
  ENSG00000111647_44 (sequence is synthesized)
attttgaagctgaaaaagtataaggaaagaagtacaggagactattttgcaatattaccatcatagacataaatactattctgttaagacttgcaaggaagattttggtagcttaggttg

SEQ ID NO: 184379 - DNA, 120 bp, Artificial Sequence
  ENSG00000111647_45 (sequence is synthesized)
acgaagatggaagagatttgaagagggatatagaatgagtaaattaagcaactttttaatatcctatttctataaatatccagaatttaaaacattcctgtattataatatctaaaaaca

SEQ ID NO: 184380 - DNA, 79 bp, Artificial Sequence
  ENSG00000111647_46 (sequence is synthesized)
ggctcaagtgatcctctcgcttgttcactttagtggaaatattattttatcagagatgtcttcttaacccctgatgatg

SEQ ID NO: 184381 - DNA, 120 bp, Artificial Sequence
  ENSG00000111647_47 (sequence is synthesized)
tattattttatcagagatgtcttcttaacccctgatgatgttaggaaccccttatgaaatgcctttattagcccctcataccacaaatgtattcacaggtattttccctgggccattttt

SEQ ID NO: 184382 - DNA, 120 bp, Artificial Sequence
  ENSG00000111647_48 (sequence is synthesized)
ttaataatgtattgagcacctaccacattgccaagcactatgttagaagctgactacagagtagtaaatacaataataaattgagacttatgttttgtatgtctttaggttttcttacct

SEQ ID NO: 184383 - DNA, 120 bp, Artificial Sequence
  ENSG00000111647_49 (sequence is synthesized)
ttaattcatttttatggcattttttaaaagtattgatctgtgatggctactgaattttaaaaaaaattgtcttttaccacagatagtttgagaaatattgaattatagcacattcattgt

SEQ ID NO: 184384 - DNA, 120 bp, Artificial Sequence
  ENSG00000111647_50 (sequence is synthesized)
ttgctaactaattacaatctaatttttcttggtccattttttaaaggaggcagtgcttgagaaagagttgaagggatagtccatttttgttaaataagcatacagtgttagatcatgtgt

SEQ ID NO: 184385 - DNA, 120 bp, Artificial Sequence
  ENSG00000111652_0 (sequence is synthesized)
ggtggcaggaaaggcttggaacagctgccggaggtgacggagcggcggccccgcccggtgcgctggaggtcgaagcttccagctctggacatcctgagcccaagtcccccacactcagtg

SEQ ID NO: 184386 - DNA, 120 bp, Artificial Sequence
  ENSG00000111652_1 (sequence is synthesized)
cagtgatgagtgcggaagtgaaggtgacagggcagaaccaggagcaatttctgctcctagccaagtcggccaagggggcagcgctggccacactcatccatcaggtgctggaggcccctg

SEQ ID NO: 184387 - DNA, 120 bp, Artificial Sequence
  ENSG00000111652_2 (sequence is synthesized)
gtgtctacgtgtttggagaactgctggacatgcccaatgttagagagctggctgagagtgactttgcctctaccttccggctgctcacagtgtttgcttatgggacatacgctgactact

SEQ ID NO: 184388 - DNA, 120 bp, Artificial Sequence
  ENSG00000111652_3 (sequence is synthesized)
tagctgaagcccggaatcttcctccactaacagaggctcagaagaataagcttcgacacctctcagttgtcaccctggctgctaaagtaaagtgtatcccatatgcagtgttgctggagg

SEQ ID NO: 184389 - DNA, 120 bp, Artificial Sequence
  ENSG00000111652_4 (sequence is synthesized)
ctcttgccctgcgtaatgtgcggcagctggaagaccttgtgattgaggctgtgtatgctgacgtgcttcgtggctccctggaccagcgcaaccagcggctcgaggttgactacagcatcg

SEQ ID NO: 184390 - DNA, 120 bp, Artificial Sequence
  ENSG00000111652_5 (sequence is synthesized)
ggcgggacatccagcgccaggacctcagtgccattgcccgaaccctgcaggaatggtgtgtgggctgtgaggtcgtgctgtcaggcattgaggagcaggtgagccgtgccaaccaacaca

SEQ ID NO: 184391 - DNA, 120 bp, Artificial Sequence
  ENSG00000111652_6 (sequence is synthesized)
aggagcagcagctgggcctgaagcagcagattgagagtgaggttgccaaccttaaaaaaaccattaaagttacgacggcagcagcagccgcagccacatctcaggaccctgagcaacacc

SEQ ID NO: 184392 - DNA, 120 bp, Artificial Sequence
  ENSG00000111652_7 (sequence is synthesized)
cagcccagcaagaaagcctcaaagggcaaggggctccgagggagcgccaagatttggtccaagtcgaattgaaaggactgtcgtttcctccctggggatgtggggtcccagctgcctgcc

SEQ ID NO: 184393 - DNA, 120 bp, Artificial Sequence
  ENSG00000111652_8 (sequence is synthesized)
tgcctcttaggagtcctcagagagccttctgtgcccctggccagctgataatcctaggttcatgacccttcacctcccctaaccccaaacatagatcacaccttctctagggaggaggca

SEQ ID NO: 184394 - DNA, 120 bp, Artificial Sequence
  ENSG00000111652_9 (sequence is synthesized)
aatgtaggtcatgtttttgttggtactttctgttttttgtgacttcatgtgttccattgctccccgctgccatgctctctcccttgtttccttaagagctcagcatctgtccctgttcat

SEQ ID NO: 184395 - DNA, 120 bp, Artificial Sequence
  ENSG00000111652_10 (sequence is synthesized)
tacatgtcattgagtaggtgggtagccctgatgggggtcgctctgtctggagcataacccacaggcgttttttctgccaccccatccctgcatgcctgatccccagttcctataccctac

SEQ ID NO: 184396 - DNA, 120 bp, Artificial Sequence
  ENSG00000111652_11 (sequence is synthesized)
ccctgacctattgagcagcctctgaagagccatagggcccccacctttactcacaccctgagaattctgggagccagtctgccatgccaggagtcactggacatgttcatcctagaatcc

SEQ ID NO: 184397 - DNA, 120 bp, Artificial Sequence
  ENSG00000111652_12 (sequence is synthesized)
tgtcacactacagtcatttcttttcctctctctggcccttgggtcctgggaatgctgctgcttcaaccccagagcctaagaatggcagccgtttcttaacatgttgagagatgattcttt

SEQ ID NO: 184398 - DNA, 120 bp, Artificial Sequence
  ENSG00000111652_13 (sequence is synthesized)
cttggccctggccatctcgggaagcttgatggcaatcctggaagggtttaatctccttttgtgagtttggtggggaagggaagggtatatagattgtattaaaaaaaaaaaggtatatat

SEQ ID NO: 184399 - DNA, 120 bp, Artificial Sequence
  ENSG00000111652_14 (sequence is synthesized)
gcgcgtgcggggcagcaatggagagctgagggagcgtcgtcagggtggacaccatgcgacacccatttctcctttgcatcctgtgtcttggggttcaatggggtgcacgtgatggggctt

SEQ ID NO: 184400 - DNA, 120 bp, Artificial Sequence
  ENSG00000111652_15 (sequence is synthesized)
ggggttaggcccaggggagggggtgggtgtggcagccttgcgaagtggctgactttaggattcctagatcagaattttagaccgctccatgtctgattcctcaccgcagaaccgacttag

SEQ ID NO: 184401 - DNA, 120 bp, Artificial Sequence
  ENSG00000111652_16 (sequence is synthesized)
tgcctttacaatccagtccctcagccttgtgcttcccatccgaccagccatcggggacctctagcttcacatcctctttccttgcagctctggacatcctgagcccaagtcccccacact

SEQ ID NO: 184402 - DNA, 120 bp, Artificial Sequence
  ENSG00000111652_17 (sequence is synthesized)
gaaaggcttggaacagctgccggaggtgacggagcggcggccccgcccggtgcgctggaggtcgaagcttccaggtagcggcccgcagagcctgacccagggtacgacgaagcagtcggc

SEQ ID NO: 184403 - DNA, 120 bp, Artificial Sequence
  ENSG00000111652_18 (sequence is synthesized)
agtggccagagcgactcttcagggaggtggcaggaaaggcttggaacagctgccggaggtgacggagcggcggccccgcccggtgcgctggaggtcgaagcttccaggtagcggcccgca

SEQ ID NO: 184404 - DNA, 120 bp, Artificial Sequence
  ENSG00000111652_19 (sequence is synthesized)
ttttatttaagattgtccttctaatgatgctgtttttgaagtgggaatacttttatttattttgctttagaaccagcctcttagaggaagtgatttaggaatgggagtggagggcaggtg

SEQ ID NO: 184405 - DNA, 120 bp, Artificial Sequence
  ENSG00000111652_20 (sequence is synthesized)
ggctagggcagggggaaaaggagggaagatttttggaagcccttctctactacggagcgtcacaaatcctggcctgatctccgcggccccagtgtatcccatatgcagtgttgctggagg

SEQ ID NO: 184406 - DNA, 120 bp, Artificial Sequence
  ENSG00000111652_21 (sequence is synthesized)
aaccgttcacacaaaagtggcagagttaatttacaatcagaggaggcagcctgagtcctgacatgctgacagtgtggaactaaagagtatcaatcaaagtgatgaaaaagaagcacttgg

SEQ ID NO: 184407 - DNA, 120 bp, Artificial Sequence
  ENSG00000111652_22 (sequence is synthesized)
gagggtaggaattggatgacgtatggagcaagagggcattgtggtttgggagaatagtgtaaacaaaagcctgaaggtggaaatgagcccttcctatgtgaagagtgatcagagaggcag

SEQ ID NO: 184408 - DNA, 120 bp, Artificial Sequence
  ENSG00000111653_0 (sequence is synthesized)
gctttgttttgcttcgagatggctgcggggatgtatttggaacattatctggacagtattgaaaaccttccctttgaattacagagaaactttcagctcatgagggacctagaccaaaga

SEQ ID NO: 184409 - DNA, 120 bp, Artificial Sequence
  ENSG00000111653_1 (sequence is synthesized)
acagaggacctgaaggctgaaattgacaagttggccactgagtatatgagtagtgcccgcagcctgagctccgaggaaaaattggcccttctcaaacagatccaggaagcctatggcaag

SEQ ID NO: 184410 - DNA, 120 bp, Artificial Sequence
  ENSG00000111653_2 (sequence is synthesized)
tgcaaggaatttggtgacgacaaggtgcagcttgccatgcagacctatgagatggtggacaaacacattcggcggctggacacagacctggcccgttttgaggctgatctcaaggagaaa

SEQ ID NO: 184411 - DNA, 120 bp, Artificial Sequence
  ENSG00000111653_3 (sequence is synthesized)
cagattgagtcaagtgactatgacagctcttccagcaaaggcaaaaagagccggactcaaaaggagaagaaagctgctcgtgctcgttccaaagggaaaaactcggatgaagaagccccc

SEQ ID NO: 184412 - DNA, 120 bp, Artificial Sequence
  ENSG00000111653_4 (sequence is synthesized)
aagactgcccagaagaagttaaagctcgtgcgcacaagtcctgagtatgggatgccctcagtgacctttggcagtgtccacccctctgatgtgttggatatgcctgtggatcccaacgaa

SEQ ID NO: 184413 - DNA, 120 bp, Artificial Sequence
  ENSG00000111653_5 (sequence is synthesized)
cccacctattgcctttgtcaccaggtctcctatggagagatgattggctgtgacaaccctgattgttccattgagtggttccattttgcctgtgtggggctgacaaccaagcctcggggg

SEQ ID NO: 184414 - DNA, 120 bp, Artificial Sequence
  ENSG00000111653_6 (sequence is synthesized)
tgggcagaggaatgcctgtgctggggccaggggttcagggaggagtggatggcacagtgctgtcatcccttctcctcccctctccccactcccggtgctgaggctgcatcagaccctggt

SEQ ID NO: 184415 - DNA, 120 bp, Artificial Sequence
  ENSG00000111653_7 (sequence is synthesized)
agggaggggtgccgcagccactaacggtatgtgctctccttcagccctctcccttcggagggacgtggtcttgcccactgtccttttgcctccatgctgaggtcggtgctgtatttcaga

SEQ ID NO: 184416 - DNA, 120 bp, Artificial Sequence
  ENSG00000111653_8 (sequence is synthesized)
gggagggtccttttcattctccttgctttgtatttaaggactggggcatagcatgggggcagtcccccagacctcttcattccccctcctgtggtgagggctaggtgtgatcaacacttt

SEQ ID NO: 184417 - DNA, 120 bp, Artificial Sequence
  ENSG00000111653_9 (sequence is synthesized)
tcttctccattcccttcctgcttttttcatggtgggggatccaccaggtcatctaggctctggccctagttgaaggggcaccccttcctctgtgccaagaggattcatcctgggagaggg

SEQ ID NO: 184418 - DNA, 120 bp, Artificial Sequence
  ENSG00000111653_10 (sequence is synthesized)
ggcaaggtggaatgcagataactcacatgtaaaaggaacttgggtaggtaaataaaagctatacatgttggcctgctgtgtttattgtagagacactgttttagtaaacatgctgagcat

SEQ ID NO: 184419 - DNA, 120 bp, Artificial Sequence
  ENSG00000111653_11 (sequence is synthesized)
tcattttgcgtcctctgggttggatgcaatgtgagaggatggcatgccagaattaggacacgacatgaaaccagagtggtgcctctgtccgagaacttgtaagttctcaacttgggaaag

SEQ ID NO: 184420 - DNA, 120 bp, Artificial Sequence
  ENSG00000111653_12 (sequence is synthesized)
acagaggtgctggagggtaggcctcagaccagggggtctccaaaactttgtaaatcatgcatcttttctccataaaacatctttcacttaatttccaataaatgatgtatttgtgctata

SEQ ID NO: 184421 - DNA, 120 bp, Artificial Sequence
  ENSG00000111653_13 (sequence is synthesized)
gagatggctgcggggatgtatttggaacattatctggacagtattgaaaaccttccctttgaattacagagaaactttcagctcatgagggacctagaccaaagaacagagggtatgtat

SEQ ID NO: 184422 - DNA, 120 bp, Artificial Sequence
  ENSG00000111653_14 (sequence is synthesized)
ttatttttctacttgatgttaccgtatcatctggtatgatctggagaactgtggcttctctcgctccttttttacgctcttggaattcttaaaacaggataatgatcctcatttctgtgt

SEQ ID NO: 184423 - DNA, 120 bp, Artificial Sequence
  ENSG00000111653_15 (sequence is synthesized)
cagctttttcataacaaatagagtattgtgaaaacgcctcaagaattcaaagatgctgtgttctttatgtcttcctggagaataattagccaggctggctcacacctgtaatcccagcac

SEQ ID NO: 184424 - DNA, 120 bp, Artificial Sequence
  ENSG00000111653_16 (sequence is synthesized)
actgcccagaagaagttaaagctcgtgcgcacgtgagtgattcagggagccctttgccggatgacatcctcttctctcccggtgccccactcccagcctgcaccgccccctgccgctttc

SEQ ID NO: 184425 - DNA, 120 bp, Artificial Sequence
  ENSG00000111653_17 (sequence is synthesized)
tatatgtctgcgccaagaactcttcttatcattttggtatctgctggagaagccacaaatcatttgccctaccaggatctcctgccacctctgaaagcctcaggctttagcttcccttcc

SEQ ID NO: 184426 - DNA, 120 bp, Artificial Sequence
  ENSG00000111653_18 (sequence is synthesized)
ccactgaaggatctgtagtcttgtcttcattctatgtagccatgttcaaggatgtaacagactggttttgagatacatgaagctgtgtcttaagttactctgagtttacacatgaaaagg

SEQ ID NO: 184427 - DNA, 120 bp, Artificial Sequence
  ENSG00000111653_19 (sequence is synthesized)
aggagggggcggggctgtgagaggtggggcgaggactgaaagggagaagaagtcagctcttcatctggtgggaagtttggcaccaggttggaaagggggagagaagaggacttaacccat

SEQ ID NO: 184428 - DNA, 90 bp, Artificial Sequence
  ENSG00000111653_20 (sequence is synthesized)
ttgaaaaccttccctttgaattacagagaaactttcagctcatgagggacctagaccaaagaacagagggtggacaaacacattcggcgg

SEQ ID NO: 184429 - DNA, 120 bp, Artificial Sequence
  ENSG00000111653_21 (sequence is synthesized)
gttaaagctcgtgcgcactgttccattgagtggttccattttgcctgtgtggggctgacaaccaagcctcgggggaaatggttttgcccacgctgctcccaagaacggaagaagaaatag

SEQ ID NO: 184430 - DNA, 120 bp, Artificial Sequence
  ENSG00000111664_0 (sequence is synthesized)
ccacaataggggcagacctgtccatccttctctgtgggtcccctgtacctttctcccccaacaggatcagacccagaggcagctggttggggtttgtcgagaagaaggattatccagatc

SEQ ID NO: 184431 - DNA, 120 bp, Artificial Sequence
  ENSG00000111664_1 (sequence is synthesized)
agtcctttctaatctcagctcctgcctgtaccctcccatactcaccaaaccctcttccccaccaccctgagctgaggagcacagtttgaggcccccccaaccccccgccggtcggggcca

SEQ ID NO: 184432 - DNA, 120 bp, Artificial Sequence
  ENSG00000111664_2 (sequence is synthesized)
ggccaggccaggccagctcctctggcagcagagcctgggcaggtgacgggcgggcgcgggcgtcgcagctgagggagtaaggaggctcccaggaaccggagctggaaacccggccgaggt

SEQ ID NO: 184433 - DNA, 120 bp, Artificial Sequence
  ENSG00000111664_3 (sequence is synthesized)
ccagccagagcccaagagccagagtgacccctcgacctgtcagccatgggggagatggagcaactgcgtcaggaagcggagcagctcaagaagcagattgcagatgccaggaaagcctgt

SEQ ID NO: 184434 - DNA, 120 bp, Artificial Sequence
  ENSG00000111664_4 (sequence is synthesized)
gctgacgttactctggcagagctggtgtctggcctagaggtggtgggacgagtccagatgcggacgcggcggacgttaaggggacacctggccaagatttacgccatgcactgggccact

SEQ ID NO: 184435 - DNA, 120 bp, Artificial Sequence
  ENSG00000111664_5 (sequence is synthesized)
gattctaagctgctggtaagtgcctcgcaagatgggaagctgatcgtgtgggacagctacaccaccaacaaggtgcacgccatcccactgcgctcctcctgggtcatgacctgtgcctat

SEQ ID NO: 184436 - DNA, 120 bp, Artificial Sequence
  ENSG00000111664_6 (sequence is synthesized)
gccccatcagggaactttgtggcatgtggggggctggacaacatgtgttccatctacaacctcaaatcccgtgagggcaatgtcaaggtcagccgggagctttctgctcacacaggttat

SEQ ID NO: 184437 - DNA, 120 bp, Artificial Sequence
  ENSG00000111664_7 (sequence is synthesized)
ctctcctgctgccgcttcctggatgacaacaatattgtgaccagctcgggggacaccacgtgtgccttgtgggacattgagactgggcagcagaagactgtatttgtgggacacacgggt

SEQ ID NO: 184438 - DNA, 120 bp, Artificial Sequence
  ENSG00000111664_8 (sequence is synthesized)
tgcatgagcctggctgtgtctcctgacttcaatctcttcatttcgggggcctgtgatgccagtgccaagctctgggatgtgcgagaggggacctgccgtcagactttcactggccacgag

SEQ ID NO: 184439 - DNA, 120 bp, Artificial Sequence
  ENSG00000111664_9 (sequence is synthesized)
tcggacatcaacgccatctgtttcttccccaatggagaggccatctgcacgggctcggatgacgcttcctgccgcttgtttgacctgcgggcagaccaggagctgatctgcttctcccac

SEQ ID NO: 184440 - DNA, 120 bp, Artificial Sequence
  ENSG00000111664_10 (sequence is synthesized)
gagagcatcatctgcggcatcacgtccgtggccttctccctcagtggccgcctactattcgctggctacgacgacttcaactgcaatgtctgggactccatgaagtctgagcgtgtgggc

SEQ ID NO: 184441 - DNA, 120 bp, Artificial Sequence
  ENSG00000111664_11 (sequence is synthesized)
atcctctctggccacgataacagggtgagctgcctgggagtcacagctgacgggatggctgtggccacaggttcctgggacagcttcctcaaaatctggaactgaggaggctggagaaag

SEQ ID NO: 184442 - DNA, 120 bp, Artificial Sequence
  ENSG00000111664_12 (sequence is synthesized)
ggaagtggaaggcagtgaacacactcagcagccccctgcccgaccccatctcattcaggtgttctcttctatattccgggtgccattcccactaagctttctcctttgagggcagtgggg

SEQ ID NO: 184443 - DNA, 120 bp, Artificial Sequence
  ENSG00000111664_13 (sequence is synthesized)
agcatgggactgtgcctttgggaggcagcatcagggacacaggggcaaagaactgccccatctcctcccatggccttccctccccacagtcctcacagcctctcccttaatgagcaagga

SEQ ID NO: 184444 - DNA, 120 bp, Artificial Sequence
  ENSG00000111664_14 (sequence is synthesized)
caacctgcccctccccagccctttgcaggcccagcagacttgagtctgaggccccaggccctaggattcctcccccagagccactacctttgtccaggcctgggtggtatagggcgtttg

SEQ ID NO: 184445 - DNA, 120 bp, Artificial Sequence
  ENSG00000111664_15 (sequence is synthesized)
gccctgtgactatggctctggcaccactagggtcctggccctcttcttattcatgctttctcctttttctacctttttttctctcctaagacacctgcaataaagtgtagcaccctggta

SEQ ID NO: 184446 - DNA, 120 bp, Artificial Sequence
  ENSG00000111664_16 (sequence is synthesized)
gcgcctggagcctgtgatttgtcagggaaatctcagccacctgctcccctcatgcaaatgacccaagcccctggcagctgctccttaggcctccaagtgtaagccctgtcttccctctct

SEQ ID NO: 184447 - DNA, 120 bp, Artificial Sequence
  ENSG00000111664_17 (sequence is synthesized)
gagctttgctgagacttagggccgcctgctttctctctgacccctgctttcacagcctcgagagggcaaggagggggccagaccccagcctgggagcagcgtgcgggccttccctccact

SEQ ID NO: 184448 - DNA, 120 bp, Artificial Sequence
  ENSG00000111664_18 (sequence is synthesized)
ggccatctatcacccttatatcccacctcctggcctggttgctaagtggccctgactgccaagatcatcaccatggatgggggccgggaccaggggggccactggagctgtagttgtctg

SEQ ID NO: 184449 - DNA, 120 bp, Artificial Sequence
  ENSG00000111664_19 (sequence is synthesized)
ctcctttgcacccctcccaaaccccaacccttaatcctcacagctttgctctaatcctgtggggcctgatgctcttatctctgcctgcagagactgaccagggaagcaccccttcacccc

SEQ ID NO: 184450 - DNA, 120 bp, Artificial Sequence
  ENSG00000111664_20 (sequence is synthesized)
ctcctctctcagggcttgtggtgggggctgcccctctctatggccccacactcctgcccccaaccctcctcccggctgggcccaagtctctctggaatccgtacacctccctccctcccc

SEQ ID NO: 184451 - DNA, 120 bp, Artificial Sequence
  ENSG00000111664_21 (sequence is synthesized)
aaacagctggggacatgaggagcgtggcccagggggagggggctgggtttgctcttgagtgactagaagtgaccagggactttctaaacttggttcgcatatttgagacccccaagcccc

SEQ ID NO: 184452 - DNA, 120 bp, Artificial Sequence
  ENSG00000111664_22 (sequence is synthesized)
ggagctggcctgggctctgctctcctgggctggggcgcaggcagggctcaggcaggctggggctggacgcaaaggacctcaaacttggagggcctagctggggagagggtgcagccaccc

SEQ ID NO: 184453 - DNA, 120 bp, Artificial Sequence
  ENSG00000111664_23 (sequence is synthesized)
agtcgtttccctgtgtcttggagtctggtgtgggcacgaagggcagaagcacagcctggtggggggttcctcaacaccgaccccatgttcctggcaggagccagagtgacccctcgacct

SEQ ID NO: 184454 - DNA, 120 bp, Artificial Sequence
  ENSG00000111664_24 (sequence is synthesized)
cagcgctgtatagtgcagagcgggcgaggggcatagggaagtcactggcacgtggtatgtgttggcagggctgcttctcaccccaaaccaagggagggacaggcagggaggctgagagca

SEQ ID NO: 184455 - DNA, 120 bp, Artificial Sequence
  ENSG00000111664_25 (sequence is synthesized)
gcggcttgccctggagctgtcaggtgggaggcagagggcgggagaggctgtgggctgcccaggtctgatccctgacccacttgccacccgtgccctcagttcttccccaatggagaggcc

SEQ ID NO: 184456 - DNA, 120 bp, Artificial Sequence
  ENSG00000111665_0 (sequence is synthesized)
cgagctgttgtgcatccagaggtggaattggggcccggtaagtgatttgaataatttaataaataagttagagggctcagcaggcccagaacgagccattttgtcagctgcagcagtcat

SEQ ID NO: 184457 - DNA, 120 bp, Artificial Sequence
  ENSG00000111665_1 (sequence is synthesized)
taactccgcagaggcctctggtccctcgccaggaagtttcttcactggaaactgggaagacagggtggtttagggttgaaggtccgacgtggaagagataagggctgagacctgagtcac

SEQ ID NO: 184458 - DNA, 120 bp, Artificial Sequence
  ENSG00000111665_2 (sequence is synthesized)
ttctcacaggcattccctcctcgtcccgggctggcccttgcccccaccctgcaactcctggttgagatgggctcagccaagagcgtcccagtcacaccagcgcggcctccgccgcacaac

SEQ ID NO: 184459 - DNA, 120 bp, Artificial Sequence
  ENSG00000111665_3 (sequence is synthesized)
aagcatctggctcgagtggcggacccccgttcacctagtgctggcatcctgcgcactcccatccaggtggagagctctccacagccaggcctaccagcaggggagcaactggagggtctt

SEQ ID NO: 184460 - DNA, 120 bp, Artificial Sequence
  ENSG00000111665_4 (sequence is synthesized)
aaacatgcccaggactcagatccccgctctcctactcttggtattgcacggacacctatgaagaccagcagtggagaccccccaagcccactggtgaaacagctgagtgaagtatttgaa

SEQ ID NO: 184461 - DNA, 120 bp, Artificial Sequence
  ENSG00000111665_5 (sequence is synthesized)
actctaaatcaaatcttcccccagagcctgttctgcccccagaggcacctttatcttctgaattggacttgcctctgggtacccagttatctgttgaggaacagatgccaccttggaacc

SEQ ID NO: 184462 - DNA, 120 bp, Artificial Sequence
  ENSG00000111665_6 (sequence is synthesized)
agactgagttcccctccaaacaggtgttttccaaggaggaagcaagacagcccacagaaacccctgtggccagccagagctccgacaagccctcaagggaccctgagactcccagatctt

SEQ ID NO: 184463 - DNA, 120 bp, Artificial Sequence
  ENSG00000111665_7 (sequence is synthesized)
caggttctatgcgcaatagatggaaaccaaacagcagcaaggtactagggagatcccccctcaccatcctgcaggatgacaactcccctggcaccctgacactacgacagggtaagcggc

SEQ ID NO: 184464 - DNA, 120 bp, Artificial Sequence
  ENSG00000111665_8 (sequence is synthesized)
cttcacccctaagtgaaaatgttagtgaactaaaggaaggagccattcttggaactggacgacttctgaaaactggaggacgagcatgggagcaaggccaggaccatgacaaggaaaatc

SEQ ID NO: 184465 - DNA, 120 bp, Artificial Sequence
  ENSG00000111665_9 (sequence is synthesized)
agcactttcccttggtggagagctaggccctgcatggccccagcaatgcagtcacccagggcctggtgatatctgtgtcctctcaccccttctttcccagggatactgaggaatggcttg

SEQ ID NO: 184466 - DNA, 120 bp, Artificial Sequence
  ENSG00000111665_10 (sequence is synthesized)
ttttcttagactcctcctcagctaccaaactgggactcacagctttattgggctttctttgtgtcttgtgtgtttcttttatattaaaggaagtaattttaaatgttactttaaaaaggt

SEQ ID NO: 184467 - DNA, 120 bp, Artificial Sequence
  ENSG00000111665_11 (sequence is synthesized)
gcgcgagaatggcagttggacggagcctgcctgccggtgctccgcccctgccccgcgcttgactgacgccaatgagaagcgctcctaaggcaattgatggttgaaagaaccaatcccact

SEQ ID NO: 184468 - DNA, 120 bp, Artificial Sequence
  ENSG00000111665_12 (sequence is synthesized)
cctccagggcgggagcgcacgtagagcagctaggtgggcttcggggttgcagctgctgcggctccgcagctgctccggctccgggacccttagagtccattcgcgtgccttctattgaag

SEQ ID NO: 184469 - DNA, 120 bp, Artificial Sequence
  ENSG00000111665_13 (sequence is synthesized)
agcaggaactgacggttgttttaggcctctcaattccagaaagtttcctggggacctgtccggtcggaaagtcgagggacagttgtcttggtatttgtaaagggggtatccagtgaggcg

SEQ ID NO: 184470 - DNA, 120 bp, Artificial Sequence
  ENSG00000111665_14 (sequence is synthesized)
gagcttgagggggttgtgtcgagtgactgatacagctgtcaaccaataaagctactatcgctcgcctcaggaaaaccatcacaactccagctggatgtgcgcataatagtgtaatcactc

SEQ ID NO: 184471 - DNA, 120 bp, Artificial Sequence
  ENSG00000111665_15 (sequence is synthesized)
atgattctattttgtttaataattcgttcttgagactagacgtctcgaaagcgaagactggcactcctcagcctgccacggacggctcgcaggccgatactgaacagaagtacccttatc

SEQ ID NO: 184472 - DNA, 120 bp, Artificial Sequence
  ENSG00000111665_16 (sequence is synthesized)
aaggaggcgtcacccctgggcaagcctagcatcagtccattgacacctacagtcaccatgatagacgttctcccagaccaacagcttcctttggctcgaggcgggtcttacgtggagggc

SEQ ID NO: 184473 - DNA, 120 bp, Artificial Sequence
  ENSG00000111665_17 (sequence is synthesized)
ctatgggaactacgtcggctcagccaatagggtcagggcagggggcgtggcgggaagtttgaaactggtaacttcgggagttgagccacgagctgttgtgcatccagaggtggaattggg

SEQ ID NO: 184474 - DNA, 120 bp, Artificial Sequence
  ENSG00000111665_18 (sequence is synthesized)
gaagctgtcatctattattcttgggtagggtccatgaagccattctctcagggttccttaaaggggcctctatcctcctgcttcggacccatctcactcttatctcaatattttgttccc

SEQ ID NO: 184475 - DNA, 80 bp, Artificial Sequence
  ENSG00000111665_19 (sequence is synthesized)
cttcggacccatctcactcttatctcaatattttgttcccagcaaggccggggtggtcagatcgcttgagcccaggagtt

SEQ ID NO: 184476 - DNA, 120 bp, Artificial Sequence
  ENSG00000111665_20 (sequence is synthesized)
tcccaggcagctcaccctgttatcgtggccagagaggatgcctgaggaagagggaaaggagtcagcctgtctctccaagctgatttggaaagcagtgtgtgcatgcgtgtaagtgtatgt

SEQ ID NO: 184477 - DNA, 120 bp, Artificial Sequence
  ENSG00000111665_21 (sequence is synthesized)
gtgggtgtgtgggtgtgtgtgtgtatgtgggtgtgtggggggatatgtgtgcatgtgtatgcatgtgtgggtgtgtgtacgtgtgtgtgtgcatgtgtgcttgagcacatgcatgcaggg

SEQ ID NO: 184478 - DNA, 120 bp, Artificial Sequence
  ENSG00000111665_22 (sequence is synthesized)
atcctagactcggtagactgggctcaacccctgaagaaggctaagagactgaaagaggattagctgtagggcagggggttctctgtcaagagctttggttgggggagggctgggatcaga

SEQ ID NO: 184479 - DNA, 120 bp, Artificial Sequence
  ENSG00000111665_23 (sequence is synthesized)
cagagaaaggctggaagcatctgtgtactatgaaaaaacccgagggcaccttgacaggtgctggaaaagagaaggcaaccgttcatcctatttctttgcttccagatgaagaaactgagg

SEQ ID NO: 184480 - DNA, 120 bp, Artificial Sequence
  ENSG00000111665_24 (sequence is synthesized)
cccatggaggagtgacttgtgcaaggacactcagaaagtgagcaacagaattaggatttggattctgcccctggccagtgttattttcatcagcacctggcctcttgatagagaagaagc

SEQ ID NO: 184481 - DNA, 120 bp, Artificial Sequence
  ENSG00000111665_25 (sequence is synthesized)
catcctatctgaccaacttcaggctagtcttagatgagccctaggctgcagtcagggccctcgggccactccagatctccttgattctgccttgattccatgtttccctgaggctgtctt

SEQ ID NO: 184482 - DNA, 120 bp, Artificial Sequence
  ENSG00000111665_26 (sequence is synthesized)
gcctctcagtgggtgcccctgaaatgccaggaacccagaactgactggacagtcatggtccacagatctcctagggcagggagcagtcatggcattgggcagtggagagaggctgcttag

SEQ ID NO: 184483 - DNA, 120 bp, Artificial Sequence
  ENSG00000111665_27 (sequence is synthesized)
agcaacactgagggaaaacagtcctagttgggaaccaaggggtactggattccaggggtggagtcacccagtgacaagggacagcagtaagagagtccgaaatgggagctgatggggggt

SEQ ID NO: 184484 - DNA, 120 bp, Artificial Sequence
  ENSG00000111665_28 (sequence is synthesized)
acagaatggggagggagggctggggagggtccttccagctgaggaagcagcagccagggctggcccttacccacacgctcagacttcatggagtcccagacattgcagttgaagtcgtcg

SEQ ID NO: 184485 - DNA, 120 bp, Artificial Sequence
  ENSG00000111665_29 (sequence is synthesized)
tagccagcgaatagtaggcggccactgagggagaaggccacggacgtgatgccgcagatgatgctctcgtgggagaagcagatcagctcctggtctgcccgcaggtcaaacaagcggcag

SEQ ID NO: 184486 - DNA, 120 bp, Artificial Sequence
  ENSG00000111665_30 (sequence is synthesized)
gaagcgtcatccgagcccgtgcagatggcctctccattggggaagaactgagggcacgggtggcaagtgggtcagggatcagacctgggcagcccacagcctctcccgccctctgcctcc

SEQ ID NO: 184487 - DNA, 120 bp, Artificial Sequence
  ENSG00000111665_31 (sequence is synthesized)
cacctgacagctccagggcaagccgctgctctcagcctccctgcctgtccctcccttggtttggggtgagaagcagccctgccaacacataccacgtgccagtgacttccctatgcccct

SEQ ID NO: 184488 - DNA, 120 bp, Artificial Sequence
  ENSG00000111665_32 (sequence is synthesized)
cgcccgctctgcactatacagcgctgcaggcaggcatcatttccacgtcgcaggcaagagcaccaaggcttgcctgcagtgacccggctagaagggcggacggaggttgtcccagactcc

SEQ ID NO: 184489 - DNA, 120 bp, Artificial Sequence
  ENSG00000111665_33 (sequence is synthesized)
cagactacacaagtgggctggatcagggtgtgtaagaacagggtccagtacaaatgcaaggcctggatctcacggcgagcaaatgtcagataagctcaaacggagggagagtctacagaa

SEQ ID NO: 184490 - DNA, 120 bp, Artificial Sequence
  ENSG00000111665_34 (sequence is synthesized)
aactggtttgtactcttcaaaaacgtcaatgacataaaagacaaaggtgggaaaacagttccagtttaaaggtggtgacgaaaaagatatggcgaggaaaggtaatgcacgtttctggat

SEQ ID NO: 184491 - DNA, 120 bp, Artificial Sequence
  ENSG00000111665_35 (sequence is synthesized)
tggatcctggacagaaaaaaacatgagctattatggacatttttgaggctattggtgaaatttgaatatagactgtagactgtagtattgtgtcaatgttgagtttcctgatcttaagaa

SEQ ID NO: 184492 - DNA, 120 bp, Artificial Sequence
  ENSG00000111665_36 (sequence is synthesized)
tcatacagtgattatgctacagaagggctttgtttcgggaagtacttaaggggtaaagaaacatgatgtctgcaacctactttcaaaagacacagaaagaaaatgtatatctacatctaa

SEQ ID NO: 184493 - DNA, 120 bp, Artificial Sequence
  ENSG00000111665_37 (sequence is synthesized)
aggcagagaatgtctgaattcttgggtctcttcctaacctgattttgagagagccgtcatgaccccacccttatcctagccttattttctgcaatctcaatctgtgtggggtaggctgga

SEQ ID NO: 184494 - DNA, 120 bp, Artificial Sequence
  ENSG00000111665_38 (sequence is synthesized)
tatctgagggccttggcaattccttcctggaatatggggaggagaggagagaagagtcagggcccagacttgttctagcctatggtcttgacaggtggagagctctccacagccaggcct

SEQ ID NO: 184495 - DNA, 120 bp, Artificial Sequence
  ENSG00000111665_39 (sequence is synthesized)
aggcaagatgcagggaagataaactaggataatgttttgggataaggtccatgggtgagtgtgggaggaataaactgtaagtcctagttttgggtccttgctttaacgccttacccaccc

SEQ ID NO: 184496 - DNA, 120 bp, Artificial Sequence
  ENSG00000111665_40 (sequence is synthesized)
ttttatattaaaggaagtaattttaaatgttactttaaaaaggtatatgtaaaccttgcaccgagttttctgtgtgtagaatggcggcctagagagcttgcgttccctggcctgagccca

SEQ ID NO: 184497 - DNA, 120 bp, Artificial Sequence
  ENSG00000111665_41 (sequence is synthesized)
ctgatgctctgagccttctttgcacatctccctttaaccatggtgtccctatggctctgtccttggccctgctctccctgggtgtttacttctagggctttagctatcacttccctatat

SEQ ID NO: 184498 - DNA, 120 bp, Artificial Sequence
  ENSG00000111665_42 (sequence is synthesized)
tctggtaactttcaggtctctctctctaaccctgacctttatccagctgctttataagtacttcaaagtcagtttgtctaaaactgaatttatgatcttcccccaaaagctattcctcat

SEQ ID NO: 184499 - DNA, 120 bp, Artificial Sequence
  ENSG00000111665_43 (sequence is synthesized)
tccctcttccctatccttgtgaatgacagcattatctacccagccaccaaacccaaaccttggccattatctcgaatccttccctcccaatgtcctatatcctagcatttggtcactaaa

SEQ ID NO: 184500 - DNA, 87 bp, Artificial Sequence
  ENSG00000111665_44 (sequence is synthesized)
tccctcccaatgtcctatatcctagcatttggtcactaaatcctggtgattccacattttgtttgtttgcttgttttttagaggcag

SEQ ID NO: 184501 - DNA, 74 bp, Artificial Sequence
  ENSG00000111665_45 (sequence is synthesized)
atagagatgaggtcttgccatattgcccaggctggtttcaaactcctaggctcaagtgatctgcctgcctcagc

SEQ ID NO: 184502 - DNA, 71 bp, Artificial Sequence
  ENSG00000111665_46 (sequence is synthesized)
cagcctcctcagttccagattttgaggaagctgtcccaggaacctgtggccacagccatcccgtcagctgt

SEQ ID NO: 184503 - DNA, 120 bp, Artificial Sequence
  ENSG00000111665_47 (sequence is synthesized)
aagtttgaaactggtaacttcgggagttgagccacgagctgttgtgcatccagaggtggaattggggcccggtggagagctctccacagccaggcctaccagcaggggagcaactggagg

SEQ ID NO: 184504 - DNA, 80 bp, Artificial Sequence
  ENSG00000111666_0 (sequence is synthesized)
cgcgagccgcagccgcggccccacagcttctggggctggggccccggcagccgggcaggccggcctgacctcgacctccg

SEQ ID NO: 184505 - DNA, 80 bp, Artificial Sequence
  ENSG00000111666_1 (sequence is synthesized)
cagtcgcaggacccggccgccagcctctccctccacctctccctgcccccagcgccaggcgcgggctgcgctcggtggcg

SEQ ID NO: 184506 - DNA, 120 bp, Artificial Sequence
  ENSG00000111666_2 (sequence is synthesized)
ggtccgcgccgcgctggctgagggcgctgagcgagccgctgagcgcggcgcagctgcggcgactggaggagcaccgctacagcgcggcgggcgtctcgctgctcgagccgccgctgcagc

SEQ ID NO: 184507 - DNA, 120 bp, Artificial Sequence
  ENSG00000111666_3 (sequence is synthesized)
cagctctactggacctggctgctccagtggatcccgctctggatggcccccaactccatcaccctgctggggctcgccgtcaacgtggtcaccacgctcgtgctcatctcctactgtccc

SEQ ID NO: 184508 - DNA, 120 bp, Artificial Sequence
  ENSG00000111666_4 (sequence is synthesized)
acggccaccgaagaggcaccatactggacataccttttatgtgcactgggactttttatttaccagtcactggatgctattgatgggaaacaagccagaagaacaaactcttgttcccct

SEQ ID NO: 184509 - DNA, 120 bp, Artificial Sequence
  ENSG00000111666_5 (sequence is synthesized)
ttaggggagctctttgaccatggctgtgactctctttccacagtatttatggcagtgggagcttcaattgccgctcgcttaggaacttatcctgactggttttttttctgctcttttatt

SEQ ID NO: 184510 - DNA, 120 bp, Artificial Sequence
  ENSG00000111666_6 (sequence is synthesized)
ttttattgcgctcattggcagacttatgtttcaggcatgttgagatttggaaaagtggatgtaactgaaattcagatagctttagtgattgtctttgtgttgtctgcatttggaggagca

SEQ ID NO: 184511 - DNA, 120 bp, Artificial Sequence
  ENSG00000111666_7 (sequence is synthesized)
acaatgtgggactatacgattcctattctagaaataaaattgaagatccttccagttcttggatttctaggtggagtaatattttcctgttcaaattatttccatgttatcctccatggt

SEQ ID NO: 184512 - DNA, 120 bp, Artificial Sequence
  ENSG00000111666_8 (sequence is synthesized)
ggtgttggcaagaatggatccactatagcaggcaccagtgtcttgtcacctggactccacataggactaattattatactggcaataatgatctataaaaagtcagcaactgatgtgttt

SEQ ID NO: 184513 - DNA, 120 bp, Artificial Sequence
  ENSG00000111666_9 (sequence is synthesized)
gaaaagcatccttgtctttatatcctaatgtttggatgtgtctttgctaaagtctcacaaaaattagtggtagctcacatgaccaaaagtgaactatatcttcaagacactgtctttttg

SEQ ID NO: 184514 - DNA, 120 bp, Artificial Sequence
  ENSG00000111666_10 (sequence is synthesized)
gggccaggtcttttgtttttagaccagtactttaataactttatagacgaatatgttgttctatggatggcaatggtgatttcttcatttgatatggtgatatactttagtgctttgtgc

SEQ ID NO: 184515 - DNA, 120 bp, Artificial Sequence
  ENSG00000111666_11 (sequence is synthesized)
ctgcaaatttcaagacaccttcatctaaatatattcaagactgcatgtcatcaagcacctgaacaggttcaagttctttcttcaaagagtcatcagaataacatggattgaagagacttc

SEQ ID NO: 184516 - DNA, 120 bp, Artificial Sequence
  ENSG00000111666_12 (sequence is synthesized)
cgaacacttgctatctcttgctgctgctgtttcatggaaggagatattaaacatttgtttaatttttatttaagtgttatacctatttcagcaaataaaatatttcattgcttatattaa

SEQ ID NO: 184517 - DNA, 120 bp, Artificial Sequence
  ENSG00000111666_13 (sequence is synthesized)
aaaagaggagatgaagttaggggaatctatgagtgaaggaaatccccctgtgcaggaggctagtataccatcaataaggttatatttgaatataaaacataaaccctgtagatttcattg

SEQ ID NO: 184518 - DNA, 120 bp, Artificial Sequence
  ENSG00000111666_14 (sequence is synthesized)
tgtcttatttcagttatgaagcccccattgtatcatcattttttatcacagatgttctcagaattgtctacatattaattagaaacaagactaaagaaatgtcaatcctgaggacaacag

SEQ ID NO: 184519 - DNA, 120 bp, Artificial Sequence
  ENSG00000111666_15 (sequence is synthesized)
tgaacccctgtaattctaagtagcagtttgtctctgagacttatcagacacagggttttcactgccaaaggattacataaatattcagaacataaaggattttagccatcttgagggtgc

SEQ ID NO: 184520 - DNA, 120 bp, Artificial Sequence
  ENSG00000111666_16 (sequence is synthesized)
ttactttgactgctaaaaactgaaaagtgattcaatactgcttaagtgcatggcttataatgtaattattgaatcaagttatgttctaagaaattttttatactaatcatttttcaagag

SEQ ID NO: 184521 - DNA, 120 bp, Artificial Sequence
  ENSG00000111666_17 (sequence is synthesized)
gcatattagtatgttataaaatacttgcttttagtatactagaatttaaaagggctacaggaattttttaaataaaatttgtatttaataaaaggaatttgttgtaccagttcagaaaaa

SEQ ID NO: 184522 - DNA, 120 bp, Artificial Sequence
  ENSG00000111666_18 (sequence is synthesized)
ctttagtgctttgtgcctgcaaatttcaagacaccttcatctaaatatattcaagactgcatgtcatcaagcacctgaacagggtctcgctgtcgcccaggctggagtacagtagtacga

SEQ ID NO: 184523 - DNA, 68 bp, Artificial Sequence
  ENSG00000111666_19 (sequence is synthesized)
agggtctcgctgtcgcccaggctggagtacagtagtacgatttcagctcactgcaacctttgcctcca

SEQ ID NO: 184524 - DNA, 120 bp, Artificial Sequence
  ENSG00000111666_20 (sequence is synthesized)
aggagttcaagacagcctggataacagtaagaccctgtctctacaaaaatataaacaaaattagtcaggtgtggtggagcacatctgtggtcacagctgctcaggaagctgaggtgagag

SEQ ID NO: 184525 - DNA, 120 bp, Artificial Sequence
  ENSG00000111666_21 (sequence is synthesized)
gactgcttgagcctgtgaggttgacgctgcagtcagctgagatcacgccactgctctccagcctggggcaacagagtgagatcgtctcaaaagaaacaaacaaacaaaaaacacttttga

SEQ ID NO: 184526 - DNA, 120 bp, Artificial Sequence
  ENSG00000111666_22 (sequence is synthesized)
agacataaggtaggttaaaaaaatcctttgtaattagaaaatgtgtcacttttttagctaagagcaatataatcatctcaccctaatgactagactaggagcctcacctctggcctggac

SEQ ID NO: 184527 - DNA, 120 bp, Artificial Sequence
  ENSG00000111666_23 (sequence is synthesized)
gcaggaggctattctttcttcaaagagtcatcagaataacatggattgaagagacttccgaacacttgctatctcttgctgctgctgtttcatggaaggagatattaaacatttgtttaa

SEQ ID NO: 184528 - DNA, 120 bp, Artificial Sequence
  ENSG00000111666_24 (sequence is synthesized)
ggggcgattgcgcgcccaaatagctggcccagggtgctttggccgccggagcgggttgcgagtacacttgaggcctggtgccttccagtttttaagttttaaatgtttataatcgaaaat

SEQ ID NO: 184529 - DNA, 88 bp, Artificial Sequence
  ENSG00000111666_25 (sequence is synthesized)
atttgatttttccaattgctttcaagtatggcagcttgccttcaccttgagtacctaatccaggaacttggtcttccacctgcaccat

SEQ ID NO: 184530 - DNA, 120 bp, Artificial Sequence
  ENSG00000111666_26 (sequence is synthesized)
tgaaaagtggatgttaaatattccctttcatgaaaaatgaaaacagtagctaagagtcagttgacatgtaagaaaattagtaacttagaaaaacttacttggtaaaaaaaatcttccttt

SEQ ID NO: 184531 - DNA, 120 bp, Artificial Sequence
  ENSG00000111666_27 (sequence is synthesized)
tagaatacaaaagtttactttaagtacacactgactcatttgaggtgataagggataaaataagtaaaagttattcaaccactaagtacattaggtactgatacttatctttccactcta

SEQ ID NO: 184532 - DNA, 120 bp, Artificial Sequence
  ENSG00000111666_28 (sequence is synthesized)
attgaaatgtatttagattactcattatgaatactactagaactatcacaaagatctctggggatccaaatcttcagattcccatctgaccctatttatttttaattttatataatagtt

SEQ ID NO: 184533 - DNA, 120 bp, Artificial Sequence
  ENSG00000111666_29 (sequence is synthesized)
tgaagtaatcaaaaaaaaaaaaaaggagtaatttgtgtactacatctgttttaggcaagaaaaaggtatattgaagaaaacagtgaaagatgatattccttaaaagcaaaaaaacatact

SEQ ID NO: 184534 - DNA, 120 bp, Artificial Sequence
  ENSG00000111666_30 (sequence is synthesized)
tatgggaattaagtacacagaaaacactggagtacttattttgcctctaactaactattggtaaaacttcccaaataaggactttcttacaaggatgaatagtacttatgatttatattc

SEQ ID NO: 184535 - DNA, 120 bp, Artificial Sequence
  ENSG00000111666_31 (sequence is synthesized)
taataatatatactttggcttaaaaggaaaatcctttacaaagttcaaaaatttaggaaataatgtcaaatattcgttaatggtggaagactaatttcttcctgtacaagtaggttgtca

SEQ ID NO: 184536 - DNA, 120 bp, Artificial Sequence
  ENSG00000111666_32 (sequence is synthesized)
caattagaaaaagtttatctgtaggcacctgtttttttaaaacttggaaaaccttattataactaagataagggtgagttatacaggcaaaaattagaatttaaaacatagaaaagcagg

SEQ ID NO: 184537 - DNA, 120 bp, Artificial Sequence
  ENSG00000111666_33 (sequence is synthesized)
gtgagactccatctcaaaaaataaataaacgcagatgtgatatatataaaccataagaaattaggtatgttaatgatgtgctcttaatttaattgcagaccaagcccaatgaagtgacat

SEQ ID NO: 184538 - DNA, 120 bp, Artificial Sequence
  ENSG00000111666_34 (sequence is synthesized)
ttgcagaccaagcccaatgaagtgacattatgtctttgtggcaatgacatattcacaaatccatgtcttaaaactgttatttatatattgttctattgctagtgatttaatgttcagagg

SEQ ID NO: 184539 - DNA, 120 bp, Artificial Sequence
  ENSG00000111666_35 (sequence is synthesized)
ttaatgattttagcaatttattccagaacacaaatttaaatgcatcttattgtcattagaatcggttgtacaacttaagtatatagaaaaggatgtacatgtaaaatagattttgtattc

SEQ ID NO: 184540 - DNA, 120 bp, Artificial Sequence
  ENSG00000111666_36 (sequence is synthesized)
cgttttttccttaaagaacataaccttctatacttggttttctaccttttgggattgatagagatacaatgaagccaaacctaaaattaaatcgtctttatttaattgacagtgttagag

SEQ ID NO: 184541 - DNA, 120 bp, Artificial Sequence
  ENSG00000111666_37 (sequence is synthesized)
agaaaaattcactatcattactaaagagctgaaagcttaatacatattctttaggaatagttgctaactaactcataactatttagatttgacttaacagaaagggaggtcttacaatga

SEQ ID NO: 184542 - DNA, 120 bp, Artificial Sequence
  ENSG00000111666_38 (sequence is synthesized)
aacaggtttatgattaaagatgttacaattaaactattctaaagacttacaatatgcttcttagctaacgttataattgtatcatattacttaggttcaagttctttcttcaaagagtca

SEQ ID NO: 184543 - DNA, 120 bp, Artificial Sequence
  ENSG00000111666_39 (sequence is synthesized)
gcaccagtaagtagattatcatgattcttctccaactcttccatactctaaaaacacaaaagacaagttaagttacaaaggaccacttttcatctcaggttctaaacttgtacaattaat

SEQ ID NO: 184544 - DNA, 120 bp, Artificial Sequence
  ENSG00000111666_40 (sequence is synthesized)
tctcaggttctaaacttgtacaattaattttcaaaagtagtaatttttgaatattcaaatgctcatctatttgaaataaaaatattctaagtaatacatgaataccaaaatacctactaa

SEQ ID NO: 184545 - DNA, 120 bp, Artificial Sequence
  ENSG00000111666_41 (sequence is synthesized)
atgttataggaagtacaatgtagtatactttgcccacaatgggtttcctgaactgttaaggtcaagataaaaaagactggaagtcccacatcagtaaaaaccatttctattaagctttcc

SEQ ID NO: 184546 - DNA, 120 bp, Artificial Sequence
  ENSG00000111666_42 (sequence is synthesized)
aaatatcaagcaataatctacttatgactaatagtgtgccatgaattcactagagggaataaaataatctatagtacaacctctttcacattatgaaaaataaaaattatgtcttacgtc

SEQ ID NO: 184547 - DNA, 120 bp, Artificial Sequence
  ENSG00000111666_43 (sequence is synthesized)
ttaaaagaaaattaagggacctgaataatatagaaaagggatatgcagtacttaaataagcatttgattcatataataaaataatgcagtgtggagtctaaggtccttttttggtcgaat

SEQ ID NO: 184548 - DNA, 120 bp, Artificial Sequence
  ENSG00000111667_0 (sequence is synthesized)
ccgccgtgtgtggagaagctgctgccggtgtcatggcggagctgagtgaggaggcgctgctgtcagtattaccgacgatccgggtccctaaggctggagaccgggtccacaaagacgagt

SEQ ID NO: 184549 - DNA, 120 bp, Artificial Sequence
  ENSG00000111667_1 (sequence is synthesized)
gcgccttctccttcgacacgccggagtctgaggggggcctctacatctgtatgaacacgtttctgggctttgggaaacagtatgtggagagacatttcaataagaccggccagcgagtct

SEQ ID NO: 184550 - DNA, 120 bp, Artificial Sequence
  ENSG00000111667_2 (sequence is synthesized)
acttgcacctccggcggacccggcgcccgaaagaggaggaccctgctacaggcactggagacccaccccggaagaagcccacgcggctggctattggtgttgaaggcggatttgacctta

SEQ ID NO: 184551 - DNA, 120 bp, Artificial Sequence
  ENSG00000111667_3 (sequence is synthesized)
gcgaggagaagtttgaattagacgaggatgtgaagattgtcattttgccagattacctggagattgcccgggatggactggggggactgcctgacattgtcagagatcgggtgaccagtg

SEQ ID NO: 184552 - DNA, 120 bp, Artificial Sequence
  ENSG00000111667_4 (sequence is synthesized)
cagtggaggccctactgtcggccgactcagcctcccgcaagcaggaggtgcaggcatgggatggggaagtacggcaggtgtctaagcatgccttcagcctcaagcagttggacaaccctg

SEQ ID NO: 184553 - DNA, 120 bp, Artificial Sequence
  ENSG00000111667_5 (sequence is synthesized)
ctcgaatccctccctgtggctggaagtgctccaagtgtgacatgagagagaacctgtggctcaacctgactgatggctccatcctctgtgggcgacgctacttcgatggcagtgggggca

SEQ ID NO: 184554 - DNA, 120 bp, Artificial Sequence
  ENSG00000111667_6 (sequence is synthesized)
acaaccacgctgtggagcactaccgagagacaggctacccgttagctgtcaagctgggcaccatcacccctgatggagctgacgtgtactcatatgatgaggatgacatggtcctggacc

SEQ ID NO: 184555 - DNA, 120 bp, Artificial Sequence
  ENSG00000111667_7 (sequence is synthesized)
ccagcctggctgagcacctgtcccacttcggcatcgacatgctgaagatgcagaagacagacaagacgatgactgagttggagatagacatgaaccagcggattggtgaatgggagctga

SEQ ID NO: 184556 - DNA, 120 bp, Artificial Sequence
  ENSG00000111667_8 (sequence is synthesized)
tccaggagtcaggtgtgccactcaagcccctgtttgggcctggctacacaggcatccggaacctgggtaacagctgctacctcaactctgtggtccaggtgctcttcagcatccctgact

SEQ ID NO: 184557 - DNA, 120 bp, Artificial Sequence
  ENSG00000111667_9 (sequence is synthesized)
tccagaggaagtatgtggataagctggagaagatcttccagaatgccccgacggaccctacccaggatttcagcacccaggtggccaagctgggccatggccttctctccggggagtatt

SEQ ID NO: 184558 - DNA, 120 bp, Artificial Sequence
  ENSG00000111667_10 (sequence is synthesized)
ccaagccagtaccggagtcgggcgatggggagcgggtgccagaacagaaggaagttcaagatggcattgcccctcggatgttcaaggccctcatcggcaagggccaccctgaattctcca

SEQ ID NO: 184559 - DNA, 120 bp, Artificial Sequence
  ENSG00000111667_11 (sequence is synthesized)
ccaaccggcagcaggatgcccaggagttcttccttcaccttatcaacatggtggagaggaattgccggagctctgaaaatcctaatgaagtgttccgcttcttggtggaggaaaagatca

SEQ ID NO: 184560 - DNA, 120 bp, Artificial Sequence
  ENSG00000111667_12 (sequence is synthesized)
aacaaagaggagcttctggagtacgaggagaagaagcggcaagccgaagaggagaagatggcactgccagaactggttcgggcccaggtgcccttcagctcttgcctggaggcctacggg

SEQ ID NO: 184561 - DNA, 120 bp, Artificial Sequence
  ENSG00000111667_13 (sequence is synthesized)
gcccctgagcaggtcgatgacttctggagcacggccctgcaggccaagtcagtagctgtcaagaccacacgatttgcctcattccctgactacctggtcatccagatcaagaagttcacc

SEQ ID NO: 184562 - DNA, 120 bp, Artificial Sequence
  ENSG00000111667_14 (sequence is synthesized)
ttcggcttagactgggtgcccaagaaactggatgtgtccatcgagatgccagaggagctcgacatctcccagttgaggggcacagggctgcagcccggagaggaggagctgccagacatt

SEQ ID NO: 184563 - DNA, 120 bp, Artificial Sequence
  ENSG00000111667_15 (sequence is synthesized)
gccccacccctggtcactccggatgagcccaaagcgcccatgctggatgaatcagtcatcatccagctggtggagatgggattccctatggacgcctgccgcaaagctgtctactacacg

SEQ ID NO: 184564 - DNA, 120 bp, Artificial Sequence
  ENSG00000111667_16 (sequence is synthesized)
ggcaacagcggggctgaggccgccatgaactgggtcatgtcacacatggatgatccagattttgcaaaccccctcatcctgcctggctctagtgggccgggctccacaagcgcagcagcc

SEQ ID NO: 184565 - DNA, 120 bp, Artificial Sequence
  ENSG00000111667_17 (sequence is synthesized)
gacccccctcctgaggactgtgtgaccaccattgtctccatgggcttctcccgggaccaggccttgaaagcgctgcgggccacgaacaatagtttagaacgggctgtggactggatcttc

SEQ ID NO: 184566 - DNA, 120 bp, Artificial Sequence
  ENSG00000111667_18 (sequence is synthesized)
agtcacattgacgacctggatgctgaagctgccatggacatctcagagggccgctcagctgccgactccatctctgagtctgtgccagtgggacctaaagtccgggatggtcctggaaag

SEQ ID NO: 184567 - DNA, 120 bp, Artificial Sequence
  ENSG00000111667_19 (sequence is synthesized)
tatcagctctttgccttcattagtcacatgggcacctctaccatgtgtggtcactacgtctgccacatcaagaaagaaggcagatgggtgatctacaatgaccagaaagtgtgtgcctcc

SEQ ID NO: 184568 - DNA, 120 bp, Artificial Sequence
  ENSG00000111667_20 (sequence is synthesized)
gagaagccgcccaaggacctgggctacatctacttctaccagagagtggccagctaagagcctgcctcaccccttaccaatgagggcaggggaagaccacctggcatgagggagaggggc

SEQ ID NO: 184569 - DNA, 120 bp, Artificial Sequence
  ENSG00000111667_21 (sequence is synthesized)
tgagggatggacttcagcccctctgctctgtaccctttttccttttgtccccggcagcagggaagaagctggaggccgtgggagaatggctgggcagagcagaggggcagcgatagactc

SEQ ID NO: 184570 - DNA, 120 bp, Artificial Sequence
  ENSG00000111667_22 (sequence is synthesized)
tggggatggagcaggacggggacgggaggggccggccacctgtctgtaaggagactttgttgcttcccctgcccccggaatccacagtgctctgcttctctgtgtcgccccgcccagccc

SEQ ID NO: 184571 - DNA, 120 bp, Artificial Sequence
  ENSG00000111667_23 (sequence is synthesized)
cctggtgtggagggaggggtctcgtttgtgcgcgtgggtgtagctttgtgcatcctctcccagtggagcgatcacctgtgcctcccctccccctttgtttgcccctgtgtggttggtcaa

SEQ ID NO: 184572 - DNA, 120 bp, Artificial Sequence
  ENSG00000111667_24 (sequence is synthesized)
ggagggatgtgagggaaatagggaccccccgacttgccctcctgcctcagtctttcccccaccctgtctcttccttgtccttctctggaaaatgccaaaatacacgatgtgaataaaagt

SEQ ID NO: 184573 - DNA, 120 bp, Artificial Sequence
  ENSG00000111667_25 (sequence is synthesized)
tgtgtttgattctagtcttagagtagttcctatcggctgggtgtgttggcccacacccgtaatcccagtacttcgggaggccaagatgggagaattgcttgagcccaggaggttgagacc

SEQ ID NO: 184574 - DNA, 120 bp, Artificial Sequence
  ENSG00000111667_26 (sequence is synthesized)
gaatcacaagtaattccaaccctcacccggtttcatctgtcttccctgaccgtcagccccagaagggccatgaccgcactcatattactcatattcaagggaaccaagagggtggacctt

SEQ ID NO: 184575 - DNA, 120 bp, Artificial Sequence
  ENSG00000111667_27 (sequence is synthesized)
actggctctccttctgtcccctcaagtcccttctgtgcaagggatgggatggtggcctggctagtcctgagccacttcccctgattctcttcctgcctcctgctctagacgtgtactcat

SEQ ID NO: 184576 - DNA, 120 bp, Artificial Sequence
  ENSG00000111669_0 (sequence is synthesized)
gcagacactgaccttcagcgcctcggctccagcgccatggcgccctccaggaagttcttcgttgggggaaactggaagatgaacgggcggaagcagagtctgggggagctcatcggcact

SEQ ID NO: 184577 - DNA, 120 bp, Artificial Sequence
  ENSG00000111669_1 (sequence is synthesized)
ctgaacgcggccaaggtgccggccgacaccgaggtggtttgtgctccccctactgcctatatcgacttcgcccggcagaagctagatcccaagattgctgtggctgcgcagaactgctac

SEQ ID NO: 184578 - DNA, 120 bp, Artificial Sequence
  ENSG00000111669_2 (sequence is synthesized)
aaagtgactaatggggcttttactggggagatcagccctggcatgatcaaagactgcggagccacgtgggtggtcctggggcactcagagagaaggcatgtctttggggagtcagatgag

SEQ ID NO: 184579 - DNA, 120 bp, Artificial Sequence
  ENSG00000111669_3 (sequence is synthesized)
ctgattgggcagaaagtggcccatgctctggcagagggactcggagtaatcgcctgcattggggagaagctagatgaaagggaagctggcatcactgagaaggttgttttcgagcagaca

SEQ ID NO: 184580 - DNA, 120 bp, Artificial Sequence
  ENSG00000111669_4 (sequence is synthesized)
aaggtcatcgcagataacgtgaaggactggagcaaggtcgtcctggcctatgagcctgtgtgggccattggtactggcaagactgcaacaccccaacaggcccaggaagtacacgagaag

SEQ ID NO: 184581 - DNA, 120 bp, Artificial Sequence
  ENSG00000111669_5 (sequence is synthesized)
atgcggtggctcagagcacccgtatcatttatggaggctctgtgactggggcaacctgcaaggagctggccagccagcctgatgtggatggcttccttgtgggtggtgcttccctcaagc

SEQ ID NO: 184582 - DNA, 120 bp, Artificial Sequence
  ENSG00000111669_6 (sequence is synthesized)
ccgaattcgtggacatcatcaatgccaaacaatgagccccatccatcttccctacccttcctgccaagccagggactaagcagcccagaagcccagtaactgccctttccctgcatatgc

SEQ ID NO: 184583 - DNA, 120 bp, Artificial Sequence
  ENSG00000111669_7 (sequence is synthesized)
ttctgatggtgtcatctgctccttcctgtggcctcatccaaactgtatcttcctttactgtttatatcttcaccctgtaatggttgggaccaggccaatcccttctccacttactataat

SEQ ID NO: 184584 - DNA, 120 bp, Artificial Sequence
  ENSG00000111669_8 (sequence is synthesized)
ggttggaactaaacgtcaccaaggtggcttctccttggctgagagatggaaggcgtggtgggatttgctcctgggttccctaggccctagtgagggcagaagagaaaccatcctctccct

SEQ ID NO: 184585 - DNA, 120 bp, Artificial Sequence
  ENSG00000111669_9 (sequence is synthesized)
tcttacaccgtgaggccaagatcccctcagaaggcaggagtgctgccctctcccatggtgcccgtgcctctgtgctgtgtatgtgaaccacccatgtgagggaataaacctggcactagg

SEQ ID NO: 184586 - DNA, 120 bp, Artificial Sequence
  ENSG00000111669_10 (sequence is synthesized)
tcttgtggtttgtctgccttcactggacttgcccagataatcttcctttttgaggcagctatataaatgatcatttgtgcaagaaaaaaaaaaaaacaagaacaggtttctataacaaca

SEQ ID NO: 184587 - DNA, 120 bp, Artificial Sequence
  ENSG00000111669_11 (sequence is synthesized)
ccctctccttttgctacaaatccttgccttgcaaaggggaggtgaggatgggctattttagaagggaagcagggttgctccctggagaatgctgagtctgtgaggtgcctatgccgagaa

SEQ ID NO: 184588 - DNA, 120 bp, Artificial Sequence
  ENSG00000111669_12 (sequence is synthesized)
tagctcgaggaaattggagccccagctgttaaaagagcagagggcagggtgagggccgtggcctctcaggggtatctggaaggctcttcgagttgagtgcagacccagcctgggctggaa

SEQ ID NO: 184589 - DNA, 120 bp, Artificial Sequence
  ENSG00000111669_13 (sequence is synthesized)
aatggacaaaggtcatcttgctggggtgaaaagggggagagcagaaccaagaagaagagggtgagggctggggggctccagggcactggttaggaattgtggggaatgaaggctttcttt

SEQ ID NO: 184590 - DNA, 120 bp, Artificial Sequence
  ENSG00000111669_14 (sequence is synthesized)
ggaggttgtctatcccacagttggagaggggccctctctgccccagtgggcgatctgggctacggccaagttgccaccagctagttccgcttgaaaaccacttctggccccgtgggggac

SEQ ID NO: 184591 - DNA, 120 bp, Artificial Sequence
  ENSG00000111669_15 (sequence is synthesized)
tcaagtcgccaagcgagggttcccctgagcgccggagctcacaggtctcgccttgtcccgaaagccccgcaatcgaggcggaggcgaccgagcccccgactctcctagaacgttgccaca

SEQ ID NO: 184592 - DNA, 120 bp, Artificial Sequence
  ENSG00000111669_16 (sequence is synthesized)
cacaagaagggggaacgtcggaacagtgcatcatcgggcggcggccggggcggcggcaggagggcgggcggggggcagggctccgggggactgggcgggccatggcggaggacggcgagg

SEQ ID NO: 184593 - DNA, 120 bp, Artificial Sequence
  ENSG00000111669_17 (sequence is synthesized)
gactcctccccttcctcgccggcgtccgcgtccccgcgccgagctgctcgggctccctgagccccagatctgaccccttcccttcggcaacctgaacgactcccgccttccacggaaggg

SEQ ID NO: 184594 - DNA, 120 bp, Artificial Sequence
  ENSG00000111669_18 (sequence is synthesized)
gagccatcctaccgctttccccaacctggaaacagcaaagcgcaaggcctctgagtcagttaggtctctgccacccacgggcaaaggatgctctcctccatcctccttcctccctccacc

SEQ ID NO: 184595 - DNA, 120 bp, Artificial Sequence
  ENSG00000111669_19 (sequence is synthesized)
gaaatcggagagccgcgggcctgatccaaagaggcatccccttctcgttcattccccagaggcctcaatacaaaccccaggagttggcccctctccttttgctacaaatccttgccttgc

SEQ ID NO: 184596 - DNA, 120 bp, Artificial Sequence
  ENSG00000111669_20 (sequence is synthesized)
agccccaaggtagatgccacctggaaatcccccaatgtccactagggggcagtaggccaccgttcttcgtactccggagaacctggctggagagctctttcttgttcacccttccctcca

SEQ ID NO: 184597 - DNA, 120 bp, Artificial Sequence
  ENSG00000111669_21 (sequence is synthesized)
actgcaacaccccaacagcttcttgttctaggcccaggaagtacacgagaagctccgaggatggctgaagtccaacgtctctgatgcggtggctcagagcacccgtatcatttatggagg

SEQ ID NO: 184598 - DNA, 80 bp, Artificial Sequence
  ENSG00000111670_0 (sequence is synthesized)
agggcgtgggctcccggctcccggaagcggcggccgcggcgcggagccgagcgggcgtccgtcgccggagctgcaatgag

SEQ ID NO: 184599 - DNA, 80 bp, Artificial Sequence
  ENSG00000111670_1 (sequence is synthesized)
agccgagcgggcgtccgtcgccggagctgcaatgagcggcgcccggaggctgtgacctgcgcgcggcggcccgaccgggg

SEQ ID NO: 184600 - DNA, 120 bp, Artificial Sequence
  ENSG00000111670_2 (sequence is synthesized)
ggcggctcaggctcctcggggcgtggcgtggcggtgaaggggtgatgctgttcaagctcctgcagagacagacctatacctgcctgtcccacaggtatgggctctacgtgtgcttcttgg

SEQ ID NO: 184601 - DNA, 120 bp, Artificial Sequence
  ENSG00000111670_3 (sequence is synthesized)
gcgtcgttgtcaccatcgtctccgccttccagttcggagaggtggttctggaatggagccgagatcaataccatgttttgtttgattcctatagagacaatattgctggaaagtcctttc

SEQ ID NO: 184602 - DNA, 120 bp, Artificial Sequence
  ENSG00000111670_4 (sequence is synthesized)
agaatcggctttgtctgcccatgccgattgacgttgtttacacctgggtgaatggcacagatcttgaactactgaaggaactacagcaggtcagagaacagatggaggaggagcagaaag

SEQ ID NO: 184603 - DNA, 120 bp, Artificial Sequence
  ENSG00000111670_5 (sequence is synthesized)
caatgagagaaatccttgggaaaaacacaacggaacctactaagaagagtgagaagcagttagagtgtttgctaacacactgcattaaggtgccaatgcttgtcctggacccagccctgc

SEQ ID NO: 184604 - DNA, 120 bp, Artificial Sequence
  ENSG00000111670_6 (sequence is synthesized)
cagccaacatcaccctgaaggacctgccatctctttatccttcttttcattctgccagtgacattttcaatgttgcaaaaccaaaaaacccttctaccaatgtctcagttgttgtttttg

SEQ ID NO: 184605 - DNA, 120 bp, Artificial Sequence
  ENSG00000111670_7 (sequence is synthesized)
acagtactaaggatgttgaagatgcccactctggactgcttaaaggaaatagcagacagacagtatggaggggctacttgacaacagataaagaagtccctggattagtgctaatgcaag

SEQ ID NO: 184606 - DNA, 120 bp, Artificial Sequence
  ENSG00000111670_8 (sequence is synthesized)
atttggctttcctgagtggatttccaccaacattcaaggaaacaaatcaactaaaaacaaaattgccagaaaatctttcctctaaagtcaaactgttgcagttgtattcagaggccagtg

SEQ ID NO: 184607 - DNA, 120 bp, Artificial Sequence
  ENSG00000111670_9 (sequence is synthesized)
tagcgcttctaaaactgaataaccccaaggattttcaagaattgaataagcaaactaagaagaacatgaccattgatggaaaagaactgaccataagtcctgcatatttattatgggatc

SEQ ID NO: 184608 - DNA, 120 bp, Artificial Sequence
  ENSG00000111670_10 (sequence is synthesized)
tgagcgccatcagccagtctaagcaggatgaagacatctctgccagtcgttttgaagataacgaagaactgaggtactcattgcgatctatcgagaggcatgcaccatgggttcggaata

SEQ ID NO: 184609 - DNA, 120 bp, Artificial Sequence
  ENSG00000111670_11 (sequence is synthesized)
ttttcattgtcaccaacgggcagattccatcctggctgaaccttgacaatcctcgagtgacaatagtaacacaccaggatgtttttcgaaatttgagccacttgcctacctttagttcac

SEQ ID NO: 184610 - DNA, 120 bp, Artificial Sequence
  ENSG00000111670_12 (sequence is synthesized)
ctgctattgaaagtcacattcatcgcatcgaagggctgtcccagaagtttatttacctaaatgatgatgtcatgtttgggaaggatgtctggccagatgatttttacagtcactccaaag

SEQ ID NO: 184611 - DNA, 120 bp, Artificial Sequence
  ENSG00000111670_13 (sequence is synthesized)
gccagaaggtttatttgacatggcctgtgccaaactgtgccgagggctgcccaggttcctggattaaggatggctattgtgacaaggcttgtaataattcagcctgcgattgggatggtg

SEQ ID NO: 184612 - DNA, 120 bp, Artificial Sequence
  ENSG00000111670_14 (sequence is synthesized)
gggattgctctggaaacagtggagggagtcgctatattgcaggaggtggaggtactgggagtattggagttggacagccctggcagtttggtggaggaataaacagtgtctcttactgta

SEQ ID NO: 184613 - DNA, 120 bp, Artificial Sequence
  ENSG00000111670_15 (sequence is synthesized)
atcagggatgtgcgaattcctggctcgctgataagttctgtgaccaagcatgcaatgtcttgtcctgtgggtttgatgctggcgactgtgggcaagatcattttcatgaattgtataaag

SEQ ID NO: 184614 - DNA, 120 bp, Artificial Sequence
  ENSG00000111670_16 (sequence is synthesized)
tgatccttctcccaaaccagactcactatattattccaaaaggtgaatgcctgccttatttcagctttgcagaagtagccaaaagaggagttgaaggtgcctatagtgacaatccaataa

SEQ ID NO: 184615 - DNA, 120 bp, Artificial Sequence
  ENSG00000111670_17 (sequence is synthesized)
ttcgacatgcttctattgccaacaagtggaaaaccatccacctcataatgcacagtggaatgaatgccaccacaatacattttaatctcacgtttcaaaatacaaacgatgaagagttca

SEQ ID NO: 184616 - DNA, 120 bp, Artificial Sequence
  ENSG00000111670_18 (sequence is synthesized)
aaatgcagataacagtggaggtggacacaagggagggaccaaaactgaattctacagcccagaagggttacgaaaatttagttagtcccataacacttcttccagaggcggaaatccttt

SEQ ID NO: 184617 - DNA, 120 bp, Artificial Sequence
  ENSG00000111670_19 (sequence is synthesized)
ttgaggatattcccaaagaaaaacgcttcccgaagtttaagagacatgatgttaactcaacaaggagagcccaggaagaggtgaaaattcccctggtaaatatttcactccttccaaaag

SEQ ID NO: 184618 - DNA, 120 bp, Artificial Sequence
  ENSG00000111670_20 (sequence is synthesized)
acgcccagttgagtctcaataccttggatttgcaactggaacatggagacatcactttgaaaggatacaatttgtccaagtcagccttgctgagatcatttctgatgaactcacagcatg

SEQ ID NO: 184619 - DNA, 120 bp, Artificial Sequence
  ENSG00000111670_21 (sequence is synthesized)
ctaaaataaaaaatcaagctataataacagatgaaacaaatgacagtttggtggctccacaggaaaaacaggttcataaaagcatcttgccaaacagcttaggagtgtctgaaagattgc

SEQ ID NO: 184620 - DNA, 120 bp, Artificial Sequence
  ENSG00000111670_22 (sequence is synthesized)
agaggttgacttttcctgcagtgagtgtaaaagtgaatggtcatgaccagggtcagaatccacccctggacttggagaccacagcaagatttagagtggaaactcacacccaaaaaacca

SEQ ID NO: 184621 - DNA, 120 bp, Artificial Sequence
  ENSG00000111670_23 (sequence is synthesized)
acagggaaagaaaaagagaacagtagaatggaggaaaatgctgaaaatcacataggcgttactgaagtgttacttggaagaaagctgcagcattacacagatagttacttgggctttttg

SEQ ID NO: 184622 - DNA, 120 bp, Artificial Sequence
  ENSG00000111670_24 (sequence is synthesized)
ccatgggagaaaaaaaagtatttccaagatcttctcgacgaagaagagtcattgaagacacaattggcatacttcactgatagcaaaaatactgggaggcaactaaaagatacatttgca

SEQ ID NO: 184623 - DNA, 120 bp, Artificial Sequence
  ENSG00000111670_25 (sequence is synthesized)
gattccctcagatatgtaaataaaattctaaatagcaagtttggattcacatcgcggaaagtccctgctcacatgcctcacatgattgaccggattgttatgcaagaactgcaagatatg

SEQ ID NO: 184624 - DNA, 120 bp, Artificial Sequence
  ENSG00000111670_26 (sequence is synthesized)
ttccctgaagaatttgacaagacgtcatttcacaaagtgcgccattctgaggatatgcagtttgccttctcttatttttattatctcatgagtgcagtgcagccactgaatatatctcaa

SEQ ID NO: 184625 - DNA, 120 bp, Artificial Sequence
  ENSG00000111670_27 (sequence is synthesized)
gtctttgatgaagttgatacagatcaatctggtgtcttgtctgacagagaaatccgaacactggctaccagaattcacgaactgccgttaagtttgcaggatttgacaggtctggaacac

SEQ ID NO: 184626 - DNA, 120 bp, Artificial Sequence
  ENSG00000111670_28 (sequence is synthesized)
atgctaataaattgctcaaaaatgcttcctgctgatatcacgcagctaaataatattccaccaactcaggaatcctactatgatcccaacctgccaccggtcactaaaagtctagtaaca

SEQ ID NO: 184627 - DNA, 120 bp, Artificial Sequence
  ENSG00000111670_29 (sequence is synthesized)
aactgtaaaccagtaactgacaaaatccacaaagcatataaggacaaaaacaaatataggtttgaaatcatgggagaagaagaaatcgcttttaaaatgattcgtaccaacgtttctcat

SEQ ID NO: 184628 - DNA, 120 bp, Artificial Sequence
  ENSG00000111670_30 (sequence is synthesized)
gtggttggccagttggatgacataagaaaaaaccctaggaagtttgtttgcctgaatgacaacattgaccacaatcataaagatgctcagacagtgaaggctgttctcagggacttctat

SEQ ID NO: 184629 - DNA, 120 bp, Artificial Sequence
  ENSG00000111670_31 (sequence is synthesized)
gaatccatgttccccataccttcccaatttgaactgccaagagagtatcgaaaccgtttccttcatatgcatgagctgcaggaatggagggcttatcgagacaaattgaagttttggacc

SEQ ID NO: 184630 - DNA, 120 bp, Artificial Sequence
  ENSG00000111670_32 (sequence is synthesized)
cattgtgtactagcaacattgattatgtttactatattctcattttttgctgagcagttaattgcacttaagcggaagatatttcccagaaggaggatacacaaagaagctagtcccaat

SEQ ID NO: 184631 - DNA, 120 bp, Artificial Sequence
  ENSG00000111670_33 (sequence is synthesized)
cgaatcagagtatagaagatcttcatttgaaaaccatctacctcagcatttactgagcattttaaaactcagcttcacagagatgtctttgtgatgtgatgcttagcagtttggcccgaa

SEQ ID NO: 184632 - DNA, 120 bp, Artificial Sequence
  ENSG00000111670_34 (sequence is synthesized)
gaaggaaaatatccagtaccatgctgttttgtggcatgaatatagcccactgaccaggaattatttaaccaacccactgaaaacttgtgtgttgagcagctctgaactgattttactttt

SEQ ID NO: 184633 - DNA, 120 bp, Artificial Sequence
  ENSG00000111670_35 (sequence is synthesized)
aaagaatttgctcatggacctgtcatcctttttataaaaaggctcactgacaagagacagctgttaatttcccacagcaatcattgcagactaactttattaggagaagcctatgccagc

SEQ ID NO: 184634 - DNA, 120 bp, Artificial Sequence
  ENSG00000111670_36 (sequence is synthesized)
tgggagtgattgctaagaggctccagtctttgcattccaaagccttttgctaaagttttgcactttttttttttcatttcccatttttaagtagttactaagttaactagttattcttgc

SEQ ID NO: 184635 - DNA, 120 bp, Artificial Sequence
  ENSG00000111670_37 (sequence is synthesized)
ttctgagtataacgaattgggatgtctaaacctatttttatagatgttatttaaataatgcagcaatatcacctcttattgacaatacctaaattatgagttttattaatatttaagact

SEQ ID NO: 184636 - DNA, 120 bp, Artificial Sequence
  ENSG00000111670_38 (sequence is synthesized)
gtaaatggtcttaaaccactaactactgaagagctcaatgattgacatctgaaatgctttgtaattattgacttcagcccctaagaatgctatgatttcacgtgcaggtctaatttcaaa

SEQ ID NO: 184637 - DNA, 120 bp, Artificial Sequence
  ENSG00000111670_39 (sequence is synthesized)
gggctagagttagtactacttaccagatgtaattatgttttggaaatgtacatattcaaacagaagtgcctcattttagaaatgagtagtgctgatggcactggcacattacagtggtgt

SEQ ID NO: 184638 - DNA, 120 bp, Artificial Sequence
  ENSG00000111670_40 (sequence is synthesized)
cttgtttaatactcattggtatattccagtagctatctctctcagttggtttttgatagaacagaggccagcaaactttctttgtaaaaggctggttagtaaattattgcaggccacctg

SEQ ID NO: 184639 - DNA, 120 bp, Artificial Sequence
  ENSG00000111670_41 (sequence is synthesized)
tgtctttgtcatacattcttcttgctgttgtttagtttgttttttttcaaacaaccctctaaaaatgtaaaaaccatgtttagcttgcagctgtacaaaaactgcccaccagccagatgt

SEQ ID NO: 184640 - DNA, 79 bp, Artificial Sequence
  ENSG00000111670_42 (sequence is synthesized)
tagcttgcagctgtacaaaaactgcccaccagccagatgtgaccctcaggccatcatttgccaatcactgagaattagt

SEQ ID NO: 184641 - DNA, 65 bp, Artificial Sequence
  ENSG00000111670_43 (sequence is synthesized)
gtgcacccagccgagaattagtatttttatgtatggttaaaccttggcgtctagccatattttat

SEQ ID NO: 184642 - DNA, 120 bp, Artificial Sequence
  ENSG00000111670_44 (sequence is synthesized)
tttatgtatggttaaaccttggcgtctagccatattttatgtcataatacaatggatttgtgaagagcagattccatgagtaactctgacaggtattttagatcatgatctcaacaatat

SEQ ID NO: 184643 - DNA, 120 bp, Artificial Sequence
  ENSG00000111670_45 (sequence is synthesized)
tcttccaaaatggcatacatcttttgtacaaagaacttgaaatgtaaatactgtgtttgtgctgtaagagttgtgtatttcaaaaactgaaatctcataaaaagttaaatttttgtctga

SEQ ID NO: 184644 - DNA, 120 bp, Artificial Sequence
  ENSG00000111670_46 (sequence is synthesized)
tttttcccccaaagtttagctgataaacataagaagcaaagagggattctgttctgccagaagagcctcactccttacttttaatttgggcaaaaatctaagagtcttatttggtttgct

SEQ ID NO: 184645 - DNA, 120 bp, Artificial Sequence
  ENSG00000111670_47 (sequence is synthesized)
tgtttcctggatagagaaggactcatttgtttaacagatgagctcctacaatgtctcccatccaagtagtaaccaggcccaaccctgcttagcttccgagatcagacaagatcgggtgcg

SEQ ID NO: 184646 - DNA, 120 bp, Artificial Sequence
  ENSG00000111670_48 (sequence is synthesized)
ttcagggtggtatggccgtagacgagctcctacaatgtcttaggtgacattacagctgctggggatgcagcagtggacaaaacagacaaaggcccggatggaacttagggtgtgaacaat

SEQ ID NO: 184647 - DNA, 120 bp, Artificial Sequence
  ENSG00000111670_49 (sequence is synthesized)
ggaagcatgggaggaggagatgaggggaagtcataaatgtcatcaatgcacacagcctgttgtttacccaaagctttcactcataaaggtagtgtgcttcagatacatggaacatctgct

SEQ ID NO: 184648 - DNA, 120 bp, Artificial Sequence
  ENSG00000111670_50 (sequence is synthesized)
aatgagaaccattcattagtaactaattgagggacaaatgtatttaaaatttatacttattagctcttcaggcttgaccattgatgccacttgttaaggtggactctggaggctggcctg

SEQ ID NO: 184649 - DNA, 120 bp, Artificial Sequence
  ENSG00000111670_51 (sequence is synthesized)
tgctattctgtcagaggtgtttcaggttgtaaatcgtgaatgtcccatctcttagagtagagagcataaagtccttgtctcagaatttgtgaggctctagttttcctgattttataaaga

SEQ ID NO: 184650 - DNA, 120 bp, Artificial Sequence
  ENSG00000111670_52 (sequence is synthesized)
aatgttctttgagttctgccactgggtttagcttacctgattcttacttcctcctgttgtatgtcatttaacaattttgagggtgaaaggatgaagatggagtagtggtgggggagctgt

SEQ ID NO: 184651 - DNA, 120 bp, Artificial Sequence
  ENSG00000111670_53 (sequence is synthesized)
gattagaggtgactagagagcagtttttacttagttcctgtcttaaccatgtttttatatgcaccccccaaccaaattccttttaacttgtttctccctaccccagaccaagtgttttac

SEQ ID NO: 184652 - DNA, 120 bp, Artificial Sequence
  ENSG00000111670_54 (sequence is synthesized)
tgttttatgatacattgtattatccttgtaatacaatggtaatgtgaataaccacttatgaattttttacttttttcatatttttcttcatagctttttttttttggagagagtcttgct

SEQ ID NO: 184653 - DNA, 120 bp, Artificial Sequence
  ENSG00000111670_55 (sequence is synthesized)
caggcgtgagccactgctccttgcccttcatgactttctttattgtactttgaaatactgtaatgcctggctatattagagttgaatttgttcttaaatgcagttattttagaatagata

SEQ ID NO: 184654 - DNA, 120 bp, Artificial Sequence
  ENSG00000111670_56 (sequence is synthesized)
atacatctctccttcctctgagttatttttagtactgatttggacagataaaaccatagattaactttcatttcagccaatgtttatttgacttcttggcttcctggttattagttctag

SEQ ID NO: 184655 - DNA, 120 bp, Artificial Sequence
  ENSG00000111670_57 (sequence is synthesized)
aattatagacacatgtatatctgtacttttgaccaccagttcaacttgcttatgtagacagaatggcattcttgattctatttatataatttcaataaaataaatgctgaaaagaaagaa

SEQ ID NO: 184656 - DNA, 120 bp, Artificial Sequence
  ENSG00000111670_58 (sequence is synthesized)
cacagacatgagctgctgcacccagctaaaatggagtatttttaatttctgggtcttttaaatgcatttggaggtctttagttttacctcactgaaattaggattttaattataaataat

SEQ ID NO: 184657 - DNA, 120 bp, Artificial Sequence
  ENSG00000111670_59 (sequence is synthesized)
caaagatgtgaaccttacagacattttaaagccattatattttttctataaaccctgttctcgtttggaggagaaagaaattggaattttcaaaaaaaataaaaatacctttaacaccta

SEQ ID NO: 184658 - DNA, 120 bp, Artificial Sequence
  ENSG00000111670_60 (sequence is synthesized)
tgtgttaaactgtaattcgttcatttttatggaatattttcttcttaatcattattgaacatgtgctatagacttaaccaaacattctttatgtattaataaagaatcagtaatgctggg

SEQ ID NO: 184659 - DNA, 120 bp, Artificial Sequence
  ENSG00000111670_61 (sequence is synthesized)
atgattctctgtgtatccctttaccagccttgcattcaaactagttatgaaagtaagagaacaacataaatcactgaagaggatcttttcctgttattgttgcagtctggtgttttgttt

SEQ ID NO: 184660 - DNA, 120 bp, Artificial Sequence
  ENSG00000111670_62 (sequence is synthesized)
tgttttgttttgtttggaccaagcagatttaccttagctgaaaatatgtggtgaagttttaatttggaaacaaaaaaggatatcaataattcattaaataaagatggttcaaacactgga

SEQ ID NO: 184661 - DNA, 120 bp, Artificial Sequence
  ENSG00000111670_63 (sequence is synthesized)
gtcatgaaatagccatcctgtaaatatgacagtttaaggggtctttctgagttatagatatggtttaatttactcaggagtatgcccatctgatgtgttcactttagcagcacatatact

SEQ ID NO: 184662 - DNA, 120 bp, Artificial Sequence
  ENSG00000111670_64 (sequence is synthesized)
ctgagtggaatagaaatgattcattcttaaatgtctgataaacttttctaaaaatgcacaaagagaagcaaaacagctgctattgtattttggccttaacctcaaaaagggattgctgca

SEQ ID NO: 184663 - DNA, 120 bp, Artificial Sequence
  ENSG00000111670_65 (sequence is synthesized)
tatattttactctgtgtaatacacatacctttctgtgctgtgatgaggactttcaatctgatatcacaattaccttgttctcttggctctgaattattctagaggcaatttttctactat

SEQ ID NO: 184664 - DNA, 120 bp, Artificial Sequence
  ENSG00000111670_66 (sequence is synthesized)
ataactcctctactaggtagcgttctgcagtttgggcagaacatacctggagtattgattctttacattctgaaatatatgaactgaatgtgtttcctccaaaatttgtatgttgaaatc

SEQ ID NO: 184665 - DNA, 120 bp, Artificial Sequence
  ENSG00000111670_67 (sequence is synthesized)
ctgtaggatgaggaaaccaggtggctactacacagcggtttctgagccctggccggaattctgttgacagcgtcctgtgaaatgggaccactccccagtaaaccactggggctgaacccc

SEQ ID NO: 184666 - DNA, 120 bp, Artificial Sequence
  ENSG00000111670_68 (sequence is synthesized)
actccattggtcactcttgctgcttacctatgagggaggagcaaatagcctcatacctcattagtgtgggtctttcccttggaaggccaagcttcttagtgccgccattctggaacgcag

SEQ ID NO: 184667 - DNA, 120 bp, Artificial Sequence
  ENSG00000111670_69 (sequence is synthesized)
tcttcaccatttcttgtctttggggattttttttttcctcttcacaagacagacctcagaatggaaacaatttttttcaacaccctccttccctttttgcagataaaatgaatcacacaa

SEQ ID NO: 184668 - DNA, 120 bp, Artificial Sequence
  ENSG00000111670_70 (sequence is synthesized)
tgcaaataaacctgaataaaaggactggaaagaagggagtagcttatttctgtatggaacagaccaaaaggcctaacagtgcaggcagtgttggagctggtggttgagtgagagatagga

SEQ ID NO: 184669 - DNA, 120 bp, Artificial Sequence
  ENSG00000111670_71 (sequence is synthesized)
gttgcaagttgagatagggtcccccatgcagagggatgagcctgaacttcgaagaactgggttctattaataacaagctgttcagagagacccagggacagatcgcattgtggggaggtg

SEQ ID NO: 184670 - DNA, 120 bp, Artificial Sequence
  ENSG00000111670_72 (sequence is synthesized)
ctcctgcagagacagacctatacctgcctgtcccacaggtatgggctctacgtgtgcttcttgggcgtcgttgtcaccatcgtctccgccttccagttcggagaggctctgtgggagcag

SEQ ID NO: 184671 - DNA, 120 bp, Artificial Sequence
  ENSG00000111670_73 (sequence is synthesized)
gggcctttctgtcttattcaccactgtattttcggcccctggaagcctggcacctggaagtaagctgagcacagaaatatttttttctactgtctaaatatggaaaggtcacccatggtg

SEQ ID NO: 184672 - DNA, 120 bp, Artificial Sequence
  ENSG00000111671_0 (sequence is synthesized)
cagaggcccggcgacctccagggctgggaagtcaaccgaggttcgggggcagcggcgagggctccgggcgagtcaatccaaactggagctcaactttcagaagagaaagacgccccagca

SEQ ID NO: 184673 - DNA, 120 bp, Artificial Sequence
  ENSG00000111671_1 (sequence is synthesized)
agcctctttcggggagtcctctagctcctcacctccatgggccagacagctctggcagggggcagcagcagcacccccacgccacaggccctgtaccctgacctctcctgtcccgagggc

SEQ ID NO: 184674 - DNA, 120 bp, Artificial Sequence
  ENSG00000111671_2 (sequence is synthesized)
ttggaagagctgctgtctgcaccccctcctgacctgggggcccagcggcgccacggttggaaccccaaagactgttcagagaacatcgaggtcaaggaaggagggttgtactttgagcgg

SEQ ID NO: 184675 - DNA, 120 bp, Artificial Sequence
  ENSG00000111671_3 (sequence is synthesized)
cggcccgtggcccagagcactgatggggcccggggtaagaggggctattcaaggggcctgcacgcctgggagatcagctggcccctagagcagaggggcacgcatgccgtggtgggcgtg

SEQ ID NO: 184676 - DNA, 120 bp, Artificial Sequence
  ENSG00000111671_4 (sequence is synthesized)
gccacggccctcgccccgctgcagactgaccactacgcggcgctgctgggcagcaacagcgagtcgtggggctgggacatcgggcgggggaagctgtaccatcagagcaaggggcccgga

SEQ ID NO: 184677 - DNA, 120 bp, Artificial Sequence
  ENSG00000111671_5 (sequence is synthesized)
ccagtatccagcgggaactcagggtgagcagctggaggtgccagagagactgctggtggttctggacatggaggagggaactctgggctacgctattgggggcacctacctggggccagc

SEQ ID NO: 184678 - DNA, 120 bp, Artificial Sequence
  ENSG00000111671_6 (sequence is synthesized)
attccgcggactgaagggcaggaccctctatccggcagtaagcgctgtctggggccagtgccaggtccgcatccgctacctgggcgaaaggagagcggagccacactcccttctgcacct

SEQ ID NO: 184679 - DNA, 120 bp, Artificial Sequence
  ENSG00000111671_7 (sequence is synthesized)
gagccgcctgtgtgtgcgccacaacctgggggatacccggctcggccaggtgtctgccctgcccttgccccctgccatgaagcgctacctgctctaccagtgagccctgtgataccacag

SEQ ID NO: 184680 - DNA, 120 bp, Artificial Sequence
  ENSG00000111671_8 (sequence is synthesized)
actgtgctgaggtcttgccaccacccctccccttggggaggtggggaggcactgctggcctagaccagctgctgaaagctggtgaggctgagcccctaccccaacccaagctctgcggaa

SEQ ID NO: 184681 - DNA, 120 bp, Artificial Sequence
  ENSG00000111671_9 (sequence is synthesized)
atcaacagccccagagccacttggagggaggaagaaagggagccggcgttcaaggctatgacagtctgctacgcaaaacattttttcaagtaaaaatagtaagagatgttgttatagaaa

SEQ ID NO: 184682 - DNA, 120 bp, Artificial Sequence
  ENSG00000111671_10 (sequence is synthesized)
ggccggcggtctgcgccctgcgcgcctcggcttctttccgcccggctccttcagaggcccggcgacctccagggctgggaagtcaaccgagctcccttccaggtcaatccaaactggagc

SEQ ID NO: 184683 - DNA, 120 bp, Artificial Sequence
  ENSG00000111671_11 (sequence is synthesized)
agacaaggtttccctctgtaacccaggctggagtgcagtggaacttctgagctcaagtagtcttcacatctcagccttccaagtagctgtgactagagcttgtgacagtccagccccttc

SEQ ID NO: 184684 - DNA, 120 bp, Artificial Sequence
  ENSG00000111671_12 (sequence is synthesized)
agcctggagttccacctaccagtccccacatgtgctgtctctcaccaaggttgccagtgacctctgaccaaaacaatcttgggcgcaggagttagtcgctcaggcggctcaaaggtcttg

SEQ ID NO: 184685 - DNA, 120 bp, Artificial Sequence
  ENSG00000111671_13 (sequence is synthesized)
cagtggtttgggatggaaactcttctgacaagagcagaggggatggaccttcatccagcctgcctcaacctctgttcagtgctgggaaaggctaggggtcttcacagctgttatttaatt

SEQ ID NO: 184686 - DNA, 120 bp, Artificial Sequence
  ENSG00000111671_14 (sequence is synthesized)
taacccaacagcaatagaggtgaaacaggcttgagaaagcaactttctcaagttctcttggccagtaaatggtgaaccttcagaatggagggaggaactgcagggatgagagaattcagg

SEQ ID NO: 184687 - DNA, 120 bp, Artificial Sequence
  ENSG00000111671_15 (sequence is synthesized)
agatatcaacccctgagcaagaggtgcaaagcgttaggtactgggtttgatgtacaggtccaaaagaaggatgggcagagccaggtacccaggctgtataccggattccctgggctctaa

SEQ ID NO: 184688 - DNA, 120 bp, Artificial Sequence
  ENSG00000111671_16 (sequence is synthesized)
cctgtctctgtgccacatacctacttccttcctcagccacacctctggatggagacactggggccctgggcaccagggaggagagcagtggaggaggcagggccttagggtggggcagca

SEQ ID NO: 184689 - DNA, 120 bp, Artificial Sequence
  ENSG00000111671_17 (sequence is synthesized)
ggggaggagcctccccaggaactgactgggtccagggcttggagctgctctctgcagttgtgtgggctgtagagtggagggccatccctcctcacctcagccccagctcccaagcctctg

SEQ ID NO: 184690 - DNA, 120 bp, Artificial Sequence
  ENSG00000111671_18 (sequence is synthesized)
aaacatttgcattccttaactcagcctagaaggcctctgtgacttgctgtctacttatctggcccttctcatgcttcctttctggctgtagcaaccttgaagatatcgtacttccccaaa

SEQ ID NO: 184691 - DNA, 120 bp, Artificial Sequence
  ENSG00000111674_0 (sequence is synthesized)
gccactcccgctctctcagcgccgccgtcgccaccgccaccgccaccgccactaccaccgtctgagtctgcagtcccgagatcccagccatcatgtccatagagaagatctgggcccggg

SEQ ID NO: 184692 - DNA, 120 bp, Artificial Sequence
  ENSG00000111674_1 (sequence is synthesized)
agatcctggactcccgcgggaaccccacagtggaggtggatctctatactgccaaaggtcttttccgggctgcagtgcccagtggagcctctacgggcatctatgaggccctggagctga

SEQ ID NO: 184693 - DNA, 120 bp, Artificial Sequence
  ENSG00000111674_2 (sequence is synthesized)
gggatggagacaaacagcgttacttaggcaaaggtgtcctgaaggcagtggaccacatcaactccaccatcgcgccagccctcatcagctcaggtctctctgtggtggagcaagagaaac

SEQ ID NO: 184694 - DNA, 120 bp, Artificial Sequence
  ENSG00000111674_3 (sequence is synthesized)
tggacaacctgatgctggagttggatgggactgagaacaaatccaagtttggggccaatgccatcctgggtgtgtctctggccgtgtgtaaggcaggggcagctgagcgggaactgcccc

SEQ ID NO: 184695 - DNA, 120 bp, Artificial Sequence
  ENSG00000111674_4 (sequence is synthesized)
tgtatcgccacattgctcagctggccgggaactcagacctcatcctgcctgtgccggccttcaacgtgatcaatggtggctctcatgctggcaacaagctggccatgcaggagttcatga

SEQ ID NO: 184696 - DNA, 120 bp, Artificial Sequence
  ENSG00000111674_5 (sequence is synthesized)
tcctcccagtgggagctgagagctttcgggatgccatgcgactaggtgcagaggtctaccatacactcaagggagtcatcaaggacaaatacggcaaggatgccaccaatgtgggggatg

SEQ ID NO: 184697 - DNA, 120 bp, Artificial Sequence
  ENSG00000111674_6 (sequence is synthesized)
aaggtggctttgcccccaatatcctggagaacagtgaagccttggagctggtgaaggaagccatcgacaaggctggctacacggaaaagatcgttattggcatggatgttgctgcctcag

SEQ ID NO: 184698 - DNA, 120 bp, Artificial Sequence
  ENSG00000111674_7 (sequence is synthesized)
agttttatcgtgatggcaaatatgacttggacttcaagtctcccactgatccttcccgatacatcactggggaccagctgggggcactctaccaggactttgtcagggactatcctgtgg

SEQ ID NO: 184699 - DNA, 120 bp, Artificial Sequence
  ENSG00000111674_8 (sequence is synthesized)
tctccattgaggacccatttgaccaggatgattgggctgcctggtccaagttcacagccaatgtagggatccagattgtgggtgatgacctgacagtgaccaacccaaaacgtattgagc

SEQ ID NO: 184700 - DNA, 120 bp, Artificial Sequence
  ENSG00000111674_9 (sequence is synthesized)
aaggcctgcaactgtctgctgctcaaggtcaaccagatcggctcggtcactgaagccatccaagcgtgcaagctggcccaggagaatggctggggggtcatggtgagtcatcgctcagga

SEQ ID NO: 184701 - DNA, 120 bp, Artificial Sequence
  ENSG00000111674_10 (sequence is synthesized)
gagactgaggacacattcattgctgacctggtggtggggctgtgcacaggccagatcaagactggtgccccgtgccgttctgaacgtctggctaaatacaaccagctcatgagaattgag

SEQ ID NO: 184702 - DNA, 120 bp, Artificial Sequence
  ENSG00000111674_11 (sequence is synthesized)
gaagagctgggggatgaagctcgctttgccggacataacttccgtaatcccagtgtgctgtgattcctctgcttgcctggagacgtggaacctctgtctcatcctcctggaaccttgctg

SEQ ID NO: 184703 - DNA, 120 bp, Artificial Sequence
  ENSG00000111674_12 (sequence is synthesized)
tcctgatctgtgatagttcaccccctgagatcccctgagccccagggtgcccagaacttccctgattgacctgctccgctgctccttggcttacctgacctcttgctgtctctgctcgcc

SEQ ID NO: 184704 - DNA, 120 bp, Artificial Sequence
  ENSG00000111674_13 (sequence is synthesized)
ctcctttctgtgccctactcattggggttccgcactttccacttcttcctttctctttctctcttccctcagaaactagaaatgtgaatgaggattattataaaagggggtccgtggaag

SEQ ID NO: 184705 - DNA, 120 bp, Artificial Sequence
  ENSG00000111674_14 (sequence is synthesized)
aatgatcagcatctgtgatgggagcgtcagggttggtgtgctgaggtgttagagagggaccatgtgtcacttgtgctttgctcttgtcccacgtgtcttccactttgcatatgagccgtg

SEQ ID NO: 184706 - DNA, 120 bp, Artificial Sequence
  ENSG00000111674_15 (sequence is synthesized)
aactgtgcatagtgctgggatggaggggagtgttgggcatgtgatcacgcctggctaataaggctttagtgtatttatttatttatttattttatttgtttttcattcatcccattaatc

SEQ ID NO: 184707 - DNA, 120 bp, Artificial Sequence
  ENSG00000111674_16 (sequence is synthesized)
atttccccataactcaatggcctaaaactggcctgacttgggggaacgatgtgtctgtatttcatgtggctgtagatcccaagatgactggggtgggaggtcttgctagaatgggaaggg

SEQ ID NO: 184708 - DNA, 120 bp, Artificial Sequence
  ENSG00000111674_17 (sequence is synthesized)
tcatagaaagggccttgacatcagttcctttgtgtgtactcactgaagcctgcgttggtccagagcggaggctgtgtgcctgggggagttttcctctatacatctctccccaaccctagg

SEQ ID NO: 184709 - DNA, 120 bp, Artificial Sequence
  ENSG00000111674_18 (sequence is synthesized)
ttccctgttcttcctccagctgcaccagagcaacctctcactccccatgccacgttccacagttgccaccacctctgtggcattgaaatgagcacctccattaaagtctgaatcagtgca

SEQ ID NO: 184710 - DNA, 120 bp, Artificial Sequence
  ENSG00000111674_19 (sequence is synthesized)
ctcttcacttcccgctgcaacccccagggactgcagggcctttctcaggaccctcttccccgacacctgtattgcatgcgcctttcgcgggaagaggagggatacacgtttgggagagag

SEQ ID NO: 184711 - DNA, 120 bp, Artificial Sequence
  ENSG00000111674_20 (sequence is synthesized)
tgggaccttggggaaggggcagtgttcaggcagctggggtgttaagttggggaggtatgggggctctggaagagaggcccaggcagcccatcctcttcttggctcccaggagaaatgcaa

SEQ ID NO: 184712 - DNA, 120 bp, Artificial Sequence
  ENSG00000111674_21 (sequence is synthesized)
gcctggcagccattccgctctgaggagatctgggggaaccccaccggctggccaagctgcaaagaggcgcgggaaccactgtcgtgcccctcccctcctcactgcagtgttctcccatct

SEQ ID NO: 184713 - DNA, 120 bp, Artificial Sequence
  ENSG00000111674_22 (sequence is synthesized)
catcatttgatcttaccccgccccccactgcagtgacctccccttcctcactgcattgaccttctcctcttcccaggggggagggggaatcccttctacagccctagactgcagccagcg

SEQ ID NO: 184714 - DNA, 120 bp, Artificial Sequence
  ENSG00000111674_23 (sequence is synthesized)
cctccctacccaccccccacccactgcagtaacctctttcccatccctcccagcctcccgccccgcccattgatctcaggctccacccctctaagcctcttatctttctccttccttccc

SEQ ID NO: 184715 - DNA, 120 bp, Artificial Sequence
  ENSG00000111674_24 (sequence is synthesized)
ctgttactgtcgagtgggtcgggccgtgggtatgagcgcttgtgtgcgctggggccaggtcgtgggtgcccccacccttcccccatcctcctcccttccccactccaccctcgtcggtcc

SEQ ID NO: 184716 - DNA, 120 bp, Artificial Sequence
  ENSG00000111674_25 (sequence is synthesized)
cccacccgcgctcgtacgtgcgcctccgccggcagctcctgactcatcgggggctccgggtcacatgcgcccgcgcggccctataggcgcctcctccgcccgccgcccgggagccgcagc

SEQ ID NO: 184717 - DNA, 120 bp, Artificial Sequence
  ENSG00000111674_26 (sequence is synthesized)
aaggttggggctgggaagagagtgcccagtgtgagagctggagaatcagtgctgtgtgtggatacaggtgcaagctggcccaggagaatggctggggggtcatgatcaagactggtgccc

SEQ ID NO: 184718 - DNA, 120 bp, Artificial Sequence
  ENSG00000111674_27 (sequence is synthesized)
tcagggtggggaggcgtggagcagatagagagctgaagggccagtgctgtagtggcttcctcaggaatgactgtcaggggcattctcctctcaaagccagagcaaggggagatgagttta

SEQ ID NO: 184719 - DNA, 85 bp, Artificial Sequence
  ENSG00000111674_28 (sequence is synthesized)
tccaaagtgctgggattacaggggcgcctcctccgcccgccgcccgggagccgcagccgccgccgccactgccactcccgctctc

SEQ ID NO: 184720 - DNA, 120 bp, Artificial Sequence
  ENSG00000111674_29 (sequence is synthesized)
gcgttacttaggcaaaggtgaggtcccttctcttttccagactctcccccacctcagccttatgcccctacctcacaccagtccccagtcctcctctagcatggcttcccctcctcccat

SEQ ID NO: 184721 - DNA, 120 bp, Artificial Sequence
  ENSG00000111674_30 (sequence is synthesized)
tgatcccttccggcccctcctggcccgacccagtccagcctcttcctttccccaggtgtcctgaaggcagtggaccacatcaactccaccatcgcgccagccctcatcagctcagtgagg

SEQ ID NO: 184722 - DNA, 120 bp, Artificial Sequence
  ENSG00000111674_31 (sequence is synthesized)
gcctgagagagtctgtggtctcagggatatttagaaagaggtgtggctctctgccgtttccaatctcctcctccccacccattcctctccctgctgttttcaagagagcatggatgaggt

SEQ ID NO: 184723 - DNA, 120 bp, Artificial Sequence
  ENSG00000111674_32 (sequence is synthesized)
gttgctggggcaggggtggggagggaggagggggtctcctttactggctccttttggagactacagatggaggcaggagctagaaaggagaaggggacattgtgctcagcaccttcctct

SEQ ID NO: 184724 - DNA, 120 bp, Artificial Sequence
  ENSG00000111674_33 (sequence is synthesized)
ctgctcccatgggagttcaggtcccctaatccaggtaggcccctgtcacagggacctggttggaccctggccaaatgtgagcttgggtgtgaatgaggggaccctctgccttagggctca

SEQ ID NO: 184725 - DNA, 120 bp, Artificial Sequence
  ENSG00000111676_0 (sequence is synthesized)
gacgccatactggacgccaagtgggaggaacttcaaggctgtcccctgcgggcctcccgctctgcttctgcgaaggtttcattgaaaacagatcctgcaaaagttccaggtgcccacact

SEQ ID NO: 184726 - DNA, 120 bp, Artificial Sequence
  ENSG00000111676_1 (sequence is synthesized)
ggaaacttggagatcctgcttcccagaccacagctgtggggaacttggggtggagcagagaagtttctgtattcagctgcccaggcagaggagaatggggtctccacagcctgaagaatg

SEQ ID NO: 184727 - DNA, 120 bp, Artificial Sequence
  ENSG00000111676_2 (sequence is synthesized)
aagacacgacagaataaagactcgatgtcaatgaggagtggacggaagaaagaggcccctgggccccgggaagaactgagatcgaggggccgggcctcccctggaggggtcagcacgtcc

SEQ ID NO: 184728 - DNA, 120 bp, Artificial Sequence
  ENSG00000111676_3 (sequence is synthesized)
agcagtgatggcaaagctgagaagtccaggcagacagccaagaaggcccgagtagaggaagcctccaccccaaaggtcaacaagcagggtcggagtgaggagatctcagagagtgaaagt

SEQ ID NO: 184729 - DNA, 120 bp, Artificial Sequence
  ENSG00000111676_4 (sequence is synthesized)
gaggagaccaatgcaccaaaaaagaccaaaactgagcaggaactccctcggccacagtctccctccgatctggatagcttggacgggcggagccttaatgatgatggcagcagcgaccct

SEQ ID NO: 184730 - DNA, 120 bp, Artificial Sequence
  ENSG00000111676_5 (sequence is synthesized)
agggatatcgaccaggacaaccgaagcacgtcccccagtatctacagccctggaagtgtggagaatgactctgactcatcttctggcctgtcccagggcccagcccgcccctaccaccca

SEQ ID NO: 184731 - DNA, 120 bp, Artificial Sequence
  ENSG00000111676_6 (sequence is synthesized)
cctccactctttcctccttcccctcaaccgccagacagcacccctcgacagccagaggctagctttgaaccccatccttctgtgacacccactggatatcatgctcccatggagcccccc

SEQ ID NO: 184732 - DNA, 120 bp, Artificial Sequence
  ENSG00000111676_7 (sequence is synthesized)
acatctcgaatgttccaggctcctcctggggcccctccccctcacccacagctctatcctgggggcactggtggagttttgtctggacccccaatgggtcccaaggggggaggggctgcc

SEQ ID NO: 184733 - DNA, 120 bp, Artificial Sequence
  ENSG00000111676_8 (sequence is synthesized)
tcatcagtggggggccctaatgggggtaagcagcaccccccacccactactcccatttcagtatcaagctctggggctagtggtgctcccccaacaaagccgcctaccactccagtgggt

SEQ ID NO: 184734 - DNA, 120 bp, Artificial Sequence
  ENSG00000111676_9 (sequence is synthesized)
ggtgggaacctaccttctgctccaccaccagccaacttcccccatgtgacaccgaacctgcctcccccacctgccctgagacccctcaacaatgcatcagcctctccccctggcctgggg

SEQ ID NO: 184735 - DNA, 120 bp, Artificial Sequence
  ENSG00000111676_10 (sequence is synthesized)
gcccaaccactacctggtcatctgccctctccccacgccatgggacagggtatgggtggacttcctcctggcccagagaagggcccaactctggctccttcaccccactctctgcctcct

SEQ ID NO: 184736 - DNA, 120 bp, Artificial Sequence
  ENSG00000111676_11 (sequence is synthesized)
gcttcctcttctgctccagcgccccccatgaggtttccttattcatcctctagtagtagctctgcagcagcctcctcttccagttcttcctcctcttcctctgcctcccccttcccagct

SEQ ID NO: 184737 - DNA, 120 bp, Artificial Sequence
  ENSG00000111676_12 (sequence is synthesized)
tcccaggcattgcccagctacccccactctttccctcccccaacaagcctctctgtctccaatcagccccccaagtatactcagccttctctcccatcccaggctgtgtggagccagggt

SEQ ID NO: 184738 - DNA, 120 bp, Artificial Sequence
  ENSG00000111676_13 (sequence is synthesized)
cccccaccacctcctccctatggccgcctcttagccaacagcaatgcccatccaggccccttccctccctctactggggcccagtccaccgcccacccaccagtctcaacacatcaccat

SEQ ID NO: 184739 - DNA, 120 bp, Artificial Sequence
  ENSG00000111676_14 (sequence is synthesized)
agcagcagcagcagcagcagcagcatcacggaaactctgggccccctcctcctggagcatttccccacccactggagggcggtagctcccaccacgcacacccttacgccatgtctccct

SEQ ID NO: 184740 - DNA, 120 bp, Artificial Sequence
  ENSG00000111676_15 (sequence is synthesized)
ggtagctcccaccacgcacacccttacgccatgtctccctccctggggtctctgaggccctacccaccagggccagcacacctgcccccacctcacagccaggtgtcctacagccaagca

SEQ ID NO: 184741 - DNA, 120 bp, Artificial Sequence
  ENSG00000111676_16 (sequence is synthesized)
ggccccaatggccctccagtctcttcctcttccaactcttcctcttccacttctcaagggtcctacccatgttcacacccctccccttcccagggccctcaaggggcgccctaccctttc

SEQ ID NO: 184742 - DNA, 120 bp, Artificial Sequence
  ENSG00000111676_17 (sequence is synthesized)
ccaccggtgcctacggtcaccacctcttcggctaccctttccacggtcattgccaccgtggcttcctcgccagcaggctacaaaacggcctccccacctgggcccccaccgtacggaaag

SEQ ID NO: 184743 - DNA, 120 bp, Artificial Sequence
  ENSG00000111676_18 (sequence is synthesized)
ccaccccacccggatacaaacccgggtcgcctccctccttccgaacggggaccccaccgggctatcgaggaacctcgccacctgcaggcccagggaccttcaagccgggctcgcccaccg

SEQ ID NO: 184744 - DNA, 120 bp, Artificial Sequence
  ENSG00000111676_19 (sequence is synthesized)
tgggacctgggcccctgccacctgcggggccctcaggcctgccatcgctgccaccaccacctgcggcccctgcctcagggccgcccctgagcgccacgcagatcaaacaggagccggctg

SEQ ID NO: 184745 - DNA, 120 bp, Artificial Sequence
  ENSG00000111676_20 (sequence is synthesized)
aggagtatgagacccccgagagcccggtgcccccagcccgcagcccctcgccccctcccaaggtggtagatgtacccagccatgccagtcagtctgccaggttcaacaaacacctggatc

SEQ ID NO: 184746 - DNA, 120 bp, Artificial Sequence
  ENSG00000111676_21 (sequence is synthesized)
gcggcttcaactcgtgcgcgcgcagcgacctgtacttcgtgccactggagggctccaagctggccaagaagcgggccgacctggtggagaaggtgcggcgcgaggccgagcagcgcgcgc

SEQ ID NO: 184747 - DNA, 120 bp, Artificial Sequence
  ENSG00000111676_22 (sequence is synthesized)
gcgaagaaaaggagcgcgagcgcgagcgggaacgcgagaaagagcgcgagcgcgagaaggagcgcgagcttgaacgcagcgtgaagttggctcaggagggccgtgctccggtggaatgcc

SEQ ID NO: 184748 - DNA, 120 bp, Artificial Sequence
  ENSG00000111676_23 (sequence is synthesized)
catctctgggcccagtgccccatcgccctccatttgaaccgggcagtgcggtggctacagtgcccccctacctgggtcctgacactccagccttgcgcactctcagtgaatatgcccggc

SEQ ID NO: 184749 - DNA, 120 bp, Artificial Sequence
  ENSG00000111676_24 (sequence is synthesized)
ctcatgtcatgtctcctggcaatcgcaaccatccattctacgtgcccctgggggcagtggacccggggctcctgggttacaatgtcccggccctgtacagcagtgatccagctgcccggg

SEQ ID NO: 184750 - DNA, 120 bp, Artificial Sequence
  ENSG00000111676_25 (sequence is synthesized)
agagggaacgggaagcccgtgaacgagacctccgtgaccgcctcaagcctggctttgaggtgaagcctagtgagctggaacccctacatggggtccctgggccgggcttggatccctttc

SEQ ID NO: 184751 - DNA, 120 bp, Artificial Sequence
  ENSG00000111676_26 (sequence is synthesized)
cccgacatgggggcctggctctgcagcctggcccacctggcctgcaccctttcccctttcatccgagcctggggcccctggagcgagaacgtctagcgctggcagctgggccagccctgc

SEQ ID NO: 184752 - DNA, 120 bp, Artificial Sequence
  ENSG00000111676_27 (sequence is synthesized)
ggcctgacatgtcctatgctgagcggctggcagctgagaggcagcacgcagaaagggtggcggccctgggcaatgacccactggcccggctgcagatgctcaatgtgactccccatcacc

SEQ ID NO: 184753 - DNA, 120 bp, Artificial Sequence
  ENSG00000111676_28 (sequence is synthesized)
accagcactcccacatccactcgcacctgcacctgcaccagcaagatgctatccatgcagcctctgcctcggtgcaccctctcattgaccccctggcctcagggtctcaccttacccgga

SEQ ID NO: 184754 - DNA, 120 bp, Artificial Sequence
  ENSG00000111676_29 (sequence is synthesized)
tcccctacccagctggaactctccctaaccccctgcttcctcaccctctgcacgagaacgaagttcttcgtcaccagctctttgctgccccttaccgggacctgccggcctccctttctg

SEQ ID NO: 184755 - DNA, 120 bp, Artificial Sequence
  ENSG00000111676_30 (sequence is synthesized)
ccccgatgtcagcagctcatcagctgcaggccatgcacgcacagtcagctgagctgcagcgcttggcgctggaacagcagcagtggctgcatgcccatcacccgctgcacagtgtgccgc

SEQ ID NO: 184756 - DNA, 120 bp, Artificial Sequence
  ENSG00000111676_31 (sequence is synthesized)
tgcctgcccaggaggactactacagtcacctgaagaaggaaagcgacaagccactgtagaacctgcgatcaagagagcaccatggctcctacattggaccttggagcacccccaccctcc

SEQ ID NO: 184757 - DNA, 120 bp, Artificial Sequence
  ENSG00000111676_32 (sequence is synthesized)
ccccaccgtgcccttggcctgccacccagagccaagagggtgctgctcagttgcagggcctccgcagctggacagagagtgggggagggagggacagacagaaggccaaggcccgatgtg

SEQ ID NO: 184758 - DNA, 120 bp, Artificial Sequence
  ENSG00000111676_33 (sequence is synthesized)
gtgtgcagaggtggggaggtggcgaggatggggacagaaagcgcacagaatcttggaccaggtctctcttccttgtcccccctgcttttctcctcccccatgcccaacccctgtggccgc

SEQ ID NO: 184759 - DNA, 120 bp, Artificial Sequence
  ENSG00000111676_34 (sequence is synthesized)
cgcccctcccctgccccgttggtgtgattatttcatctgttagatgtggctgttttgcgtagcatcgtgtgccacccctgcccctccccgatccctgtgtgcgcgccccctctgcaatgt

SEQ ID NO: 184760 - DNA, 120 bp, Artificial Sequence
  ENSG00000111676_35 (sequence is synthesized)
atgccccttgccccttccccacactaataatttatatatataaatatctatatgacgctcttaaaaaaacatcccaaccaaaaccaaccaaacaaaaacatcctcacaactccccaggaa

SEQ ID NO: 184761 - DNA, 80 bp, Artificial Sequence
  ENSG00000111676_36 (sequence is synthesized)
ggggaggcggcgagcccggggaggtggggagcagagcggggatcggggtttgctccgggggccggcgggcgattggggcc

SEQ ID NO: 184762 - DNA, 80 bp, Artificial Sequence
  ENSG00000111676_37 (sequence is synthesized)
gtcggggccgccgccgccgtcgtcgcggcggcgactgaggccgagaagaggagaggggggcgggggagctgccgccgccg

SEQ ID NO: 184763 - DNA, 120 bp, Artificial Sequence
  ENSG00000111676_38 (sequence is synthesized)
ctagtggccagtgaggcccgcagcagctcacagcctgcaggggtggttttgaggcgggggctacaagcactcgccggggccgcggcgctgcgggctccatcgggcagctcgcaccgcctg

SEQ ID NO: 184764 - DNA, 120 bp, Artificial Sequence
  ENSG00000111676_39 (sequence is synthesized)
ggggacatgggctcagcgagcctgggaggagctgtgggcatggtacggctgggcaccgtgctcctgggggagggaacccctcctctcccaaccccttcggtaagagggggcaaggtcaga

SEQ ID NO: 184765 - DNA, 120 bp, Artificial Sequence
  ENSG00000111678_0 (sequence is synthesized)
cctttccgctcccaggggcgttgggaacggttgtaggacgtggctctttattcgtgagttttccatttacctccgctgaacctagagcttcagacgccctatggcgtccgcctcgaccca

SEQ ID NO: 184766 - DNA, 120 bp, Artificial Sequence
  ENSG00000111678_1 (sequence is synthesized)
accggcggccttgagcgctgagcaagcaaaggtggtcctcgcggaggtgatccaggcgttctccgccccggagaatgcagtgcgcatggacgaggctcgggataacgcctgcaacgacat

SEQ ID NO: 184767 - DNA, 120 bp, Artificial Sequence
  ENSG00000111678_2 (sequence is synthesized)
cggggaaggtgtccttaagtttgctcgcttggtcaagtcctacgaagcccaggatcctgagatcgccagcctgtcaggcaagctgaaggcgctgtttctgccgcccatgaccctgccacc

SEQ ID NO: 184768 - DNA, 120 bp, Artificial Sequence
  ENSG00000111678_3 (sequence is synthesized)
ccatgggcctgctgctggtggcagcgtggccgcctcctgagagttggccctcccttgtgccactgccaggggaggaaaggccttgatgttccagacaataataaatgcgcctgtgactta

SEQ ID NO: 184769 - DNA, 120 bp, Artificial Sequence
  ENSG00000111678_4 (sequence is synthesized)
gacaacggcttttgctctgggcctttactgccgaatccaggtctccgggcttaacaacaacgaaggggctgtgactggctgctttctcaaccaatcagcaccgaactcatttgcatgggc

SEQ ID NO: 184770 - DNA, 120 bp, Artificial Sequence
  ENSG00000111678_5 (sequence is synthesized)
atggcgtccgcctcgacccaaccggcggccttgagcgctgagcaagcaaaggcctcaatccactaattccttgcgctctccgctgggcccgctgtctgttctccgacgcctacccgggac

SEQ ID NO: 184771 - DNA, 69 bp, Artificial Sequence
  ENSG00000111678_6 (sequence is synthesized)
agagtcctgaaacctttccgtggaatactttaagaaacggttatgaggccaggcgcgacggctcacgct

SEQ ID NO: 184772 - DNA, 73 bp, Artificial Sequence
  ENSG00000111678_7 (sequence is synthesized)
gttcaaacattagctgggcatggtggcgcgcgcctgtcgtcccagcgacttgggaggttgaggcaggagaatc

SEQ ID NO: 184773 - DNA, 120 bp, Artificial Sequence
  ENSG00000111678_8 (sequence is synthesized)
tgcccgtggccacgcagatccagcaggaggttatcaaagcctatggcttcagctgcgacggggaaggtgggtcagacgcgggaaggcgggtcagacgcgggaaggcgggagttgggtcgg

SEQ ID NO: 184774 - DNA, 120 bp, Artificial Sequence
  ENSG00000111678_9 (sequence is synthesized)
gagagggcgccggatctgtgggcccatgagcggttgtcccctttctcgccacacggcggcagccacaatctgactaacattcttggcactcagagcccagggtctaccctgagcttgtgc

SEQ ID NO: 184775 - DNA, 120 bp, Artificial Sequence
  ENSG00000111678_10 (sequence is synthesized)
gtccgagttgcgttttgtacagtagaggttctgtatcccttacccgaaatggttgggaccggaagtgtttcgggttttttcagatttcggaatatttacatatacatggatatcttgggg

SEQ ID NO: 184776 - DNA, 120 bp, Artificial Sequence
  ENSG00000111678_11 (sequence is synthesized)
gatgggacctaaatctgaacacgaaattgttttgtttcatatacacgcaccttatgcacatagcctgagggtaattttatataatagtctgaataattttgtgcatgagacaaagttttg

SEQ ID NO: 184777 - DNA, 120 bp, Artificial Sequence
  ENSG00000111678_12 (sequence is synthesized)
agtgttacagctcttttagaatttgtctagtaggctttctggctttttaccggaaagcccctcttatgatgtttgttgccaatgatagattgttttcactgtgcaaaaattatgggtagt

SEQ ID NO: 184778 - DNA, 120 bp, Artificial Sequence
  ENSG00000111679_0 (sequence is synthesized)
attggcctggcaggcaggatcgaggaggaagtggctgattactgagcggttcttcctcacctggcttgggccactgtgcacagctgtgccgctggctcagccccgccccctgcggccctc

SEQ ID NO: 184779 - DNA, 120 bp, Artificial Sequence
  ENSG00000111679_1 (sequence is synthesized)
tgccgtggcttccccctccctacagagagatgctgtcccgtgggtggtttcaccgagacctcagtgggctggatgcagagaccctgctcaagggccgaggtgtccacggtagcttcctgg

SEQ ID NO: 184780 - DNA, 120 bp, Artificial Sequence
  ENSG00000111679_2 (sequence is synthesized)
ctcggcccagtcgcaagaaccagggtgacttctcgctctccgtcagggtgggggatcaggtgacccatattcggatccagaactcaggggatttctatgacctgtatggaggggagaagt

SEQ ID NO: 184781 - DNA, 120 bp, Artificial Sequence
  ENSG00000111679_3 (sequence is synthesized)
ttgcgactctgacagagctggtggagtactacactcagcagcagggtgtcctgcaggaccgcgacggcaccatcatccacctcaagtacccgctgaactgctccgatcccactagtgaga

SEQ ID NO: 184782 - DNA, 120 bp, Artificial Sequence
  ENSG00000111679_4 (sequence is synthesized)
ggtggtaccatggccacatgtctggcgggcaggcagagacgctgctgcaggccaagggcgagccctggacgtttcttgtgcgtgagagcctcagccagcctggagacttcgtgctttctg

SEQ ID NO: 184783 - DNA, 120 bp, Artificial Sequence
  ENSG00000111679_5 (sequence is synthesized)
tgctcagtgaccagcccaaggctggcccaggctccccgctcagggtcacccacatcaaggtcatgtgcgagggtggacgctacacagtgggtggtttggagaccttcgacagcctcacgg

SEQ ID NO: 184784 - DNA, 120 bp, Artificial Sequence
  ENSG00000111679_6 (sequence is synthesized)
acctggtggagcatttcaagaagacggggattgaggaggcctcaggcgcctttgtctacctgcggcagccgtactatgccacgagggtgaatgcggctgacattgagaaccgagtgttgg

SEQ ID NO: 184785 - DNA, 120 bp, Artificial Sequence
  ENSG00000111679_7 (sequence is synthesized)
aactgaacaagaagcaggagtccgaggatacagccaaggctggcttctgggaggagtttgagagtttgcagaagcaggaggtgaagaacttgcaccagcgtctggaagggcagcggccag

SEQ ID NO: 184786 - DNA, 120 bp, Artificial Sequence
  ENSG00000111679_8 (sequence is synthesized)
aaccagctgctaggccctgatgagaacgctaagacctacatcgccagccagggttgtctggaggccacggtcaatgacttctggcagatggcgtggcaggagaacagccgtgtcatcgtc

SEQ ID NO: 184787 - DNA, 120 bp, Artificial Sequence
  ENSG00000111679_9 (sequence is synthesized)
atgaccacccgagaggtggagaaaggccggaacaaatgcgtcccatactggcccgaggtgggcatgcagcgtgcttatgggccctactctgtgaccaactgcggggagcatgacacaacc

SEQ ID NO: 184788 - DNA, 120 bp, Artificial Sequence
  ENSG00000111679_10 (sequence is synthesized)
gaatacaaactccgtaccttacaggtctccccgctggacaatggagacctgattcgggagatctggcattaccagtacctgagctggcccgaccatggggtccccagtgagcctgggggt

SEQ ID NO: 184789 - DNA, 120 bp, Artificial Sequence
  ENSG00000111679_11 (sequence is synthesized)
gtcctcagcttcctggaccagatcaaccagcggcaggaaagtctgcctcacgcagggcccatcatcgtgcactgcagcgccggcatcggccgcacaggcaccatcattgtcatcgacatg

SEQ ID NO: 184790 - DNA, 120 bp, Artificial Sequence
  ENSG00000111679_12 (sequence is synthesized)
ctcatggagaacatctccaccaagggcctggactgtgacattgacatccagaagaccatccagatggtgcgggcgcagcgctcgggcatggtgcagacggaggcgcagtacaagttcatc

SEQ ID NO: 184791 - DNA, 120 bp, Artificial Sequence
  ENSG00000111679_13 (sequence is synthesized)
tacgtggccatcgcccagttcattgaaaccactaagaagaagctggaggtcctgcagtcgcagaagggccaggagtcggagtacgggaacatcacctatcccccagccatgaagaatgcc

SEQ ID NO: 184792 - DNA, 120 bp, Artificial Sequence
  ENSG00000111679_14 (sequence is synthesized)
catgccaaggcctcccgcacctcgtccaaacacaaggaggatgtgtatgagaacctgcacactaagaacaagagggaggagaaagtgaagaagcagcggtcagcagacaaggagaagagc

SEQ ID NO: 184793 - DNA, 120 bp, Artificial Sequence
  ENSG00000111679_15 (sequence is synthesized)
aagggttccctcaagaggaagtgagcggtgctgtcctcaggtggccatgcctcagccctgaccctgtggaagcatttcgcgatggacagactcacaacctgaacctaggagtgccccatt

SEQ ID NO: 184794 - DNA, 120 bp, Artificial Sequence
  ENSG00000111679_16 (sequence is synthesized)
cttttgtaatttaaatggctgcatcccccccacctctccctgaccctgtatatagcccagccaggccccaggcagggccaacccttctcctcttgtaaataaagccctgggatcactgtg

SEQ ID NO: 184795 - DNA, 120 bp, Artificial Sequence
  ENSG00000111679_17 (sequence is synthesized)
agtggagtggcagccccagaactgggaccaccgggggtggtgaggcggcccggcactgggagctgcatctgaggcttagtccctgagctctctgcctgcccagactagctgcacctcctc

SEQ ID NO: 184796 - DNA, 120 bp, Artificial Sequence
  ENSG00000111679_18 (sequence is synthesized)
agctctctgcctgcccagactagctgcacctcctcattccctgcgcccccttcctctccggaagcccccaggatggtgaggtaagggcctgccacccacggtagacaggaggcaagggtg

SEQ ID NO: 184797 - DNA, 120 bp, Artificial Sequence
  ENSG00000111679_19 (sequence is synthesized)
taggtgggccccccgcaaccccgggcattttggccactctcttgtgccatccaggccctgaaccactcattcctggttccccgtggcagtgctgactccccgtctgttcccttgccccca

SEQ ID NO: 184798 - DNA, 120 bp, Artificial Sequence
  ENSG00000111679_20 (sequence is synthesized)
acccccacactccccatccctgtctgtgcccacccatgcccatgtgtgcccccacccaggacctcagccgatccctgccctcctgcctctactcctgcaccgactggcctcaccgcctgg

SEQ ID NO: 184799 - DNA, 120 bp, Artificial Sequence
  ENSG00000111679_21 (sequence is synthesized)
gatgagccggctcccaccctgaacagccagggaggcagggagactggcagccggcgctgcctaccctccatcccctcccctccctgcaccagctggggctctcaatgtccctcctccctg

SEQ ID NO: 184800 - DNA, 120 bp, Artificial Sequence
  ENSG00000111679_22 (sequence is synthesized)
tcctgggacctggtgtctcagagcctaacctaccaccctttccacctaaccccgaggaagccacagaaagctgcctcgccctactccgggagccctggccgctgcaacccaggtcccact

SEQ ID NO: 184801 - DNA, 120 bp, Artificial Sequence
  ENSG00000111679_23 (sequence is synthesized)
ggagacagggaggccactgctggtggccagcatgtcgtgcaggccagctctgttgttagaaagctcttcttcctctggaatcgagcctgccttcctccgtctgcccctcaccccagcaca

SEQ ID NO: 184802 - DNA, 120 bp, Artificial Sequence
  ENSG00000111679_24 (sequence is synthesized)
tgttaggacagtgaggagctgacactggggtgaagatggggatgaatgcttgccaagacacttgatgccttgtcccagccgccccgtggggatgggtctgtcctgtggggtcaaataggt

SEQ ID NO: 184803 - DNA, 120 bp, Artificial Sequence
  ENSG00000111679_25 (sequence is synthesized)
ctccggcccaaacagagatcattgagagcacgatgtgaagtgttcacctgtgtaaagtgtctcacgctgtcccgggcacagagtaatactccaggcatttccttcctgtggcctccccga

SEQ ID NO: 184804 - DNA, 120 bp, Artificial Sequence
  ENSG00000111679_26 (sequence is synthesized)
ctcctcctgtggtctcccaaaggcatgggctgggggctgggggctctgaatgctcctcatgacaccatggctcctttcagcagccgcatctcaatgccagatccccttagagtaaagggc

SEQ ID NO: 184805 - DNA, 120 bp, Artificial Sequence
  ENSG00000111679_27 (sequence is synthesized)
agcggaataacgctagggggttttcacatgcacccctgggccaagccgacttgcccttgccgtggatccctgcattcatggatcggttattgaaatgatcgggaaccttgctcctgccag

SEQ ID NO: 184806 - DNA, 120 bp, Artificial Sequence
  ENSG00000111679_28 (sequence is synthesized)
cttgcagcctctctgagattcgggcctccaaactgcatcaatatttttggtcaaggcactgattgaaacttagagctggattcggtcacggtgcagccctgtggcccacctgggaggcct

SEQ ID NO: 184807 - DNA, 120 bp, Artificial Sequence
  ENSG00000111679_29 (sequence is synthesized)
cctttcctggatcggcctccttcaaggccttccctctctctgtgagcctcacatggctggctccgtgtctgccccctgcccttcctcttccccaccgcaacactcagggggcttttggca

SEQ ID NO: 184808 - DNA, 120 bp, Artificial Sequence
  ENSG00000111679_30 (sequence is synthesized)
ccgagaccctctaaagctcatgtcctctctttctccttgcctccagccaggagaggaggacgggctgaccagtgcctggaggtggaagagaggagcagggccccaggaggcccctgcaga

SEQ ID NO: 184809 - DNA, 120 bp, Artificial Sequence
  ENSG00000111679_31 (sequence is synthesized)
ccatggccacatgtctggcgggcaggcagagacgctgctgcaggctccccgctcagggtcacccacatcaaggtcatgtgcgagggtggacgctacacagtgggtggtttggagaccttc

SEQ ID NO: 184810 - DNA, 120 bp, Artificial Sequence
  ENSG00000111679_32 (sequence is synthesized)
gtccaagagcttggagtctagtgcagggaccgtggctgcgtcacctgtgagacggggtggccagaggggactgccagtgccgggtccccctgtgctgtctcctgacctgcaccaactgcc

SEQ ID NO: 184811 - DNA, 120 bp, Artificial Sequence
  ENSG00000111679_33 (sequence is synthesized)
ccttgctgtgctctaaaacgagaagtacaaactagctgcacctcctcattccctgcgcccccttcctctccggaagcccccaggatggtgaggtggtttcaccgagacctcagtgggctg

SEQ ID NO: 184812 - DNA, 120 bp, Artificial Sequence
  ENSG00000111679_34 (sequence is synthesized)
gaccagtgcctggaggtggaagagaggagcagggccccaggaggcccctgcagaggaggctgaggcctgggttcaaggagaagagagaagagagagaaggaagggagggcagtgccgggg

SEQ ID NO: 184813 - DNA, 120 bp, Artificial Sequence
  ENSG00000111679_35 (sequence is synthesized)
cgggaggttaagaccagggaagccgcactggaggcccttttgggtgacccgtcccaggagccagtgtcacccctgagcctgggagtgtgtgagaggctctttctcccaggttctgctgtg

SEQ ID NO: 184814 - DNA, 120 bp, Artificial Sequence
  ENSG00000111679_36 (sequence is synthesized)
gaaacttcctactgcactgctcccctgagtcccctgaccctgtgcccccgcaccctgctgtctcagggctatcctttccctgacgtcagggtttgaaggaaaagggaagtgaagccatgc

SEQ ID NO: 184815 - DNA, 120 bp, Artificial Sequence
  ENSG00000111679_37 (sequence is synthesized)
tgagagacgctccataactccttcagggagaggcggggagggctcagggtacctgggagccggcaggacagtggtgggatttgggggtcccaggtcttccggggtgggggcagccactca

SEQ ID NO: 184816 - DNA, 120 bp, Artificial Sequence
  ENSG00000111679_38 (sequence is synthesized)
ctaggagtgaggagtcggcgcgaggagtggaggagggaaggatggtggcagctggggagccagcgtcagcaccgcagagcccgaggtggagcgtgtccatgcagagctgggcaaacctcc

SEQ ID NO: 184817 - DNA, 120 bp, Artificial Sequence
  ENSG00000111679_39 (sequence is synthesized)
ggctggagctgagcgctgggtaccccccttcccggggagggcttgactggcctctgatggcacccccgtctttccccagcgccggcatcggccgcacaggcaccatcattgtcatcgaca

SEQ ID NO: 184818 - DNA, 120 bp, Artificial Sequence
  ENSG00000111684_0 (sequence is synthesized)
gcattcggggcgcgcggagctggggggtccctgtggggctcccggagttaagatggcgtcctcagcggagggggacgaggggactgtggtggcgctggcgggggttctgcagtcgggttt

SEQ ID NO: 184819 - DNA, 120 bp, Artificial Sequence
  ENSG00000111684_1 (sequence is synthesized)
ccaggagctgagccttaacaagttggcgacgtccctgggcgcgtcagaacaggcgctgcggctgatcatctccatcttcctgggttacccctttgctttgttttatcggcattacctttt

SEQ ID NO: 184820 - DNA, 120 bp, Artificial Sequence
  ENSG00000111684_2 (sequence is synthesized)
ctacaaggagacctacctcatccacctcttccatacctttacaggcctctcaattgcttattttaactttggaaaccagctctaccactccctgctgtgtattgtgcttcagttcctcat

SEQ ID NO: 184821 - DNA, 120 bp, Artificial Sequence
  ENSG00000111684_3 (sequence is synthesized)
ccttcgactaatgggccgcaccatcactgccgtcctcactaccttttgcttccagatggcctaccttctggctggatactattacactgccaccggcaactacgatatcaagtggacaat

SEQ ID NO: 184822 - DNA, 120 bp, Artificial Sequence
  ENSG00000111684_4 (sequence is synthesized)
gccacattgtgttctgactttgaagctgattggtttggctgttgactactttgacggagggaaagatcagaattccttgtcctctgagcaacagaaatatgccatacgtggtgttccttc

SEQ ID NO: 184823 - DNA, 120 bp, Artificial Sequence
  ENSG00000111684_5 (sequence is synthesized)
cctgctggaagttgctggtttctcctacttctatggggccttcttggtagggccccagttctcaatgaatcactacatgaagctggtgcagggagagctgattgacataccaggaaagat

SEQ ID NO: 184824 - DNA, 120 bp, Artificial Sequence
  ENSG00000111684_6 (sequence is synthesized)
accaaacagcatcattcctgctctcaagcgcctgagtctgggccttttctacctagtgggctacacactgctcagcccccacatcacagaagactatctcctcactgaagactatgacaa

SEQ ID NO: 184825 - DNA, 120 bp, Artificial Sequence
  ENSG00000111684_7 (sequence is synthesized)
ccaccccttctggttccgctgcatgtacatgctgatctggggcaagtttgtgctgtacaaatatgtcacctgttggctggtcacagaaggagtatgcattttgacgggcctgggcttcaa

SEQ ID NO: 184826 - DNA, 120 bp, Artificial Sequence
  ENSG00000111684_8 (sequence is synthesized)
tggctttgaagaaaagggcaaggcaaagtgggatgcctgtgccaacatgaaggtgtggctctttgaaacaaacccccgcttcactggcaccattgcctcattcaacatcaacaccaacgc

SEQ ID NO: 184827 - DNA, 120 bp, Artificial Sequence
  ENSG00000111684_9 (sequence is synthesized)
attcctggccctctggcacggcctgcactcaggatacctggtctgcttccagatggaattcctcattgttattgtggaaagacaggctgccaggctcattcaagagagccccaccctgag

SEQ ID NO: 184828 - DNA, 120 bp, Artificial Sequence
  ENSG00000111684_10 (sequence is synthesized)
caagctggccgccattactgtcctccagcccttctactatttggtgcaacagaccatccactggctcttcatgggttactccatgactgccttctgcctcttcacgtgggacaaatggct

SEQ ID NO: 184829 - DNA, 120 bp, Artificial Sequence
  ENSG00000111684_11 (sequence is synthesized)
taaggtgtataaatccatctatttccttggccacatcttcttcctgagcctactattcatattgccttatattcacaaagcaatggtgccaaggaaagagaagttaaagaagatggaata

SEQ ID NO: 184830 - DNA, 120 bp, Artificial Sequence
  ENSG00000111684_12 (sequence is synthesized)
atccatttccctggtggcctgtgcgggactggtgcagaaactactcgtctcccttttcacagcactcctttgccccagagcagagaatggaaaagccagggaggtggaagatcgatgctt

SEQ ID NO: 184831 - DNA, 120 bp, Artificial Sequence
  ENSG00000111684_13 (sequence is synthesized)
ccagctgtgcctctgctgccagccaagtcttcatttggggccaaaggggaaacttttttttggagaaggcgtcttgctttgtcacccacgctggaatgcagtggcgggatctcagctcac

SEQ ID NO: 184832 - DNA, 120 bp, Artificial Sequence
  ENSG00000111684_14 (sequence is synthesized)
gggaggagcagaggggctcacatctcccctctgattcccccatgcacattgccttatctctccccatctagccaggaatctattgtgtttttcttctgccaatttactatgattgtgtat

SEQ ID NO: 184833 - DNA, 120 bp, Artificial Sequence
  ENSG00000111684_15 (sequence is synthesized)
gtgccgctaccaccaccccccccatgggggggtggagaggggtgcaaggccctgcctgctccactttttctaccttggaactgtattagataaaatcacttctgtttgttcagtttttca

SEQ ID NO: 184834 - DNA, 120 bp, Artificial Sequence
  ENSG00000111684_16 (sequence is synthesized)
gcagaaccccctgtcgctcacactgactttgacccccacctatacccccctcccaaaaaaaccattactgtcatatttgaaaaaaaggcaagatataaaagtgcgttaagacctgggtgt

SEQ ID NO: 184835 - DNA, 120 bp, Artificial Sequence
  ENSG00000111684_17 (sequence is synthesized)
tactccagctctgccaatggacttatgtcctccactgccctgtttatcaacagctttacttgtttgtccccaccactagagtgtgggcagcttgagtagagtgtctggttcaccactgat

SEQ ID NO: 184836 - DNA, 120 bp, Artificial Sequence
  ENSG00000111684_18 (sequence is synthesized)
gctgctgaaccaagtggctcgtgcgcacacggtctccagctccgccttgggtctgctttccatctctaaaagtaatcagtcagcactgcctcctgtaccctctgggggctacacgtggga

SEQ ID NO: 184837 - DNA, 120 bp, Artificial Sequence
  ENSG00000111684_19 (sequence is synthesized)
acccaccagcactccaatccaatcctcagggtgaggacccagaggcaggtggcgggatgcaaggaccagtcagtttgagggtcgccccacccacccttttctccagctacatcttcaaac

SEQ ID NO: 184838 - DNA, 120 bp, Artificial Sequence
  ENSG00000111684_20 (sequence is synthesized)
ttgtggaaagacaggtaggcctccagggtgggggtgaaggggaatataagggacaagatgctgatgagctcctcctccctccccaggctgccaggctcattcaagagagccccaccctga

SEQ ID NO: 184839 - DNA, 120 bp, Artificial Sequence
  ENSG00000111684_21 (sequence is synthesized)
ggctgtgccaggtgcacatttagcacccgttgccttctctaggagccgctcctagcttgccttatcacatccacgtgacccctcagagcacagcagcttctgattctccatcctattttc

SEQ ID NO: 184840 - DNA, 120 bp, Artificial Sequence
  ENSG00000111684_22 (sequence is synthesized)
ttctcttgactgatacatttgggcacttctagggaattcagaaaccaagggaaggggggaagtgctggcttttgctcctgcccagctgaaaggcttgaaaacagttcagtaattctgggc

SEQ ID NO: 184841 - DNA, 120 bp, Artificial Sequence
  ENSG00000111684_23 (sequence is synthesized)
aggtttctctccttaaattaaaatccaatatgggcccctctgtacttaacattccaaatgctcattccaaacactttgccaacgaaggcaaacagtagagaagttaaatacagtgctgcc

SEQ ID NO: 184842 - DNA, 120 bp, Artificial Sequence
  ENSG00000111684_24 (sequence is synthesized)
cttgaggctctccaagggaaaggcgaatgaatattctccaggccctctgcttattcctctctgcctattgtgaaggcaatcaggccagactattgagggcatctggcagcaggactcagg

SEQ ID NO: 184843 - DNA, 120 bp, Artificial Sequence
  ENSG00000111684_25 (sequence is synthesized)
ctcttctgaaagctgcattctccagcatgaccctggcatagagacctgagtcatgcaggccctggactgttgtaacaggcactctgtgccaggagtgggccctttttagtttagggttct

SEQ ID NO: 184844 - DNA, 120 bp, Artificial Sequence
  ENSG00000111684_26 (sequence is synthesized)
tccagttatccattctaacactagtacaaacataaaaatccacatttatgccacaggattttgcctgaaccagtcacatttctgcctttaaagcctattttcatgtatatatgaaatata

SEQ ID NO: 184845 - DNA, 120 bp, Artificial Sequence
  ENSG00000111684_27 (sequence is synthesized)
acatgtaggtccctcccccatctcactaaaaacttcctcggcaccccccctccgccccccgccatacacttctggctgcactcagtctacaggccacatcctcagtgtcctctcccacca

SEQ ID NO: 184846 - DNA, 120 bp, Artificial Sequence
  ENSG00000111684_28 (sequence is synthesized)
ccctacccatccgttctctctctgctcaggtttggctgttgactactttgacggagggaaagatcaggtaagtacccattcatcggcagagaggttcaagacttaatgaaagggaagaaa

SEQ ID NO: 184847 - DNA, 120 bp, Artificial Sequence
  ENSG00000111684_29 (sequence is synthesized)
gtaaacacaagactggtccactgtctgctgccctgactttcctacaactcttaagaggtttgcagtccccattcctcatagccagccatagaaatctttccctgaaacaggaaacacttt

SEQ ID NO: 184848 - DNA, 120 bp, Artificial Sequence
  ENSG00000111684_30 (sequence is synthesized)
gggcagcagagcttctcatcccattccaggtagacaaccacacccctaaacactcctctccataactgaaggtcagagggtgaagggaatagtctctgctctctgtgaccaggaacttca

SEQ ID NO: 184849 - DNA, 120 bp, Artificial Sequence
  ENSG00000111684_31 (sequence is synthesized)
taacaaaagactgaacccaaattccagagcggagcctctccctcattccccagcctgtgcaatctccctttcagatagcactgagcaaggatcaacaaatctaatttgcccaggatccag

SEQ ID NO: 184850 - DNA, 120 bp, Artificial Sequence
  ENSG00000111684_32 (sequence is synthesized)
ctcttgcacaaagtccagagatcaatgccagcaaggcatttgctaaagcagcaacagccagctatgcacacacatacgcatttccacaagaagcaactatttgtcatcccccaaagagaa

SEQ ID NO: 184851 - DNA, 80 bp, Artificial Sequence
  ENSG00000111696_0 (sequence is synthesized)
agagcgcgggtagatcttgggccgggcagcagcagtcgcagagcggcgcggcggcggtggcggcagcaggcagcaggcat

SEQ ID NO: 184852 - DNA, 120 bp, Artificial Sequence
  ENSG00000111696_1 (sequence is synthesized)
tgcgggaccgcggctcgggggcggccgtgtgcgggccccgcccggcccttgtgcactgcacccgggaccgccccggacatgaagcgctacctgtgggagcgctaccgggaggcgaagaga

SEQ ID NO: 184853 - DNA, 120 bp, Artificial Sequence
  ENSG00000111696_2 (sequence is synthesized)
cgctacctgtgggagcgctaccgggaggcgaagagaagcacagaagaattggttccttccattatgagcaacttgttgaatccagatgccattttctcaaacaatgaaatgagcctgtca

SEQ ID NO: 184854 - DNA, 120 bp, Artificial Sequence
  ENSG00000111696_3 (sequence is synthesized)
gacattgaaatctatggcttcgattatgattacaccttggtgttttattcaaagcacctccacacgctgatatttaatgctgcacgggaccttctcatcaatgaacaccggtatccagca

SEQ ID NO: 184855 - DNA, 120 bp, Artificial Sequence
  ENSG00000111696_4 (sequence is synthesized)
gaaatcaggaagtatgagtatgacccaaattttgcaattcgtggacttcattatgatgtacagcgggcagtattaatgaagatcgatgcttttcattatatccagctgggaactgtctac

SEQ ID NO: 184856 - DNA, 120 bp, Artificial Sequence
  ENSG00000111696_5 (sequence is synthesized)
agaggcctcagtgttgtccctgatgaagaagtcattgaaatgtacgaggggtcccacgtgcccttggagcagatgagtgacttttacggaaagagctctcatggaaacacgatgaagcag

SEQ ID NO: 184857 - DNA, 120 bp, Artificial Sequence
  ENSG00000111696_6 (sequence is synthesized)
ttcatggacatcttctccctgcccgagatgaccctcctgtcctgcgtgaatgaatacttcctcaagaacaacatcgactatgagcctgtgcatctgtacaaagatgtcaaggattcaatt

SEQ ID NO: 184858 - DNA, 120 bp, Artificial Sequence
  ENSG00000111696_7 (sequence is synthesized)
cgagacgtccacatcaaaggaataatgtacagagcaattgaagcagacattgaaaagtacatctgctatgctgagcagacccgcgcagtgttggccaaactggctgatcatggcaagaag

SEQ ID NO: 184859 - DNA, 120 bp, Artificial Sequence
  ENSG00000111696_8 (sequence is synthesized)
atgtttctcatcaccaatagccccagtagctttgtggacaaagggatgagttatatcgttgggaaagactggagggacctgttcgatgtggtcattgttcaggctgagaagccaaacttc

SEQ ID NO: 184860 - DNA, 120 bp, Artificial Sequence
  ENSG00000111696_9 (sequence is synthesized)
tttaatgataagcggaggcctttccgaaagatgaatgagaaaggtgtcttactctgggataaaatccataagttgcagaaaggccagatatacaagcagggtaatttatatgaatttttg

SEQ ID NO: 184861 - DNA, 120 bp, Artificial Sequence
  ENSG00000111696_10 (sequence is synthesized)
aagcttactggatggagaggatccagagtgttgtattttggtgaccatatatacagtgacctggcggatttgaccctaaagcatggctggaggactggtgcaatcatcccagagttgaga

SEQ ID NO: 184862 - DNA, 120 bp, Artificial Sequence
  ENSG00000111696_11 (sequence is synthesized)
tctgagctcaaaatcatgaacacggagcaatacattcaaaccatgacctggctgcagaccttgactggcttattggaacagatgcaggttcacagagatgctgagtcacagctggttttg

SEQ ID NO: 184863 - DNA, 120 bp, Artificial Sequence
  ENSG00000111696_12 (sequence is synthesized)
caggagtggaaaaaggaaaggaaggagatgcgagaaatgaccaagagtttcttcaatgcccagtttggaagcctgttccgcacagaccagaacccaacctacttcctaaggcgcctgtcg

SEQ ID NO: 184864 - DNA, 120 bp, Artificial Sequence
  ENSG00000111696_13 (sequence is synthesized)
cgcttcgctgacatctacatggcgtctctgagctgcctcctgaactatgacgtcagccacactttctacccccggaggactccactgcagcacgaactgcccgcctggtcagaaaggccc

SEQ ID NO: 184865 - DNA, 120 bp, Artificial Sequence
  ENSG00000111696_14 (sequence is synthesized)
cccaccttcggaacccctctcctgcaggaggcccaggccaagtagccaagggcaaaaactagaaactgtaactgcccctgattgggcaggcatgatggggttgacttcatgtgggtctga

SEQ ID NO: 184866 - DNA, 120 bp, Artificial Sequence
  ENSG00000111696_15 (sequence is synthesized)
gtgttgcttttggaaaagatacagataagccttttgatatttattttgtaccttacggagaataattctcccaatggttaagacaggagctagcagcccacccctccagcctttcccccc

SEQ ID NO: 184867 - DNA, 120 bp, Artificial Sequence
  ENSG00000111696_16 (sequence is synthesized)
atgcagggctgaaaggcaagcttcacattggaactctgattttgcctttttgtttactgaggtcctggaacatcaggtttcctgggataggtgagaccacttgatgccatgtctgtattc

SEQ ID NO: 184868 - DNA, 120 bp, Artificial Sequence
  ENSG00000111696_17 (sequence is synthesized)
tagcaggtcaagcttgaaacggttcttgactcctccatggaacatttcctgaacatttacgggctatgcattgggaactgcaggggcacagtgatgggcaaagattagctgcttccagaa

SEQ ID NO: 184869 - DNA, 120 bp, Artificial Sequence
  ENSG00000111696_18 (sequence is synthesized)
ggctgatttcgtgggctccacaatggtaaaacgctgctgtgagtggcagagaggttccccaggtgatggccagttcccaaatcatttggtactaaggctttgacattctggcacatcaca

SEQ ID NO: 184870 - DNA, 120 bp, Artificial Sequence
  ENSG00000111696_19 (sequence is synthesized)
tcaaatagaacacagcctccctggaaggacttaagtgagaaagaacaagagaagctgcaactcctggacccttttgtcctcagtgtgtggttcctgcgtccttccccagcatggaggagg

SEQ ID NO: 184871 - DNA, 120 bp, Artificial Sequence
  ENSG00000111696_20 (sequence is synthesized)
gcaggagagaggagatgagagctctggtcaaaacctgccagctagtggaacagccttctgtagagccttctgcaagaaacgagtgggtttgaagaaccaaaacatttgtggtaggtctcc

SEQ ID NO: 184872 - DNA, 120 bp, Artificial Sequence
  ENSG00000111696_21 (sequence is synthesized)
caggagcttgttaaacctggaaacaccacctgagttggtttcatctgctcattggaagaaagaaaatgaaccaggaaaaagcatctttgtcatgaaatgctatgccatgccacccaccca

SEQ ID NO: 184873 - DNA, 120 bp, Artificial Sequence
  ENSG00000111696_22 (sequence is synthesized)
gttgaattggaatcctgttaaaacatgagatttaccagaaacagtcctttgtctagatggaaacaaacaagatcctggcttctctctaatgagttaccaactgagaggtgcttggattgg

SEQ ID NO: 184874 - DNA, 120 bp, Artificial Sequence
  ENSG00000111696_23 (sequence is synthesized)
ccaggggaggaggaagatggccaccacaacttagccatgtccagccttctcttagatttcactcctgtgatgtttgtgcgactatttgggagtttgtgtagtttgttttttttttttttg

SEQ ID NO: 184875 - DNA, 120 bp, Artificial Sequence
  ENSG00000111696_24 (sequence is synthesized)
ttttgttttgtttttttttagatgtctaagatgggaaagggcgaaggacattgaagctaaggaatagatatgacctagctaaccaagcttttctcatttccttctgttttgttttgttga

SEQ ID NO: 184876 - DNA, 120 bp, Artificial Sequence
  ENSG00000111696_25 (sequence is synthesized)
aggtgtgagccaccgcacctggcctgcttttttcatttctttctaggggcaatgcaagtggcatgtattccttttgttggagggaagaatccttaattgcacctgcatttgtagtatcct

SEQ ID NO: 184877 - DNA, 120 bp, Artificial Sequence
  ENSG00000111696_26 (sequence is synthesized)
gcatttgtagtatccttcaatgtaaagtgcatatttactgcactctctgagtgctatgggaatgtctgctgttattagttatggggctgctaatactgttttaattgcatatgctatatc

SEQ ID NO: 184878 - DNA, 120 bp, Artificial Sequence
  ENSG00000111696_27 (sequence is synthesized)
aatacttctgttcagattagcctaatctagtattgctaaaactcattttaagcttttgcggtaacttgtatatattcttaaatctaaaggatggcaggaacatgaggggagcttgtggag

SEQ ID NO: 184879 - DNA, 120 bp, Artificial Sequence
  ENSG00000111696_28 (sequence is synthesized)
ccatctattgatgaaatccaagtctggcattccatgggctccttgccagatggcagaaacttaatgagttatatagcatcctttgtaatgctgcttgttatagttggaatgtacttgtga

SEQ ID NO: 184880 - DNA, 120 bp, Artificial Sequence
  ENSG00000111696_29 (sequence is synthesized)
tatttggctgtatttaactataatggtgaaggtgaccctttagatccaataaggcttctccccatcttctacattttgttatgaacacagtaaggcacagtagtatgttctttttttgga

SEQ ID NO: 184881 - DNA, 120 bp, Artificial Sequence
  ENSG00000111696_30 (sequence is synthesized)
acagggtaggcattttgtttattgtttgcttgcttctaggtgttttcgccatcagggtgtattggaggctgacacttaatgggtgtgtgttgcgcccagaactgctcggtgtcggggttc

SEQ ID NO: 184882 - DNA, 120 bp, Artificial Sequence
  ENSG00000111696_31 (sequence is synthesized)
taaaagaatgcgctggtgttcttggcttcaagtttctgctttggagaagcagattcaggaagtaggtgttgcttaaaaataattcttggtttttatctaatcagatattcattgattacc

SEQ ID NO: 184883 - DNA, 120 bp, Artificial Sequence
  ENSG00000111696_32 (sequence is synthesized)
taccaggtgccagttatagggtgttttgtttactcaagaatgaagtagaactatttttaaaacctgtttccatgagtgttcacgttaggtgacctaagctttgaaggagaaaaacatttt

SEQ ID NO: 184884 - DNA, 120 bp, Artificial Sequence
  ENSG00000111696_33 (sequence is synthesized)
tgggtatgaataatgagttttgtaatcaattcccagttagaagaatttcagtctctgggccattgagcttggcagtgttgagatctcccatgtgacagaagcctgacatctgggccacca

SEQ ID NO: 184885 - DNA, 120 bp, Artificial Sequence
  ENSG00000111696_34 (sequence is synthesized)
aggctcactgactgtgtaccttgcagactgtagacccatgtcgtggcggtaacggggccgaacacagtcattcccatgtgaacgatggaggcacatcccactttattattaatccttgta

SEQ ID NO: 184886 - DNA, 120 bp, Artificial Sequence
  ENSG00000111696_35 (sequence is synthesized)
tccttgtatatactcagtcaggacagattttaacttgtcgctgtcatgactttttttttttttttttgaggcaaggtctcgctctgttgcccattctggagtgcagtggtgtgatctcgg

SEQ ID NO: 184887 - DNA, 82 bp, Artificial Sequence
  ENSG00000111696_36 (sequence is synthesized)
ctgcaacctcttgcctcccaggttcaagcaattacatgccaccaggcctggccaagttttgtagttttaatagagatggggt

SEQ ID NO: 184888 - DNA, 86 bp, Artificial Sequence
  ENSG00000111696_37 (sequence is synthesized)
tcaaactcctagcctcaagtgtctgggtgtgagccactgtcatgcctggcctcgtcatgactcttttctctttttttttttttttt

SEQ ID NO: 184889 - DNA, 81 bp, Artificial Sequence
  ENSG00000111696_38 (sequence is synthesized)
tgcctggcctcgtcatgagttttgctctttttgcccaggccggagtgcaatggcacgatcttggctcactccaacctccgc

SEQ ID NO: 184890 - DNA, 87 bp, Artificial Sequence
  ENSG00000111696_39 (sequence is synthesized)
catgactcaactgggatctggcacactgcactgggtgttttgttctctgatgtgcacattgatgaatgcatattggtacaagggaaa

SEQ ID NO: 184891 - DNA, 120 bp, Artificial Sequence
  ENSG00000111696_40 (sequence is synthesized)
tgatgtgcacattgatgaatgcatattggtacaagggaaatgaatctgttttcagccatttaaaaaattgtgttgtaaagcaaacaaaaatagcttgaacatttaaaaattactgtttaa

SEQ ID NO: 184892 - DNA, 120 bp, Artificial Sequence
  ENSG00000111696_41 (sequence is synthesized)
tattgtttgactgattttctaagaattatgtgaacaatgatgagtccagggcagcagccatcacaaatatgacagtccagcaaggcccatggaggtccctttggaagggacttgcacagc

SEQ ID NO: 184893 - DNA, 120 bp, Artificial Sequence
  ENSG00000111696_42 (sequence is synthesized)
tgattttctttttccagtgttgtttttacgggtgaaacgtggcttttgaaatactttagttgtttggcttagagctcccactttccccctaacatagtgcctgtctgttttttaaaacat

SEQ ID NO: 184894 - DNA, 120 bp, Artificial Sequence
  ENSG00000111696_43 (sequence is synthesized)
tttacccttcggcactattttctgctattcccattaatattatgtaacataaaccacttgctactgatttgggcatattacagactacaattactagttgctttgaatgcattggcactc

SEQ ID NO: 184895 - DNA, 120 bp, Artificial Sequence
  ENSG00000111696_44 (sequence is synthesized)
ttaattattgcaaaggagaattgaaaagtagtcttgtggtcctagttaatttagctttgggcaaactaagtggcttttcttctgtcctcttctcaaaaggccttttaagcagcagagact

SEQ ID NO: 184896 - DNA, 120 bp, Artificial Sequence
  ENSG00000111696_45 (sequence is synthesized)
gggctaaatactggaactgaattccacttttctgcctgctcatttgctgccaaagaccacttggggctccttgtctagaatgctctaagacgaaatttggccagacacagggttccttga

SEQ ID NO: 184897 - DNA, 120 bp, Artificial Sequence
  ENSG00000111696_46 (sequence is synthesized)
ttgttctgttcaactaatagagaacctacattttgccttcttaatatcgactttcttttgtaccaggtttttctttctttcttttttgccttaggagcttagctcaaagttcagctaacc

SEQ ID NO: 184898 - DNA, 120 bp, Artificial Sequence
  ENSG00000111696_47 (sequence is synthesized)
tttgacactactagtgtcatttagtaacagtaatctttgacactactagtgtcatttaggagcttagctcaaagttcagctaacctttgacactgctagtgcgttcaagaaagggtaggg

SEQ ID NO: 184899 - DNA, 120 bp, Artificial Sequence
  ENSG00000111696_48 (sequence is synthesized)
aatgaagtacccttaatgcagggtcagcaaacttttcctgtaaaaggccagataggaagtatttttggctttttgggctgtttgcttttgctactactactgtgggaatgaccatggtca

SEQ ID NO: 184900 - DNA, 120 bp, Artificial Sequence
  ENSG00000111696_49 (sequence is synthesized)
tggctgtgttccagcacaacttgatttaccaagacaagctgtgggctgtatttggtcctcaggctgtggcttgctagcccctgctctaatggattgtgttggcggcaatggcaagattcc

SEQ ID NO: 184901 - DNA, 120 bp, Artificial Sequence
  ENSG00000111696_50 (sequence is synthesized)
cttgctgagaacatgcagatgaataaccttatagctgggatgcagagaggagaaagttctgtaggtaataagtgcactgtattccctctgagctacttcctgggcatagttacatgtatg

SEQ ID NO: 184902 - DNA, 120 bp, Artificial Sequence
  ENSG00000111696_51 (sequence is synthesized)
gccagtgtgtgtacttgagccatcaggctcagacacttgttgaatatacctctcattgcattagtttgtaattgtgctagtgctgggtgctgagctcagctgcccggatgacctttccag

SEQ ID NO: 184903 - DNA, 120 bp, Artificial Sequence
  ENSG00000111696_52 (sequence is synthesized)
actgaaggacatactcccctaacagctgggagtgctgctggctggccatttacttccagcccttatgaggagtttcccctgctgaagagccctgcctgccccagatcatacccccttcct

SEQ ID NO: 184904 - DNA, 120 bp, Artificial Sequence
  ENSG00000111696_53 (sequence is synthesized)
gcctgtaacccttaccggctccatatggggtacaaagggctggcctcctcaccccaacttgggaaaccctctggggccatcccagctccagagccccttgtggggtcagtgagacctcat

SEQ ID NO: 184905 - DNA, 120 bp, Artificial Sequence
  ENSG00000111696_54 (sequence is synthesized)
tgtggccacattacagcccagtgcctctccctgacaagcctgtacccagccggctcagcccacagcactgtcctatgaaccttcctgcacgccattctccacctcagtatctgctttcgg

SEQ ID NO: 184906 - DNA, 120 bp, Artificial Sequence
  ENSG00000111696_55 (sequence is synthesized)
ggaacccaacctgcgacagtgcttctgtgtgttttcagtcctgcaggtttgaactctgactttggagacttttccagttatctcgtggaatgacagattgtgcctgtatgatatcaggca

SEQ ID NO: 184907 - DNA, 120 bp, Artificial Sequence
  ENSG00000111696_56 (sequence is synthesized)
caattaatgcaaattaggcagacctatttattctagatgtgaatttgctatttattttaaatgttgattttatgtgttatgtgactctgaacttattgccaaataaaagtttgaattgta

SEQ ID NO: 184908 - DNA, 120 bp, Artificial Sequence
  ENSG00000111696_57 (sequence is synthesized)
tgatggtggagttttggtttcgggttttttttaggtttttgcagggagctacttcctgtgatagtgaataactggtatttcatagagcagacagcctgtactactccatgtcataatgtt

SEQ ID NO: 184909 - DNA, 120 bp, Artificial Sequence
  ENSG00000111696_58 (sequence is synthesized)
gccaaataggttttaattaaatgtaattcattgaattcagcttggtgaataactaaccattaccatcaaaaagatttgaccctaaagcatggctggaggactggtgcaatcatcccagag

SEQ ID NO: 184910 - DNA, 120 bp, Artificial Sequence
  ENSG00000111696_59 (sequence is synthesized)
atcttctttcttgccacctggcatttgctcctgctggtgttctgccagcgtgcagttttccttcctctctgcttcttgaaatcctacccaccctccatggccaacttgtggtgagtcctc

SEQ ID NO: 184911 - DNA, 120 bp, Artificial Sequence
  ENSG00000111696_60 (sequence is synthesized)
tgctcaccctctcagcctgaaatgctttctcctctttcttctcctggggttcacaggagaagaattgccttgtttcttgtatatacactgtccattgtgtcaaggagtatggacagtgta

SEQ ID NO: 184912 - DNA, 120 bp, Artificial Sequence
  ENSG00000111696_61 (sequence is synthesized)
ttcatcttattcagagctttataaggaattgttcgtcatttcagaagagcacatcctccacaggaggccactcctggtatttgagtcgtgaatcacacccgtgtcagtctgcatttctac

SEQ ID NO: 184913 - DNA, 120 bp, Artificial Sequence
  ENSG00000111696_62 (sequence is synthesized)
tggtcatttccatgaagattatatagacacacgtatgtaagactgtacttactgtctgagtccattcatgctgctataacaaaataccatatgctgatttagcttataaacaacagaaat

SEQ ID NO: 184914 - DNA, 120 bp, Artificial Sequence
  ENSG00000111696_63 (sequence is synthesized)
ttacttctcactgcccaggaggctggcaagtccaagatcaaggtgccggcagatttggtgtctggtgaggcctgtttcctggttcacagatggtgacttctacatggtagataggttgag

SEQ ID NO: 184915 - DNA, 120 bp, Artificial Sequence
  ENSG00000111696_64 (sequence is synthesized)
ggagctctctgaggcctctattataagggcactaatccctttcaggatgcccctcccccttaatcacctcccaaaggcttacaggctcacttaccaccctcctagtgttatcaccttggg

SEQ ID NO: 184916 - DNA, 120 bp, Artificial Sequence
  ENSG00000111696_65 (sequence is synthesized)
gtgttatcaccttgggggtaaagatttcaacacaggaattttgggggtcacaaacattcagaccatagcacttaacctttattttaaaatgtcagccaggtgcagtggctcatgcttgta

SEQ ID NO: 184917 - DNA, 88 bp, Artificial Sequence
  ENSG00000111696_66 (sequence is synthesized)
aatttgagaccagcctgggtaaccacattagttgggtttggtgatgggtgcctatagcagcagctacttgggaggctgaggctggagg

SEQ ID NO: 184918 - DNA, 64 bp, Artificial Sequence
  ENSG00000111696_67 (sequence is synthesized)
tatagcatcagtgagccatgattgagctactgcaatccagtctgggtgacagagtgagaccctg

SEQ ID NO: 184919 - DNA, 120 bp, Artificial Sequence
  ENSG00000111700_0 (sequence is synthesized)
aggtgatcatttcaaaccaagcatcagcaacaattaaaaatattcacttggtatctgtagtttaataatggaccaacatcaacatttgaataaaacagcagagtcagcatcttcagagaa

SEQ ID NO: 184920 - DNA, 120 bp, Artificial Sequence
  ENSG00000111700_1 (sequence is synthesized)
aaagaaaacaagacgctgcaatggattcaagatgttcttggcagccctgtcattcagctatattgctaaagcactaggtggaatcattatgaaaatttccatcactcaaatagaaaggag

SEQ ID NO: 184921 - DNA, 120 bp, Artificial Sequence
  ENSG00000111700_2 (sequence is synthesized)
atttgacatatcctcttctcttgctggtttaattgatggaagctttgaaattggaaatttgcttgtgattgtatttgtaagttactttggatctaaactacacagaccgaagttaattgg

SEQ ID NO: 184922 - DNA, 120 bp, Artificial Sequence
  ENSG00000111700_3 (sequence is synthesized)
aattggttgtctccttatgggaactggaagtattttgacatctttaccacatttcttcatgggatattataggtattctaaagaaacccatattaatccatcagaaaattcaacatcaag

SEQ ID NO: 184923 - DNA, 120 bp, Artificial Sequence
  ENSG00000111700_4 (sequence is synthesized)
tttatcaacctgtttaattaatcaaaccttatcattcaatggaacatcacctgagatagtagaaaaagattgtgtaaaggaatctgggtcacacatgtggatctatgtcttcatggggaa

SEQ ID NO: 184924 - DNA, 120 bp, Artificial Sequence
  ENSG00000111700_5 (sequence is synthesized)
tatgcttcgtggcataggggaaacccccatagtaccattggggatttcatacattgatgattttgcaaaagaaggacattcttccttgtatttaggtagtttgaatgcaataggaatgat

SEQ ID NO: 184925 - DNA, 120 bp, Artificial Sequence
  ENSG00000111700_6 (sequence is synthesized)
tggtccagtcattggctttgcactgggatctctgtttgctaaaatgtacgtggatattggatatgtagatctgagcactatcagaataactcctaaggactctcgttgggttggagcttg

SEQ ID NO: 184926 - DNA, 120 bp, Artificial Sequence
  ENSG00000111700_7 (sequence is synthesized)
gtggcttggtttccttgtgtctggactattttccattatttcttccataccattttttttcttgccgaaaaatccaaataaaccacaaaaagaaagaaaaatttcactatcattgcatgt

SEQ ID NO: 184927 - DNA, 120 bp, Artificial Sequence
  ENSG00000111700_8 (sequence is synthesized)
gctgaaaacaaatgatgatagaaatcaaacagctaatttgaccaaccaaggaaaaaatgttaccaaaaatgtgactggttttttccagtctttgaaaagcatccttaccaatcccctgta

SEQ ID NO: 184928 - DNA, 120 bp, Artificial Sequence
  ENSG00000111700_9 (sequence is synthesized)
tgttatatttctgcttttgacattgttacaagtaagcagctttattggttcttttacttacgtctttaaatatatggagcaacagtacggtcagtctgcatctcatgctaactttttgtt

SEQ ID NO: 184929 - DNA, 120 bp, Artificial Sequence
  ENSG00000111700_10 (sequence is synthesized)
gggaatcataaccattcctacggttgcaactggaatgtttttaggaggatttatcattaaaaaattcaaattgtctttagttggaattgccaaattttcatttcttacttcgatgatatc

SEQ ID NO: 184930 - DNA, 120 bp, Artificial Sequence
  ENSG00000111700_11 (sequence is synthesized)
ataattcagtggcatctcatgtagatgtaccactttcttattgcaactcagagtgcaattgtgatgaaagtcagtgggaaccagtctgtgggaacaatggaataacttacctgtcacctt

SEQ ID NO: 184931 - DNA, 120 bp, Artificial Sequence
  ENSG00000111700_12 (sequence is synthesized)
gtctagcaggatgcaaatcctcaagtggtattaaaaagcatacagtgttttataactgtagttgtgtggaagtaactggtctccagaacagaaattactcagcacacttgggtgaatgcc

SEQ ID NO: 184932 - DNA, 120 bp, Artificial Sequence
  ENSG00000111700_13 (sequence is synthesized)
caagagataatacttgtacaaggaaatttttcatctatgttgcaattcaagtcataaactctttgttctctgcaacaggaggtaccacatttatcttgttgactgtgaagattgttcaac

SEQ ID NO: 184933 - DNA, 120 bp, Artificial Sequence
  ENSG00000111700_14 (sequence is synthesized)
ctgaattgaaagcacttgcaatgggtttccagtcaatggttataagaacactaggaggaattctagctccaatatattttggggctctgattgataaaacatgtatgaagtggtccacca

SEQ ID NO: 184934 - DNA, 120 bp, Artificial Sequence
  ENSG00000111700_15 (sequence is synthesized)
acagctgtggagcacaaggggcttgtaggatatataattccgtattttttggaagggtctacttgggcttatctatagctttaagattcccagcacttgttttatatattgttttcattt

SEQ ID NO: 184935 - DNA, 120 bp, Artificial Sequence
  ENSG00000111700_16 (sequence is synthesized)
ttgctatgaagaaaaaatttcaaggaaaagataccaaggcatcggacaatgaaagaaaagtaatggatgaagcaaacttagaattcttaaataatggtgaacattttgtaccttctgctg

SEQ ID NO: 184936 - DNA, 120 bp, Artificial Sequence
  ENSG00000111700_17 (sequence is synthesized)
gaacagatagtaaaacatgtaatttggacatgcaagacaatgctgctgccaactaacattgcattgattcattaagatgttatttttgaggtgttcctggtctttcactgacaattccaa

SEQ ID NO: 184937 - DNA, 120 bp, Artificial Sequence
  ENSG00000111700_18 (sequence is synthesized)
cattctttacttacagtggaccaatggataagtctatgcatctataataaactataaaaaatgggagtacccatggttaggatatagctatgcctttatggttaagattagaatatatga

SEQ ID NO: 184938 - DNA, 120 bp, Artificial Sequence
  ENSG00000111700_19 (sequence is synthesized)
tccataaaaatttaaagtgagaggcatggttagtgtgtgatacaataaaaagtaattgtttggtagttgtaactgctaataaaaccagtgactagaatataagggaggtaaaaaggacaa

SEQ ID NO: 184939 - DNA, 120 bp, Artificial Sequence
  ENSG00000111700_20 (sequence is synthesized)
gatagattaatagcctaaataaagagaaaagcctgatgcctttaaaaaaaatgaaacactttggatgtattacttaggccaaaatctggcctggatttatgctataatatatattttcat

SEQ ID NO: 184940 - DNA, 120 bp, Artificial Sequence
  ENSG00000111700_21 (sequence is synthesized)
gttaagttgtatatttttcagaaattataaatattattaatttaaaatttgaatttgtgtttgactaacaacctcgatggatcttcttccaacctcccattaagatcctgcagaagaaat

SEQ ID NO: 184941 - DNA, 120 bp, Artificial Sequence
  ENSG00000111700_22 (sequence is synthesized)
agaaatattcaaatattgcaaggtgtaattgtgagacaacttattataatacgtgttaagtttctactggacccatggaagtggattaagaaaaaccgactttagcttgagaaagcaaaa

SEQ ID NO: 184942 - DNA, 120 bp, Artificial Sequence
  ENSG00000111700_23 (sequence is synthesized)
gatggacttgttgcagttgctgtagcattcaaagtcaagttgtgctttgcgatgctgagtttactgttttaaatggacttcaagcatagccctgaagtgttgtcccgttgttcccacctc

SEQ ID NO: 184943 - DNA, 120 bp, Artificial Sequence
  ENSG00000111700_24 (sequence is synthesized)
gtggagcacaaggggcttgtaggatatataattccgtattttttgggcagaagtatcctgcaagtgacattaagacaactagattatctggaagaaacaaaaagctgctgcaattgtacc

SEQ ID NO: 184944 - DNA, 120 bp, Artificial Sequence
  ENSG00000111700_25 (sequence is synthesized)
ctgctgcaattgtaccttacctcttatagaagcattaatttgtaatttatatattgatcaatatataaatttgatttctgaaactataagtattagaactactcatagtagaatttcttt

SEQ ID NO: 184945 - DNA, 120 bp, Artificial Sequence
  ENSG00000111700_26 (sequence is synthesized)
ataaatgtgtttgtaagtatgacccaaatgcctgaaagtataatagaaaaataatggtgaaaggatttatattgctttgtgtatatacccaataataggactgatgggttgaatggtaat

SEQ ID NO: 184946 - DNA, 120 bp, Artificial Sequence
  ENSG00000111700_27 (sequence is synthesized)
tctgttttatgttctttgagaaatcgtcagactgctttctacaatgacagaacttatttacattcccactagtagtgtataagcgttcccttttctccactatgtcttcagtatctgtta

SEQ ID NO: 184947 - DNA, 120 bp, Artificial Sequence
  ENSG00000111700_28 (sequence is synthesized)
tatcctcagtaaggcttcacaacttcacctgctgctgtacaggttttcccatcagcatttcactgaagctgctctttctaagttataggtattctaaagaaacccatattaatccatcag

SEQ ID NO: 184948 - DNA, 120 bp, Artificial Sequence
  ENSG00000111701_0 (sequence is synthesized)
atgactccagaggaggaagtccagagacagagcaccatgacttctgagaaaggtccttcaaccggtgaccccactctgaggagaagaatcgaaccctgggagtttgacgtcttctatgac

SEQ ID NO: 184949 - DNA, 120 bp, Artificial Sequence
  ENSG00000111701_1 (sequence is synthesized)
cccagagaacttcgtaaagaggcctgtctgctctacgaaatcaagtggggcatgagccggaagatctggcgaagctcaggcaaaaacaccaccaatcacgtggaagttaattttataaaa

SEQ ID NO: 184950 - DNA, 120 bp, Artificial Sequence
  ENSG00000111701_2 (sequence is synthesized)
aaatttacgtcagaaagagattttcacccatccatgagctgctccatcacctggttcttgtcctggagtccctgctgggaatgctcccaggctattagagagtttctgagtcggcaccct

SEQ ID NO: 184951 - DNA, 120 bp, Artificial Sequence
  ENSG00000111701_3 (sequence is synthesized)
aatcggcaaggtctcagggaccttgttaacagtggagtaactattcagattatgagagcatcagagtattatcactgctggaggaattttgtcaactacccacctggggatgaagctcac

SEQ ID NO: 184952 - DNA, 120 bp, Artificial Sequence
  ENSG00000111701_4 (sequence is synthesized)
tggccacaatacccacctctgtggatgatgttgtacgcactggagctgcactgcataattctaagtcttccaccctgtttaaagatttcaagaagatggcaaaatcatcttacatttttc

SEQ ID NO: 184953 - DNA, 120 bp, Artificial Sequence
  ENSG00000111701_5 (sequence is synthesized)
agacttcatcttcaaaactgccattaccaaacgattccgccacacatccttttagctacagggctgatacatccttctgtggcttggagatgaataggatgattccgtgtgtgtactgat

SEQ ID NO: 184954 - DNA, 120 bp, Artificial Sequence
  ENSG00000111701_6 (sequence is synthesized)
tcaagaacaagcaatgatgacccactaaagagtgaatgccatttagaatctagaaatgttcacaaggtaccccaaaactctgtagcttaaaccaacaataaatatgtattacctctggca

SEQ ID NO: 184955 - DNA, 120 bp, Artificial Sequence
  ENSG00000111704_0 (sequence is synthesized)
ataaatctagagactccaggattttaacgttctgctggactgagctggttgcctcatgttattatgcaggcaactcactttatcccaatttcttgatacttttccttctggaggtcctat

SEQ ID NO: 184956 - DNA, 120 bp, Artificial Sequence
  ENSG00000111704_1 (sequence is synthesized)
ttctctaacatcttccagaaaagtcttaaagctgccttaaccttttttccagtccacctcttaaattttttcctcctcttcctctatactaacatgagtgtggatccagcttgtccccaa

SEQ ID NO: 184957 - DNA, 120 bp, Artificial Sequence
  ENSG00000111704_2 (sequence is synthesized)
agcttgccttgctttgaagcatccgactgtaaagaatcttcacctatgcctgtgatttgtgggcctgaagaaaactatccatccttgcaaatgtcttctgctgagatgcctcacacggag

SEQ ID NO: 184958 - DNA, 120 bp, Artificial Sequence
  ENSG00000111704_3 (sequence is synthesized)
actgtctctcctcttccttcctccatggatctgcttattcaggacagccctgattcttccaccagtcccaaaggcaaacaacccacttctgcagagaagagtgtcgcaaaaaaggaagac

SEQ ID NO: 184959 - DNA, 120 bp, Artificial Sequence
  ENSG00000111704_4 (sequence is synthesized)
aaggtcccggtcaagaaacagaagaccagaactgtgttctcttccacccagctgtgtgtactcaatgatagatttcagagacagaaatacctcagcctccagcagatgcaagaactctcc

SEQ ID NO: 184960 - DNA, 120 bp, Artificial Sequence
  ENSG00000111704_5 (sequence is synthesized)
aacatcctgaacctcagctacaaacaggtgaagacctggttccagaaccagagaatgaaatctaagaggtggcagaaaaacaactggccgaagaatagcaatggtgtgacgcagaaggcc

SEQ ID NO: 184961 - DNA, 120 bp, Artificial Sequence
  ENSG00000111704_6 (sequence is synthesized)
tcagcacctacctaccccagcctttactcttcctaccaccagggatgcctggtgaacccgactgggaaccttccaatgtggagcaaccagacctggaacaattcaacctggagcaaccag

SEQ ID NO: 184962 - DNA, 120 bp, Artificial Sequence
  ENSG00000111704_7 (sequence is synthesized)
acccagaacatccagtcctggagcaaccactcctggaacactcagacctggtgcacccaatcctggaacaatcaggcctggaacagtcccttctataactgtggagaggaatctctgcag

SEQ ID NO: 184963 - DNA, 120 bp, Artificial Sequence
  ENSG00000111704_8 (sequence is synthesized)
tcctgcatgcagttccagccaaattctcctgccagtgacttggaggctgccttggaagctgctggggaaggccttaatgtaatacagcagaccactaggtattttagtactccacaaacc

SEQ ID NO: 184964 - DNA, 120 bp, Artificial Sequence
  ENSG00000111704_9 (sequence is synthesized)
atggatttattcctaaactactccatgaacatgcaacctgaagacgtgtgaagatgagtgaaactgatattactcaatttcagtctggacactggctgaatccttcctctcccctcctcc

SEQ ID NO: 184965 - DNA, 120 bp, Artificial Sequence
  ENSG00000111704_10 (sequence is synthesized)
catccctcataggatttttcttgtttggaaaccacgtgttctggtttccatgatgcccatccagtcaatctcatggagggtggagtatggttggagcctaatcagcgaggtttctttttt

SEQ ID NO: 184966 - DNA, 75 bp, Artificial Sequence
  ENSG00000111704_11 (sequence is synthesized)
tggagtatggttggagcctaatcagcgaggtttctttttttttttttttcctattggatcttcctggagaaaata

SEQ ID NO: 184967 - DNA, 89 bp, Artificial Sequence
  ENSG00000111704_12 (sequence is synthesized)
cccgcctcggcctccctaacactgcctagaaaagacattttaataaccttggctgccgtctctggctatagataagtagatctaatact

SEQ ID NO: 184968 - DNA, 120 bp, Artificial Sequence
  ENSG00000111704_13 (sequence is synthesized)
tggctgccgtctctggctatagataagtagatctaatactagtttggatatctttagggtttagaatctaacctcaagaataagaaatacaagtacaaattggtgatgaagatgtattcg

SEQ ID NO: 184969 - DNA, 120 bp, Artificial Sequence
  ENSG00000111704_14 (sequence is synthesized)
tattgtttgggattgggaggctttgcttattttttaaaaactattgaggtaaagggttaagctgtaacatacttaattgatttcttaccgtttttggctctgttttgctatatcccctaa

SEQ ID NO: 184970 - DNA, 120 bp, Artificial Sequence
  ENSG00000111704_15 (sequence is synthesized)
tttgttggttgtgctaatctttgtagaaagaggtctcgtatttgctgcatcgtaatgacatgagtactgctttagttggtttaagttcaaatgaatgaaacaactatttttcctttagtt

SEQ ID NO: 184971 - DNA, 120 bp, Artificial Sequence
  ENSG00000111704_16 (sequence is synthesized)
gattttaccctgatttcaccgagtgtttcaatgagtaaatatacagcttaaacataaatctttgttaaatttttggttggggtggagaaggaaattagctgaggacactgctatcttaga

SEQ ID NO: 184972 - DNA, 70 bp, Artificial Sequence
  ENSG00000111704_17 (sequence is synthesized)
ggtggagaaggaaattagctgaggacactgctatcttagaaatgcatagaaatagctgagcgtggtggcc

SEQ ID NO: 184973 - DNA, 120 bp, Artificial Sequence
  ENSG00000111704_18 (sequence is synthesized)
actgcactccagcttgggcgacaagagcaaaactcccatctcaaaaataaataaataaataagtaaataaatgaataataaataaatatgccagttttagaatgaatgaataataaatat

SEQ ID NO: 184974 - DNA, 120 bp, Artificial Sequence
  ENSG00000111704_19 (sequence is synthesized)
gccagttttagaaaaaagggcacttacgtgcattgtacatgtgcatctacaaatgtaatgggttatttccgtgtatgaatctgtaattgatgctaacatttaaagtttcatcagaggcct

SEQ ID NO: 184975 - DNA, 120 bp, Artificial Sequence
  ENSG00000111704_20 (sequence is synthesized)
tagttgaaacagatttatgttctcaccttaagagcagctacgcaggcatctgtgaattatactaataatcctttactgtccttttcccatcttgtgcctgccctaaatgtatctgatctg

SEQ ID NO: 184976 - DNA, 120 bp, Artificial Sequence
  ENSG00000111704_21 (sequence is synthesized)
agagcacgtcccttcactctgaagcagcatgatgcaggttatcagagtggttttttccagtcttttctctcattatttccccaattgtccaatgttactaagactatccagtctaattcc

SEQ ID NO: 184977 - DNA, 120 bp, Artificial Sequence
  ENSG00000111704_22 (sequence is synthesized)
tgtgagccaccgtgtctgggcaatttttttttttttttttgagatggaacttcacttttgttactcaggctggagcacaatgatgcaatctctactcactgcaacctgcacctcccaggt

SEQ ID NO: 184978 - DNA, 120 bp, Artificial Sequence
  ENSG00000111704_23 (sequence is synthesized)
ttctcttgcctcagcctttcgagtggctggtattacagggatttgccactatgcccagctaattctttgtatttagtagagatggggtttcaccgtattgaccaggctggtctcgaactc

SEQ ID NO: 184979 - DNA, 90 bp, Artificial Sequence
  ENSG00000111704_24 (sequence is synthesized)
ttcttttttatttttttaagacgggcttattctgctgctcagactggggcttagtggcaccatttcacctcactgtagcctcgacttccc

SEQ ID NO: 184980 - DNA, 120 bp, Artificial Sequence
  ENSG00000111704_25 (sequence is synthesized)
ttagtggcaccatttcacctcactgtagcctcgacttcccggattcaagcaatcctcctgcctgagtctctcaaatagcccagactataggtgcacaccaccatgccagctaacttttgt

SEQ ID NO: 184981 - DNA, 120 bp, Artificial Sequence
  ENSG00000111704_26 (sequence is synthesized)
ccatgccagctaacttttgtgtttttaggagagacggggtttccccatgttggcctggctagtctcaaactcctgagctcaagcagtctaccagccttggcctcccgaagtgctgagatt

SEQ ID NO: 184982 - DNA, 120 bp, Artificial Sequence
  ENSG00000111704_27 (sequence is synthesized)
tagccctgtattatgttttctgaacttttttttttttaatcacccagtattaatcttcaacctcttggcaggtaagaatttagagatctatttggaataatctttaaagtaacaataata

SEQ ID NO: 184983 - DNA, 74 bp, Artificial Sequence
  ENSG00000111704_28 (sequence is synthesized)
gatctatttggaataatctttaaagtaacaataataactacagtcaaaagcagtaagattagtaccaaggcagg

SEQ ID NO: 184984 - DNA, 89 bp, Artificial Sequence
  ENSG00000111704_29 (sequence is synthesized)
cctgtctctactaaaaatacagaaatttgccagaggtcttggtttgcgcctgtaatctcagctacttggaaggcgtgcagtgaccccag

SEQ ID NO: 184985 - DNA, 120 bp, Artificial Sequence
  ENSG00000111704_30 (sequence is synthesized)
gttgcagtgaccccagataatgccaccccactccagcctgggcgacagagcgtcactgtctcaaaaataaacaaaaataataggagattaggcaaaaaggatagtacaaggctctctgtt

SEQ ID NO: 184986 - DNA, 120 bp, Artificial Sequence
  ENSG00000111704_31 (sequence is synthesized)
taacatttcttcctttctctagaaaattttcctttcttttcccaaaaggaggtgtgtgttacttccaatgctatattttagtagctttaccatattttagtttttaaaattcattatttt

SEQ ID NO: 184987 - DNA, 120 bp, Artificial Sequence
  ENSG00000111704_32 (sequence is synthesized)
gatttctcagctttcattttcatttcagtttgtacctgaaggagagaagcatggattgaatttgcctgggttttccgaatttcataatataaatttaaaactcagaagtgggaggaatac

SEQ ID NO: 184988 - DNA, 120 bp, Artificial Sequence
  ENSG00000111704_33 (sequence is synthesized)
aggccttgattagtgaatttcaagctcagttctcggggtgaaggacaaggttaattctactctgagtaattctaccgttcagaaaacctggtgtgtctacaggaaaaaatacaggctgtg

SEQ ID NO: 184989 - DNA, 120 bp, Artificial Sequence
  ENSG00000111704_34 (sequence is synthesized)
actacaaacctaaaagtaaaggcaaacaactgccagacagaggcaggaaagtgggggagagcccttggtaaatattgcatgcctcctggggcccccatgggctttgactcaagggggaga

SEQ ID NO: 184990 - DNA, 120 bp, Artificial Sequence
  ENSG00000111704_35 (sequence is synthesized)
tgaagggaatttgttaaagaaagaagtcactgggacagacaaaagcttccggcacaggaagttagttcgactaaggataccgaaatgtaggaatttgaatgggttcctgggtgtgaggtt

SEQ ID NO: 184991 - DNA, 120 bp, Artificial Sequence
  ENSG00000111704_36 (sequence is synthesized)
gaagtgaaacttgattgaaaagaagctgctggtggtgagtctctccttaagctattcctggcttctgggtagttggtgtaaactctgtggtccttgaataaagtgtgcttgagaatttta

SEQ ID NO: 184992 - DNA, 120 bp, Artificial Sequence
  ENSG00000111704_37 (sequence is synthesized)
aaagcttctggtacctgccctttggagagctgcgggcaagctcagcctcgaaacacacacacccacacgagatgggcacggagtagtcttgaaagacatgacaaatcaccagacctggga

SEQ ID NO: 184993 - DNA, 120 bp, Artificial Sequence
  ENSG00000111707_0 (sequence is synthesized)
ggagacggggaaggggtcgccgtggctgccggtcctcgagttgggggctgccgcggacactgctaggcagacggcgagtaccgagcgcgggtggccgcggtgtccgtgggccacgctcag

SEQ ID NO: 184994 - DNA, 120 bp, Artificial Sequence
  ENSG00000111707_1 (sequence is synthesized)
ctgcggtcagaggcgacatgagtgccgcggggctgctggccccggccccggcccaggctggagcgccgccggcccccgagtactaccccgaggaggatgaagagctggagagcgccgagg

SEQ ID NO: 184995 - DNA, 120 bp, Artificial Sequence
  ENSG00000111707_2 (sequence is synthesized)
acgacgagcgcagctgtcggggccgcgagtcggacgaagacactgaggatgctagtgaaactgacctggcaaagcatgatgaagaagactatgtagaaatgaaggaacagatgtatcagg

SEQ ID NO: 184996 - DNA, 120 bp, Artificial Sequence
  ENSG00000111707_3 (sequence is synthesized)
acaaactggcttctctcaagaggcagttgcaacaactgcaagaaggtacattacaggaatatcagaagagaatgaaaaaactagatcagcagtacaaagagaggatacggaatgcagaac

SEQ ID NO: 184997 - DNA, 120 bp, Artificial Sequence
  ENSG00000111707_4 (sequence is synthesized)
tcttcctccagctggaaactgaacaagtggaacgaaattacattaaagaaaagaaggcagcagtgaaagaatttgaagacaagaaggttgagctgaaagagaacctgattgctgagctag

SEQ ID NO: 184998 - DNA, 120 bp, Artificial Sequence
  ENSG00000111707_5 (sequence is synthesized)
aagaaaagaagaaaatgattgaaaatgaaaagctgacaatggaactgactggagattctatggaggtgaaacctatcatgaccagaaagttgcggaggcgaccaaatgatcccgtcccca

SEQ ID NO: 184999 - DNA, 120 bp, Artificial Sequence
  ENSG00000111707_6 (sequence is synthesized)
tcccagacaagaggaggaaacctgctccagcccagctaaactatttgttaacagatgaacagatcatggaggatctgagaacattaaataagcttaagtcacccaagagaccagcatctc

SEQ ID NO: 185000 - DNA, 120 bp, Artificial Sequence
  ENSG00000111707_7 (sequence is synthesized)
catcctctcctgagcacttgcctgcaacacccgcggaatctccagcccagaggttcgaagctcggatagaagatggcaaactgtactatgacaaaagatggtaccacaagagccaggcca

SEQ ID NO: 185001 - DNA, 120 bp, Artificial Sequence
  ENSG00000111707_8 (sequence is synthesized)
tctatctggagtcaaaggacaaccagaaactgagctgcgtgatcagttctgtaggagccaatgagatctgggtgaggaagacaagtgacagcaccaagatgaggatctacctgggccagc

SEQ ID NO: 185002 - DNA, 120 bp, Artificial Sequence
  ENSG00000111707_9 (sequence is synthesized)
ttcagcgcgggctcttcgtgatccgccggcgctcagctgcttgactttctacagtgctcttctcttgaccctttttctggagtgggttttatttttgttttgtttcgttttctccttaat

SEQ ID NO: 185003 - DNA, 120 bp, Artificial Sequence
  ENSG00000111707_10 (sequence is synthesized)
agaaaaatgttaacttactgggaatagctactcagccttggaaatggagagcactgcagtgaattctttagggcacttttgtggccggatgcttccaactttgtcagtcttttctgcctc

SEQ ID NO: 185004 - DNA, 120 bp, Artificial Sequence
  ENSG00000111707_11 (sequence is synthesized)
aacttcttccagacatcagtcaccatgagactgttttactttcaggcgtattggggggtttgatttactttccttttatttctttattttttgcttatacttgtttttgaaaacctcctc

SEQ ID NO: 185005 - DNA, 120 bp, Artificial Sequence
  ENSG00000111707_12 (sequence is synthesized)
tgagtttgaagggacagctatttttattgattatctttaagtctctctaccatggagaagagcaggaagggatacactctccagtgcattttcatgttttgaatctgattagtggatcac

SEQ ID NO: 185006 - DNA, 120 bp, Artificial Sequence
  ENSG00000111707_13 (sequence is synthesized)
gtagctactttccctgtcgcgtccaattcactatttgcccagaagcttggggcagaggtcctagcaggagatgatgaattctcgtggctctcggccttctcagagaaataaatgctttgt

SEQ ID NO: 185007 - DNA, 120 bp, Artificial Sequence
  ENSG00000111707_14 (sequence is synthesized)
gtaacatctgtgcacaccatccattccgctcgctgagcgatggaaaagcttgcctggaagactatgtgcactgaagtaaatggggttgggggaggggacatttcatatttataatgtgct

SEQ ID NO: 185008 - DNA, 120 bp, Artificial Sequence
  ENSG00000111707_15 (sequence is synthesized)
gaaggtaccatattttaaatgttatttaatgcaggtgatttattcaaacatttgttctagcttaagctggaataagcagtggtcatttcagaagttttcatttgtaattccttcctctcc

SEQ ID NO: 185009 - DNA, 120 bp, Artificial Sequence
  ENSG00000111707_16 (sequence is synthesized)
cttgttcccaagtaggtagtagtaagtatgtgccacaggctgattatctgggtaatcttttacgggtgggaggtgagattgatagtgcaataatcagtgatctatagaccctcatgcacg

SEQ ID NO: 185010 - DNA, 120 bp, Artificial Sequence
  ENSG00000111707_17 (sequence is synthesized)
attcaagtttcactcttgtggctgatgccattattgcacattggccattccaaacctgtggagaactttgttgtcaggccctgagcgctcacagcttcatttggcccaggttgaagacaa

SEQ ID NO: 185011 - DNA, 120 bp, Artificial Sequence
  ENSG00000111707_18 (sequence is synthesized)
ggaaagctctgctgtggctgcctctggactgacaccctccctaatgagtcctgatgaaacagcctttcctacatccttccctcactcccatgattggagaaatgattcattgggtgatga

SEQ ID NO: 185012 - DNA, 120 bp, Artificial Sequence
  ENSG00000111707_19 (sequence is synthesized)
aaaaatttggggttagagcaactgttagcgtctctatgagcaatcagtagaacttacacatcctaggaaatctttctttgtaagtaattcttttggtctcaagtgattctcttcatgttg

SEQ ID NO: 185013 - DNA, 120 bp, Artificial Sequence
  ENSG00000111707_20 (sequence is synthesized)
tctcttgatgtacatacccccaagcaagttggggggactgtgatgacaattaaatcaccttctctgaagttctggctctgcagagaccaaaccttactgacttgtacagacttgtacaag

SEQ ID NO: 185014 - DNA, 120 bp, Artificial Sequence
  ENSG00000111707_21 (sequence is synthesized)
taaagacttatacagatagatttttgttttaacttacaatccgttttttcctcttttttttttttttttctggtgttggagtcttatttagaaaacaggataaatgacgctgttatcaaa

SEQ ID NO: 185015 - DNA, 120 bp, Artificial Sequence
  ENSG00000111707_22 (sequence is synthesized)
agttgcctggggttctgtatttcttctctgccctccaatccccgactgctatgatgtttactacagtgaacccagcccatggtaaacacaggcttcacctgttcttgtttgttagccttg

SEQ ID NO: 185016 - DNA, 120 bp, Artificial Sequence
  ENSG00000111707_23 (sequence is synthesized)
actgtgaggcaggacttccctcgcttgaactgttacacatacgatgtgtgtgtcacatcacatattgtgcagctgttggttttcatgtagtgccctgcgatggaaattagatatatttca

SEQ ID NO: 185017 - DNA, 120 bp, Artificial Sequence
  ENSG00000111707_24 (sequence is synthesized)
tgtatttttccattgaaggtggagtttttcaatgatcatgtgttttgtcctcctaaacagtataccaaagtttgtttttatagttgaggattgtattgataaccactggggttccgcatt

SEQ ID NO: 185018 - DNA, 120 bp, Artificial Sequence
  ENSG00000111707_25 (sequence is synthesized)
gaagcaggaacaaattgcctctttttctggccttctctgtgggacctctgcttttgtgaagcaactatttatttgaagaccagggtatgggcacttttgccttctctcctctctgacttt

SEQ ID NO: 185019 - DNA, 120 bp, Artificial Sequence
  ENSG00000111707_26 (sequence is synthesized)
tgagggtattgagggcgcccttagtcatagtctcgactccgccattgccttctcctcggcgtcctcacaactcttaattgggcctagtgaaaatgggggcaggtgagaagtccattttga

SEQ ID NO: 185020 - DNA, 120 bp, Artificial Sequence
  ENSG00000111707_27 (sequence is synthesized)
gaatcagcatagtaaattacatttctaatcccagaggacttaatattttcttttgtcaccccagaggtgaaaaatcagcagttgaagcctgacaggcctcagtggtgaccaggaacagaa

SEQ ID NO: 185021 - DNA, 120 bp, Artificial Sequence
  ENSG00000111707_28 (sequence is synthesized)
gcagccttcctgttagtagatgggggtacttctgtggtgggcagaagccttactaaaggggaagacagactttgaagtttctagacgagaaggaggctagcttctagcctgggtggccat

SEQ ID NO: 185022 - DNA, 120 bp, Artificial Sequence
  ENSG00000111707_29 (sequence is synthesized)
tattccaaaaggtcattgtttctcactagaccccagggcaccagatgaatttccaagtttaaactctttcctgcaggtgattactttgaaaaaggttggtccagaccattttgatcaaga

SEQ ID NO: 185023 - DNA, 120 bp, Artificial Sequence
  ENSG00000111707_30 (sequence is synthesized)
acctgtatatgtgttgtgttagaggcatctgcctcaagtctatgtacagtgtttgctgcgggtgtgttccaatattcattttacctctgcttgggggttttgtgtgttcccctcccccca

SEQ ID NO: 185024 - DNA, 120 bp, Artificial Sequence
  ENSG00000111707_31 (sequence is synthesized)
tgccctgcctacccccttttccctgaaccacgtccttttgaataatttccagatggatttctgtagccataccaaagccagggtgttttcattcatgcggatactagtatttatagatgt

SEQ ID NO: 185025 - DNA, 120 bp, Artificial Sequence
  ENSG00000111707_32 (sequence is synthesized)
ctgactacctaacttaatttttgtttttgaacttctaattggggccagtgtaaggtcgatcccagaggctgatctgcaaatcaagctacatgtatttgtgtataagaccctgtgttcagg

SEQ ID NO: 185026 - DNA, 120 bp, Artificial Sequence
  ENSG00000111707_33 (sequence is synthesized)
actgggtgacttttctaagaaatatggggtttagaatggggttgactgtattttttaacctaattctggagagaagattgtattttttacagttttttgggtttggcttccttctcacat

SEQ ID NO: 185027 - DNA, 120 bp, Artificial Sequence
  ENSG00000111707_34 (sequence is synthesized)
ttctttagctttgaatttttactaaataaatttcctcctgattaattttttttttctcatctgggaatttgaaatctcggtgcttactgttacaccaatttgtccaaagagttgaaatca

SEQ ID NO: 185028 - DNA, 120 bp, Artificial Sequence
  ENSG00000111707_35 (sequence is synthesized)
ctttaatgccagaacatggtaaatttgcagccatttcaagcaggtgatggtctttttttataacatcgttaacgggtaccattaaatattctgagaggtgaatgtaaaatataaaaggta

SEQ ID NO: 185029 - DNA, 120 bp, Artificial Sequence
  ENSG00000111707_36 (sequence is synthesized)
taggtttttttttttttttaaagaaaacaataaactttcaaagagaaaaccagcatgaagtctgtattgtatccattgacttgataagtgatagaaatttattttaggtttttgatccat

SEQ ID NO: 185030 - DNA, 120 bp, Artificial Sequence
  ENSG00000111707_37 (sequence is synthesized)
tgcttatggggaaaggaagttagggcagaggaagggatattctagacatttaattcttagtgaagactaagatacagaatgatgtcaggctaatactcagttttgtaaagagcaatctgg

SEQ ID NO: 185031 - DNA, 120 bp, Artificial Sequence
  ENSG00000111707_38 (sequence is synthesized)
ggtgttgacccttaaatgtttgtgcactcttcttgttgcagataaaagtcattaaaaatcaagtgaatagaatggatcttgggtggaaaaacaatcttgaaataaacttgtgattgagga

SEQ ID NO: 185032 - DNA, 81 bp, Artificial Sequence
  ENSG00000111707_39 (sequence is synthesized)
tactatgacaaaagatgctgcaaaagtggtcaaggacacttgcttgggggaactgtatcctaaaacattcctagtttgttt

SEQ ID NO: 185033 - DNA, 67 bp, Artificial Sequence
  ENSG00000111707_40 (sequence is synthesized)
gatattgcattcctggtttacattgaagactctttgaaacgttcagaccgcctagcatttttcattg

SEQ ID NO: 185034 - DNA, 120 bp, Artificial Sequence
  ENSG00000111707_41 (sequence is synthesized)
gactctttgaaacgttcagaccgcctagcatttttcattggaaaggtaccacaagagccaggccatctatctggagtcaaaggacaaccagaaactgagctgcgtgatcagttctgtagg

SEQ ID NO: 185035 - DNA, 120 bp, Artificial Sequence
  ENSG00000111707_42 (sequence is synthesized)
ataaaagagacatttgattgattgattgatttccttctgtgtaggcatcaggcataagatttaagtacacatccatttttgaaaatgaaaccagaaggatttttaagtattactggcttt

SEQ ID NO: 185036 - DNA, 120 bp, Artificial Sequence
  ENSG00000111707_43 (sequence is synthesized)
ctaaagccaagtcctaggcagttctgctcccgtggcttttcgtggcctgactctggtaaggcattccaaggctgctctgactcgcagttcatagaagagaccaaccagctcagtattcat

SEQ ID NO: 185037 - DNA, 120 bp, Artificial Sequence
  ENSG00000111707_44 (sequence is synthesized)
gaattggtgacatcttttttttgtttaaagcaccatgattactcgattactcgattactcacacatccctctacttactgagtcttgtggaagaaaacaagagtcttctttttctagcat

SEQ ID NO: 185038 - DNA, 120 bp, Artificial Sequence
  ENSG00000111711_0 (sequence is synthesized)
agtgagggtggctgcgtgtttccggaagacgtggcggctctcgcctgggctgtttcccggcttcatttctcccgactcagcttcccaccctgggctttccgaggtgctgtcgccgctgtc

SEQ ID NO: 185039 - DNA, 120 bp, Artificial Sequence
  ENSG00000111711_1 (sequence is synthesized)
cccaccactgcagccatgatctccttaacggacacgcagaaaattggaatgggattaacaggatttggagtgtttttcctgttctttggaatgattctcttttttgacaaagcactactg

SEQ ID NO: 185040 - DNA, 120 bp, Artificial Sequence
  ENSG00000111711_2 (sequence is synthesized)
gctattggaaatgttttatttgtagccggcttggcttttgtaattggtttagaaagaacattcagattcttcttccaaaaacataaaatgaaagctacaggtttttttctgggtggtgta

SEQ ID NO: 185041 - DNA, 120 bp, Artificial Sequence
  ENSG00000111711_3 (sequence is synthesized)
tttgtagtccttattggttggcctttgataggcatgatcttcgaaatttatggattttttctcttgttcaggggcttctttcctgtcgttgttggctttattagaagagtgccagtcctt

SEQ ID NO: 185042 - DNA, 120 bp, Artificial Sequence
  ENSG00000111711_4 (sequence is synthesized)
ggatccctcctaaatttacctggaattagatcatttgtagataaagttggagaaagcaacaatatggtataacaacaagtgaatttgaagactcatttaaaatattgtgttatttataaa

SEQ ID NO: 185043 - DNA, 120 bp, Artificial Sequence
  ENSG00000111711_5 (sequence is synthesized)
gtcatttgaagaatattcagcacaaaattaaattacatgaaatagcttgtaatgttctttacaggagtttaaaacgtatagcctacaaagtaccagcagcaaattagcaaagaagcagtg

SEQ ID NO: 185044 - DNA, 120 bp, Artificial Sequence
  ENSG00000111711_6 (sequence is synthesized)
aaaacaggcttctactcaagtgaactaagaagaagtcagcaagcaaactgagagaggtgaaatccatgttaatgatgcttaagaaactcttgaaggctatttgtgttgtttttccacaat

SEQ ID NO: 185045 - DNA, 120 bp, Artificial Sequence
  ENSG00000111711_7 (sequence is synthesized)
gtgcgaaactcagccatccttagagaactgtggtgcctgtttcttttctttttattttgaaggctcaggagcatccataggcatttgctttttagaaatgtccactgcaatggcaaaaat

SEQ ID NO: 185046 - DNA, 120 bp, Artificial Sequence
  ENSG00000111711_8 (sequence is synthesized)
atttccagttgcactgtatctctggaagtgatgcatgaattcgattggattgtgtcattttaaagtattaaaaccaaggaaaccccaattttgatgtatggattacttttttttgtaaac

SEQ ID NO: 185047 - DNA, 120 bp, Artificial Sequence
  ENSG00000111711_9 (sequence is synthesized)
atggttaaaataaaacttttgtggttcttctgaatcttaatatttcaaagccaggtgaaaatctgaactagatattctttgttggaatatgcaaaggtcattctttactaacttttagtt

SEQ ID NO: 185048 - DNA, 120 bp, Artificial Sequence
  ENSG00000111711_10 (sequence is synthesized)
actaaattatagctaagttttgtcagcagcatactccggaaagtctcatacttcttgggagtctgccctcctaagtatctgtctatatcattcattacgtgtaagtatttaacaaaaaag

SEQ ID NO: 185049 - DNA, 120 bp, Artificial Sequence
  ENSG00000111711_11 (sequence is synthesized)
cattcttgaccatgaatgaagtagtttgtttcatagcttgtctcattgaatagtattattgaagatactaaatgatgcaaaccaaatggattttttccatgtcatgatgtaatttttctt

SEQ ID NO: 185050 - DNA, 120 bp, Artificial Sequence
  ENSG00000111711_12 (sequence is synthesized)
tcttctttcttttttttaaattttagcagtggcttattatttgtttttcataaattaaaataacttttgataatgtttactttaagacatgtaacatgttaaaaggttaaacttatggct

SEQ ID NO: 185051 - DNA, 120 bp, Artificial Sequence
  ENSG00000111711_13 (sequence is synthesized)
tattcatttaatctgagttttcccttattttcagctttttcctagcatataatagtcattaagcatgacatatccttcatatgatcactcatcttgagttaattagaaaatacctgagtt

SEQ ID NO: 185052 - DNA, 120 bp, Artificial Sequence
  ENSG00000111711_14 (sequence is synthesized)
cacgtgctaaagtcatttcactgtaataaactgactgtggtttcttaagaacatgacactaaaaaaaaagtgttttttttccaccgttgctgattattagacagtaggaaatagctgttt

SEQ ID NO: 185053 - DNA, 120 bp, Artificial Sequence
  ENSG00000111711_15 (sequence is synthesized)
tctttagttttacaagatgtgacagctttagtggtagatgtagggaaacatttcaacagccatagtactatttgttttaccactgattgcactgttttgtttttttaacagttgcaaagc

SEQ ID NO: 185054 - DNA, 120 bp, Artificial Sequence
  ENSG00000111711_16 (sequence is synthesized)
tttttaatgcataaaagtataattgaaatctgtggtatttatttacaaacatgtctacaaaaatagattacagcttattttatttttagttaaatctcttaatacacagagaactcccaa

SEQ ID NO: 185055 - DNA, 120 bp, Artificial Sequence
  ENSG00000111711_17 (sequence is synthesized)
tcttgctcatctaaataaggaaagacttggtgtatagtgtgatggtttagtcttaaggattaagacatttttggtacttgcatttgacttacgatgtatctgtgaaaatgggatgatatt

SEQ ID NO: 185056 - DNA, 120 bp, Artificial Sequence
  ENSG00000111711_18 (sequence is synthesized)
gacaaatggagactcctacctcaatagttaatggaataataagaggctactgttgtgtctaatgttcttcaaaaaagtaatatcctcacttggagagtgtcaaatacatactttgaggat

SEQ ID NO: 185057 - DNA, 120 bp, Artificial Sequence
  ENSG00000111711_19 (sequence is synthesized)
tgactttatataaggtgccctgtagaactctgttacacatatttttgacccatattatttacaatgtcttgataattctacctttttagagcaagaatagtatctgctaatgtaagggac

SEQ ID NO: 185058 - DNA, 120 bp, Artificial Sequence
  ENSG00000111711_20 (sequence is synthesized)
atctgtatttaactcctttgtagacatgaatttctatcaaaatgttctttgcactgtaacagagattccttttttcaataatcttaattcaaaagcattattagacttgaaagggtttga

SEQ ID NO: 185059 - DNA, 120 bp, Artificial Sequence
  ENSG00000111711_21 (sequence is synthesized)
taatctcccagtccttagtaaagattgagagaggctggagcagttttcagttttaaatgagtctgcagttaatatcaaatgtgagtttgggactgcctggcaacatttatatttcttatt

SEQ ID NO: 185060 - DNA, 120 bp, Artificial Sequence
  ENSG00000111711_22 (sequence is synthesized)
cagaacccttgatgagactatttttaaacatactagtctgctgatagaaagcactatacatcctattgtttctttctttccaaaatcagccttctgtctgtaacaaaaatgtactttata

SEQ ID NO: 185061 - DNA, 120 bp, Artificial Sequence
  ENSG00000111711_23 (sequence is synthesized)
gagatggaggaaaaggtctaatactacatagccttaagtgtttctgtcattgttcaagtgtattttctgtaacagaaacatatttggaatgtttttcttttccccttataaattgtaatt

SEQ ID NO: 185062 - DNA, 120 bp, Artificial Sequence
  ENSG00000111711_24 (sequence is synthesized)
cctgaaatactgctgctttaaaaagtcccactgtcagattatattatctaacaattgaatattgtaaatatacttgtcttacctctcaataaaagggtacttttctattaattggtggtc

SEQ ID NO: 185063 - DNA, 120 bp, Artificial Sequence
  ENSG00000111711_25 (sequence is synthesized)
aagtatatctgtgttatgaagttctaaaagctaatttagcattgcaaaataacctcatttttaaaaaattagccttatatgcagtgttctatttatcaaatgatcttcacatctttcatt

SEQ ID NO: 185064 - DNA, 120 bp, Artificial Sequence
  ENSG00000111711_26 (sequence is synthesized)
tccaaattgttgaaatgtactaatgaatacaaatagacttcaagtaagcaaaaatgttcttaattttgaaaactgtaaaataaagtcacttaccttgggcaatatgctattttttaaaaa

SEQ ID NO: 185065 - DNA, 120 bp, Artificial Sequence
  ENSG00000111711_27 (sequence is synthesized)
cagaaccaagaggaatacccttgggtgacatatttatgggcagctttcctctttatgccttgccaactcatctgcttgactaagccttcctcatccagctaaaactaggaaaactactgc

SEQ ID NO: 185066 - DNA, 120 bp, Artificial Sequence
  ENSG00000111711_28 (sequence is synthesized)
aattcactattactcataagtaattcctgttacattctctatttccatcaggaatgaaacctgtcagctttctgtttaaataaaaggtaaacacttaatgaggttttctaattccataac

SEQ ID NO: 185067 - DNA, 120 bp, Artificial Sequence
  ENSG00000111711_29 (sequence is synthesized)
tactctgttaagtgtttgtcatgagatttacaatagattaaatgaaggctgcctctaaataggagttcaaaatagatgacttgatagtttcatgtcttgataaatcactaaagtattttt

SEQ ID NO: 185068 - DNA, 120 bp, Artificial Sequence
  ENSG00000111713_0 (sequence is synthesized)
agatactgacagggcagataccgtcctcacaatacctgcccagaaagacgagaaagaggaggaagaattcctccttccaccaggaattctgtgggaagcacataagatttcatgctacta

SEQ ID NO: 185069 - DNA, 120 bp, Artificial Sequence
  ENSG00000111713_1 (sequence is synthesized)
gtttattcccaagagaagctaccaaagcctggtaactctaccaactctaacttttgtgcctgtaagttctcttctcctgggattacaactaattgaaacaggaattcaaaggagtctcgg

SEQ ID NO: 185070 - DNA, 120 bp, Artificial Sequence
  ENSG00000111713_2 (sequence is synthesized)
aggactgtaagaagaatgcttcgaggccgatccctctctgtaacatccctgggtgggcttccccagtgggaagtcgaagaacttcctgtggaggagttactgctctttgaagttgcttgg

SEQ ID NO: 185071 - DNA, 120 bp, Artificial Sequence
  ENSG00000111713_3 (sequence is synthesized)
gaagtgaccaataaagttggaggcatctatactgtgattcagacaaaggccaaaacaacagcagatgaatggggagagaactattttctgataggtccatattttgagcataatatgaag

SEQ ID NO: 185072 - DNA, 120 bp, Artificial Sequence
  ENSG00000111713_4 (sequence is synthesized)
actcaggtggaacagtgtgaacctgtaaatgatgctgtcagaagagcagtggacgcaatgaataagcatggctgccaggtgcattttggaagatggctgatagaaggaagtccttatgtg

SEQ ID NO: 185073 - DNA, 120 bp, Artificial Sequence
  ENSG00000111713_5 (sequence is synthesized)
gtactttttgacataggctattcagcttggaatctggacaggtggaagggtgacctctgggaagcatgcagtgtcggcattccttatcatgaccgagaagccaatgatatgctgatattt

SEQ ID NO: 185074 - DNA, 120 bp, Artificial Sequence
  ENSG00000111713_6 (sequence is synthesized)
ggatctttaactgcctggttcttaaaagaggtgacagatcatgcagatggtaaatatgtcgttgcccaattccatgaatggcaggctggaattggactgatcctttctcgagccaggaaa

SEQ ID NO: 185075 - DNA, 120 bp, Artificial Sequence
  ENSG00000111713_7 (sequence is synthesized)
cttcctattgccacaatatttacaacccacgctacactacttgggaggtatctctgtgcagcaaatattgatttctacaaccatcttgataagtttaacattgacaaagaggctggggaa

SEQ ID NO: 185076 - DNA, 120 bp, Artificial Sequence
  ENSG00000111713_8 (sequence is synthesized)
aggcagatttaccaccggtactgcatggagcgagcttccgttcattgcgctcacgtgttcaccacggtttctgaaataacagcaatagaagctgaacatatgctgaagagaaagcctgat

SEQ ID NO: 185077 - DNA, 120 bp, Artificial Sequence
  ENSG00000111713_9 (sequence is synthesized)
gtagttactccaaacggcttgaatgttaagaaattttcagcagtgcatgagtttcaaaatctacatgccatgtacaaggccagaatccaagattttgttcgaggtcatttctatggtcat

SEQ ID NO: 185078 - DNA, 120 bp, Artificial Sequence
  ENSG00000111713_10 (sequence is synthesized)
ctcgactttgatcttgaaaagactttgttccttttcattgctgggaggtatgagttttcaaacaaaggagctgacatcttcctagaatccttatccaggctaaatttcctgctgaggatg

SEQ ID NO: 185079 - DNA, 120 bp, Artificial Sequence
  ENSG00000111713_11 (sequence is synthesized)
cataaaagtgacatcacagtgatggtgtttttcattatgcctgccaagacaaataatttcaacgtggaaaccctgaaaggacaagcagtgcgaaaacagctgtgggatgttgcacattct

SEQ ID NO: 185080 - DNA, 120 bp, Artificial Sequence
  ENSG00000111713_12 (sequence is synthesized)
gtgaaggaaaagtttggaaaaaaactctatgatgcattattaagaggagaaattcctgacctgaacgatattttagatcgagatgatctaacaattatgaaaagagccatcttttcaact

SEQ ID NO: 185081 - DNA, 120 bp, Artificial Sequence
  ENSG00000111713_13 (sequence is synthesized)
acaaccgcacagatagagtcaaggtgattttgcacccagagtttctatcctccaccagtcccttactacccatggactatgaagagtttgttagaggttgtcatcttggagtatttccat

SEQ ID NO: 185082 - DNA, 120 bp, Artificial Sequence
  ENSG00000111713_14 (sequence is synthesized)
catactatgaaccctggggttatactccagctgaatgcactgtgatgggtatccccagtgtgaccacgaatctctccgggtttggctgtttcatgcaggagcacgtggctgatcctactg

SEQ ID NO: 185083 - DNA, 120 bp, Artificial Sequence
  ENSG00000111713_15 (sequence is synthesized)
cttacggtatttacatcgttgacaggcggttccgttctccagatgattcttgcaatcagctgactaagtttctctatggattttgcaaacagtcacgccgccaaaggattatccagagga

SEQ ID NO: 185084 - DNA, 120 bp, Artificial Sequence
  ENSG00000111713_16 (sequence is synthesized)
acagaactgagaggctctcagatcttctggattggagatacttaggcagatattaccagcatgccagacacctgacattaagcagagcttttccagataaattccatgtggaactaacat

SEQ ID NO: 185085 - DNA, 120 bp, Artificial Sequence
  ENSG00000111713_17 (sequence is synthesized)
caccaccaacgacagaaggatttaaatatcccaggccttcctcagtaccaccttctccttcagggtctcaggcctccagtcctcagagcagtgatgtggaagatgaagtggaggatgaga

SEQ ID NO: 185086 - DNA, 120 bp, Artificial Sequence
  ENSG00000111713_18 (sequence is synthesized)
gatacgatgaggaagaggaggctgaaagggatcggttaaatatcaagtcaccattttcactgagccacgttcctcatgggaagaaaaagctgcatggtgaatataagaactgaattctac

SEQ ID NO: 185087 - DNA, 120 bp, Artificial Sequence
  ENSG00000111713_19 (sequence is synthesized)
atgtgctgcatgaagagctaatttaaaaaagcaaagtaagactaattatttaaaataaaaatgccacaaatttcattttctccttctaagtattacaatggagtttattctctgcctaaa

SEQ ID NO: 185088 - DNA, 120 bp, Artificial Sequence
  ENSG00000111713_20 (sequence is synthesized)
aagtggaagaaattgagtgaatgacaattttgtaatttaggataagatccaagttattttccccaactcttgtttcccccataaagttaggcatgaggaggagcactcattaaaggcaga

SEQ ID NO: 185089 - DNA, 120 bp, Artificial Sequence
  ENSG00000111713_21 (sequence is synthesized)
agacggaaaagtgtttttaaaatggtgaatttaagtggtaaggattttctcttactctgtttatttttaaatgatcatcataatcctttgcttactatttatgcagcttctctaccccac

SEQ ID NO: 185090 - DNA, 120 bp, Artificial Sequence
  ENSG00000111713_22 (sequence is synthesized)
cacacaaatttcccatttcccccccgaaaaccttgatcttacccatgaatgtgcactacctacattttttaaatagctaggtttttactgattattttcatttttcacatgcatcagaac

SEQ ID NO: 185091 - DNA, 120 bp, Artificial Sequence
  ENSG00000111713_23 (sequence is synthesized)
catgatttagatgtagttttgcagagacaaaaatccatgagtgaatagctatcctaagtccatattttgatgcatattaatggacatttatgtcacttttgaaatctagaattgatgttg

SEQ ID NO: 185092 - DNA, 120 bp, Artificial Sequence
  ENSG00000111713_24 (sequence is synthesized)
taattaatgcaagatattaccatgtacatggtaccaccatcttactgtaacatttttctattgtttaaatagaaagcctttttaaaatttggtcaatcttcatagatgataacttgtaaa

SEQ ID NO: 185093 - DNA, 120 bp, Artificial Sequence
  ENSG00000111713_25 (sequence is synthesized)
atccaagtaaataaacacattaatatttaataacttaactttcactggtaatgccttgtttcttcatagatgataagttgttaaatccaagtaaataaacacattaatattgaataacaa

SEQ ID NO: 185094 - DNA, 120 bp, Artificial Sequence
  ENSG00000111716_0 (sequence is synthesized)
cttgcagagccggcgccggaggagacgcacgcagctgactttgtcttctccgcacgactgttacagaggtctccagagccttctctctcctgtgcaaaatggcaactcttaaggaaaaac

SEQ ID NO: 185095 - DNA, 120 bp, Artificial Sequence
  ENSG00000111716_1 (sequence is synthesized)
tcattgcaccagttgcggaagaagaggcaacagttccaaacaataagatcactgtagtgggtgttggacaagttggtatggcgtgtgctatcagcattctgggaaagtctctggctgatg

SEQ ID NO: 185096 - DNA, 120 bp, Artificial Sequence
  ENSG00000111716_2 (sequence is synthesized)
aacttgctcttgtggatgttttggaagataagcttaaaggagaaatgatggatctgcagcatgggagcttatttcttcagacacctaaaattgtggcagataaagattattctgtgactg

SEQ ID NO: 185097 - DNA, 120 bp, Artificial Sequence
  ENSG00000111716_3 (sequence is synthesized)
ccaattctaagattgtagtggtaactgcaggagtccgtcagcaagaaggggagagtcggctcaatctggtgcagagaaatgttaatgtcttcaaattcattattcctcagatcgtcaagt

SEQ ID NO: 185098 - DNA, 120 bp, Artificial Sequence
  ENSG00000111716_4 (sequence is synthesized)
acagtcctgattgcatcataattgtggtttccaacccagtggacattcttacgtatgttacctggaaactaagtggattacccaaacaccgcgtgattggaagtggatgtaatctggatt

SEQ ID NO: 185099 - DNA, 120 bp, Artificial Sequence
  ENSG00000111716_5 (sequence is synthesized)
gagtggtgtgaatgtggcaggtgtttctctccaggaattgaatccagaaatgggaactgacaatgatagtgaaaattggaaggaagtgcataagatggtggttgaaagtgcctatgaagt

SEQ ID NO: 185100 - DNA, 120 bp, Artificial Sequence
  ENSG00000111716_6 (sequence is synthesized)
catcaagctaaaaggatataccaactgggctattggattaagtgtggctgatcttattgaatccatgttgaaaaatctatccaggattcatcccgtgtcaacaatggtaaaggggatgta

SEQ ID NO: 185101 - DNA, 120 bp, Artificial Sequence
  ENSG00000111716_7 (sequence is synthesized)
tggcattgagaatgaagtcttcctgagccttccatgtatcctcaatgcccggggattaaccagcgttatcaaccagaagctaaaggatgatgaggttgctcagctcaagaaaagtgcaga

SEQ ID NO: 185102 - DNA, 120 bp, Artificial Sequence
  ENSG00000111716_8 (sequence is synthesized)
taccctgtgggacatccagaaggacctaaaagacctgtgactagtgagctctaggctgtagaaatttaaaaactacaatgtgattaactcgagcctttagttttcatccatgtacatgga

SEQ ID NO: 185103 - DNA, 120 bp, Artificial Sequence
  ENSG00000111716_9 (sequence is synthesized)
tcacagtttgctttgatcttcttcaatatgtgaatttgggctcacagaatcaaagcctatgcttggtttaatgcttgcaatctgagctcttgaacaaataaaattaactattgtagtgtg

SEQ ID NO: 185104 - DNA, 120 bp, Artificial Sequence
  ENSG00000111716_10 (sequence is synthesized)
tccgcacgactgttacagaggtctccagagccttctctctcctggtaggtttcggctcaggaccctgaatcctggcccacaggcaagcctgatgggacgtgcggggtagtacttgtatgg

SEQ ID NO: 185105 - DNA, 120 bp, Artificial Sequence
  ENSG00000111716_11 (sequence is synthesized)
ggagacgcgggaaggaggaagaagcacatctgtcctccgcggcctttagctctgagcatccggccgcgggccctgactttgccgctcagtttggggcgcagggggggccgtgccctggcg

SEQ ID NO: 185106 - DNA, 120 bp, Artificial Sequence
  ENSG00000111716_12 (sequence is synthesized)
gttaagttcagtgttttggtgtttctgttgttattgttttggactaaaatcagtcccagtattcatttacagaagcagtttacatgtcttctttcattggccctaaatagtggtgtttgc

SEQ ID NO: 185107 - DNA, 120 bp, Artificial Sequence
  ENSG00000111716_13 (sequence is synthesized)
aaaacaaatgcctctgtcccaggccagatgttcaaaaaatgtgacaagagttttagctaaagcaatttcatgtttttgcttcatctggcttggttatagattctgaaggcttttaaaact

SEQ ID NO: 185108 - DNA, 120 bp, Artificial Sequence
  ENSG00000111716_14 (sequence is synthesized)
tttttataaagattatcctgggatggagaatgaagcattcgaacatagtttcaatttgtaagaaacattttgacatatttgaccttttattttctggaaaatcccattatacagaattga

SEQ ID NO: 185109 - DNA, 120 bp, Artificial Sequence
  ENSG00000111716_15 (sequence is synthesized)
acttgagcccttgtccttgaaggggattgagcgagccgaggggaggggtaggcggtactcggatttccaatcacaatggagaaacctaagaggctgcggtggttgtggggccccgccccc

SEQ ID NO: 185110 - DNA, 120 bp, Artificial Sequence
  ENSG00000111716_16 (sequence is synthesized)
ggaattttattatatctttaaaagatttctttttttcctgagcaatttgaagttgtagatgtaatcccacttcactttcaaatatttaagcatgtatctcctaaaagaattatattctcc

SEQ ID NO: 185111 - DNA, 120 bp, Artificial Sequence
  ENSG00000111716_17 (sequence is synthesized)
agaagccagagcagacagcaatttcgggacattgcagagctgtagtagatctgtactggtctgcagacagacaataatttgcactaagaccaggaagacgttctgtgaggaagacatagg

SEQ ID NO: 185112 - DNA, 120 bp, Artificial Sequence
  ENSG00000111716_18 (sequence is synthesized)
gcagagccggcgccggaggagacgcacgcagctgactttgtcttctccgcacgactgttacagaggtctccagagccttctctctcctggagccatgcgccagttctttcctgcagggcc

SEQ ID NO: 185113 - DNA, 120 bp, Artificial Sequence
  ENSG00000111716_19 (sequence is synthesized)
tcttttctggatgcttaggggcttcgtttactttaccagccttgggtgctccgagtaaggaagtcctagacttgtccccacagaccttactcggggagatctctagcttctgcatgccct

SEQ ID NO: 185114 - DNA, 120 bp, Artificial Sequence
  ENSG00000111716_20 (sequence is synthesized)
ggacattgcagagctgtagtagatctgtactggtctgcagacagacaataatttgcactaccaggaagacgttctgtgaggaagacataggtggaaatacggaaagcagaaaagacaact

SEQ ID NO: 185115 - DNA, 120 bp, Artificial Sequence
  ENSG00000111716_21 (sequence is synthesized)
ggagataacagaagagccggcgccggaggagacgcacgcagctgactttgtcttctccgcacgactgttacagaggtctccagagccttctctctcctgtgcaaaatggcaactcttaag

SEQ ID NO: 185116 - DNA, 120 bp, Artificial Sequence
  ENSG00000111716_22 (sequence is synthesized)
gttttaagcattttacatatatattaattcatttaacactcaaaaagggaacactaaggcaataaagggtaaataatttgcccaagattatagttagagacagagcagtagtcaaagtca

SEQ ID NO: 185117 - DNA, 120 bp, Artificial Sequence
  ENSG00000111725_0 (sequence is synthesized)
gactccttccgcaggctccttgggacccgcggttccgggagtcccttgctcagggtccctttcctgcagtgaggcgccgtccgccttccctgtgtccccgcagacccccatcatgggcaa

SEQ ID NO: 185118 - DNA, 120 bp, Artificial Sequence
  ENSG00000111725_1 (sequence is synthesized)
taccagcagtgagcgcgccgcgctggagcggcatggtggccataagacgccccggagggacagctcggggggcaccaaggacggggacaggcccaagatcctgatggacagccccgaaga

SEQ ID NO: 185119 - DNA, 120 bp, Artificial Sequence
  ENSG00000111725_2 (sequence is synthesized)
cgccgacctcttccactccgaggaaatcaaggcaccagagaaggaggaattcctggcctggcagcatgatctggaagtgaatgataaagctcccgcccaggctcggccaacggtgtttcg

SEQ ID NO: 185120 - DNA, 120 bp, Artificial Sequence
  ENSG00000111725_3 (sequence is synthesized)
atggacggggggcggaaaggaagtttacttatctgggtccttcaacaactggagtaaacttcccctcaccagaagccacaataactttgtagccatcctggatctgccggaaggagagca

SEQ ID NO: 185121 - DNA, 120 bp, Artificial Sequence
  ENSG00000111725_4 (sequence is synthesized)
tcagtacaagttctttgtggatggtcagtggacgcacgacccttccgagcccatagtaaccagccagcttggcacagttaacaacatcattcaagtgaagaaaactgactttgaagtatt

SEQ ID NO: 185122 - DNA, 120 bp, Artificial Sequence
  ENSG00000111725_5 (sequence is synthesized)
tgatgctttaatggtggattcccaaaagtgctccgatgtgtctgagctgtccagttctcccccaggaccctaccatcaggagccctacgtctgcaaacccgaagagcgctttcgggcacc

SEQ ID NO: 185123 - DNA, 120 bp, Artificial Sequence
  ENSG00000111725_6 (sequence is synthesized)
ccctattctccccccacatctcctccaggtcatcctgaacaaggacacggggatttcctgtgatccagctttgcttcctgagcccaatcacgtcatgctgaaccacctatacgcgctgtc

SEQ ID NO: 185124 - DNA, 120 bp, Artificial Sequence
  ENSG00000111725_7 (sequence is synthesized)
tatcaaggatggagtgatggtgctcagcgcaacccaccggtacaagaagaagtacgtcaccaccttgttatacaagcccatatgaagagctgggggcggatggtggcccaggagacagca

SEQ ID NO: 185125 - DNA, 120 bp, Artificial Sequence
  ENSG00000111725_8 (sequence is synthesized)
caccaccaggctccacacgtgcatgctttccccaagagggaatggactgtacattgctcatttcacactcttcagaagacatttcatacctgccctggtcctgcttgaaggtttgtccag

SEQ ID NO: 185126 - DNA, 120 bp, Artificial Sequence
  ENSG00000111725_9 (sequence is synthesized)
tgagcctcggggactcatcaagtccaagaaaagagggaggggtggcagaggatctgcagccctggccccgcggtgcatgaggctgggtgcagttctaaacctacattctcgatttttctt

SEQ ID NO: 185127 - DNA, 120 bp, Artificial Sequence
  ENSG00000111725_10 (sequence is synthesized)
aagccaaaaatgaatgctaactcctttgccagtaaaattctgggaaacagggactgaggccacacatcatttccagtcatctgtgtgtttttaaggccagccacttgtccctgttgaggc

SEQ ID NO: 185128 - DNA, 120 bp, Artificial Sequence
  ENSG00000111725_11 (sequence is synthesized)
ctggctatggaactaaatacagtgttggtcttgcctgtccttcaaaatcaacaacagattgtctctcggctccagggaggtgtcatttctatagaaattagaagctttctgatttctaga

SEQ ID NO: 185129 - DNA, 120 bp, Artificial Sequence
  ENSG00000111725_12 (sequence is synthesized)
tgaggttttacaattgtttcttacagtcatgtgcactaagtactctttttgtaagcagaggtggctggctctgcagccttaaggccattttttaagtcaccacgtctagaagtcacatga

SEQ ID NO: 185130 - DNA, 120 bp, Artificial Sequence
  ENSG00000111725_13 (sequence is synthesized)
actctgctcagcaataatctgttctcagaacagacttttcaacctgctgccggatttctccattcagctggatgatcctcaggactgaccagttagctggcaggttgtccagctttttat

SEQ ID NO: 185131 - DNA, 120 bp, Artificial Sequence
  ENSG00000111725_14 (sequence is synthesized)
tccagtcataataggtgacagtgttaaccgtgaaaacttgagaggcactctgccctcttccctataaaatcacacagcgtgattttacaaggtcccgtggcaccttgctcaggacctctg

SEQ ID NO: 185132 - DNA, 120 bp, Artificial Sequence
  ENSG00000111725_15 (sequence is synthesized)
cccctagttagcaagactgcagcagttgctgttgcttattctgaaaggaatgtagaacttgacagcagccttctgagtctgggtcaggaagatgtcctttggaccaaagcagacttcttt

SEQ ID NO: 185133 - DNA, 120 bp, Artificial Sequence
  ENSG00000111725_16 (sequence is synthesized)
atacgcagctcagtttcccgggagtcgccacagatgtacccactagcccaggttgctgtgagtcagcggaagctcccgttatgccctttgctcctggtgggagagggaggagtgagctcc

SEQ ID NO: 185134 - DNA, 120 bp, Artificial Sequence
  ENSG00000111725_17 (sequence is synthesized)
ctgggttccagtatttacttggtatacctgagtttgggggtacccttttttgtgacttttcaaaacagtgaattactgtcaccttgatggacaagtttcaataaaactttgtaaaaataa

SEQ ID NO: 185135 - DNA, 120 bp, Artificial Sequence
  ENSG00000111725_18 (sequence is synthesized)
aagcggaaatggaatcgagatagcctcgcgcgtttagctggccgccgccacctccacgccctaggccgggccgacttacggagtcgccggaagcggaagtcgctgaggggtggtgaagcg

SEQ ID NO: 185136 - DNA, 120 bp, Artificial Sequence
  ENSG00000111725_19 (sequence is synthesized)
gtagcttttaagtgttctcaccacaaaaacatggtaagcatgttctgcgtgtgttgatgagcttgatttagccattccacaatgtgtccatatttcaaaacaacatattgtacatggtaa

SEQ ID NO: 185137 - DNA, 120 bp, Artificial Sequence
  ENSG00000111725_20 (sequence is synthesized)
atatacataattttatctgtcaatctttgaaattgattaattttttaaaaacccctcttaggctcacacagcaactggctgagccagcagtcacatcaggcttggctggtgccagatcct

SEQ ID NO: 185138 - DNA, 120 bp, Artificial Sequence
  ENSG00000111725_21 (sequence is synthesized)
tctgggatcctaagcctacagcagttgttctacacttttttccatttgaattgcatttataacagttgggggtatacaatgaaaaaataaatcccgatttctggcttctcttaaaacata

SEQ ID NO: 185139 - DNA, 120 bp, Artificial Sequence
  ENSG00000111725_22 (sequence is synthesized)
ggaaggtgcggcgggcagctctgagtgccagcccggtggcagattttccagagtagtggtgtcttgcccagtgtgatccagctttgcttcctgagcccaatcacgtcatgctgaaccacc

SEQ ID NO: 185140 - DNA, 87 bp, Artificial Sequence
  ENSG00000111725_23 (sequence is synthesized)
aaaccatcagatctcatgagactcactcactgtcagagaacagcatggggaaaccgcccccatgatcgatacctccacctggtcctg

SEQ ID NO: 185141 - DNA, 120 bp, Artificial Sequence
  ENSG00000111725_24 (sequence is synthesized)
atgctgaattgtctaaatgggctaaaaatgtttgttctcctgcagctgaactcttggttttatgtggaaacgttttgttctgtagctggtttggcaagtaagctcggggggcagcccacc

SEQ ID NO: 185142 - DNA, 73 bp, Artificial Sequence
  ENSG00000111725_25 (sequence is synthesized)
tttcagcacaatctcggggcactgcaaccttcgtctcccggactcaaaccatcctgcctcagcctcccgagta

SEQ ID NO: 185143 - DNA, 77 bp, Artificial Sequence
  ENSG00000111725_26 (sequence is synthesized)
ctgggccgtcaccctgcttttttttaaagcgtacatagaaaagtctttcagcttctagaggcaccagagaaggagga

SEQ ID NO: 185144 - DNA, 120 bp, Artificial Sequence
  ENSG00000111725_27 (sequence is synthesized)
tgtgctgagacgaggaatgcacgtgtacacatgcaggtgtccctacagtggtccctgccgggctgccaggacagggtctcagtgcttgttaccctacagggtacccaacagggcttgcct

SEQ ID NO: 185145 - DNA, 120 bp, Artificial Sequence
  ENSG00000111725_28 (sequence is synthesized)
ttctcaggtcacctcctgtgctgggagtgcccctgcagctgggtagccatcctggtataggcccagaagaggccagtggtaaggacagcacgcctcagctggcagggcccaccatctttc

SEQ ID NO: 185146 - DNA, 120 bp, Artificial Sequence
  ENSG00000111725_29 (sequence is synthesized)
cagcactgagttggcaacagtctcaaataggtcacaggtgaagagtttcaaggacatgtagcttctgccttagaagcacttagttgacactgcttcccttagctctaactttacaaaggt

SEQ ID NO: 185147 - DNA, 78 bp, Artificial Sequence
  ENSG00000111725_30 (sequence is synthesized)
tagttgacactgcttcccttagctctaactttacaaaggttggtgggtaagatgactttcagtgccctcctaagctag

SEQ ID NO: 185148 - DNA, 120 bp, Artificial Sequence
  ENSG00000111725_31 (sequence is synthesized)
tttctagaaaagggaggcatcactagccatcttctctgatggagactgctgctgggaatagacaagctgagagtggcccagggggctgggaatatgagaatgtcaggacccctctgtcca

SEQ ID NO: 185149 - DNA, 120 bp, Artificial Sequence
  ENSG00000111725_32 (sequence is synthesized)
aggtagcactaagctctaatgtaaactgtggttacagttgtcactactaaagggttaacatttattttgccccaaactaatcttaagtgcttttcgtgtattcttattcaagcctcacaa

SEQ ID NO: 185150 - DNA, 120 bp, Artificial Sequence
  ENSG00000111725_33 (sequence is synthesized)
caaccatgtgaagtaggtgcaattattacccccattttagggatggggaaactgaggcacagagcagtagggagaacacttaaaatctactgtcttagagattttcaagaatacattgtt

SEQ ID NO: 185151 - DNA, 120 bp, Artificial Sequence
  ENSG00000111725_34 (sequence is synthesized)
actaatagtcaccgtgttgtacagtggatctcttgaacgtattcctcctgtctaactgaaatgttgtattctttgaccagcatctccctacccccaccactcctagccgctggcaaccac

SEQ ID NO: 185152 - DNA, 120 bp, Artificial Sequence
  ENSG00000111725_35 (sequence is synthesized)
cactctactctctacttctgtgagttcgactttcttggattccacataagtgacatcacatgggatttgtctttctgtgcctggctcatttcacttaatgtcctccaggtttatccatgc

SEQ ID NO: 185153 - DNA, 120 bp, Artificial Sequence
  ENSG00000111725_36 (sequence is synthesized)
tgtcacagatgacaagattccttttgtaaggctcagcagcactgcattgtgtatcagtacctcatttctttatccattcatccattgtggacacctacgttgattccacgtcttggctat

SEQ ID NO: 185154 - DNA, 120 bp, Artificial Sequence
  ENSG00000111725_37 (sequence is synthesized)
tatgaatagagctgcagtgaacgtgggagtacagatatctcgacatgctgatttcatttccttggagtatctaccctgtagtgggattgctagaccatgtggtaattttagttataactt

SEQ ID NO: 185155 - DNA, 120 bp, Artificial Sequence
  ENSG00000111725_38 (sequence is synthesized)
gagtgccagcccggtggcagattttccagagtagtggtgtcttgcccaggtatccgtttcattcttcaggttcattgagtcttacagatacaagttttgaatccattgctcaggagcgtt

SEQ ID NO: 185156 - DNA, 120 bp, Artificial Sequence
  ENSG00000111725_39 (sequence is synthesized)
tagtgcagatggtctcttcctgtgttctctgaaagtgctgttaatagctgctttcttcctgccccaccctccataagaggacagggccgtggcccacacttgaaagaggccggggtaaat

SEQ ID NO: 185157 - DNA, 120 bp, Artificial Sequence
  ENSG00000111725_40 (sequence is synthesized)
gcctggccagagacacacaccgatgcctccagcaggcatgcagggagctcccttcaggtcagaaggcgtgaccttcatctcacctgtcgtcttggacaagcccttgcgctgcctgatttg

SEQ ID NO: 185158 - DNA, 120 bp, Artificial Sequence
  ENSG00000111725_41 (sequence is synthesized)
ggaagagaggtcggcctgagcgctgcctcctgtcctttgatatctggcactgggaagtaaaggggagaatcttggtttccaaatcccaaatgctcaccgctgcctttgttccctcacagt

SEQ ID NO: 185159 - DNA, 120 bp, Artificial Sequence
  ENSG00000111725_42 (sequence is synthesized)
ggcgggactgacttaaagggcagcttccagggtctggcacaggccatcaggctcaggttctgaagctggcccgggaatttgtggttttatgaagcccttaatgattctcatgtcctctga

SEQ ID NO: 185160 - DNA, 120 bp, Artificial Sequence
  ENSG00000111726_0 (sequence is synthesized)
aggcggggatcgggcggcgccgagctgaggtggtgagggactagctcccggatgtggagaagctggggagaaggcgtgggaggaagatggactcggtggagaagggggccgccacctccg

SEQ ID NO: 185161 - DNA, 120 bp, Artificial Sequence
  ENSG00000111726_1 (sequence is synthesized)
tctccaacccgcgggggcgaccgtcccggggccggccgccgaagctgcagcgcaactctcgcggcggccagggccgaggtgtggagaagcccccgcacctggcagccctaattctggccc

SEQ ID NO: 185162 - DNA, 120 bp, Artificial Sequence
  ENSG00000111726_2 (sequence is synthesized)
ggggaggcagcaaaggcatccccctgaagaacattaagcacctggcgggggtcccgctcattggctgggtcctgcgtgcggccctggattcaggggccttccagagtgtatgggtttcga

SEQ ID NO: 185163 - DNA, 120 bp, Artificial Sequence
  ENSG00000111726_3 (sequence is synthesized)
cagaccatgatgaaattgagaatgtggccaaacaatttggtgcacaagttcatcgaagaagttctgaagtttcaaaagacagctctacctcactagatgccatcatagaatttcttaatt

SEQ ID NO: 185164 - DNA, 120 bp, Artificial Sequence
  ENSG00000111726_4 (sequence is synthesized)
atcataatgaggttgacattgtaggaaatattcaagctacttctccatgtttacatcctactgatcttcaaaaagttgcagaaatgattcgagaagaaggatatgattctgttttctctg

SEQ ID NO: 185165 - DNA, 120 bp, Artificial Sequence
  ENSG00000111726_5 (sequence is synthesized)
ttgtgagacgccatcagtttcgatggagtgaaattcagaaaggagttcgtgaagtgaccgaacctctgaatttaaatccagctaaacggcctcgtcgacaagactgggatggagaattat

SEQ ID NO: 185166 - DNA, 120 bp, Artificial Sequence
  ENSG00000111726_6 (sequence is synthesized)
atgaaaatggctcattttattttgctaaaagacatttgatagagatgggttacttgcagggtggaaaaatggcatactacgaaatgcgagctgaacatagtgtggatatagatgtggata

SEQ ID NO: 185167 - DNA, 120 bp, Artificial Sequence
  ENSG00000111726_7 (sequence is synthesized)
ataaaacttttggtttgcaatattgatggatgtctcaccaatggccacatttatgtatcaggagaccaaaaagaaataatatcttatgatgtaaaagatgctattgggataagtttatta

SEQ ID NO: 185168 - DNA, 120 bp, Artificial Sequence
  ENSG00000111726_8 (sequence is synthesized)
aagaaaagtggtattgaggtgaggctaatctcagaaagggcctgttcaaagcagacgctgtcttctttaaaactggattgcaaaatggaagtcagtgtatcagacaagctagcagttgta

SEQ ID NO: 185169 - DNA, 120 bp, Artificial Sequence
  ENSG00000111726_9 (sequence is synthesized)
gatgaatggagaaaagaaatgggcctgtgctggaaagaagtggcatatcttggaaatgaagtgtctgatgaagagtgcttgaagagagtgggcctaagtggcgctcctgctgatgcctgt

SEQ ID NO: 185170 - DNA, 120 bp, Artificial Sequence
  ENSG00000111726_10 (sequence is synthesized)
tctactgcccagaaggctgttggatacatttgcaaatgtaatggtggccgtggtgccatccgagaatttgcagagcacatttgcctactaatggaaaaggttaataattcatgccaaaaa

SEQ ID NO: 185171 - DNA, 120 bp, Artificial Sequence
  ENSG00000111726_11 (sequence is synthesized)
tagaaattagcgtaatattgagaaaaaaatgatacagccttcttcagccagtttgcttttatttttgattaagtaaattccatgttgtaatgttacagagagtgtgatttggtttgtgat

SEQ ID NO: 185172 - DNA, 120 bp, Artificial Sequence
  ENSG00000111726_12 (sequence is synthesized)
atatatatattgtgctctacttttctctttacgcaagataattatttagagactgattacagtctttctcagatttttagtaaatgcaagtaagaacatcatcaaagttcactttgtatt

SEQ ID NO: 185173 - DNA, 120 bp, Artificial Sequence
  ENSG00000111726_13 (sequence is synthesized)
gtaccctgtaaaactgtgtgtttgtgtgctttcaaagatgttgggattttatttatctggggacagtgtgtatggtaagacatgcccttctattaataaaactacatttctcaaacttga

SEQ ID NO: 185174 - DNA, 120 bp, Artificial Sequence
  ENSG00000111726_14 (sequence is synthesized)
aaaccctgactcgaaaaaataaaaaagtaaaaataaatttaaaaatcatttttatgtgactgatttttactgggttattcatttttctcagtactgtagaaatgaattcattgttctgta

SEQ ID NO: 185175 - DNA, 120 bp, Artificial Sequence
  ENSG00000111726_15 (sequence is synthesized)
ttataataaagttttgatatatgtgaatgaatattaaaaacagtattcatgacatttatactacctttagggtggaaaaatggcatactacgaaatgcgagctgaacatagtgtggatat

SEQ ID NO: 185176 - DNA, 120 bp, Artificial Sequence
  ENSG00000111727_0 (sequence is synthesized)
attgtgggcagaggggcgggggttgggaagatggcggctcccagcctcctcaactggaggcgagtttcttccttcacggggccggtcccccgcgcccggcacggacaccgagcggtggcc

SEQ ID NO: 185177 - DNA, 120 bp, Artificial Sequence
  ENSG00000111727_1 (sequence is synthesized)
atccgggagctgatgatcatctttggagggggaaatgagggcatcgcggatgagctgcacgtctacaacacggctacgaatcagtggtttctgccagctgttagaggagatatccctcca

SEQ ID NO: 185178 - DNA, 120 bp, Artificial Sequence
  ENSG00000111727_2 (sequence is synthesized)
ggctgtgctgcccatggatttgtctgtgatggtaccagaatattagtatttgggggaatggttgaatatggaagatacagcaatgagttatatgagttacaagcaagtcgttggttatgg

SEQ ID NO: 185179 - DNA, 120 bp, Artificial Sequence
  ENSG00000111727_3 (sequence is synthesized)
aaaaaagtgaaaccccatccccctccttctggtttacctccttgtcctcggcttggacatagcttctctttatatggtaacaaatgctatttgtttggtggcctggcaaacgaaagcgaa

SEQ ID NO: 185180 - DNA, 120 bp, Artificial Sequence
  ENSG00000111727_4 (sequence is synthesized)
gattcaaacaataatgttcccagatatttaaatgatttttatgagttggagctacagcatggctctggtgttgtgggttggagcattccagtgactaaaggggttgtgccttctccaaga

SEQ ID NO: 185181 - DNA, 120 bp, Artificial Sequence
  ENSG00000111727_5 (sequence is synthesized)
gaatcccacacagctgttatatattgcaaaaaagattctggaagtcctaaaatgtatgtttttggtggaatgtgtggtgctcgcctggatgacctatggcagcttgacttagaaactatg

SEQ ID NO: 185182 - DNA, 120 bp, Artificial Sequence
  ENSG00000111727_6 (sequence is synthesized)
tcatggtcaaaaccagaaactaaagggacagtgccacttccacgaagccttcatacagccagtgttataggaaacaagatgtacatttttggtggatgggtcccacataagggggaaaat

SEQ ID NO: 185183 - DNA, 120 bp, Artificial Sequence
  ENSG00000111727_7 (sequence is synthesized)
actgagacttcacctcatgattgtgaatggagatgtaccagttcattttcttacctaaatctggatacaacagagtggaccaccctagtatcagattctcaggaagataaaaaaaattca

SEQ ID NO: 185184 - DNA, 120 bp, Artificial Sequence
  ENSG00000111727_8 (sequence is synthesized)
agaccaagaccaagagctggccactgtgctgttgcaatcggcactcgattgtatttttggagtggaagagatggctacaaaaaagcactgaatagtcaagtttgctgcaaggatctttgg

SEQ ID NO: 185185 - DNA, 120 bp, Artificial Sequence
  ENSG00000111727_9 (sequence is synthesized)
tatcttgatactgagaaaccaccggcaccatctcaagtacagctgatcaaagccactaccaactcctttcatgtcaagtgggatgaagtgtctacagttgagggctatcttttgcagttg

SEQ ID NO: 185186 - DNA, 120 bp, Artificial Sequence
  ENSG00000111727_10 (sequence is synthesized)
agtacagacttgccataccaagctgcatcatcagattcttcagcagcaccaaatatgcaaggagtcaggatggaccctcacagacaaggcagtaataacatcgttcctaacagtatcaat

SEQ ID NO: 185187 - DNA, 120 bp, Artificial Sequence
  ENSG00000111727_11 (sequence is synthesized)
gatacaataaacagcacaaaaactgaacagccagccacaaaagaaacttcaatgaaaaacaaaccagactttaaagcactgacggattctaatgccattttatatccatctttggcatca

SEQ ID NO: 185188 - DNA, 120 bp, Artificial Sequence
  ENSG00000111727_12 (sequence is synthesized)
aatgcttctaatcataatagtcatgtggtggatatgctaaggaaaaatgaaggtcctcacacttcagcaaatgtaggtgttctaagtagttgcctggatgtaagaacagtaattcctgaa

SEQ ID NO: 185189 - DNA, 120 bp, Artificial Sequence
  ENSG00000111727_13 (sequence is synthesized)
acatctgtatccagtactgtttccagcacacaaactatggtaacccagcagaccattaaaactgaatcatccagtacaaatggggcagttgttaaagatgaaacttcactaacaacattc

SEQ ID NO: 185190 - DNA, 120 bp, Artificial Sequence
  ENSG00000111727_14 (sequence is synthesized)
agtaccaaatctgaagttgatgaaacatatgcactgcctgcaacgaagatcagccgtgtagagacacatgctacagcaacgccgttttctaaagagactccttcaaatccagtggccaca

SEQ ID NO: 185191 - DNA, 120 bp, Artificial Sequence
  ENSG00000111727_15 (sequence is synthesized)
gtgaaagcgggagaacgacaatggtgtgatgtgggaatttttaaaaataatacagctttggtgagccagttttatttgctgccaaaagggaagcaaagcatctcaaaggtaggaaatgca

SEQ ID NO: 185192 - DNA, 120 bp, Artificial Sequence
  ENSG00000111727_16 (sequence is synthesized)
gatgtacctgactacagcttgcttaagaaacaagatcttgttccaggcacaggatacagattcagggttgctgcaatcaatggttgtgggataggtcctttcagcaaaatcagtgaattt

SEQ ID NO: 185193 - DNA, 120 bp, Artificial Sequence
  ENSG00000111727_17 (sequence is synthesized)
aaaacttgtattcctggttttcctggagctccttctgcagtcagaatttcaaagaatgttgaaggtatccacctttcctgggaacctccaacctcaccttctggaaatattttggaatat

SEQ ID NO: 185194 - DNA, 120 bp, Artificial Sequence
  ENSG00000111727_18 (sequence is synthesized)
tcagcctacttggctatccgcacagcacagatacaagataatccaagtcaacttgtgttcatgaggatttattgtggtcttaagacatcatgtatagtaactgctgggcaacttgcaaat

SEQ ID NO: 185195 - DNA, 120 bp, Artificial Sequence
  ENSG00000111727_19 (sequence is synthesized)
gcacatattgattatacatccaggcctgccattgtgttcaggatatcagcaaagaatgaaaagggatatggaccagctacacaagttcggtggcttcaaggtaacaataagaaagcacct

SEQ ID NO: 185196 - DNA, 120 bp, Artificial Sequence
  ENSG00000111727_20 (sequence is synthesized)
ttaaattgaattggtttttttactgaagctattgtgatgatgattatttattagtaactggttatgaagatttgtcatttaaaagagtattctctggctgtatttccagcagttatgaac

SEQ ID NO: 185197 - DNA, 120 bp, Artificial Sequence
  ENSG00000111727_21 (sequence is synthesized)
ttgagtttgtaaattgttcttaaaatgtatttgctgaattatagatccaaataaaagaaaagaagcaaagactctctgaaaattagtatatgagttcttccttacagatatagctctttt

SEQ ID NO: 185198 - DNA, 120 bp, Artificial Sequence
  ENSG00000111727_22 (sequence is synthesized)
ataaagaaaaacagtgaaattaagataaaagctagaaagctttattaccccaatatcttttataagggctgtgtaacccagtcatcctagagttattgagatgattctggtaactggctg

SEQ ID NO: 185199 - DNA, 120 bp, Artificial Sequence
  ENSG00000111727_23 (sequence is synthesized)
tatagtaaatgttctctacattgtaaatgtcctacctttgagtactccttctatctttattctatatgagcagtgttcctctaacaactgtcttctattggataatatgtgtgatactat

SEQ ID NO: 185200 - DNA, 120 bp, Artificial Sequence
  ENSG00000111727_24 (sequence is synthesized)
aataattctaatagttatttgattcctttctttgtttacagttagcacagagcttaagaaattaaaaaagaggcaagtttagaaactgcttttgaacttttattattttccaagaatcat

SEQ ID NO: 185201 - DNA, 120 bp, Artificial Sequence
  ENSG00000111727_25 (sequence is synthesized)
ggtaaaatacaacaagaacaatgagttttcttgattcttaccaggccaatatatttgaatatatttttggccaaagcacttaacttatctggccctcattttcctcataacagatgaggg

SEQ ID NO: 185202 - DNA, 120 bp, Artificial Sequence
  ENSG00000111727_26 (sequence is synthesized)
agttaaagcagtttatcttttaggtccctttcagcactaaggttttgtgtttttagtagaagtgaagtatgtccctgaacattttcatctgtcttaatggctctaattttgcttttgcta

SEQ ID NO: 185203 - DNA, 120 bp, Artificial Sequence
  ENSG00000111727_27 (sequence is synthesized)
aaattaaaatcttcataattgaattcaaaattaaagtatatgtcctcctattggagaaaaaaacaagcaccttaacaggacacaagttttaaaatagtgttttaaacatttgtaagattt

SEQ ID NO: 185204 - DNA, 120 bp, Artificial Sequence
  ENSG00000111727_28 (sequence is synthesized)
ttgtaaatgctctaaatgttttatttttgcattgtttttaccttgaaattgtataaacttttttactatgaaaatataagcattagacagctaactcaggttccattacaaccttaaaga

SEQ ID NO: 185205 - DNA, 120 bp, Artificial Sequence
  ENSG00000111727_29 (sequence is synthesized)
tacagataggcattataaacactctgctacaggtaacttgttttaaaccttttaggaatttcatggttccactgcctatttaaatctggaattaatatacagagcaataattgcagaaaa

SEQ ID NO: 185206 - DNA, 120 bp, Artificial Sequence
  ENSG00000111727_30 (sequence is synthesized)
gatatttcaaactaagagcttcaataactgcaggggcacaggtctatctttttttataccacataaccttatgccagtttaggttgactgagtagctatgtcctcaaatttcatgtatga

SEQ ID NO: 185207 - DNA, 120 bp, Artificial Sequence
  ENSG00000111727_31 (sequence is synthesized)
taccccccagcaaagatggatttaattgtgcagaattgatatatatgtgtgttccagttactaatttaaagtgtatagaatattttaatatataatttttgtaaagaactgggattttta

SEQ ID NO: 185208 - DNA, 120 bp, Artificial Sequence
  ENSG00000111727_32 (sequence is synthesized)
tactacagtatttgtaattaatgtgtctcactaattaagtttctcttgaagaaaatatgcaaattgttagacacataatgagtggtttccaaactctaaagataaaataaatgcactact

SEQ ID NO: 185209 - DNA, 120 bp, Artificial Sequence
  ENSG00000111727_33 (sequence is synthesized)
atggtgttgttagaataccttttttgtggctgtatgaatctttactctttaaatgtgtactttacaatgtttacaaggagcttctctggtttgttatcccagcaatgcccttggtgagag

SEQ ID NO: 185210 - DNA, 120 bp, Artificial Sequence
  ENSG00000111727_34 (sequence is synthesized)
cttcattctgcatttgtttaattcatatgctttgcttttggcatatgcttgctttttgcactagtagaattttaacttacctcattattatgtttgtaatcatttgtctagcttctgtaa

SEQ ID NO: 185211 - DNA, 120 bp, Artificial Sequence
  ENSG00000111727_35 (sequence is synthesized)
tgtatctgatataggctaaacaaatacttaaccaaagttaaaatacatggtaagcaattttgcacatattaaatattagggtttgttgtgtatatgtgtatacttaattataaaagaata

SEQ ID NO: 185212 - DNA, 120 bp, Artificial Sequence
  ENSG00000111727_36 (sequence is synthesized)
tgaatggaaagttatactaaaagtatatgtttcaagcccagttattttaaagatctattgctttaatagaaaaagtttggcttttaaccctttcttctctgcattaattaacaacgtgca

SEQ ID NO: 185213 - DNA, 120 bp, Artificial Sequence
  ENSG00000111727_37 (sequence is synthesized)
tcttgaagcccttctcctgataacaaggaataagttgattttaagcaaaggatagaatatttgtttgagtgtgcacatttatacctgtttagtatttgattcagttaagcctccactctt

SEQ ID NO: 185214 - DNA, 120 bp, Artificial Sequence
  ENSG00000111727_38 (sequence is synthesized)
ctggatcaggaggtgattctgaacctgtggttctaacatatgacttaactgtttagagggaagagaagtctttctatactgagggatttgttaaaatcataaatgtttttgccctgagac

SEQ ID NO: 185215 - DNA, 120 bp, Artificial Sequence
  ENSG00000111727_39 (sequence is synthesized)
ttagcccagattctattttttttttttttttggcatttgtacattaagcaccagtcatatttatctctgtgataagggattgctgactaaaaaatgccattaagaaatctctgtggcttt

SEQ ID NO: 185216 - DNA, 120 bp, Artificial Sequence
  ENSG00000111727_40 (sequence is synthesized)
gacattagtagttaataagagatcttagagctgtgtgctgatgaatagaatgaattggagcaaatagcaagagaagtgcatttagcttcttatgatttgcacattttctaaatgaagatc

SEQ ID NO: 185217 - DNA, 120 bp, Artificial Sequence
  ENSG00000111727_41 (sequence is synthesized)
cctttgtgtagcagtaggctgtatcatgcagatatttttcataggatttgcactgagttaaatgactttctttactcttcccagtcaggtaagcagttcaaatataacaagactttgtgc

SEQ ID NO: 185218 - DNA, 120 bp, Artificial Sequence
  ENSG00000111727_42 (sequence is synthesized)
cagtcctcttctgtgttctgcaactctggctctcataagtagtaaaaatatttttgatgttgcatgctctcagaattatgttttctaaaatatcatattggcttcattttagtttaataa

SEQ ID NO: 185219 - DNA, 120 bp, Artificial Sequence
  ENSG00000111727_43 (sequence is synthesized)
acttctttggcaacttaattagacatagggtatatataaactcaattttatctgcattttttaaaaaattgaaataatctgattgcatgtatgaaggactcctgcctcattacccaatta

SEQ ID NO: 185220 - DNA, 120 bp, Artificial Sequence
  ENSG00000111727_44 (sequence is synthesized)
cataaatacaattatctataggaaggtgaaattgttgatctattatttcaaagacttgtagactagcaaagattcattctgattagaaataaggtctatagctaaagatatttttatttt

SEQ ID NO: 185221 - DNA, 120 bp, Artificial Sequence
  ENSG00000111727_45 (sequence is synthesized)
aaaaaattacagcccttgtaacaaaaatcatttgtaacattggatatgaagacattattagtatttaaaattattgtagtcatttgatcataaatgaagtagcttgcaaaatagacttgg

SEQ ID NO: 185222 - DNA, 120 bp, Artificial Sequence
  ENSG00000111727_46 (sequence is synthesized)
tctttgaccctttaaggtgtaactgactgactgttgtgtttttcaagactgattttaggcagttttatgtatcgtgtaccaatgatatgtaaaataaagcaccttttctactataaacaa

SEQ ID NO: 185223 - DNA, 120 bp, Artificial Sequence
  ENSG00000111727_47 (sequence is synthesized)
ctgacttggagaatgcctgtcactcctgtgtttgaattggcatccctgtttcactgtcagttgacctaatctgttaagactttatttacttatgagttgttaatgttgtggtgtttatcc

SEQ ID NO: 185224 - DNA, 120 bp, Artificial Sequence
  ENSG00000111727_48 (sequence is synthesized)
aaatacctacttgtagatcactgcatggacttattaaatcttgaaatttttcgtatattcaataagagtcttcataaatttttttttctctgaaattagaaagagactccttcaaatcca

SEQ ID NO: 185225 - DNA, 120 bp, Artificial Sequence
  ENSG00000111727_49 (sequence is synthesized)
accgcccggtcactgcttccttgggcgggcggcggggagcgcggctcagccgggcagcccgggtccggcagctctgtcccggaccgcagctcaggatctccggggcccttggggcgcaac

SEQ ID NO: 185226 - DNA, 120 bp, Artificial Sequence
  ENSG00000111727_50 (sequence is synthesized)
ggaccccgagcggggcgcaccggccttcaggcgggggatcccggacgcccccaccccagcccgacaggcggacgcaggcgacagaagaccatgtccaaccgcctgggccactccccgaaa

SEQ ID NO: 185227 - DNA, 120 bp, Artificial Sequence
  ENSG00000111727_51 (sequence is synthesized)
tctcgcctctgtcaaaaaacaaaacccactccaaaccaaagttccttagggcctttcccgtctttgcctgccttccttccttaggaggaagaccatctagggggtgaggagggaaaacga

SEQ ID NO: 185228 - DNA, 120 bp, Artificial Sequence
  ENSG00000111727_52 (sequence is synthesized)
gggaataatgacaaaaagaagacatgtgcagtgcagccaaagattttgtgaatattttcagtctgtggttagttgaatccatggatgcagcacccatagatatggagggctaactgtact

SEQ ID NO: 185229 - DNA, 120 bp, Artificial Sequence
  ENSG00000111727_53 (sequence is synthesized)
aacattaagtgtaaataaatttctgattggcagtttatgtaagctggaaatgtttaagataatgttcaaataactgttctaaaatactttgtttcattttggtaagtccttgttttattt

SEQ ID NO: 185230 - DNA, 120 bp, Artificial Sequence
  ENSG00000111728_0 (sequence is synthesized)
ggggggggttgcctggcggcgcagcagcgcgggaggcggcgaagggcgcaggagcatcgctcggaggggacaaggggacgccacgggccacatgtttaggagggagccgagccttctccc

SEQ ID NO: 185231 - DNA, 120 bp, Artificial Sequence
  ENSG00000111728_1 (sequence is synthesized)
ggaccctcgccgagggcgaccgtgatgctgcagaaccggcgggagcgactcgccgccgccgctctctgcgcactcggagaccccagcgcccgccttctgcaggggaagcgaccatggcca

SEQ ID NO: 185232 - DNA, 120 bp, Artificial Sequence
  ENSG00000111728_2 (sequence is synthesized)
tagatcgtgacttcacccccagccacttcccctagaaagaaatccttggaaaagttgcatttgaaaaaatccttgcgctgacctttggggccgacggggccgaagaagcgtgcgtgcgtt

SEQ ID NO: 185233 - DNA, 120 bp, Artificial Sequence
  ENSG00000111728_3 (sequence is synthesized)
tgcaagtaagagaaccaaaggtgtgtgtgcatggggggctggcggtgggggaccctccgctgccacttcgcctagctttgtgctgaggccccggcccccgcccctgggacgccggggctg

SEQ ID NO: 185234 - DNA, 120 bp, Artificial Sequence
  ENSG00000111728_4 (sequence is synthesized)
cgatgagcccctgcgggcgggcccggcgacaaacgtccagaggggccatggctgtactggcgtggaagttcccgcggacccggctgcccatgggagccagtgccctctgtgtcgtggtcc

SEQ ID NO: 185235 - DNA, 120 bp, Artificial Sequence
  ENSG00000111728_5 (sequence is synthesized)
tctgttggctctacatcttccccgtctaccggctgcccaacgagaaagagatcgtgcagggggtgctgcaacagggcacggcgtggaggaggaaccagaccgcggccagagcgttcagga

SEQ ID NO: 185236 - DNA, 120 bp, Artificial Sequence
  ENSG00000111728_6 (sequence is synthesized)
aacaaatggaagactgctgcgaccctgcccatctctttgctatgactaaaatgaattcccctatggggaagagcatgtggtatgacggggagtttttatactcattcaccattgacaatt

SEQ ID NO: 185237 - DNA, 120 bp, Artificial Sequence
  ENSG00000111728_7 (sequence is synthesized)
caacttactctctcttcccacaggcaaccccattccagctgccattgaagaaatgcgcggtggtgggaaatggtgggattctgaagaagagtggctgtggccgtcaaatagatgaagcaa

SEQ ID NO: 185238 - DNA, 120 bp, Artificial Sequence
  ENSG00000111728_8 (sequence is synthesized)
attttgtcatgcgatgcaatctccctcctttgtcaagtgaatacactaaggatgttggatccaaaagtcagttagtgacagctaatcccagcataattcggcaaaggtttcagaaccttc

SEQ ID NO: 185239 - DNA, 120 bp, Artificial Sequence
  ENSG00000111728_9 (sequence is synthesized)
tgtggtccagaaagacatttgtggacaacatgaaaatttataaccacagttacatctacatgcctgccttttctatgaagacaggaacagagccatctttgagggtttattatacactgt

SEQ ID NO: 185240 - DNA, 120 bp, Artificial Sequence
  ENSG00000111728_10 (sequence is synthesized)
cagatgttggtgccaatcaaacagtgctgtttgccaaccccaactttctgcgtagcattggaaagttctggaaaagtagaggaatccatgccaagcgcctgtccacaggactttttctgg

SEQ ID NO: 185241 - DNA, 120 bp, Artificial Sequence
  ENSG00000111728_11 (sequence is synthesized)
tgagcgcagctctgggtctctgtgaagaggtggccatctatggcttctggcccttctctgtgaatatgcatgagcagcccatcagccaccactactatgacaacgtcttacccttttctg

SEQ ID NO: 185242 - DNA, 120 bp, Artificial Sequence
  ENSG00000111728_12 (sequence is synthesized)
gcttccatgccatgcccgaggaatttctccaactctggtatcttcataaaatcggtgcactgagaatgcagctggacccatgtgaagatacctcactccagcccacttcctaggaacaat

SEQ ID NO: 185243 - DNA, 120 bp, Artificial Sequence
  ENSG00000111728_13 (sequence is synthesized)
ggaagaagaaaggactgaaccagggtatttttgttaggttttctatgtgactccaagagggaatggtcaagttgtttcatgagtttgcatgggcccttggaaaaacaggaaaggagcaat

SEQ ID NO: 185244 - DNA, 120 bp, Artificial Sequence
  ENSG00000111728_14 (sequence is synthesized)
gaagatccaagcaaaactttactttcagcgttggcttggaggacaaataagaaatgaaacatcctatgaaatactttatagcacatggcagatttgcaactagtaaaatgctggtgaaat

SEQ ID NO: 185245 - DNA, 120 bp, Artificial Sequence
  ENSG00000111728_15 (sequence is synthesized)
gctgttggtaaagcacatggttcaaatctagaagatgcagttcaaaaacaagacagactcgagttgttagggctgaggaaccaatcaaggtagaacaaagaaaatgttggggtaaaagtg

SEQ ID NO: 185246 - DNA, 120 bp, Artificial Sequence
  ENSG00000111728_16 (sequence is synthesized)
ttgctgattgtcaacacaaactggcttaataatattaataagaacctgtcttattaagactggctttagaaccgtaggtttttttaaaaaattattatttatttttgccctctttgggga

SEQ ID NO: 185247 - DNA, 120 bp, Artificial Sequence
  ENSG00000111728_17 (sequence is synthesized)
agtgggtgggtagatttaaaaaatcccttcctgagtaataaagatacaaaatgttactgctgataattgtgatttgttgagccacgtctatattaactatagctcccctctatttttaaa

SEQ ID NO: 185248 - DNA, 120 bp, Artificial Sequence
  ENSG00000111728_18 (sequence is synthesized)
attttacataagaattgcttcttcctcttttgtcaagtccacagagacaatgtgaagcattattgaatttagactgtgttgcttcatagtctggataacaggagccactttccttcctca

SEQ ID NO: 185249 - DNA, 120 bp, Artificial Sequence
  ENSG00000111728_19 (sequence is synthesized)
gaatttaggacataaacccaattttaggtctgcattatgtaagcctgtttgcattgtcatttttattttagtgcaaaagactaccaatatgagtgaattatttgtttgtaaattggcata

SEQ ID NO: 185250 - DNA, 120 bp, Artificial Sequence
  ENSG00000111728_20 (sequence is synthesized)
attgtcttcataatttaatgttcagaaatgcagtaaagcacgttgatgaaaagcttagtctctgtggaagacagaccagaagacaaatcccttttctatctactgtggcatattcactgc

SEQ ID NO: 185251 - DNA, 120 bp, Artificial Sequence
  ENSG00000111728_21 (sequence is synthesized)
aaggtaaaggacatgtatgcatacatgcaagaatgaattgagcgaaactttgaatatgtttcctcttttgagctattgttatttagtagttacctaaaaaagaatacatttttactagta

SEQ ID NO: 185252 - DNA, 120 bp, Artificial Sequence
  ENSG00000111728_22 (sequence is synthesized)
taccattaaaaatgtaaaaggcttaacatgtatgcatacatgtagacacacatacacacacacaaagttaaacaaagctcattactgtgcaactatgaaagctgaactcatatgacctgg

SEQ ID NO: 185253 - DNA, 120 bp, Artificial Sequence
  ENSG00000111728_23 (sequence is synthesized)
tatggcaaaaatttgtaaccagtgttggagaatcacaaatgtgttatgcactatccattacatgttgatataagacaaccgagctcactggttgccgcacataatacccatagcagcaca

SEQ ID NO: 185254 - DNA, 120 bp, Artificial Sequence
  ENSG00000111728_24 (sequence is synthesized)
agatgcaagtcttacccccaaatgcttacccggaatgagcagaattgtcttactcatcctgattttacccaaaatctcatgaatgggcttgctgttgagcgtggtcacacaaggtatagt

SEQ ID NO: 185255 - DNA, 120 bp, Artificial Sequence
  ENSG00000111728_25 (sequence is synthesized)
ttgtacaagtaaagaaatgtgaattagtagctatttatttccttagtagcaggtaggactacttagcttgttacaacagctttgatacacagtaagaaaactctactgacagattacaag

SEQ ID NO: 185256 - DNA, 120 bp, Artificial Sequence
  ENSG00000111728_26 (sequence is synthesized)
cagccaaatgtgtttacatttcagagaagggtaagggaagcctctcgttgtcttcatactttggaatgtcttaagctaaaatgtgacactagagttcaatttcttttttattttaaatgt

SEQ ID NO: 185257 - DNA, 120 bp, Artificial Sequence
  ENSG00000111728_27 (sequence is synthesized)
cactaaattgtaggtaaactgtaccaaaaagttctagtttaattttaacagtaaaaactcagcataccatgttaccacgtaaacaataatggctggtattttctgtgggttaatttaaca

SEQ ID NO: 185258 - DNA, 120 bp, Artificial Sequence
  ENSG00000111728_28 (sequence is synthesized)
tgacataaacataggaaagcccttggcaaaattctacatcattgaagtagaccatttctaaatgcaattaaatagtgaggttattataaaaattagaatttaaaatatgacttgttgata

SEQ ID NO: 185259 - DNA, 120 bp, Artificial Sequence
  ENSG00000111728_29 (sequence is synthesized)
gtgcagattataatgttacttagaaagttaagaattcgagagtaatgatgctattggagaactggtttgctatacggcagcaaaaacataatgagaatgtaccatgaagaaattgtgtta

SEQ ID NO: 185260 - DNA, 120 bp, Artificial Sequence
  ENSG00000111728_30 (sequence is synthesized)
aatattcactttgagtgaaactttaaatatgtttcctcttttgagctactgttatttagcagttacctaaaaaagaatacatttttactagtctaccattaaaaatataaaaggcttaac

SEQ ID NO: 185261 - DNA, 120 bp, Artificial Sequence
  ENSG00000111728_31 (sequence is synthesized)
aaaaacgcatataaaagttaataaaatgttactcagattagtactttaattgttaaaatgtaattaatgagctccatagagcccatacatcacagttccattgaaaatatcatctggact

SEQ ID NO: 185262 - DNA, 120 bp, Artificial Sequence
  ENSG00000111728_32 (sequence is synthesized)
gaaaatattatgtggaaatttttcatctttttatgatgcctgggatagatttatgcagtagatttatatataatgtttagtttacaaacttgtgaaactatttcatgtgggttctgaaag

SEQ ID NO: 185263 - DNA, 120 bp, Artificial Sequence
  ENSG00000111728_33 (sequence is synthesized)
gcaaaacagaaatggccagtgctggtgatgtttgattagaccagctcttctcagctggggtgattcattatccctctctggtgacatttggcaatgtctggagaccagagacatttttta

SEQ ID NO: 185264 - DNA, 120 bp, Artificial Sequence
  ENSG00000111728_34 (sequence is synthesized)
ttttcatgactcaagggtgctaatagcatgtacttagtagaggttagggatcctgctaaagatcttacaatgcacaagtcagcctctcacagcaaaataattatccaggctgagatgtca

SEQ ID NO: 185265 - DNA, 120 bp, Artificial Sequence
  ENSG00000111728_35 (sequence is synthesized)
gtagtatcaaggttgacatctcagacctggattagacctggattagaccaaaatgaaattttgattgttccaccttgtcttcacttaaagatagatatacatgctcacagcattcaaaat

SEQ ID NO: 185266 - DNA, 120 bp, Artificial Sequence
  ENSG00000111728_36 (sequence is synthesized)
aaatatgactacaatttaatgaaaatattttcttatggtagattacaactcactagatacaccatacatatgccttttggacataattggttagataggagtgtgtgtgtgtgtgtgtgt

SEQ ID NO: 185267 - DNA, 120 bp, Artificial Sequence
  ENSG00000111728_37 (sequence is synthesized)
gtgtgtgtgtgtgtgtgtgtgtagcatgaagttaggcatctctatccttaactgtgctatgtgttcctaagtaaggacctcgctagaatcatcctgtagagtgctctggaatactctatt

SEQ ID NO: 185268 - DNA, 120 bp, Artificial Sequence
  ENSG00000111728_38 (sequence is synthesized)
attaagatcttcaattctaagctcccattatctttctttgtttatctgaaattaagaccttcagaattaggcctggtacttttccagatttgatcagttacattttgatataactgactc

SEQ ID NO: 185269 - DNA, 120 bp, Artificial Sequence
  ENSG00000111728_39 (sequence is synthesized)
gtagtcataaaaattaggctgatccataggggcaaaaggaagggtgaagagactaaaaactagtaccctgatagaattttagtttttattagcctcgatttgagaactgcattgattcca

SEQ ID NO: 185270 - DNA, 120 bp, Artificial Sequence
  ENSG00000111728_40 (sequence is synthesized)
aagatcatgaaggtaggtgaaggattaagtcattccataattaagaaaagtaatgtttatatgaaagatttttatatggacaatgactcacagacacatatgctttgtatagaggatttt

SEQ ID NO: 185271 - DNA, 120 bp, Artificial Sequence
  ENSG00000111728_41 (sequence is synthesized)
gccaaaagtttatacaaaattgcacatctaaactgcataattctcatacaagaagttaaggaagtgctcactggattttgcttctgtatagttcacttttatctgtcttcacaagggtag

SEQ ID NO: 185272 - DNA, 120 bp, Artificial Sequence
  ENSG00000111728_42 (sequence is synthesized)
gaagtaaatgatctcaaatggcacatgttcagacaatactgtgtttggctttgtgatgtctcatgtctttctcttggctaaaaaaaattgtttaggctatatataacttgtacctgaagc

SEQ ID NO: 185273 - DNA, 120 bp, Artificial Sequence
  ENSG00000111728_43 (sequence is synthesized)
aatctggacaacatggcttaaaatggaaaataactgaaaaaatcctgggattttaaatttgccaaaaatacccttggattagtcaaaggctttacaagagtgttatagatgatccaaaat

SEQ ID NO: 185274 - DNA, 120 bp, Artificial Sequence
  ENSG00000111728_44 (sequence is synthesized)
ggaaacaatattgataacatttcttttcgtcagcagctacatattccagttttataactttattatatacattttttgattattaatagaaagtcagccatccagagttttaacttctgt

SEQ ID NO: 185275 - DNA, 120 bp, Artificial Sequence
  ENSG00000111728_45 (sequence is synthesized)
ggttgaaatattgactttgtgaaatttttcactgacaaatacttgttaggagggacctaagggggaggggaatgttaccagtccactgaaaactttaggaaatgttcattgtgttgtgta

SEQ ID NO: 185276 - DNA, 120 bp, Artificial Sequence
  ENSG00000111728_46 (sequence is synthesized)
aatactttcccaccagcaccaggtaatatattctctatgtttgtagaattccaaagatcaaaagctgtaaggacgtttatgtgaacttgacgcaaacttgtggaggaataaggactgaga

SEQ ID NO: 185277 - DNA, 120 bp, Artificial Sequence
  ENSG00000111728_47 (sequence is synthesized)
gtaatgttgtgctttttctttatcttcccgtcgtataggtcgactctcaggttatatgacttttattgggcacacgtcaggggtggaagtggtagaagtgggttaacaatttcaaggcct

SEQ ID NO: 185278 - DNA, 120 bp, Artificial Sequence
  ENSG00000111728_48 (sequence is synthesized)
ggcaacctaggtcaaaacctctaataaagtcagcagtaaacataactagcaacttcattccactatgtgctaggaggagggtgaggcaagttgaaaggagatgaccctatccccacactc

SEQ ID NO: 185279 - DNA, 120 bp, Artificial Sequence
  ENSG00000111728_49 (sequence is synthesized)
tcaggatgtaaaagggcagagtgctctctacccttaaccttggctttttagcaccgtcagtctctgtcctctcccaggagagctgccttggctccagagttgagctagtagcattgtgac

SEQ ID NO: 185280 - DNA, 120 bp, Artificial Sequence
  ENSG00000111728_50 (sequence is synthesized)
tagagaggtagtgtggaaattcgctgaggacctcaaaattttacactgccttaaactgttttgtttttgcttaaactcgtgctgtctaaatgtgggtgttttgtggcagagtctgatcac

SEQ ID NO: 185281 - DNA, 120 bp, Artificial Sequence
  ENSG00000111728_51 (sequence is synthesized)
cccgacctagttatagccctgccagtgattctaaagtggaacttttccccctcattcatatggatagtctgagtccttgaagctagggagatatcaaatattctaccagttcctacatag

SEQ ID NO: 185282 - DNA, 120 bp, Artificial Sequence
  ENSG00000111728_52 (sequence is synthesized)
cttctttaaaagtcctagagactaactcacaggaagtctgaagcccagagcgtctgtttataaactcctaaatatgaggccacaatatttaggttgagcactagaaaatttctattttgc

SEQ ID NO: 185283 - DNA, 120 bp, Artificial Sequence
  ENSG00000111728_53 (sequence is synthesized)
aagtggaaggagacttgaatctataattgctgtagctttttttcccttctatcataagaaaatggataccatctgctttaccctcagcccagacttgtcttttgaattttttacatacat

SEQ ID NO: 185284 - DNA, 120 bp, Artificial Sequence
  ENSG00000111728_54 (sequence is synthesized)
cttaggggtgagagattgaaacaagtgcatgaatgaaaagcttattgaaacataacacagcccctgctcaccatttcagtaagggaaaatacatgtttctgtttccctctaatttgtttt

SEQ ID NO: 185285 - DNA, 120 bp, Artificial Sequence
  ENSG00000111728_55 (sequence is synthesized)
ctctggtgccaacatttctgatttcttctgtctctaatacataaggaataaataccatattttaaattgacttacatgcctgcgagcatttgccagataatcaaagcctatgactctaac

SEQ ID NO: 185286 - DNA, 120 bp, Artificial Sequence
  ENSG00000111728_56 (sequence is synthesized)
tttttaaagcacagaagaggaattatattttatggtcactcctctgtgtttctattgatctctatattgtgctaaaattctttcaggtaatttttttcttgttgaagctgtgggatataa

SEQ ID NO: 185287 - DNA, 120 bp, Artificial Sequence
  ENSG00000111728_57 (sequence is synthesized)
tcaatgatgccaagctgtctgagaattttatagaataatatccaaatatattgatcctgcctctttctgcttctatgtaattaaactttcttttgatgtttatttttaaaatgtatgctt

SEQ ID NO: 185288 - DNA, 120 bp, Artificial Sequence
  ENSG00000111728_58 (sequence is synthesized)
cacacaacaccaataaacatctaagagatgtgatataatccaaggcaaagaaaagtaagaatcagttaatgtctattttatctgcacagcattacgaacagaaaattgtaataaaaaaag

SEQ ID NO: 185289 - DNA, 120 bp, Artificial Sequence
  ENSG00000111728_59 (sequence is synthesized)
gtttaaccaaactgaaaaaaagagagacaaaatcttggttttaatttgaaaagatgattgggagtgatctcagaagagagttcagcaggaagcaaggaagaggctgttgaccttgagtgc

SEQ ID NO: 185290 - DNA, 120 bp, Artificial Sequence
  ENSG00000111728_60 (sequence is synthesized)
agcctcaagaatggaacctttttgaaatattttaaaggaaatatcttgtcatccagctgttatggttaataatgaatagttttctctgggtgaagcttatccattgcacacctgatgtgc

SEQ ID NO: 185291 - DNA, 120 bp, Artificial Sequence
  ENSG00000111728_61 (sequence is synthesized)
tgatgtgctggcccctgcgatttccccaaatgttggaatgttgcctgcataatttgtggtaatgggggactgtgttcctgcttttacctggttacaaaaaacaaaacaaaacaaaacaaa

SEQ ID NO: 185292 - DNA, 120 bp, Artificial Sequence
  ENSG00000111728_62 (sequence is synthesized)
cagaaaaaaaaagagagaaaagatgctagaggaagcagtgtgacagacagatcatgagatgctgacggagagaacagagtggtacctgtttacccacttggaccatgacagtatcaaggc

SEQ ID NO: 185293 - DNA, 120 bp, Artificial Sequence
  ENSG00000111728_63 (sequence is synthesized)
atgacagtatcaaggctccaccccttgctgtcccttcccaagaggtgctctcctgggagtttgatcacagtgaaacaacactcccgttttctttttcctttctttctttctttctttttt

SEQ ID NO: 185294 - DNA, 120 bp, Artificial Sequence
  ENSG00000111728_64 (sequence is synthesized)
gtgctgggattacaggcataagccaccgagcccagccccacactcctgttttcatagcccttttttgtctgtactttggtacatattccccaaataagattattatttacatctgtcatg

SEQ ID NO: 185295 - DNA, 120 bp, Artificial Sequence
  ENSG00000111728_65 (sequence is synthesized)
acatctgtcatgatgaggcagtgatagcagcaagtgtcactttgaccctcacccttggaaagtgggctatgcatagctagagttagaacaggaggttctaatcctgcttccacaattact

SEQ ID NO: 185296 - DNA, 120 bp, Artificial Sequence
  ENSG00000111728_66 (sequence is synthesized)
tcagtaacaggcttttgtatccatgattacttaagctgacttagatgcattttctaccctgtattctagtgtacacaacacaaacacacataagccctttacctgtggagaagagggaga

SEQ ID NO: 185297 - DNA, 120 bp, Artificial Sequence
  ENSG00000111728_67 (sequence is synthesized)
tggttgattcagtgggagtggggagtggcagagggtgccttaactttttctggcttgacccctacttccttatgtgtttccttcatatacctctgtcactttagagatgtaatcatgtct

SEQ ID NO: 185298 - DNA, 120 bp, Artificial Sequence
  ENSG00000111728_68 (sequence is synthesized)
gttccaagttgtatcgttattatcaagaagtcctataaatgtagcaaatgtgactattttatagaaatgcacaatagtttataggccttggagaagtctgataatagtatgtaaatatcc

SEQ ID NO: 185299 - DNA, 120 bp, Artificial Sequence
  ENSG00000111728_69 (sequence is synthesized)
ttcattgaagtcatagaaccttctagtaggaagctccataggtgataactgcaagaggattaatgtttgtttctccagtaaacaccggaagcaaggaatcaatctgtcactgtttatcat

SEQ ID NO: 185300 - DNA, 120 bp, Artificial Sequence
  ENSG00000111728_70 (sequence is synthesized)
tcagtcttgagcaccgttgggtgttgataggttactatagacactccccttataattaatatacaggactcacaatttaggatgtctgatggccactagggtacatcatagagacactag

SEQ ID NO: 185301 - DNA, 120 bp, Artificial Sequence
  ENSG00000111728_71 (sequence is synthesized)
agagaagagaacaaatatagctccatcaaaaagcctgcttaatctttaacaagtctgaaatattactaaaattccagttaccgtgcagcatagtcagtctaaaaagcactggggaaaaag

SEQ ID NO: 185302 - DNA, 120 bp, Artificial Sequence
  ENSG00000111728_72 (sequence is synthesized)
gtgtctttttggtctctttaattctattatggcacattttaatattattccacatgtgtgcaaactatttctcaagagcaaagtttgaggctggagttaagaaaatagaaaaattaaaac

SEQ ID NO: 185303 - DNA, 120 bp, Artificial Sequence
  ENSG00000111728_73 (sequence is synthesized)
attattttttctcatataatataatctgactactagttcatggatataataattctgggaaaaattttagattaaactataaaattgaaatcacctttgaagagtatatggaattgcttc

SEQ ID NO: 185304 - DNA, 120 bp, Artificial Sequence
  ENSG00000111728_74 (sequence is synthesized)
tttctattaaagccaacctacattggcaaaaagtgtggagaaaatcagtgtgctcaattctttttgtagagtttcatctaaaatgttgcaggtaaaaaagaaaactttaattggtacttt

SEQ ID NO: 185305 - DNA, 120 bp, Artificial Sequence
  ENSG00000111728_75 (sequence is synthesized)
ctacggtgtgattagaaaaattagtatctatctctgttggttctgctgacttgcttctttccaccgaatctaaatgcaatgtcataggaggaggtttgctgtaaaaacatgtctttttct

SEQ ID NO: 185306 - DNA, 120 bp, Artificial Sequence
  ENSG00000111728_76 (sequence is synthesized)
ttggtgtattcattgtaattatggctggcagtgagaaggttcggtaagtctcaatttctctacctcctttacttggagaaaatttgtaaatgtaccctgtgaataaaatgattttttata

SEQ ID NO: 185307 - DNA, 120 bp, Artificial Sequence
  ENSG00000111728_77 (sequence is synthesized)
ctaaatcaactgagacaagtttctgcctaggatgccttgatgtgttgatactcacaggatgcaatctccctcctttgtcaagtgaatacactaaggatgttggatccaaaagtcagttag

SEQ ID NO: 185308 - DNA, 120 bp, Artificial Sequence
  ENSG00000111728_78 (sequence is synthesized)
aatcccagcataattcggcaaaggagcggtggatgattggataaactacttcagagcagaagagtatttaatgaactattcacagagaagatgaaacacagtgaactgtgcctcttaatc

SEQ ID NO: 185309 - DNA, 120 bp, Artificial Sequence
  ENSG00000111728_79 (sequence is synthesized)
cattctgagtgtaataagaaattttacccatcctccttcaaacataaaggtgagacgggaaagtgggctggagttgagcagagttcagagttctcctagctaggaactgtcacagccacc

SEQ ID NO: 185310 - DNA, 120 bp, Artificial Sequence
  ENSG00000111728_80 (sequence is synthesized)
atttcaaaggcagtgagcataattcagtttgggaaatcaagaggaaaaccatctggacaggcaggaaggatgaagggaattgtaaataaagaaaacaggattatgggaatccaaacaata

SEQ ID NO: 185311 - DNA, 120 bp, Artificial Sequence
  ENSG00000111728_81 (sequence is synthesized)
tgtggcattgcatgagagggaagcagccaagaccgtaagagctgtgtcgctctaattaggtgccaggaggaagtggaaatgaattcagagccacacattctccatttttcagatcttaaa

SEQ ID NO: 185312 - DNA, 120 bp, Artificial Sequence
  ENSG00000111728_82 (sequence is synthesized)
cacagaagacactatcagagatttccaggtgaccacaatgagaaaagggcctttcgtcccactacatcttgcctgggatgcaaaatctttagtttgtttccattattgataaaataaaca

SEQ ID NO: 185313 - DNA, 120 bp, Artificial Sequence
  ENSG00000111728_83 (sequence is synthesized)
tatatagtacatgattttatgtcccccatgttcatttaaacaatttatagtgtttattatttgtctgattttggaaagaatacatatttactatagaaaacttttaaatgtagtaaaaaa

SEQ ID NO: 185314 - DNA, 120 bp, Artificial Sequence
  ENSG00000111728_84 (sequence is synthesized)
ttcgctctgcacttcttctcgctgctgccacgtgagaaaggatgtgtttgcttccccttctgccgtgattgtttcctgaggcctcccccgccatgctgaactgcaaccccattccagctg

SEQ ID NO: 185315 - DNA, 120 bp, Artificial Sequence
  ENSG00000111728_85 (sequence is synthesized)
gtcaattacacctgaccttggagtgtgacactgagtctctaaccctgcacagcctcctgggcacgagagcttgagcttcactgacagtctcaagggcttctgcaacctcagcaaccctgg

SEQ ID NO: 185316 - DNA, 120 bp, Artificial Sequence
  ENSG00000111728_86 (sequence is synthesized)
gcagtgacatcatccaggaggcctgggctgtggctgttggtgcgaggtggggaggcaggcagctggtgaccaggactgagaacttgtcccaggccacgagcctccccattgagaaggcaa

SEQ ID NO: 185317 - DNA, 120 bp, Artificial Sequence
  ENSG00000111728_87 (sequence is synthesized)
ttgactttcctgatatgttcctgcagtagttctgggagccaaagttcacaatgtgagtctccacatgctgctctgtctgtctaagtggaagctacaaactagtcttgcttcctatctgcc

SEQ ID NO: 185318 - DNA, 120 bp, Artificial Sequence
  ENSG00000111728_88 (sequence is synthesized)
attttcactcaatcacgccaagatgtctttataacataaagatgcaaggagaaacagcaagtgctaatgaagaagctgcagcaggttatccagaagatttaattaagatcattgatgaag

SEQ ID NO: 185319 - DNA, 120 bp, Artificial Sequence
  ENSG00000111728_89 (sequence is synthesized)
agtgggctggagttgagcagagttcagagttctcctagctaggggcatactctggagtacgcaaatccaacagtcctgacagaggaaagcagcttcctgtatagttgacctggaaggtca

SEQ ID NO: 185320 - DNA, 120 bp, Artificial Sequence
  ENSG00000111728_90 (sequence is synthesized)
tcacagccacctcaaccttcagcaaccaccactgttcaaggcaacatccttcagcagcagaaagattgactcgctgtaggctcagacatggggcctcactatgtttcacaggctggtcta

SEQ ID NO: 185321 - DNA, 120 bp, Artificial Sequence
  ENSG00000111728_91 (sequence is synthesized)
aaactcctgagctccagggatctgcctgcctccgcttcccaaagtggtgggattgtaggcatgagccatcatgcctggcctgctgtgagttttaaataaaaatgtaaatgctcttctcca

SEQ ID NO: 185322 - DNA, 78 bp, Artificial Sequence
  ENSG00000111728_92 (sequence is synthesized)
aagcgcagcgcgcagccgcggttcccagccgtgcctccccttccacacctccccgcaggctgagggagccggctccgg

SEQ ID NO: 185323 - DNA, 120 bp, Artificial Sequence
  ENSG00000111728_93 (sequence is synthesized)
gctgaagggctcctcaagcgcagccagagtgggcgccgaggccaagggggcgccgaggccgaggaggcgcctagagcgagcgagggctgccagggctgccagcatgctgtcacctctcac

SEQ ID NO: 185324 - DNA, 120 bp, Artificial Sequence
  ENSG00000111728_94 (sequence is synthesized)
tgaggaccagtttgagccatcatatgtcagggagaaaagaggaacctctggcaaggctatgcctgctacctgccttatgattgggcagaaactcccacccatggaagctgaaactagttt

SEQ ID NO: 185325 - DNA, 120 bp, Artificial Sequence
  ENSG00000111728_95 (sequence is synthesized)
ttagagaaaattttctttgaactggaggatacattgtgattttggcatctgtagctgatactctgcattgccatgaaccaagatgacagcctgttaaggcaactgtgcatgatgagagct

SEQ ID NO: 185326 - DNA, 120 bp, Artificial Sequence
  ENSG00000111728_96 (sequence is synthesized)
tgtggagttttaccctctgctcttctggccaccctcctgatggatccctgcggtgccaggcaggaatgggcagcttggggacccactgagcccccagggcctttctgctgctttctctac

SEQ ID NO: 185327 - DNA, 120 bp, Artificial Sequence
  ENSG00000111728_97 (sequence is synthesized)
caatcattcattcaaccacatttgctgaatgtctaccatgtaccagttaggtgctggcaatacagtgatgaatacaagaacgtggtccctgatttgttaatctaattaacaaattttata

SEQ ID NO: 185328 - DNA, 120 bp, Artificial Sequence
  ENSG00000111728_98 (sequence is synthesized)
tataatctaattaacagcagttctcccatatctgtggttttgttttccatggcttcagttgtctatggttaatttggtccaaaaatattaaatggaaattccagaaataaacaattcata

SEQ ID NO: 185329 - DNA, 120 bp, Artificial Sequence
  ENSG00000111728_99 (sequence is synthesized)
ttaaattgtgctctgttttgagtagcgtgatgagatttcactttgtcccactatgtcttgcctgggatgcgaatcttccctttgttcagcgtctccacactgttgacacttgctgcccat

SEQ ID NO: 185330 - DNA, 120 bp, Artificial Sequence
  ENSG00000111728_100 (sequence is synthesized)
gagtcacttaatatccatcttggtggtgggatcaccgtgcttgtgttcaaggaacaccgattttattttaccagtggccccaaaatgcaagactgatgatgcaggtatattgttataatt

SEQ ID NO: 185331 - DNA, 120 bp, Artificial Sequence
  ENSG00000111728_101 (sequence is synthesized)
gttctattttattattagttattattgttcatctcttactgtgcctaatttataaatcaaattttatcataggcatgtatgtataggaaaaaataggaaaaaacggtatatagggcttgg

SEQ ID NO: 185332 - DNA, 120 bp, Artificial Sequence
  ENSG00000111728_102 (sequence is synthesized)
acagataagaggagattcctagtttcattccttaaatcagtaagaaaccaagtaacatggggttccaaggcttacagtttgactgttttggataatgataatgagttttgaaggaatcga

SEQ ID NO: 185333 - DNA, 120 bp, Artificial Sequence
  ENSG00000111728_103 (sequence is synthesized)
ttttattttggaaaaataattatttattgtccaagtattaccataaaaatactttaaaaaaagattatgctgctgacaaatttatgttagacttttttctttaatgatttcttcatatgt

SEQ ID NO: 185334 - DNA, 120 bp, Artificial Sequence
  ENSG00000111728_104 (sequence is synthesized)
tcatatgtagttgttgtatagctgagcataggaaattaaaaagcctctttaaagatctgtactgtcttgaggttgatatttaaaggataaaagcaacactattttcatttgtaaaagtaa

SEQ ID NO: 185335 - DNA, 120 bp, Artificial Sequence
  ENSG00000111728_105 (sequence is synthesized)
ttgacatttaacaaacatcgctaatattttggtttatattcttctggatcattcaatgccaatgtgtgtataaatgaaacaaaaatataatgaattcaacagtacattgcaaatattttt

SEQ ID NO: 185336 - DNA, 120 bp, Artificial Sequence
  ENSG00000111728_106 (sequence is synthesized)
ctagtaatagtatatgcagtctacatcatctcttctaatggctgtaagattttccattgttaggatagatacaaatgtatttaattaatatactgttattggatatttatgttgtaattt

SEQ ID NO: 185337 - DNA, 120 bp, Artificial Sequence
  ENSG00000111728_107 (sequence is synthesized)
agtcagttagtgacagctaatcccagcataattcggcaaagggattttacagctgtcgagagggtgaagaaatagattcttgattaaggaaatggaaaacagctccaaaagccaaatgac

SEQ ID NO: 185338 - DNA, 120 bp, Artificial Sequence
  ENSG00000111728_108 (sequence is synthesized)
agaacgtctccagcaatcaatagactgcagaatcagtcagaatcagaatccctgccacgttgagaagccacaacttcagctgctcactccagactcatgctgcttgaatcagaatctggc

SEQ ID NO: 185339 - DNA, 120 bp, Artificial Sequence
  ENSG00000111728_109 (sequence is synthesized)
atgacattggctgcgccagcatcacagctggaatcccggctataaagaagtctgagaaaggcagttcttagcttttccactttggactacaggaagatacagaaggaggttgaaatgatt

SEQ ID NO: 185340 - DNA, 120 bp, Artificial Sequence
  ENSG00000111728_110 (sequence is synthesized)
attttgtgatccagtccatacatgcaccacactctaaacattcaaattataagaaatgtattcaatggctttaaatgactctgaaatacttttgattaaacattttttaaaaagcatgaa

SEQ ID NO: 185341 - DNA, 120 bp, Artificial Sequence
  ENSG00000111728_111 (sequence is synthesized)
gaagaaaaagcctgctgaaattccctcactcggaagtacttattgtaaacagtctcttttgtgtatgtttgtttgtgtgtattactaaattgtatgtattttgtatatttaattttatat

SEQ ID NO: 185342 - DNA, 120 bp, Artificial Sequence
  ENSG00000111729_0 (sequence is synthesized)
ctgtgattctcactatactggtcctgaggaaagggcttctgtgaactgcggtttttagtttttattgtggttcttagttctcatgagacccctcttgaggatatgtgcctatctggtgcc

SEQ ID NO: 185343 - DNA, 120 bp, Artificial Sequence
  ENSG00000111729_1 (sequence is synthesized)
tctgctctccactagttgagtgaaaggaaggaggtaatttaccaccatgtttggttcctgtttataagatgttttaagaaagatctgaaacagattttctgaagaaagcagaagctctct

SEQ ID NO: 185344 - DNA, 120 bp, Artificial Sequence
  ENSG00000111729_2 (sequence is synthesized)
tcccattatgacttcggaaatcacttatgctgaagtgaggttcaaaaatgaattcaagtcctcaggcatcaacacagcctcttctgcagcttccaaggagaggactgcccctcacaaaag

SEQ ID NO: 185345 - DNA, 120 bp, Artificial Sequence
  ENSG00000111729_3 (sequence is synthesized)
taataccggattccccaagctgctttgtgcctcactgttgatatttttcctgctattggcaatctcattctttattgcttttgtcattttctttcaaaaatattctcagcttcttgaaaa

SEQ ID NO: 185346 - DNA, 120 bp, Artificial Sequence
  ENSG00000111729_4 (sequence is synthesized)
aaagactacaaaagagctggttcatacaacattggagtgtgtgaaaaaaaatatgcccgtggaagagacagcctggagctgttgcccaaagaattggaagtcatttagttccaactgcta

SEQ ID NO: 185347 - DNA, 120 bp, Artificial Sequence
  ENSG00000111729_5 (sequence is synthesized)
cactcaagaagagcaggatttcatcttccagaatctgcaagaagaatctgcttattttgtggggctctcagatccagaaggtcagcgacattggcaatgggttgatcagacaccatacaa

SEQ ID NO: 185348 - DNA, 120 bp, Artificial Sequence
  ENSG00000111729_6 (sequence is synthesized)
tgaaagttccacattctggcatccacgtgagcccagtgatcccaatgagcgctgcgttgtgctaaattttcgtaaatcacccaaaagatggggctggaatgatgttaattgtcttggtcc

SEQ ID NO: 185349 - DNA, 120 bp, Artificial Sequence
  ENSG00000111729_7 (sequence is synthesized)
tcaaaggtcagtttgtgagatgatgaagatccacttatgaactgaacattctccatgaacaggtggttggattggtatctgtcattgtagggatagataataagctcttcttattcatgt

SEQ ID NO: 185350 - DNA, 120 bp, Artificial Sequence
  ENSG00000111729_8 (sequence is synthesized)
gtaagggaggtccatagaatttaggtggtctgtcaactattctacttatgagagaattggtctgtacattgactgattcactttttcataaagtgagcatttattgagcattttttcatg

SEQ ID NO: 185351 - DNA, 120 bp, Artificial Sequence
  ENSG00000111729_9 (sequence is synthesized)
tgccagagcctgtactggaggcccccattgtgcacacatggagagaacatgagtctctcttaatttttatctggttgctaaagaattatttaccaataaaattatatgatgtggtgtctc

SEQ ID NO: 185352 - DNA, 120 bp, Artificial Sequence
  ENSG00000111729_10 (sequence is synthesized)
aagaaagcagaagctctcttcccattatgacttcggaaatcacttatgctgaagtgaggttcaaaaatgaattcaagtcctcaggcatcaacacagcctcttctgcagagacagcctgga

SEQ ID NO: 185353 - DNA, 120 bp, Artificial Sequence
  ENSG00000111731_0 (sequence is synthesized)
cggaagaacccatcaaagcccttcctcccgccgcctctccggaatgaggtctcagcacccgcgcgggacagcacccttcctcctgcgacagagcccaagaagaggccgaaaccgagacca

SEQ ID NO: 185354 - DNA, 120 bp, Artificial Sequence
  ENSG00000111731_1 (sequence is synthesized)
tgccagggaagctgaaggtgaaaatcgtggccgggcgccatttgccagtgatggaccgtgctagtgacctgactgatgccttcgtggaggtaaaatttggtaataccacctttaaaacag

SEQ ID NO: 185355 - DNA, 120 bp, Artificial Sequence
  ENSG00000111731_2 (sequence is synthesized)
atgtgtaccttaagtcactcaaccctcagtggaactcggagtggtttaaatttgaggtggatgatgaagacttacaagatgaacctttacagatcacagttcttgaccatgatacttaca

SEQ ID NO: 185356 - DNA, 120 bp, Artificial Sequence
  ENSG00000111731_3 (sequence is synthesized)
gtgcaaatgatgccattggtaaagtgtacattgatattgatcctttactgtatagtgaagctgcaacagtcatctcaggatggtttccaatttatgacaccatacatggtatccgtgggg

SEQ ID NO: 185357 - DNA, 120 bp, Artificial Sequence
  ENSG00000111731_4 (sequence is synthesized)
aaatcaatgtagttgtcaaagtagacctcttcaatgatttaaatcgatttaggcagtcatcatgtggagtcaaattcttttgcacaacgtctattccaaaatgctatagagctgtgataa

SEQ ID NO: 185358 - DNA, 120 bp, Artificial Sequence
  ENSG00000111731_5 (sequence is synthesized)
ttcatggatttgtagaagaacttgtggtcaatgaagacccagaatatcagtggattgatcgaattcgcacaccaagggcatcaaatgaggccagacagagactcatttcgttaatgtcag

SEQ ID NO: 185359 - DNA, 120 bp, Artificial Sequence
  ENSG00000111731_6 (sequence is synthesized)
gtgagctgcagaggaagattggcttgaaagtacttgaaatgagaggaaatgcagttgtggggtacttacagtgtttcgatctggagggcgagtctgggttagtggtgcgagccataggaa

SEQ ID NO: 185360 - DNA, 120 bp, Artificial Sequence
  ENSG00000111731_7 (sequence is synthesized)
cggcgtgtactctggataaattaagtagcccagcagcattccttcctgcatgtaattccccatccaaagaaatgaaggagtctccgctggttcatcctccaagccatggatgccgctcga

SEQ ID NO: 185361 - DNA, 120 bp, Artificial Sequence
  ENSG00000111731_8 (sequence is synthesized)
ctcacaacagcccaattcacactgctactggctcacgacttactcagaacttctctgtgtctgttcccactctcatctatactggaatgggaagtggtagtgctggaaaagaaggggggc

SEQ ID NO: 185362 - DNA, 120 bp, Artificial Sequence
  ENSG00000111731_9 (sequence is synthesized)
cctttaaagctcttttaagacaacagactcaatcagcgttggaacagaggggaggatcgcctcataggttctgtagaaggcgggaatttccattttttaccttgacggcatttcctcctg

SEQ ID NO: 185363 - DNA, 120 bp, Artificial Sequence
  ENSG00000111731_10 (sequence is synthesized)
gattccttgtacacgttgggggtgtagttagtgcacgttctgtgaagcttttggatcgtatccacaatcctgatgaaccagaaactcgagatgcatggtgggcagaaatcagacaagaaa

SEQ ID NO: 185364 - DNA, 120 bp, Artificial Sequence
  ENSG00000111731_11 (sequence is synthesized)
taaaatcacatgctaaagcattaggctgtcatgctgtagtgggctacagtgaatcaactagcatctgtgaagaggtctgcattttatctgcatctggcacagcggctgtactgaatccta

SEQ ID NO: 185365 - DNA, 120 bp, Artificial Sequence
  ENSG00000111731_12 (sequence is synthesized)
gatttctgcaggatggcaccgtggaaggctgtttggaacagaggcttgaagaaaatttgcctacacgttgtggattttgtcatataccatatgatgaactgaatatgccatttccagctc

SEQ ID NO: 185366 - DNA, 120 bp, Artificial Sequence
  ENSG00000111731_13 (sequence is synthesized)
atctcacatattgctataactgcaggaaacaaaaagttcctgatgttctgtttacaactatagacctcccaacagatgcaacagttattggaaaaggttgtcttattcaagcaaggttat

SEQ ID NO: 185367 - DNA, 120 bp, Artificial Sequence
  ENSG00000111731_14 (sequence is synthesized)
agcacaggcagaagcaaatgctacagctatcagtaatctcttgccatttatggaatatgaagtgcatactcagctaatgaataaactaaaactcaaaggaatgaatgctttgtttggact

SEQ ID NO: 185368 - DNA, 120 bp, Artificial Sequence
  ENSG00000111731_15 (sequence is synthesized)
aagaattcagatcacagtgggtgaaaatatgttgatgggcttagcgtctgccacaggtgtgtatttagcagctttaccaactcctggtggtattcagattgctgggaagactcctaatga

SEQ ID NO: 185369 - DNA, 120 bp, Artificial Sequence
  ENSG00000111731_16 (sequence is synthesized)
tggctcatatgaacaacacatctctcatatgcagaagaagataaatgacacaattgctaaaaacaaagagttatatgaaatcaatcctccagagatatctgaagagattataggatcacc

SEQ ID NO: 185370 - DNA, 120 bp, Artificial Sequence
  ENSG00000111731_17 (sequence is synthesized)
catcccagaacctaggcaacgctcaagacttctaagatctcaatcagaaagctcggatgaagttacagaattagacctttcacatgggaaaaaagatgcttttgttttggagattgatga

SEQ ID NO: 185371 - DNA, 120 bp, Artificial Sequence
  ENSG00000111731_18 (sequence is synthesized)
cacagatgccatggaagatgtccattctctacttactgatgttcctcctccttcaggcttttatagttgtaatacagaaattatgcccggtataaataattggacctctgaaatacagat

SEQ ID NO: 185372 - DNA, 120 bp, Artificial Sequence
  ENSG00000111731_19 (sequence is synthesized)
gttcacttcagtaagagtaatcagattaagcagcctcaacctgactaatcaagctctcaataagaactttaatgatctctgtgaaaatttgctcaagagcctgtactttaaactacgatc

SEQ ID NO: 185373 - DNA, 120 bp, Artificial Sequence
  ENSG00000111731_20 (sequence is synthesized)
tatgatcccctgctgcctttgccatgtaaattttacagtatctctgcctgaagatgaattaattcaggttacagtcacggcagtcgcaatcacttttgacaaaaatcaggctttacaaac

SEQ ID NO: 185374 - DNA, 120 bp, Artificial Sequence
  ENSG00000111731_21 (sequence is synthesized)
cacaaaaacccctgttgaaaagtcattgcaaagagcctcaacagataatgaagaacttttacaatttccactggaactgtgttcagattcacttccttctcatccttttccaccagctaa

SEQ ID NO: 185375 - DNA, 120 bp, Artificial Sequence
  ENSG00000111731_22 (sequence is synthesized)
agaacacctggagagtgcaagttctaactcaggtataccagctgcacagagagcaacgtcagttgattacagttcctttgcagacagatgcagcagctggatagagctcattaaactgaa

SEQ ID NO: 185376 - DNA, 120 bp, Artificial Sequence
  ENSG00000111731_23 (sequence is synthesized)
agctcagaccataaggcgtggatcaattaagacaaccatgacagttgaaaaagcaagtccagtgggtgatggaaatttccggaatcgttctgctccaccttgtgcaaattccacagttgg

SEQ ID NO: 185377 - DNA, 120 bp, Artificial Sequence
  ENSG00000111731_24 (sequence is synthesized)
ggttgttaagatgacacctctttcttttattcctggagcaaaaataactaagtatcttgggataattaacatgttttttattcgagagactacttctcttcgggaggaaggaggagtcag

SEQ ID NO: 185378 - DNA, 120 bp, Artificial Sequence
  ENSG00000111731_25 (sequence is synthesized)
tggttttctccatgcttttattgctgaagtgtttgcaatggtgagagctcatgttgctgcattaggagggaatgctgttgtctcctacataatgaagcagtgtgtcttcatggagaatcc

SEQ ID NO: 185379 - DNA, 120 bp, Artificial Sequence
  ENSG00000111731_26 (sequence is synthesized)
aaataaaaaccaggcacagtgtcttataaatgtaagtggtgatgcagtggtttttgttcgtgaatctgacttagaagtggtgtcatctcagcaacctactaccaactgccagtcatcatg

SEQ ID NO: 185380 - DNA, 120 bp, Artificial Sequence
  ENSG00000111731_27 (sequence is synthesized)
tactgaaggcgaagttacaacctgaggaaaattaggaaaaaagagctcaactaaatgaaattcatcaatctctgttattttgtcattaattatcttcttagacttaaaattgaacttgag

SEQ ID NO: 185381 - DNA, 120 bp, Artificial Sequence
  ENSG00000111731_28 (sequence is synthesized)
ataaataaggaagaattgagtagatttgatttgcctggagtcttttggaggcatgagaattttctaatcttgacattttgtttgcctgttctagacaggccctgtggggtcttgaccctt

SEQ ID NO: 185382 - DNA, 120 bp, Artificial Sequence
  ENSG00000111731_29 (sequence is synthesized)
caggaccctcaacccctctgaaaaaccaaacttattccttttcaccttccaagtcctacagtcgacagtcctcttcttctgacacagatttgagtttgacacccaaaactggaatgggaa

SEQ ID NO: 185383 - DNA, 120 bp, Artificial Sequence
  ENSG00000111731_30 (sequence is synthesized)
ttgagtgtatttttttgaggtgactcttttccctcaggaataatgagaaccttttatttcaggcatagtagtatttctacatcacaaaaatattttcttttctgcttacctaggaatatt

SEQ ID NO: 185384 - DNA, 120 bp, Artificial Sequence
  ENSG00000111731_31 (sequence is synthesized)
aaattgtagtactatatattgtgaatattgccatttaaatcatttgtaagtgtacagtttggtagcattaattacattcacagtgttttgctaccatcaccgctatttccagaacttttt

SEQ ID NO: 185385 - DNA, 120 bp, Artificial Sequence
  ENSG00000111731_32 (sequence is synthesized)
ctttatcctaaatggaaattgtgtactcactaaccaataacttcccattccctcctctccctagactctggtgacctctaatctactttctgtctctttgaatttgcttatgctagatat

SEQ ID NO: 185386 - DNA, 120 bp, Artificial Sequence
  ENSG00000111731_33 (sequence is synthesized)
gaatttccattttttaccttgacggcatttcctcctggattccttgtacacgttgggggtgtagttagtgcacgttctgtgaagcttttggatcgtatccacaatcctgtgaagaggtct

SEQ ID NO: 185387 - DNA, 120 bp, Artificial Sequence
  ENSG00000111731_34 (sequence is synthesized)
ctggtacgagactgctcagactccagagctggggagatgcaggccacgggcagagtggctgcagaggcaggcaggcaggattcccttcaatgaagatcccaatcccaatactcactcatc

SEQ ID NO: 185388 - DNA, 120 bp, Artificial Sequence
  ENSG00000111731_35 (sequence is synthesized)
gaacgatcgatgctttcttccgcgccccgagagccgccatttttgagagcgggggaggagagacaagcaggggcggcagaggctcaacgggatgctgactgggttttgcttttcgtccca

SEQ ID NO: 185389 - DNA, 120 bp, Artificial Sequence
  ENSG00000111731_36 (sequence is synthesized)
gtaagttaagataaatttttaaaagaaccgtagcaaagatggaacctttgtaatttatgttgattttaataaaatcataatttaaaaaatgaaatgggaagattgtcaggaaattaggat

SEQ ID NO: 185390 - DNA, 120 bp, Artificial Sequence
  ENSG00000111731_37 (sequence is synthesized)
agctactctagtataatttagaaaaactaagcaagagattctccagttgctagtgagtaagcactctgatttgagaaatgtgtggggacaatggagaaaagttttcagaaaactgctatg

SEQ ID NO: 185391 - DNA, 120 bp, Artificial Sequence
  ENSG00000111731_38 (sequence is synthesized)
tagatttctgaatgtgttgtattttgctgaggaattcggtaacaactgaaagggaaaagtgcttcagccatcttttgaaaacaagttaaaattctggaacttgtatctgtaatacatcct

SEQ ID NO: 185392 - DNA, 120 bp, Artificial Sequence
  ENSG00000111731_39 (sequence is synthesized)
aactcttgtaaaagaaaataatttatcatagctggtgtcctttcattgaaagttgtaatactgtctctaaggagggaggaaaagattattatataattttataactggcaacatttgagt

SEQ ID NO: 185393 - DNA, 120 bp, Artificial Sequence
  ENSG00000111731_40 (sequence is synthesized)
tagtattgactttgtctaaaagaggcttgacttcaactgggataaaaatgtcagtgaattttgttaaagtagtaaaaatgcagttgacttagtaggaacataaaattatttcctaataag

SEQ ID NO: 185394 - DNA, 120 bp, Artificial Sequence
  ENSG00000111731_41 (sequence is synthesized)
ataatattgcactcctaccaaataaacaggattttagtaatatctgagggattgttgatggtgagttagactgtatttggcatagaatttggaaatgtaacttgaatgtaaatatgctgc

SEQ ID NO: 185395 - DNA, 120 bp, Artificial Sequence
  ENSG00000111731_42 (sequence is synthesized)
aaaatgttgaatgtatacatagaaagactttttctgtcgacgccaaatgcccgttgtaaatgaaccttaaatattacattcctcctttgcacaataatatttctttataacacttatgat

SEQ ID NO: 185396 - DNA, 120 bp, Artificial Sequence
  ENSG00000111731_43 (sequence is synthesized)
tttttcccccaggacaacaaactgcccttaagagtcatttccttgttatcacaggtgtcaatatttttctgtattttgtttataattttattttttaaataaaaagtgtataaaaataaa

SEQ ID NO: 185397 - DNA, 120 bp, Artificial Sequence
  ENSG00000111731_44 (sequence is synthesized)
cttttaattacaaagcatgtgtgatgtgtaatgggtggccttttatttcaagggatgtaatacagttgctatggcaagctttttaataagcaaattttttacactctacacacgataagt

SEQ ID NO: 185398 - DNA, 120 bp, Artificial Sequence
  ENSG00000111731_45 (sequence is synthesized)
ttagtatatttttaggttatcttattgaggacacaagatttttttttcactgtttagctctccttattactcattctttcacctccctttatgtctttgctcaactgtctccttttcggg

SEQ ID NO: 185399 - DNA, 120 bp, Artificial Sequence
  ENSG00000111731_46 (sequence is synthesized)
taagcctactctaacgatcctatttaaaaattgtgacttcatttttgccacttcctatgacttttccctcttttattgttttctatagctcttatctttgtgagtgtgtgtgtgtgtgag

SEQ ID NO: 185400 - DNA, 120 bp, Artificial Sequence
  ENSG00000111731_47 (sequence is synthesized)
ttgatatttatgttagaccccactcaggctctccctaggagaccacacaactatgacatcaccagaaatgctcagcctgctaactgagaacttggttttggacaaatcagtgtctaaagc

SEQ ID NO: 185401 - DNA, 120 bp, Artificial Sequence
  ENSG00000111731_48 (sequence is synthesized)
ttgactctttactatctctcttatctgacttgaaaaggaccattctttttctgagttacagttaaattacatcatcgaaaggagtgttaagacgagtaagagacatcatccatatttttt

SEQ ID NO: 185402 - DNA, 120 bp, Artificial Sequence
  ENSG00000111731_49 (sequence is synthesized)
ggtatgtttgtgaaaacaacactcggtgtccctgaaaaagtatgagatagggagccgtaaacctatttttaagtgtcagctttactgtttcctacctgtttgatcctgcacaaactggac

SEQ ID NO: 185403 - DNA, 120 bp, Artificial Sequence
  ENSG00000111731_50 (sequence is synthesized)
aattctgctggaactttgtattttattgcatgtaaaaaaaaaaccctctgtgtaaaactcaaataagtttgtgtacaaaagcagtttttaactttaaattctacacaaatatttgtcatt

SEQ ID NO: 185404 - DNA, 120 bp, Artificial Sequence
  ENSG00000111731_51 (sequence is synthesized)
ttgggaattattaacctgccaaaggctagggatgtgactaagtatagattgcttcaattacattcaatatgtaacacattttagaagttgactctctttttttcttttaaagaacagtgc

SEQ ID NO: 185405 - DNA, 120 bp, Artificial Sequence
  ENSG00000111731_52 (sequence is synthesized)
acttcatataataattgaaaaatgtcatttaacacaaaaatcaatgaaatattatcatatattttgattacaatttattttgacaggcttttatagttgtaatacagaaattatgcccgg

SEQ ID NO: 185406 - DNA, 120 bp, Artificial Sequence
  ENSG00000111732_0 (sequence is synthesized)
gtcagactaagacagagaaccatcattaattgaagtgagatttttctggcctgagacttgcagggaggcaagaagacactctggacaccactatggacagcctcttgatgaaccggagga

SEQ ID NO: 185407 - DNA, 120 bp, Artificial Sequence
  ENSG00000111732_1 (sequence is synthesized)
agtttctttaccaattcaaaaatgtccgctgggctaagggtcggcgtgagacctacctgtgctacgtagtgaagaggcgtgacagtgctacatccttttcactggactttggttatcttc

SEQ ID NO: 185408 - DNA, 120 bp, Artificial Sequence
  ENSG00000111732_2 (sequence is synthesized)
gcaataagaacggctgccacgtggaattgctcttcctccgctacatctcggactgggacctagaccctggccgctgctaccgcgtcacctggttcacctcctggagcccctgctacgact

SEQ ID NO: 185409 - DNA, 120 bp, Artificial Sequence
  ENSG00000111732_3 (sequence is synthesized)
gtgcccgacatgtggccgactttctgcgagggaaccccaacctcagtctgaggatcttcaccgcgcgcctctacttctgtgaggaccgcaaggctgagcccgaggggctgcggcggctgc

SEQ ID NO: 185410 - DNA, 120 bp, Artificial Sequence
  ENSG00000111732_4 (sequence is synthesized)
accgcgccggggtgcaaatagccatcatgaccttcaaagattatttttactgctggaatacttttgtagaaaaccacgaaagaactttcaaagcctgggaagggctgcatgaaaattcag

SEQ ID NO: 185411 - DNA, 120 bp, Artificial Sequence
  ENSG00000111732_5 (sequence is synthesized)
ttcgtctctccagacagcttcggcgcatccttttgcccctgtatgaggttgatgacttacgagacgcatttcgtactttgggactttgatagcaacttccaggaatgtcacacacgatga

SEQ ID NO: 185412 - DNA, 120 bp, Artificial Sequence
  ENSG00000111732_6 (sequence is synthesized)
aatatctctgctgaagacagtggataaaaaacagtccttcaagtcttctctgtttttattcttcaactctcactttcttagagtttacagaaaaaatatttatatacgactctttaaaaa

SEQ ID NO: 185413 - DNA, 120 bp, Artificial Sequence
  ENSG00000111732_7 (sequence is synthesized)
gatctatgtcttgaaaatagagaaggaacacaggtctggccagggacgtgctgcaattggtgcagttttgaatgcaacattgtcccctactgggaataacagaactgcaggacctgggag

SEQ ID NO: 185414 - DNA, 120 bp, Artificial Sequence
  ENSG00000111732_8 (sequence is synthesized)
catcctaaagtgtcaacgtttttctatgacttttaggtaggatgagagcagaaggtagatcctaaaaagcatggtgagaggatcaaatgtttttatatcaacatcctttattatttgatt

SEQ ID NO: 185415 - DNA, 120 bp, Artificial Sequence
  ENSG00000111732_9 (sequence is synthesized)
catttgagttaacagtggtgttagtgatagatttttctattcttttcccttgacgtttactttcaagtaacacaaactcttccatcaggccatgatctataggacctcctaatgagagta

SEQ ID NO: 185416 - DNA, 120 bp, Artificial Sequence
  ENSG00000111732_10 (sequence is synthesized)
tctgggtgattgtgaccccaaaccatctctccaaagcattaatatccaatcatgcgctgtatgttttaatcagcagaagcatgtttttatgtttgtacaaaagaagattgttatgggtgg

SEQ ID NO: 185417 - DNA, 120 bp, Artificial Sequence
  ENSG00000111732_11 (sequence is synthesized)
aataaaggatcttaaaatgggcaggaggactgtgaacaagacaccctaataatgggttgatgtctgaagtagcaaatcttctggaaacgcaaactcttttaaggaagtccctaatttaga

SEQ ID NO: 185418 - DNA, 120 bp, Artificial Sequence
  ENSG00000111732_12 (sequence is synthesized)
aacacccacaaacttcacatatcataattagcaaacaattggaaggaagttgcttgaatgttggggagaggaaaatctattggctctcgtgggtctcttcatctcagaaatgccaatcag

SEQ ID NO: 185419 - DNA, 120 bp, Artificial Sequence
  ENSG00000111732_13 (sequence is synthesized)
gtcaaggtttgctacattttgtatgtgtgtgatgcttctcccaaaggtatattaactatataagagagttgtgacaaaacagaatgataaagctgcgaaccgtggcacacgctcatagtt

SEQ ID NO: 185420 - DNA, 120 bp, Artificial Sequence
  ENSG00000111732_14 (sequence is synthesized)
tcatagttctagctgcttgggaggttgaggagggaggatggcttgaacacaggtgttcaaggccagcctgggcaacataacaagatcctgtctctcaaaaaaaaaaaaaaaaaaaagaaa

SEQ ID NO: 185421 - DNA, 90 bp, Artificial Sequence
  ENSG00000111732_15 (sequence is synthesized)
tcagaagagaacaatatttgggagagaaggatggggaagcattgcaaggaaattgtgctttatccaacaaaatgtaaggagccaataagg

SEQ ID NO: 185422 - DNA, 120 bp, Artificial Sequence
  ENSG00000111732_16 (sequence is synthesized)
aattgtgctttatccaacaaaatgtaaggagccaataagggatccctatttgtctcttttggtgtctatttgtccctaacaactgtctttgacagtgagaaaaatattcagaataaccat

SEQ ID NO: 185423 - DNA, 120 bp, Artificial Sequence
  ENSG00000111732_17 (sequence is synthesized)
atccctgtgccgttattacctagcaacccttgcaatgaagatgagcagatccacaggaaaacttgaatgcacaactgtcttattttaatcttattgtacataagtttgtaaaagagttaa

SEQ ID NO: 185424 - DNA, 120 bp, Artificial Sequence
  ENSG00000111732_18 (sequence is synthesized)
ttaaaaattgttacttcatgtattcatttatattttatattattttgcgtctaatgattttttattaacatgatttccttttctgatatattgaaatggagtctcaaagcttcataaatt

SEQ ID NO: 185425 - DNA, 120 bp, Artificial Sequence
  ENSG00000111732_19 (sequence is synthesized)
actttagaaatgattctaataacaacgtatgtaattgtaacattgcagtaatggtgctacgaagccatttctcttgatttttagtaaacttttatgacagcaaatttgcttctggctcac

SEQ ID NO: 185426 - DNA, 120 bp, Artificial Sequence
  ENSG00000111732_20 (sequence is synthesized)
tggctcactttcaatcagttaaataaatgataaataattttggaagctgtgaagataaaataccaaataaaataatataaaagtgatttatatgaagttaaaataaaaaatcagtatgat

SEQ ID NO: 185427 - DNA, 120 bp, Artificial Sequence
  ENSG00000111732_21 (sequence is synthesized)
ccatcatgaccttcaaaggtgcgaaagggccttccgcgcaggcgcagtgcagcagcccgcattcgggattgcgatgcggaatgaatgagttagtggggaagctcgaggggaagaagtggg

SEQ ID NO: 185428 - DNA, 120 bp, Artificial Sequence
  ENSG00000111732_22 (sequence is synthesized)
cggggattctggttcacctctggagccgaaattaaagattagaagcagagaaaagagtgaatggctcagagacaaggccccgaggaaatgagaaaatggggccagggttgcttctttccc

SEQ ID NO: 185429 - DNA, 120 bp, Artificial Sequence
  ENSG00000111737_0 (sequence is synthesized)
gttcgggaagtggatccgccgctgccggagcagcccgaagggagctgcggatcgcgaggccagtaccgaccccgcccgcccgcgcgcaccgcccccgcccgccatggcccgggactacga

SEQ ID NO: 185430 - DNA, 120 bp, Artificial Sequence
  ENSG00000111737_1 (sequence is synthesized)
ccacctcttcaagctgctcatcatcggcgacagcggtgtgggcaagagcagtttactgttgcgttttgcagacaacactttctcaggcagctacatcaccacgatcggagtggatttcaa

SEQ ID NO: 185431 - DNA, 120 bp, Artificial Sequence
  ENSG00000111737_2 (sequence is synthesized)
gatccggaccgtggagatcaacggggagaaggtgaagctgcagatctgggacacagcggggcaggagcgcttccgcaccatcacctccacgtattatcgggggacccacggggtcattgt

SEQ ID NO: 185432 - DNA, 120 bp, Artificial Sequence
  ENSG00000111737_3 (sequence is synthesized)
ggtttacgacgtcaccagtgccgagtcctttgtcaacgtcaagcggtggcttcacgaaatcaaccagaactgtgatgatgtgtgccgaatattagtgggtaataagaatgacgaccctga

SEQ ID NO: 185433 - DNA, 120 bp, Artificial Sequence
  ENSG00000111737_4 (sequence is synthesized)
gcggaaggtggtggagacggaagatgcctacaaattcgccgggcagatgggcatccagttgttcgagaccagcgccaaggagaatgtcaacgtggaagagatgttcaactgcatcacgga

SEQ ID NO: 185434 - DNA, 120 bp, Artificial Sequence
  ENSG00000111737_5 (sequence is synthesized)
gctggtcctccgagcaaagaaagacaacctggcaaaacagcagcagcaacaacagaacgatgtggtgaagctcacgaagaacagtaaacgaaagaaacgctgctgctaatggcacccagt

SEQ ID NO: 185435 - DNA, 120 bp, Artificial Sequence
  ENSG00000111737_6 (sequence is synthesized)
ccactgcagagactgcactgcggtccctcccccagcccgaggcccacggaggttcctcgggggacagtctcagtttcgtgccgttatttaaagaattctctccatgtttttgtatcggga

SEQ ID NO: 185436 - DNA, 120 bp, Artificial Sequence
  ENSG00000111737_7 (sequence is synthesized)
ggtgccatcggcacttcctcccccgccctcctcgagtgccaagaaggtgttggaccagcccgcccttccctactggtgccccctcctccccggccaaggcgcctggacctggcgaggacg

SEQ ID NO: 185437 - DNA, 120 bp, Artificial Sequence
  ENSG00000111737_8 (sequence is synthesized)
ctgcccgccgagcggactgattcgcagagtctgtacatagtgtatattgctctacccggccgcacaccacgtcctgctctggcttttgccttcttgatgccagcctgctgcaacagaccc

SEQ ID NO: 185438 - DNA, 120 bp, Artificial Sequence
  ENSG00000111737_9 (sequence is synthesized)
tccccgcgcccctccccagcccatcttactgcaagcagcgtcctgaggagacagcggcacgttctagctgcgtctgcggccagcccgtgccagtggagtgggctccgcgttgctcattct

SEQ ID NO: 185439 - DNA, 120 bp, Artificial Sequence
  ENSG00000111737_10 (sequence is synthesized)
ctccgacaggttgtcagcctctgtccccgctgcacagggtcttgccccttctccggggcctgtgccagctcccttccctccccgttgtcctgtccccacagccattctgggagctgggga

SEQ ID NO: 185440 - DNA, 120 bp, Artificial Sequence
  ENSG00000111737_11 (sequence is synthesized)
gctccaaacccagggcagccatggcttctcatttacaccaacaggtttcagttccaacagaaaggtcggggtaggttcgtgcagagatggggctggcaggggggctatgggaggattatt

SEQ ID NO: 185441 - DNA, 120 bp, Artificial Sequence
  ENSG00000111737_12 (sequence is synthesized)
ttaacagatcaagaaaatgaagccaaatcaagtgaattaaattcctcacaattattttctttccctgaggtttgattggcacagcagcaaaagttgaggccaccccacttgtgtccactg

SEQ ID NO: 185442 - DNA, 120 bp, Artificial Sequence
  ENSG00000111737_13 (sequence is synthesized)
tttttagaaaaaaatgaatggcttcctgccattgtggggctggactcttgggctttcttggtgggagcggagaaggggcctcccacccttgtccgagttgcctcccactggaggtcagga

SEQ ID NO: 185443 - DNA, 120 bp, Artificial Sequence
  ENSG00000111737_14 (sequence is synthesized)
gtctacactgcagcctcgggcactgtggggagtgcatgcctggggcctctgggtggggaccatggacaggccctggtcactgtcctaacctttgtcaggacaaaggtagcaagaggattt

SEQ ID NO: 185444 - DNA, 120 bp, Artificial Sequence
  ENSG00000111737_15 (sequence is synthesized)
cctggcgggtgggaaggaatggctggggcggccagttttgacacgccccagtgccctggagaacaaccagggtcatctgcacttgatgactgctccccgacccccagcccggacacctca

SEQ ID NO: 185445 - DNA, 120 bp, Artificial Sequence
  ENSG00000111737_16 (sequence is synthesized)
ttcccctcccactacagggatcaagtgacctgggaagaaccgagtttaacaccaggatgtgtttccttagatttcctttcctaggcgatttccagggagagccctgattggacaatcaca

SEQ ID NO: 185446 - DNA, 120 bp, Artificial Sequence
  ENSG00000111737_17 (sequence is synthesized)
tcacagatcacactgcagtttccatgttagcactgtggatgggtttttaatcaataaaaactgggggtttcttctcaccgactctccacttgcccaaactgccaaaagctggtgattctg

SEQ ID NO: 185447 - DNA, 120 bp, Artificial Sequence
  ENSG00000111737_18 (sequence is synthesized)
ggacaggccttcactttggagccacgggatggggtgggggagccccatgggcctgggaaggagggtgctgtggagggggctgcagggctgaccagcaggcagcctcatctggtcgggggc

SEQ ID NO: 185448 - DNA, 120 bp, Artificial Sequence
  ENSG00000111737_19 (sequence is synthesized)
gggggcggcaggagcagaagcggggtctccgtccttgggactgtcctggttggccacgggccctgaggatgcacggtgcctggggctcctgtgccggtgggcggggggcatgctggcctc

SEQ ID NO: 185449 - DNA, 120 bp, Artificial Sequence
  ENSG00000111737_20 (sequence is synthesized)
tgagcgatcaggcgaggccagcgagggtgtgcttgcaaattcaagcaataagaggggggttcctgggggcttccagcccaggctagaagcccccatggcttctggcagctggacatcagc

SEQ ID NO: 185450 - DNA, 120 bp, Artificial Sequence
  ENSG00000111737_21 (sequence is synthesized)
cccaggtattggggtgattttggtcatgacagtgtgcctgtcccactgttacacgcatgaatgggggttatggggtgggggtggggactcagggctggaccgacgtcctagtggacctga

SEQ ID NO: 185451 - DNA, 120 bp, Artificial Sequence
  ENSG00000111737_22 (sequence is synthesized)
tgtgaaattcctgtcaaacaaacaccacttttcaatggtttgctaggagtatttctgtattgaaagtttctaattatgctttttaaaaaaatactaaaaataaaggttcaagctgccaaa

SEQ ID NO: 185452 - DNA, 120 bp, Artificial Sequence
  ENSG00000111737_23 (sequence is synthesized)
attcagctcccaggctcggctcggagctggaccactccctcccctccaccaaagaggcaatgtgggctccaagaggtcacagcgctgggatgggatttcgaccccgcgctgccctcaaag

SEQ ID NO: 185453 - DNA, 120 bp, Artificial Sequence
  ENSG00000111737_24 (sequence is synthesized)
gccacctcctcgcagctctgctcccgccggcagctcccgttctgtccaactcggaagccgcccgccgccctcggcgtccactccacaggcccggggccggggccagctccgcgggggagg

SEQ ID NO: 185454 - DNA, 120 bp, Artificial Sequence
  ENSG00000111737_25 (sequence is synthesized)
ggtcggtgcggaaggggcggggtaccgggccttccccgcgcgactctgccttctacggccccggcccctgcctctggaaacccggagctcgtgcgagccccgccccacggtcgcggcgtg

SEQ ID NO: 185455 - DNA, 120 bp, Artificial Sequence
  ENSG00000111737_26 (sequence is synthesized)
cctgtcatttcctctccgcagggcgtgcgggtctcgaagatgagggagcaacaacgtccacgaccgggcttctccggcaccttgggcttctttccgctgggactcgacagcggctcggct

SEQ ID NO: 185456 - DNA, 120 bp, Artificial Sequence
  ENSG00000111737_27 (sequence is synthesized)
ccgcaagctctcagcgcccagggtggcggcgacgacgctccccgaggagacgcgaggaagacgggcccgcgcttgctgggactccgtcagggcgcgtgcgcgacccgggcgcggccggct

SEQ ID NO: 185457 - DNA, 120 bp, Artificial Sequence
  ENSG00000111737_28 (sequence is synthesized)
caggctgcggctgcgcaaggcggtgccagacgctgcgcctgcgcagtggtggggcggggcgggaaggagggaggcggtggtagcggcggcggctgctgaggaggaggagggggagcggag

SEQ ID NO: 185458 - DNA, 120 bp, Artificial Sequence
  ENSG00000111737_29 (sequence is synthesized)
agatgtttcaagcctgcagcagactctgaacagcaggaggtgactcctcagacctgctctgctgcccaggggctggccctcccgccctgttggtgccccgggcgggcagggggagtcagt

SEQ ID NO: 185459 - DNA, 120 bp, Artificial Sequence
  ENSG00000111737_30 (sequence is synthesized)
gctgccgcagtagcctctcctgctggcctgttgtggctcgggggcatctgccgaggctgagtgagagcccaggctccagggccaccctcaccttttccgggtattatcgggggacccacg

SEQ ID NO: 185460 - DNA, 80 bp, Artificial Sequence
  ENSG00000111752_0 (sequence is synthesized)
caggaagtgacaggcccggagcgagccccggaggcctggctgagccgcggccgggcccgcacccggagcggcgggagggg

SEQ ID NO: 185461 - DNA, 120 bp, Artificial Sequence
  ENSG00000111752_1 (sequence is synthesized)
cccctccaggaaggggaggaggcgaggggagcccgccgcggaggccgagcgagcccccagcccagcctggcgactggggaccccggcacatgaggtggacgcccccggggaagacttggg

SEQ ID NO: 185462 - DNA, 120 bp, Artificial Sequence
  ENSG00000111752_2 (sequence is synthesized)
ccggggaagacttgggtgcacagccaggcgagaaggattcatgggtcttgagtcagacagagcaccagccttggggaccctggaccactatcatggagactgagagcgagcagaactcca

SEQ ID NO: 185463 - DNA, 120 bp, Artificial Sequence
  ENSG00000111752_3 (sequence is synthesized)
attccaccaatgggagttctagctcagggggcagctctcggccccagatagctcaaatgtcactttatgaacgacaagcagtgcaggctctgcaagcactgcagcggcagcccaatgcag

SEQ ID NO: 185464 - DNA, 120 bp, Artificial Sequence
  ENSG00000111752_4 (sequence is synthesized)
ctcagtatttccaccagttcatgctccagcagcagctcagtaatgcccagctgcatagcctggctgccgtccagcaggccacaattgctgccagtcggcaggccagctccccaaacacca

SEQ ID NO: 185465 - DNA, 120 bp, Artificial Sequence
  ENSG00000111752_5 (sequence is synthesized)
gcactacacagcagcagactaccaccacccaggcctcgatcaatctggccaccacatcggccgcccagctcatcagccgatcccagagtgtgagctctcccagtgctaccaccttgaccc

SEQ ID NO: 185466 - DNA, 120 bp, Artificial Sequence
  ENSG00000111752_6 (sequence is synthesized)
aatctgtgctactggggaacaccacctccccacccctcaaccagtctcaggcccagatgtatctacggccacagctgggaaacctattgcaggtaaaccgaaccctgggtcggaatgtgc

SEQ ID NO: 185467 - DNA, 120 bp, Artificial Sequence
  ENSG00000111752_7 (sequence is synthesized)
ctctagcctcccaactcatcctgatgcctaatggggcggtggctgcagtccagcaggaggtgccatctgctcagtctcctggagttcatgcagatgcagatcaggttcagaacttggcag

SEQ ID NO: 185468 - DNA, 120 bp, Artificial Sequence
  ENSG00000111752_8 (sequence is synthesized)
taaggaatcaacaggcctcagctcaaggacctcagatgcaaggctccactcagaaggccattcctccaggagcctcccctgtctctagcctctcccaggcctctagccaggccctagcgg

SEQ ID NO: 185469 - DNA, 120 bp, Artificial Sequence
  ENSG00000111752_9 (sequence is synthesized)
tggcacaggcttcctctggggccacaaaccagtccctcaaccttagtcaagctggtggaggcagtgggaatagcatcccagggtccatgggtccaggtggaggtgggcaggcacatggtg

SEQ ID NO: 185470 - DNA, 120 bp, Artificial Sequence
  ENSG00000111752_10 (sequence is synthesized)
gtttgggtcagttgccttcctcaggaatgggtggtgggagctgtcccagaaagggtacaggagtggtgcagcccttgcctgcagcccaaacagtgactgtgagccagggcagccagacag

SEQ ID NO: 185471 - DNA, 120 bp, Artificial Sequence
  ENSG00000111752_11 (sequence is synthesized)
aggcagaaagtgcagcagccaagaaggcagaagcagatgggagtggccagcagaatgtgggcatgaacctgacacggacagccacacctgcgcccagccagacacttattagctcagcca

SEQ ID NO: 185472 - DNA, 120 bp, Artificial Sequence
  ENSG00000111752_12 (sequence is synthesized)
cctacacacagatccagccccattcactgattcagcaacagcaacagatccacctccagcagaaacaggtggtgatccagcagcagattgccatccaccaccagcagcagttccagcacc

SEQ ID NO: 185473 - DNA, 120 bp, Artificial Sequence
  ENSG00000111752_13 (sequence is synthesized)
ggcagtcccagctccttcacacagctacacacctccagttggcgcagcagcagcagcagcaacaacagcaacagcagcaacagcagcagccgcaagccaccaccctcactgcccctcagc

SEQ ID NO: 185474 - DNA, 120 bp, Artificial Sequence
  ENSG00000111752_14 (sequence is synthesized)
caccacaggtcccacctactcagcaggtcccaccttcccagtcccagcagcaagcccaaaccctggtcgttcagcccatgcttcagtcttcacccttgtctcttccacctgatgcagccc

SEQ ID NO: 185475 - DNA, 120 bp, Artificial Sequence
  ENSG00000111752_15 (sequence is synthesized)
ctaagccaccaattcccatccaatccaaaccacctgtagcacctatcaagccgcctcagttaggggccgctaagatgtcagctgcccagcaaccaccaccccatatccctgtgcaagttg

SEQ ID NO: 185476 - DNA, 120 bp, Artificial Sequence
  ENSG00000111752_16 (sequence is synthesized)
taggcactcgacagccaggtacagcccaggcacaggctttggggttggcacagctggcagctgctgtacctacttcccgggggatgccaggtacagtgcagtctggtcaggcccatttgg

SEQ ID NO: 185477 - DNA, 120 bp, Artificial Sequence
  ENSG00000111752_17 (sequence is synthesized)
acagcacatgtggtaaagggtggggctaccacctcctcacctgttgtagcccaggtccctgctgccttctatatgcagtctgtgcacttgccgggtaaaccccagacattggctgtcaaa

SEQ ID NO: 185478 - DNA, 120 bp, Artificial Sequence
  ENSG00000111752_18 (sequence is synthesized)
cgcaaggctgactctgaggaggagagagatgatgtctccacattgggttcaatgcttcctgccaaggcatctccagtagcagaaagcccaaaagtcatggacgagaagagcagtcttgga

SEQ ID NO: 185479 - DNA, 120 bp, Artificial Sequence
  ENSG00000111752_19 (sequence is synthesized)
gaaaaagctgaatcagtggctaatgtgaatgctaatactccaagcagtgaactagtagccttgacccccgccccttcagtaccgcctcctacactagccatggtgtctagacaaatgggt

SEQ ID NO: 185480 - DNA, 120 bp, Artificial Sequence
  ENSG00000111752_20 (sequence is synthesized)
gactcaaaacccccacaggccatcgtgaagccccagattctcacccacatcattgaaggctttgttatccaggaaggagcagaacctttcccggtgggttgttctcagttactgaaggag

SEQ ID NO: 185481 - DNA, 120 bp, Artificial Sequence
  ENSG00000111752_21 (sequence is synthesized)
tctgagaagccactacagactggccttccgacagggctgactgagaatcagtcaggtggccctttgggagtggacagcccatctgctgagttagataagaaggcgaatctcctgaagtgc

SEQ ID NO: 185482 - DNA, 120 bp, Artificial Sequence
  ENSG00000111752_22 (sequence is synthesized)
gagtactgtgggaagtacgcccccgcagagcagtttcgtggctctaagaggttctgctccatgacttgcgctaagaggtacaatgtgagctgtagccatcagttccggctgaagaggaaa

SEQ ID NO: 185483 - DNA, 120 bp, Artificial Sequence
  ENSG00000111752_23 (sequence is synthesized)
aaaatgaaagagtttcaagaagccaactatgctcgcgttcgcaggcgtggaccccgccgcagctcctctgacattgcccgtgccaagattcagggcaagtgccaccggggtcaagaagac

SEQ ID NO: 185484 - DNA, 120 bp, Artificial Sequence
  ENSG00000111752_24 (sequence is synthesized)
tctagccggggttcagataattccagttatgatgaagcactctctccaacatctcctgggcctttatcagtaagagctgggcatggagaacgtgacctggggaatcccaatacagctcca

SEQ ID NO: 185485 - DNA, 120 bp, Artificial Sequence
  ENSG00000111752_25 (sequence is synthesized)
cctacaccggaattacatggcatcaaccctgtgttcctgtccagtaatcccagccgttggagtgtagaggaggtgtacgagtttattgcttctctccaaggctgccaagagattgcagag

SEQ ID NO: 185486 - DNA, 120 bp, Artificial Sequence
  ENSG00000111752_26 (sequence is synthesized)
gaatttcgctcacaggagattgatggacaggcccttttattacttaaagaagaacatcttatgagtgccatgaacatcaagctgggccctgccctcaagatctgcgccaagataaatgtc

SEQ ID NO: 185487 - DNA, 120 bp, Artificial Sequence
  ENSG00000111752_27 (sequence is synthesized)
ctcaaggagacctaaggtggccctcttgcacaaaccagcctaaggcagacactctccactgtccaggttataacctggtaccagcagactttgcagggaagaaagagttgttccaatcat

SEQ ID NO: 185488 - DNA, 120 bp, Artificial Sequence
  ENSG00000111752_28 (sequence is synthesized)
gtaaccttctgtaggggattactgagacagggaagagaagtgcaagaattggttgctggtgctacatggcggcagctttgacattttctctgggttctactttattttttaaaatcttta

SEQ ID NO: 185489 - DNA, 120 bp, Artificial Sequence
  ENSG00000111752_29 (sequence is synthesized)
cagttctcaccatttcacgtaccttaatccaatctttataaaagaggcagtctagagaactaggactgctcagccttatcctggagtggagcatttagcccaggtcttaattctccaaga

SEQ ID NO: 185490 - DNA, 120 bp, Artificial Sequence
  ENSG00000111752_30 (sequence is synthesized)
ggaggaatacatagtatggtaaggcaaggaactgggtggaatgtcaggttgcctgcccaatgggagaggtagggtttttctagcttgtgtgacagaagtagcaaaatctggtcctccccc

SEQ ID NO: 185491 - DNA, 120 bp, Artificial Sequence
  ENSG00000111752_31 (sequence is synthesized)
ctcccagtgtagctgtggctcagagttttttctttttgttgtcacttactcccttgtgattgaattttttctcctgcatccatggcaggatccccagccagtatagagacttggttggca

SEQ ID NO: 185492 - DNA, 120 bp, Artificial Sequence
  ENSG00000111752_32 (sequence is synthesized)
tcttctgctgcagggactaaaagtatttgactggggcacatgtggctgttgtcattctttctgcatcccactgttcccctccaatttatgttattttctaccctgtttttcagttccatc

SEQ ID NO: 185493 - DNA, 120 bp, Artificial Sequence
  ENSG00000111752_33 (sequence is synthesized)
tctgctctgtcctatagctttataaaaccagagtgtgtggggctgaggtcaggagtataagtacctgccttaggcactattccttatataacaaaaatattaaatatttttttcctcagt

SEQ ID NO: 185494 - DNA, 120 bp, Artificial Sequence
  ENSG00000111752_34 (sequence is synthesized)
aaaaggatgaaaattggtttcagttgtcttactctattccagtctttgcccactttcacacaaatgacaaggccaatatgttttgtttgttttttaatcattaagagtttttgtacaaaa

SEQ ID NO: 185495 - DNA, 120 bp, Artificial Sequence
  ENSG00000111752_35 (sequence is synthesized)
aagaaaaaaatcactccaatagtattgaaaagtccaaagatgaaatagtttcattttcttttcctaaggcttataaaaggccccctgcctgttgattccatccctcttttgtgtccagtg

SEQ ID NO: 185496 - DNA, 120 bp, Artificial Sequence
  ENSG00000111752_36 (sequence is synthesized)
gagccatgttactcttcagtggcccaggggttcactattaaagaaagatcagtccaggtttctgggcacatggcctaaacaggaagatggaagcatcagaggattaaaaacctttcccca

SEQ ID NO: 185497 - DNA, 120 bp, Artificial Sequence
  ENSG00000111752_37 (sequence is synthesized)
cagaaatgtgggcaagaagacacttccctgagccagcagaagggacaggtgcagcagcattccacacccagcgcagaggacagcagagccctcgatgtcccacttctgcttccgttccct

SEQ ID NO: 185498 - DNA, 120 bp, Artificial Sequence
  ENSG00000111752_38 (sequence is synthesized)
ttctagaagattgaaaaaaaggtcaaaaccacatgcctgtggagaaagtgcgacatgtttagaaatactggtagggaaccaggagtaagaaaagctttaccagcttttactacaaatgga

SEQ ID NO: 185499 - DNA, 120 bp, Artificial Sequence
  ENSG00000111752_39 (sequence is synthesized)
tgaaagacatcaggatcccaccaccgcaaggtaaagtgacttcccttttctggaacccctgtggcacaggagtaccaattttcctttccaacgaactggatttctggataggcattttgg

SEQ ID NO: 185500 - DNA, 120 bp, Artificial Sequence
  ENSG00000111752_40 (sequence is synthesized)
ctgtatgtggacagataagaccacagtccttagcccaatcccagctatacagtcaccccaatttccacaaatgatgtgatggtaccgtataatcctgtaattgggaaatttcacattttt

SEQ ID NO: 185501 - DNA, 120 bp, Artificial Sequence
  ENSG00000111752_41 (sequence is synthesized)
cctgtcctaatctcagaggtgggagaagcaagtctagaacatctccaggctcagactaaacgagagtacttggactgcaaccaagtaatcactgcaaagtagttccaagcagcaagaaat

SEQ ID NO: 185502 - DNA, 120 bp, Artificial Sequence
  ENSG00000111752_42 (sequence is synthesized)
accagattctcatggaggctactatagggtacagaataacaacatgaaagcaatcaaccctgtataaataatgtttcttggcattttttttttaattaaagaaatccagtgtctcaaaaa

SEQ ID NO: 185503 - DNA, 120 bp, Artificial Sequence
  ENSG00000111752_43 (sequence is synthesized)
caggaatcctggttttggtggcagtttcccttgattttattgagacttttaagttggtccctttacatttttatttctagttcacaatccaaaaaaaattattaatcagaattcaggttt

SEQ ID NO: 185504 - DNA, 120 bp, Artificial Sequence
  ENSG00000111752_44 (sequence is synthesized)
gggaagacgaggggtcatacggtttgtattttcacatgtgaatgtaggaattatgttctctatacctagcaaaggggtctcgtgtctctgagtccagtgaactaaatccagtaatctata

SEQ ID NO: 185505 - DNA, 120 bp, Artificial Sequence
  ENSG00000111752_45 (sequence is synthesized)
cagccttatcctggagtggagcatttagcccaggtcttaattctccaagaggaggaatacatagtatggcttataaaaggccccctgcctgttgattccatccctcttttgtgtccagtg

SEQ ID NO: 185506 - DNA, 120 bp, Artificial Sequence
  ENSG00000111752_46 (sequence is synthesized)
gctgatactattctgggtttttgggtatgtaataagttagatcaagatagccttaaccaaatcagtctttgaaaaaacaacagttcttggttggtctacgtgaatacagggtctcaagac

SEQ ID NO: 185507 - DNA, 120 bp, Artificial Sequence
  ENSG00000111752_47 (sequence is synthesized)
ctaggtcaggactaaatcatgttacattttcttttgtcctgatggaaagttactaggaatgaccaggaattttagtgtaccatgggaagtagataaattgggaaatctggaactaagaaa

SEQ ID NO: 185508 - DNA, 120 bp, Artificial Sequence
  ENSG00000111752_48 (sequence is synthesized)
cacccctcaaccagtctcaggcccagatgtatctacggctgggaaacctattgcaggtaaaccgaaccctgggtcggaatgtgcctctagcctcccaactcatcctgatgcctaatgggg

SEQ ID NO: 185509 - DNA, 120 bp, Artificial Sequence
  ENSG00000111775_0 (sequence is synthesized)
agtccagatcaaaaatggcggtagttggtgtgtcctcggtttctcggctgctgggtcggtcccgcccacagctggggcggcctatgtcgagtggcgcccatggcgaagagggctcagctc

SEQ ID NO: 185510 - DNA, 120 bp, Artificial Sequence
  ENSG00000111775_1 (sequence is synthesized)
gcatgtggaagactctcaccttcttcgtcgcgctccccggggtggcagtcagcatgctgaatgtgtacctgaagtcgcaccacggagagcacgagagacccgagttcatcgcctaccccc

SEQ ID NO: 185511 - DNA, 120 bp, Artificial Sequence
  ENSG00000111775_2 (sequence is synthesized)
ataaccctcatgtgaatccacttccaactggctacgaagatgaataaagagaatctggaccactacccgggcaccagggaccacagcactggtttggaccgttactctgcacatggacca

SEQ ID NO: 185512 - DNA, 120 bp, Artificial Sequence
  ENSG00000111775_3 (sequence is synthesized)
gaaaaagtatatgggaccttaagctcaccttctttacttgtatcaaatgatgactggtatactggtctcccatccctttgcttgtggcaggagatggcttaaataaataacttaaattta

SEQ ID NO: 185513 - DNA, 120 bp, Artificial Sequence
  ENSG00000111775_4 (sequence is synthesized)
tgccttagtgcaagttcttcattctctgaaggcatgggtgccaggcgtgtacagcttgtttatcctcacaaacagaaaatgtattttcttccattttgtggatggacagctgacacttgg

SEQ ID NO: 185514 - DNA, 120 bp, Artificial Sequence
  ENSG00000111775_5 (sequence is synthesized)
gattacgtctcaattctcttcttcaaggtcatacaataagtgctcttcagtttcccttttctccgattcatcctacctcctgccttctgagacagttctttttttttttttttttttttt

SEQ ID NO: 185515 - DNA, 120 bp, Artificial Sequence
  ENSG00000111775_6 (sequence is synthesized)
aaagtaatgcttttcaaaggtaataggcaagataattcagggtgggctgcagtttcccagcccagatattgtttgaagtctgggatggtgccagaaatctgcatttaattaagcatctcc

SEQ ID NO: 185516 - DNA, 120 bp, Artificial Sequence
  ENSG00000111775_7 (sequence is synthesized)
ctcccctaatactgccaccattttgatataggtgatttgaggattacactttcataaacacagcactggatatactagttactagggagaggatgatgagtaactaacttgagcttgcat

SEQ ID NO: 185517 - DNA, 120 bp, Artificial Sequence
  ENSG00000111775_8 (sequence is synthesized)
tttctgccatccatatttgtttctggaattaaaactgtcctgtagccaggataactttaagggctcccctggtagttataagagctccttaaataatgggaaggttgaactacaccagta

SEQ ID NO: 185518 - DNA, 120 bp, Artificial Sequence
  ENSG00000111783_0 (sequence is synthesized)
atctgacgagcggccattcatcaggccggctggcctatcaatgacattgctcccatcggggctcctataaaatgatgctttttcccatgaaacatccgcaaacattttgacgggtttggc

SEQ ID NO: 185519 - DNA, 120 bp, Artificial Sequence
  ENSG00000111783_1 (sequence is synthesized)
tttgcccggctggattactgagtgtccccttgctcgctcgctttttctctctcccccttctccgagctcgctcccttctctccctctctctcctcttttcttctttctcttttctttcct

SEQ ID NO: 185520 - DNA, 120 bp, Artificial Sequence
  ENSG00000111783_2 (sequence is synthesized)
cttctttttcttttcttttcctttcctcctttatccttgtgccccctcactttctgcgtctctctctctccccttctccctccctccctcccttcctccctgggcatctctagcacaggg

SEQ ID NO: 185521 - DNA, 120 bp, Artificial Sequence
  ENSG00000111783_3 (sequence is synthesized)
gatccccaaacatcaggacttttggggggcgcctgtgctgtccatgggaagagcatgcattgtgggttactggaggaacccgacatggattccacagagagctggattgaaagatgtctc

SEQ ID NO: 185522 - DNA, 120 bp, Artificial Sequence
  ENSG00000111783_4 (sequence is synthesized)
aacgaaagtgaaaacaaacgttattccagccacacatctctggggaatgtttctaatgatgaaaatgaggaaaaagaaaataatagagcatccaagccccactccactcctgctactctg

SEQ ID NO: 185523 - DNA, 120 bp, Artificial Sequence
  ENSG00000111783_5 (sequence is synthesized)
caatggctggaggagaactatgagattgcagagggggtctgcatccctcgcagtgccctctatatgcattacctggatttctgcgagaagaatgatacccaacctgtcaatgctgccagc

SEQ ID NO: 185524 - DNA, 120 bp, Artificial Sequence
  ENSG00000111783_6 (sequence is synthesized)
tttggaaagatcataaggcagcagtttcctcagttaaccaccagaagactcgggacccgaggacagtcaaagtaccattactatggcattgcagtgaaagaaagctcccaatattatgat

SEQ ID NO: 185525 - DNA, 120 bp, Artificial Sequence
  ENSG00000111783_7 (sequence is synthesized)
gtgatgtattccaagaaaggagctgcctgggtgagtgagacgggcaagaaagaagtgagcaaacagacagtggcatattcaccccggtccaaactcggaacactgctgccagaatttccc

SEQ ID NO: 185526 - DNA, 120 bp, Artificial Sequence
  ENSG00000111783_8 (sequence is synthesized)
aatgtcaaagatctaaatctgccagccagcctgcctgaggagaaggtttctacctttattatgatgtacagaacacactgtcagagaatactggacactgtaataagagccaactttgat

SEQ ID NO: 185527 - DNA, 120 bp, Artificial Sequence
  ENSG00000111783_9 (sequence is synthesized)
gaggttcaaagtttccttctgcacttttggcaaggaatgccgccccacatgctgcctgtgctgggctcctccacggtggtgaacattgtcggcgtgtgtgactccatcctctacaaagct

SEQ ID NO: 185528 - DNA, 120 bp, Artificial Sequence
  ENSG00000111783_10 (sequence is synthesized)
atctccggggtgctgatgcccactgtgctgcaggcattacctgacagcttaactcaggtgattcgaaagtttgccaagcaactggatgagtggctaaaagtggctctccacgacctccca

SEQ ID NO: 185529 - DNA, 120 bp, Artificial Sequence
  ENSG00000111783_11 (sequence is synthesized)
gaaaacttgcgaaacatcaagttcgaattgtcgagaaggttctcccaaattctgagacggcaaacatcactaaatcatctctgccaggcatctcgaacagtgatccacagtgcagacatc

SEQ ID NO: 185530 - DNA, 120 bp, Artificial Sequence
  ENSG00000111783_12 (sequence is synthesized)
acgttccaaatgctggaagactggaggaacgtggacctgaacagcatcaccaagcaaaccctttacaccatggaagactctcgcgatgagcaccggaaactcatcacccaattatatcag

SEQ ID NO: 185531 - DNA, 120 bp, Artificial Sequence
  ENSG00000111783_13 (sequence is synthesized)
gagtttgaccatctcttggaggagcagtctcccatcgagtcctacattgagtggctggataccatggttgaccgctgtgttgtgaaggtggctgccaagagacaagggtccttgaagaaa

SEQ ID NO: 185532 - DNA, 120 bp, Artificial Sequence
  ENSG00000111783_14 (sequence is synthesized)
gtggcccagcagttcctcttgatgtggtcctgtttcggcacaagggtgatccgggacatgaccttgcacagcgcccccagcttcgggtcttttcacctaattcacttaatgtttgatgac

SEQ ID NO: 185533 - DNA, 120 bp, Artificial Sequence
  ENSG00000111783_15 (sequence is synthesized)
tacgtgctctacctgttagaatctctgcactgtcaggagcgggccaatgagctcatgcgagccatgaagggagaaggaagcactgcagaagtccgagaagagatcatcttgacagaggct

SEQ ID NO: 185534 - DNA, 120 bp, Artificial Sequence
  ENSG00000111783_16 (sequence is synthesized)
tcagcactacaggagcaatgcagtcttacacgtggtctctaacatacacagtgacgacggctgctgggtccccagctgagaactcccaacagctgccctgtatgaggaacactcatgtgc

SEQ ID NO: 185535 - DNA, 120 bp, Artificial Sequence
  ENSG00000111783_17 (sequence is synthesized)
cttcttcctccgtcacacacaggataccagtttatccccacagagaggaacatggatacacgggaagctataactatgggagctatggcaaccagcatcctcaccccatgcagagccagt

SEQ ID NO: 185536 - DNA, 120 bp, Artificial Sequence
  ENSG00000111783_18 (sequence is synthesized)
atccggccctccctcatgacacagctatctctgggccactccactatgccccttaccacaggagctctgcacagtacccttttaatagccccacttcccggatggaaccttgtttgatga

SEQ ID NO: 185537 - DNA, 120 bp, Artificial Sequence
  ENSG00000111783_19 (sequence is synthesized)
gcagtactcccagactgcatcctaccccagtcactccccgctggccagaggtgccctcagccaacacgtgctacacaagcccgtctgtgcattctgcgaggtacggaaactctagtgaca

SEQ ID NO: 185538 - DNA, 120 bp, Artificial Sequence
  ENSG00000111783_20 (sequence is synthesized)
tgtatacacctctgacaacgcgcaggaattctgaatatgagcacatgcaacactttcctggctttgcttacatcaacggagaggcctctacaggatgggctaaatgactgctatcatagg

SEQ ID NO: 185539 - DNA, 120 bp, Artificial Sequence
  ENSG00000111783_21 (sequence is synthesized)
catccatatttaatattaataataataattaataataataataaacccaacacccatcccccagaagactttatctctatacattgtaactcatgggctattcctaagtgcccattttcc

SEQ ID NO: 185540 - DNA, 120 bp, Artificial Sequence
  ENSG00000111783_22 (sequence is synthesized)
taatgaacatgaggatgggatcaatgtgggatgaataaactttagttcagaaacaggacttactaaaagtcagtgggactgggtttctgtagccaagccagacttgactgtttctgtaga

SEQ ID NO: 185541 - DNA, 120 bp, Artificial Sequence
  ENSG00000111783_23 (sequence is synthesized)
gcactatctcgggcaggccattctgtgccttttccctctgttccatgactttgctttgtgttggcaaccacttctagtaagctactgattttcctgttgacaaaatctctttagtcttga

SEQ ID NO: 185542 - DNA, 120 bp, Artificial Sequence
  ENSG00000111783_24 (sequence is synthesized)
aggatggatactggagacagaatctggtttgtgttcttggatgggcacataatttaccaagagcattcaccttgccatctgtcttgtcattgtactgtacaaggaacagccctcagacgt

SEQ ID NO: 185543 - DNA, 120 bp, Artificial Sequence
  ENSG00000111783_25 (sequence is synthesized)
gttctgcacatcccttcttcctggtggtaccatccctatttcctggagcaccagggctaaatggggagctatctggaaactctagattttctgtcatacccacatctgtcacagtacctg

SEQ ID NO: 185544 - DNA, 120 bp, Artificial Sequence
  ENSG00000111783_26 (sequence is synthesized)
cattgtcttggaatgtaagcactgtcttgagggaaggaagaggtctgttctgtattgccttaagttgattgaggtttgtaggagactggttcttctacatacaaggatttgtcttaagtt

SEQ ID NO: 185545 - DNA, 120 bp, Artificial Sequence
  ENSG00000111783_27 (sequence is synthesized)
tgcacaatggctagtgtcagcaaaaggcaggagagggtttttgttttttttttaagttctatgagaatgtggatttatggcattgagtatcacactcagctctgctgtgttaactttgtg

SEQ ID NO: 185546 - DNA, 120 bp, Artificial Sequence
  ENSG00000111783_28 (sequence is synthesized)
aaactggatggaacaaactttaacttaccaagcaccaagtgtgaaagtgactttcacggttccttcataaaactataataatatccgacactttgatagaaaaaaattcaaagctgtgcc

SEQ ID NO: 185547 - DNA, 120 bp, Artificial Sequence
  ENSG00000111783_29 (sequence is synthesized)
tttgagcctatactatactgtgtatgtgtggaaataaaaatgtattgtacttttggagaattttttgtaggcatttttctgtcagatttgtagtaatttgtgaggtttgttagagattaa

SEQ ID NO: 185548 - DNA, 120 bp, Artificial Sequence
  ENSG00000111783_30 (sequence is synthesized)
tataggttttctttctgtattataaaatgcaccaagcaattatggtggacctattaccctatgggtaagaaataaatggaaatatgacatcggatgtttcagcaactgttctgtaaataa

SEQ ID NO: 185549 - DNA, 120 bp, Artificial Sequence
  ENSG00000111783_31 (sequence is synthesized)
aatctttgatcacaccactcagtgtgataattgtgtctacagctaaaatggaaatagttttatctgtacagttgtgcaagatatgaatggtttcacactcaaataaaaaatattgaaacg

SEQ ID NO: 185550 - DNA, 120 bp, Artificial Sequence
  ENSG00000111783_32 (sequence is synthesized)
gttgccatggcaacccactgacctgagccaccccctggagaggccacagctgctggcttcctgggcttctccaaactcctgtgtgtcgccactgccaccggcagggagccaggagagaga

SEQ ID NO: 185551 - DNA, 120 bp, Artificial Sequence
  ENSG00000111783_33 (sequence is synthesized)
ggcaaaatgaactgggctgccttcggagggtctgaattcttcatcccagaaggcattcagatagattcgagatgcccactaagcagaaatatcacggaatgtgaaagaaagctcccaata

SEQ ID NO: 185552 - DNA, 120 bp, Artificial Sequence
  ENSG00000111783_34 (sequence is synthesized)
gttattatatcattccgaaaggactggaacaaccgactcacagcaagtgctggggcgaagtaggaaacgtccaggataagagaggccggcgagcggggccaccgtcccttactcttaaaa

SEQ ID NO: 185553 - DNA, 120 bp, Artificial Sequence
  ENSG00000111783_35 (sequence is synthesized)
ggaaaatccccgcgaagtgcctcgggcccgggagaacagttttgcaggggccagggctctagtggcctgctttggggccacttcagcatgacctgcggaaacgcgcccctttgttccgca

SEQ ID NO: 185554 - DNA, 120 bp, Artificial Sequence
  ENSG00000111783_36 (sequence is synthesized)
acctccctcttcccctgttagcaatccttcccctgagtacactggcctcagcactacaggtaatggaaagtccttcaaaaactttgggtagttaatgtttgaagaaagggctttctgcca

SEQ ID NO: 185555 - DNA, 120 bp, Artificial Sequence
  ENSG00000111783_37 (sequence is synthesized)
actttgggtagttaatgtttgaagaaagggctttctgccagcctgggcaacatagtgagacttcatttccacacacacaaaaagccagacatcttggctcacacctgtagtcccagctac

SEQ ID NO: 185556 - DNA, 120 bp, Artificial Sequence
  ENSG00000111783_38 (sequence is synthesized)
tacgatcgcaccactgcattctagccttagtgatacagtgagaccttgtctcaaaaaaagaaaaacagggctttctggaaaaacattcttctcccacaatctccaaaagataatgccaaa

SEQ ID NO: 185557 - DNA, 120 bp, Artificial Sequence
  ENSG00000111783_39 (sequence is synthesized)
acctgggtatcttcctggatttgtgaatgacgtacaggtattcatttattcattggtacacattctgtatgctgctgttttcaagttggcaaattaagcatatgataaaatcccaaaact

SEQ ID NO: 185558 - DNA, 120 bp, Artificial Sequence
  ENSG00000111783_40 (sequence is synthesized)
ctacatcctcaccagcatttggtgttgtcagtgttccaggttttggccattctaatagatcataaggcagcagtttcctcagttaaccaccagaagactcgggacccgaggacagtcaaa

SEQ ID NO: 185559 - DNA, 120 bp, Artificial Sequence
  ENSG00000111783_41 (sequence is synthesized)
agagtgagttccaggtgggaaggcagttatgacagttgagaagtagtagaagacacggaaggcacagaaggcagacttcgctcagcacaaagaattttctgataaccatactggcaaaat

SEQ ID NO: 185560 - DNA, 120 bp, Artificial Sequence
  ENSG00000111783_42 (sequence is synthesized)
gaactgggctgccttcggagggtctgaattcttcatcccagaaggcattcagatagattcgagatgcccactaagcagaaatatcacggaatggtaccattactatggcattgcagtgaa

SEQ ID NO: 185561 - DNA, 120 bp, Artificial Sequence
  ENSG00000111783_43 (sequence is synthesized)
agtcaaagtaagcaccggacggccattccacctgcagagcgcacatctatgggcctcgagacaggccacacccttggctctttatcctgagctctgtctgcaggcctggcagaagtctgt

SEQ ID NO: 185562 - DNA, 120 bp, Artificial Sequence
  ENSG00000111783_44 (sequence is synthesized)
gcctagagggaatatggaagagctttatgacggccagggcccctctctcaggactcctgaaagagaggttgtccaaaagcccaagacgagttggctctgctgctttaaggaatctgattt

SEQ ID NO: 185563 - DNA, 120 bp, Artificial Sequence
  ENSG00000111783_45 (sequence is synthesized)
tgtaccaccctgcttttaggcatattttgtaaaatagtcttgggcatcattgaaaggattgccttgtggcctcttggaggatcaccaggttatctggactgttttgctgagcaaactctg

SEQ ID NO: 185564 - DNA, 120 bp, Artificial Sequence
  ENSG00000111783_46 (sequence is synthesized)
ctctgatagtatgcagtagaccagagaagcaaaactgtactattccctgcatgggagatggggcagaaaggtccagctgcaccatggtccatgagggttcacggcttcccattcatcagt

SEQ ID NO: 185565 - DNA, 120 bp, Artificial Sequence
  ENSG00000111783_47 (sequence is synthesized)
atggagcatagattccggtgggaaacagacaaaacagagaatcagattgtgacaaagttgtagcagagagcaacaaaagaggaatggccagggaaggtctttcagaggaggttacattta

SEQ ID NO: 185566 - DNA, 120 bp, Artificial Sequence
  ENSG00000111783_48 (sequence is synthesized)
agtaaagactaggggagtgcagaaggctgtgcagacacttgtctgctaggtgtgagtcagtgggaagggaatctcttcctgtactgctcgaccttcattaaaatctgcatttataggact

SEQ ID NO: 185567 - DNA, 120 bp, Artificial Sequence
  ENSG00000111783_49 (sequence is synthesized)
tgcctctaaggatgtttcaaaaattgttggacgataataggtgttccatgaagaagagcagcaggccctataagtttggttaacactaagtttaaacagtttcctttactgcaagacttc

SEQ ID NO: 185568 - DNA, 120 bp, Artificial Sequence
  ENSG00000111783_50 (sequence is synthesized)
tcagaacccttattatgctaatgtacaaggtgactccactagagggtgccttattatgcagcatttctaagcattttgaccacgttgagcaggtcagcacatagtgacctataaaacact

SEQ ID NO: 185569 - DNA, 120 bp, Artificial Sequence
  ENSG00000111783_51 (sequence is synthesized)
gtaactttttagaaaggcaaccatataggacttttaagacttgtcttgaaggatgtgtcaaaagcatgtccagtgctctcaccctgggccaaacccctgtccctcaccagctcctctcat

SEQ ID NO: 185570 - DNA, 120 bp, Artificial Sequence
  ENSG00000111783_52 (sequence is synthesized)
ccctgggcagcacattcccatcctccaagggtgggtttgattttggagccaaggtagggaaagaaaatggatgatcgaactgggaaaaacccttttttggtattctgaaaataatgagac

SEQ ID NO: 185571 - DNA, 120 bp, Artificial Sequence
  ENSG00000111783_53 (sequence is synthesized)
taatttttttggtgtagctcagaagcttttgaaccagtctctaaaggaatttccagaagactgttgaacaaaggacctcttggaataaattcctaataattttccaagatgactattctg

SEQ ID NO: 185572 - DNA, 120 bp, Artificial Sequence
  ENSG00000111785_0 (sequence is synthesized)
gcgtttacctggaggcagcggcttgggcgcgcagagcggccgcggctcccccgcacctgcggccatggatgaggagcgcgccctctacatcgtccgggccggcgaagcaggggctatcga

SEQ ID NO: 185573 - DNA, 120 bp, Artificial Sequence
  ENSG00000111785_1 (sequence is synthesized)
gcgggtcctgagggattacagcgacaagcatagggctactttcaaatttgaatcaacagatgaagataaaagaaagaaactctgtgaaggcatatttaaagtccttataaaggacatccc

SEQ ID NO: 185574 - DNA, 120 bp, Artificial Sequence
  ENSG00000111785_2 (sequence is synthesized)
aacaacatgtcaagtgtcctgcctggaagtactccgcattctctccagagacaaaaaggttttagttcctgtgacaactaaggaaaatatgcagatactgctgcgactagccaagctaaa

SEQ ID NO: 185575 - DNA, 120 bp, Artificial Sequence
  ENSG00000111785_3 (sequence is synthesized)
tgagttagatgattctttggagaaagtatcagagttcccagttattgtggagtcattaaaatgtctgtgtaatatagtgttcaacagtcagatggcacagcagctcagcctggaacttaa

SEQ ID NO: 185576 - DNA, 120 bp, Artificial Sequence
  ENSG00000111785_4 (sequence is synthesized)
tcttgctgcaaagctctgtaacctcctgagaaagtgcaaggaccggaaatttatcaatgacattaagtgctttgacttgcgcttgctcttccttctgtcacttttgcacaccgacatcag

SEQ ID NO: 185577 - DNA, 120 bp, Artificial Sequence
  ENSG00000111785_5 (sequence is synthesized)
gtcacaattgcgctatgagctccagggactaccgctgctaacgcagatcttggaaagtgcctttagcatcaagtggaccgatgagtatgaatcggccatagaccataatggacctcctct

SEQ ID NO: 185578 - DNA, 120 bp, Artificial Sequence
  ENSG00000111785_6 (sequence is synthesized)
ctcacctcaggagacagactgtgccattgaggccctcaaagctctcttcaatgtgacggtagacagttggaaggtgcataaagagagtgattctcatcagttccgtgtaatggcagctgt

SEQ ID NO: 185579 - DNA, 120 bp, Artificial Sequence
  ENSG00000111785_7 (sequence is synthesized)
ccttcgtcattgtttactaatcgtaggtccaactgaagacaaaacagaagagctacacagcaatgcagtcaaccttttaagcaatgttccagtctcttgtttggatgttctcatttgtcc

SEQ ID NO: 185580 - DNA, 120 bp, Artificial Sequence
  ENSG00000111785_8 (sequence is synthesized)
gttaacccatgaagaaacagcccaagaggcaacgactctagatgaactgcccagtaataaaacagctgagaaagaaacagttttgaaaaacaataccatggtatacaatggtatgaatat

SEQ ID NO: 185581 - DNA, 120 bp, Artificial Sequence
  ENSG00000111785_9 (sequence is synthesized)
ggaggccattcatgttttactgaattttatggagaagagaatagacaagggaagcagctatagagagggtctaactccagttctcagcttattaaccgaatgttcccgagcccatcgaaa

SEQ ID NO: 185582 - DNA, 120 bp, Artificial Sequence
  ENSG00000111785_10 (sequence is synthesized)
catccgaaaatttctcaaagatcaggttttaccaccgttgagggatgtgacaaatcgacctgaagttggctcaactgtgagaaataagctggtgcgcctcatgacacatgttgaccttgg

SEQ ID NO: 185583 - DNA, 120 bp, Artificial Sequence
  ENSG00000111785_11 (sequence is synthesized)
agtcaagcaaattgctgctgaattcctttttgtcctttgcaaagagagagtggatagtctgctgaaatacactggctatgggaatgctgcaggactgttggcggccaggggcctcttggc

SEQ ID NO: 185584 - DNA, 120 bp, Artificial Sequence
  ENSG00000111785_12 (sequence is synthesized)
tggaggaagaggagataattggtactcagaggatgaggacacagacactgaagaatacaaaaatgcaaaaccaaacattaatcttatcactggtcatttagaggaaccaatgccaaaccc

SEQ ID NO: 185585 - DNA, 120 bp, Artificial Sequence
  ENSG00000111785_13 (sequence is synthesized)
catagatgaaatgacagaagaacaaaaagaatatgaagccatgaaacttgtcaacatgcttgataaactttccagagaggagttgcttaaaccaatgggactaaaacctgatgggacaat

SEQ ID NO: 185586 - DNA, 120 bp, Artificial Sequence
  ENSG00000111785_14 (sequence is synthesized)
aacgcctttggaggaagcactcaaccagtactctgtcatcgaagagaccagctctgacacagactaaaagcatcacctgctcaactctcaatattgctttatcagcatcttttctctgta

SEQ ID NO: 185587 - DNA, 120 bp, Artificial Sequence
  ENSG00000111785_15 (sequence is synthesized)
gctccaggggaatcttttctctaaaacatttatgcccttgctttggctagaaacacattaactggtttactcattgagaatccagcatatttaagaggtgaccctgtgttttttgtgata

SEQ ID NO: 185588 - DNA, 120 bp, Artificial Sequence
  ENSG00000111785_16 (sequence is synthesized)
ttgaggcattcatacagagctgcagttagacggggttacgggggctaaaagcagaaaaaaaattccatttcatcgggatggaactgaaggattttattctataaagcggccctggttgaa

SEQ ID NO: 185589 - DNA, 120 bp, Artificial Sequence
  ENSG00000111785_17 (sequence is synthesized)
tctggcaattctttttgccaagatccctagcagaagatttagccatgtccttcccctcacttgtgtgagtggccccttctgaatctctccagcagccagaggcacgtgagaagcagaaag

SEQ ID NO: 185590 - DNA, 120 bp, Artificial Sequence
  ENSG00000111785_18 (sequence is synthesized)
agctggtaaataaagccttgggcaagcgacttcttagatcagaactcaccaaatggaagcctagcagctgctccataaacctagccccattcttcatatcaattttgtataaatatatag

SEQ ID NO: 185591 - DNA, 120 bp, Artificial Sequence
  ENSG00000111785_19 (sequence is synthesized)
aaacacacacacagcctcagacttacaaactgattatactctaaaagtttgtatgtcagttagctaaaacttcagaatacatttctccctataaagagttataaatgatggtttagttct

SEQ ID NO: 185592 - DNA, 120 bp, Artificial Sequence
  ENSG00000111785_20 (sequence is synthesized)
caggcagctacaaatgcctatttattccctaatgtacctgaacactagtaccatagaactgaaccaccatctgtatcagcgcatggggagtgtgcattctgaggtctaacccggggtgcc

SEQ ID NO: 185593 - DNA, 120 bp, Artificial Sequence
  ENSG00000111785_21 (sequence is synthesized)
acacatcctccatcccagcatagagaatggggactccctgagtaatgggagttctttcatggcctctgcttggggtgggggagtcagcagcacccatttgtacatataggtcattcatac

SEQ ID NO: 185594 - DNA, 120 bp, Artificial Sequence
  ENSG00000111785_22 (sequence is synthesized)
atcacattttaaattggggactgtgtgtgctggtgtgtgtgtgagttctacgtttctaccatatgtgatcagtttaatagtaactttatttatttaaaaaaaagaaacacaattagttac

SEQ ID NO: 185595 - DNA, 120 bp, Artificial Sequence
  ENSG00000111785_23 (sequence is synthesized)
tgttaaactgataaagggtgtttatttttacttttagaattggtcctatgaagaagtagaaagtgagtcatgcactagacagtgggcctagctcatcagtggctaaagttgaaaaggggt

SEQ ID NO: 185596 - DNA, 120 bp, Artificial Sequence
  ENSG00000111785_24 (sequence is synthesized)
tggtttcctgtatatatatgtatgtatatacacacgtacatacattcatatatatacatatatacataatgtgcttaaccactgccttttaaaactttaaattaaataaaacattggggt

SEQ ID NO: 185597 - DNA, 120 bp, Artificial Sequence
  ENSG00000111785_25 (sequence is synthesized)
tgattcaatttggccatctgtgtgtgtttctttatagatacatgggctaaacaatactatttcacagtttatgcttttttaaagtgcttttacatccatggtcccacttctaatagcctt

SEQ ID NO: 185598 - DNA, 120 bp, Artificial Sequence
  ENSG00000111785_26 (sequence is synthesized)
tttaaggacaggtagagtacatggagggttactgaaaaggtcatttatccagaagttacctctctggcaaagcaaaaaaatcaggaattacgtcttaaaggcctttcagctgccagagga

SEQ ID NO: 185599 - DNA, 120 bp, Artificial Sequence
  ENSG00000111785_27 (sequence is synthesized)
gatgtcacaaagtttcttgcaacttacttatgggagagatcttcaagaatatcactcttagactctgaactgaaatttgcatacgcttccaacatgttttattagctggctttgaagctc

SEQ ID NO: 185600 - DNA, 120 bp, Artificial Sequence
  ENSG00000111785_28 (sequence is synthesized)
acaaaagaatggcaaagaaagaggctgctagattgaaggcaggcatactgaaagaagaaaaaggccaactgaaaactagatagtgagatgagaagaataaaacttcaagacatagcaaat

SEQ ID NO: 185601 - DNA, 120 bp, Artificial Sequence
  ENSG00000111785_29 (sequence is synthesized)
ctgggactgtctacttaccaaaggatactctagttgacccagaaaatgtgtgtacaacagtatggcccgtagactacttcctataatggtgaccctgagtttttttaaaagaagaaatta

SEQ ID NO: 185602 - DNA, 120 bp, Artificial Sequence
  ENSG00000111785_30 (sequence is synthesized)
aatccagaacgctttataaaagggtaggaagaagacaatagatgttagaatttcatccaaaatgtttgagggagaggtgagtgacccaggttttaaccaacagcaaaagaaatgggcaat

SEQ ID NO: 185603 - DNA, 120 bp, Artificial Sequence
  ENSG00000111785_31 (sequence is synthesized)
tcataattttagattaagtgaaaagtttagaaaaaatttaagtatttttgttattctacaaatgcatttttaaagtatttttataatttctataatcaaatagctttggcatgcatgtca

SEQ ID NO: 185604 - DNA, 120 bp, Artificial Sequence
  ENSG00000111785_32 (sequence is synthesized)
gcttacctaaatgaagatgtgtttaatgaaatgccatcttaccagctttctttatgcagagtaagtgtttgaacagtcctgtttcagtagctgtgctcttctgctttcagtgagttctgt

SEQ ID NO: 185605 - DNA, 120 bp, Artificial Sequence
  ENSG00000111785_33 (sequence is synthesized)
ttcattttgcatttctctgcactgggcactaagctttgtttttgaaaagagagtttgcggggaagaagatgagagtgtcttcatctggcacacagaaagagaactaatatctgttaagtg

SEQ ID NO: 185606 - DNA, 120 bp, Artificial Sequence
  ENSG00000111785_34 (sequence is synthesized)
cttactacatgctgggcttttgatgtatgttatctcatgtaacctcaccttatcgcatatgaaagatcctctccagaaagcttatgaaagttaccccacgtcacagcaaggaagagtcca

SEQ ID NO: 185607 - DNA, 120 bp, Artificial Sequence
  ENSG00000111785_35 (sequence is synthesized)
actctggtggcctgactcccagcaccactccttccttttccccacagcacacctgggcccacactgtgcctccttagggctctgaaatgctgggaacagagtggtgtgaggagggtggtc

SEQ ID NO: 185608 - DNA, 120 bp, Artificial Sequence
  ENSG00000111785_36 (sequence is synthesized)
attctcaggccattttaagcaataactatttcaacagaactagtttaaagaggtttttaagcagggaagtgacctgaagtggaagtatgagtgggaaacttgcatggtcagcactggatt

SEQ ID NO: 185609 - DNA, 120 bp, Artificial Sequence
  ENSG00000111785_37 (sequence is synthesized)
tccaatgaagacctggaatccgttaggataggccagggaccaaggctgcaggctggcctctctgcccacaactctcctgaccttggaagcagggtacggaggcgtgtgtcctaaaataaa

SEQ ID NO: 185610 - DNA, 120 bp, Artificial Sequence
  ENSG00000111785_38 (sequence is synthesized)
gcatttgagctgctgctacagaggaacaatcaccagatattgtgaccctttcagatgcccagtagtcctgggaggcaggcagggcaggtgttattatcccttctttataaatgaggacac

SEQ ID NO: 185611 - DNA, 120 bp, Artificial Sequence
  ENSG00000111785_39 (sequence is synthesized)
agaatgaggcagtacaagtgactctaaacacccccttagtgccacatcagtctcgccacctcccaggactaggtgtcacctgtattgacctcttcccctctgattataaaagtaatatat

SEQ ID NO: 185612 - DNA, 120 bp, Artificial Sequence
  ENSG00000111785_40 (sequence is synthesized)
gttcattgtggaaagtttggaaaatgcagaaaataaaattaataatttaccccaaatcccaccatcctgagatcatcactgttaatgttttagtgtatttccttcctgtattttttctat

SEQ ID NO: 185613 - DNA, 120 bp, Artificial Sequence
  ENSG00000111785_41 (sequence is synthesized)
gcatatataatttattttactacaagattgggatcatgctgtatttacagatttgtatcctgctttctttaacatattgtgagcattttcccatgtcaataaatattcttcaaaaagtaa

SEQ ID NO: 185614 - DNA, 120 bp, Artificial Sequence
  ENSG00000111785_42 (sequence is synthesized)
ccttatcgtttagtaagatcaaatttctaaatgatgtttcgttccagttgaacattcttggaggcttatctcttccctggccagatgcctgatcagatgagaagcccgccatgatactgt

SEQ ID NO: 185615 - DNA, 120 bp, Artificial Sequence
  ENSG00000111785_43 (sequence is synthesized)
cacagtgcctagaatgggctctttatccagtagacaccactgtactttttgatacgagggcagtcttaacttgtgttaaggcctgtgtgtagcattgaagagaggagttgcttaaaccaa

SEQ ID NO: 185616 - DNA, 120 bp, Artificial Sequence
  ENSG00000111785_44 (sequence is synthesized)
ccatgaaacttgtcaacatgcttgataaactttccaggtattgtattcccatccattttttgcttggtttctaaaaatggtctatttctttgtctctctcactgagagttaccatagaac

SEQ ID NO: 185617 - DNA, 120 bp, Artificial Sequence
  ENSG00000111785_45 (sequence is synthesized)
agcaactctggaaatccatgttgattggaatagggtggcccaggcagcagtagttcagatagctcttggctaccatggtttttctacatgtgccgcttctggatgtgcattcctaaacat

SEQ ID NO: 185618 - DNA, 120 bp, Artificial Sequence
  ENSG00000111785_46 (sequence is synthesized)
ttaaactctcaaagctaagatagtaactaccagagcactgtaataattaaccaactaacctccctgtcttcaaaaagatgctgtgagttagattcagtgattttgctgctgcttgtattt

SEQ ID NO: 185619 - DNA, 120 bp, Artificial Sequence
  ENSG00000111785_47 (sequence is synthesized)
ttgttttagcctgttttagtttttgtttcaaatcatgatgcttttattttttcatttttgatgtgtaagtttgcaattacgcctttttgggttgctgctgaaaccaagaattctaaaatg

SEQ ID NO: 185620 - DNA, 120 bp, Artificial Sequence
  ENSG00000111785_48 (sequence is synthesized)
aattctaaaatgtcatgcacccaataagaaaaagtgaaaagaaatagctcacatgaaggattttctgaaaacagggacttgtattaattaggagttctaaaaaaaaaaaaaaaaaaaaaa

SEQ ID NO: 185621 - DNA, 120 bp, Artificial Sequence
  ENSG00000111785_49 (sequence is synthesized)
gggaatccacatattctagaagctgccaacaaataaatatacaaacgtcaagtctgaaataccccagcttccacctgatttaaactatgcctcaaagaagatgcctacttatccggaagt

SEQ ID NO: 185622 - DNA, 120 bp, Artificial Sequence
  ENSG00000111785_50 (sequence is synthesized)
aaaatgaaaaaggctgactctaacaagtattggtgtccctgtagagcaactggtggggtataaattggtataagtactttgaaacactgttcagcagtacctggtaaagattgacatatg

SEQ ID NO: 185623 - DNA, 120 bp, Artificial Sequence
  ENSG00000111785_51 (sequence is synthesized)
gatataacctgtgagtcagcatctcctctctagggtgtatacctgtagatatcaaatgacatgtaaaaattgtgttcacatcagcacttttcaagatagccccaagctggaaacaatcca

SEQ ID NO: 185624 - DNA, 120 bp, Artificial Sequence
  ENSG00000111785_52 (sequence is synthesized)
agtgtcatcaggagtacagcagataagtaaattgtggcatattcatacattggaatactatatagcagtgctttcttaacctacctgtaggtgaggaaccagatttttttccctaaaaat

SEQ ID NO: 185625 - DNA, 120 bp, Artificial Sequence
  ENSG00000111785_53 (sequence is synthesized)
ctgtcaggatgaaactcttgtgtaatacaatattacatacaacgccaaactgctcaaaagtttctaaatgttcacacataccttctgtactcatggtgttgcaggccagtgatgaacagg

SEQ ID NO: 185626 - DNA, 120 bp, Artificial Sequence
  ENSG00000111785_54 (sequence is synthesized)
gtggggaccagcagtggtacacaaacatacttcaaatagcactgctctcaaacaatgacaaagaacagactgcaactacacagagtagtgtgaatgaatctcacaagccaacacaagagt

SEQ ID NO: 185627 - DNA, 120 bp, Artificial Sequence
  ENSG00000111785_55 (sequence is synthesized)
ctgtattttatgattccatacgtgtaaagttcagtagcaaccaaaatactaacctgtgacattaacaagttagaattacccttgaggagcagaagatggtcatttgtagggggtatggaa

SEQ ID NO: 185628 - DNA, 120 bp, Artificial Sequence
  ENSG00000111785_56 (sequence is synthesized)
agaattctgggattcttaatcttggcattgcatgatttttatgttggctatatgggtatgctcattttgtcaaaatttagctgtgtgcttatgatttgtgcacttttctgtatgtacatt

SEQ ID NO: 185629 - DNA, 120 bp, Artificial Sequence
  ENSG00000111785_57 (sequence is synthesized)
atacttaacatttacattaaaatttattgatgacctattaaacacacaccctctttcctcattaaggtagtagattagtggaggaaacaaagtgtatgcaagtaaacaaatgtgaaatta

SEQ ID NO: 185630 - DNA, 120 bp, Artificial Sequence
  ENSG00000111785_58 (sequence is synthesized)
caaattatgatttcatgagagaaaaaagagtcttctcggagaagatactttagctgaaacctggagtatgcaaaggaaccagcgatgcaaagagcagaggcaaacaatccagggattttg

SEQ ID NO: 185631 - DNA, 120 bp, Artificial Sequence
  ENSG00000111785_59 (sequence is synthesized)
gtagttgttttgagtagagaaatagagctaatttagtggatttagagtaaaagaggacattgtagacatcgggtacaacttgggagttgatgttatcaaaactggaaaagagtgattctc

SEQ ID NO: 185632 - DNA, 120 bp, Artificial Sequence
  ENSG00000111785_60 (sequence is synthesized)
acatgcttgataaactttccaggagagcagatgtgaaggacctgcaccaggatggtggttagcaacagtggcccgtgccaaagcacttaccaaagtgatgatgactaagaccctgtcatt

SEQ ID NO: 185633 - DNA, 120 bp, Artificial Sequence
  ENSG00000111785_61 (sequence is synthesized)
aattccatgtgtcaatactgccctgtagtacacagagcagacaagaaagaagagcccttgaaaacaagggaatgatttttgagtcgttatcaagctaagtggcaagcgggaagctgaaac

SEQ ID NO: 185634 - DNA, 80 bp, Artificial Sequence
  ENSG00000111786_0 (sequence is synthesized)
cccttcgcttccgctccgcgttcccacaatgcagtgcggctgagcgcctcggagcccgcggggacgctgcggggggaccc

SEQ ID NO: 185635 - DNA, 120 bp, Artificial Sequence
  ENSG00000111786_1 (sequence is synthesized)
gcggcgtcgggcggtgcggatgtcgggctgggcggacgagcgcggcggcgagggcgacgggcgcatctacgtggggaaccttccgaccgacgtgcgcgagaaggacttggaggacctgtt

SEQ ID NO: 185636 - DNA, 120 bp, Artificial Sequence
  ENSG00000111786_2 (sequence is synthesized)
ctacaagtacggccgcatccgcgagatcgagctcaagaaccggcacggcctcgtgcccttcgccttcgtgcgcttcgaggacccccgagatgcagaggatgctatttatggaagaaatgg

SEQ ID NO: 185637 - DNA, 120 bp, Artificial Sequence
  ENSG00000111786_3 (sequence is synthesized)
ttatgattatggccagtgtcggcttcgtgtggagttccccaggacttatggaggtcggggtgggtggccccgtggtgggaggaatgggcctcctacaagaagatctgatttccgagttct

SEQ ID NO: 185638 - DNA, 120 bp, Artificial Sequence
  ENSG00000111786_4 (sequence is synthesized)
ttatgctgatgtgcagaaggatggagtggggatggtcgagtatctcagaaaagaagacatggaatatgccctgcgtaaactggatgacaccaaattccgctctcatgagggtgaaacttc

SEQ ID NO: 185639 - DNA, 120 bp, Artificial Sequence
  ENSG00000111786_5 (sequence is synthesized)
ctacatccgagtttatcctgagagaagcaccagctatggctactcacggtctcggtctgggtcaaggggccgtgactctccataccaaagcaggggttccccacactacttctctccttt

SEQ ID NO: 185640 - DNA, 120 bp, Artificial Sequence
  ENSG00000111786_6 (sequence is synthesized)
caggccctactgagacaggtgatgggaattttttctttattttttaggttaactgagctgctttgtgctcagaatctacattccagattgaggatttagtgtcttaggaaatttttttaa

SEQ ID NO: 185641 - DNA, 120 bp, Artificial Sequence
  ENSG00000111786_7 (sequence is synthesized)
ttttttttttttaaagaagaaaaaaaactacataatttctaccagggccatattagcagtgaaacattttaaactgcagaaattgtggttttggttcagaaacaagttgtatatttttca

SEQ ID NO: 185642 - DNA, 120 bp, Artificial Sequence
  ENSG00000111786_8 (sequence is synthesized)
cccctgattatgggaaaaaaatcagttctgtctttgtgggttgctctactatggagatcaacagttactgtgactgagtcggcccattctgtttagaaatatattttaaatgtttagtaa

SEQ ID NO: 185643 - DNA, 120 bp, Artificial Sequence
  ENSG00000111786_9 (sequence is synthesized)
ctttcaaacagaatgagatgatacatgtaaaatacttaacacagagtctgtcttccaagaaatgatagctgttattcttcagtgcatgggacacgggggctttcttttcaatagcctgtg

SEQ ID NO: 185644 - DNA, 120 bp, Artificial Sequence
  ENSG00000111786_10 (sequence is synthesized)
tgaagccttgccctggattgccaatgaggaaagtatcctgcaaatgaaattgcgctgggagtgcagccttggaagaacataaccatatttcttgtaaaggagttttctagtggtgagaag

SEQ ID NO: 185645 - DNA, 120 bp, Artificial Sequence
  ENSG00000111786_11 (sequence is synthesized)
gaaagatgatgggaaaacttgagctacaattctaaagatgcttcttttggaatatacttggcatcagacatggtagaaaggcattcaaggagccagatttgaacaacttacccagccttg

SEQ ID NO: 185646 - DNA, 120 bp, Artificial Sequence
  ENSG00000111786_12 (sequence is synthesized)
gatcctgaagaagatcagattttgtggtggttttagaattaaatattttttaaaaccccgtaacttaagagtcttagagattttattggaaagtatagactatttctgtctagtgtttat

SEQ ID NO: 185647 - DNA, 120 bp, Artificial Sequence
  ENSG00000111786_13 (sequence is synthesized)
acagtctcattatattgccgaggctgaccttgaactcctgggcccaagcagtcctcccacctcagcctctccagtagttgggactgcaggcatgcaccactgtgccaggctaaaccgtaa

SEQ ID NO: 185648 - DNA, 120 bp, Artificial Sequence
  ENSG00000111786_14 (sequence is synthesized)
cattttcttgtggttgattatgtcacccttcagactcagtagttcttgatgtctttccttgtaggaaagcagctgctgttttggatctcagtttgattgaggtggtgactatccctttgg

SEQ ID NO: 185649 - DNA, 120 bp, Artificial Sequence
  ENSG00000111786_15 (sequence is synthesized)
taccattgagaccagaaaccagaccagttggacattgtttttttctggttatcctgtcctgccttactatgagatttacggatgtttggggacacaggtctctgggctcatttctttttc

SEQ ID NO: 185650 - DNA, 120 bp, Artificial Sequence
  ENSG00000111786_16 (sequence is synthesized)
tgaggattcatataattgcctagtttttggcttagaggttggtccttccctggtttaatgatgcttttgttcagactgtcctctaggacttgaatttgaagcagaaacagaacagcacct

SEQ ID NO: 185651 - DNA, 120 bp, Artificial Sequence
  ENSG00000111786_17 (sequence is synthesized)
gatcctcagttatactgcaaagcagggcctcagaaagggtaactccaattactgactttcacctaaggtgaaaaagcatccggcttctttccccttggcatctttggatcttctgagaat

SEQ ID NO: 185652 - DNA, 120 bp, Artificial Sequence
  ENSG00000111786_18 (sequence is synthesized)
ggtggctgaaggcagagggcctggggacaagccagcctggacatgactcctctgctgcttattaattccttacctgaactactcttgggacctcgattccttcatgggcaaaatggtcac

SEQ ID NO: 185653 - DNA, 120 bp, Artificial Sequence
  ENSG00000111786_19 (sequence is synthesized)
ataatagcaccatcacaagacttgccaggaatctagagcaagaggataacgtctaaagcatctagctcaggtcctcacatctggaaggtattaaatacaggctagctccttccatagatg

SEQ ID NO: 185654 - DNA, 120 bp, Artificial Sequence
  ENSG00000111786_20 (sequence is synthesized)
gtggcaggggattaaactatatgacccctgagatcctttccagttcttagctttgaggggggtcaatggcagtaattcagatatattgtttatcatagttaattgagtatcaacatgtca

SEQ ID NO: 185655 - DNA, 120 bp, Artificial Sequence
  ENSG00000111786_21 (sequence is synthesized)
aattggcatttattgtgttaccttgggcaaatgatataacttaagtcttaattttcttcattcttgaaatgggatagtaagagtacctacctcataatgttatgaaggtttaatgagata

SEQ ID NO: 185656 - DNA, 120 bp, Artificial Sequence
  ENSG00000111786_22 (sequence is synthesized)
gcctcatgccaggcacagagtacacagtaagtgctcaatacttaactattattgttagatgttggtttgcttattcttctggctctgatttttttcccctttactctttttgtttttgtt

SEQ ID NO: 185657 - DNA, 120 bp, Artificial Sequence
  ENSG00000111786_23 (sequence is synthesized)
tctcagtatctgcctatcttgtgtccctttgtaattttttaaccccagaactctattccctccttcaggatgtcatacattatctttttttctctccatgctgctctgaaatcctgctta

SEQ ID NO: 185658 - DNA, 120 bp, Artificial Sequence
  ENSG00000111786_24 (sequence is synthesized)
gaaaactattaggaaatggctgcagtcctgagctgtgagcggtaaacacagcctttgagagcaggagcacatttccctttcatgacatcaggtagggttgtatgactcccgactagtttt

SEQ ID NO: 185659 - DNA, 120 bp, Artificial Sequence
  ENSG00000111786_25 (sequence is synthesized)
agcatctgagtcttaccttcccccccactgtattgaagaatgttggtgatcttttaagaggtactctgtatagtttgtcattcatacctacaagaaaacaaactttagattttttgttgt

SEQ ID NO: 185660 - DNA, 120 bp, Artificial Sequence
  ENSG00000111786_26 (sequence is synthesized)
tgtgttgttaccttcagctactctttggttatttcatgtctggtttcaaaattcccatgtcctgtgaaaccctgtcaagcaataaataattggtactgttaaatttcataatggaaaaaa

SEQ ID NO: 185661 - DNA, 120 bp, Artificial Sequence
  ENSG00000111786_27 (sequence is synthesized)
ttggaactcaaagtattaggagtttggcattgattttaaaggacaaagaaagaggctatgaattctcaaagatactaaacctgtaatgggatggacttcttgctctgttgaaaaggcctg

SEQ ID NO: 185662 - DNA, 120 bp, Artificial Sequence
  ENSG00000111786_28 (sequence is synthesized)
gtctctggaagatgaacttaaaaccagcttctcaaggtggttcatttaccacacatacttcagtgctcttttctgatttcatgtcccttatcaaggtttatgatttggggaccctcagga

SEQ ID NO: 185663 - DNA, 120 bp, Artificial Sequence
  ENSG00000111786_29 (sequence is synthesized)
tgatcatggagaaaggaccataggtattgctggctcttaacagggcagttaacatagctgaaggatgtgggctttcttatgttctccatgcctaggacttcctccgtcaggcagctggca

SEQ ID NO: 185664 - DNA, 120 bp, Artificial Sequence
  ENSG00000111790_0 (sequence is synthesized)
agttctccgggagcgccggtcggaggcggtcggcggaggtgtctaccccgccggtgatggcgttgaacgccactggcttcccggccttccgtccgctgcctccgtccgattctgcgtctg

SEQ ID NO: 185665 - DNA, 120 bp, Artificial Sequence
  ENSG00000111790_1 (sequence is synthesized)
cttgctgaggaggcggattaggggggcgcggagtctcttcccttgagtgcataggtcccggttggtagagggtttgagtccgcatcgccacagctgaaggctgcgagggactaagagcag

SEQ ID NO: 185666 - DNA, 120 bp, Artificial Sequence
  ENSG00000111790_2 (sequence is synthesized)
aatatatctttagaaatgagttgcacaattgagaaggcacttgccgacgctaaagctcttgttgaaagattaagagatcatgacgatgcagcagaatctctgattgagcaaaccacagct

SEQ ID NO: 185667 - DNA, 120 bp, Artificial Sequence
  ENSG00000111790_3 (sequence is synthesized)
ctcaacaagcgagtagaagccatgaaacagtatcaggaagaaattcaagaacttaatgaagtcgcgagacatcggccacggtccacgttagttatgggaatccagcaagaaaacagacaa

SEQ ID NO: 185668 - DNA, 120 bp, Artificial Sequence
  ENSG00000111790_4 (sequence is synthesized)
atcagagagttgcaacaagaaaacaaagaattacgtacatctctggaagaacatcagtcggccttggaacttataatgagcaagtaccgagaacaaatgtttagattgctaatggctagc

SEQ ID NO: 185669 - DNA, 120 bp, Artificial Sequence
  ENSG00000111790_5 (sequence is synthesized)
aaaaaagatgatccgggtataataatgaagttaaaagagcagcactccaagattgacatggtacatcgtaacaagtccgaaggattcttccttgatgcatctcgacacatccttgaagca

SEQ ID NO: 185670 - DNA, 120 bp, Artificial Sequence
  ENSG00000111790_6 (sequence is synthesized)
cctcaacatggactggagagaaggcacttggaagcaaatcagaatgaactgcaagcacatgttgaccagataactgaaatggcagcagtaatgaggaaagccattgaaattgacgagcaa

SEQ ID NO: 185671 - DNA, 120 bp, Artificial Sequence
  ENSG00000111790_7 (sequence is synthesized)
cagggttgcaaggaacaagaacgaatatttcaacttgaacaagaaaacaaaggcttgagagagatccttcaaataactcgagaatcatttttgaacctaaggaaagatgatgcgtcggaa

SEQ ID NO: 185672 - DNA, 120 bp, Artificial Sequence
  ENSG00000111790_8 (sequence is synthesized)
agtacttctttgtcagcattagtgaccaacagtgatttgagtctgaggaagagctgaagagtttctgagtctgtgagcttcttacatggctccaaatggtcaaataagtgaatgaatgaa

SEQ ID NO: 185673 - DNA, 120 bp, Artificial Sequence
  ENSG00000111790_9 (sequence is synthesized)
tggacagaaaattcaatcctttatttttttctctgtaaatatgtacagtgcacgggctatgagatagcaacaaaaaatgcatagttaatggtcatagactttattccaaaacataattgg

SEQ ID NO: 185674 - DNA, 120 bp, Artificial Sequence
  ENSG00000111790_10 (sequence is synthesized)
aaaatagaaactgagccattgccaaatggtaaagaaatgaaaagttttcacagtgactactgaatataccaagagcttttggcagtactgctggctttctgggtgattaattaggtaaac

SEQ ID NO: 185675 - DNA, 120 bp, Artificial Sequence
  ENSG00000111790_11 (sequence is synthesized)
ttgaatattcccagtaaatgtttgagaatgcataaaattataccaatttaaaaatataaatttttgccactgttttgtgaacggaggatttgtacgctaaatttcatccttatttggcgt

SEQ ID NO: 185676 - DNA, 120 bp, Artificial Sequence
  ENSG00000111790_12 (sequence is synthesized)
tcacatttatttaaatttttgtgaaagaaaatacagttttaaaggctataggaatgtgttatatgtaccttaaacagataatttaattttagcaatttatcataactgatacttagctaa

SEQ ID NO: 185677 - DNA, 120 bp, Artificial Sequence
  ENSG00000111790_13 (sequence is synthesized)
caattgtccataacttgtttaagtgtaagaaataccatttcaggaatgaaaaagaaggaatactactttctaagaaagaagatcttataatagacatatttagtaggttaaactactcct

SEQ ID NO: 185678 - DNA, 120 bp, Artificial Sequence
  ENSG00000111790_14 (sequence is synthesized)
ttgaaagaataagttttggttcaaagtcaataatgaagacgagatttgtttttctcttctctggctgatttttaaggatattatgtagttcatttagttaacagaattgaaatgtttgat

SEQ ID NO: 185679 - DNA, 120 bp, Artificial Sequence
  ENSG00000111790_15 (sequence is synthesized)
atggcaagataggtatggtaatttcaaagtgaattgggaattcctctggctcatagaacccttttttttttcctttaagtattcttgagatacaaaaaaaaaaagtaaatacaatttcaa

SEQ ID NO: 185680 - DNA, 120 bp, Artificial Sequence
  ENSG00000111790_16 (sequence is synthesized)
aaaaaaagttccggatctgtttttaagctccatctggtcctcataacctgcaagatttttcttaaaacctttcagctgaaagtgggggtaaaggtggagtaatctgtggatttgtttctg

SEQ ID NO: 185681 - DNA, 120 bp, Artificial Sequence
  ENSG00000111790_17 (sequence is synthesized)
ttgtcttttaaaatgtcaaatatataatatgtaatttttttaaaaaccaccagatacagaaatgtgctttaacatcagttgaaacctaaattttcttatgttgtggtgattgtattaaaa

SEQ ID NO: 185682 - DNA, 120 bp, Artificial Sequence
  ENSG00000111790_18 (sequence is synthesized)
agggataaaagaagagtgtcaaacatggttaaatatattgtactcatttatgttgaatacgtattaaaattaagacaaatggaaaattatactttgagtatataatttgttaaatattac

SEQ ID NO: 185683 - DNA, 120 bp, Artificial Sequence
  ENSG00000111790_19 (sequence is synthesized)
tttatatggtaattttatgtataatttcatatattggtaaaattcaaaactacacttgagaatttttttatcttaagtttggggtgaatggggtggatgagactgattgaatagaaaagg

SEQ ID NO: 185684 - DNA, 120 bp, Artificial Sequence
  ENSG00000111790_20 (sequence is synthesized)
gctaatggcccaaacattatatagatttctttttttcagtcagaggccttatttgatattttataaataaatgacagtttttatttttaaactttttattgtttttgggaaagtattcct

SEQ ID NO: 185685 - DNA, 120 bp, Artificial Sequence
  ENSG00000111790_21 (sequence is synthesized)
taatttaatgacacattcattcagatacttcttatccctgctaataaaggaaatctatttcaagctacaccattgagattaagtctgaggcagttcattgaggcagctctactataaaag

SEQ ID NO: 185686 - DNA, 120 bp, Artificial Sequence
  ENSG00000111790_22 (sequence is synthesized)
cttacttgataaataattatttttgtaaacaagttgggttaacttattcttcgtctttttgcttggatatgaatttaaggtcttcatgtttaaagacatttactttgttatttagtgaca

SEQ ID NO: 185687 - DNA, 120 bp, Artificial Sequence
  ENSG00000111790_23 (sequence is synthesized)
catttccatcctattttttttttttttttggttgttgttaaacagaaccttaagtttatgtttgaggtatgtactgcataggaacctattttattattaaagatgaatgattaaaattgg

SEQ ID NO: 185688 - DNA, 120 bp, Artificial Sequence
  ENSG00000111790_24 (sequence is synthesized)
cagcactccaaggtaatccattctataaatgtgacctgaaatggaaaagagagacgattgattattctgtgttcagattttttttgaaaaaaatcacaggtatctagtaatggcatttta

SEQ ID NO: 185689 - DNA, 120 bp, Artificial Sequence
  ENSG00000111790_25 (sequence is synthesized)
acatgatgttgaatgtttcatctttttaattgacattttctcctttttcttatttttccatttcttgttatatatcattttctgtttgatttataaactctcactgtttcttagaaactt

SEQ ID NO: 185690 - DNA, 120 bp, Artificial Sequence
  ENSG00000111790_26 (sequence is synthesized)
gcacttggaagcaaatcagaatgtacactaaataaacagtcaacttttggggtgtggatggaaggggggtccattttaaaagtgcttttacattgaatttccctcccagattagatcagc

SEQ ID NO: 185691 - DNA, 120 bp, Artificial Sequence
  ENSG00000111790_27 (sequence is synthesized)
aaataaatgaaatttattaaaagaatgttgtgtctttaatagccatgctgttcagtgtagaaactttaaatctctcattaattttctgtgtattgtatcatgtacagcctgttagatatt

SEQ ID NO: 185692 - DNA, 120 bp, Artificial Sequence
  ENSG00000111790_28 (sequence is synthesized)
tttaattcagattgtggatagtttgtagtcctttgattttgcaaatgaaattaaaatgcctttgtttagatgttaggattaagtatagtagtgctctctccattgtgtcttaattttttt

SEQ ID NO: 185693 - DNA, 120 bp, Artificial Sequence
  ENSG00000111790_29 (sequence is synthesized)
ttaactcacttgtggcaggtctttattgaataaaggaggaataaacctagacagggagttagaaatgaaagacatttcaagacagttcaagggttatgttggtgacacttcttgtcttcc

SEQ ID NO: 185694 - DNA, 120 bp, Artificial Sequence
  ENSG00000111790_30 (sequence is synthesized)
agacagttttgaaagcacagatcttgcctcttgtgcttgttaaaaaatctgtgatacttctctgaagattttataattaaataagtgaaccattaccatgaccttttataaaagtgctgc

SEQ ID NO: 185695 - DNA, 120 bp, Artificial Sequence
  ENSG00000111790_31 (sequence is synthesized)
cctatttgaagtattgggttttttctcatgatgagctttgttagacttggtactgaaaaaatcagtagtttttttccttctattttaaaggcaaagaaatgcttgcttcagctaggcatg

SEQ ID NO: 185696 - DNA, 90 bp, Artificial Sequence
  ENSG00000111790_32 (sequence is synthesized)
aaaatacaaaaagttagccaggcgtgatagcggaaagcaagagaattgtttgaacctgggagtgggaggttgcagtgagccgaggtcgtg

SEQ ID NO: 185697 - DNA, 120 bp, Artificial Sequence
  ENSG00000111790_33 (sequence is synthesized)
caacaagagcgagactctgtctaaaaaaaaagaaatgcttgctttctgtgtagttttttaacttaggtcagtgccataggactgaccaaatcataaattgaggatgctgttggtattcaa

SEQ ID NO: 185698 - DNA, 120 bp, Artificial Sequence
  ENSG00000111790_34 (sequence is synthesized)
agtttttactcattacccttactcagtttgcagctgcaatgatctgtacttaacctgcttttacatattatgcttccttgacaatgggaggaattttaatggttaacttgcagaatatga

SEQ ID NO: 185699 - DNA, 120 bp, Artificial Sequence
  ENSG00000111790_35 (sequence is synthesized)
cagatacttgtcttaatatcattcttcctaccataatctaattcaaaactatccagtagaactttctgaaatgattggaatgttttttatctgtgctgtccagtgtggaagccagtagcc

SEQ ID NO: 185700 - DNA, 120 bp, Artificial Sequence
  ENSG00000111790_36 (sequence is synthesized)
acatgtggctgttgagcacttgcagtgtcactaatgcgtttgagggactgaattgttaatttttaaaaatgtattgattttaattaagtttaacattgttttggacagcacagattagcc

SEQ ID NO: 185701 - DNA, 120 bp, Artificial Sequence
  ENSG00000111790_37 (sequence is synthesized)
ttttagagtaccttcttgctgagtactagcagtgtataggtttccccatgaaaaggacctacatttttgttggttaagaggttattaaatgtgctttgccaaagatactaccttgtcatt

SEQ ID NO: 185702 - DNA, 120 bp, Artificial Sequence
  ENSG00000111790_38 (sequence is synthesized)
tcttccagcttattagttccgtgggtttcttggagtactgttaaatcctttttacaaatatatatatacacaactactgaagagactgtttatttggggagttattcacttttatattta

SEQ ID NO: 185703 - DNA, 120 bp, Artificial Sequence
  ENSG00000111790_39 (sequence is synthesized)
cattgagaaaatgattattctcgagtttctgttgattttaaaccttttttgtctgtctctttcactagactgtaagcttcttcagatcaggggacatgtcttgacagtctttgtattcct

SEQ ID NO: 185704 - DNA, 120 bp, Artificial Sequence
  ENSG00000111790_40 (sequence is synthesized)
gttgtttagcatagtactggcacatcataggtgtgcaagataagaaaatgagattggaagaatttatgctacttgctgcgcctaacaaatgtggatgtctgtattatactgatactatat

SEQ ID NO: 185705 - DNA, 120 bp, Artificial Sequence
  ENSG00000111790_41 (sequence is synthesized)
tttcaatagttagcaaagaaggccatttaatattttaatactgaaaagcagaattgtgctcattttattcaatacttaccatataccatacactagatagtaggtggatgtaaagatgca

SEQ ID NO: 185706 - DNA, 120 bp, Artificial Sequence
  ENSG00000111790_42 (sequence is synthesized)
gttcctgctctcaaagaggattatgacctagaaaaggttacagattggattgagataactttataggcctgaacaatacagaaaagatttctaaatcattgaagacttcagggaggaaaa

SEQ ID NO: 185707 - DNA, 120 bp, Artificial Sequence
  ENSG00000111790_43 (sequence is synthesized)
gagattgaatgcgtcggcaatttttatcattcccgttactttgaacaatagtgtatgtaagtgcaaaaaaaaagaaaaagttgctgatcattgtggtgagaggaatgtaaaatatgagta

SEQ ID NO: 185708 - DNA, 120 bp, Artificial Sequence
  ENSG00000111790_44 (sequence is synthesized)
tttttcttgctgctaggtttagttatattgtgctgcttattcttaattctagtcctaacaaatttgatttcaaaagcacatctgtggtcaaccaacttcattgttaatatttgttttatt

SEQ ID NO: 185709 - DNA, 120 bp, Artificial Sequence
  ENSG00000111790_45 (sequence is synthesized)
catattaagtgacaatgtaagaatattcatgttaagtggtactgcagattttataaaaaggagaggatccaaaaataaaaaagtattttgctgatttccaactcccatccctctttttca

SEQ ID NO: 185710 - DNA, 120 bp, Artificial Sequence
  ENSG00000111796_0 (sequence is synthesized)
ccttttgctgattttgcctcacagaattgagagtttgttcttacacacaagtttaatgccaccttcctctgtctgccatggaccaacaagcaatatatgctgagttaaacttacccacag

SEQ ID NO: 185711 - DNA, 120 bp, Artificial Sequence
  ENSG00000111796_1 (sequence is synthesized)
actcaggcccagaaagttcttcaccttcatctcttcctcgggatgtctgtcagggttcaccttggcatcaatttgccctgaaacttagctgtgctgggattattctccttgtcttggttg

SEQ ID NO: 185712 - DNA, 120 bp, Artificial Sequence
  ENSG00000111796_2 (sequence is synthesized)
ttactgggttgagtgtttcagtgacatccttaatacagaaatcatcaatagaaaaatgcagtgtggacattcaacagagcaggaataaaacaacagagagaccgggtctcttaaactgcc

SEQ ID NO: 185713 - DNA, 120 bp, Artificial Sequence
  ENSG00000111796_3 (sequence is synthesized)
caatatattggcagcaactccgagagaaatgcttgttattttctcacactgtcaacccttggaataacagtctagctgattgttccaccaaagaatccagcctgctgcttattcgagata

SEQ ID NO: 185714 - DNA, 120 bp, Artificial Sequence
  ENSG00000111796_4 (sequence is synthesized)
aggatgaattgatacacacacagaacctgatacgtgacaaagcaattctgttttggattggattaaatttttcattatcagaaaagaactggaagtggataaacggctcttttttaaatt

SEQ ID NO: 185715 - DNA, 120 bp, Artificial Sequence
  ENSG00000111796_5 (sequence is synthesized)
ctaatgacttagaaattagaggtgatgctaaagaaaacagctgtatttccatctcacagacatctgtgtattctgagtactgtagtacagaaatcagatggatctgccaaaaagaactaa

SEQ ID NO: 185716 - DNA, 120 bp, Artificial Sequence
  ENSG00000111796_6 (sequence is synthesized)
tgaatcccatctcaatttatttgcttcccattactgatctctgtacttgtagctgcacatactattggtactacctaatagtgccacatttagtggcacaaagtgaacaattctgagaat

SEQ ID NO: 185717 - DNA, 120 bp, Artificial Sequence
  ENSG00000111796_7 (sequence is synthesized)
tgacaactgttatgaatcttacagaagttcatgtttatcatattcattctattaaatgaggaaacagagacatagagaaaaacgtgcatcgttttaaagaaacagtgatattctatggtg

SEQ ID NO: 185718 - DNA, 120 bp, Artificial Sequence
  ENSG00000111796_8 (sequence is synthesized)
aaggagtgaaggatgtccccgaatatgccagattggtatatgattgttttgtgtttaaaacagtggagaaattgtagattcagaaagggagagctgacctgtctcttcccgcacgcggca

SEQ ID NO: 185719 - DNA, 120 bp, Artificial Sequence
  ENSG00000111796_9 (sequence is synthesized)
agccgtgaagattcctctgggagggctatccgagtcatacaagggcaagaaaatagctcttatcgccagagacctggaattggatgctgcaatgaacctgaataaagatacttaataaac

SEQ ID NO: 185720 - DNA, 120 bp, Artificial Sequence
  ENSG00000111796_10 (sequence is synthesized)
acctatctttcacctattttacagccccccgcaaccaatatatctcctagtgactcctctagaaaatttattgcccctagccagcttttcttcatcctgtcatttcttttcaaatttatc

SEQ ID NO: 185721 - DNA, 120 bp, Artificial Sequence
  ENSG00000111796_11 (sequence is synthesized)
attcttggtctaaaaagcataaaagcatcttgcttaggccacttctatggatttcactctcttgcgagttcctcatgtacatgcaaaacgaataaaatgtgtatacttttattttgttca

SEQ ID NO: 185722 - DNA, 120 bp, Artificial Sequence
  ENSG00000111799_0 (sequence is synthesized)
ccacttggctaaggcgaaccgccccagacgcgtccgcgcgccggcagctgcaggctcaggccatctccagtcttcctgccgcgcccgcctctcctcctgggattctcctcctcctcctgg

SEQ ID NO: 185723 - DNA, 120 bp, Artificial Sequence
  ENSG00000111799_1 (sequence is synthesized)
acttccccgcagctgcccacgcctcggcggccgccaggtgctcctggagtgcagcgcctatcgccggggcgtgtgggggccacaccgagcaccagcttctccgacgccgggaagccgctg

SEQ ID NO: 185724 - DNA, 120 bp, Artificial Sequence
  ENSG00000111799_2 (sequence is synthesized)
tcgccgccgctacctctccctgttgccgccgcctcagatctcttcatgccgctgtaagctcggaggccaaggatgcggagtaggcttcccccagcgcttgccgccctgggcgcggccctg

SEQ ID NO: 185725 - DNA, 120 bp, Artificial Sequence
  ENSG00000111799_3 (sequence is synthesized)
ctcctgtcttccattgaggcagaagttgacccaccttcagacttgaattttaaaattatagatgaaaatactgttcatatgtcatgggcaaaaccagttgatccaattgtgggttacaga

SEQ ID NO: 185726 - DNA, 120 bp, Artificial Sequence
  ENSG00000111799_4 (sequence is synthesized)
ataacggtggaccctacaacggatgggcctactaaagaatttaccctttcagctagtaccactgaaactttattgtcagaacttgtacctgaaacagagtatgtggtgacaataacttca

SEQ ID NO: 185727 - DNA, 120 bp, Artificial Sequence
  ENSG00000111799_5 (sequence is synthesized)
tatgatgaagtagaagaaagtgtaccagttataggacaactaacaattcaaacaggtagttcgacaaagccagtggagaagaaacctggaaaaaccgagatacaaaaatgctctgtcagt

SEQ ID NO: 185728 - DNA, 120 bp, Artificial Sequence
  ENSG00000111799_6 (sequence is synthesized)
gcctggactgatttggttttcctcgtggatggctcttggagtgtgggaagaaataatttcaagtacattttagacttcattgctgctcttgtgtctgcttttgacattggggaagagaag

SEQ ID NO: 185729 - DNA, 120 bp, Artificial Sequence
  ENSG00000111799_7 (sequence is synthesized)
acaagagttggagttgttcaatacagctctgataccaggactgaatttaacttaaatcagtactaccaaagggatgaacttcttgctgcaataaaaaaaattccatataaaggtggcaac

SEQ ID NO: 185730 - DNA, 120 bp, Artificial Sequence
  ENSG00000111799_8 (sequence is synthesized)
acaatgacaggggatgccattgattatttagttaaaaatactttcacggaatctgctggggcaagagttggctttcctaaagtggcaattattattacggatggaaaatcccaggatgaa

SEQ ID NO: 185731 - DNA, 120 bp, Artificial Sequence
  ENSG00000111799_9 (sequence is synthesized)
gtggaaattccagcaagagagcttcgtaatgttggagttgaagttttctccttgggcattaaagctgcagatgcaaaagaactcaaacaaattgcctccacaccttcactgaaccatgtt

SEQ ID NO: 185732 - DNA, 120 bp, Artificial Sequence
  ENSG00000111799_10 (sequence is synthesized)
ttcaatgtggccaactttgatgcaattgtggatattcagaatgagatcatctcccaggtgtgctcaggtgttgatgaacaacttggtgaattggttagtggagaagaagttgttgagcct

SEQ ID NO: 185733 - DNA, 120 bp, Artificial Sequence
  ENSG00000111799_11 (sequence is synthesized)
ccttcaaatttgattgccatggaagtctcttcaaaatatgttaagctaaattggaatccatctcctagtccagtgactggctacaaagtcatcctcacaccaatgactgcaggaagccga

SEQ ID NO: 185734 - DNA, 120 bp, Artificial Sequence
  ENSG00000111799_12 (sequence is synthesized)
cagcacgctctgagtgtggggcctcagacaaccacgctcagtgttcgcgacctctcagcagacacagaataccagatcagtgtttccgccatgaagggaatgacatccagtgaacccatt

SEQ ID NO: 185735 - DNA, 120 bp, Artificial Sequence
  ENSG00000111799_13 (sequence is synthesized)
tcaataatggagaagactcagccaatgaaagttcaagtggaatgctcacgtggtgtggatataaaagccgatattgtgtttttggttgatggctcctatagcattgggattgcaaacttt

SEQ ID NO: 185736 - DNA, 120 bp, Artificial Sequence
  ENSG00000111799_14 (sequence is synthesized)
gttaaagttagagcctttttggaagttcttgtaaaaagttttgaaatttcaccaaatagggtccagattagtcttgtgcaatacagccgggatcctcatactgagttcactttgaaaaaa

SEQ ID NO: 185737 - DNA, 120 bp, Artificial Sequence
  ENSG00000111799_15 (sequence is synthesized)
ttcaccaaagttgaagatataattgaagcaataaacaccttcccttacagaggaggatctacaaatactggcaaagcaatgacttatgtcagagagaaaatatttgtgcctagcaaggga

SEQ ID NO: 185738 - DNA, 120 bp, Artificial Sequence
  ENSG00000111799_16 (sequence is synthesized)
tcaagaagcaatgtgccaaaggtcatgattcttatcacggatgggaaatcatcagatgctttcagagatcctgcgataaaactgaggaattcagatgttgaaatctttgcagttggtgtg

SEQ ID NO: 185739 - DNA, 120 bp, Artificial Sequence
  ENSG00000111799_17 (sequence is synthesized)
aaggatgccgttcgctcagaattggaagctattgcctctcctcctgcagagacccatgtgttcacagtggaagattttgatgcttttcagaggatatcttttgaactcacacagtctatc

SEQ ID NO: 185740 - DNA, 120 bp, Artificial Sequence
  ENSG00000111799_18 (sequence is synthesized)
tgccttagaattgagcaagaattggcagctataaagaagaaagcttacgtccctccaaaggatcttagtttttcagaagtgacttcttatggtttcaaaaccaactggtctccagctgga

SEQ ID NO: 185741 - DNA, 120 bp, Artificial Sequence
  ENSG00000111799_19 (sequence is synthesized)
gaaaatgttttttcatatcacatcacctacaaggaagcggctggggatgatgaggtcactgtggtggagccagcatcgagcaccagtgttgttctcagcagcctgaagccagagaccttg

SEQ ID NO: 185742 - DNA, 120 bp, Artificial Sequence
  ENSG00000111799_20 (sequence is synthesized)
tatttggtcaatgtgactgcggagtatgaggatggcttcagcattcccttagctggagaggagaccaccgaagaagtaaaaggagcacctcgaaacctaaaggtgacagatgagactaca

SEQ ID NO: 185743 - DNA, 120 bp, Artificial Sequence
  ENSG00000111799_21 (sequence is synthesized)
gatagtttcaaaattacttggactcaagctccagggagagttttaagatatcgaattatatatagaccagttgctggtggagagagcagagaagttaccaccccacccaatcagaggagg

SEQ ID NO: 185744 - DNA, 120 bp, Artificial Sequence
  ENSG00000111799_22 (sequence is synthesized)
agaacactggagaacttgattccagacacgaaatatgaagtatctgtaattcctgaatatttctcaggacctggtactccattaactggaaatgcagccactgaagaagttagagggaat

SEQ ID NO: 185745 - DNA, 120 bp, Artificial Sequence
  ENSG00000111799_23 (sequence is synthesized)
ccaagagacttaagagtttctgaccctacgacgtctactatgaaattatcttggagtggggcaccaggaaaagtgaaacagtatctcgtcacatataccccagtggcagggggtgaaact

SEQ ID NO: 185746 - DNA, 120 bp, Artificial Sequence
  ENSG00000111799_24 (sequence is synthesized)
caagaggtcactgtgaggggagatacaaccaatacggtgctgcagggattgaaggaagggacacaatacgccttatctgtgacagccttgtatgcgtctggggctggagacgccctcttt

SEQ ID NO: 185747 - DNA, 120 bp, Artificial Sequence
  ENSG00000111799_25 (sequence is synthesized)
ggtgaaggaacaacacttgaagaacgtggttctcctcaagatttagttactaaagacatcactgacacatcaattggggcttattggacatctgctccaggaatggttcgcggttacagg

SEQ ID NO: 185748 - DNA, 120 bp, Artificial Sequence
  ENSG00000111799_26 (sequence is synthesized)
gtctcatggaaatcactttatgatgatgttgacactggagagaaaaatctgcctgaagatgcaattcatacgatgatagaaaatctgcagccagagaccaaatacagaatttcagtattt

SEQ ID NO: 185749 - DNA, 120 bp, Artificial Sequence
  ENSG00000111799_27 (sequence is synthesized)
gccacttacagcagtggagaaggagaacctttgactggagatgccacaactgaattatctcaagattccaaaaccctgaaagtagatgaagaaacagaaaacacaatgagagttacatgg

SEQ ID NO: 185750 - DNA, 120 bp, Artificial Sequence
  ENSG00000111799_28 (sequence is synthesized)
aaaccagcaccagggaaagtcgtcaactaccgtgttgtctatcgccctcatgggagagggaagcaaatggttgctaaggtgccccccacagtcacttcgacagtgttaaagcgacttcag

SEQ ID NO: 185751 - DNA, 120 bp, Artificial Sequence
  ENSG00000111799_29 (sequence is synthesized)
ccacagaccacatatgacatcacagttcttcctatttacaagatgggagaaggaaagcttaggcaaggatcaggaacaacagcttctcggtttaagtctcctagaaacctcaaaacatct

SEQ ID NO: 185752 - DNA, 120 bp, Artificial Sequence
  ENSG00000111799_30 (sequence is synthesized)
gacccaaccatgtcaagcttccgagtgacttgggagcctgcccctggggaagtgaagggttataaagtcacattccaccctacgggggatgacagaagactgggggagttagtggttgga

SEQ ID NO: 185753 - DNA, 120 bp, Artificial Sequence
  ENSG00000111799_31 (sequence is synthesized)
ccctatgacaacacagttgttttggaggaacttagggctggtaccacctataaagtaaatgtttttggaatgtttgatggaggagaaagctcaccacttgttggacaagaaatgacaacc

SEQ ID NO: 185754 - DNA, 120 bp, Artificial Sequence
  ENSG00000111799_32 (sequence is synthesized)
ctttccgacacaactgttatgccaattttatcttctgggatggagtgtctcaccagagctgaggcagacattgtgttgctggtggatggatcatggagcatcggccgggcaaattttaga

SEQ ID NO: 185755 - DNA, 120 bp, Artificial Sequence
  ENSG00000111799_33 (sequence is synthesized)
accgtgaggagtttcatttctcgtattgtggaagtctttgacattggccccaaaagagtacaaattgctcttgctcagtatagtggggatcccagaacagagtggcagttaaatgcacac

SEQ ID NO: 185756 - DNA, 120 bp, Artificial Sequence
  ENSG00000111799_34 (sequence is synthesized)
agagacaagaagagcttgttgcaagctgtggcaaacttgccgtacaaaggaggcaatactctcacaggcatggctttgaatttcattcgccaacagaacttcaggacccaagctggcatg

SEQ ID NO: 185757 - DNA, 120 bp, Artificial Sequence
  ENSG00000111799_35 (sequence is synthesized)
agacctcgagctcgaaaaattggtgtgctcattactgatggaaaatcacaagacgatgttgaagcaccttcaaagaaactcaaggatgagggagtggagctgtttgctattggtattaaa

SEQ ID NO: 185758 - DNA, 120 bp, Artificial Sequence
  ENSG00000111799_36 (sequence is synthesized)
aatgctgatgaagtcgaattaaagatgattgcaactgatcctgatgatacccatgcatacaatgtggcagattttgagtcactctccaggatagtggatgatctcaccattaatttgtgt

SEQ ID NO: 185759 - DNA, 120 bp, Artificial Sequence
  ENSG00000111799_37 (sequence is synthesized)
aacagtgtcaaaggtccaggtgatttggaagcaccttctaacttagttatttctgagcgaacccatcgttcttttagagtgagctggacaccaccttctgacagtgtggatcgatataag

SEQ ID NO: 185760 - DNA, 120 bp, Artificial Sequence
  ENSG00000111799_38 (sequence is synthesized)
gtggaatactatccagtttctggagggaaacgtcaagaattttatgtgagtcgaatggaaactagcacagtgctgaaagatctgaaacctgaaactgaatatgttgtcaatgtgtattct

SEQ ID NO: 185761 - DNA, 120 bp, Artificial Sequence
  ENSG00000111799_39 (sequence is synthesized)
gtggtagaagatgaatatagtgagcctctgaaggggacagaaaaaaccttgccagtgcctgtagtcagcctgaatatttatgatgttggccctaccaccatgcatgtgcagtggcagcct

SEQ ID NO: 185762 - DNA, 120 bp, Artificial Sequence
  ENSG00000111799_40 (sequence is synthesized)
gtgggaggagctactggctacatcttgtcatacaaacctgttaaggacacagagccaacaagacccaaagaggtgcgtttggggccaacagtgaatgacatgcagctgactgaccttgtt

SEQ ID NO: 185763 - DNA, 120 bp, Artificial Sequence
  ENSG00000111799_41 (sequence is synthesized)
cccaacacggagtatgcagtcacagtccaggctgtcctgcacgacctcactagtgaacctgtcactgttcgggaagtcaccttgcctttacccagacctcaggatctgaaactcagagat

SEQ ID NO: 185764 - DNA, 120 bp, Artificial Sequence
  ENSG00000111799_42 (sequence is synthesized)
gtgactcacagcactatgaatgtcttttgggaacctgtgcctggaaaagtgcgtaaatatattgttcgatacaaaacaccagaagaggatgtcaaagaggtagaggtggacagatcagag

SEQ ID NO: 185765 - DNA, 120 bp, Artificial Sequence
  ENSG00000111799_43 (sequence is synthesized)
accagcacttccctcaaagacctcttctcacagaccttgtacacagtcagcgtttctgcagtacatgacgagggggagtctcctccagtgactgctcaagaaactacccgacccgtgcca

SEQ ID NO: 185766 - DNA, 120 bp, Artificial Sequence
  ENSG00000111799_44 (sequence is synthesized)
gccccaacaaacttaaagattactgaagtaacatcagagggtttcagagggacttgggatcatggagcttcagatgtgtctctctacagaataacttgggcaccttttggaagctcagat

SEQ ID NO: 185767 - DNA, 120 bp, Artificial Sequence
  ENSG00000111799_45 (sequence is synthesized)
aagatggagaccatcttaaatggagatgaaaacactttggtgttcgaaaacctgaaccccaacaccatctatgaagtttccattactgccatctatcctgatgagtcagaaagtgatgac

SEQ ID NO: 185768 - DNA, 120 bp, Artificial Sequence
  ENSG00000111799_46 (sequence is synthesized)
ctgattggcagtgagcgcacactgcctatcttaacaacacaagctcccaaaagtggcccacgaaaccttcaagtgtacaatgcaacatctaacagcctgactgttaagtgggatcctgct

SEQ ID NO: 185769 - DNA, 120 bp, Artificial Sequence
  ENSG00000111799_47 (sequence is synthesized)
agtggtcgtgtgcagaaatataggatcacttatcagccttccacaggggaaggcaatgagcaaacgaccacaataggaggacggcagaacagtgtggtcctgcagaaactgaagccagac

SEQ ID NO: 185770 - DNA, 120 bp, Artificial Sequence
  ENSG00000111799_48 (sequence is synthesized)
acactgtaaggaacctgagagtgtatgacccttctaccagcaccttgaatgtccgctgggaccatgcagagggaaatcctcgtcagtacaagctcttctatgcaccagcagcaggtggtc

SEQ ID NO: 185771 - DNA, 120 bp, Artificial Sequence
  ENSG00000111799_49 (sequence is synthesized)
cagaggaactggtaccaatccccgggaataccaattatgccattcttaggaatctgcagccagatacctcatacactgtgactgtagttcccgtttatactgaaggtgatgggggacgca

SEQ ID NO: 185772 - DNA, 120 bp, Artificial Sequence
  ENSG00000111799_50 (sequence is synthesized)
catcagatactggaaggacattgatgagaggactggcaagaaatgtccaagtatacaatcctacacctaacagcctcgatgttcgctgggaccctgctccaggacctgtgctgcaatatc

SEQ ID NO: 185773 - DNA, 120 bp, Artificial Sequence
  ENSG00000111799_51 (sequence is synthesized)
gcgttgtgtattctcctgtggatggcacaagaccctcagaatctatagtagtgccaggaaacacgcgcatggtgcatctggagcggctgattccggacacactctattccgtgaaccttg

SEQ ID NO: 185774 - DNA, 120 bp, Artificial Sequence
  ENSG00000111799_52 (sequence is synthesized)
tggctctgtactcggatggagagggaaatcccagccctgcccagggccgaacgctaccacgcagtggaccaaggaacctgagagtctttggtgaaacaaccaatagcctctcggtagcct

SEQ ID NO: 185775 - DNA, 120 bp, Artificial Sequence
  ENSG00000111799_53 (sequence is synthesized)
gggatcatgctgatgggccagttcagcagtacaggatcatctattctcccactgttggtgatccaattgatgaatataccacagtcccaggcagaagaaacaatgtaatactgcagcccc

SEQ ID NO: 185776 - DNA, 120 bp, Artificial Sequence
  ENSG00000111799_54 (sequence is synthesized)
tgcaacctgacactccatataaaattactgttattgctgtttatgaagatggagatggtggccatctaacaggaaatggaagaactgtgggactccttcctcctcagaacatacacatct

SEQ ID NO: 185777 - DNA, 120 bp, Artificial Sequence
  ENSG00000111799_55 (sequence is synthesized)
ctgacgaatggtatacaagattcagggtgtcctgggatccttcaccttctccagttcttggatataaaatagtatataagccagtgggttccaatgagcccatggaagcctttgttggag

SEQ ID NO: 185778 - DNA, 120 bp, Artificial Sequence
  ENSG00000111799_56 (sequence is synthesized)
aaatgacatcatataccttacacaatctcaatcccagcaccacctacgatgtgaatgtttatgctcaatatgattctggactcagtgtccccttgacagatcaaggcactacattatatt

SEQ ID NO: 185779 - DNA, 120 bp, Artificial Sequence
  ENSG00000111799_57 (sequence is synthesized)
taaatgtaacagatctgaaaacttaccagattgggtgggatacattctgtgtcaaatggtcacctcaccgggcagccacctcctacaggctaaaactaagccctgcagatggaacaaggg

SEQ ID NO: 185780 - DNA, 120 bp, Artificial Sequence
  ENSG00000111799_58 (sequence is synthesized)
gacaagaaattacagtgcgtggatcagaaaccagtcactgcttcactggcctttcaccagacactgattatggtgtcactgtttttgtgcagacaccaaatctcgagggaccaggagtct

SEQ ID NO: 185781 - DNA, 120 bp, Artificial Sequence
  ENSG00000111799_59 (sequence is synthesized)
ctgttaaagaacataccactgtgaaaccaacagaagcccctacagagccacccacacctcctccccctcccaccattccaccagcccgggatgtatgcaaaggggccaaggcagatattg

SEQ ID NO: 185782 - DNA, 120 bp, Artificial Sequence
  ENSG00000111799_60 (sequence is synthesized)
tgttcttgactgatgcctcctggagcattggggacgataattttaacaaagttgtaaaattcatcttcaatactgtgggaggctttgatgaaatcagtcctgctgggattcaggtttcat

SEQ ID NO: 185783 - DNA, 120 bp, Artificial Sequence
  ENSG00000111799_61 (sequence is synthesized)
ttgtgcaatacagcgatgaggtcaagtctgagttcaagctgaacacgtacaatgacaaggccctagcccttggggccctccagaatattaggtacagaggaggaaacacaagaacaggca

SEQ ID NO: 185784 - DNA, 120 bp, Artificial Sequence
  ENSG00000111799_62 (sequence is synthesized)
aggccctcacgtttatcaaggagaaagtcttgacttgggagagcggcatgaggaagaatgtccctaaggtgttggttgtggtcacggacggtcggtcccaggatgaggtcaagaaggcgg

SEQ ID NO: 185785 - DNA, 120 bp, Artificial Sequence
  ENSG00000111799_63 (sequence is synthesized)
ctttggtcatccagcagtcagggttcagtgtctttgtagttggtgtggctgatgtcgactacaatgagcttgccaacattgccagcaaaccaagtgaacggcacgtgttcattgtggacg

SEQ ID NO: 185786 - DNA, 120 bp, Artificial Sequence
  ENSG00000111799_64 (sequence is synthesized)
actttgaatcttttgagaagatcgaagacaatcttattacatttgtttgtgaaactgccacttcaagttgtcctctcatttatttggatggctacacctcaccaggttttaaaatgcttg

SEQ ID NO: 185787 - DNA, 120 bp, Artificial Sequence
  ENSG00000111799_65 (sequence is synthesized)
aagcatacaacctgacagaaaagaattttgcttctgtacaaggagtatctttggagtcagggtctttccccagctactcagcatacaggattcagaagaatgcgtttgtgaatcagccta

SEQ ID NO: 185788 - DNA, 120 bp, Artificial Sequence
  ENSG00000111799_66 (sequence is synthesized)
cagcagacctacacccaaatggactccctccttcatacacgattatattattattcagacttctcccagaaactcccagtgacccttttgcaatttggcaaatcacagacagagactaca

SEQ ID NO: 185789 - DNA, 120 bp, Artificial Sequence
  ENSG00000111799_67 (sequence is synthesized)
aaccacaagttggagtgattgcagatccttctagcaagacgttatcattctttaacaaggatacaagaggcgaggtgcaaactgttacatttgacacagaagaagtaaagacattatttt

SEQ ID NO: 185790 - DNA, 120 bp, Artificial Sequence
  ENSG00000111799_68 (sequence is synthesized)
atggaagttttcacaaggttcatattgtagtgacctcaaaaagtgttaagatttacattgactgctatgaaattatagaaaaagacatcaaggaagctggaaatataacaactgatggtt

SEQ ID NO: 185791 - DNA, 120 bp, Artificial Sequence
  ENSG00000111799_69 (sequence is synthesized)
atgaaattcttggaaaactccttaaaggggaaaggaaatcagccgcattccaaatccagagttttgacattgtctgcagtccagtgtggaccagtagagacagatgctgtgatattccct

SEQ ID NO: 185792 - DNA, 120 bp, Artificial Sequence
  ENSG00000111799_70 (sequence is synthesized)
ctaggagagatgagggaaaatgccctgcttttccaaattcttgcacatgtacacaggacagcgttggacctccaggacctccaggccctgcaggaggacctggtgctaaaggtcccagag

SEQ ID NO: 185793 - DNA, 120 bp, Artificial Sequence
  ENSG00000111799_71 (sequence is synthesized)
gtgaaagaggtatcagtggggcaattgggccccctggtcctcgtggagacataggtcctccaggcccccagggtcctccaggccctcagggacccaatggactctctattccgggagagc

SEQ ID NO: 185794 - DNA, 120 bp, Artificial Sequence
  ENSG00000111799_72 (sequence is synthesized)
aaggtcgccaagggatgaaaggtgatgctggagagccaggacttccaggccgaacaggaaccccaggattacctggcccaccaggaccaatgggacctccaggagacagaggcttcactg

SEQ ID NO: 185795 - DNA, 120 bp, Artificial Sequence
  ENSG00000111799_73 (sequence is synthesized)
gaaaagacggtgcaatgggacccaggggcccaccagggccgccgggaagcccaggctccccaggagtcacaggaccaagtgggaagccaggaaaacctggagatcatggcagaccaggtc

SEQ ID NO: 185796 - DNA, 120 bp, Artificial Sequence
  ENSG00000111799_74 (sequence is synthesized)
catctgggttgaaaggagaaaaaggtgataggggagacattgcttcccagaacatgatgcgagcagttgcaagacaagtctgtgaacaattgataagtggtcagatgaacagattcaatc

SEQ ID NO: 185797 - DNA, 120 bp, Artificial Sequence
  ENSG00000111799_75 (sequence is synthesized)
agatgctgaatcagattccaaatgattaccagtccagtcgcaaccagccaggcccgccgggtccaccgggacctcctggtagcgcaggagccagaggagaacctgggcctggggggcggc

SEQ ID NO: 185798 - DNA, 120 bp, Artificial Sequence
  ENSG00000111799_76 (sequence is synthesized)
caggcttcccgggcacaccagggatgcagggaccccctggggaacgaggtttgccaggagagaaaggtgaaaggggtactggatcttcaggacctcgggggctgcctggccccccaggtc

SEQ ID NO: 185799 - DNA, 120 bp, Artificial Sequence
  ENSG00000111799_77 (sequence is synthesized)
cacaaggagaatccagaacaggtccaccagggtccacaggttcaagaggtccccctggcccccctggccgtcctggaaactcaggtatccgaggacccccaggtcctcctggatactgtg

SEQ ID NO: 185800 - DNA, 120 bp, Artificial Sequence
  ENSG00000111799_78 (sequence is synthesized)
attcttctcagtgtgccagcatcccatacaacgggcaaggctatccaggttccggctaacacattttctaagtcgccagtgctgcttacagtttgaatacatgaaaatcctgtttctgag

SEQ ID NO: 185801 - DNA, 120 bp, Artificial Sequence
  ENSG00000111799_79 (sequence is synthesized)
atgtttgcgcacgtgcttattaggaaatgagtctgtatggaaatctcaccacagataatggttaacgaaccgggtcgacatcacaaaggagggtggagactctttttactaacttgaatg

SEQ ID NO: 185802 - DNA, 120 bp, Artificial Sequence
  ENSG00000111799_80 (sequence is synthesized)
agacaaaagcagtggtgtcagtttataatcctgatgcatttcagtaataatgtagaaaaacattattttaaaaaagttccaacacacagccatgaggagcctcagttttgaaagaggtgc

SEQ ID NO: 185803 - DNA, 120 bp, Artificial Sequence
  ENSG00000111799_81 (sequence is synthesized)
ataataaaactactaaccagaggagtctatgccattttaagaaaaacaattaacctggttaaagagaaatgtcttatgtaaataataaactaattgtggcttgtaaatgatttgtatgtg

SEQ ID NO: 185804 - DNA, 120 bp, Artificial Sequence
  ENSG00000111799_82 (sequence is synthesized)
atcctgtcgactaaaatcacttaacaattctacaataagcttctgcatcaaagcctgccgcttgctctatgccggaataacaccaaatggaatctcctcatctcttgcttgttagcgatg

SEQ ID NO: 185805 - DNA, 120 bp, Artificial Sequence
  ENSG00000111799_83 (sequence is synthesized)
tgtctgattcagggcatctgtctttttgttacttttttgtccgtgtcctctcatttgggttttgtaactgcaattttcaaaccaaagtttaaaatcaccttttcttcctgttttgctgta

SEQ ID NO: 185806 - DNA, 120 bp, Artificial Sequence
  ENSG00000111799_84 (sequence is synthesized)
gtcactggtgttcctcacccaccagctgtaactcagtttgtgtgaggtacagccacagaagatgtcatgtactgtatattacctggtgatagttgcttttcaccccccgagttcagtttc

SEQ ID NO: 185807 - DNA, 120 bp, Artificial Sequence
  ENSG00000111799_85 (sequence is synthesized)
taggagccaatgaaacttcccctcacctcctcatctttccaagttgttctttgaattgaggagtttgaaggcataaacagttacttggggatttgcgaaaatcctacttagttactgcgt

SEQ ID NO: 185808 - DNA, 120 bp, Artificial Sequence
  ENSG00000111799_86 (sequence is synthesized)
ttacagttctttggcccagtctctgacccttcccaagtatttgtgcaatgattgtgtttactgctggatttttgaaggtttttttttttaagaaagtgccatttcattatttgattatca

SEQ ID NO: 185809 - DNA, 120 bp, Artificial Sequence
  ENSG00000111799_87 (sequence is synthesized)
ccaaattatctggaaataattgggacattgtaacttatctatttatagttatgagattaagactggagtgccatcaccgcgggtgatgatttagcttttgctgtgtgtgtgtgtgtgtgc

SEQ ID NO: 185810 - DNA, 120 bp, Artificial Sequence
  ENSG00000111799_88 (sequence is synthesized)
cttccaaatcatgccataattgtaatgttgaatcggacagagccttacgtgcccgagggcggggcctacctgcctgagcgcgagcccttcatcgtgccggtggagcccgagcggacagcg

SEQ ID NO: 185811 - DNA, 120 bp, Artificial Sequence
  ENSG00000111799_89 (sequence is synthesized)
gaatacgaggactacggcgcagacgagcctgcagaggagcctcctgagccccaccggcgctggcggcgcgccctgccccacggacccgggcagtgaaccagagatcacgcgccgcgccgc

SEQ ID NO: 185812 - DNA, 120 bp, Artificial Sequence
  ENSG00000111799_90 (sequence is synthesized)
gaggcttgggggaggtgttgaaattctcatttacaggtcagatagagcagtgtacgtcttttctgaggtgtttcttccagcgttgctcatccaggagtaccctttctgattgtagagaac

SEQ ID NO: 185813 - DNA, 120 bp, Artificial Sequence
  ENSG00000111799_91 (sequence is synthesized)
cttgtttctgcaggaagcctagctccaagcacgcagtctgtagacatttttgcctttgcccttgaaatgcttgcaaaatactttgttaacaaaagctgcaaagagagaacatgccgtgtg

SEQ ID NO: 185814 - DNA, 120 bp, Artificial Sequence
  ENSG00000111799_92 (sequence is synthesized)
cctttagttagcacagcgggcagcctcagtgaaactcttaggttaagcagttaagtcctggaacccagagctgctgtgtatttcgagcgggcagtttatcttttgctatacttattttca

SEQ ID NO: 185815 - DNA, 120 bp, Artificial Sequence
  ENSG00000111799_93 (sequence is synthesized)
attcaattacaccacgattcaaataattcccctcctaaaaccaaaaaggagggaaacgtcaactccattgcaattacttatcttcctcttctatctctgttatacgccggggcatagaat

SEQ ID NO: 185816 - DNA, 120 bp, Artificial Sequence
  ENSG00000111799_94 (sequence is synthesized)
gctcgtatacatctctttaacaaccacaaaccttaagccatgtagatgaagttagtgcatcaacgggatacagttccatattgccttaaacctccttgttttagacacactaacatttat

SEQ ID NO: 185817 - DNA, 120 bp, Artificial Sequence
  ENSG00000111799_95 (sequence is synthesized)
accaaattgcagattattctgcagagagggaattgcatgtttgtgttgtatatttagtatgaacttttttcagaatataatatttcttagttatcaaaagtagttggaaaacatttgcaa

SEQ ID NO: 185818 - DNA, 120 bp, Artificial Sequence
  ENSG00000111799_96 (sequence is synthesized)
gactatgaacatagaattgctgcttttatattttaactgcagattgtgaatttcactgccttatattatttatttctgaaacaaaagaggcatttttcaataaaactactgaaaatttga

SEQ ID NO: 185819 - DNA, 120 bp, Artificial Sequence
  ENSG00000111799_97 (sequence is synthesized)
aaagcagaagcctggatatgtgtttcacctcatttccatttcataccctggtcttaaccttcaagttggtgctattcaattcagggaaccccaggattacctggcccaccaggaccaatg

SEQ ID NO: 185820 - DNA, 120 bp, Artificial Sequence
  ENSG00000111799_98 (sequence is synthesized)
aactcacctgaagtaaagaactttacggaaatgaagttccttaggattgaaggaaggctgatttgaagatgtcttgaagataacaactctttcagttctgattatataataatagtgttt

SEQ ID NO: 185821 - DNA, 120 bp, Artificial Sequence
  ENSG00000111799_99 (sequence is synthesized)
gctatcatagcacacaacattatttcactgttaggattgaattattttcttttttccccatgtttctgcatttaccaaatcacatcataaacctccccttacttctcttgggacttcaaa

SEQ ID NO: 185822 - DNA, 120 bp, Artificial Sequence
  ENSG00000111799_100 (sequence is synthesized)
gcatgctagtaattgactttttttttttcttttccccaagattgggaacagggatttgttaaatacaactgtaaaatgccaagaatatgtatttaaaaattgttttgggaatctaattta

SEQ ID NO: 185823 - DNA, 120 bp, Artificial Sequence
  ENSG00000111801_0 (sequence is synthesized)
gttattattcctcacaataaccagatagcctctgctttctttttcctttcttcggaatgagagactcaaccataatagaaagaatggagaactattaaccaccattcttcagtgggctgt

SEQ ID NO: 185824 - DNA, 120 bp, Artificial Sequence
  ENSG00000111801_1 (sequence is synthesized)
gattttcagaggggaatactaagaaatggttttccatactggaacccaaaggtaaagacactcaaggacagacatttttggcagagcatagatgaaaatggcaagttccctggctttcct

SEQ ID NO: 185825 - DNA, 120 bp, Artificial Sequence
  ENSG00000111801_2 (sequence is synthesized)
tctgctcaactttcatgtctccctcttcttggtccagctgctcactccttgctcagctcagttttctgtgcttggaccctctgggcccatcctggccatggtgggtgaagacgctgatct

SEQ ID NO: 185826 - DNA, 120 bp, Artificial Sequence
  ENSG00000111801_3 (sequence is synthesized)
gccctgtcacctgttcccgaccatgagtgcagagaccatggagctgaggtgggtgagttccagcctaaggcaggtggtgaacgtgtatgcagatggaaaggaagtggaagacaggcagag

SEQ ID NO: 185827 - DNA, 120 bp, Artificial Sequence
  ENSG00000111801_4 (sequence is synthesized)
tgcaccgtatcgagggagaacttcgattctgcgggatggcatcactgcagggaaggctgctctccgaatacacaacgtcacagcctctgacagtggaaagtacttgtgttatttccaaga

SEQ ID NO: 185828 - DNA, 120 bp, Artificial Sequence
  ENSG00000111801_5 (sequence is synthesized)
tggtgacttctacgaaaaagccctggtggagctgaaggttgcagcattgggttctgatcttcacattgaagtgaagggttatgaggatggagggatccatctggagtgcaggtccactgg

SEQ ID NO: 185829 - DNA, 120 bp, Artificial Sequence
  ENSG00000111801_6 (sequence is synthesized)
ctggtacccccaaccccaaataaagtggagcgacaccaagggagagaacatcccggctgtggaagcacctgtggttgcagatggagtgggcctgtatgcagtagcagcatctgtgatcat

SEQ ID NO: 185830 - DNA, 120 bp, Artificial Sequence
  ENSG00000111801_7 (sequence is synthesized)
gagaggcagctctggtgggggtgtatcctgcatcatcagaaattccctcctcggcctggaaaagacagccagcatatccatcgcagaccccttcttcaggagcgcccagccctggatcgc

SEQ ID NO: 185831 - DNA, 120 bp, Artificial Sequence
  ENSG00000111801_8 (sequence is synthesized)
ggccctggcagggaccctgcctatctcgttgctgcttctcgcaggagccagttacttcttgtggagacaacagaaggaaaaaattgctctgtccagggagacagaaagagagcgagagat

SEQ ID NO: 185832 - DNA, 120 bp, Artificial Sequence
  ENSG00000111801_9 (sequence is synthesized)
gaaagaaatgggatacgctgcaacagagcaagaaataagcctaagagagaagctccaggaggaactcaagtggaggaaaatccagtacatggctcgtggagagaagtctttggcctatca

SEQ ID NO: 185833 - DNA, 120 bp, Artificial Sequence
  ENSG00000111801_10 (sequence is synthesized)
tgaatggaaaatggccctcttcaaacctgcggatgtgattctggatccagacacggcaaacgccatcctccttgtttctgaggaccagaggagtgtgcagcgtgctgaagagccgcggga

SEQ ID NO: 185834 - DNA, 120 bp, Artificial Sequence
  ENSG00000111801_11 (sequence is synthesized)
tctgccagacaaccctgagagatttgaatggcgttactgtgtccttggctgtgaaaacttcacatcagggagacattactgggaggtggaagtgggggacagaaaagagtggcatattgg

SEQ ID NO: 185835 - DNA, 120 bp, Artificial Sequence
  ENSG00000111801_12 (sequence is synthesized)
taagtatcgggctctcactgagcccagaaccaacctgaaacttcctgagcctcctaggaaagtggggatcttcctggactatgagactggagagatctcgttctataatgccacagatgg

SEQ ID NO: 185836 - DNA, 120 bp, Artificial Sequence
  ENSG00000111801_13 (sequence is synthesized)
atctcatatctacacctttccgcacgcctctttctctgagcctctatatcctgttttcagaattttgaccttggagcccactgccctgaccatttgcccaataccaaaagaagtagagag

SEQ ID NO: 185837 - DNA, 120 bp, Artificial Sequence
  ENSG00000111801_14 (sequence is synthesized)
ttcccccgatcctgacctagtgcctgatcattccctggagacaccactgaccccgggcttagctaatgaaagtggggagcctcaggctgaagtaacatctctgcttctccctgcccaccc

SEQ ID NO: 185838 - DNA, 120 bp, Artificial Sequence
  ENSG00000111801_15 (sequence is synthesized)
tggagctgaggtctccccttctgcaacaaccaatcagaaccataagctacaggcacgcactgaagcactttactgatattcattccattattccatatgacagttgttttgagtttcgta

SEQ ID NO: 185839 - DNA, 120 bp, Artificial Sequence
  ENSG00000111801_16 (sequence is synthesized)
ccaccttattgtccccttatacagataaggaaactggggtgcagaaaggtgaattaactttacaaagtagacatgacaagtgaacagcagagctgggatctaaacagcaataactaacat

SEQ ID NO: 185840 - DNA, 120 bp, Artificial Sequence
  ENSG00000111801_17 (sequence is synthesized)
taacagagaatttaaaatgttcttagtgctgtgttataagctttggtggatgtcactcctttaatcctcacaacaccctgtcgggtagtcatattttgcaagtatggaagctgaggcagg

SEQ ID NO: 185841 - DNA, 120 bp, Artificial Sequence
  ENSG00000111801_18 (sequence is synthesized)
gcaacatgaagtaacttacataactcatacagtaatttgtgcagttgggagatgttcagccttagtccctggctaattgcctgttcttttccagcctgattttttttcccacaggaagag

SEQ ID NO: 185842 - DNA, 120 bp, Artificial Sequence
  ENSG00000111801_19 (sequence is synthesized)
cccacatgtagccctgaggtttccttcccaggacagctgcagggtagagatcattttaagtgcttgtggagttgacatccctattgactctttcccagctgatatcagagacttagaccc

SEQ ID NO: 185843 - DNA, 120 bp, Artificial Sequence
  ENSG00000111801_20 (sequence is synthesized)
agcactccttggattagctctgcagagtgtcttggttgagagaataacctcatagtaccaacatgacatgtgacttggaaagagactagaggccacacttgataaatcatggggcacaga

SEQ ID NO: 185844 - DNA, 120 bp, Artificial Sequence
  ENSG00000111801_21 (sequence is synthesized)
tatgttcccacccaacaaatgtgataagtgattgtgcagccagagccagccttccttcaatcaaggtttccaggcagagcaaataccctagagattctctgtgatataggaaatttggat

SEQ ID NO: 185845 - DNA, 120 bp, Artificial Sequence
  ENSG00000111801_22 (sequence is synthesized)
caaggaagctaaaagaattacagggatgtttttaatcccactatggactcagtctcctggaaataggtctgtccactcctggtcattggtggatgttaaacccatattcctttcaactgc

SEQ ID NO: 185846 - DNA, 120 bp, Artificial Sequence
  ENSG00000111801_23 (sequence is synthesized)
tgcctgctagggaaaactgctcctcattatcatcactattattgctcaccactgtatcccctctacttggcaagtggttgtcaagttctagttgttcaataaatgtgttaataatgctta

SEQ ID NO: 185847 - DNA, 120 bp, Artificial Sequence
  ENSG00000111801_24 (sequence is synthesized)
gcagacaattatctcaattacctaattaagcagacaattacctaaatgccctcttagaacctttaactcattcccatacctggaagtccatcccaacctgaaggaccacctgtcacaaag

SEQ ID NO: 185848 - DNA, 120 bp, Artificial Sequence
  ENSG00000111801_25 (sequence is synthesized)
agacaaatggtccttctgttaggattgtgttcccctctaggttctctgtatctcgccttccctgtctgagaaggacccttcctctcgtgaccccaactccaaaaccctctgatggagctt

SEQ ID NO: 185849 - DNA, 120 bp, Artificial Sequence
  ENSG00000111801_26 (sequence is synthesized)
gaatgagagactcaaccataatagaaagaatggagaactattaaccaccattcttcagtgggctgtgattttcagaggggaatactaagaactcagttttctgtgcttggaccctctggg

SEQ ID NO: 185850 - DNA, 120 bp, Artificial Sequence
  ENSG00000111801_27 (sequence is synthesized)
atagattagctggactccactgggaaggaactctcacagtgactgccctgccactagcattcaaccaatgttcccagacttgatattaagaagaagaggtgaagagagaattgagcttgc

SEQ ID NO: 185851 - DNA, 120 bp, Artificial Sequence
  ENSG00000111801_28 (sequence is synthesized)
agagtgagaccacagggaagagtggaatggtcaaaaagaaagtctagatggatgcgaaaggaagtggaaggggccaacagagcaaaggcagtgttcaggtgacacctctatctttctttc

SEQ ID NO: 185852 - DNA, 120 bp, Artificial Sequence
  ENSG00000111801_29 (sequence is synthesized)
tgtaggatctagagcagatgcagagtccctcttccaaaagtactgcagacactcctggctgctcactagcaattgtctgcactgcctcccaacttagcttctctgcaacccttaagaaag

SEQ ID NO: 185853 - DNA, 120 bp, Artificial Sequence
  ENSG00000111801_30 (sequence is synthesized)
acacattctttctttagaaagaattcctgctgtaccttacatgccgaagtaaacaactccctccctctgacaaccagagatataagggaaatgaaggacgacggataggaaacattagaa

SEQ ID NO: 185854 - DNA, 120 bp, Artificial Sequence
  ENSG00000111801_31 (sequence is synthesized)
atcatctctttagtgactggtacacagtcattttggtttagtcatgtaacagacggcttctgttgtgtctccaagtgcacgttaccgtgggtcctgggaggtggaatggtgactgtatct

SEQ ID NO: 185855 - DNA, 120 bp, Artificial Sequence
  ENSG00000111801_32 (sequence is synthesized)
gctgccagtgttttccaatcagtgactcccagaaacatttttgtagtataatgaggcatgtttcttacttgttgctttgaggaagaacacacatcatggggagctgtggcgaggtctcag

SEQ ID NO: 185856 - DNA, 120 bp, Artificial Sequence
  ENSG00000111801_33 (sequence is synthesized)
taaggttttagagcagatttattttacaatttgggcttgtgttaggggatttgggggagggtttatagacttagctctcttctctggatgagatactgtcaggaaggtgtggggagatga

SEQ ID NO: 185857 - DNA, 120 bp, Artificial Sequence
  ENSG00000111801_34 (sequence is synthesized)
attctgagagtgggagccttaatcaagcttatctaggaggaaggagactagggtgagactaaagctgtaaatgatgaagaggcagcaattcctcattgctgatgggggatgtttggttat

SEQ ID NO: 185858 - DNA, 120 bp, Artificial Sequence
  ENSG00000111801_35 (sequence is synthesized)
tgttgtggtttgtacaatgttcatgtttttctctgcactcacaaaagattggggtggtcttgtatttcccatgatctgtcacagtgataaagtactattttttgtgttctgtgaaattac

SEQ ID NO: 185859 - DNA, 120 bp, Artificial Sequence
  ENSG00000111801_36 (sequence is synthesized)
ttatgttcaacaggaggataccaagacctggtatcaggttccagacgccgaggagagcttttttctttctcagtgcaatcccttgcctcatggcttctggttgggtttggtttaagggga

SEQ ID NO: 185860 - DNA, 120 bp, Artificial Sequence
  ENSG00000111801_37 (sequence is synthesized)
gctgtagcagacaatggtaggaagaagagaaaagggagaggtctgggtgcttattccctggcttccttcctgcaagattccctcaggctggctgcattgccttgctgaaggtcacaagtc

SEQ ID NO: 185861 - DNA, 120 bp, Artificial Sequence
  ENSG00000111801_38 (sequence is synthesized)
aactcaagaaagtcctcaatgcatcaatctttttatgtctccggaacagatccctctcctcctccctctggtaattggggtggatgggaatagccccacattactgaccctgggatactg

SEQ ID NO: 185862 - DNA, 120 bp, Artificial Sequence
  ENSG00000111801_39 (sequence is synthesized)
cactagcccatttagttttcttttcatcatgaccacacttgtgtaaatagctcctgaatgaaatcttccttggattatcaaatgtgagtctgccattgattcccattgagaccctccctg

SEQ ID NO: 185863 - DNA, 120 bp, Artificial Sequence
  ENSG00000111801_40 (sequence is synthesized)
acccccattcccaccctgacactgcatcaagtttaaggtttattttcccaaaaccccccttacccataactgttctttttttcttttctttttttgcttattttccagagaagctccagg

SEQ ID NO: 185864 - DNA, 120 bp, Artificial Sequence
  ENSG00000111801_41 (sequence is synthesized)
aggaactcagtaagttcccattccccaggagacccaggcatgtcttcttatccccactttgagcaccttgataacccttccctattcattccattgcagagtggaggaaaatccagtaca

SEQ ID NO: 185865 - DNA, 120 bp, Artificial Sequence
  ENSG00000111801_42 (sequence is synthesized)
ttatcataactgctttcaaaaactagtccctgaaattgctcattaaatttcccaaattctttttagagcaaggtaggaaatgatacagattgagaagggtggatcttgtactcctagaca

SEQ ID NO: 185866 - DNA, 120 bp, Artificial Sequence
  ENSG00000111801_43 (sequence is synthesized)
tggcctatcatgaatggaaaatggccctcttcaaacctggtgagtaaatcactgtatgttccctggatcaacaacctgagggactatattcctttctcctcctccaactcttgtgattta

SEQ ID NO: 185867 - DNA, 120 bp, Artificial Sequence
  ENSG00000111802_0 (sequence is synthesized)
gttccgcttaaaggggcggtgcagaggcggcaggaagatggagttggggagttgcctggagggcgggagggaggcggcggaggaagagggcgagcctgaggtgaaaaagcggcgacttct

SEQ ID NO: 185868 - DNA, 120 bp, Artificial Sequence
  ENSG00000111802_1 (sequence is synthesized)
gtgtgtggagtttgcctcggtcgcaagctgcgatgccgcagtggctcagtgcttcctggccgagaacgactgggagatggaaagggctctgaactcctacttcgagcctccggtggagga

SEQ ID NO: 185869 - DNA, 120 bp, Artificial Sequence
  ENSG00000111802_2 (sequence is synthesized)
gagcgccttggaacgccgacctgaaaccatctctgagcccaagacctatgttgacctaaccaatgaagaaacaactgattccaccacttctaaaatcagcccatctgaagatactcagca

SEQ ID NO: 185870 - DNA, 120 bp, Artificial Sequence
  ENSG00000111802_3 (sequence is synthesized)
agaaaatggcagcatgttctctctcattacctggaatattgatggattagatctaaacaatctgtcagagagggctcgaggggtgtgttcctacttagctttgtacagcccagatgtgat

SEQ ID NO: 185871 - DNA, 120 bp, Artificial Sequence
  ENSG00000111802_4 (sequence is synthesized)
atttctacaggaagttattcccccatattatagctacctaaagaagagatcaagtaattatgagattattacaggtcatgaagaaggatatttcacagctataatgttgaagaaatcaag

SEQ ID NO: 185872 - DNA, 120 bp, Artificial Sequence
  ENSG00000111802_5 (sequence is synthesized)
agtgaaattaaaaagccaagagattattccttttccaagtaccaaaatgatgagaaaccttttatgtgtgcatgtgaacgtgtcaggaaatgagctttgccttatgacatcccatttgga

SEQ ID NO: 185873 - DNA, 120 bp, Artificial Sequence
  ENSG00000111802_6 (sequence is synthesized)
gagcaccagagggcatgctgcggaacgaatgaatcagttaaaaatggttttaaagaaaatgcaagaggctccagagtcagctacagttatatttgcaggagatacaaatctaagggatcg

SEQ ID NO: 185874 - DNA, 120 bp, Artificial Sequence
  ENSG00000111802_7 (sequence is synthesized)
agaggttaccagatgtggtggtttacccaacaacattgtggatgtctgggagtttttgggcaaacctaaacattgccagtatacatgggatacacaaatgaactctaatcttggaataac

SEQ ID NO: 185875 - DNA, 120 bp, Artificial Sequence
  ENSG00000111802_8 (sequence is synthesized)
tcgttttgatcgaatatttttcagagcagcagcagaagagggacacattattccccgaagtttggaccttcttggattagaaaaactggactgtggtagatttcctagtgatcactgggg

SEQ ID NO: 185876 - DNA, 120 bp, Artificial Sequence
  ENSG00000111802_9 (sequence is synthesized)
tcttctgtgcaacttagatataatattgtaaaatgcttttcaagtgtgggttttgccctgattgttgcaaatacaatttccaccttctggaaaggtaggtttgctgtggaggaaataatg

SEQ ID NO: 185877 - DNA, 120 bp, Artificial Sequence
  ENSG00000111802_10 (sequence is synthesized)
tactagatcattgtcacagaaaaaccaactatgatttatggttgtgttttcagaattcaacattaaagattaatgtttatttaaacgaacacattcctgcattcaggatgtgaggccatt

SEQ ID NO: 185878 - DNA, 120 bp, Artificial Sequence
  ENSG00000111802_11 (sequence is synthesized)
taataaaaagggcacaaagcctgtcagagttttcaacggtgcttatagctgccagctggattccaaacaggtaccacattgtctctgagctaatgtttatatttttccattcaggcaccg

SEQ ID NO: 185879 - DNA, 120 bp, Artificial Sequence
  ENSG00000111802_12 (sequence is synthesized)
aaatagttaatatttgaaataagtcttcaaaagaaaacataagagattattgagttcttgggactggatcctttatttcataagttcagatcatcttaaatgaaaatgccatgattatct

SEQ ID NO: 185880 - DNA, 120 bp, Artificial Sequence
  ENSG00000111802_13 (sequence is synthesized)
gcagttaagtagatgacagctattctacatcagacttgatttttgtcagctaattacataattggtaagctataattgaaaccttatggcttaaaattccttaactcctttttgattcat

SEQ ID NO: 185881 - DNA, 120 bp, Artificial Sequence
  ENSG00000111802_14 (sequence is synthesized)
gtttgtagtcatgttgtcaacagaggcaaagttaagcttgatgatggttaaaatcggtttgatagcaccatgggacatttttctaacaaaaataaatgcatgaagagacatagcctttta

SEQ ID NO: 185882 - DNA, 120 bp, Artificial Sequence
  ENSG00000111802_15 (sequence is synthesized)
gttttgctaattgtgaaatggaaatgctttacaggaagtaaatgcaaattacttttaagtgtgctttaaagaaaaatattttccccacaagagaaatttaaataaagaattttatttgtt

SEQ ID NO: 185883 - DNA, 120 bp, Artificial Sequence
  ENSG00000111802_16 (sequence is synthesized)
tagccctgcgcgtcctgggacctgccgtggagctgggcggacgatgctgaggcagatctccaagctgcgtagccagaggagcagggcttgcgttgctgctgctgcgcggagttgcgcccc

SEQ ID NO: 185884 - DNA, 120 bp, Artificial Sequence
  ENSG00000111802_17 (sequence is synthesized)
agcagcggatctaacactgcaccagactgtcgcttcgaacgtgatttggggtccagggaggaaaagatggaaatgtaatgtttaactcaaatgaaaggaaataagtaagcgagaggtttg

SEQ ID NO: 185885 - DNA, 120 bp, Artificial Sequence
  ENSG00000111802_18 (sequence is synthesized)
aaacaaatgaacgaaggctaaaccttctatcgaaaaatggcaacttggaagtctccttgcttcctgtattgtttatttattctaggccctaggctgaccggccagaataacagtgttgac

SEQ ID NO: 185886 - DNA, 120 bp, Artificial Sequence
  ENSG00000111802_19 (sequence is synthesized)
tgttatttttttttaatgcacacctactcctgttatttcagtgcccctctccagttcctgcacttaaaaagtgtagctgccttacaaggccctctactatttggctccataacttagaac

SEQ ID NO: 185887 - DNA, 120 bp, Artificial Sequence
  ENSG00000111802_20 (sequence is synthesized)
agtcatgggatctagagatgaagaaactgcattctcatgctgattcggttcctgtcggggtgtcttcaaactggttggtgtcagctttctgctggaattcagcgtctgaaaaacatctta

SEQ ID NO: 185888 - DNA, 120 bp, Artificial Sequence
  ENSG00000111802_21 (sequence is synthesized)
agcaatgcttaaacaaaagccttatgattctgatgtcagagatcctacccataggagcaatggggatgcaagtcatcagtatatagggctatgggatgactttccgtacaaagaagtggg

SEQ ID NO: 185889 - DNA, 120 bp, Artificial Sequence
  ENSG00000111802_22 (sequence is synthesized)
ccaaagtgcagcgtgattaatgctcaattatatttctgtctagaacctggcatgcaattcttgttaaccctgtaaggacagtgtcacttttagggctcttttaaaatttgtctgtaaaat

SEQ ID NO: 185890 - DNA, 120 bp, Artificial Sequence
  ENSG00000111816_0 (sequence is synthesized)
acagtctgttcatagctcagaatgttaaaggcaacagcctctgctggttggttattcattagcaaaaaggagagagccgtccagatccggactggtcgaaagacaggaacagacttgaaa

SEQ ID NO: 185891 - DNA, 120 bp, Artificial Sequence
  ENSG00000111816_1 (sequence is synthesized)
cagggggagagctcctggcgaaagcaagacgtggaggttttaccaggggttagtagcttcctcttgctaactttttattgggacaaaaggcaagatggcaccattctgttctcagatatt

SEQ ID NO: 185892 - DNA, 120 bp, Artificial Sequence
  ENSG00000111816_2 (sequence is synthesized)
tgtctaaataaagcccttttaattttattttatttttgttgtgggattcttaagcagataagaagaaaagacaccttcctagtgagcagctgcccagctcctgctcagttttgcctcggg

SEQ ID NO: 185893 - DNA, 120 bp, Artificial Sequence
  ENSG00000111816_3 (sequence is synthesized)
gtagcacctccagccacagaaagcaagccggtaagtctctccaggtaggacttgctgcaacccagctgctggactgatctgaaacgggactttgcatactctccgaagtatggtgagttg

SEQ ID NO: 185894 - DNA, 120 bp, Artificial Sequence
  ENSG00000111816_4 (sequence is synthesized)
gtgctgacttcaaagttgcctggtgaaggaagataaggtggatcgcagagactaaggggagagggagaagccctgctcctcttctccccaccaaggcacaatgagcaacatctgtcagag

SEQ ID NO: 185895 - DNA, 120 bp, Artificial Sequence
  ENSG00000111816_5 (sequence is synthesized)
gctctgggagtacctagaaccctatctcccctgtttgtccacggaggcagacaagtcaaccgtgattgaaaatccaggggccctttgctctccccagtcacagaggcatggccactactt

SEQ ID NO: 185896 - DNA, 120 bp, Artificial Sequence
  ENSG00000111816_6 (sequence is synthesized)
tgtggctttgtttgattaccaggctcggactgctgaggacttgagcttccgagcaggtgacaaacttcaagttctggacactttgcatgagggctggtggtttgccagacacttggagaa

SEQ ID NO: 185897 - DNA, 120 bp, Artificial Sequence
  ENSG00000111816_7 (sequence is synthesized)
aagacgagatggctccagtcagcaactacaaggctatattccttctaactacgtggctgaggacagaagcctacaggcagagccgtggttctttggagcaatcggaagatcagatgcaga

SEQ ID NO: 185898 - DNA, 120 bp, Artificial Sequence
  ENSG00000111816_8 (sequence is synthesized)
gaaacaactattatattcagaaaacaagaccggttcctttctaatcagagaaagtgaaagccaaaaaggagaattctctctttcagttttagatggagcagttgtaaaacactacagaat

SEQ ID NO: 185899 - DNA, 120 bp, Artificial Sequence
  ENSG00000111816_9 (sequence is synthesized)
taaaagactggatgaagggggattttttctcacgcgaagaagaatcttttcaacactgaacgaatttgtgagccactacaccaagacaagtgacggcctgtgtgtcaagctggggaaacc

SEQ ID NO: 185900 - DNA, 120 bp, Artificial Sequence
  ENSG00000111816_10 (sequence is synthesized)
atgcttaaagatccaggtcccagctccatttgatttgtcgtataaaaccgtggaccaatgggagatagaccgcaactccatacagcttctgaagcgattgggatctggtcagtttggcga

SEQ ID NO: 185901 - DNA, 120 bp, Artificial Sequence
  ENSG00000111816_11 (sequence is synthesized)
agtatgggaaggtctgtggaacaataccactccagtagcagtgaaaacattaaaaccaggttcaatggatccaaatgacttcctgagggaggcacagataatgaagaacctaagacatcc

SEQ ID NO: 185902 - DNA, 120 bp, Artificial Sequence
  ENSG00000111816_12 (sequence is synthesized)
aaagcttatccagctttatgctgtttgcactttagaagatccaatttatattattacagagttgatgagacatggaagtctgcaagaatatctccaaaatgacactggatcaaaaatcca

SEQ ID NO: 185903 - DNA, 120 bp, Artificial Sequence
  ENSG00000111816_13 (sequence is synthesized)
tctgactcaacaggtagacatggcggcacaggttgcctctggaatggcctatctggagtctcggaactacattcacagagatctggctgccagaaatgtcctcgttggtgaacataatat

SEQ ID NO: 185904 - DNA, 120 bp, Artificial Sequence
  ENSG00000111816_14 (sequence is synthesized)
ctacaaagtagcagattttggacttgccagagtttttaaggtagataatgaagacatctatgaatctagacacgaaataaagctgccggtgaagtggactgcgcccgaagccattcgtag

SEQ ID NO: 185905 - DNA, 120 bp, Artificial Sequence
  ENSG00000111816_15 (sequence is synthesized)
taataaattcagcattaagtccgatgtatggtcatttggaatccttctttatgaaatcattacttatggcaaaatgccttacagtggtatgacaggtgcccaggtaatccagatgttggc

SEQ ID NO: 185906 - DNA, 120 bp, Artificial Sequence
  ENSG00000111816_16 (sequence is synthesized)
tcaaaactatagacttccgcaaccatccaactgtccacagcaattttacaacatcatgttggagtgctggaatgcagagcctaaggaacgacctacatttgagacactgcgttggaaact

SEQ ID NO: 185907 - DNA, 120 bp, Artificial Sequence
  ENSG00000111816_17 (sequence is synthesized)
tgaagactattttgaaacagactcttcatattcagatgcaaataacttcataagatgaacactggagaagaatatcaaataataaagtagcaaaacaaattcaaataatccattccaaaa

SEQ ID NO: 185908 - DNA, 120 bp, Artificial Sequence
  ENSG00000111816_18 (sequence is synthesized)
tacaatgttatcaaccaactgcacaatcagtttatcctgacatattcaagtgataggataaagttggccatgtattatgaaaaagattatttgtgcattttattgactgggcaacactgc

SEQ ID NO: 185909 - DNA, 120 bp, Artificial Sequence
  ENSG00000111816_19 (sequence is synthesized)
aggacagtcaaggtgatatataatttcctcactgcctggtaaaattaagcacactaaaccaagttatttttctttttaagagatacttacatttccatttattgtttgaaatgtcgatca

SEQ ID NO: 185910 - DNA, 120 bp, Artificial Sequence
  ENSG00000111816_20 (sequence is synthesized)
agagaatcaacagatgatagtccaatttttactcagtgactgttgtagcattttcctgtttactgattagagtggttattcattattcctcagattgctgaatcccatcaggctgttatt

SEQ ID NO: 185911 - DNA, 120 bp, Artificial Sequence
  ENSG00000111816_21 (sequence is synthesized)
atgaaggaatttgattgctttgctgcacagcaggacctgtgctttgagatttttttttctcttttaaaatatcctgtaactacaatgatggtaaagccatgttaaatgacttgattgtac

SEQ ID NO: 185912 - DNA, 120 bp, Artificial Sequence
  ENSG00000111816_22 (sequence is synthesized)
ttggagtaattgcacatttttttctatgcataaaaaaatgatgcagctgttgagaaaacgaagtctttttcattttgcagaaggaaatgatggaatttttctgtacttcagtatgtgtca

SEQ ID NO: 185913 - DNA, 120 bp, Artificial Sequence
  ENSG00000111816_23 (sequence is synthesized)
actgagagtcatatacattagttttaatctcttaatattgagaatcaggttgcaaaacggatgagttattatctatggaaatgtgagaaatgtctaatagcccataaagtctgagaaata

SEQ ID NO: 185914 - DNA, 120 bp, Artificial Sequence
  ENSG00000111816_24 (sequence is synthesized)
ggtatcaaaatagtttaggaaaatgagaggagaacagtaggattgctgtggcctagacttctgagtaattaataaagaaaaagaagtaccctttggcctacagatcagagttttatttat

SEQ ID NO: 185915 - DNA, 120 bp, Artificial Sequence
  ENSG00000111816_25 (sequence is synthesized)
agttttatttattttttattttttactttttattatagtttaagttctggggtgcatgtgcagaatgtgcagttttgttacataggtgtacaagtgccatggtggtttgctgcacccatc

SEQ ID NO: 185916 - DNA, 85 bp, Artificial Sequence
  ENSG00000111816_26 (sequence is synthesized)
cacccatcaacccgtcgtctacattaggcatttctcctagtgctgttcctcccctagccctccatttgtgtccatatgttctcat

SEQ ID NO: 185917 - DNA, 73 bp, Artificial Sequence
  ENSG00000111816_27 (sequence is synthesized)
atgtgtctttatagcagaatgatttataagcctttaggtacatacccagtaatgggatacactgtcctccaca

SEQ ID NO: 185918 - DNA, 88 bp, Artificial Sequence
  ENSG00000111816_28 (sequence is synthesized)
agtaaaagtgtaaatgtgttcctatttctccacatcctctttggcatccaaaacagcatcctgttgtttcctgactttttaatgatca

SEQ ID NO: 185919 - DNA, 67 bp, Artificial Sequence
  ENSG00000111816_29 (sequence is synthesized)
gatttggatttctctaatgatcaaatgtgtctgttcaaatccttcgcccactttttgatggggttgt

SEQ ID NO: 185920 - DNA, 71 bp, Artificial Sequence
  ENSG00000111816_30 (sequence is synthesized)
atgttccttgtagattcttggtattagccctttgtcagatggatagcttgcaaaaattttctcccattctg

SEQ ID NO: 185921 - DNA, 80 bp, Artificial Sequence
  ENSG00000111816_31 (sequence is synthesized)
ctgtcgggcttttgttgccattggtttttgtgttttagtcatgatgtcttttccaatgcctatgtcctgaatggtgttgc

SEQ ID NO: 185922 - DNA, 81 bp, Artificial Sequence
  ENSG00000111816_32 (sequence is synthesized)
tagtttgaagtcaggtagcatgatgcctataactttgttctttttgcttagaattgtcttggctatgcgggctcttttttg

SEQ ID NO: 185923 - DNA, 80 bp, Artificial Sequence
  ENSG00000111816_33 (sequence is synthesized)
ccctatatatacaattcatatcatctgcaaacagagacaattttacttcctgttttcctatttgaataccctttatttct

SEQ ID NO: 185924 - DNA, 120 bp, Artificial Sequence
  ENSG00000111816_34 (sequence is synthesized)
ggccagaactttcaatactattttgaacaggagtggtgagagggggcatccttgtcttgtgccagctttcaaagggaatgcttccaggtttacccattcagtatgatattggctgtggtt

SEQ ID NO: 185925 - DNA, 75 bp, Artificial Sequence
  ENSG00000111816_35 (sequence is synthesized)
tgagctagtgttgaattttatcaaattttctgcatctattgagatcatcatgtggtttttgtcattggttctgtt

SEQ ID NO: 185926 - DNA, 66 bp, Artificial Sequence
  ENSG00000111816_36 (sequence is synthesized)
tatgtgatggattgtgtttattgatttgcgtatgttgaaccagccttgtgtcactcagtttgccag

SEQ ID NO: 185927 - DNA, 76 bp, Artificial Sequence
  ENSG00000111816_37 (sequence is synthesized)
tgatgtgctgctgcagtcagggatactggcctgaaattttctctctttttttttttttgttgtgtctctgccaggt

SEQ ID NO: 185928 - DNA, 70 bp, Artificial Sequence
  ENSG00000111816_38 (sequence is synthesized)
ctattgtttggaatagtttcagaaagaatagtactagctttgtacctctttgtacctctggtagaattcg

SEQ ID NO: 185929 - DNA, 64 bp, Artificial Sequence
  ENSG00000111816_39 (sequence is synthesized)
tcttcttcctggtttagacttgggagggtgtatgtttgcaggaatttacccatttcttctagat

SEQ ID NO: 185930 - DNA, 69 bp, Artificial Sequence
  ENSG00000111816_40 (sequence is synthesized)
tttagggattcatcttcttcctggtttagacttgggagggtgtatgtttatttatagtaatctctgatg

SEQ ID NO: 185931 - DNA, 120 bp, Artificial Sequence
  ENSG00000111816_41 (sequence is synthesized)
ttttcttctttattagtctggctagcattctattttgttgatcttttcaaaaaatcagatcctggattcattgattttttgaaaggtttttcatgtctctatcaccttcagttctgttct

SEQ ID NO: 185932 - DNA, 63 bp, Artificial Sequence
  ENSG00000111816_42 (sequence is synthesized)
acttttaattgtgatattagggtatagattttagttctttcctgattcctcttgtgggcagtt

SEQ ID NO: 185933 - DNA, 78 bp, Artificial Sequence
  ENSG00000111816_43 (sequence is synthesized)
gctcttgcttctctagtacttttaattgtgatattagggtatagattttagttctttcctgattcctcttgtgggcag

SEQ ID NO: 185934 - DNA, 67 bp, Artificial Sequence
  ENSG00000111816_44 (sequence is synthesized)
gagttctaatttgattgcactgtggtcttagagactgtttgttatgacttttagaataagtgcgatg

SEQ ID NO: 185935 - DNA, 67 bp, Artificial Sequence
  ENSG00000111816_45 (sequence is synthesized)
ctttgttaattttctgtctcatttatctgtctaatattgacagcaggctgttaaaatttcccactat

SEQ ID NO: 185936 - DNA, 62 bp, Artificial Sequence
  ENSG00000111816_46 (sequence is synthesized)
gctttccgtttgcttcgtaaatattcctccatccctttatcttgagcctgtgtgtctctttg

SEQ ID NO: 185937 - DNA, 73 bp, Artificial Sequence
  ENSG00000111816_47 (sequence is synthesized)
cccctgctttttttttctgctttccgtttgcttcgtaaatattcctccatccctttatcttgagcctgtgtgt

SEQ ID NO: 185938 - DNA, 120 bp, Artificial Sequence
  ENSG00000111816_48 (sequence is synthesized)
aggttagtattgttatgtgtgaatttgattctgtcatatgatgctagctggttattttgcccgaaagttgatgcaggttcttcgtatcctcgatgatctttacaatttggtatgtttttg

SEQ ID NO: 185939 - DNA, 63 bp, Artificial Sequence
  ENSG00000111816_49 (sequence is synthesized)
agaatgttgaatattggcccctactctattctggcttgtaaggtgtctgctctggctgccctt

SEQ ID NO: 185940 - DNA, 83 bp, Artificial Sequence
  ENSG00000111816_50 (sequence is synthesized)
ttttttccttcatttcaaccttggtgaatatgacgattatatgtcttggggttgctctgtaatttgaatgttgacctgtcttg

SEQ ID NO: 185941 - DNA, 120 bp, Artificial Sequence
  ENSG00000111816_51 (sequence is synthesized)
tttcactcttttttctctaatcttgtcttctcctttatttcattaagttgatcttcaatctttgatatcctttcttgtgctttatcgacttggctattgataattgtgtatgcttcatga

SEQ ID NO: 185942 - DNA, 120 bp, Artificial Sequence
  ENSG00000111816_52 (sequence is synthesized)
agttctcatgctgtatttttcagctccatcaggtcatttatgtgcttctctatacttgttattctagttagcaattcctctaatctttttacagtgttcttaacttccttgcattgggtt

SEQ ID NO: 185943 - DNA, 74 bp, Artificial Sequence
  ENSG00000111816_53 (sequence is synthesized)
ggaggagtttgttattacccaccttctgaggcctacttctatccatccgtcaaactcattctccatccagtttt

SEQ ID NO: 185944 - DNA, 120 bp, Artificial Sequence
  ENSG00000111816_54 (sequence is synthesized)
tcctttggaggagaagaggcattctgtttttttgaattttcagctgttttgcgctggtttctcctcatcttcctggatttatctacttttggtctttgatcctgctgatgttcggatggg

SEQ ID NO: 185945 - DNA, 83 bp, Artificial Sequence
  ENSG00000111816_55 (sequence is synthesized)
atctacttttggtctttgatcctgctgatgttcggatggggtctctgagtggacatatagtgccctctgctgcaggtctgctg

SEQ ID NO: 185946 - DNA, 88 bp, Artificial Sequence
  ENSG00000111816_56 (sequence is synthesized)
tcttaccagagctcgagcactgtgctgggaaatccactactctcttcagagctgtccggcagagatatttaagtctgctgaagctgct

SEQ ID NO: 185947 - DNA, 120 bp, Artificial Sequence
  ENSG00000111816_57 (sequence is synthesized)
gagctgtccggcagagatatttaagtctgctgaagctgctcccatatccaccccttcccacaggtgctctgtcccagggagatggggttttatctattagtccctgactgcctttttttt

SEQ ID NO: 185948 - DNA, 120 bp, Artificial Sequence
  ENSG00000111816_58 (sequence is synthesized)
ggaggaatctagagaggcagtctggccagagtggccttgctgagctgaggtggtgggctctacccaattcgaactcccaggcagctttgtttagactgtgagggtaaaatgcctactcaa

SEQ ID NO: 185949 - DNA, 120 bp, Artificial Sequence
  ENSG00000111816_59 (sequence is synthesized)
agggtaaaatgcctactcaagcttcagcaatggcagacggccctcctccctccaagctcgagtgtcccaggtcgacctcagactgctgtgcttgcaatgaggatttcaagccagtgaatc

SEQ ID NO: 185950 - DNA, 90 bp, Artificial Sequence
  ENSG00000111816_60 (sequence is synthesized)
cttccaggggagtgaatggttctgccttgctggcattccaggcaccactggggtatggaaaataaaactcctgcagctagttcagtgtct

SEQ ID NO: 185951 - DNA, 90 bp, Artificial Sequence
  ENSG00000111816_61 (sequence is synthesized)
cacccagggccccagtggcgtaggcaccggagggaatctcctggtctgcaggtttcaaagaccatgggaaaagtgcagtatctgggctgg

SEQ ID NO: 185952 - DNA, 120 bp, Artificial Sequence
  ENSG00000111816_62 (sequence is synthesized)
ggtttcaaagaccatgggaaaagtgcagtatctgggctggagtgcaccgttcctcaggtacagtccctcatggcttcccttgggtagaggaggtagttccctgaccccttgtgcttcctg

SEQ ID NO: 185953 - DNA, 86 bp, Artificial Sequence
  ENSG00000111816_63 (sequence is synthesized)
tgggtagaggaggtagttccctgaccccttgtgcttcctgggtgaggtgacaccccaccctgtttcagctggcccctgatatgaac

SEQ ID NO: 185954 - DNA, 120 bp, Artificial Sequence
  ENSG00000111816_64 (sequence is synthesized)
ctgttcctatttggccatcttgccagcaatcagaccagagttttaaatggactacaaaataggtcaaactctatttcagaactagaggctaggaataatgtccaaacttggttatgaaag

SEQ ID NO: 185955 - DNA, 120 bp, Artificial Sequence
  ENSG00000111816_65 (sequence is synthesized)
ctaggaataatgtccaaacttggttatgaaagtttttttttttttttggtctggtaggataagagggtttttactcatcttaagtttgaattaaactttgtaacaaagttattgtttttt

SEQ ID NO: 185956 - DNA, 120 bp, Artificial Sequence
  ENSG00000111816_66 (sequence is synthesized)
taaacaatgcatgtatcaaattatctgtctcattagataactaggtagacttttccaagatggtttcaaaatcaaatatatattcaaagatcttccagtgtaaagcaataggaatgaaac

SEQ ID NO: 185957 - DNA, 120 bp, Artificial Sequence
  ENSG00000111816_67 (sequence is synthesized)
aagccatgagaaagcagaatattttgagtatattctcatgcctttctttaaaggagaagcgcctatctaaacagttacagaaacccaaattcaaagtagattaaacaagaagtaaatttg

SEQ ID NO: 185958 - DNA, 120 bp, Artificial Sequence
  ENSG00000111816_68 (sequence is synthesized)
taaactcttttaactgggagacaggaagtagggagggctccaggcacaatatcattagcagttcaatgtgaacgaagacccatgtcctttccaagcctccctctgccatcagcattgccc

SEQ ID NO: 185959 - DNA, 120 bp, Artificial Sequence
  ENSG00000111816_69 (sequence is synthesized)
tccttcccagggtcacagatggctatcaatggcaaaactggggttccgcgttctcttctcctcatctggcaagagaaaatgggaaatctctatcccaagcttggattaaaaattattttc

SEQ ID NO: 185960 - DNA, 120 bp, Artificial Sequence
  ENSG00000111816_70 (sequence is synthesized)
atttttgtgttccagcaaacttgggtcctatgcccagccatggaccaaaaataggcttaatgtgaatgttatgtgctgattggattaaaataagttctgactctgaatctgggaatgtgg

SEQ ID NO: 185961 - DNA, 120 bp, Artificial Sequence
  ENSG00000111816_71 (sequence is synthesized)
tcaccttcctcagagacaagttgagaggttggcttatctgaataaaagcagagaatatgagatgctggagaggtgttcattaaggagaacattccctgaggtgaattaacggttagaatt

SEQ ID NO: 185962 - DNA, 120 bp, Artificial Sequence
  ENSG00000111816_72 (sequence is synthesized)
atctatctctgtatttatctatccacccatctatcatcatcatcacctcatctccctcctttctctctctctaaatatatacatgcgggtatgttgagtgtgtatatatttatttttttg

SEQ ID NO: 185963 - DNA, 120 bp, Artificial Sequence
  ENSG00000111816_73 (sequence is synthesized)
tgtgtttatatggtgtgtgtgtgtgtgtattccaggcagatgtgtgcatatatacccaaactttcctgatgaccttgaaattaaatgggtcatgtgaagctaaagattatagaacccctt

SEQ ID NO: 185964 - DNA, 120 bp, Artificial Sequence
  ENSG00000111816_74 (sequence is synthesized)
gattcctttataaacagtatttctaagataagatcaacactaatctttcaaattagttgactgtgtatagaacaacttgtttatttaaagtcatctagtctaatgcaatcaaggagtaaa

SEQ ID NO: 185965 - DNA, 120 bp, Artificial Sequence
  ENSG00000111816_75 (sequence is synthesized)
ttataaataaccagttagcataaatggaaagaaaatagttccttttctttgaattcatttcatgtttaatttttcttgcgcacatatagaaatgaatagaaatattcccatttcaatatg

SEQ ID NO: 185966 - DNA, 120 bp, Artificial Sequence
  ENSG00000111816_76 (sequence is synthesized)
caaattcagccactatatagtttgtttctttttggtagctaataataataaatttttaagtaagatctgattttgaaatatgaaaagaagtttatcctttcctgttttaataccacctga

SEQ ID NO: 185967 - DNA, 120 bp, Artificial Sequence
  ENSG00000111816_77 (sequence is synthesized)
tacccgtttaacttactgtgtttgattcttggggacatttatgttcaaggttctgtcaaagcaatctattattcttgtttttacctgatggatcatggagaaaaataatggattcagtta

SEQ ID NO: 185968 - DNA, 120 bp, Artificial Sequence
  ENSG00000111816_78 (sequence is synthesized)
tgagaaacagtaatagatttttttaactgccataaatttctctccctgtattaaataaaaggatcaggaaaagataagttgaattttcctacaatgagccagctcttcttaaatttacct

SEQ ID NO: 185969 - DNA, 120 bp, Artificial Sequence
  ENSG00000111816_79 (sequence is synthesized)
cccataaattgtagcaaagcacttttcatataatgttttatttatgtaattcagttatttggagatggtggtgagggatgtgagtacatcatttcatgttgtatttcaaatctcttttga

SEQ ID NO: 185970 - DNA, 120 bp, Artificial Sequence
  ENSG00000111816_80 (sequence is synthesized)
cagaaaccctaagaatttgcaataaagaaaattcaatgttccattaagtttttctttttctttttttttaaaaagagggtaaggaaggaaataagggaatagatttaagttacctaaggt

SEQ ID NO: 185971 - DNA, 120 bp, Artificial Sequence
  ENSG00000111816_81 (sequence is synthesized)
caaaagaggcacagggtagactctgaatagttgtggaacctgaatattttgtcatcaaaaacaaagttaaagtcagagtgaccaggaatctgcaaactggctgtgggaatgggttgactt

SEQ ID NO: 185972 - DNA, 120 bp, Artificial Sequence
  ENSG00000111816_82 (sequence is synthesized)
aaaagacagacaaagaactagcctgtggggtaacatcaggctaggctcaccctcagcttctacccacaatatctgtatgatgaccatgtggatctaatgaaccaggaggggcccaaactc

SEQ ID NO: 185973 - DNA, 120 bp, Artificial Sequence
  ENSG00000111816_83 (sequence is synthesized)
ttccgactctgtggaggcctaaaggaaactgttgccattggaaggatgccataccactacccagctggagcttcctgaaggaagcagagcccagctggtgttccatggtttgttaagcat

SEQ ID NO: 185974 - DNA, 120 bp, Artificial Sequence
  ENSG00000111816_84 (sequence is synthesized)
atgccatacctacaatcacttttttcatggtctggttgagcatatgatttctgaaccaaatagcctttctggtattgtgtcattggtgactcattatgattctttaaaaagacacattat

SEQ ID NO: 185975 - DNA, 120 bp, Artificial Sequence
  ENSG00000111816_85 (sequence is synthesized)
gtgagctagaatggtgatgatttgggtaccttattcaaattgcatcatcatttaattcaagagaaaggccattcttaaagtaaaagtaaatgaggtttgtacacctgggtattggaattg

SEQ ID NO: 185976 - DNA, 120 bp, Artificial Sequence
  ENSG00000111816_86 (sequence is synthesized)
ccagtgggctgatctgacaatgtttgattcttgttttttctggaattattatgtagaagattcagtctataatcttcaacatgatgcaaatattcagtgtcataggatcaaaaaaatgct

SEQ ID NO: 185977 - DNA, 120 bp, Artificial Sequence
  ENSG00000111816_87 (sequence is synthesized)
ggaaagtatctaaaaatcttttaaattcatatcttaattttcagtgttatcctcttactgcctacattcccccactaaactcttagatttttctctgcttttgttaagaaagtgatgtta

SEQ ID NO: 185978 - DNA, 120 bp, Artificial Sequence
  ENSG00000111816_88 (sequence is synthesized)
gtaggcctctcaagttatttatgaaatttagaaatatactggagaacaaagtagtatataaaccctgaatttcaaaagccttaacaagtttagcttcaatctacattcagatgacactat

SEQ ID NO: 185979 - DNA, 120 bp, Artificial Sequence
  ENSG00000111816_89 (sequence is synthesized)
ctacagagatgttataagattaaattacaagaaaagagatgcccaattatttccatttactcttcttgcctaggtagttaatttatctattattcatttgaagcaacagacgtcaatgta

SEQ ID NO: 185980 - DNA, 120 bp, Artificial Sequence
  ENSG00000111816_90 (sequence is synthesized)
acatctttttcattttcatggagaataatcagcttttccagaaaagggtgctatatctcaaacacacctcaagtgtccagttggaagtattaccatgcagaggattcaagtcatattacc

SEQ ID NO: 185981 - DNA, 120 bp, Artificial Sequence
  ENSG00000111816_91 (sequence is synthesized)
taataaccagaagttgtatgttgggaaaaagtggttaaaagcaactaaaactgccctgtttggaagaaactaaatattgctttataatgattttctgatattttagaatagaggcttcaa

SEQ ID NO: 185982 - DNA, 120 bp, Artificial Sequence
  ENSG00000111816_92 (sequence is synthesized)
ttatactatttgtgaaaaagaaaactgcttggtattaaccaagttacatttaatttttatggtccacaaaatttcagagtagaaatatatcatagcttttaatcaattttcaaaatctat

SEQ ID NO: 185983 - DNA, 120 bp, Artificial Sequence
  ENSG00000111816_93 (sequence is synthesized)
atttaattattgattcaaaaaataagaaataaaatcaattagccagatttgtatactttaaagctaccacagtgagatttttctcttaaaaacatgcatgtttttatattgtattcttta

SEQ ID NO: 185984 - DNA, 120 bp, Artificial Sequence
  ENSG00000111816_94 (sequence is synthesized)
atatttatattgtacagttacatgtgacacatattacatatgactaatttatatgtagcaacagggattaaagaagacctcttttaattgtaccacttgttataatgctattatttaccc

SEQ ID NO: 185985 - DNA, 120 bp, Artificial Sequence
  ENSG00000111816_95 (sequence is synthesized)
agattcaaatgtaactacttacaatttttaaacatttttatttctgtattctttaaaatattaaggcaatggtttttcttgaaattatattttgccctatgtattctatttttattcaca

SEQ ID NO: 185986 - DNA, 120 bp, Artificial Sequence
  ENSG00000111816_96 (sequence is synthesized)
ctggatttattatgataattatatcaaagtgattatttttaccctgacttttaaaagtcaactgtttcagaagtcaagttgattgtggatctaaaatataaattcaatgtgttcatagca

SEQ ID NO: 185987 - DNA, 120 bp, Artificial Sequence
  ENSG00000111817_0 (sequence is synthesized)
ctgcttctctataggtgacccccgccccaaagtcccccctcccactaacttctctttgagaagagagtaaaaccgaattcgagagaaaagaggcagtaactattcgggaggaggcagact

SEQ ID NO: 185988 - DNA, 120 bp, Artificial Sequence
  ENSG00000111817_1 (sequence is synthesized)
ggagtgggcaccagtcccgcggagcctcagcgcccgccgcgtccctccctccgcccctttcgcccacacctacccgcccccgccggcccggctctcagtagcgtcgcccgaggctgcagc

SEQ ID NO: 185989 - DNA, 120 bp, Artificial Sequence
  ENSG00000111817_2 (sequence is synthesized)
ggcatggcgcggcgggggcgcggagggctcggttcggagggggccgggagcccgggcgccctggagtgaggaggaccgggagctggctctggaggctgcggaggcgacgccggagagaac

SEQ ID NO: 185990 - DNA, 120 bp, Artificial Sequence
  ENSG00000111817_3 (sequence is synthesized)
gccggagagaacgaagcctcggctgggagcggatctttcgaagatggtttggctgccttggagatttggagatctgatgccacgatgaggactcacacacggggggctcccagtgtgttt

SEQ ID NO: 185991 - DNA, 120 bp, Artificial Sequence
  ENSG00000111817_4 (sequence is synthesized)
ttcatatatttgctttgctttgtgtcagcctacatcaccgacgagaacccagaagttatgattcccttcaccaatgccaactacgacagccatcccatgctgtacttctccagggcagaa

SEQ ID NO: 185992 - DNA, 120 bp, Artificial Sequence
  ENSG00000111817_5 (sequence is synthesized)
gtggcggagctgcagctcagggctgccagctcgcacgagcacattgcagcccgcctcacggaggctgtgcacacgatgctgtccagccccttggaatacctccctccctgggatcccaag

SEQ ID NO: 185993 - DNA, 120 bp, Artificial Sequence
  ENSG00000111817_6 (sequence is synthesized)
gactacagtgcccgctggaatgaaatttttggaaacaacttgggtgccttggcaatgttctgtgtgctgtatcctgagaacattgaagcccgagacatggccaaagactacatggagagg

SEQ ID NO: 185994 - DNA, 120 bp, Artificial Sequence
  ENSG00000111817_7 (sequence is synthesized)
atggcagcgcagcctagttggttggtgaaagatgctccttgggatgaggtcccgcttgctcactccctggttggttttgccactgcttatgacttcttgtacaactacctgagcaagaca

SEQ ID NO: 185995 - DNA, 120 bp, Artificial Sequence
  ENSG00000111817_8 (sequence is synthesized)
caacaggagaagtttcttgaagtgattgccaatgcctcagggtatatgtatgaaacttcatacaggagaggatggggatttcaatacctgcacaatcatcagcccaccaactgtatggct

SEQ ID NO: 185996 - DNA, 120 bp, Artificial Sequence
  ENSG00000111817_9 (sequence is synthesized)
ttgctcacgggaagcctagtcctgatgaatcaaggatatcttcaagaagcctacttatggaccaaacaagttctgaccatcatggagaaatctctggtcttgctcagggaggtgacggat

SEQ ID NO: 185997 - DNA, 120 bp, Artificial Sequence
  ENSG00000111817_10 (sequence is synthesized)
ggctccctctatgaaggagttgcgtatggcagctacaccactagatcactcttccaatacatgtttctcgtccagaggcacttcaacatcaaccactttggccatccgtggcttaaacaa

SEQ ID NO: 185998 - DNA, 120 bp, Artificial Sequence
  ENSG00000111817_11 (sequence is synthesized)
cactttgcatttatgtatagaaccatcctgccagggtttcaaaggactgtggctattgcggactcaaattacaactggttttatggtccagaaagccaattagtgttccttgataaattt

SEQ ID NO: 185999 - DNA, 120 bp, Artificial Sequence
  ENSG00000111817_12 (sequence is synthesized)
gtcatgcgtaatggcagtggtaactggctagctgaccaaatcagaaggaaccgtgtggtggaaggtccaggaacaccatccaaagggcagcgctggtgcactctgcacacagaatttctc

SEQ ID NO: 186000 - DNA, 120 bp, Artificial Sequence
  ENSG00000111817_13 (sequence is synthesized)
tggtatgatggcagcttgaaatcggttcctcctccagactttggcacccctacactgcattattttgaagactggggtgtcgtgacttatggaagtgcactacctgcagaaatcaataga

SEQ ID NO: 186001 - DNA, 120 bp, Artificial Sequence
  ENSG00000111817_14 (sequence is synthesized)
tctttcctttccttcaagtctggaaaactggggggacgtgcaatatatgacattgtccacagaaacaaatacaaagattggatcaaaggatggagaaattttaatgcagggcatgaacat

SEQ ID NO: 186002 - DNA, 120 bp, Artificial Sequence
  ENSG00000111817_15 (sequence is synthesized)
cctgatcaaaactcatttacttttgctcccaatggtgtgcctttcattactgaggctctgtacgggccaaagtacaccttcttcaacaatgttttgatgttttccccagctgtgtcaaag

SEQ ID NO: 186003 - DNA, 120 bp, Artificial Sequence
  ENSG00000111817_16 (sequence is synthesized)
agctgcttttctccctgggtgggtcaggtcacagaagactgctcatcaaaatggtctaaatacaagcatgacctggcagctagttgtcaggggagggtggttgcagcagaggagaaaaat

SEQ ID NO: 186004 - DNA, 120 bp, Artificial Sequence
  ENSG00000111817_17 (sequence is synthesized)
ggggtggttttcatccgaggagaaggtgtgggagcttataacccccagctcaacctgaagaatgttcagaggaatctcatcctcctacatccacagctgcttctccttgtagaccaaata

SEQ ID NO: 186005 - DNA, 120 bp, Artificial Sequence
  ENSG00000111817_18 (sequence is synthesized)
cacctgggagaggagagtcccttggagacagcagcgagcttcttccataatgtggatgttccttttgaggagactgtggtagatggtgtccatggggctttcatcaggcagagagatggt

SEQ ID NO: 186006 - DNA, 120 bp, Artificial Sequence
  ENSG00000111817_19 (sequence is synthesized)
ctctataaaatgtactggatggacgatactggctacagcgagaaagcaacctttgcctcagtgacatatcctcggggctatccctacaatgggacaaactatgtgaatgtcaccatgcac

SEQ ID NO: 186007 - DNA, 120 bp, Artificial Sequence
  ENSG00000111817_20 (sequence is synthesized)
ctccgaagtcccatcaccagggcagcttacctcttcatagggccatctatagatgttcagagcttcactgtccacggagactctcagcaactggatgtgttcatagccaccagcaaacat

SEQ ID NO: 186008 - DNA, 120 bp, Artificial Sequence
  ENSG00000111817_21 (sequence is synthesized)
gcctacgccacatacctgtggacaggtgaggccacaggacagtctgcctttgcacaggtcattgctgatcgtcacaaaattctgtttgaccggaattcagccatcaagagcagcattgtc

SEQ ID NO: 186009 - DNA, 120 bp, Artificial Sequence
  ENSG00000111817_22 (sequence is synthesized)
cctgaggtgaaggactatgctgctattgtggaacagaacttgcagcattttaaaccagtgtttcagctgctggagaagcagatactgtcccgagtccggaacacagctagctttaggaag

SEQ ID NO: 186010 - DNA, 120 bp, Artificial Sequence
  ENSG00000111817_23 (sequence is synthesized)
actgctgaacgcctgctgagattttcagataagagacagactgaggaggccattgacaggatttttgccatatcacagcaacagcagcagcaaagcaagtcaaagaaaaaccgaagggca

SEQ ID NO: 186011 - DNA, 120 bp, Artificial Sequence
  ENSG00000111817_24 (sequence is synthesized)
ggcaaacgctataaatttgtggatgctgtccctgatatttttgcacagattgaagtcaatgagaaaaagattagacagaaagctcagattttggcacagaaagaactacccatagatgaa

SEQ ID NO: 186012 - DNA, 120 bp, Artificial Sequence
  ENSG00000111817_25 (sequence is synthesized)
gatgaagaaatgaaagaccttttagattttgcagatgtaacatacgagaaacataaaaatgggggcttgattaaaggccggtttggacaggcacggatggtgacaactacacacagcagg

SEQ ID NO: 186013 - DNA, 120 bp, Artificial Sequence
  ENSG00000111817_26 (sequence is synthesized)
gccccatcactgtctgcttcctataccaggttgttcctgattctgaacattgctattttctttgtcatgttggcaatgcaactgacttatttccagagggcccagagcctacatggccaa

SEQ ID NO: 186014 - DNA, 120 bp, Artificial Sequence
  ENSG00000111817_27 (sequence is synthesized)
agatgtctttatgcagttcttctcatagatagctgtattttattatggttgtactcttcttgttcccaatcacagtgttagcactgaagctataaattacctggtcattttgtgatcaca

SEQ ID NO: 186015 - DNA, 120 bp, Artificial Sequence
  ENSG00000111817_28 (sequence is synthesized)
agagtctatgcaaaaaaaaaaatttctttaccccagattatcagatttttttccctcagattcattttaacaaattaagggaagatattttgacacaagaaagcaggaacgtggagaaat

SEQ ID NO: 186016 - DNA, 120 bp, Artificial Sequence
  ENSG00000111817_29 (sequence is synthesized)
tggagcaggaaaagaaattatcaaagcaatagaaatagcttggtggtcctatggtgtttttggaagtatttggcattgctaattgagcagtccatatagtactacttttagaagaaacaa

SEQ ID NO: 186017 - DNA, 120 bp, Artificial Sequence
  ENSG00000111817_30 (sequence is synthesized)
tgagaaaaaggtttagatagaattgggttttattaatattaatttaatgctattagcaatttccatatactatattgtggaaaagactgaagaatacaattctgagaaatataaaaaaat

SEQ ID NO: 186018 - DNA, 120 bp, Artificial Sequence
  ENSG00000111817_31 (sequence is synthesized)
atggtatactcatgttgaaagataaatgttgctaagtcctggtatgatggtgtgagcttccttggggaagtacttcttgagttatgtaactaacaggatgttttactacagatctggatg

SEQ ID NO: 186019 - DNA, 120 bp, Artificial Sequence
  ENSG00000111817_32 (sequence is synthesized)
gctattcagataacatggcaaaaaatgatagcagaagatcattaaaaacttaaaatatattttattagaaaacatttatctatgaatgaatatttccttgatgctggtctctgcacacat

SEQ ID NO: 186020 - DNA, 120 bp, Artificial Sequence
  ENSG00000111817_33 (sequence is synthesized)
atgcttggttacttgcatgcattcattggttgttcaataagtgagatgattacagataatactgtattttccttatatggaaaaccgttatagacccaataacaactaaacctttcaaaa

SEQ ID NO: 186021 - DNA, 120 bp, Artificial Sequence
  ENSG00000111817_34 (sequence is synthesized)
gaaaatattttctattatgaatgttgattttcataccaaagaagatggagagtctaaaatttggatatgattcttatgtttttttaatagaaaaccttcttcaagtttattttcctaaat

SEQ ID NO: 186022 - DNA, 120 bp, Artificial Sequence
  ENSG00000111817_35 (sequence is synthesized)
aaacatcataattgtgaattttctctagtattcttcttctttgttccattatattcaaaatgcattaacattttccaaaatttttgaagagagatctttatttggacgtgtattcattaa

SEQ ID NO: 186023 - DNA, 120 bp, Artificial Sequence
  ENSG00000111817_36 (sequence is synthesized)
atatataaagtagtgtttgaatcaaaagaagtattttctctgcttattaaccttaattgttgtttaagcatattttaaatatttaaaacaatagccaattctgatatttaagtagcaccc

SEQ ID NO: 186024 - DNA, 120 bp, Artificial Sequence
  ENSG00000111817_37 (sequence is synthesized)
aacttttaaaagcataaaattttcaatcaactcctcagaaggtaacagcagcatagaatactagaaaaataatccatagtttctacttgagcataagaaaatgatatacttaaaaggaac

SEQ ID NO: 186025 - DNA, 120 bp, Artificial Sequence
  ENSG00000111817_38 (sequence is synthesized)
ttaataaattatcatacattcagcatatttgagtcatatatttctcctttgaaacaaaatatgttcagctcaaattttacagtaaggacacactcactgatttataggtgtaaagtaaca

SEQ ID NO: 186026 - DNA, 120 bp, Artificial Sequence
  ENSG00000111817_39 (sequence is synthesized)
acagtaacctttcctcttacttgctcttttagttcacagcaataccagtatgtaaccaaaagacaagctagagaaacttttaagtacctttctgcagttctaatttgaaccttcttgcat

SEQ ID NO: 186027 - DNA, 120 bp, Artificial Sequence
  ENSG00000111817_40 (sequence is synthesized)
aaagaaaacacaagtttgacttttaactgtgcttcacttattatgcttggaatctagaaaacgacttctgaggaagtaatttttttcccctctcatggaaagtctctagggaggatgtca

SEQ ID NO: 186028 - DNA, 120 bp, Artificial Sequence
  ENSG00000111817_41 (sequence is synthesized)
ttacacactgtttaaaagaataatgttttcaaaagaataatgcttccgtttgtcctgcatggatgctcttactaggatttaaacttgctttatgtgacagattctccatttacttaacct

SEQ ID NO: 186029 - DNA, 120 bp, Artificial Sequence
  ENSG00000111817_42 (sequence is synthesized)
cactcaacattcctctcttttactctttctcactcaaaaggatgaactgtctgaaatgatcaaaaggaaattttgaaagaaaaaaaaaaggaaaattattctttgaggttaccaagcaaa

SEQ ID NO: 186030 - DNA, 120 bp, Artificial Sequence
  ENSG00000111817_43 (sequence is synthesized)
cctgatctcagatccaaactgagacatactttctaacagagatgaaaagtgcaagtgagtgccaaactcgcttttcttttgttttcattaggttaaggcttgacaatacgttagtcgcca

SEQ ID NO: 186031 - DNA, 120 bp, Artificial Sequence
  ENSG00000111817_44 (sequence is synthesized)
cagcatgatccagtgtaacatattagttcattttaaagtagtctttttaaaatacgcatctttaaaacaaaatgaattaaaattatgtgttttttttttttcttctaatgaacctggtat

SEQ ID NO: 186032 - DNA, 120 bp, Artificial Sequence
  ENSG00000111817_45 (sequence is synthesized)
ttatttccttaaaaagaaacttcctcaggcagtgacttaagtggttaagtgaaaaaaaaaaatgctgaaacaaatcacccctcttcataatgaaacatgttttttttaatcagggatagt

SEQ ID NO: 186033 - DNA, 120 bp, Artificial Sequence
  ENSG00000111817_46 (sequence is synthesized)
gcatatttgagtaaaactagggaactttttgtaacttgaaaacaaagcaatgttaaatctcccttgaaactgagtaatcagttatggaatctgtttcaatgctgctcactatgacaggaa

SEQ ID NO: 186034 - DNA, 120 bp, Artificial Sequence
  ENSG00000111817_47 (sequence is synthesized)
tgtttcaagttcatttgataatatgtgagctgttgttcaggggattggcaggactcttggtcctagccttaaagaaaatttgagaatcactagcatacagagcttgtcagtgcagtaaaa

SEQ ID NO: 186035 - DNA, 120 bp, Artificial Sequence
  ENSG00000111817_48 (sequence is synthesized)
aatcactagcatacagagcttgtcagtgcagtaaaagtggtatattcctgggaagctgaggtgggagtattgcctgagcttaggagttctgtgctgcagtgagctatgactgtgccactg

SEQ ID NO: 186036 - DNA, 120 bp, Artificial Sequence
  ENSG00000111817_49 (sequence is synthesized)
tctcttttttttttttttaagtatattcccttgtttataactgattagcttatttcagttgatggtagatgagacctatggtggtggatgagacccagaattttcagagagaacattctt

SEQ ID NO: 186037 - DNA, 120 bp, Artificial Sequence
  ENSG00000111817_50 (sequence is synthesized)
ttgacaacattgttttaatcgtcaaagtcaggtggaagaccgtgttctggaactattttaattgttaaaatgtatcacctaagataatgaattcttccacaaatattttagtcatagttt

SEQ ID NO: 186038 - DNA, 120 bp, Artificial Sequence
  ENSG00000111817_51 (sequence is synthesized)
ttaagtaccacgtattctaaggttatcagaaaatatgtcttaacagaatgttttgcatactgaataatttgtttttgaaaaggaaaatttacatttgacttactcagtttttaaaaaatt

SEQ ID NO: 186039 - DNA, 120 bp, Artificial Sequence
  ENSG00000111817_52 (sequence is synthesized)
atttttatttctagagacacggtcctttctgcatcacccaggctgaagtgtagtggcgtgatcgtagctcactgcagccgcaaacttcccatcttaagcgattcttctgcctcagccttc

SEQ ID NO: 186040 - DNA, 120 bp, Artificial Sequence
  ENSG00000111817_53 (sequence is synthesized)
caaagtactgggattagaggcataggtcatcatgcccggccaagttaaaaaaatttttgatagttcacaaaccactcacaaaagaatctgaaatttctccaagtgttaagagaaagcaag

SEQ ID NO: 186041 - DNA, 120 bp, Artificial Sequence
  ENSG00000111817_54 (sequence is synthesized)
ctatgaaatgctatatttgtaggcttaaaagtaaattagtgtgttttcttaaaaatctaaaccaagattaaaatgaatatagtcataggtatgaggggcatgtaatttatcttccgactg

SEQ ID NO: 186042 - DNA, 120 bp, Artificial Sequence
  ENSG00000111817_55 (sequence is synthesized)
gagatacctttgagagttaaaggaggagcaattaattgttattccaggacaacagatataaatcgagattatactaggtgaactgggacatatggtcatctttgtcatagcttaattcag

SEQ ID NO: 186043 - DNA, 120 bp, Artificial Sequence
  ENSG00000111817_56 (sequence is synthesized)
gaaaaaaggagttagggaagtctgaaggtctaactcaaagtttgatgctttttaagcaagtttagggaacttgagatgacctgattgagacccctaaatctacagatgaggaaagcaagc

SEQ ID NO: 186044 - DNA, 120 bp, Artificial Sequence
  ENSG00000111817_57 (sequence is synthesized)
ctcaagcaaggggggcctgatcctttccctgttcgctgtgtattccctgtctgtggcaaagcccattgccttgattctcttctctttactttcatgttgagaagtagtttctttctgcag

SEQ ID NO: 186045 - DNA, 120 bp, Artificial Sequence
  ENSG00000111817_58 (sequence is synthesized)
tttatttaatttactggcaaaatgacgtatttttttttcagcaatgtttcagctagatatttgctttatgcatgtaatgtcaatgaagtactcataagttttcaagaaatgactgatata

SEQ ID NO: 186046 - DNA, 120 bp, Artificial Sequence
  ENSG00000111817_59 (sequence is synthesized)
aatcatgtgttccactacatagtctaaatatttagtatttggtcatctattttaatatgttcaaattctgttaaacaagacatagtcactatgtgaagaataaaaatagacaaagttgca

SEQ ID NO: 186047 - DNA, 120 bp, Artificial Sequence
  ENSG00000111817_60 (sequence is synthesized)
gcggacgacccaccttgagatgcatctagcgactgctcccagcatgtaggagcagttgtaaaatcacagccgtaacagtgcctgctctccagtgtctgaaaacaaatgtttttctggtct

SEQ ID NO: 186048 - DNA, 120 bp, Artificial Sequence
  ENSG00000111817_61 (sequence is synthesized)
ttatttaaaaaacaaaacaataaattatctgtcccttcccctctcattcttagtttgtacttcccagaagtaaccaatttctaattcttttggctgttacatatattgtgtacttgttta

SEQ ID NO: 186049 - DNA, 120 bp, Artificial Sequence
  ENSG00000111817_62 (sequence is synthesized)
caataaggtctaaaactgcctactaatgaagctttagctctcttacccattctttatacttattggaagataataggtgctatggaaggaaaagtcagggtaaggagactgggaagagga

SEQ ID NO: 186050 - DNA, 120 bp, Artificial Sequence
  ENSG00000111817_63 (sequence is synthesized)
ggccataattttaaatgtggtgatcaggttaggctttattgatgtctccacttccattctctgtgtcattttgaaaatctatttgctgttaatttaatggggttttaggaaggaactgaa

SEQ ID NO: 186051 - DNA, 120 bp, Artificial Sequence
  ENSG00000111817_64 (sequence is synthesized)
ggaaatttatatattgagtgcagtatgtttaaatggaagtcccacagcacttttcagttgagttaacaaataacgaatgacaataacatgtttacagagcatctactatatgccaagtat

SEQ ID NO: 186052 - DNA, 120 bp, Artificial Sequence
  ENSG00000111817_65 (sequence is synthesized)
tgttttaggaactgaagatatggtagagaataggaataataaaagctggcccttgtatagtttatgttctagtgggagcaaataataacagtaatagtgcaggatgtcaagtagtggtaa

SEQ ID NO: 186053 - DNA, 120 bp, Artificial Sequence
  ENSG00000111817_66 (sequence is synthesized)
gtactgtggagaataaagcaaggggaggggatgtaaggtgatggtgaattggtactgtcccataaacagtggtttctgatgtgattacttatgatcagacacttgaaagaaataagggaa

SEQ ID NO: 186054 - DNA, 120 bp, Artificial Sequence
  ENSG00000111817_67 (sequence is synthesized)
tgaatcacagggacatctaagagagaggagcattccagatagaacagcagttcgaaggccctgagctcagtatgtgtttggtgtatttaggactaggaggccagtgtggctagagcagag

SEQ ID NO: 186055 - DNA, 120 bp, Artificial Sequence
  ENSG00000111817_68 (sequence is synthesized)
tgggggaggggagggtgataggaataggatcagatcatacatgctctcacagactgcagcaaagacttggattatgagttggggagtcagttgcaatgaactgagatgtggctgactgca

SEQ ID NO: 186056 - DNA, 120 bp, Artificial Sequence
  ENSG00000111817_69 (sequence is synthesized)
ggaggaataagtagtaggaagcgggtccaggaggttgttttagccatgttaagtttaagatactttctaaaaatccaagtggagatgtaccagcctggaatccaggggcaggctgtggct

SEQ ID NO: 186057 - DNA, 120 bp, Artificial Sequence
  ENSG00000111817_70 (sequence is synthesized)
gaagatgtaattgttggtgccttcttaaaggttaaacagaaatttactagctgtgtgagaggagaagtgcattctgggtaaatggaatagaataaagaaaaaagtacgaaaaagcaaacc

SEQ ID NO: 186058 - DNA, 120 bp, Artificial Sequence
  ENSG00000111817_71 (sequence is synthesized)
tggttcaggaattctccagactggtggtgttggcccacagggtgtgtgatggagaatgggtgaagatgaaactgaaaaggcaagcagggaggctattgtgcaggactttgtaggacatgc

SEQ ID NO: 186059 - DNA, 120 bp, Artificial Sequence
  ENSG00000111817_72 (sequence is synthesized)
taaggaatctggactttattctgccatgaggctgctcaaccatttttatgcctcagcataactgagggctacaacataacacccatcactcaacaagcatggcagcgattttcatgggat

SEQ ID NO: 186060 - DNA, 120 bp, Artificial Sequence
  ENSG00000111817_73 (sequence is synthesized)
aggaaatgtgtatgggagcaaaagggacatgggtgaggggtgttgatgatgccacatatacctgtgtgtatgtgaaactttgaaaaatccctgagatggctctgatatgccccccatatt

SEQ ID NO: 186061 - DNA, 120 bp, Artificial Sequence
  ENSG00000111817_74 (sequence is synthesized)
ccatatgtttactccctggggtgaggtggggcagggagggggtaccctctgcttagaaatcgctgcaagcaatggcaagccattaaagaattttctttttaaataatcagatttgcattt

SEQ ID NO: 186062 - DNA, 120 bp, Artificial Sequence
  ENSG00000111817_75 (sequence is synthesized)
tagaaaggcaattttagcttcagtgtagagagtggacccaatggggaagaggttaggagaccatttccatagtctgggtagaagacaattagctccttgaataagtctggagagggaatg

SEQ ID NO: 186063 - DNA, 120 bp, Artificial Sequence
  ENSG00000111817_76 (sequence is synthesized)
tttaactcctagcccacaggcaaaatgtgtggccaaaggaatgaatattttgtggaagtattgatcagaaagataatgagtcaaggatccctaatggtatatatgtctgagtcttattta

SEQ ID NO: 186064 - DNA, 120 bp, Artificial Sequence
  ENSG00000111817_77 (sequence is synthesized)
atataagaagagcatggttgcctgccatggctctgctgccgtcaccctggctatcccttaataagcccaggaaattgttcaaatatttctgccatttgtgttttcagcttgccttgttca

SEQ ID NO: 186065 - DNA, 120 bp, Artificial Sequence
  ENSG00000111817_78 (sequence is synthesized)
gggacttcacatagaatggtataactggagtacagggtgtgtatgtagtggcgggtgatagaaaattagactggaaaagtagaccaggctccagggcaggagggtctcttttcctcactc

SEQ ID NO: 186066 - DNA, 120 bp, Artificial Sequence
  ENSG00000111817_79 (sequence is synthesized)
catttaatttaaaaaagaaatagtttcaattatataagcattgtgattaatgcaggcagttggagtactttctaaatcagaaaagtaaaagtgctgctccttctgcatatctctagaaat

SEQ ID NO: 186067 - DNA, 120 bp, Artificial Sequence
  ENSG00000111817_80 (sequence is synthesized)
ttgttatggggaagtctttatcaaagaatgtccctatgatttcagtagaatttcttaagaaaagagcttctaaaaacattcagtcagcccagcacattccaaattaaataatgagaagtg

SEQ ID NO: 186068 - DNA, 120 bp, Artificial Sequence
  ENSG00000111817_81 (sequence is synthesized)
tgtttagtatttatttaggaattcttttctgaacaaaaaaacgttttcaatggtctaggcacttcctttttcttccaaagaaatggtaataacaggacactagaagtacctttctgtgta

SEQ ID NO: 186069 - DNA, 120 bp, Artificial Sequence
  ENSG00000111817_82 (sequence is synthesized)
aagcaaacatcttgtcagttttccttactttgtacttttcagtctctgctgtttaccatttttgtccaggatcagagacctccagtaaaataaaaggaatttctgtttattgtctccttg

SEQ ID NO: 186070 - DNA, 120 bp, Artificial Sequence
  ENSG00000111817_83 (sequence is synthesized)
ataatcttgatttctaaactcctttactcctctcttgaaggtatttgttttactgacaaaagaatggatccaggtcatttagtagagttctgaagagaattcttagagcactctatatat

SEQ ID NO: 186071 - DNA, 120 bp, Artificial Sequence
  ENSG00000111817_84 (sequence is synthesized)
tcaaacctccgtattttttgatacaaaaaggactgatgaaagggagacgtgattcttttgaaagattaattcacagaattttttatcacagttgaaatatcaattgcaataacaactgaa

SEQ ID NO: 186072 - DNA, 120 bp, Artificial Sequence
  ENSG00000111817_85 (sequence is synthesized)
aactgattgctattactgaacactgcccttaggtggctcactcttagaagacacaaagtcactggactacaatcctttagggcagggattgtgtctcttgctcgttgtatatacatggtt

SEQ ID NO: 186073 - DNA, 120 bp, Artificial Sequence
  ENSG00000111817_86 (sequence is synthesized)
cttacacagtgcctggcattcaaaaaatgcattcagaaaaatttggtattcaaaaaatgcttgatgaattgactgactgcctgaatgaataaataaattggtggattaatgactgaatgg

SEQ ID NO: 186074 - DNA, 120 bp, Artificial Sequence
  ENSG00000111817_87 (sequence is synthesized)
agtacagaagactgtggtcccagaagaccttaacattgagcttgctgcagactgaatgtttgcctcctctcaaaattaatatgttgaaacctaatccttaatgtgatagtattaggatgt

SEQ ID NO: 186075 - DNA, 120 bp, Artificial Sequence
  ENSG00000111817_88 (sequence is synthesized)
ggggcctttggaaagtgattaggttatgaaggtggagccctcgtgaatgggagtagtatccttataaaagataccccagagaggtcccttgtcccttccaacatgtgaggctacagtgaa

SEQ ID NO: 186076 - DNA, 120 bp, Artificial Sequence
  ENSG00000111817_89 (sequence is synthesized)
aagatggccatctgtaaaccaggaagtgagtcctcaccagataccacatctgttgtgctttgatcttggatttccctgtccccagaactgtggtaaataaatttctgttgtttgtaagcc

SEQ ID NO: 186077 - DNA, 120 bp, Artificial Sequence
  ENSG00000111817_90 (sequence is synthesized)
atcatgtcagcgctgagaaaggcagggagggaggcctgagcaaggaagcttggagaagcctctggaggatgcctggccagggctgaatgctcagaaatggaagggaaagctcaggagatt

SEQ ID NO: 186078 - DNA, 120 bp, Artificial Sequence
  ENSG00000111817_91 (sequence is synthesized)
aggaattggatggaggtgcccttcagaactcatggagaaaagcactgctcccagtaaaatatctctcattctaatgaatgggaggactcttctccaggaggctgtgactaccaaggttgc

SEQ ID NO: 186079 - DNA, 120 bp, Artificial Sequence
  ENSG00000111817_92 (sequence is synthesized)
aaatgctccacctgaacttgggtgcatgagggatctctctctctcacacacacacacccccccaccgcgtaagataaatttctgtttgtgagctgcctacattaaatgctttgctcctga

SEQ ID NO: 186080 - DNA, 120 bp, Artificial Sequence
  ENSG00000111817_93 (sequence is synthesized)
ccatgcggagagcctcatgcaaaggccagggcccttcttcctccctcgcctcctcctccaatctatcctcctccgccacttctatttcttcaccttctggcggctgctcctctacctcca

SEQ ID NO: 186081 - DNA, 120 bp, Artificial Sequence
  ENSG00000111817_94 (sequence is synthesized)
tctgctcctccattacctccttctccgccaggccttccttcaccacctcagcgctctccctctcagccacggctgctgagacggtggcgcactttcctgtcttcacctcctccgcctcag

SEQ ID NO: 186082 - DNA, 120 bp, Artificial Sequence
  ENSG00000111817_95 (sequence is synthesized)
cctccgcccccgccgtcagctcagacgcggatctctgggcgccacagatttctagggccttctctccaccctgaacgccctttttcaggctgcggtcggctgccatcaccacagaagcgg

SEQ ID NO: 186083 - DNA, 120 bp, Artificial Sequence
  ENSG00000111817_96 (sequence is synthesized)
ctgccaggccttcggcgggaggctggccctcttcctgcccggctttgatcgccacatgaccgcgacccccaacaactcggatctggggagtaccgccacggcccgcggcatcctggggta

SEQ ID NO: 186084 - DNA, 120 bp, Artificial Sequence
  ENSG00000111817_97 (sequence is synthesized)
cgcccccctcctctgaaggcggtggaggcgggagcgcgacggtctccgagcctccctcacccggctccgccatcacctgtgtcgcctcgctttggtcgcggagcctcaggatctttcgaa

SEQ ID NO: 186085 - DNA, 120 bp, Artificial Sequence
  ENSG00000111817_98 (sequence is synthesized)
ttactgtggtaactctgcattagaaagaaacaaatccatatgacatctcagtggccagatcttcatgtacctctttgtgtatgtgtgtggggggaggtgttatttgttatttgtgttgcc

SEQ ID NO: 186086 - DNA, 120 bp, Artificial Sequence
  ENSG00000111817_99 (sequence is synthesized)
agtcttatgaatggcccttagtttcaaaagatgtagtaacttccatgtttaaagttagaaggaaaatatttagatgcagcctaatctaaagaaaaaataatttgctgaattgagtaaaga

SEQ ID NO: 186087 - DNA, 120 bp, Artificial Sequence
  ENSG00000111817_100 (sequence is synthesized)
ctttcttccatattcagcatgtatatattactatcatctggtgttaggtttgattgatcccaagtagttaaaacattttgcagcaagacatttcaagtaattaagacttacttgcatttt

SEQ ID NO: 186088 - DNA, 120 bp, Artificial Sequence
  ENSG00000111817_101 (sequence is synthesized)
atgatcgtaaggaactaaatgtgaatgggatgggactgactggcaatttataaacacatcccctccaataaccagcagatttctgagacctgtaggaaaaccaacattattgtgtaattg

SEQ ID NO: 186089 - DNA, 120 bp, Artificial Sequence
  ENSG00000111817_102 (sequence is synthesized)
tgtgaggaattctaactacataataatttagtttcgaagtttaagatttgagaacaaattcctgtcttttcgattagcttaaatttatttgattaatttataattaatgcttcatatgct

SEQ ID NO: 186090 - DNA, 120 bp, Artificial Sequence
  ENSG00000111817_103 (sequence is synthesized)
tccaaacagatatgggatgagttgattaaacaagggattctacagatgtttttactcatgcaatttttaaatacacatttatggttcaattgcaataaaagaatttacagattgatgaaa

SEQ ID NO: 186091 - DNA, 120 bp, Artificial Sequence
  ENSG00000111817_104 (sequence is synthesized)
tttttttaaaaaattacataagctgcctcttgtcatagggctagagagagctcattttaaatgcttagaaaaaaatcagtgaatgcacctaatgctatgatgaattacatcttaacatat

SEQ ID NO: 186092 - DNA, 120 bp, Artificial Sequence
  ENSG00000111817_105 (sequence is synthesized)
cacaggggtgaaggatggtggtttgcaagctttccgataaatttctggaattttgtaatgaaaagtattatgcaagagttggcattaaatccatatcagagctgatattttaggcctgtt

SEQ ID NO: 186093 - DNA, 120 bp, Artificial Sequence
  ENSG00000111817_106 (sequence is synthesized)
gctaagtacatgtagtcattttgaagtttataatattgtaggttgaaaagaattttttatttgatttatttcaaagcttagccatgtatgtagttgtttctgactttgactgacattaac

SEQ ID NO: 186094 - DNA, 120 bp, Artificial Sequence
  ENSG00000111817_107 (sequence is synthesized)
tgatcttattctattcttgacaccaagaaagaaaagatgtatgaaaacttatctgatatttgaattaccagattacattatcaaatgctacagtaactcactgattgatttgttcaatta

SEQ ID NO: 186095 - DNA, 120 bp, Artificial Sequence
  ENSG00000111817_108 (sequence is synthesized)
gtttaaaatagcaaccatatttacattatttagaaagaaacctttgtcatctagaagggtactttaaagtcctttttgttttagataagtagattttggcaaattaagaaattgatgtaa

SEQ ID NO: 186096 - DNA, 120 bp, Artificial Sequence
  ENSG00000111817_109 (sequence is synthesized)
atgttccagagatagagcctgtagagaaccgtgtatttaatctcacaagaaagtaatggactgtgaaataccatttttgatggagattgtttagcacaatacagtaacatgagaattgta

SEQ ID NO: 186097 - DNA, 120 bp, Artificial Sequence
  ENSG00000111817_110 (sequence is synthesized)
caagactagtacagttttctcattataatgtaaaatatttgggtatataaataccaatgaatgaatgctgccattaggatgagactccttctatgaaaagagaaataaataacttgaaag

SEQ ID NO: 186098 - DNA, 120 bp, Artificial Sequence
  ENSG00000111817_111 (sequence is synthesized)
gctcccagcatgtaggagcagttgtaaaatcacagccgtaacagtgcctgctctccagtgtctgaaaacaaatgtttttctggtcttcacttttttgaggcaggaaggagcctgcctaca

SEQ ID NO: 186099 - DNA, 120 bp, Artificial Sequence
  ENSG00000111817_112 (sequence is synthesized)
aagtccctacgcagtcatgaatctgatttcaagttacagctctcctactcactagctgtttgactggagctagtcatctttctgagccacaatttcctcatagctaactatatagaattt

SEQ ID NO: 186100 - DNA, 120 bp, Artificial Sequence
  ENSG00000111817_113 (sequence is synthesized)
cagagaagaatataatccctgtggattagagtggtcagtggaagaaatgagccttgacttatattctgctatggacactcaaaggtgagaatcagtcctaggaagattgtgagcaaccag

SEQ ID NO: 186101 - DNA, 120 bp, Artificial Sequence
  ENSG00000111817_114 (sequence is synthesized)
tcaaaagcagatctataactacagctgcagctccatcaaggcaacaagtggacacatcctggcaaagtattttatatacaacgtttggtttgctccttccagaaactgtatgagaaaagt

SEQ ID NO: 186102 - DNA, 120 bp, Artificial Sequence
  ENSG00000111817_115 (sequence is synthesized)
ttgcatatcaaaatcctactgatgagaaagtggaactcaacaatgttaaatgacttgcctgcctaaggtcacacagttagtgacagagtctagatttcagcctagttttgttcaacttca

SEQ ID NO: 186103 - DNA, 120 bp, Artificial Sequence
  ENSG00000111817_116 (sequence is synthesized)
aagtccttgctcttatttgatggacacattaaattatccaccatggtatctagactgggacacagccacaatctgaaaattgaattctaatttaataaacgtgccctctgccaggaaata

SEQ ID NO: 186104 - DNA, 120 bp, Artificial Sequence
  ENSG00000111817_117 (sequence is synthesized)
tgaggaatggctatagaaatgaagaagagtctctaccatgaaggagcttataatactaaatgttacactccttttggtctattaagtctaaggaaaagaataaacatctaatttcattca

SEQ ID NO: 186105 - DNA, 120 bp, Artificial Sequence
  ENSG00000111817_118 (sequence is synthesized)
gcggttgactacgcttatcaatccatcgtattcctttgtcttcttgtcacaaaaagaatttcgtcagtctggaaggggagttttacttacgtaaatggatgtagaccagactcaagcatg

SEQ ID NO: 186106 - DNA, 120 bp, Artificial Sequence
  ENSG00000111817_119 (sequence is synthesized)
taagaactgtgttaatgtggatttctaagcctctgaatgaatttctaaggcacctaacctattgtttctgaaaatatttactttaagggctgccctgaagggcagacaggtttattgggc

SEQ ID NO: 186107 - DNA, 120 bp, Artificial Sequence
  ENSG00000111817_120 (sequence is synthesized)
aacagctgggaaaatcagcggttggacttggccacatgctccaagaaggccacacgtccttcttcttaatggcataggagttggaggagcccttggcagcattgatgagctcctctgcca

SEQ ID NO: 186108 - DNA, 120 bp, Artificial Sequence
  ENSG00000111817_121 (sequence is synthesized)
ggcactcagcaatggtcttaatgttccggaaggcagcctcacgagcacctgtgcacagcagccagatggcctgattcacacggcgaagtggggacacgtccacagcctgtcgtctcacag

SEQ ID NO: 186109 - DNA, 120 bp, Artificial Sequence
  ENSG00000111817_122 (sequence is synthesized)
tcccggcgcacccaatgcgtgtggagtcctcccggggaccactgttgatgatggcgttcaccaggacctgcagagggttctcgcctgtgagcaggtgtatgacctcgaaggcatgcttga

SEQ ID NO: 186110 - DNA, 120 bp, Artificial Sequence
  ENSG00000111817_123 (sequence is synthesized)
cgatgcacacagtcatgagcttcttgccgttgttgcagccgtgcatcatcatggagttagtaaggcgctccacaatgggacactgagctttgtggaagcatttggcggcataccaccctg

SEQ ID NO: 186111 - DNA, 120 bp, Artificial Sequence
  ENSG00000111817_124 (sequence is synthesized)
tcttttcaaaatgtgttcatgtggtaattcactgcagcacaggagcaataatcagctatgtgcaggcatctatgctactgtctcttaaaatactttaaaagtaaggttagttattgtcta

SEQ ID NO: 186112 - DNA, 120 bp, Artificial Sequence
  ENSG00000111817_125 (sequence is synthesized)
ttcgagtcagttagctcttacaattcatttgatagtgattatcagtacaatatattagtttgttggagtgtgagaataatggtgttaatccttagaaaaatgcaagaccaaagggaaatt

SEQ ID NO: 186113 - DNA, 120 bp, Artificial Sequence
  ENSG00000111817_126 (sequence is synthesized)
taaattttgcatatttatgtttaatgtcaaatttatattcaaataaacggttatgattataactctttgtaaaagaaactccattttaagccccccagattatgatcactttcaaataca

SEQ ID NO: 186114 - DNA, 120 bp, Artificial Sequence
  ENSG00000111817_127 (sequence is synthesized)
ggctcagaagtacagatttagagaaaaaggattcctcttagaggaatacatcatatatactgagacttctagcgagggaaggagtgtagttctggttcaactaagataaagtactgatga

SEQ ID NO: 186115 - DNA, 120 bp, Artificial Sequence
  ENSG00000111817_128 (sequence is synthesized)
aaggtcactggcagacaatacggagaaacagcctgccttgcaggattttttgtatgcctagtcagcctacccaaggacaatgtgtccagaatgacctctttactgcctgccagctaatca

SEQ ID NO: 186116 - DNA, 120 bp, Artificial Sequence
  ENSG00000111817_129 (sequence is synthesized)
gttatcccataagaaatatgcaaacaagattcacacagcagagagcaattatttttctctccctctttcctctttgtcttaataaacgctctttttttatttgtggggtgaaatcaatct

SEQ ID NO: 186117 - DNA, 120 bp, Artificial Sequence
  ENSG00000111817_130 (sequence is synthesized)
aattgactttgtgactttgaattattgacactgctctgtttcttttccaaagaacctttgcactgttgaaagagtaacttttccattataacctgagtcaagatgaagagaagcagggaa

SEQ ID NO: 186118 - DNA, 120 bp, Artificial Sequence
  ENSG00000111817_131 (sequence is synthesized)
tactgaatgaaagttacttttccatgcagcaggaaaaaacaagtttgctactatacaaatttatagaaaagtataaaattacatgtgaacttctttttctttttgtgtgtgccaaagttt

SEQ ID NO: 186119 - DNA, 120 bp, Artificial Sequence
  ENSG00000111817_132 (sequence is synthesized)
tttaaagatttatatctctactactcaaagcattcccatctctagcctgtattagttctgtcacctgaatcatttttcactcataaccacctggccattctttaacactcagttcatgta

SEQ ID NO: 186120 - DNA, 120 bp, Artificial Sequence
  ENSG00000111817_133 (sequence is synthesized)
gattgtactaggcagtttaaatacattagattttataaacaaagacccagtgagcacagagcagttaacatgcccatggtcacatatgtattaattggcagattgcctcctcccacctta

SEQ ID NO: 186121 - DNA, 120 bp, Artificial Sequence
  ENSG00000111817_134 (sequence is synthesized)
ttactttacctccttccttaattacttgccattttgacagtcttctgatttctgtatagcccttatgacttttactatccaacttagtacagttacgtttcactgaatgacagggatttt

SEQ ID NO: 186122 - DNA, 120 bp, Artificial Sequence
  ENSG00000111817_135 (sequence is synthesized)
gtcattatggaaacatcatacagtacatctatcaaacctagctgcaatagcctactatacacctaagctaaatagtatatcatattgctcctaggctacaaacctgaacagcatgttgct

SEQ ID NO: 186123 - DNA, 120 bp, Artificial Sequence
  ENSG00000111817_136 (sequence is synthesized)
gtactgaatactgtaggcacttgtaacataatggtaagcatttttgtatctaaacataagaatgatacagtaaaaatagagtattacaattgtatggtcccacacttgtatatgcagttc

SEQ ID NO: 186124 - DNA, 120 bp, Artificial Sequence
  ENSG00000111817_137 (sequence is synthesized)
atctttgaccaaaatgttatgcagcaaatgaccgtacttatttatcctctactttttaactttattggttgtttcattaaggtcagttttatcccagctagataatgactgcatagcagc

SEQ ID NO: 186125 - DNA, 120 bp, Artificial Sequence
  ENSG00000111817_138 (sequence is synthesized)
ttctgtagcatctacgacagtatagtccagttactatctcatagaatgttttaatgaatcttgattatttaagtgaaaatttaaatttaaataaaaattttaaaaaattttaccaaaatg

SEQ ID NO: 186126 - DNA, 120 bp, Artificial Sequence
  ENSG00000111817_139 (sequence is synthesized)
ttagctgtaaattacataaatataattgtggtaacattttagaagaggttctatgttaaagcaatctgttttcaacttcatttctctctttttttttttttctacagttgatactctagt

SEQ ID NO: 186127 - DNA, 120 bp, Artificial Sequence
  ENSG00000111817_140 (sequence is synthesized)
agcaatttttttgtctggctgagttttctatcttgctgcttcttttttcatgaacacgtggagcatatccagtcttacctgcttttatttttcttccctattccaaaaatgatatatggc

SEQ ID NO: 186128 - DNA, 120 bp, Artificial Sequence
  ENSG00000111817_141 (sequence is synthesized)
tttatgatccttgcattttctgtcgtttaacttccagcagtacatactggcaggagctactccgggaattaaattttcttcctgtagaaactcagtctctcccctgaacttcgtatatag

SEQ ID NO: 186129 - DNA, 120 bp, Artificial Sequence
  ENSG00000111817_142 (sequence is synthesized)
tataacttacactttattgaagccaaactgaagcatgttattttattatcttggcctagaatgcatgttgagttgtgggagagctagtgttcattccaggttcagaaacccaaactgcac

SEQ ID NO: 186130 - DNA, 120 bp, Artificial Sequence
  ENSG00000111817_143 (sequence is synthesized)
aagaggatgtcccatgtatatatgcaaatataatcacgtatagcatgaacattggaaaatgaggaaggcagggaataggtgtagcactaatgttaccaaggacaggttaccacataataa

SEQ ID NO: 186131 - DNA, 120 bp, Artificial Sequence
  ENSG00000111817_144 (sequence is synthesized)
atacaagcttgcacacaacatatgtggaagaccttttgagggattctgactaactggtctggaataaaatgtgaggattgtgatttttcttttattttatcccttccattacacaattct

SEQ ID NO: 186132 - DNA, 120 bp, Artificial Sequence
  ENSG00000111817_145 (sequence is synthesized)
aatttgcaactagatttgaaaagtcattgtttagacctatataggagtgtgaagttttcaaagtatcttaattctttccaacttatttccctagggtttcaaaggactgtggctattgcg

SEQ ID NO: 186133 - DNA, 120 bp, Artificial Sequence
  ENSG00000111817_146 (sequence is synthesized)
gcctgctctccagtgtctgaaaacaaatgtttttctggtcttcacttttttgaggcaggaagacactcaaaggtgagaatcagtcctaggaagattgtgagcaaccagtctacaatgcaa

SEQ ID NO: 186134 - DNA, 120 bp, Artificial Sequence
  ENSG00000111817_147 (sequence is synthesized)
atagctttcaactgaggccaggatacgcaaactgtaaatgaggctttagacacaaaaagttagtctaggccaagtggtttagtggaaggatcctagattttatgtcagaaaacataattg

SEQ ID NO: 186135 - DNA, 120 bp, Artificial Sequence
  ENSG00000111817_148 (sequence is synthesized)
ttatgtggtctgaaccatttatggtttgggaaattcactttaactttcagagcctctgtttcctcatcagtcagtgcctgtgaggataaaaggagacacgtatggacgtgcctggtacat

SEQ ID NO: 186136 - DNA, 120 bp, Artificial Sequence
  ENSG00000111817_149 (sequence is synthesized)
ttcatgacctattagaagattgtgaggccaggaagtatgtacctgcagaaatctcaaattgtgacttgcagtggaggtggaattcaattattattaagaatgtaggtcaatgtttcattt

SEQ ID NO: 186137 - DNA, 120 bp, Artificial Sequence
  ENSG00000111817_150 (sequence is synthesized)
aagtgcctgggcagcctggatttcaacacagctcctcccactgaagcagccctccatgccagcagcatgcctctgatgggtggcttattttggatcacatttaccctctaagacagtggc

SEQ ID NO: 186138 - DNA, 120 bp, Artificial Sequence
  ENSG00000111817_151 (sequence is synthesized)
tttgaaactttttcactgtgacctacagtaacaaacaacccagtacagacataactttttttatttgtttctagtttttaattttatttttgtttctaattttattacactgtttatttt

SEQ ID NO: 186139 - DNA, 120 bp, Artificial Sequence
  ENSG00000111817_152 (sequence is synthesized)
tgacctccccttccctatgcctcagaagaaattgaggcaatgagaaataaagtggtttatccaagatcacacagcaagtggtagagccacaatctgaacgagggctgccctgaagggcag

SEQ ID NO: 186140 - DNA, 120 bp, Artificial Sequence
  ENSG00000111817_153 (sequence is synthesized)
tgtaatcctgcagggaaatgtcactgatgtgcacatcatcagtgctccacttcccaaagagcttgatgtctggggtctctgccactgctggtgctgctgtctcccactcagtcatcgtga

SEQ ID NO: 186141 - DNA, 120 bp, Artificial Sequence
  ENSG00000111817_154 (sequence is synthesized)
gaacacagcctgagtgtctctgttgctcgacgtagaccatgcgccaccctggcacagacaggaagagcaaacttacttgtaatttaaaggaaaaataaaaggaaagtaatttttaaaata

SEQ ID NO: 186142 - DNA, 120 bp, Artificial Sequence
  ENSG00000111832_0 (sequence is synthesized)
ctcccggcgcggcagctgtctgggctgctgcgcgccgcctaggtgtctgggcgatctatgggcaagagcaagggccacgatgacagattacggcgaggagcagcgcaacgagctggaggc

SEQ ID NO: 186143 - DNA, 120 bp, Artificial Sequence
  ENSG00000111832_1 (sequence is synthesized)
cctggagtccatctaccctgactccttcacagtattatcagaaaatccacccagcttcaccattactgtgacgtctgaggctggagaaaatgatgaaactgtccagactaccctcaagtt

SEQ ID NO: 186144 - DNA, 120 bp, Artificial Sequence
  ENSG00000111832_2 (sequence is synthesized)
tacatacagtgaaaaatacccagatgaagctcccctttatgaaatattctcccaggaaaatctagaagataatgatgtctcagacattttaaaattactagcattacaggctgaagaaaa

SEQ ID NO: 186145 - DNA, 120 bp, Artificial Sequence
  ENSG00000111832_3 (sequence is synthesized)
tcttggtatggtgatgatttttactctagtgacagctgtgcaagaaaaattaaatgaaatagtagatcagataaaaactagaagagaagaagaaaagaaacaaaaagaaaaagaagcaga

SEQ ID NO: 186146 - DNA, 120 bp, Artificial Sequence
  ENSG00000111832_4 (sequence is synthesized)
agaagctgaaaagcaattattccatggtactccagttacaattgagaatttcttaaattggaaagccaagtttgatgcagaactcttggaaattaaaaagaaaaggatgaaagaagaaga

SEQ ID NO: 186147 - DNA, 120 bp, Artificial Sequence
  ENSG00000111832_5 (sequence is synthesized)
acaagcaggaaaaaataaattaagtgggaaacaactatttgaaacagatcataatcttgacacatctgatatccagttcttggaggatgctggaaacaacgtggaggtagatgagtcttt

SEQ ID NO: 186148 - DNA, 120 bp, Artificial Sequence
  ENSG00000111832_6 (sequence is synthesized)
gttccaagaaatggatgacttggagctggaggatgatgaagatgatccagactataatcctgctgacccagagagtgactcagctgactaatggactgtccccatctgcagagaggcttg

SEQ ID NO: 186149 - DNA, 120 bp, Artificial Sequence
  ENSG00000111832_7 (sequence is synthesized)
actgccacagcatctgtggctatgctcagagggttatgattttcctttctttttttctaagaaaaaattattttcaggagaatattcttctgatagctttcatcattgaacttaataaac

SEQ ID NO: 186150 - DNA, 120 bp, Artificial Sequence
  ENSG00000111832_8 (sequence is synthesized)
tgaccttaaaatttcaaatataaaatgttcaaggcttcttactgttgagcacaaggttacgtatttaaaatcacctagtatttgagagagatcctgcctatagcaccaagactcgaaggt

SEQ ID NO: 186151 - DNA, 120 bp, Artificial Sequence
  ENSG00000111832_9 (sequence is synthesized)
aggctgctgctgtgcacatgagtttatacacaggaaattggaataacttggaatttctatgctggagactttggctacttctggatttcaagcattgtatgaagtgtgagaaaactgagg

SEQ ID NO: 186152 - DNA, 120 bp, Artificial Sequence
  ENSG00000111832_10 (sequence is synthesized)
tgactagcacattaaaccatccagattctagcctccaggcacactaaatttaagtcttgataaaaccaggaggccatattatgatcataagtaagatgaagtttagccttccttttagtc

SEQ ID NO: 186153 - DNA, 90 bp, Artificial Sequence
  ENSG00000111832_11 (sequence is synthesized)
atgatcataagtaagatgaagtttagccttccttttagtccattttgtattgccgtaaaggaatatctgaggctgggtaatttataaaag

SEQ ID NO: 186154 - DNA, 120 bp, Artificial Sequence
  ENSG00000111832_12 (sequence is synthesized)
tcataattctggatgaccagaaagttgaagattgggtatctgcatctggtgagagcctcacgctgcttccactcatggtagaaggggaagaggcactatgtgtgtagagatcacatggcc

SEQ ID NO: 186155 - DNA, 120 bp, Artificial Sequence
  ENSG00000111832_13 (sequence is synthesized)
agagagtgagggtggaagtgccaggctttttttttttttttaaactagctttggtgggaactccctcacccctgctccccacaggaaggcattaatctatttatgagggatctacctgct

SEQ ID NO: 186156 - DNA, 120 bp, Artificial Sequence
  ENSG00000111832_14 (sequence is synthesized)
ataacccaaacaccccaccagcccccatctcccaacaccaccacactggggattaaatttcaatgtgggatttggagaggacaaatatccaaaccatagcagtcttaaagtatttaaatt

SEQ ID NO: 186157 - DNA, 120 bp, Artificial Sequence
  ENSG00000111832_15 (sequence is synthesized)
agaatttaaattaaaatttaaattacagtatttaaattagaatcatttgtggagtttctaaaaggtatgcattcctaggcccctctcaagttagatttatgaacactgatccccagtctg

SEQ ID NO: 186158 - DNA, 120 bp, Artificial Sequence
  ENSG00000111832_16 (sequence is synthesized)
aattttaaaacagcaaaatctcatactggttctacagattattctgatgcacaatctgggttaagaaccactgtcctgtagtcgtgaagtctatatattttggtattttctttacctctt

SEQ ID NO: 186159 - DNA, 120 bp, Artificial Sequence
  ENSG00000111832_17 (sequence is synthesized)
ctctaattaaccagtctgaaggagtttgaattttggggatcgtacattgtctgcaagagaaacacattaacatccgtgcacatagagtcctttgtaataatttgggatgattgacttggt

SEQ ID NO: 186160 - DNA, 120 bp, Artificial Sequence
  ENSG00000111832_18 (sequence is synthesized)
ggctccaggtaggagagccagtcttcatgcaagttattcagtcactacagttttggaggactgactcttaaccccaataggaaatcagttgtgctattttaaattcataaagctattata

SEQ ID NO: 186161 - DNA, 120 bp, Artificial Sequence
  ENSG00000111832_19 (sequence is synthesized)
aagagctgcctccagtaaaaaatacatatgccacatacccacaaacagcaatattaagccttcatttattgttggagttagaccttataatcaaaaagcaaattatttaagataaaatta

SEQ ID NO: 186162 - DNA, 120 bp, Artificial Sequence
  ENSG00000111832_20 (sequence is synthesized)
aaatccaaaagtttgtcctatgtgagattttgcttttcccatctttttgaagctgatcagcagatacataagaacctggaagaagctgctcaattaaggttaaaaaaaataaaaagcaat

SEQ ID NO: 186163 - DNA, 120 bp, Artificial Sequence
  ENSG00000111832_21 (sequence is synthesized)
tgttagcaatgtggtgctgaaatcaagacttaactttgaagtgtcaagaatgataacctcccatccacttcatgtgatttttaagaataaattttatatatttctccaggtattaaagtg

SEQ ID NO: 186164 - DNA, 120 bp, Artificial Sequence
  ENSG00000111832_22 (sequence is synthesized)
gatgtccacctttgccatttcagaacctaaaggcagaatctaatggtaaaatgaagacaacctagttgtcttctaataacctagttagttctaataacattctcaaatattttcatctag

SEQ ID NO: 186165 - DNA, 120 bp, Artificial Sequence
  ENSG00000111832_23 (sequence is synthesized)
agtaaatatttactgttggctttgtattctgggaattagcccaagactatgctgctcaaatgggtgcaaatatactctcaggttgcaatagcatgacgagtggtatttgaagcaataatt

SEQ ID NO: 186166 - DNA, 120 bp, Artificial Sequence
  ENSG00000111832_24 (sequence is synthesized)
gttccatcttggattatcggttttgctctttgatttggtaaagtttttgtttttctactcgtgccagttgtattaaaatgtcactaggttaaaaacaaacacagatatgtttattcatta

SEQ ID NO: 186167 - DNA, 120 bp, Artificial Sequence
  ENSG00000111832_25 (sequence is synthesized)
ctgtatccctgtaataatgcctggcatgcagtaggtccctaatatttgttgaatgaatgaattatagaatagagtgcaaaattaattctaatgtattttaaagtaaagcatgagagttca

SEQ ID NO: 186168 - DNA, 120 bp, Artificial Sequence
  ENSG00000111832_26 (sequence is synthesized)
aagaaatgttgtatttgccatctacaacttggaataatgttccttgatcctgctttacttcatgcacttttgccagcagaggtggatgccttagggaaaaagttggataaatgctgatct

SEQ ID NO: 186169 - DNA, 120 bp, Artificial Sequence
  ENSG00000111832_27 (sequence is synthesized)
aaggcaacacgtctaaatggttatgtgaacatttcccagttggggtaaaactaagaggagtgataataacatctcatcaatttaaaggacaagttcactgatcgtactgtcatactccag

SEQ ID NO: 186170 - DNA, 120 bp, Artificial Sequence
  ENSG00000111832_28 (sequence is synthesized)
agatacatgtgccaagaagcaaagagatgcactcttgtattccagaaagaagatgatttgtaagtgttcagtatttgtgtggcagcccttttaggtgtaatgaagtgtaacagaaaagta

SEQ ID NO: 186171 - DNA, 120 bp, Artificial Sequence
  ENSG00000111832_29 (sequence is synthesized)
agtgaactacttcacatagctcttaatgtttgtctttcagaggacatacgagtcaggcagcaaaagttggagccattgtatgattgtgtgtcaaaatgagagtcacacacttcaagaact

SEQ ID NO: 186172 - DNA, 120 bp, Artificial Sequence
  ENSG00000111832_30 (sequence is synthesized)
gtaggaactaattttagaaaaagactcttcagaacagatgacacatgaaatgtgagtttatgtaaacatgtaaatttgagtagcattagtttgttttctgtttaggaactgtatcagggt

SEQ ID NO: 186173 - DNA, 120 bp, Artificial Sequence
  ENSG00000111832_31 (sequence is synthesized)
gacaaagatgaaagaatgctgccagaaaagtatattgttaaattttcaggcctccattggtgaagtttcaagtaacctttcacttaagttacttgtgtcagaggatggatgatggggtca

SEQ ID NO: 186174 - DNA, 120 bp, Artificial Sequence
  ENSG00000111832_32 (sequence is synthesized)
tttaaattgttggacaaagccatgaaaggacttttaaaattttgtcataaaaatagccaatgatgtttttaattttacatctaaaactaatttgcattatcctgtgttagtgactgaatc

SEQ ID NO: 186175 - DNA, 120 bp, Artificial Sequence
  ENSG00000111832_33 (sequence is synthesized)
tcaactcagtcctcattttttagttcaacttttgacaaccttatattcattgacaccatggacagcacagtaaaaaaatacacaaatttcttttgcagttattgatttggaatgatcact

SEQ ID NO: 186176 - DNA, 120 bp, Artificial Sequence
  ENSG00000111832_34 (sequence is synthesized)
ttaaaagagccatcaaatacgcctacatattgagccactctttatcattaaggtgaaaagttcattcaattaaggtatttgagtgctactatgcgccagcctttctttgtgataatgtta

SEQ ID NO: 186177 - DNA, 120 bp, Artificial Sequence
  ENSG00000111832_35 (sequence is synthesized)
attttttttttcctcccctccatgaagggaagaaaaaaaaattaattcggccatgaattttaatattctggccagcaccttatccatttgtagccacgccaacaaatttattctgtgata

SEQ ID NO: 186178 - DNA, 120 bp, Artificial Sequence
  ENSG00000111832_36 (sequence is synthesized)
taccaaacttacaaagtcactctgcgatttcagtaaggcccattcccaacatgagtgctgctgtccacggtactgaaccatcaatgctaaatggtatttagttgtggatcttcatcctgt

SEQ ID NO: 186179 - DNA, 120 bp, Artificial Sequence
  ENSG00000111832_37 (sequence is synthesized)
catgcagctaaatattccaggaatactgaaccaagtgaggagaaagatagcagtgggttgctgcaaaggaggtgaggggaggggagagatagcaagtgagaaaaagagagactagtggtg

SEQ ID NO: 186180 - DNA, 120 bp, Artificial Sequence
  ENSG00000111832_38 (sequence is synthesized)
atgtttttaagtaattgaagtaaaaaagagagagaaagagagagagaagaggttctactcagtccaccaaagctttttaatttccttacataattaacatgatgaatttttaaataattg

SEQ ID NO: 186181 - DNA, 120 bp, Artificial Sequence
  ENSG00000111832_39 (sequence is synthesized)
ttatatttagttttgttcttccaccttttggctatttctactacatatttacttatcataaaaaatacttcctagaccttcctcttatagctattgcctatctctgcctttgcagctgtt

SEQ ID NO: 186182 - DNA, 120 bp, Artificial Sequence
  ENSG00000111832_40 (sequence is synthesized)
ctcctttaaagagtagtctccattagttttcttgacttcttcatctccctgcataaagatgaagggtatttagctctgaaaatcctttactgttgaatatttagattgttttcaattttt

SEQ ID NO: 186183 - DNA, 120 bp, Artificial Sequence
  ENSG00000111832_41 (sequence is synthesized)
acataatgaacaatgcatcatgggattattggctgcaaataaattggaaacataaaaggtgttttaagtttaaatttttttaaaaaaacaggtaaaaataaaatatttgccaaagactaa

SEQ ID NO: 186184 - DNA, 120 bp, Artificial Sequence
  ENSG00000111832_42 (sequence is synthesized)
gggcaagagcaagggccacgatgacagattacggcgaggagcagcgcaacgagctggaggccctggagtccatctaccctgactccttcacagacatatgggacttgggattcagctcca

SEQ ID NO: 186185 - DNA, 120 bp, Artificial Sequence
  ENSG00000111832_43 (sequence is synthesized)
ttcacaggcagatgtctctcagctatccctgtatagctccagtcctgttcatgttctctctcaccagcagtacatctgtgctgtgaggatgttaaggggatgagtgaagaggggtttgag

SEQ ID NO: 186186 - DNA, 120 bp, Artificial Sequence
  ENSG00000111832_44 (sequence is synthesized)
tgattgcacattgatccaaccctcctaacaactagtcttccaaaatataaatggactctcctgataccacattctccttcagtagtgcttcacttgacaaggtcctgctaagtattatca

SEQ ID NO: 186187 - DNA, 120 bp, Artificial Sequence
  ENSG00000111834_0 (sequence is synthesized)
atggagataggacgcagcaactcacagagcaaccaggacccagaaatcgcttaagagaccgcggcaaagtaacttaactgagttgccttcttccatattttcacgcccctttcatccaga

SEQ ID NO: 186188 - DNA, 120 bp, Artificial Sequence
  ENSG00000111834_1 (sequence is synthesized)
acattttttttcttgaactgcttccatggaggactcaacctccccgaagcaagaaaaagaaaaccaagaagaactaggggaaacaaggcggccatgggaaggaaagacagcagcttctcc

SEQ ID NO: 186189 - DNA, 120 bp, Artificial Sequence
  ENSG00000111834_2 (sequence is synthesized)
ccaatattctgagcctgagtcgtctgagcccttggaggcgaagcaggggccagaaactggacgccagtcccgaagcagccgtccttggagcccgcagtctagagccaagacgcctctggg

SEQ ID NO: 186190 - DNA, 120 bp, Artificial Sequence
  ENSG00000111834_3 (sequence is synthesized)
tggccccgcgggaccagaaacatcatcacctgctcctgtctctccgcgggagccctcttcctctccttctcccctggctccggccagacaagacctcgcggcaccacctcagtcggacag

SEQ ID NO: 186191 - DNA, 120 bp, Artificial Sequence
  ENSG00000111834_4 (sequence is synthesized)
gaccacgagtgtgattcctgaagctgggacaccttatcctgatcctttggaacaatcatctgataaaagagaatcaactcctcatcacacaagccagtcagaaggaaacacctttcaaca

SEQ ID NO: 186192 - DNA, 120 bp, Artificial Sequence
  ENSG00000111834_5 (sequence is synthesized)
gtctcagcaacccaaaccccacctgtgtggacgaagggacgtgagctataacaacgctaaacagaaagagctgagatttgacgtttttcaggaggaagactcaaacagtgactatgattt

SEQ ID NO: 186193 - DNA, 120 bp, Artificial Sequence
  ENSG00000111834_6 (sequence is synthesized)
acagcagccggcgcctgggggctctgaagtggcccccagcatgcttgagatcaccattcagaatgctaaggcttacctgctgaagactagcagcaattcgggctttaatctatatgatca

SEQ ID NO: 186194 - DNA, 120 bp, Artificial Sequence
  ENSG00000111834_7 (sequence is synthesized)
tctttctaatatgttgaccaagatattaaatgagcgtcctgaaaatgctgttgacatctttgaaaatattagccaagatgtgaagatggcacattttagtaaaaaatttgatgcactaca

SEQ ID NO: 186195 - DNA, 120 bp, Artificial Sequence
  ENSG00000111834_8 (sequence is synthesized)
aaatgagaatgagttgcttccaacatatgaaatagcagaaaagcaaaaggctctttttctccagggacatttggaaggagttgaccaagaattggaagatgaaatagcagaaaacgctct

SEQ ID NO: 186196 - DNA, 120 bp, Artificial Sequence
  ENSG00000111834_9 (sequence is synthesized)
tccaaatgtaatggagtcagctttttattttgaacaagctggagttggtttgggcacagatgagacataccgcatatttcttgccctcaagcagcttactgatacccacccaatccaaag

SEQ ID NO: 186197 - DNA, 120 bp, Artificial Sequence
  ENSG00000111834_10 (sequence is synthesized)
atgccgcttctggggaaagatcttgggtctggaaatgaattatattgtagctgaagtggaatttcgtgagggggaagatgaagaggaagtggaagaggaagatgtagctgaagagaggga

SEQ ID NO: 186198 - DNA, 120 bp, Artificial Sequence
  ENSG00000111834_11 (sequence is synthesized)
aagaagaaagtagaacaggtgccaacaaatatgtctattttgtttgcaatgaaccaggaagaccatgggtgaagttaccaccagttatacctgcacaaattgttattgcaagaaaaatca

SEQ ID NO: 186199 - DNA, 120 bp, Artificial Sequence
  ENSG00000111834_12 (sequence is synthesized)
agaaatttttcactgggcgattggatgctcccatcataagctacccacctttcccaggaaatgagagtaattatttacgagcacaaattgcccgaatttcagcaggaacccacgtcagtc

SEQ ID NO: 186200 - DNA, 120 bp, Artificial Sequence
  ENSG00000111834_13 (sequence is synthesized)
ctctaggattttatcagtttggtgaagaggaaggagaggaggaggaagaggcagaaggtgggcgaaatagctttgaggaaaaccctgattttgaaggcatccaagtgattgatctagtag

SEQ ID NO: 186201 - DNA, 120 bp, Artificial Sequence
  ENSG00000111834_14 (sequence is synthesized)
aatccctatccaattgggttcatcatgtacagcatattctctctcagggtcgctgtaattggttcaactccatacaaaaaaatgaggaagaagaagaggaagaagatgaagaaaaagacg

SEQ ID NO: 186202 - DNA, 120 bp, Artificial Sequence
  ENSG00000111834_15 (sequence is synthesized)
attctgactacatagaacaggaagtggggcttcctcttttgacaccaatctctgaagatttagagattcagaatatacccccctggacaacacggttatcctcaaatctcattccacaat

SEQ ID NO: 186203 - DNA, 120 bp, Artificial Sequence
  ENSG00000111834_16 (sequence is synthesized)
atgctattgcagtccttcaatccaacctttggcctggagcatatgccttctccaatggcaaaaagtttgaaaatttctacataggctggggtcataagtatagtccagacaattatacac

SEQ ID NO: 186204 - DNA, 120 bp, Artificial Sequence
  ENSG00000111834_17 (sequence is synthesized)
ccccagttccaccaccagtttatcaagaataccccagtggaccagaaattacagaaatggatgatcctagtgtggaggaggagcaggctttcagggctgcacaagaagcagttctactcg

SEQ ID NO: 186205 - DNA, 120 bp, Artificial Sequence
  ENSG00000111834_18 (sequence is synthesized)
cagctgagaatgaagaatctgaggaagatgaagatgaggaagatgattatgactaataaacataaaattagcctggttttatgtgacactgatacacacacaccccttatatgggactaa

SEQ ID NO: 186206 - DNA, 120 bp, Artificial Sequence
  ENSG00000111834_19 (sequence is synthesized)
ttttacacttttctgtgttatgtgtgtatatacatacacatgtaagaaattattcaactgcaaaatctcaatcttgaaaatcaagcttgaaatttcataggtagaaatattagcattttt

SEQ ID NO: 186207 - DNA, 120 bp, Artificial Sequence
  ENSG00000111834_20 (sequence is synthesized)
attgaaagatactcacaggattttccagaggctaaataacatgcaattgcataattgttctgagggttatggataatggaatatgtgtttgtacattcctgtttttaaaagggctcaggt

SEQ ID NO: 186208 - DNA, 120 bp, Artificial Sequence
  ENSG00000111834_21 (sequence is synthesized)
ttcacatggtccaggtgaggtaaaacaattaaaataaataaataaatggtctcaggtttaatttgtaatacgacaaacactggaagatataacccacaggaaattcttggaaacatcaat

SEQ ID NO: 186209 - DNA, 120 bp, Artificial Sequence
  ENSG00000111834_22 (sequence is synthesized)
actttttaaagagtgtcaaggggtatgaagacaaaaaatattgatagtcactagagtaatgtattcttaacctttgtaagaactgatctcagcatgtattcttaaacctttgtaattacc

SEQ ID NO: 186210 - DNA, 120 bp, Artificial Sequence
  ENSG00000111837_0 (sequence is synthesized)
gcaggcgcggacaggtaatccccagcgggctgcagggccaccaccctctgtccgacccagccggagcccgacctgcgaggctggccgggcatgtcccctcggcgccctgtgctaccaggg

SEQ ID NO: 186211 - DNA, 120 bp, Artificial Sequence
  ENSG00000111837_1 (sequence is synthesized)
ccaatctccgcccggagaccggtccctgacgccgggtgtttataagaatggaagtgttgtttccttgcccgattccttcatgctatatctcatgaacctctgtaatcttgggggagagac

SEQ ID NO: 186212 - DNA, 120 bp, Artificial Sequence
  ENSG00000111837_2 (sequence is synthesized)
tatatttaatgatgacaaacctgtcaccagtgtagcaacaacagtgtgaggacaaaagcaaataaaaattaagaagcgttcaaatttatattcaacaaggaagtcatttcaatcaacaac

SEQ ID NO: 186213 - DNA, 120 bp, Artificial Sequence
  ENSG00000111837_3 (sequence is synthesized)
ttctgctgcattatttttccaagatgaaccgatacacaaccatgagacagttgggggacggcacgtatgggagtgtgcttatgggcaagagtaatgaatccggggagctggtggccatca

SEQ ID NO: 186214 - DNA, 120 bp, Artificial Sequence
  ENSG00000111837_4 (sequence is synthesized)
aaaggatgaagagaaagttctattcttgggatgaatgcatgaacttgagagaagttaagtctctgaagaaacttaatcatgccaatgttattaaattgaaagaagttatcagagaaaatg

SEQ ID NO: 186215 - DNA, 120 bp, Artificial Sequence
  ENSG00000111837_5 (sequence is synthesized)
accatctttattttatatttgaatatatgaaagaaaacctctatcaattaatgaaagacagaaacaagttgttccctgaatcagtcatcagaaatattatgtatcaaatattgcaagggc

SEQ ID NO: 186216 - DNA, 120 bp, Artificial Sequence
  ENSG00000111837_6 (sequence is synthesized)
tggcttttatccataaacatggcttttttcatagggacatgaaaccagaaaacttgctttgtatgggtccagagcttgtgaaaattgctgattttggacttgcaagagaattaaggtcac

SEQ ID NO: 186217 - DNA, 120 bp, Artificial Sequence
  ENSG00000111837_7 (sequence is synthesized)
agccaccatacactgattatgtatctaccagatggtatcgtgcccctgaagttttactgagatcttcagtttatagttctcccattgatgtgtgggctgttggaagtatcatggctgaac

SEQ ID NO: 186218 - DNA, 120 bp, Artificial Sequence
  ENSG00000111837_8 (sequence is synthesized)
tctatatgttaaggccacttttcccagggacaagtgaggtcgatgaaatctttaaaatttgccaagttttagggactcccaaaaaaagtgactggccagaaggataccagctggcatcct

SEQ ID NO: 186219 - DNA, 120 bp, Artificial Sequence
  ENSG00000111837_9 (sequence is synthesized)
ctatgaacttccgttttccccagtgtgttcctataaacttaaaaactcttattcccaatgccagtaatgaagctattcagctcatgaccgaaatgttgaattgggatccaaagaaacgac

SEQ ID NO: 186220 - DNA, 120 bp, Artificial Sequence
  ENSG00000111837_10 (sequence is synthesized)
cgacagcaagccaggcattgaaacacccatattttcaagttggtcaggtattaggcccttcgtcaaatcatctggaatcaaaacagtctttaaataagcagctgcaaccattagaatcaa

SEQ ID NO: 186221 - DNA, 120 bp, Artificial Sequence
  ENSG00000111837_11 (sequence is synthesized)
agccatctttagttgaggtagagcctaagcctctgccggatataatcgatcaggttgttggacaaccccagccaaaaactagccagcagccactgcagcccattcagccgccacagaacc

SEQ ID NO: 186222 - DNA, 120 bp, Artificial Sequence
  ENSG00000111837_12 (sequence is synthesized)
tgagcgtccagcaacctccaaagcaacagagtcaggagaaaccgccacaaacgctattcccgagcatcgtcaaaaacatgccaactaagccaaatggcacactgagtcataaaagtggta

SEQ ID NO: 186223 - DNA, 120 bp, Artificial Sequence
  ENSG00000111837_13 (sequence is synthesized)
ggaggcgttggggtcagactatcttcaagtctggagatagctgggaagagttggaggactatgatttcggagcctcccattccaagaagccaagcatgggtgtttttaaagaaaaaagga

SEQ ID NO: 186224 - DNA, 120 bp, Artificial Sequence
  ENSG00000111837_14 (sequence is synthesized)
aaaaagattctccatttcggcttccagagccagtaccctcaggctccaaccactcgacaggggaaaacaagagcttacctgctgttacttccctaaaatctgattccgaattgtcaactg

SEQ ID NO: 186225 - DNA, 120 bp, Artificial Sequence
  ENSG00000111837_15 (sequence is synthesized)
ctccaacctctaaacagtactacttgaaacaatcaagatatcttccaggtgtgaatcccaagaaggtgtccttgatagccagtggaaaggaaataaacccccacacttggagcaaccagt

SEQ ID NO: 186226 - DNA, 120 bp, Artificial Sequence
  ENSG00000111837_16 (sequence is synthesized)
ttggggcagaacttgctttcaaaaggagcaatgcaggaaatcttggaagttatgctacttacaatcagtcaggatatattccttcctttctcaaaaaagaagtgcagtcagctggccaga

SEQ ID NO: 186227 - DNA, 120 bp, Artificial Sequence
  ENSG00000111837_17 (sequence is synthesized)
ggatccacttagcacctctcaatgcaacggcttcagaatatacctggaacacaaaaactggtcgggggcagttttcaggacgtacttataatcctacagcaaaaaacctaaatattgtga

SEQ ID NO: 186228 - DNA, 120 bp, Artificial Sequence
  ENSG00000111837_18 (sequence is synthesized)
accgtgcacagcccattccctcagtgcatgggaggacagactgggtggccaagtatggaggccaccggtaggagtctatggtgtgaaaccctacagcattgctccgtagagtacgtgcaa

SEQ ID NO: 186229 - DNA, 120 bp, Artificial Sequence
  ENSG00000111837_19 (sequence is synthesized)
gttccttgaccctgggaaatgtctacaaatgtctatttctactgagttctggaagaaatatgcaaaagtgggtacttggaagggcaaaaatcatcccctattttacttatttccaagaaa

SEQ ID NO: 186230 - DNA, 120 bp, Artificial Sequence
  ENSG00000111837_20 (sequence is synthesized)
tgcattttcttagcatcattgcccacagtgttgatatatgggtaggatgttacaaagtattgaataaactatttgccaaagtatgaagtatttgatctacaatttaataaatagtaaatc

SEQ ID NO: 186231 - DNA, 120 bp, Artificial Sequence
  ENSG00000111837_21 (sequence is synthesized)
caataagaacccttaaaaaaaaacaacttccagaaaatgtttagagtgttttagttttcatttgttgtatgtgcccaaatggtttagtagttcttcactttgctgtggttggcttaagag

SEQ ID NO: 186232 - DNA, 120 bp, Artificial Sequence
  ENSG00000111837_22 (sequence is synthesized)
gtttgtcttttgtttttgtacagcagttgggccaacctttgctggctgtcagctgtggttcttatttgactaaggctctgcgctgccattttgtcaatgacagaaagattgcaattattt

SEQ ID NO: 186233 - DNA, 120 bp, Artificial Sequence
  ENSG00000111837_23 (sequence is synthesized)
gtttttctactttgaagctatgggagcgatggtaatttcaatcttgagcaggatatctttttttttttttttgaggcgatgtttcactcttgtgtccaggctggagtgcagtggcactat

SEQ ID NO: 186234 - DNA, 69 bp, Artificial Sequence
  ENSG00000111837_24 (sequence is synthesized)
cttacaggtgtgagccacagtgcccagctttttttttttttttttagaaataaatttatctttaacata

SEQ ID NO: 186235 - DNA, 120 bp, Artificial Sequence
  ENSG00000111837_25 (sequence is synthesized)
ttttttttttttttttagaaataaatttatctttaacatagagaatatcaaagttatgccacttgattttagtggacggcttgtgttttgatcttgaccagtacagttcccatgaattca

SEQ ID NO: 186236 - DNA, 120 bp, Artificial Sequence
  ENSG00000111837_26 (sequence is synthesized)
aggtgacaatcaagcccaatggcttgatgacttcaatagtaaccaagtcaaggttctcttggctggacatcattaagaaagttctggaaactgtgtttgtttgatgctggttcattggac

SEQ ID NO: 186237 - DNA, 120 bp, Artificial Sequence
  ENSG00000111837_27 (sequence is synthesized)
ttttcaaattgttttgtttctgtgtccctaccagacacaaagatgaagtgtgccagctggttcccccaagccagctcatgctgctgaccactgactcagctctgaccttcacatttgctc

SEQ ID NO: 186238 - DNA, 120 bp, Artificial Sequence
  ENSG00000111837_28 (sequence is synthesized)
tgaagcaagtgcgttcagctgctggggcagtgatatcacatagtacatatattatttccttagtttatttccaaactggtattttaaatagacacttcgaactttgggctactctgttta

SEQ ID NO: 186239 - DNA, 120 bp, Artificial Sequence
  ENSG00000111837_29 (sequence is synthesized)
aatctgccactttctggactggaccttagtactgtaaattctttttaaagaataataatgttaccaactgctgagatttttatgtattttgtgactttgtaacaactgctattgtaataa

SEQ ID NO: 186240 - DNA, 120 bp, Artificial Sequence
  ENSG00000111837_30 (sequence is synthesized)
gtgtcatcttgtgggcattatacaaaggcatattataaaataataatgatatttttgtatagaagagtcaactgttcagatgtaagatgttgaaaaatgttaaaatctaaagagtaattt

SEQ ID NO: 186241 - DNA, 120 bp, Artificial Sequence
  ENSG00000111837_31 (sequence is synthesized)
atcctagtggtaatggttatatgtatttgtacagtttaaattaatgtctcaaagctgtgcagtcttttgttactgggacacttttaaactctgaataggcattaaaaaaaatatggctaa

SEQ ID NO: 186242 - DNA, 120 bp, Artificial Sequence
  ENSG00000111843_0 (sequence is synthesized)
attctctgaccgcccctctcccggtacactgcgcaggcacaacagagccgctcccctctcctcgccccgccaccgggacggagagcgcccgccgctgcatttccggcgacacctcgcagt

SEQ ID NO: 186243 - DNA, 120 bp, Artificial Sequence
  ENSG00000111843_1 (sequence is synthesized)
cattcctgcggcttgcgcgcccttgtagacagccggggccttcgtgagaccggtgcaggcctggggtagtctcctgtctggacagagaagagaaaaatgcaggacactggctcagtagtg

SEQ ID NO: 186244 - DNA, 120 bp, Artificial Sequence
  ENSG00000111843_2 (sequence is synthesized)
cctttgcattggtttggctttggctacgcagcactggttgcttctggtgggatcattggctatgtaaaagcaggcagcgtgccgtccctggctgcagggctgctctttggcagtctagcc

SEQ ID NO: 186245 - DNA, 120 bp, Artificial Sequence
  ENSG00000111843_3 (sequence is synthesized)
ggcctgggtgcttaccagctgtctcaggatccaaggaacgtttgggttttcctagctacatctggtaccttggctggcattatgggaatgaggttctaccactctggaaaattcatgcct

SEQ ID NO: 186246 - DNA, 120 bp, Artificial Sequence
  ENSG00000111843_4 (sequence is synthesized)
gttcaacagaccccattagcagaagtcatgttccagcttagactgatgaagaattaaaaatctgcatcttccactattttcaatatattaagagaaataagtgcagcatttttgcatctg

SEQ ID NO: 186247 - DNA, 120 bp, Artificial Sequence
  ENSG00000111843_5 (sequence is synthesized)
acattttacctaaaaaaaaagacaccaaacttggcagagaggtggaaaatcagtcatgattacaaacctacagaggtggcgagtatgtaacacaagagcttaataagaccctcatagagc

SEQ ID NO: 186248 - DNA, 120 bp, Artificial Sequence
  ENSG00000111843_6 (sequence is synthesized)
ttgattcttgtatattgatgttgtcttttctttctgtatctgtaggtaaatctcaagggtaaaatgttaggtgtcagctttcagggctctgaaaccccattccctgctctgaggaacagt

SEQ ID NO: 186249 - DNA, 120 bp, Artificial Sequence
  ENSG00000111843_7 (sequence is synthesized)
gtgaaaaaaagtcttttaggagatttacaatatctgttcttttgctcatcttagaccacagactgactttgaaattatgttaagtgaaatatcaatgaaaataaagtttactataaataa

SEQ ID NO: 186250 - DNA, 120 bp, Artificial Sequence
  ENSG00000111843_8 (sequence is synthesized)
gccctgcaggcgctgcggacaggggaagcacagagattccccgccgcgttccctggactcaggagctcgccgcgatgccccgccccactctccacccgctgaatgcagggcgcatgctgc

SEQ ID NO: 186251 - DNA, 120 bp, Artificial Sequence
  ENSG00000111843_9 (sequence is synthesized)
ctctcctcgccccgccaccgggacggagagcgcccgccgctgcatttccggcgacacctcgcagtcattcctgcggcttgcgcgcccttgtagacagccggggccttcgtgagaccgagt

SEQ ID NO: 186252 - DNA, 120 bp, Artificial Sequence
  ENSG00000111843_10 (sequence is synthesized)
ccccaggaaatcggtaccagtgttatcctcatggtacagtgaagaatactgagacttaggttgcgtagcttgcaggttggacacacttctttctgactgctggagagctgtgcttttaac

SEQ ID NO: 186253 - DNA, 120 bp, Artificial Sequence
  ENSG00000111845_0 (sequence is synthesized)
acgtgcgctgctgaatggagctggtcgctggttgctacgagcaggtcctctttgggttcgctgtacacccggagcccgaggcttgcggcgaccacgagcaatggactcttgtggctgact

SEQ ID NO: 186254 - DNA, 120 bp, Artificial Sequence
  ENSG00000111845_1 (sequence is synthesized)
tcactcaccatgctcacactgcctccttgtcagcagtagctgtaaatagtcgttttgtggtcactgggagcaaagatgaaacaattcacatttatgacatgaaaaagaagattgagcatg

SEQ ID NO: 186255 - DNA, 120 bp, Artificial Sequence
  ENSG00000111845_2 (sequence is synthesized)
gggctctagtgcatcacagtggtacaataacttgcctgaaattctatggcaacaggcatttaatcagtggagcggaagatggactcatctgtatctgggatgcaaagaaatgggaatgcc

SEQ ID NO: 186256 - DNA, 120 bp, Artificial Sequence
  ENSG00000111845_3 (sequence is synthesized)
tgaagtcaattaaagctcacaaaggacaggtgaccttcctttctattcacccatctggcaagttggccctgtcggttggtacagataaaactttaagaacgtggaatcttgtagaaggaa

SEQ ID NO: 186257 - DNA, 120 bp, Artificial Sequence
  ENSG00000111845_4 (sequence is synthesized)
gatcagcattcataaaaaatataaaacaaaatgctcacatagtagaatggtccccaagaggagagcagtatgtagttatcatacagaataaaatagacatctatcagcttgacactgcat

SEQ ID NO: 186258 - DNA, 120 bp, Artificial Sequence
  ENSG00000111845_5 (sequence is synthesized)
ccattagtggcaccatcacaaatgaaaagagaatttcctctgttaaatttctttcagagtctgtccttgcagtggctggagatgaagaagttataaggttttttgactgtgattcactag

SEQ ID NO: 186259 - DNA, 120 bp, Artificial Sequence
  ENSG00000111845_6 (sequence is synthesized)
tcagcatcgagtgatggtttcatcaaaatgtggaagcttaagcaggataagaaagttcccccatctttactctgtgaaataaacactaatgccaggctgacgtgtcttggagtgtggcta

SEQ ID NO: 186260 - DNA, 120 bp, Artificial Sequence
  ENSG00000111845_7 (sequence is synthesized)
gacaaagtggcagacatgaaagaaagccttcctccagctgcagagccttctcctgtaagtaaagaacagtccaaaattggcaaaaaggagcctggtgacacagtgcacaaagaagaaaag

SEQ ID NO: 186261 - DNA, 120 bp, Artificial Sequence
  ENSG00000111845_8 (sequence is synthesized)
cggtcaaaacctaacacaaagaaacgcggtttaacaggtgacagtaagaaagcaacaaaagaaagtggcctgatatcaaccaagaagaggaaaatggtagaaatgttggaaaagaagagg

SEQ ID NO: 186262 - DNA, 120 bp, Artificial Sequence
  ENSG00000111845_9 (sequence is synthesized)
aaaaagaagaaaataaaaacaatgcagtgaatcacagatgtctcctgaaagaactcttttagatgaaatcattctactcaaatgtaccttaattttttttttttccctgagtaaaagcaa

SEQ ID NO: 186263 - DNA, 120 bp, Artificial Sequence
  ENSG00000111845_10 (sequence is synthesized)
gaaatttcttcctttggaaaaaatatatatattaaaaaaccacttttagatggttttttttaaaaaaaaaaaaaaaactggtaaaattacttttggcagacagtgttttatgaattatgt

SEQ ID NO: 186264 - DNA, 120 bp, Artificial Sequence
  ENSG00000111845_11 (sequence is synthesized)
ttggcagacagtgttttatgaattatgtatcatgttgatatataatatgttaatgtgtcatgtaatttttactttgtacaaagcaaataaagatctttctcaaaatatactgtaaaataa

SEQ ID NO: 186265 - DNA, 120 bp, Artificial Sequence
  ENSG00000111846_0 (sequence is synthesized)
aaccctggggaactgcagaccaaagtgagagagggacgcaccgcatctccaggcacatccaaaaaggatggacgagacaccgaagcagaggatacaggaggattaaaggattcaggaaag

SEQ ID NO: 186266 - DNA, 120 bp, Artificial Sequence
  ENSG00000111846_1 (sequence is synthesized)
caagcagccctccggagaagctgtcgaaattcaagactggcaagagaagcaaattcaacctctcacaccgatcatttctcattccctgaaaagaagagattgtttccccagggaagtgaa

SEQ ID NO: 186267 - DNA, 120 bp, Artificial Sequence
  ENSG00000111846_2 (sequence is synthesized)
aataatgaacttttggaggtactgcttttttgctttcactctgctcagcgtggtcatttttgtgagattttacagtagccaattgagcccgccaaaaagttatgagaagctgaacagttc

SEQ ID NO: 186268 - DNA, 120 bp, Artificial Sequence
  ENSG00000111846_3 (sequence is synthesized)
cagtgaaaggtattttaggaaaactgcctgtaatcacgccttagagaaaatgccagtctttttgtgggaaaatatattaccatcacctttgcgaagtgtcccttgcaaggattacctgac

SEQ ID NO: 186269 - DNA, 120 bp, Artificial Sequence
  ENSG00000111846_4 (sequence is synthesized)
ccagaatcactacatcacaagtcccctgtcggaagaagaggctgcattccctttggcctatgtcatggtcatccataaggactttgacacctttgaaaggctctttagggctatctatat

SEQ ID NO: 186270 - DNA, 120 bp, Artificial Sequence
  ENSG00000111846_5 (sequence is synthesized)
gccccaaaatgtctactgtgttcacgtggatgagaaagccccagctgagtataaggaatctgtgaggcagttactgagttgcttccaaaatgctttcattgcttcaaagacagagtctgt

SEQ ID NO: 186271 - DNA, 120 bp, Artificial Sequence
  ENSG00000111846_6 (sequence is synthesized)
ggtttatgcaggcatttccagactccaggctgacctgaactgtctgaaagaccttgtcgcctctgaggttccctggaagtacgtcatcaacacctgtggacaagacttccccctgaaaac

SEQ ID NO: 186272 - DNA, 120 bp, Artificial Sequence
  ENSG00000111846_7 (sequence is synthesized)
caaccgggagatagttcagcatctgaaaggatttaaagggaaaaatatcaccccaggggtgctgcctcctgaccatgcaattaagcgaactaaatatgtccaccaagagcatacagataa

SEQ ID NO: 186273 - DNA, 120 bp, Artificial Sequence
  ENSG00000111846_8 (sequence is synthesized)
aggtggcttttttgtgaaaaatactaatattttgaaaacttcacctccacatcagctgaccatctactttggcactgcctatgtggcgcttaccagagactttgtcgactttgttctacg

SEQ ID NO: 186274 - DNA, 120 bp, Artificial Sequence
  ENSG00000111846_9 (sequence is synthesized)
tgaccaaagggccattgatctactacaatggtcaaaagatacctatagtcctgatgagcatttctgggtgacacttaatagggtttcaggtgttcctggctctatgccaaatgcatcctg

SEQ ID NO: 186275 - DNA, 120 bp, Artificial Sequence
  ENSG00000111846_10 (sequence is synthesized)
gactggaaacctcagagctataaagtggagtgacatggaagacagacacggaggctgccacggccactatgtacatggtatttgtatctatggaaacggagacttaaagtggctggttaa

SEQ ID NO: 186276 - DNA, 120 bp, Artificial Sequence
  ENSG00000111846_11 (sequence is synthesized)
ttcaccaagcctgtttgctaacaagtttgagcttaatacctacccccttactgtggaatgcctagaactgaggcatcgcgaaagaaccctcaatcagagtgaaactgcgatacaacccag

SEQ ID NO: 186277 - DNA, 120 bp, Artificial Sequence
  ENSG00000111846_12 (sequence is synthesized)
ctggtatttttgagctattcatgagctactcatgactgaagggaaactgcagctgggaagaggagcctgtttttgtgagagacttttgccttcgtaatgttaaccgtttcaggaccacgt

SEQ ID NO: 186278 - DNA, 120 bp, Artificial Sequence
  ENSG00000111846_13 (sequence is synthesized)
ttatagcttcaggacctggctacgtaattatacttaaaatatccactggacactgtgaaatacactaacaggatggctgggtagagcaatctgggcactttggccaattttagtcttgct

SEQ ID NO: 186279 - DNA, 120 bp, Artificial Sequence
  ENSG00000111846_14 (sequence is synthesized)
gtttcttgatgctcacctctatattagtttattgttaggatcaatgataaatttaaatgacctcagatctttgcaccagatactcatcatatacaaatgttttagtaaaaaagagaattg

SEQ ID NO: 186280 - DNA, 120 bp, Artificial Sequence
  ENSG00000111846_15 (sequence is synthesized)
tagataatactgtctaggaaaataagaattaggtttctttgaagaaggaatcttttataacaccttaacagtcaccactgtgctcaaccagacagatagtgaaacagctttctgggtaat

SEQ ID NO: 186281 - DNA, 120 bp, Artificial Sequence
  ENSG00000111846_16 (sequence is synthesized)
tcaccaatttcctttaaaacataagctacctgaatggagaatacatcttgtttctgagtttcaacactagcatttttggcttactcatggacaaagttctgtatatagtataaagtcatt

SEQ ID NO: 186282 - DNA, 120 bp, Artificial Sequence
  ENSG00000111846_17 (sequence is synthesized)
tatgctttaagacagaattcactgtctgttgcttcagtaaaaggacctcggggaataaaacatttctctcttatatgccagaatgtaggctggtccctatgtcatgtcttccattaagaa

SEQ ID NO: 186283 - DNA, 120 bp, Artificial Sequence
  ENSG00000111846_18 (sequence is synthesized)
cactaaaaagtccttgcaagaatggagatatgcattcaagagaggtgctatcacatagatctagtctgaagtctggaacactttcctcttctatgacccctctctccccagtattatctt

SEQ ID NO: 186284 - DNA, 120 bp, Artificial Sequence
  ENSG00000111846_19 (sequence is synthesized)
acttgcaaaatggagaccaaattctatcctgtgaggcttttaattgcaccatagtatgctctgagtagctttacactgcctggtactgatagtagtggctcgatttttaagagccttcaa

SEQ ID NO: 186285 - DNA, 120 bp, Artificial Sequence
  ENSG00000111846_20 (sequence is synthesized)
ttgtagatgaacatctctgttatttatccctcattcatccatccgttcattcattcagccttcaatcaacatctcttgagtgtctattatgtacaggacatgtactgagacaaaaaggaa

SEQ ID NO: 186286 - DNA, 120 bp, Artificial Sequence
  ENSG00000111846_21 (sequence is synthesized)
acataagagctttttcactctaaaaatcttggcaataatgtcaacaccagaaagcctcctctggagaatcttacagagtgattgtagtttaatacaggaacacacagggctgtgtagcat

SEQ ID NO: 186287 - DNA, 120 bp, Artificial Sequence
  ENSG00000111846_22 (sequence is synthesized)
gataccaggcccaggagatcagtaattacaaattaagggttaaatcagagattattcaacagagagggagaaaggaggagacagagggaggacctgttgtgttccagccattctggtatt

SEQ ID NO: 186288 - DNA, 120 bp, Artificial Sequence
  ENSG00000111846_23 (sequence is synthesized)
cctttatgtatctaatttcattcaaacctcacaacagtcttgtgaggcccttatataattactcccattttgcagatgaagtaactgaggcttagaaaggttaatagcaccggggaacaa

SEQ ID NO: 186289 - DNA, 120 bp, Artificial Sequence
  ENSG00000111846_24 (sequence is synthesized)
tttctctgggtgagaattgggactctgttgctggtcttctcagttcatttcctgaggtggatttactgagagaaggtgaaataaagccatatttagtataccagagaaggtagattttaa

SEQ ID NO: 186290 - DNA, 120 bp, Artificial Sequence
  ENSG00000111846_25 (sequence is synthesized)
gaatggtctcagtgttaatactgagaaaaagtcctgtcagttcagaaaaaatgtgaagtctactttagtattcctgtaatactaaaccgttgagtttctaaatatttatttattctaaca

SEQ ID NO: 186291 - DNA, 120 bp, Artificial Sequence
  ENSG00000111846_26 (sequence is synthesized)
aaaagcaattactacaaatggatgacacatttaatgaacacaattttattttttttctgtaactgtgcttgttgaatgtcaatcatatttaaagggaatgactttgaagtaaaacctttt

SEQ ID NO: 186292 - DNA, 120 bp, Artificial Sequence
  ENSG00000111846_27 (sequence is synthesized)
ttcttgctactgaaaaaaatggagttgttttgggtggtaaagtgttaaggaatagggacagctggtcacacaaggaactcttgaaggccacatgtgaaaacctgtcacttgcacagaggc

SEQ ID NO: 186293 - DNA, 120 bp, Artificial Sequence
  ENSG00000111846_28 (sequence is synthesized)
cagtcccactaaggtgaccagagtgggctccaagcacaaactgccattggctatagatgggactgtgtccccccaaaattcatgtgttggagccttaaccctcaatgtgatggtatttga

SEQ ID NO: 186294 - DNA, 120 bp, Artificial Sequence
  ENSG00000111846_29 (sequence is synthesized)
ttgagatggggcctttggtaagggaagtttagatgaggtcacgagggtaggaccctcatgatgggatgagtccccttacaagacctctggcttgggccgggcgtggtggctcacacctgt

SEQ ID NO: 186295 - DNA, 65 bp, Artificial Sequence
  ENSG00000111846_30 (sequence is synthesized)
gaggccaaggcaggtagatcacttgatgccaggagttccagaccaggtttgtggcatgtgcctgt

SEQ ID NO: 186296 - DNA, 120 bp, Artificial Sequence
  ENSG00000111846_31 (sequence is synthesized)
gagactttgtcccaaaacaaaataggtgaggggatagcgaatgcactcagggtcagcagtggagtttaaaaattgtctcttttcaacttatttaaatgacagcacctgagaagaggaacc

SEQ ID NO: 186297 - DNA, 120 bp, Artificial Sequence
  ENSG00000111846_32 (sequence is synthesized)
gttttacactggatgtttctcatgtagaacaagaaatctttctggaattgatgtttacatgtctgttgttggtcatctctcctgtgtcttaaatactttaatgttggaagagcatagtgt

SEQ ID NO: 186298 - DNA, 120 bp, Artificial Sequence
  ENSG00000111846_33 (sequence is synthesized)
ttgggctagtgggtttctgacagcccatgggaatgccctgaaactactgtatctgatgtttgttttcgatgaggttccatgttttgttttcttgggaataaattaatatattgttttcca

SEQ ID NO: 186299 - DNA, 120 bp, Artificial Sequence
  ENSG00000111846_34 (sequence is synthesized)
actgcgctcattccctgaatggcagtaaccagggggcgggggtggcatgggaaatgaaagaaagagatatgggaaactaaatctgccgggggaaagagagttaccggagttttagcaaaa

SEQ ID NO: 186300 - DNA, 120 bp, Artificial Sequence
  ENSG00000111846_35 (sequence is synthesized)
cagctagcagatgcaaacggggaggcagagggaggagggaaggctgggcttcagcaacctgccacggggatttaaacaaaggaggtttgagagaggcgggatctggctgtaatatcggca

SEQ ID NO: 186301 - DNA, 120 bp, Artificial Sequence
  ENSG00000111846_36 (sequence is synthesized)
cagggacagagacagcagctggactctcgggatgaaacggaatcgattcccagcgtctccaacagggcaggagtgagtggagtatgttgcaaaataagaactcagagaaacgagtgagtt

SEQ ID NO: 186302 - DNA, 120 bp, Artificial Sequence
  ENSG00000111846_37 (sequence is synthesized)
tggaaaaaagacttacagattttgacggtctcttgacatttcacccttctttgaggcatgcctttatcaatgcgttacctcttcataatttctgtctctagtgtaattatttttatcgtc

SEQ ID NO: 186303 - DNA, 120 bp, Artificial Sequence
  ENSG00000111846_38 (sequence is synthesized)
ttctctgtgttcaattttgggggagatccaagcttccaaaggctaaatatctcagaccctttgaggctgactcaagtttgcacatcttttatcaatggaaaaacacgtttcctgtggaaa

SEQ ID NO: 186304 - DNA, 120 bp, Artificial Sequence
  ENSG00000111846_39 (sequence is synthesized)
aacaaactaatgatccatgagaagtcttcttgcaaggaatacttgacccagagccactacatcacagcccctttatctaaggaagaagctgactttcccttggcatatataatggtcatc

SEQ ID NO: 186305 - DNA, 120 bp, Artificial Sequence
  ENSG00000111846_40 (sequence is synthesized)
catcatcactttgacacctttgcaaggctcttcagggctatttacatgccccaaaatatctactgtgttcatgtggatgaaaaagcaacaactgaatttaaagatgcggtagagcaacta

SEQ ID NO: 186306 - DNA, 120 bp, Artificial Sequence
  ENSG00000111846_41 (sequence is synthesized)
ttaagctgcttcccaaacgcttttctggcttccaagatggaacccgttgtctatggagggatctccaggctccaggctgacctgaactgcatcagagatctttctgccttcgaggtctca

SEQ ID NO: 186307 - DNA, 120 bp, Artificial Sequence
  ENSG00000111846_42 (sequence is synthesized)
tggaagtacgttatcaacacctgtgggcaagacttccccctgaaaaccaacaaggaaatagttcagtatctgaaaggatttaaaggtaaaaatatcaccccaggggtgctgcccccagct

SEQ ID NO: 186308 - DNA, 120 bp, Artificial Sequence
  ENSG00000111846_43 (sequence is synthesized)
catgcaattggacggactaaatatgtccaccaagagcacctgggcaaagagctttcctatgtgataagaacaacagcgttgaaaccgcctcccccccataatctcacaatttactttggc

SEQ ID NO: 186309 - DNA, 120 bp, Artificial Sequence
  ENSG00000111846_44 (sequence is synthesized)
tctgcctatgtggctctatcaagagagtttgccaactttgttctgcatgacccacgggctgttgatttgctccagtggtccaaggacactttcagtcctgatgagcatttctgggtgaca

SEQ ID NO: 186310 - DNA, 120 bp, Artificial Sequence
  ENSG00000111846_45 (sequence is synthesized)
atatctctccaggcagtattcacatgctttaaactgaagctcgtagcttggcagtgcagtttaagcaaataaactcaggctgttgaacacaatgattaacaggaagcaggggaggggaca

SEQ ID NO: 186311 - DNA, 120 bp, Artificial Sequence
  ENSG00000111846_46 (sequence is synthesized)
tagttactagactctggccgggacaagaggctgaggttaaggtcttagagccgatgacttgcagaatggtcacctcacccacttgtaatttcatggtgggaacaggtggaccccctggaa

SEQ ID NO: 186312 - DNA, 120 bp, Artificial Sequence
  ENSG00000111846_47 (sequence is synthesized)
tcagaacctctctgaggacatctgtttttgtgtagacacaggttgcaggttagcaggagaacaggcaagccaaatgcaaaggagccacttcagaaatgtgtcacagaaaagtgaaaatgc

SEQ ID NO: 186313 - DNA, 120 bp, Artificial Sequence
  ENSG00000111846_48 (sequence is synthesized)
aacctagtggtaagtgaagaggggaagaagaaagaaaaaggaccagaaccgtgaactgaagggacagggaacagccagacgagagcttcagccatcacgaggatgatttcggaacctgga

SEQ ID NO: 186314 - DNA, 120 bp, Artificial Sequence
  ENSG00000111846_49 (sequence is synthesized)
gaaaatgtaagttaaatatatctacactctgatcctatctcaagagagagatattttactcatttcctggttgtgaatgatgggctcttggaagcactgtctttttagcgcgtctcttat

SEQ ID NO: 186315 - DNA, 120 bp, Artificial Sequence
  ENSG00000111846_50 (sequence is synthesized)
ctctgccctgatttttgtatttgtttacaatactgagttatgggagaataaacgttttctgagggcagctctgtccaatgcttcactgttagcagaagcctgtcatcagatttttgaggg

SEQ ID NO: 186316 - DNA, 120 bp, Artificial Sequence
  ENSG00000111846_51 (sequence is synthesized)
gaaagttttttacccaacagaaaatgcattgaaaactacccttgatgaagctacctgctatgagtacatggttcgaagccactatgtaacagaaacactctctgaagaagaggctgggtt

SEQ ID NO: 186317 - DNA, 120 bp, Artificial Sequence
  ENSG00000111846_52 (sequence is synthesized)
ccctttagcttacacagtgaccatccacaaagacttcggcacttttgagaggctcttcagggcgatttatatgccccaaaatgtctactgtgtgcacctggatcagaaggcgacggatgc

SEQ ID NO: 186318 - DNA, 120 bp, Artificial Sequence
  ENSG00000111846_53 (sequence is synthesized)
ctttaaaggtgcagtgaaacagttactcagctgcttcccaaatgcttttctggcttccaagaaggagtcggttgtctatggggggatctccaggctccaggctgacctgaactgcctgga

SEQ ID NO: 186319 - DNA, 120 bp, Artificial Sequence
  ENSG00000111846_54 (sequence is synthesized)
agaccttgtggcctctgaagttccctggaagtatgtcatcaacacctgcgggcaagactttcccctgaaaaccaacagggaaatagttcagtatctgaagggatttaaagggaaaaatat

SEQ ID NO: 186320 - DNA, 120 bp, Artificial Sequence
  ENSG00000111846_55 (sequence is synthesized)
cacccccggagtgctgcctcctgaccacgctgttggacggactaaatacgtccaccaagaactgttaaaccacaaaaattcctacgtgattaaaacaacaaaattaaaaactcctcctcc

SEQ ID NO: 186321 - DNA, 120 bp, Artificial Sequence
  ENSG00000111846_56 (sequence is synthesized)
tcatgacatggtgatttactttggcacggcctacgtggctctcacaagggactttgctaacttcgtcctccaagaccagctcgcacttgacttactctcctggtccaaggacacctacag

SEQ ID NO: 186322 - DNA, 120 bp, Artificial Sequence
  ENSG00000111846_57 (sequence is synthesized)
cttcccactttcacattccagcctctgttattccacttaaaacgctagggttaaactgcgtttaccttaaacaggcttactgtgttcactgctggacgcctctgggcaatcttaccctcc

SEQ ID NO: 186323 - DNA, 120 bp, Artificial Sequence
  ENSG00000111846_58 (sequence is synthesized)
tgggaactgagagagacaatgctaggagccagaaacatgaggaatacatgagctcggcgccaatggaacatgctttcacaccgggtgcagctaaccaccacatcatacaaaactcgtcgc

SEQ ID NO: 186324 - DNA, 120 bp, Artificial Sequence
  ENSG00000111846_59 (sequence is synthesized)
aggtggaggtcagcgtgctgggaaactggtggagggaggaaactgcggggagctggtcttctcgtgttacctctgttaaatcgctgacagcagtttaaggtccaataggctggtactcaa

SEQ ID NO: 186325 - DNA, 120 bp, Artificial Sequence
  ENSG00000111846_60 (sequence is synthesized)
ggtgacactcaataggattccaggaatgatccctctcttgtcacccaggctggaatacagtagtactcaaactcactgcagcctttagctcctaggctcaagcaatcctcccacttcagc

SEQ ID NO: 186326 - DNA, 120 bp, Artificial Sequence
  ENSG00000111846_61 (sequence is synthesized)
caagagtgcatcaccatgcttggctaatttaaaaaaaaaaattgtggagatggtgtctttctgtgttgcctaggctggagtgcagatgtgcaatcattgttcactgcagtctcaaactcc

SEQ ID NO: 186327 - DNA, 120 bp, Artificial Sequence
  ENSG00000111846_62 (sequence is synthesized)
gataactggtttacgtctgttctttgtgttgctatagacttgttgtttgggtttgtgttatctttttgatctgcaggactaatagtaaaagtctgtagcttcagttatagactaagatta

SEQ ID NO: 186328 - DNA, 120 bp, Artificial Sequence
  ENSG00000111846_63 (sequence is synthesized)
ctgtagcttcagttatagactaagattactactctgccagaagtagtgaataaagaatcaactgggtgggatgaatcacgtttcacttgtgctgcccaggctggagtgcagtggcactat

SEQ ID NO: 186329 - DNA, 120 bp, Artificial Sequence
  ENSG00000111846_64 (sequence is synthesized)
ttcaagcgattctgctgtctcagcctcccaagtatggattacaggacaaatggaaggaaagatttttggaagcagcttcttgtgtccgacccgctgtgatcagctgctactcccaggtgt

SEQ ID NO: 186330 - DNA, 120 bp, Artificial Sequence
  ENSG00000111846_65 (sequence is synthesized)
aaagagtggaaaaaatgggacaaacttctttacggttttaaatgtcaaattaaaaaaaaaatttcatctgtaaaatggtaaaatggagatgtgttatatcacccactcttgtgaaccgct

SEQ ID NO: 186331 - DNA, 120 bp, Artificial Sequence
  ENSG00000111846_66 (sequence is synthesized)
ttgtgaaccgctctgttcacaggacaaaagaccgaaggaacactggccatataaataaaaacgtgaccgagcacagtggctcaagcctgtaatcacagcactttgggaggcggaggcagg

SEQ ID NO: 186332 - DNA, 86 bp, Artificial Sequence
  ENSG00000111846_67 (sequence is synthesized)
cggactccagacactaggattacaggtgttcctggctctatgccaaatgcatcctggactggaaacctcagagctataaagtggag

SEQ ID NO: 186333 - DNA, 120 bp, Artificial Sequence
  ENSG00000111846_68 (sequence is synthesized)
tgggtgacactcaacaggattcccggtgttcctggctctatgccaaatgcatcctggactggaaacctcagagctataaagtggagtgacatggaagacagacacggaggctgccacggt

SEQ ID NO: 186334 - DNA, 120 bp, Artificial Sequence
  ENSG00000111846_69 (sequence is synthesized)
agagagaattgctgctatatttagaccaatctgttagttattggagaagccagaggcttcaagacacagtccttcaaaaataagtttaaacatctcattgatgttctctaacttataatt

SEQ ID NO: 186335 - DNA, 120 bp, Artificial Sequence
  ENSG00000111846_70 (sequence is synthesized)
gttacctctgttaaatcgctgacagcagtttaaggtccaataggctggtactcaaatgggctgcgtggatgttttatatttccagaacctagcacagtgccgggcataaaacaatgctag

SEQ ID NO: 186336 - DNA, 120 bp, Artificial Sequence
  ENSG00000111850_0 (sequence is synthesized)
ggggcgtctcgggcgaggagaggaggtgaccccgcgaaagataataaatcatcattgatcaagatgtcttcagcacctgagcctccaacattcaaaaaggaaccacccaaagagaaagag

SEQ ID NO: 186337 - DNA, 120 bp, Artificial Sequence
  ENSG00000111850_1 (sequence is synthesized)
tttcaaagcccagggctcagaggggtgcgcacaacaaccttatttcgtgctgtgaatccagagctcttcattaaacctaacaaacctgtaatggctttcggattggtaactctttcactt

SEQ ID NO: 186338 - DNA, 120 bp, Artificial Sequence
  ENSG00000111850_2 (sequence is synthesized)
tgcgtggcatatattggttatctacatgcaatacaagagaataaaaaggacctctatgaagctattgatagtgaggggcacagttatatgaggcggaaaacatccaaatgggattagtag

SEQ ID NO: 186339 - DNA, 120 bp, Artificial Sequence
  ENSG00000111850_3 (sequence is synthesized)
tgctggttagtgcagatggacctttattaaaggttctgaaatcttcaaatgaaagaccttgtgagtgtacagtatcatgtttcttgttctagaacatgctaatgaagagagaagatagca

SEQ ID NO: 186340 - DNA, 120 bp, Artificial Sequence
  ENSG00000111850_4 (sequence is synthesized)
gttgcaaccagacaactgtcgtaaattttgtcctttcacagctgcagccattatctcattctttttccacagagtgagcgtcataatatttttctttccttacctcttataaaagtgcca

SEQ ID NO: 186341 - DNA, 120 bp, Artificial Sequence
  ENSG00000111850_5 (sequence is synthesized)
tgagaatggaagttgtttttgttaattattaaattctgtataataaaagtacccatgctgttaaatttgcatgatgttttaaatattttaagatgaattatgccggtgcagctgtcgtga

SEQ ID NO: 186342 - DNA, 120 bp, Artificial Sequence
  ENSG00000111850_6 (sequence is synthesized)
aagtttacttgtgttttgctacttgcaaaggaaatgttcatgttctccctggcatagaacctatatttttaaagaaagataaatagaaattttaaggcctgaagtcaatattaaaaatat

SEQ ID NO: 186343 - DNA, 120 bp, Artificial Sequence
  ENSG00000111850_7 (sequence is synthesized)
gagatatgagaaactgagttggctctgacaagtagtttttatagtgtcacaaatggttcatatatttcagtttccattttagctatttttgggacagaattttattttaatggaaaagat

SEQ ID NO: 186344 - DNA, 120 bp, Artificial Sequence
  ENSG00000111850_8 (sequence is synthesized)
ccttccactcagctactaaaataaggattaagaatatcccagagtaattggagtttttctttaaaaaaaaaaaaaaagtatgttttactgaggtatgatgattttgactacaactaaatg

SEQ ID NO: 186345 - DNA, 120 bp, Artificial Sequence
  ENSG00000111850_9 (sequence is synthesized)
atgttaattaattttgtttatgttaatttgtgttaattaatgttactgtaatgttataaacataagaccaagtgttcttatagttatttaaaaactacaactactcaatggataaggaat

SEQ ID NO: 186346 - DNA, 120 bp, Artificial Sequence
  ENSG00000111850_10 (sequence is synthesized)
caactactcaatggataaggaatagataaggtctccttattgtaccttttttttcttttgaagtttatatgccagcaggcctttttgtttttttccttttcagaatgtttcttattctct

SEQ ID NO: 186347 - DNA, 120 bp, Artificial Sequence
  ENSG00000111850_11 (sequence is synthesized)
gaagcatcagcattttgaagtgtcttttatggaagtggggacagaaatgggggtaaaaatgagtgtaaacaaagcctagccctacggtcagtacccactggaggtgagaagcagaatggc

SEQ ID NO: 186348 - DNA, 120 bp, Artificial Sequence
  ENSG00000111850_12 (sequence is synthesized)
cttggttgtcctggcacctggcccaggggcctaggacagaggtcaaggctaggcccctgtgtctggccagattctgccttatagaattcaaatctttcttacaagggttctggacccgtt

SEQ ID NO: 186349 - DNA, 120 bp, Artificial Sequence
  ENSG00000111850_13 (sequence is synthesized)
tcatttctagatatatacctaattctccaaatcattgtcattgggcctcagtagtaaatcttacctctgaagtcttgcttcagtcgctattaatattaccaagtaataataacagcacag

SEQ ID NO: 186350 - DNA, 120 bp, Artificial Sequence
  ENSG00000111850_14 (sequence is synthesized)
gcagagtttatcataatgttatttttaatttgtcatactttattatggttttgtaaggtacatgaaaatgtaattatgtgtgatttgtaggtattaaagaacttagctaattgaatttac

SEQ ID NO: 186351 - DNA, 120 bp, Artificial Sequence
  ENSG00000111850_15 (sequence is synthesized)
atgaaactaaataaaatctttactactgagccccaaatatgtatttgctatgcctgtctgtataatgtacttcatatagtttaaaatgcacttcagtgatacaaaatcccttttaaagac

SEQ ID NO: 186352 - DNA, 120 bp, Artificial Sequence
  ENSG00000111850_16 (sequence is synthesized)
tcttttgtttttgttttccctgtgtattttggctatcacaaaactagggttcttctgtttttaacttatgcatttaatgacacattgccatcttttagaattttttactattcaacagaa

SEQ ID NO: 186353 - DNA, 120 bp, Artificial Sequence
  ENSG00000111850_17 (sequence is synthesized)
taagctgatgtttggtggcagaggagttattagttgcgtgaactgtcaagagattgcagtgcaggagggcaacagaaactgtacaaggtgcagacttgagtcatgtaagatctatgtgaa

SEQ ID NO: 186354 - DNA, 120 bp, Artificial Sequence
  ENSG00000111850_18 (sequence is synthesized)
tgaaccaaagtaactagagtcagtcaagcacaaagctgtgaaaagtagtgtgtggaaagaatcatactgaattttaggaacaagtacctgactatgatactttttacagagtgactacaa

SEQ ID NO: 186355 - DNA, 120 bp, Artificial Sequence
  ENSG00000111850_19 (sequence is synthesized)
gttgtaggacagtctttgtgtgtgctgagtgtcaacagctgcctgcctatgtgttgatgttttcatcctttctttgttgaatgagggtataaccatcaaaaataaaatacctttcaaata

SEQ ID NO: 186356 - DNA, 120 bp, Artificial Sequence
  ENSG00000111850_20 (sequence is synthesized)
gaagcggggcggggcgtctcgggcgaggagaggaggtgaccccgcgaaaggaggatggacagaagaaaaaggtaaagaacattttaccagagagaaacaaatgaagcaaataccccttag

SEQ ID NO: 186357 - DNA, 120 bp, Artificial Sequence
  ENSG00000111850_21 (sequence is synthesized)
tttagaccttttttacaggcacctgtgaaatgttctactctcctctatttttttttttaagaaaagataaataacagtttcttaatcatgcatggaaaagggaacaagaagtgggtgatg

SEQ ID NO: 186358 - DNA, 120 bp, Artificial Sequence
  ENSG00000111850_22 (sequence is synthesized)
ggtaagcggcggcttcggtggtgttgagtggctgggcgccggcctggaggggccagggcggccgcaccatcacgctcccgtctctgcccttcccagctgccctgccggtctccctcccag

SEQ ID NO: 186359 - DNA, 120 bp, Artificial Sequence
  ENSG00000111850_23 (sequence is synthesized)
ggagggagcgtcctctcggatagcccaaatctttgcctctccgtggactccctgtacccgcaccccaagtcggtgaagctctctggccccacagagcccatttcccgtactcaccttgcg

SEQ ID NO: 186360 - DNA, 120 bp, Artificial Sequence
  ENSG00000111850_24 (sequence is synthesized)
gaccccgcgaaagtatatttattgactgcagatggaagcacattgctaaggaatggaaagctgcaagatagaacatgcccttcacctgcgtggttgcatagaaaccagtcgtttgtccaa

SEQ ID NO: 186361 - DNA, 120 bp, Artificial Sequence
  ENSG00000111850_25 (sequence is synthesized)
atcttaaagaactcaagtggaaagcatacttaaaaatgtaaaggttagaatcacaaactacagtttgaattgaaatgactgaaagattgtttcaagaatataagaattctatctaaaaga

SEQ ID NO: 186362 - DNA, 88 bp, Artificial Sequence
  ENSG00000111850_26 (sequence is synthesized)
cttcagcagtgtatgtatgaggaagtgcccacaggagtgtgcctccgggatgaagcaaagcaacagagatccaagcaggagaggctgc

SEQ ID NO: 186363 - DNA, 120 bp, Artificial Sequence
  ENSG00000111850_27 (sequence is synthesized)
gagatccaagcaggagaggctgcaacaggctggagatatgcagagtcttcatgggggagtgttcttccagctccctgccccacatccacccactgtcctcagacctcagctggggctgca

SEQ ID NO: 186364 - DNA, 120 bp, Artificial Sequence
  ENSG00000111850_28 (sequence is synthesized)
ccccaaccctgagtgtgacagagagaagatgagtgttagagatcatgatcctgaagtgctgacgagaaattcaggaagcctgcaagcctagaggtcagctcagtggccaccttctgaagc

SEQ ID NO: 186365 - DNA, 120 bp, Artificial Sequence
  ENSG00000111850_29 (sequence is synthesized)
ccagggcaccattggaagctgcctagtttgaggcacggatggaagaggaaaacactgagaacaacatccctcttcctgaggaatgcatacaagggtgcttgggggtgggttggggatccc

SEQ ID NO: 186366 - DNA, 120 bp, Artificial Sequence
  ENSG00000111850_30 (sequence is synthesized)
agtaaagggaaacagacatgaacactaggtgacatggagtgttaggggcgctatggtagaagtctgcagagagtgcaatgggcgtccaaatgaggaagtgatcacttgcacaagagtggg

SEQ ID NO: 186367 - DNA, 120 bp, Artificial Sequence
  ENSG00000111850_31 (sequence is synthesized)
aggcttggctggaaaggcttctctgaataggatgacatttgatctgtgttttgaagggcatcgttggcaaggtaagtaatccaattaaaggaggttgcctcagctaaagcacagtatgct

SEQ ID NO: 186368 - DNA, 120 bp, Artificial Sequence
  ENSG00000111850_32 (sequence is synthesized)
caaaggtgcggatcatttgaaaatttgagttcaggtgcagtaggggtaaggtaagtatccaacagaattttctacaatgatggaaatgttctatattgtcactgtccaatacggtagcct

SEQ ID NO: 186369 - DNA, 120 bp, Artificial Sequence
  ENSG00000111850_33 (sequence is synthesized)
ctagccacatttggccagtacaactgaagaattgaatattaactttcatttaattctagctaatttaaatttaaatagtttcatcagttagtggctaccatattgaacagtgcaggttta

SEQ ID NO: 186370 - DNA, 120 bp, Artificial Sequence
  ENSG00000111850_34 (sequence is synthesized)
gagataaacagaggccagttgcaggagggtcttgcatcccattgaggaggactgaattttcttctgcagggccttctgtggtctgcagaaagggcagtacacaggcagtaatattatcag

SEQ ID NO: 186371 - DNA, 120 bp, Artificial Sequence
  ENSG00000111850_35 (sequence is synthesized)
ctttgcctgtgggagtgccccagcctggaagcagataatacagttaggagattcccataacctgcctgagtgagagcattagtaattagggaaggaaatggatgtgagacttgctgagaa

SEQ ID NO: 186372 - DNA, 120 bp, Artificial Sequence
  ENSG00000111850_36 (sequence is synthesized)
caggcttagtgacaggtctgagtgtgaggggagagggagtgggggaagtgggatcaggtttgagccagctattaaatcaatgccaattcatcccataaagaatgcagagagtgggacagg

SEQ ID NO: 186373 - DNA, 120 bp, Artificial Sequence
  ENSG00000111850_37 (sequence is synthesized)
tttggagagtgtaaggaacatggctgtgctgtagccaagcaggcatagggtagcaggaataggccgaggtaaacagcctagacatctcagcgggattggggtgcaagtgcacagtcctgt

SEQ ID NO: 186374 - DNA, 120 bp, Artificial Sequence
  ENSG00000111850_38 (sequence is synthesized)
gtcttatatagtcacagccatgtaggcataacatagagcagctccccacctggctctcagccactagtgtttgtgtagtgtataaatgtaacactgaccctgtgaaggggctgctgaata

SEQ ID NO: 186375 - DNA, 120 bp, Artificial Sequence
  ENSG00000111850_39 (sequence is synthesized)
gaagctcttcttctgaaacctgtaatttcaatgtcttttcctttcccttcaaaattgtaatttccttctgaaatcattctaaccctttagtaaagacattaatttaaagatgtttaaaaa

SEQ ID NO: 186376 - DNA, 120 bp, Artificial Sequence
  ENSG00000111850_40 (sequence is synthesized)
aaattgcttattaagcctcaggtttcttcacttacaaaatgaggataataattgcacctggtccacagggtcatgacatggattcagtagaaagctcagcagtgtacctgacttaacagt

SEQ ID NO: 186377 - DNA, 120 bp, Artificial Sequence
  ENSG00000111850_41 (sequence is synthesized)
tgttcacactaagatctttaaactttacaatggtgaaaaggcaatatgcattccatagaactcatacaaccattttgttcttaactttcagtaaaatattcaataaatattcaataaact

SEQ ID NO: 186378 - DNA, 120 bp, Artificial Sequence
  ENSG00000111850_42 (sequence is synthesized)
aattcaaaaaattactttattacaaaataggctttgtgttagaggattttgcccaactgcaggctaatggaagtgttctgagcacattcaaggtaggctaggctgagctgtgatgttcag

SEQ ID NO: 186379 - DNA, 120 bp, Artificial Sequence
  ENSG00000111850_43 (sequence is synthesized)
tggattaggtattaaatgcatttttaacttacaataatttcaacttataatgaatttatcaggacttgatcccgccataagtcaaggagcatctgtacaccaactgttggttattatttt

SEQ ID NO: 186380 - DNA, 120 bp, Artificial Sequence
  ENSG00000111850_44 (sequence is synthesized)
tcatccccacaagacagatatagttctgcatttctcatgcagattctacaggcctttattctaattttttaatgtgccaattttatcatatttggtttcttcagtctttaatatattcat

SEQ ID NO: 186381 - DNA, 120 bp, Artificial Sequence
  ENSG00000111850_45 (sequence is synthesized)
gtagatgtctgtgaattatagtctatctatgcttgtaggctttaaaatatatttagtcaatggtgggtagaaattttattttagcttaaaaaattaatcttataaaatgcctgctgacat

SEQ ID NO: 186382 - DNA, 120 bp, Artificial Sequence
  ENSG00000111850_46 (sequence is synthesized)
aactgagaaggaaaaaagtgaatagaaggatatcaggattgctgaagcacagaacccagaacaacagtccaaaccaatgatggaggtgaaactaagatagcagccacaaccagaagttga

SEQ ID NO: 186383 - DNA, 83 bp, Artificial Sequence
  ENSG00000111850_47 (sequence is synthesized)
tggaggtgaaactaagatagcagccacaaccagaagttgattcagaaagaattaattcgggctgggttgtggtcatttctgga

SEQ ID NO: 186384 - DNA, 90 bp, Artificial Sequence
  ENSG00000111850_48 (sequence is synthesized)
gcctcaaaaccctgattctaccaaaaaaaaaaaaaaaaactagcctgtggtggcaagcgcctctagtcccagctactggggaggctgagg

SEQ ID NO: 186385 - DNA, 120 bp, Artificial Sequence
  ENSG00000111850_49 (sequence is synthesized)
aggcaggggaggttgcagtgagctgaggtccttccactgaactccagtttgggggacagagcgagacactgtctcaagaaagaaagaaagaaagaattggctgggcatggtggctcacac

SEQ ID NO: 186386 - DNA, 83 bp, Artificial Sequence
  ENSG00000111850_50 (sequence is synthesized)
cagactgccactgcattccagcctgggagaaagaaaaaaagaaagaaagggagggagggaaggagtcaggaaggaaggaagga

SEQ ID NO: 186387 - DNA, 120 bp, Artificial Sequence
  ENSG00000111850_51 (sequence is synthesized)
agaaagggagggagggaaggagtcaggaaggaaggaaggaagggattgattcagagacaaaacagaaatagaccttgtttttcgtgattaaaatatgctaaaagcaatagctaagattgc

SEQ ID NO: 186388 - DNA, 120 bp, Artificial Sequence
  ENSG00000111850_52 (sequence is synthesized)
ctttgtctctatcttggttttggtatagatattattgtttgcaaggtactaaactagctcattataaatttcaggttaaaaaataagcagcaaggatatctggagacattctgacaataa

SEQ ID NO: 186389 - DNA, 120 bp, Artificial Sequence
  ENSG00000111850_53 (sequence is synthesized)
atgcaatgatagagcactagccttttcactatagaccaatagaaatggaagcagtagttgtggggcatgaatatacagacacaagaatcagtggcacagaatagaatttccagaaacaga

SEQ ID NO: 186390 - DNA, 120 bp, Artificial Sequence
  ENSG00000111850_54 (sequence is synthesized)
taccaatgcacttatgcatttgttaatttagtatatgacaaagatcgctgctgtggtttgtatgtgtccctcagatttcatgtgttggcaacttaatccccaatgtgatagcattgaagg

SEQ ID NO: 186391 - DNA, 120 bp, Artificial Sequence
  ENSG00000111850_55 (sequence is synthesized)
ttggcaacttaatccccaatgtgatagcattgaagggtgaggcctttaagaggagattggggctgggcacggtggctcacatttgtaataccagaactttgagaggctgaggcgggtgga

SEQ ID NO: 186392 - DNA, 77 bp, Artificial Sequence
  ENSG00000111850_56 (sequence is synthesized)
tcacttgaggtcaggagtttgatatcagcctggactgggcatggtgaccacacctgtaatgccagctacttgggagg

SEQ ID NO: 186393 - DNA, 88 bp, Artificial Sequence
  ENSG00000111850_57 (sequence is synthesized)
gggtgacagaatgacaggaagaatgatctgagctagcatagtcagcacattcagcccacttcctattgtgaagccctgtaccacctgg

SEQ ID NO: 186394 - DNA, 120 bp, Artificial Sequence
  ENSG00000111850_58 (sequence is synthesized)
attcagcccacttcctattgtgaagccctgtaccacctgggatctgtagagaaccccccccaacccgcaagaaggctctcacctgctgtggcccctcaaccttggacttctagtttgagg

SEQ ID NO: 186395 - DNA, 120 bp, Artificial Sequence
  ENSG00000111850_59 (sequence is synthesized)
tattctgttataagcaacagaaaacaaactaatataatggcatttcaaagtagtggaaaaaaacatgacattcagttaatggtttgaaggcaactggagagttattgaggtgaaatatta

SEQ ID NO: 186396 - DNA, 120 bp, Artificial Sequence
  ENSG00000111850_60 (sequence is synthesized)
ttgaatcctctcttataatacatcaaaatatattccaagtagatcaaagtttacaagtaaaaataaaactgcaaaagtatgaaaagaagtcatgtaagaatttttacataaatcagattg

SEQ ID NO: 186397 - DNA, 120 bp, Artificial Sequence
  ENSG00000111850_61 (sequence is synthesized)
aggaagaccttctatttttaacacaaaacccaggggtgaaacagtattaataaaaaattgatgacttcaacttcataaaaatttgtttaaagcttctaggtcaaaaatcataggcttcgg

SEQ ID NO: 186398 - DNA, 120 bp, Artificial Sequence
  ENSG00000111850_62 (sequence is synthesized)
tggaatattgctgtaaaagaaattttttaaaaacagaaaaaagaaagaaaaactacaggcaaggtcaaaagataaaccacaaacctgagaaaaatatttgcgtctcctatcacagacaaa

SEQ ID NO: 186399 - DNA, 120 bp, Artificial Sequence
  ENSG00000111850_63 (sequence is synthesized)
cagacaaaggacttatttcttgactatataaggaactcttaagcatcaataagaaatagattaacaacactataggaaagtagattaaaattttacatagaaaatataaaaataactaaa

SEQ ID NO: 186400 - DNA, 120 bp, Artificial Sequence
  ENSG00000111850_64 (sequence is synthesized)
aaatataggaaagatttttcaatcactcaaaataaatgcaaattaaaactacactgagaagactttttaaaatctatgagactggcaaaaataataaaattataaaactgtcttggtgaa

SEQ ID NO: 186401 - DNA, 120 bp, Artificial Sequence
  ENSG00000111850_65 (sequence is synthesized)
agtatggaattcaatttggcaatatctttggcatatatatatcttttgccccagaaattccacttccgggaatttatcctacagatactcttgtacatgcagaataacatatggactaga

SEQ ID NO: 186402 - DNA, 120 bp, Artificial Sequence
  ENSG00000111850_66 (sequence is synthesized)
ttgtcattatggtattatctgttaaaaaaaaaaaaggaccaaacaatctaaatataactggttacataaattatgatacagctttccagtggaataataagcttctattaaaaaaagaga

SEQ ID NO: 186403 - DNA, 120 bp, Artificial Sequence
  ENSG00000111850_67 (sequence is synthesized)
atgggctgggtacaatggctcatgcctatgatcccagcactttggaaggctgggaggattgcttgagcccaggactttgagaagaccagcctgactaacatagggatatcctgtctctac

SEQ ID NO: 186404 - DNA, 120 bp, Artificial Sequence
  ENSG00000111859_0 (sequence is synthesized)
agagacttgagggaggcgctgcgactgacaagcggctctgcccgggaccttctcgctttcatctagcgctgcactcaatggaggggcgggcaccgcagtgcttaatgctgtcttaactag

SEQ ID NO: 186405 - DNA, 120 bp, Artificial Sequence
  ENSG00000111859_1 (sequence is synthesized)
tgtaggaaaacggctcaacccaccgctgccgaaatgaagtataagaatcttatggcaagggccttatatgacaatgtcccagagtgtgccgaggaactggcctttcgcaagggagacatc

SEQ ID NO: 186406 - DNA, 120 bp, Artificial Sequence
  ENSG00000111859_2 (sequence is synthesized)
ctgaccgtcatagagcagaacacagggggactggaaggatggtggctgtgctcattacacggtcggcaaggcattgtcccaggcaaccgggtgaagcttctgattggtcccatgcaggag

SEQ ID NO: 186407 - DNA, 120 bp, Artificial Sequence
  ENSG00000111859_3 (sequence is synthesized)
actgcctccagtcacgagcagcctgcctctggactgatgcagcagacctttggccaacagaagctctatcaagtgccaaacccacaggctgctccccgagacaccatctaccaagtgcca

SEQ ID NO: 186408 - DNA, 120 bp, Artificial Sequence
  ENSG00000111859_4 (sequence is synthesized)
ccttcctaccaaaatcagggaatttaccaagtccccactggccacggcacccaagaacaagaggtatatcaggtgccaccatcagtgcagagaagcattgggggaaccagtgggccccac

SEQ ID NO: 186409 - DNA, 120 bp, Artificial Sequence
  ENSG00000111859_5 (sequence is synthesized)
gtgggtaaaaaggtgataacccccgtgaggacaggccatggctacgtatacgagtacccatccagataccaaaaggacgtctatgatatccctccttctcataccactcaaggggtatac

SEQ ID NO: 186410 - DNA, 120 bp, Artificial Sequence
  ENSG00000111859_6 (sequence is synthesized)
gacatccctccctcatcagcaaaaggccctgtgttttcagttccagtgggagagataaaacctcaaggggtgtatgacatcccgcctacaaaaggggtatatgccattccgccctctgct

SEQ ID NO: 186411 - DNA, 120 bp, Artificial Sequence
  ENSG00000111859_7 (sequence is synthesized)
tgccgggatgaagcagggcttagggaaaaagactatgacttcccccctcccatgagacaagctggaaggccggacctcagaccggagggggtttatgacattcctccaacctgcaccaag

SEQ ID NO: 186412 - DNA, 120 bp, Artificial Sequence
  ENSG00000111859_8 (sequence is synthesized)
ccagcagggaaggaccttcatgtaaaatacaactgtgacattccaggagctgcagaaccggtggctcgaaggcaccagagcctgtccccgaatcacccacccccgcaactcggacagtca

SEQ ID NO: 186413 - DNA, 120 bp, Artificial Sequence
  ENSG00000111859_9 (sequence is synthesized)
gtgggctctcagaacgacgcatatgatgtcccccgaggcgttcagtttcttgagccaccagcagaaaccagtgagaaagcaaacccccaggaaagggatggtgtttatgatgtccctctg

SEQ ID NO: 186414 - DNA, 120 bp, Artificial Sequence
  ENSG00000111859_10 (sequence is synthesized)
cataacccgccagatgctaaaggctctcgggacttggtggatgggatcaaccgattgtctttctccagtacaggcagcacccggagtaacatgtccacgtcttccacctcctccaaggag

SEQ ID NO: 186415 - DNA, 120 bp, Artificial Sequence
  ENSG00000111859_11 (sequence is synthesized)
tcctcactgtcagcctccccagctcaggacaaaaggctcttcctggatccagacacagctattgagagacttcagcggctccagcaggcccttgagatgggtgtctccagcctaatggca

SEQ ID NO: 186416 - DNA, 120 bp, Artificial Sequence
  ENSG00000111859_12 (sequence is synthesized)
ctggtcactaccgactggcggtgttacggatatatggaaagacacatcaatgaaatacgcacagcagtggacaaggtggagctgttcctgaaggagtacctccactttgtcaagggagct

SEQ ID NO: 186417 - DNA, 120 bp, Artificial Sequence
  ENSG00000111859_13 (sequence is synthesized)
gttgcaaatgctgcctgcctcccggaactcatcctccacaacaagatgaagcgggagctgcaacgagttgaagactcccaccagatcctgagtcaaaccagccatgacttaaatgagtgc

SEQ ID NO: 186418 - DNA, 120 bp, Artificial Sequence
  ENSG00000111859_14 (sequence is synthesized)
agctggtccctgaatatcttggccatcaacaagccccagaacaagtgtgacgatctggaccggtttgtgatggtggcaaagacggtgcccgatgacgccaagcagctcaccacaaccatc

SEQ ID NO: 186419 - DNA, 120 bp, Artificial Sequence
  ENSG00000111859_15 (sequence is synthesized)
aacaccaacgcagaggccctcttcagacccggccctggcagcttgcatctgaagaatgggccggagagcatcatgaactcaacggagtacccacacggtggctcccagggacagctgctg

SEQ ID NO: 186420 - DNA, 120 bp, Artificial Sequence
  ENSG00000111859_16 (sequence is synthesized)
catcctggtgaccacaaggcccaggcccacaacaaggcactgcccccaggcctgagcaaggagcaggcccctgactgtagcagcagtgatggttctgagaggagctggatggatgactac

SEQ ID NO: 186421 - DNA, 120 bp, Artificial Sequence
  ENSG00000111859_17 (sequence is synthesized)
gattacgtccacctacagggtaaggaggagtttgagaggcaacagaaagagctattggaaaaagagaatatcatgaaacagaacaagatgcagctggaacatcatcagctgagccagttc

SEQ ID NO: 186422 - DNA, 120 bp, Artificial Sequence
  ENSG00000111859_18 (sequence is synthesized)
acagtggcgtgagtgctcaggatcggcagttgctgtgcttctactatgaccaatgtgagacccatttcatttcccttctcaacgccattgacgcactcttcagttgtgtcagctcagccc

SEQ ID NO: 186423 - DNA, 120 bp, Artificial Sequence
  ENSG00000111859_19 (sequence is synthesized)
agcccccgcgaatcttcgtggcacacagcaagtttgtcatcctcagtgcacacaaactggtgttcattggagacacgctgacacggcaggtgactgcccaggacattcgcaacaaagtca

SEQ ID NO: 186424 - DNA, 120 bp, Artificial Sequence
  ENSG00000111859_20 (sequence is synthesized)
tgaactccagcaaccagctctgcgagcagctcaagaccatagtcatggcaaccaagatggccgccctccattaccccagcaccacggccctgcaggaaatggtgcaccaagtgacagacc

SEQ ID NO: 186425 - DNA, 120 bp, Artificial Sequence
  ENSG00000111859_21 (sequence is synthesized)
tttctagaaatgcccagctgttcaagcgctctttgctggagatggcaacgttctgagaagaaaaaaaagaggaaggggactgcgttaacggttactaaggaaaactggaaatactgtctg

SEQ ID NO: 186426 - DNA, 120 bp, Artificial Sequence
  ENSG00000111859_22 (sequence is synthesized)
gtttttgtaaatgttatctatttttgtagatattttatataaaaatgaaatattttaacattttatgggtcagtcaactttcagaaattcagggagctggagagggaaatcttttttttt

SEQ ID NO: 186427 - DNA, 120 bp, Artificial Sequence
  ENSG00000111859_23 (sequence is synthesized)
ccccctgagtggttcttatgtatacatagaagtatctgagacataaactgtacagaaaacttgtccacgtgcttttgtatgcccatgtattcatgtttgtttgtagatgtttgtctgatg

SEQ ID NO: 186428 - DNA, 120 bp, Artificial Sequence
  ENSG00000111859_24 (sequence is synthesized)
catttcattaaaaaaaaaaccatgaattacgaagcaccttagtaagcaccttctaatgctgcattttttttgttgttgttaaaaacataccagctggttataatattgttctccacgtcc

SEQ ID NO: 186429 - DNA, 120 bp, Artificial Sequence
  ENSG00000111859_25 (sequence is synthesized)
ttgtgatgattctgagcctggcactcccaaatctgggaagcatagtttatttgcaagtgttcaccttccaaatcatgaggcatagcatgacttattcttgtttggaaaactcttttcaaa

SEQ ID NO: 186430 - DNA, 120 bp, Artificial Sequence
  ENSG00000111859_26 (sequence is synthesized)
actgaccatcttaaacacatgatggccaagtgcccaaaagccctcttgcggagcaaatttcagaatatatatgtggatccaagctctgatagttcaggtgctggagggaagagagacctg

SEQ ID NO: 186431 - DNA, 120 bp, Artificial Sequence
  ENSG00000111859_27 (sequence is synthesized)
tgtgtttagaggccaggaccacagttaggattgggttgtttcaatactgagagacagctacaataaaaggagagcaattgcctccctggggctgttcaatcttctgcatttgtgagtggt

SEQ ID NO: 186432 - DNA, 120 bp, Artificial Sequence
  ENSG00000111859_28 (sequence is synthesized)
tcagtcatgaggttttccaaaagatgtttttagagttgtaaaaaccatatttgcagcaaagatttacaaaggcgtatcagactatgattgttcaccaaaataggggaatggtttgatccg

SEQ ID NO: 186433 - DNA, 120 bp, Artificial Sequence
  ENSG00000111859_29 (sequence is synthesized)
ccagttgcaagtagaggcctttctgactcttaatattcactttggtgctactacccccattacctgagggaaactggccaggtccttgatcatggaactatagagctaccaggacatatc

SEQ ID NO: 186434 - DNA, 120 bp, Artificial Sequence
  ENSG00000111859_30 (sequence is synthesized)
ctgctctctaagggaatttattgctatcttgcaccttctttaaaactcacatatgcagacctgacactcaagagtggctagctacacagagtccatctaatttttgcaacttcctgtggc

SEQ ID NO: 186435 - DNA, 120 bp, Artificial Sequence
  ENSG00000111859_31 (sequence is synthesized)
cagtgtgtataaccccttccactatctcacagatagtcacagcgtccattccatagtctgtctcctcacatctgttagtattgacacagcacagacaccacaagccatcaggttcttcat

SEQ ID NO: 186436 - DNA, 120 bp, Artificial Sequence
  ENSG00000111859_32 (sequence is synthesized)
ggggcaggtgaaatacttctaccccatgggtaaatgtattcacatattaccaagagaagaagcacattatctatgatcttttggcccagttcttatttagcatttttattccagcctact

SEQ ID NO: 186437 - DNA, 120 bp, Artificial Sequence
  ENSG00000111859_33 (sequence is synthesized)
tggaaacatgtttttatttgcaatatatgcctgactgaattaagcttgcttgttttaaacaaccaaatcattggaacagaaaaggatttaaaaaacaagaatgcatgatctcagagtgat

SEQ ID NO: 186438 - DNA, 120 bp, Artificial Sequence
  ENSG00000111859_34 (sequence is synthesized)
taaaaaaaaatcagtggaaataaatgatcatagaaggtgcttttcaaaacaactgctattataattctcaaagtcctactctgccaaaagaagattaaaagtcatacattacattacaag

SEQ ID NO: 186439 - DNA, 120 bp, Artificial Sequence
  ENSG00000111859_35 (sequence is synthesized)
gaaatgttcatgtgggaagagggttgctgaaaatcaacaacgcttgaagttaaaaagtgtgtctttgtagatttcattgtataatgtgtatttcttaggagatggctgacttgattgatc

SEQ ID NO: 186440 - DNA, 120 bp, Artificial Sequence
  ENSG00000111859_36 (sequence is synthesized)
tacgctaagtggagacatttcacatttttaaaaccaaatgttcaatctgtattactctttgccgtcttgtatgtagaggctatttttaaatcattaaatttttagatctctgttttcata

SEQ ID NO: 186441 - DNA, 120 bp, Artificial Sequence
  ENSG00000111859_37 (sequence is synthesized)
acacatacatatgccactcacatccgacgtgtgtggttgctcagtagggaaatgcttacagctgcctctagaagcaagtccgctcgctgcatggagagggaaacatgagcatgcagcagg

SEQ ID NO: 186442 - DNA, 120 bp, Artificial Sequence
  ENSG00000111859_38 (sequence is synthesized)
actagctgtcacctcccgcccgcctgcccagagagggccagagcgtcggggaggcaagatgatccaccagcggttccatcctacacttggattcagtaagctgtgaggtccgtaatgtca

SEQ ID NO: 186443 - DNA, 120 bp, Artificial Sequence
  ENSG00000111859_39 (sequence is synthesized)
gacactggcaaacatcatatgttcttcaagtagagttatgaaaacgaagaaactggtcagaagagtaaaacgccggaattgtcctttccaacatccagagctgcatcattccttggggca

SEQ ID NO: 186444 - DNA, 120 bp, Artificial Sequence
  ENSG00000111859_40 (sequence is synthesized)
attctaaatccctgaagtggttgaacactgtgtctgaggccagaagctttcgtgggtcactagaaaagagcctagtgagggggaggaactggactggaacgtggaaagctggaatcgggt

SEQ ID NO: 186445 - DNA, 120 bp, Artificial Sequence
  ENSG00000111859_41 (sequence is synthesized)
ctgacctgccctgccgccttggcaaatcactcctacaggccttcaactgattggatgaggcccaccaacattatgaagggcaatctgctttactcaaagtccattggtttaaataatctt

SEQ ID NO: 186446 - DNA, 120 bp, Artificial Sequence
  ENSG00000111859_42 (sequence is synthesized)
aggtgttccagagagatgggcaagtgtcctatttcttagtgagagcctctaaacaaaccagcttgtgaacctccactgaaaagatctcatctgatgagcattttaataaagtgtcctgag

SEQ ID NO: 186447 - DNA, 120 bp, Artificial Sequence
  ENSG00000111859_43 (sequence is synthesized)
tttggaggcttgccgtctttctcttggataaatatcttcatctcctagacttggaaaaacacattttctcctggggtttcccattggcgtgtcttgagctgctctggtgataaccgtaat

SEQ ID NO: 186448 - DNA, 120 bp, Artificial Sequence
  ENSG00000111859_44 (sequence is synthesized)
aatgccaatactgatacgaacagcagaaaacagtaaccccaagaactctacagatgatcatcaaggaccactgtctcttaccatttgctgctttggtttgaaattctcactgcctcgtag

SEQ ID NO: 186449 - DNA, 120 bp, Artificial Sequence
  ENSG00000111859_45 (sequence is synthesized)
atctcattttgagcactatacattcctaaagattgatttctttctatctgacttaaatttaggaatgattaaatcttcatttctcccatgatttgatcctaaaacattttgaaaggaaac

SEQ ID NO: 186450 - DNA, 120 bp, Artificial Sequence
  ENSG00000111859_46 (sequence is synthesized)
agccttgagatctgtgattactaagacatacataacattcttatcacattagaaagcaagaattgactgttgcttgtcttgttcctgttgtcttgtcccctgaattcctgtttatctttg

SEQ ID NO: 186451 - DNA, 120 bp, Artificial Sequence
  ENSG00000111859_47 (sequence is synthesized)
attgtatgtgggacattgtattttcagtacatttgtagaaataatgtgaagcctataaagatgttctctgcctccagagagaattttgtttccttctgccagcctcataggcaagcatac

SEQ ID NO: 186452 - DNA, 120 bp, Artificial Sequence
  ENSG00000111859_48 (sequence is synthesized)
atctgattccatgctttgagctgttctggcaaccctgatgtcttcagcctgtgcaagggtgggtttacttccagttaatccttattttggatacagtccttagggttccaacccaaagtc

SEQ ID NO: 186453 - DNA, 120 bp, Artificial Sequence
  ENSG00000111859_49 (sequence is synthesized)
gggggtggtttggggtccctgccttggtgagccctatagtccaatgttcccccttacccaaagaagctgtagaaaacccagcacagcctcccaggcaccagtttcagatcagcaaaaaat

SEQ ID NO: 186454 - DNA, 120 bp, Artificial Sequence
  ENSG00000111859_50 (sequence is synthesized)
agcttttcttcatttttttaagttgtcttcagcaagatggttaatctcaattacctagtccatgatttctggaagtcaaagtcaaaaggtaaaatctatatagcctaggtgacaattaca

SEQ ID NO: 186455 - DNA, 120 bp, Artificial Sequence
  ENSG00000111859_51 (sequence is synthesized)
ataacaataacaatagctaaggcttattatggctttatgccaggtactttatgcacttgatctcatttaatactcatatagcctatgagggaagtataatttccattttacctatgagaa

SEQ ID NO: 186456 - DNA, 120 bp, Artificial Sequence
  ENSG00000111859_52 (sequence is synthesized)
aacaggcttagaatggaacctttgttctcatagcttgtgagtggtagaaccgggatttagatccagctctgcctgagtccagcttctgtttgtcaattacttccctcttcagacctaatt

SEQ ID NO: 186457 - DNA, 120 bp, Artificial Sequence
  ENSG00000111859_53 (sequence is synthesized)
cttccaataagcaacagaaaaagacccagtggggccatggcctctggcacacagcttctcataaacgagcctatcacacatccccagaactaaagcaatcgtatgttccttctgatgttg

SEQ ID NO: 186458 - DNA, 120 bp, Artificial Sequence
  ENSG00000111859_54 (sequence is synthesized)
aggtaaaaagcagggtttgttttggtttcccttttccaaaacactcccccacatgtttctggcttgtggttaagaagaacccaggtgttcatgtcacatacgagctcaactggggaaaag

SEQ ID NO: 186459 - DNA, 120 bp, Artificial Sequence
  ENSG00000111859_55 (sequence is synthesized)
gaaaccatccagcagccctccttgcctgccaatagtggcttcacccaacttggggtgcattcttctacagtttctgatttctcaacttcacctaacattcccttgccttcttggatccct

SEQ ID NO: 186460 - DNA, 120 bp, Artificial Sequence
  ENSG00000111859_56 (sequence is synthesized)
ctcttgcccaacactaccatgcatggctgatagggcactgttctgccccatatcccatgggttctacttaacccagagctggcttacctggaaaccaagcttattctgtagtggcagacc

SEQ ID NO: 186461 - DNA, 120 bp, Artificial Sequence
  ENSG00000111859_57 (sequence is synthesized)
tcacgccatcttgcttaatagccttcagttttcctttagttgattaatgtatcactcaatagattatgcaagacctactctgctaggcactgtactaggccctgtggtttatatttaaat

SEQ ID NO: 186462 - DNA, 120 bp, Artificial Sequence
  ENSG00000111859_58 (sequence is synthesized)
gaagagggaatgatctctgactttaaaatgctggaagaagagatgagatgcatcaagaccgtcaaaccacaagtgataagtgctgtcagagatgtgtggatcactggctcagggagttcc

SEQ ID NO: 186463 - DNA, 120 bp, Artificial Sequence
  ENSG00000111859_59 (sequence is synthesized)
aaggatagagacatattatctgtttgggaagggcttggtgggggaaaggcattcagccgggccttgaaaatcaattaaagtttgaatatgaggaaagaaagaagagcatctcagacaagg

SEQ ID NO: 186464 - DNA, 120 bp, Artificial Sequence
  ENSG00000111859_60 (sequence is synthesized)
acatggcatggatgaaggcacagaggtatgggcgtgcagggcatctgtggaaatggacagctcagttctcgccgagggagggagttggtgcagagcctgggggccctgccttcagaagat

SEQ ID NO: 186465 - DNA, 120 bp, Artificial Sequence
  ENSG00000111859_61 (sequence is synthesized)
aacagacaatttgtgattcccctttttccagtttgctcagcctaaattctctgcaataataatacaaatcatgtttttttgtcatacgggcctgcaactaacatttggggaaaatactgt

SEQ ID NO: 186466 - DNA, 120 bp, Artificial Sequence
  ENSG00000111859_62 (sequence is synthesized)
ctctgtttctgtgtttataaaatggtgacaggaagattgttcagaggatgaaatgagaaaatgcacatagagtaactcatgctcaaaatgaaaaaaggtaaattcccttatctattgaga

SEQ ID NO: 186467 - DNA, 120 bp, Artificial Sequence
  ENSG00000111859_63 (sequence is synthesized)
tcgatcaactgttttctgtatctcagagaatcaaccatcaactgcacacaaataaaaaagctctgggcaccgtatcaagccaagaacagcccaatctcctttctgggcaaacgttccaag

SEQ ID NO: 186468 - DNA, 120 bp, Artificial Sequence
  ENSG00000111859_64 (sequence is synthesized)
gacatgtctagctgaaatgaatgaaatcaaactcagcagaagtcaacacttagcacggaaggcaaagtagagacaaagggtcacccggctgctgcacaccggcctttagctttagctcaa

SEQ ID NO: 186469 - DNA, 120 bp, Artificial Sequence
  ENSG00000111859_65 (sequence is synthesized)
gttgttctgctttaaaggacaatgccaatcatctcataagtaaatgaagacaatgattcaacagtgctgtcaagtttgagagaaaagagaagccatccctacacccaacacttaatatat

SEQ ID NO: 186470 - DNA, 120 bp, Artificial Sequence
  ENSG00000111859_66 (sequence is synthesized)
caccttagagaggagagagaaaaccatgaccgtgaccgaggaagatgcctcaggacataacttctgcacaggggaggttgtcaatttcctctgcagtatggatttatgctcctcacctaa

SEQ ID NO: 186471 - DNA, 120 bp, Artificial Sequence
  ENSG00000111859_67 (sequence is synthesized)
ccagcctggactccagtatccctatctgtttaatattaagctctctgaaatgtctccaccataggtatctcattagtagaggacaagagacaaaggtgatttaatcaaaacagccaccac

SEQ ID NO: 186472 - DNA, 120 bp, Artificial Sequence
  ENSG00000111859_68 (sequence is synthesized)
catatgaaattacccatcatggggatgaaaactggtgagtcactggcatatgaatagctggcatgactgtggactctggggagagagaagagaaggagaaggcagggcctaaggaacatc

SEQ ID NO: 186473 - DNA, 120 bp, Artificial Sequence
  ENSG00000111859_69 (sequence is synthesized)
tgccaaagatcaagcttgtacataacctggtaaataaatccataattaagtgcttaggagcataaaaaatgaccaagtataagacatttccattctgggtaactcacgggtttctcttca

SEQ ID NO: 186474 - DNA, 120 bp, Artificial Sequence
  ENSG00000111859_70 (sequence is synthesized)
ccgccttggcaaatcactcctacagaatcttatggcaagggccttatatgacaatgtcccagagtgtgccgaggaactggcctttcgcaagggagacatcctgaccgtcatagagcagaa

SEQ ID NO: 186475 - DNA, 120 bp, Artificial Sequence
  ENSG00000111859_71 (sequence is synthesized)
gagggagcagaggtagagaggaagtcaaaaccttggaatggatgacataccacttccccaatgaatgaagctgcagattcagccacatgtagttgatgtcgccatgtcaagactgcattt

SEQ ID NO: 186476 - DNA, 120 bp, Artificial Sequence
  ENSG00000111859_72 (sequence is synthesized)
ttccttccaaacacagaagtatggggtaaacttaatgcaggactatgaagatgaagccattgaggcccaagactttatcttgatttcttcaattccttggatatgtttactccctcccca

SEQ ID NO: 186477 - DNA, 120 bp, Artificial Sequence
  ENSG00000111859_73 (sequence is synthesized)
cactgggcccttgtagctgcttagactgaacctactggcccttctcttgctggaaagttgccctccaagaagtgcaagagctcagattgcacctgctaactgttaagaccagacttggcc

SEQ ID NO: 186478 - DNA, 120 bp, Artificial Sequence
  ENSG00000111859_74 (sequence is synthesized)
aggatgttacctgtattaactgagatcttcacagctcacaaagctagatattgatggccttatagagatgaagaaacagaagctcaaagagtttcaatcacttgcctgaagtcacacaag

SEQ ID NO: 186479 - DNA, 120 bp, Artificial Sequence
  ENSG00000111859_75 (sequence is synthesized)
agcttcagagaaagaagctgtataaagaaaccaaatgattatgcttgaggcttaaccaaagcaatataaaaagtgtatgttctcaggggaatgggcaaaacagaagagaaaaaggccggc

SEQ ID NO: 186480 - DNA, 120 bp, Artificial Sequence
  ENSG00000111859_76 (sequence is synthesized)
caccgagcggctgtgggtgaatgagttaaccaaagagcaaatgtctgagttggatcatgaaacagcagatcaagtgggctcagtgtctgtaaacatctacactgcccatgaggacaagat

SEQ ID NO: 186481 - DNA, 120 bp, Artificial Sequence
  ENSG00000111859_77 (sequence is synthesized)
ctgtatgctccatctacacccagaggctgaaggaatgcctgtggtgtagacaactcacttttctagagaaatggagaagggattagacatgttaaccctgaagaaaaggaaacttggggt

SEQ ID NO: 186482 - DNA, 120 bp, Artificial Sequence
  ENSG00000111860_0 (sequence is synthesized)
agagaacccgcagctgcaacttcgcctggagcctttgagcctgggctcagccggggatctagcagccgtcaccgccgagtcgccgcttccccggcgcgggcctcagcccagccggcttgg

SEQ ID NO: 186483 - DNA, 120 bp, Artificial Sequence
  ENSG00000111860_1 (sequence is synthesized)
ccatggcaggcgccggcagtgcggcgaatctggcccctgcgctccccgcccgtagctgagcagccgttaaccagccatcccgcctttcctcctgcccgtgtcgccgaggcccacgctccg

SEQ ID NO: 186484 - DNA, 120 bp, Artificial Sequence
  ENSG00000111860_2 (sequence is synthesized)
cgcaagtttccgccgccgaagaagcaggaggacggacgtgaggagtcgggcgtccctggcccacccggccctctcgcccgcgatgtgggggcgcttcctggctccggaggccagcggccg

SEQ ID NO: 186485 - DNA, 120 bp, Artificial Sequence
  ENSG00000111860_3 (sequence is synthesized)
ggatagccccggcggagcccgcagcttccctgccggcccagattattcatcagcatggctacctgctaatgaatcattgtggcaggccacaactgttccatctaaccatcgaaataacca

SEQ ID NO: 186486 - DNA, 120 bp, Artificial Sequence
  ENSG00000111860_4 (sequence is synthesized)
tatcaggagacacagtatagcttctgacagtggagacactggcattggaacttcctgttctgatagcgtggaagatcattcaacttcaagtggcacattatcttttaagcctagtcaatc

SEQ ID NO: 186487 - DNA, 120 bp, Artificial Sequence
  ENSG00000111860_5 (sequence is synthesized)
attgattactcttcctactgcccatgtgatgccgtctaattccagcgcttcaatttccaaacttagggaatcattgacaccagatggctcaaaatggagtacaagcctcatgcaaacatt

SEQ ID NO: 186488 - DNA, 120 bp, Artificial Sequence
  ENSG00000111860_6 (sequence is synthesized)
gggaaaccacagtaggggggagcaggactcttccctagacatgaaggacttccggccacttcggaaatggtcatctttatccaaactcactgccccggataactgtggccagggtggcac

SEQ ID NO: 186489 - DNA, 120 bp, Artificial Sequence
  ENSG00000111860_7 (sequence is synthesized)
tgtatgcagagaagagtcaaggaatggtttggagaagatagggaaggctaaggctttaacatcacaactgaggacaattgggcctagctgtttacatgatagtatggagatgcttaggtt

SEQ ID NO: 186490 - DNA, 120 bp, Artificial Sequence
  ENSG00000111860_8 (sequence is synthesized)
agaggacaaggaaataaataaaaaacggtcatcaactctggactgcaagtataaatttgagagctgtagcaaggaggactttagagcctcttcctctactcttaggagacagcctgtaga

SEQ ID NO: 186491 - DNA, 120 bp, Artificial Sequence
  ENSG00000111860_9 (sequence is synthesized)
catgacatatagtgccttacctgaaagcaagcccattatgacaagctcagaggcttttgaacctccaaaatatttaatgcttggtcaacaggcagtaggtggagttcccattcagccttc

SEQ ID NO: 186492 - DNA, 120 bp, Artificial Sequence
  ENSG00000111860_10 (sequence is synthesized)
cgtaaggactcagatgtggcttacagagcagctgcggacaaatcctttggaaggtagaaatacagaggattcttacagtttagctccttggcaacagcagcaaattgaagactttcgaca

SEQ ID NO: 186493 - DNA, 120 bp, Artificial Sequence
  ENSG00000111860_11 (sequence is synthesized)
aggaagtgaaacaccaatgcaggttttgactggatcatctcgtcaaagttattcacctggctatcaggatttcagtaagtgggaatcaatgttgaaaataaaagaaggacttctaaggca

SEQ ID NO: 186494 - DNA, 120 bp, Artificial Sequence
  ENSG00000111860_12 (sequence is synthesized)
gaaagaaattgtaatcgatcggcagaagcaacaaattacccacctgcatgagaggataagggataatgaattacgggctcaacatgccatgttaggacattatgtaaattgtgaggattc

SEQ ID NO: 186495 - DNA, 120 bp, Artificial Sequence
  ENSG00000111860_13 (sequence is synthesized)
ttatgtggctagtttgcagccacaatatgagaacacttcactccagacaccattttcagaggaatcagtttcccattcccaacaaggggaatttgagcaaaagcttgcatctactgagaa

SEQ ID NO: 186496 - DNA, 120 bp, Artificial Sequence
  ENSG00000111860_14 (sequence is synthesized)
agaagttttacagcttaatgagtttctcaaacaaagactaagcctatttagtgaagagaagaagaaactagaggaaaaacttaaaactagagatcgatacatcagtagtctgaaaaagaa

SEQ ID NO: 186497 - DNA, 120 bp, Artificial Sequence
  ENSG00000111860_15 (sequence is synthesized)
atgccagaaggaatctgaacaaaacaaagaaaagcagagaagaattgagaccttggaaaagtatctggctgatcttccaactctagatgatgtacagagtcagagtctacagctgcagat

SEQ ID NO: 186498 - DNA, 120 bp, Artificial Sequence
  ENSG00000111860_16 (sequence is synthesized)
tctggaagaaaaaaataagaatttacaagaggctttgatagatacagaaaaaaaacttgaagagatcaaaaagcagtgtcaagataaagagacacagttaatatgccagaaaaagaaaga

SEQ ID NO: 186499 - DNA, 120 bp, Artificial Sequence
  ENSG00000111860_17 (sequence is synthesized)
aaaggagttagtaactaccgttcagagtttgcaacaaaaagtagaaagatgccttgaagatggaatccgccttcccatgttagatgcaaaacagcttcagaatgaaaatgataatctcag

SEQ ID NO: 186500 - DNA, 120 bp, Artificial Sequence
  ENSG00000111860_18 (sequence is synthesized)
acaacaaaatgagactgctagtaagataatagacagccaacaagatgagattgacagaatgattttagaaattcagtctatgcaaggaaagctttctaaagagaaactgaccactcaaaa

SEQ ID NO: 186501 - DNA, 120 bp, Artificial Sequence
  ENSG00000111860_19 (sequence is synthesized)
gatgatggaagagctggaaaagaaagaaagaaatgtacagagattaacaaaagcattgcttgaaaaccaaagacaaacagatgagacatgctctttattggatcagggccaggaacctga

SEQ ID NO: 186502 - DNA, 120 bp, Artificial Sequence
  ENSG00000111860_20 (sequence is synthesized)
ccaatctaggcagcagacagttctttccaaacggccactatttgatttgactgtgattgatcagctgttcaaggaaatgtcctgttgtttgtttgacttgaaagcattgtgtagtattct

SEQ ID NO: 186503 - DNA, 120 bp, Artificial Sequence
  ENSG00000111860_21 (sequence is synthesized)
taatcagcgtgctcagggcaaggagcctaatctttcattattactgggaataagatcaatgaactgttcagctgaagagactgagaatgaccacagcacagaaacactcactaaaaagct

SEQ ID NO: 186504 - DNA, 120 bp, Artificial Sequence
  ENSG00000111860_22 (sequence is synthesized)
gtcagatgtgtgccagttacgaagagacattgatgaattaaggactacaatatcagaccgctatgctcaggacatgggagacaactgcattactcagtgatcaagtgttagtcccacagc

SEQ ID NO: 186505 - DNA, 120 bp, Artificial Sequence
  ENSG00000111860_23 (sequence is synthesized)
aataatgacctgttgtttaaatgctgctgtgttatggagccataatggaaggttgcaagtgacatgacttgcacttagggattttttttctgtggatttgttttgttgaaggggagaagg

SEQ ID NO: 186506 - DNA, 120 bp, Artificial Sequence
  ENSG00000111860_24 (sequence is synthesized)
gaagtgaagagattttgaaggggcttatctaatcaggcaaaaagaaaaaaaatcaaattacctttggaaaatatgataaaatctacaaggaaaaaaatgtctatattctcaaactactga

SEQ ID NO: 186507 - DNA, 120 bp, Artificial Sequence
  ENSG00000111860_25 (sequence is synthesized)
ttgtaggaccaagctgtgaagagtacccttcacatgaaggagtaggattccttttaatcctatagctttgtgtgtttgtgtgtgcatgtatgtgtgttgttgtgtgtgtgtgcacgtgct

SEQ ID NO: 186508 - DNA, 120 bp, Artificial Sequence
  ENSG00000111860_26 (sequence is synthesized)
ttattcacaaatttataagggtttctagggtcagagcagagcttctgagaaaggcacacgctgtttattcttatatttctttcatatagaagcttgtgttgtactttgggattttcagtg

SEQ ID NO: 186509 - DNA, 120 bp, Artificial Sequence
  ENSG00000111860_27 (sequence is synthesized)
gctggctgaacaagagttcaaacagcaggcaagtgttgtcatggtagtacaggaggcaaaaccatttatattttgaacacttactgcactgataggatgtttgtggttgagctgatttta

SEQ ID NO: 186510 - DNA, 120 bp, Artificial Sequence
  ENSG00000111860_28 (sequence is synthesized)
gtactgtagataggtcagctgtttttccagagtgattgtggatttcccaagaggtgtgaaattttgacgtgatgctctttttccttagcattgtaatgtatgtgttacaagaaaggttaa

SEQ ID NO: 186511 - DNA, 80 bp, Artificial Sequence
  ENSG00000111860_29 (sequence is synthesized)
ttagcattgtaatgtatgtgttacaagaaaggttaacataacttgaactaattttaacatgttccttactatttacaatt

SEQ ID NO: 186512 - DNA, 120 bp, Artificial Sequence
  ENSG00000111860_30 (sequence is synthesized)
ccaaatctcaacatttacattttaacagttttgtatgtttcaaagttgaaactactgtaagagaaagccaatactatttatatctgaatcaacagtagcataaacattttttaattgaga

SEQ ID NO: 186513 - DNA, 120 bp, Artificial Sequence
  ENSG00000111860_31 (sequence is synthesized)
ttgtattttaatcccttttgttaaagtacattaacaacagtttttcacaggatatgaacttggcgaaattagttcttaatctgaattacagggtattactatgaaatgcagttgattttg

SEQ ID NO: 186514 - DNA, 120 bp, Artificial Sequence
  ENSG00000111860_32 (sequence is synthesized)
cagtagacgtacagtcatttaaacttccaaatgagtgttgtccatgtttctgttggtattttggaaggattatacattttattgccttcagcattgattatgttcttttgaatatactta

SEQ ID NO: 186515 - DNA, 120 bp, Artificial Sequence
  ENSG00000111860_33 (sequence is synthesized)
gttttggcgaaagccttgtcctttgtaagttggtttgatcttgtgatgcaaccaagtctcatttaggtcaagactaaataagagatggaggggtagagggtgtgactcaagcaggataat

SEQ ID NO: 186516 - DNA, 120 bp, Artificial Sequence
  ENSG00000111860_34 (sequence is synthesized)
attgatttgataaagagcatatcacatgcctgttttcttgccagataaagggcatagcacatgcctgttttcttatatactagaataaaggctctcctaggaaagatttttcttaaatat

SEQ ID NO: 186517 - DNA, 120 bp, Artificial Sequence
  ENSG00000111860_35 (sequence is synthesized)
ttaaaagtgaaaatgtgagacaaggccttcaaggagactacccaggaagatacacagtttaaaatgttggctatacagctctcaatagattattttatagttatagttgaataatcagtt

SEQ ID NO: 186518 - DNA, 120 bp, Artificial Sequence
  ENSG00000111860_36 (sequence is synthesized)
ataatacactgtaaagaaatcagattttccttctgtttggtgtctgagtccttcctgctcttcttacttctgagaatctgggcactaagaaatcagtaagtacattgtagtgctcctgca

SEQ ID NO: 186519 - DNA, 120 bp, Artificial Sequence
  ENSG00000111860_37 (sequence is synthesized)
tcccagagtccttaacctaaggagggtcttagtcactggtaagaacttggctttctaattatattcacttggtttttaacattagtagcttgacgataatcagggtatagtaaatttcca

SEQ ID NO: 186520 - DNA, 120 bp, Artificial Sequence
  ENSG00000111860_38 (sequence is synthesized)
ccaaaaatgtgatgcgaagaattctgccttggtcctttatggtaaaacagataataacgtctaaaatagatcagccacaagtgcagcaaatatttttacactctctttgaatagaatccc

SEQ ID NO: 186521 - DNA, 120 bp, Artificial Sequence
  ENSG00000111860_39 (sequence is synthesized)
aaccaccctcccccatgattttagaaataaaggcttcctaaaataatagaacaaattggcaaacaatcactaattggaccagtaggttcttacttaaatatctctcctagatttttagtg

SEQ ID NO: 186522 - DNA, 120 bp, Artificial Sequence
  ENSG00000111860_40 (sequence is synthesized)
tatgttttgggattttatgggtttatttatttttttttttttaagcagacgttacagtttgttttaatctactatagatacgtttttgttttttggcttagttggggataaaataattta

SEQ ID NO: 186523 - DNA, 120 bp, Artificial Sequence
  ENSG00000111860_41 (sequence is synthesized)
tttgtaagttagctttctaaaacttagagaaagtaatttaattcacgtatcttaaaaataaaattccaaagttaaaaaatttctgacttagtaggaagttaacaaaactactgctgatgc

SEQ ID NO: 186524 - DNA, 120 bp, Artificial Sequence
  ENSG00000111860_42 (sequence is synthesized)
atttcagtttccaaaatctgtaccctccccccataaaaaagggagttaagatgtgctagtttaagtagttagctgaattatagattgatcctcttaaaatctggagtttgtaaaggggcc

SEQ ID NO: 186525 - DNA, 120 bp, Artificial Sequence
  ENSG00000111860_43 (sequence is synthesized)
tacataaacagtagatagacttggagggattttgtgggggaattgaaactaatagtattctatctagtttgtcagtatttactttttgatttttatttttcagaaaattttcctttccca

SEQ ID NO: 186526 - DNA, 120 bp, Artificial Sequence
  ENSG00000111860_44 (sequence is synthesized)
ggacaccctcttgtattagaatatcctcttctgtatcacattaaaaacagattttactgttagaccaaataagatgggcaaatagcaacactagagcatctcacccagtttgaactagga

SEQ ID NO: 186527 - DNA, 120 bp, Artificial Sequence
  ENSG00000111860_45 (sequence is synthesized)
tgttcgtggaagttatgacaccaatatattcctgaaatgaaaattaacctaaattttaaagtgaatctatttgaaaatttacttagataatgaaacctcgttttaattgtgctttttgtg

SEQ ID NO: 186528 - DNA, 120 bp, Artificial Sequence
  ENSG00000111860_46 (sequence is synthesized)
aatccaacacttgtttgcttagaaagtatcttatccagtattaatattttgttcttttgggttttaaagttgagcttattcagcctcaatcacattacagcaagcataaagtaacagttg

SEQ ID NO: 186529 - DNA, 120 bp, Artificial Sequence
  ENSG00000111860_47 (sequence is synthesized)
actcaatgaaagacccaaattgcctgtacagataaaattcactgaatcaaaggcacaatagctatcttttcacttgagctcagaaaagtaaaatggcttaatttgaactattaattttca

SEQ ID NO: 186530 - DNA, 120 bp, Artificial Sequence
  ENSG00000111860_48 (sequence is synthesized)
gtggcctctaattaaacaaaaacaaaaaaccacaaatactggctaggtaagatattcctgaggtcattttaaaagaagtgtggcacctaggattcaatatttaatgctaacagtattata

SEQ ID NO: 186531 - DNA, 120 bp, Artificial Sequence
  ENSG00000111860_49 (sequence is synthesized)
ttttagtgaaatttattttggtggtgacagtttattaaacctaattagacttctttcaatagcttgttgtagagacaatctcaagggctggaaagtgttgctaaaatgaatgtcatacat

SEQ ID NO: 186532 - DNA, 120 bp, Artificial Sequence
  ENSG00000111860_50 (sequence is synthesized)
ttctgatatactaaggagcttataaagtaattctttcatagtgcaagaattattaatttcttagaggatgtttttaaaggagctacttaattgggaaaatgttctttaaatatcagtaat

SEQ ID NO: 186533 - DNA, 120 bp, Artificial Sequence
  ENSG00000111860_51 (sequence is synthesized)
agttcattaagtaacatagtagctaagaacatggactatattttcacagcatagttcagcttaggcacacctttagtttggattattggcattctcttacgtaggaattatatcattgta

SEQ ID NO: 186534 - DNA, 120 bp, Artificial Sequence
  ENSG00000111860_52 (sequence is synthesized)
gatatgtaattatggtaataagcaattttcataaccatgctcactcagactatatcatttgaaactgccatgtttccatttttgacaattcatgttcacaaaacaacaggaacaatttcc

SEQ ID NO: 186535 - DNA, 120 bp, Artificial Sequence
  ENSG00000111860_53 (sequence is synthesized)
tatttggtataaagagcaaaatttccaactttgccccaaaatgccatgggtggcatattgccatatgattatatcatatatttaatcatgtatgggaaagattttggattttttttctta

SEQ ID NO: 186536 - DNA, 120 bp, Artificial Sequence
  ENSG00000111860_54 (sequence is synthesized)
tttaaaaaagtgctaaatataagaatatagttttaaatcagcaagtctaataacactattgcagctgtacacagagagaaccttttgtgcctttttgcctgcagtaagcatttatttcta

SEQ ID NO: 186537 - DNA, 120 bp, Artificial Sequence
  ENSG00000111860_55 (sequence is synthesized)
ttttacatgagttctaagaatgttgatgattattgcaccttgttcttctgtatataaacttgattaaggaatttttttttttaaagcaaggagccgttttttgttactaggtggatacct

SEQ ID NO: 186538 - DNA, 120 bp, Artificial Sequence
  ENSG00000111860_56 (sequence is synthesized)
tagtaaacatgaggggaattatcagatagatgtctttggagcccagccttccctgtgtagtgagctggaaactcctttagattgtattcattggtgtgtatgtatatgtacatatatgta

SEQ ID NO: 186539 - DNA, 120 bp, Artificial Sequence
  ENSG00000111860_57 (sequence is synthesized)
taaatagttaaatacataaacataaaacttaacatcgcattgttgtgatgacaagaagtagtaaggtgctaggtggttacattaaaaagcacagcacagtgtataatcagtcactatgac

SEQ ID NO: 186540 - DNA, 120 bp, Artificial Sequence
  ENSG00000111860_58 (sequence is synthesized)
tggtggttttgtaagctgggttcagtttttgaaccacccagaatacctcatgtgtaaatacagtgttcatgacttaattgaaatacagttattgtttaaaaaaaaaaaaaaagaatgtga

SEQ ID NO: 186541 - DNA, 120 bp, Artificial Sequence
  ENSG00000111860_59 (sequence is synthesized)
agccactggttggcttatgccttctgatctatcattcttgcctctttttttgtaaaggggttttcttcttgttgttctgttttttaatagggtttacagctagaattttgaatgccaaag

SEQ ID NO: 186542 - DNA, 120 bp, Artificial Sequence
  ENSG00000111860_60 (sequence is synthesized)
ttctatttattaaattaagaaaaaagttttcaatgttaatggctagtatttttccactggactattgtttgttgatgttggaatttgtatttacagagaaataaattttttataaaaaga

SEQ ID NO: 186543 - DNA, 120 bp, Artificial Sequence
  ENSG00000111860_61 (sequence is synthesized)
atttgaagacgttccttgaggaggtttgaaaaactcttacccggctctacaaattactgaagtccactgatagtccctccttcgtgaagcattcctgaagaccccagcctgacagatctc

SEQ ID NO: 186544 - DNA, 120 bp, Artificial Sequence
  ENSG00000111860_62 (sequence is synthesized)
cccttcctctgacctcctgtattgaaacagctgacccttggctaacattacatgatttggagaaataattggaagtctaccacagggagactaaatgtaaaactccaatcagataaatta

SEQ ID NO: 186545 - DNA, 120 bp, Artificial Sequence
  ENSG00000111860_63 (sequence is synthesized)
aaagttgaattaggtcaacaacatttcctcagcatataattatttgtctgtcatttaccctgtcaggtgtcatgccaggttatgtatacatttatgtggaggtgattaattttgtagtaa

SEQ ID NO: 186546 - DNA, 120 bp, Artificial Sequence
  ENSG00000111860_64 (sequence is synthesized)
cttttgagaagccctctgctgtctgcagaaatccaaggattttctttgaggatagaaatgctcttgtatatctttctaacaaatagtaaaatctttaaaaaattaattgcctacaccaaa

SEQ ID NO: 186547 - DNA, 120 bp, Artificial Sequence
  ENSG00000111860_65 (sequence is synthesized)
ctcttacccggctctacaaattactgaagtccactgatagtccctccttcgtgaagcattcctgaagaccccagcctgacagatctccccttcctctgacctcctgtattgaatgtgtca

SEQ ID NO: 186548 - DNA, 120 bp, Artificial Sequence
  ENSG00000111860_66 (sequence is synthesized)
aaggctcagaccacaatgcacatctgacaagttcccagtcaactcaacagcaagctagagaacaaggactgatgattagaagggctctgcattgcaaagaatggccaggcccaagtatct

SEQ ID NO: 186549 - DNA, 120 bp, Artificial Sequence
  ENSG00000111860_67 (sequence is synthesized)
cggctgagctttgtcactggctggggatatctgggaaaagcatggagtagggcgactgtggtttacaataatctattgttatattttaaaatagctagaagaaaataatttgaatgtttc

SEQ ID NO: 186550 - DNA, 120 bp, Artificial Sequence
  ENSG00000111860_68 (sequence is synthesized)
aatactgtggtaacaatgaaacataactctggcctaaacccaactgaacatgttctttcataatagctggtaaattaatctgaggccaagcaataaatggcccagattattcatcagcat

SEQ ID NO: 186551 - DNA, 120 bp, Artificial Sequence
  ENSG00000111860_69 (sequence is synthesized)
agtatcgcaaaataggccaagtcgctgccctctactcaactcgcagggcgggaggatggagacagagggatgcggcgggagggcgggacagcccagtcgccgccaaggaggcgaagcggg

SEQ ID NO: 186552 - DNA, 80 bp, Artificial Sequence
  ENSG00000111860_70 (sequence is synthesized)
gggtagctcacccgccccccgcagtccccgccccccgcagtccccgccccgcgcggcgccgcgcacgcctgaagtcattg

SEQ ID NO: 186553 - DNA, 120 bp, Artificial Sequence
  ENSG00000111860_71 (sequence is synthesized)
ctctgagtgatgggcctactgcagagcccgcctcccaccacagtgctggcccagaattttttatacgaactagttcgtaactaaacgttggaagcatcaccatattgccagtgagaagcc

SEQ ID NO: 186554 - DNA, 120 bp, Artificial Sequence
  ENSG00000111860_72 (sequence is synthesized)
ctagtgtttgcttccctccagtggatgttatgagtacagtagcacacttacagtaagcatataacaagtgttcacagattgttttgcatttccttttccctgcaagttaataggcagaaa

SEQ ID NO: 186555 - DNA, 120 bp, Artificial Sequence
  ENSG00000111860_73 (sequence is synthesized)
tgttacaaaccgaaaagtgttgttgataaacttgcaaagcatttgagactaattaacatgaaaatctgaaaaccttgtacctagcttgttctttccttttcatttgttaaatgggcataa

SEQ ID NO: 186556 - DNA, 120 bp, Artificial Sequence
  ENSG00000111860_74 (sequence is synthesized)
aaataaagcaaaacatactcaatctaaataaacttggaaacagaaacaaaaaagctagcataggtataatagaaagagcatcaacttggctatacaaggtcttagattttgtgtctggtt

SEQ ID NO: 186557 - DNA, 120 bp, Artificial Sequence
  ENSG00000111860_75 (sequence is synthesized)
ctgttagatttagaacgtggatgactttttcacttaatttctctgggcctcagtttcttcatctgtacaatgagaaggtggaactacagtcatttgtaaagttttggtgatacatgatgt

SEQ ID NO: 186558 - DNA, 120 bp, Artificial Sequence
  ENSG00000111860_76 (sequence is synthesized)
tgtgtacaaagcaagagaccaagggagctttgaagaagaacttattgtccttaacaccagcttttcatcttgctttatatcattcaacttcaagtggcacattatcttttaagcctagtc

SEQ ID NO: 186559 - DNA, 120 bp, Artificial Sequence
  ENSG00000111860_77 (sequence is synthesized)
aatactgtggtaacaatgaaacataactctggcctaaacccaactgaacatgttctttcataataggtattggggggtaaggggtgaatcttaactttagtgatgactttggtgaaatga

SEQ ID NO: 186560 - DNA, 120 bp, Artificial Sequence
  ENSG00000111863_0 (sequence is synthesized)
gaaaagaaaagagactacagccatggaagtatttcgctagattttcctagtatttcatgcttacttcatttaaccatgcccctgccccagtgccctagtgaaacagtacaatgtacagct

SEQ ID NO: 186561 - DNA, 120 bp, Artificial Sequence
  ENSG00000111863_1 (sequence is synthesized)
cttgcattgctacctgcccttctcaaagcccacatgttgtattttatgcaaatctacagattatctatcattatctaaatgcaggcatctgaaaaccagcagtaatcctgcctctgaagt

SEQ ID NO: 186562 - DNA, 120 bp, Artificial Sequence
  ENSG00000111863_2 (sequence is synthesized)
ttatcaggaaaggagcttaaaagagaaccaaattcagcctgtgttggaactctcagtcccagaggggtgtggtttgtagctctccggcctgctgttggacttaggctgtgacccacagaa

SEQ ID NO: 186563 - DNA, 120 bp, Artificial Sequence
  ENSG00000111863_3 (sequence is synthesized)
ggacgccagaaagtactcaagacattcacggtgccccggtcagcactcgccatgacgaagacttctacatgcatataccacttccttgttctgagctggtatactttcctcaattattac

SEQ ID NO: 186564 - DNA, 120 bp, Artificial Sequence
  ENSG00000111863_4 (sequence is synthesized)
atctcacaggaaggaaaagacgaggtgaaacccaaaatcttggcaaatggtgcaaggtggaaatatatgacgctgcttaatctgctcttgcagaccattttctacggggtcacctgcctg

SEQ ID NO: 186565 - DNA, 120 bp, Artificial Sequence
  ENSG00000111863_5 (sequence is synthesized)
gatgatgtgctgaaaagaaccaaagggggaaaagacattaagttcctaactgccttcagagacctgcttttcaccactctggcttttcctgtatccacgtttgtatttttggcattctgg

SEQ ID NO: 186566 - DNA, 120 bp, Artificial Sequence
  ENSG00000111863_6 (sequence is synthesized)
atcctctttctctacaatcgagatctcatttaccccaaggtcctagatactgtcatccccgtgtggctgaatcatgcaatgcacactttcatattccccatcacattggctgaagtcgtc

SEQ ID NO: 186567 - DNA, 120 bp, Artificial Sequence
  ENSG00000111863_7 (sequence is synthesized)
ctcaggcctcactcctatccatcaaagaagacaggactcaccttgctggctgctgccagcattgcttacatcagccgcatcctatggctctactttgagacgggtacctgggtgtatcct

SEQ ID NO: 186568 - DNA, 120 bp, Artificial Sequence
  ENSG00000111863_8 (sequence is synthesized)
ctcttgggtctagcagctttcttctctctcagctacgtcttcatcgccagcatctacctacttggagagaagctcaaccactggaaatggggtgacatgaggcagccacggaagaagagg

SEQ ID NO: 186569 - DNA, 120 bp, Artificial Sequence
  ENSG00000111863_9 (sequence is synthesized)
aagtaattgcacaccattttccaagaaccaagaaagaagaaaacacaagagatttttctcatcttttttttttttttctggtggagggaggtggtggaggaacatagcaaagtaggaggg

SEQ ID NO: 186570 - DNA, 120 bp, Artificial Sequence
  ENSG00000111863_10 (sequence is synthesized)
acagagagtgatacttaaatttaataagaggttcgtgaaggtagcttaacttgagaactcttggttttttgaaaggttgactgcacatgccaaaaacaactcctgctatctcagaattaa

SEQ ID NO: 186571 - DNA, 120 bp, Artificial Sequence
  ENSG00000111863_11 (sequence is synthesized)
ttatctttgaccttcgtggaggatggtctctggttaaaatctggccaaagaaactcacataaacttggtgttagagaacatctagagagagagagaggaacttagagtcatttaaactct

SEQ ID NO: 186572 - DNA, 120 bp, Artificial Sequence
  ENSG00000111863_12 (sequence is synthesized)
tcagtttacagagaaggatgctgaggacctagatgagaagttacctgcaaaaggcaaaagggttacttagtgtcagaaccaaggcaatgacttctctctcccagatctcctagctactgg

SEQ ID NO: 186573 - DNA, 120 bp, Artificial Sequence
  ENSG00000111863_13 (sequence is synthesized)
tcctgggccatttttttttttttaaataatcccaactttctttaaaagacaagcatttcagtaagctagttattttcatgggttgctcatccatttttttcagtgatctaaaaatgtagg

SEQ ID NO: 186574 - DNA, 120 bp, Artificial Sequence
  ENSG00000111863_14 (sequence is synthesized)
gagatggctactactgaagttgtctgtctacttgggataatagcaaattaattgaagacaatgggaaagtaagttataaaaaatactgggaaatctgtttctcttctgagcaagcattca

SEQ ID NO: 186575 - DNA, 120 bp, Artificial Sequence
  ENSG00000111863_15 (sequence is synthesized)
gggcaggtataaacatcaaacatagtgacattgtcaaaacctcttccatttgaacattgattaattcatcaaataaatggtatagtaataaattttgcttgcagaagaatctggatggga

SEQ ID NO: 186576 - DNA, 120 bp, Artificial Sequence
  ENSG00000111863_16 (sequence is synthesized)
agtgatagaattataagggctgttgagattgctttgctacaaagcacttttctgaattagtgtgtggtttaacaaagctgatttccagatgcttaacaaggattcatgatccctgctgtg

SEQ ID NO: 186577 - DNA, 120 bp, Artificial Sequence
  ENSG00000111863_17 (sequence is synthesized)
agtctccaaaccagagccaccattcttgcgaagtgagttcccacccacccgagagggagatccttagctcctcatcatcgccagtcatgatgatgagatactctggaagacatccattct

SEQ ID NO: 186578 - DNA, 87 bp, Artificial Sequence
  ENSG00000111863_18 (sequence is synthesized)
tgtggtgttatctcagctcactgcagtttcaagctcctgggctcaagtgatcttacctcagccttctgagtagctgggactccaggc

SEQ ID NO: 186579 - DNA, 120 bp, Artificial Sequence
  ENSG00000111863_19 (sequence is synthesized)
agcaagaggaaaattcagagacagcatcatggaagattgcactggctgcaaagaacatagaggatttgaatcccagggagagaaggcacagtccacacagggagaggaagcagggacagg

SEQ ID NO: 186580 - DNA, 120 bp, Artificial Sequence
  ENSG00000111863_20 (sequence is synthesized)
aggctggaagtgcgagcgagcatgctgagcacaacggagggtgaaggagacagcctcggtctaacaggggggttgtgtgtgtgtatgtgtgcacaaatgtatgaatgtgtgtgagagtgc

SEQ ID NO: 186581 - DNA, 120 bp, Artificial Sequence
  ENSG00000111863_21 (sequence is synthesized)
aagagtatggatgtgtgcatgtgcatgtgtgtgcacaaatgtgtgtgagaatatgccgaagtgtatatgtgttagtgtgcgtgtttgtgcacaaatgtgtgaatatctgtgagagtatgc

SEQ ID NO: 186582 - DNA, 120 bp, Artificial Sequence
  ENSG00000111863_22 (sequence is synthesized)
atgaacatgtgtgtgtgagtgcatggatgtgcatgactatatatgcttgagtgcgagtgtgcatgtttgtgcatgaatgtgtgaatgtttatgagagtatgcatgagtgtgtgtgcgtgt

SEQ ID NO: 186583 - DNA, 120 bp, Artificial Sequence
  ENSG00000111863_23 (sequence is synthesized)
atgtttatgagagtatgcatgagtgtgtgtgcgtgtgtgtgtgtgtgtgttttaggagagggccaggcacggtgacttacgccaagccgccaagccagcactttgggaggccaaggcggg

SEQ ID NO: 186584 - DNA, 120 bp, Artificial Sequence
  ENSG00000111863_24 (sequence is synthesized)
aaccactggaaatgggtttctgttcagatcttgcaaagatggaggctagaatctgttggaatctgcttccagtggcccgattggaagtcaccagccaagcaccaactggtcaagaatatc

SEQ ID NO: 186585 - DNA, 120 bp, Artificial Sequence
  ENSG00000111863_25 (sequence is synthesized)
ctagagaaatagacttttaagctgagatttgaagcgtgagtaagattcagccagacacagggcaaagagaagtaggttccaggaaacaaaaaggtcagaggtgtacccagtgaagacaac

SEQ ID NO: 186586 - DNA, 120 bp, Artificial Sequence
  ENSG00000111863_26 (sequence is synthesized)
agcaggtgtgaaagccaagaaactgcagcgctcagttcactcaagaaacaaaggggttcaatatggatggactgcagatctccagatggaagcggggcatggccaggccagcatcctatg

SEQ ID NO: 186587 - DNA, 120 bp, Artificial Sequence
  ENSG00000111863_27 (sequence is synthesized)
gcaaggtggaaatatatgacgctgcttaatctgtctagctcaagaacaggactgctgggtttgacatctaccagccaggaagctttaggcagctcttgcagaccattttctacggggtca

SEQ ID NO: 186588 - DNA, 120 bp, Artificial Sequence
  ENSG00000111863_28 (sequence is synthesized)
gtcatccccgtgtggctgaatcatgcaatggaattctgttccaaatgatcgttaatgtagaggacgggagctgctgattgtgggcagggttaataaaattcatcagatcaatggccagta

SEQ ID NO: 186589 - DNA, 120 bp, Artificial Sequence
  ENSG00000111863_29 (sequence is synthesized)
aggaataaaacaagtcggggtgaatctaacttcctatctgccaactaggatactttctactgggaaaaatgcttctcaatcaagaaaatatttataataaacataattttccaattacaa

SEQ ID NO: 186590 - DNA, 120 bp, Artificial Sequence
  ENSG00000111863_30 (sequence is synthesized)
acctgagtcagagcctagtccggcatgctgcctagcccagccacgtctcatcctattcatggcagagcggggactctcaccctctcccagcaatgtctaaagtcaggcatctgaaaacca

SEQ ID NO: 186591 - DNA, 120 bp, Artificial Sequence
  ENSG00000111863_31 (sequence is synthesized)
catcttgcagagctggacaaaagaaggtggtcaagagatcccaaattggtggaaactgtccccgttacaggaggaggaaggacgctgccaccactaccccagggactggcctatactcat

SEQ ID NO: 186592 - DNA, 120 bp, Artificial Sequence
  ENSG00000111863_32 (sequence is synthesized)
gagatatgagaccttcaaaggtggcacatggaaaagacaaccgaggagagaaagacagcctggtgtggggtacacagtgggtgcctcattcatgttgctgagtggatggatgtcaggaag

SEQ ID NO: 186593 - DNA, 120 bp, Artificial Sequence
  ENSG00000111875_0 (sequence is synthesized)
agaactcgggtgcagccaatcgagggcaacgctgctacttatcagagcagaatgggctgtagtttagtgaaataggaaagctgcaaaacactgtggagtgctcccgtgtaaataaaaaga

SEQ ID NO: 186594 - DNA, 120 bp, Artificial Sequence
  ENSG00000111875_1 (sequence is synthesized)
ggaaaaaagtttctcaagtcgccgctgcacgacgtctggccggcgctggagcgggggtctgcgctctcccgagcggccgcgcgctggactttattgtgccgcaaccagccccagttccca

SEQ ID NO: 186595 - DNA, 120 bp, Artificial Sequence
  ENSG00000111875_2 (sequence is synthesized)
ttgtttgtgtttttttcaaaatatggcaaaggttcaggtgaacaatgtagtggtgctggataacccttctcctttctacaacccgttccagttcgagatcaccttcgagtgcatcgagga

SEQ ID NO: 186596 - DNA, 120 bp, Artificial Sequence
  ENSG00000111875_3 (sequence is synthesized)
cctgtctgaagacttggaatggaaaattatctatgtgggctctgcagaaagtgaagaatacgatcaagttttagactctgttttagtgggtcctgttcccgcaggaaggcatatgtttgt

SEQ ID NO: 186597 - DNA, 120 bp, Artificial Sequence
  ENSG00000111875_4 (sequence is synthesized)
atttcaggctgatgcacctaatccaggactcattccagatgcagatgcagtaggcgtaactgttgtgctaattacttgtacctatcgaggacaagaatttattagagttggctattatgt

SEQ ID NO: 186598 - DNA, 120 bp, Artificial Sequence
  ENSG00000111875_5 (sequence is synthesized)
aaataatgaatatactgagacagaattaagggaaaatccaccagtaaaaccagacttttctaagcttcaaaggaatattttggcatctaatcccagggtcacaagattccacattaattg

SEQ ID NO: 186599 - DNA, 120 bp, Artificial Sequence
  ENSG00000111875_6 (sequence is synthesized)
ggaagataacacagaaaaactggaagatgcagagagcagtaatccaaatctacagtcacttctttcaacagatgcattaccttcagcatcaaagggatggtccacatcagaaaactcact

SEQ ID NO: 186600 - DNA, 120 bp, Artificial Sequence
  ENSG00000111875_7 (sequence is synthesized)
aaatgtcatgttagaatcccacatggactgcatgtgaccacctaccatccctttagtacaaattaagctattaaaaatacacagaactatttccctgaaattccgtaagtacatagtcaa

SEQ ID NO: 186601 - DNA, 120 bp, Artificial Sequence
  ENSG00000111875_8 (sequence is synthesized)
aacacaatgtgaagaatttgtttaaaaacatcctgtagaaagtttataagaaaaccagtatttgaacaaattgtggaatataaatacaactatttttaagtaatttttttctctaatgtg

SEQ ID NO: 186602 - DNA, 120 bp, Artificial Sequence
  ENSG00000111875_9 (sequence is synthesized)
ttattttatttgttctgaaactaatctgattaaagcatatatattattttcttctcctttatatgtaatgaaagcacttataaagaaacaggaatcattagaccaggttgtaaagatgtc

SEQ ID NO: 186603 - DNA, 120 bp, Artificial Sequence
  ENSG00000111875_10 (sequence is synthesized)
actggcctttgaaagaacaaagtttacttcaactaaaatgtttcttcctgtgaagacatatggtatcattttaatttaaggggcagatttccattcttttttggcatgtccttaaaaaga

SEQ ID NO: 186604 - DNA, 120 bp, Artificial Sequence
  ENSG00000111875_11 (sequence is synthesized)
ggatttgaaatcaactatatgctaccaagaactttaggatccaattttccaagccaccgtgaagcctcttatggctactattatagttcatgagatgttggacagcatttggtttgtttg

SEQ ID NO: 186605 - DNA, 120 bp, Artificial Sequence
  ENSG00000111875_12 (sequence is synthesized)
gtaagagaagaacaaatatggctaattgttaataaggtcccctggctatggtttttgttcttataacagagtttagaatatcagagcatttcttgaatcatacatcattattgtccagtg

SEQ ID NO: 186606 - DNA, 120 bp, Artificial Sequence
  ENSG00000111875_13 (sequence is synthesized)
aattcaagaccaaatacaatatcgggagaaaatacaaactccctgtgtttaagaataggggattacaatggctcaaattggttcatttgatttctaaaaataccatgacctttaaaaatt

SEQ ID NO: 186607 - DNA, 120 bp, Artificial Sequence
  ENSG00000111875_14 (sequence is synthesized)
taatagatcatgttattggcagtatttatataaaaaccatggatttagaaaggtatatttagctttattataatagatacgttactattttggaaatatatatattttcacacctgtagt

SEQ ID NO: 186608 - DNA, 120 bp, Artificial Sequence
  ENSG00000111875_15 (sequence is synthesized)
tagtactcttccccatttcctctgacactcatgcagaatgagatcaggcatatttgtggttgacatactctagatagcttttccaacaaatctttgaaaagcaatcttggaaaggaattc

SEQ ID NO: 186609 - DNA, 120 bp, Artificial Sequence
  ENSG00000111875_16 (sequence is synthesized)
attaactaaatggggtaaaaggtttctttttctttgagagttaagtccttcctcaaaaaattttcttatgctccataaaattgaggtagaatattttcattattcttgcagctaagcaag

SEQ ID NO: 186610 - DNA, 120 bp, Artificial Sequence
  ENSG00000111875_17 (sequence is synthesized)
acagccatatgatgcaggttatgcagtgccttcatatctaaaacttttatactgcactttttaaagcttttatgttgaggaaaggaaaagggcatttgtctaaacatggattctgagttg

SEQ ID NO: 186611 - DNA, 120 bp, Artificial Sequence
  ENSG00000111875_18 (sequence is synthesized)
tatatatttcctatcattctaaaaaagtgaatttgtgaagcaaagttttgccagatgttaaactttgaatttaatataccagattattaaaatattgtccattaactagttcatagattt

SEQ ID NO: 186612 - DNA, 120 bp, Artificial Sequence
  ENSG00000111875_19 (sequence is synthesized)
tgtttcgaagtagactatattatctattatcttataacccttatccctttccttttgggttaaagaactgcttctgctgcattcactttaaatctgtttccatcatgttttaggcagtct

SEQ ID NO: 186613 - DNA, 120 bp, Artificial Sequence
  ENSG00000111877_0 (sequence is synthesized)
tccatccggaagagccgccggggcagggaagttgaggcggtgcgcggcccggcgtcggtcgagagcgcaggcccggcagagccgcaggcgctaggccgcccgacacagcccgcgcgtccc

SEQ ID NO: 186614 - DNA, 120 bp, Artificial Sequence
  ENSG00000111877_1 (sequence is synthesized)
cgcggccggtggcgcctcgagcggccacgtgcacgcgcgcactccgcctcaccagccttcttgcgccggagacgaacccgctgcctggctggagctctctgggcccttcggcctcgggag

SEQ ID NO: 186615 - DNA, 120 bp, Artificial Sequence
  ENSG00000111877_2 (sequence is synthesized)
caacgcgttcccggcgacttctgacacagccattacctagattcaagatgaatagcgatcaagttacactggttggtcaagtgtttgagtcatatgtttcggaataccataagaatgata

SEQ ID NO: 186616 - DNA, 120 bp, Artificial Sequence
  ENSG00000111877_3 (sequence is synthesized)
ttcttctaatcttgaaggaaagggatgaagatgctcattacccagttgtggttaatgccatgactctgtttgagaccaacatggaaatcggggaatatttcaacatgttccccagtgaag

SEQ ID NO: 186617 - DNA, 120 bp, Artificial Sequence
  ENSG00000111877_4 (sequence is synthesized)
tgcttacaatttttgatagtgcactgcgaaggtcagccttgacaattctccagtccctttctcagcctgaggctgtttccatgaaacagaatcttcatgccaggatatcaggtttgcctg

SEQ ID NO: 186618 - DNA, 120 bp, Artificial Sequence
  ENSG00000111877_5 (sequence is synthesized)
tctgtcctgagctggtgagggaacacatacctaaaaccaaggatgtgggacactttttatctgtcactgggacagtgattcgaacaagtctggtgaaggttctggagtttgagcgggatt

SEQ ID NO: 186619 - DNA, 120 bp, Artificial Sequence
  ENSG00000111877_6 (sequence is synthesized)
acatgtgtaacaaatgcaagcatgtgtttgtgatcaaggctgactttgagcagtattacaccttttgccggccatcctcgtgtcccagcttggagagctgtgattcctctaaattcactt

SEQ ID NO: 186620 - DNA, 120 bp, Artificial Sequence
  ENSG00000111877_7 (sequence is synthesized)
gcctctcaggcttgtcttcgtctccaaccaggtgtagagattaccaggaaatcaaaattcaggaacaggttcaaaggctatctgttggaagtattccacgatctatgaaggttattctgg

SEQ ID NO: 186621 - DNA, 120 bp, Artificial Sequence
  ENSG00000111877_8 (sequence is synthesized)
aagatgacttagtggatagttgcaaatctggtgatgacctcactatttacgggattgtaatgcaacggtggaagccctttcagcaagatgtgcgctgtgaagtggagatagtcctgaaag

SEQ ID NO: 186622 - DNA, 120 bp, Artificial Sequence
  ENSG00000111877_9 (sequence is synthesized)
caaattacatccaagtaaataatgagcagtcctcagggatcatcatggatgaggaggtccaaaaggaattcgaagatttttgggaatactataagagcgatccctttgcaggaaggaatg

SEQ ID NO: 186623 - DNA, 120 bp, Artificial Sequence
  ENSG00000111877_10 (sequence is synthesized)
taatattggctagcttgtgccctcaagtgtttggaatgtatctagtaaagcttgctgtggccatggtgctggctggtgggattcaaaggactgatgctacaggaacacgggtcagaggag

SEQ ID NO: 186624 - DNA, 120 bp, Artificial Sequence
  ENSG00000111877_11 (sequence is synthesized)
aatctcatcttttattggttggggatcctggcacagggaaatctcagttcctcaaatatgcagcaaagattacaccaagatctgtgctgaccacaggaattggatctactagtgcaggtc

SEQ ID NO: 186625 - DNA, 120 bp, Artificial Sequence
  ENSG00000111877_12 (sequence is synthesized)
tgacggtaactgctgtaaaagactcaggagaatggaatttggaggctggggcattagttcttgcagatgcgggcctttgctgtattgatgagttcaatagcctcaaagagcatgatagga

SEQ ID NO: 186626 - DNA, 120 bp, Artificial Sequence
  ENSG00000111877_13 (sequence is synthesized)
ccagtatccatgaagcaatggagcaacaaaccataagtgttgctaaggctggcctcgtgtgcaagctgaacacaaggaccaccatcctggcagcaacgaaccccaaaggccagtacgacc

SEQ ID NO: 186627 - DNA, 120 bp, Artificial Sequence
  ENSG00000111877_14 (sequence is synthesized)
cccaggagtccgtgtctgtgaacattgccctcggcagcccactcttaagtcgatttgacctgatcctggttttgcttgataccaagaatgaagactgggatcgtatcatttcctccttta

SEQ ID NO: 186628 - DNA, 120 bp, Artificial Sequence
  ENSG00000111877_15 (sequence is synthesized)
tcttagaaaataaaggttacccaagcaaatcagagaagctctggagcatggaaaagatgaaaacctatttctgcctcataaggaatctgcagcccacactgtctgatgtgggcaatcagg

SEQ ID NO: 186629 - DNA, 120 bp, Artificial Sequence
  ENSG00000111877_16 (sequence is synthesized)
ttcttctccggtactaccagatgcaaaggcagagtgattgccggaacgctgcccggaccaccattcggctgttggaaagcttgatacgattagcagaagctcatgctcgcctgatgtttc

SEQ ID NO: 186630 - DNA, 120 bp, Artificial Sequence
  ENSG00000111877_17 (sequence is synthesized)
gtgatactgtaactctggaagacgctattacggtggtgtcagtcatggagtcctcaatgcagggaggtgcactgctaggaggtgtgaatgccctccacacttcctttcctgaaaaccctg

SEQ ID NO: 186631 - DNA, 120 bp, Artificial Sequence
  ENSG00000111877_18 (sequence is synthesized)
gagagcagtaccagagacagtgtgaacttattctggaaaagctagagctgcagagcctcttgagtgaagagcttagaagacttgaaaggttacagaatcagagtgtgcaccaatcccaac

SEQ ID NO: 186632 - DNA, 120 bp, Artificial Sequence
  ENSG00000111877_19 (sequence is synthesized)
cacgggtattggaggtagagactactccaggatccttgagaaatggtccaggggaagaatcaaacttcagaacttcatcacagcaggaaatcaactatagcacacatatcttctctcctg

SEQ ID NO: 186633 - DNA, 120 bp, Artificial Sequence
  ENSG00000111877_20 (sequence is synthesized)
gaggcagccccgagggaagcccagttctagatcccccaccgcatctggagcctaatagatcaacaagtaggaaacattcagctcagcacaaaaataacagagatgacagtttagattggt

SEQ ID NO: 186634 - DNA, 120 bp, Artificial Sequence
  ENSG00000111877_21 (sequence is synthesized)
caaaacatctggagaaaatatggcttcgaagatctctaacagcacatctcagggtaaggagaagagtgagccaggccaaaggagcaaagtggacattgggttgcttccatcaccaggaga

SEQ ID NO: 186635 - DNA, 120 bp, Artificial Sequence
  ENSG00000111877_22 (sequence is synthesized)
gacaggtgttccatggagggcagacaatgtggaaagtaacaagaaaaaaaggctagcactagattctgaagcagcagtctctgctgataaaccagactcagtactgactcatcatgtccc

SEQ ID NO: 186636 - DNA, 120 bp, Artificial Sequence
  ENSG00000111877_23 (sequence is synthesized)
caggaacctgcagaagctgtgcaaagagagggcccagaagttgtgcagaaatagcaccagggtgcctgcacagtgcacagtcccttcccatcctcagtccactcctgtacatagcccaga

SEQ ID NO: 186637 - DNA, 120 bp, Artificial Sequence
  ENSG00000111877_24 (sequence is synthesized)
cagaatgctggactcacccaaaagaaagagaccgaaatcccttgcgcaagtggaagagcctgcaattgaaaatgttaagcctccaggttcccctgtggccaaactggcaaaatttacttt

SEQ ID NO: 186638 - DNA, 120 bp, Artificial Sequence
  ENSG00000111877_25 (sequence is synthesized)
caagcagaagtcaaaactgatccactcctttgaagatcacagccatgtgtcacctggtgcaactaaaatagcagttcatagtcctaaaatttcccagcgtagaacaagaagagacgcagc

SEQ ID NO: 186639 - DNA, 120 bp, Artificial Sequence
  ENSG00000111877_26 (sequence is synthesized)
cttgccggtgaagcgtccaggaaagttaacatctaccccaggaaaccagatctccagtcagccacagggtgagacaaaggaggtgtcgcagcagccaccagagaaacacggaccaagaga

SEQ ID NO: 186640 - DNA, 120 bp, Artificial Sequence
  ENSG00000111877_27 (sequence is synthesized)
gaaggtgatgtgtgcccctgagaagaggattattcagcctgaattagagcttgggaacgagactgggtgtgctcatcttacttgtgagggagacaaaaaggaagaggtttcaggcagtaa

SEQ ID NO: 186641 - DNA, 120 bp, Artificial Sequence
  ENSG00000111877_28 (sequence is synthesized)
taaaagcggcaaggttcatgcctgcacattagccagattggcaaacttctgctttactcccccatcggaatccaaatcaaaatcccctcctcctgaaaggaagaaccgaggtgagagagg

SEQ ID NO: 186642 - DNA, 120 bp, Artificial Sequence
  ENSG00000111877_29 (sequence is synthesized)
cccaagctcccctcctacaaccacagctccaatgcgtgtcagtaaaaggaaatcttttcagctccgtgggtccaccgagaaactgattgtttccaaagaatccctcttcactttaccaga

SEQ ID NO: 186643 - DNA, 120 bp, Artificial Sequence
  ENSG00000111877_30 (sequence is synthesized)
actaggtgatgaagcatttgattgtgactgggatgaagagatgagaaaaaagtcatagttgggaaaagctttctggtcaaatctcaccttcttcaactccacagaggaccttcaggatat

SEQ ID NO: 186644 - DNA, 120 bp, Artificial Sequence
  ENSG00000111877_31 (sequence is synthesized)
caatatggtatttataaatgtatagaacaattggccatattgaggatcactctgaatactggctcccccttaaggctttctaatttcaggttaatcttcatgacttaaaaagttgtataa

SEQ ID NO: 186645 - DNA, 120 bp, Artificial Sequence
  ENSG00000111877_32 (sequence is synthesized)
tcagttgaggtcagtgtgataccagcagctgagctgaattaattatgttgtgcttaattttacaaatggagtacttgtattcctgttcctgaagctgtttctgttttttgttttgttttg

SEQ ID NO: 186646 - DNA, 120 bp, Artificial Sequence
  ENSG00000111877_33 (sequence is synthesized)
tttttaagggggagaggttcttccctagattaatttcttctttcattcactcaggaacaaatgtcaagaaggtagcactcataaatctaacaaggcagatgaactcttttctactttttt

SEQ ID NO: 186647 - DNA, 120 bp, Artificial Sequence
  ENSG00000111877_34 (sequence is synthesized)
tttttttttttgtattttcacctggaatgggctaagtacagtgaatataatcacttggatgatttgccaaaatcagactatttttctagtattatttttgtattgatttgtgtggatcag

SEQ ID NO: 186648 - DNA, 120 bp, Artificial Sequence
  ENSG00000111877_35 (sequence is synthesized)
gttaaatgtgactaatgcttttctttctttgagaggtatccttacaattccatgatgttcttagagatctggccactggtcaaacagtacctttctgaagtactgaccttctgagttgtc

SEQ ID NO: 186649 - DNA, 120 bp, Artificial Sequence
  ENSG00000111877_36 (sequence is synthesized)
ctttctttcttgagccaacattttgtacttcagattcttttttctcttgggggcctaccttcaaccaagtaaaatactgtgattagaagaagagagagtatgagccaggcacagtgactc

SEQ ID NO: 186650 - DNA, 120 bp, Artificial Sequence
  ENSG00000111877_37 (sequence is synthesized)
actcctgtagtcctagctactcggggaggctgaggcaggatgattgcttaagcccaggagttcggggttacagtgagctgtggtcacaccactgtattccagcctgggtgacagagtgag

SEQ ID NO: 186651 - DNA, 120 bp, Artificial Sequence
  ENSG00000111877_38 (sequence is synthesized)
atcctgtctctaaaaataaaataaatgaagaagagagactatgtggtagtctcaatcaaacatcatgtctcatctacccagctggttaatatggaaatgtgattcctactaagttgtgat

SEQ ID NO: 186652 - DNA, 120 bp, Artificial Sequence
  ENSG00000111877_39 (sequence is synthesized)
tcacttgtctttaaaaccaaggaaattatatactgtttttggtcagaatagataacctcaagctttgtctttctatgtgcttttaaaatcacttattcctttggattctaataagggtta

SEQ ID NO: 186653 - DNA, 120 bp, Artificial Sequence
  ENSG00000111877_40 (sequence is synthesized)
ttaggattcagtaattatggactttctcttctgaagtgtgaatttgtaaactgattgtttaattgtcagagggacttttggacatagaatactcaaaactatatgtattttgtttaattt

SEQ ID NO: 186654 - DNA, 120 bp, Artificial Sequence
  ENSG00000111877_41 (sequence is synthesized)
tcacttcattcaattcacgcattgaaaacaaatttagaaaatccaatttttcttaagcatttaaacgttctaaaattcactaataaaattttctgaaaaaatttaaactgtgagtacaaa

SEQ ID NO: 186655 - DNA, 120 bp, Artificial Sequence
  ENSG00000111877_42 (sequence is synthesized)
agcgcgcggccgctcgggagagcgcagacccccgctccagcgccggccagacgtcgtgcagcggcgacttgagaaacttttttcctctttttatttacacgggagcactccacagtgttt

SEQ ID NO: 186656 - DNA, 120 bp, Artificial Sequence
  ENSG00000111877_43 (sequence is synthesized)
tgcagctttcctatttcactaaactacagcccattctgctctgataagtagcagcgttgccctcgattggctgcacccgagttctgaccctcctcctccagcgagggcctcggcagccag

SEQ ID NO: 186657 - DNA, 120 bp, Artificial Sequence
  ENSG00000111877_44 (sequence is synthesized)
ttctgacacagccactgtttctgcagaacccagtagatttcctacggtaagaaagagaaagaaggaaacaaattcacttccaagtatgaatttctaaggacagtctgttaattattcatg

SEQ ID NO: 186658 - DNA, 120 bp, Artificial Sequence
  ENSG00000111877_45 (sequence is synthesized)
tttcaagctaatttttgagttaccactaaaaatggaaggaaatatgcaatgttattttggtagctctaagaaaatatcttgcaagctccaccttcactttgcatcttagttttgaacaat

SEQ ID NO: 186659 - DNA, 120 bp, Artificial Sequence
  ENSG00000111877_46 (sequence is synthesized)
cctattcaattttctcattctctagtgattaccttcatacttttatgcaggaaaaagtccgtatcatctggcattttatcaagactcagcaactggaatgttaaactaaagagggggata

SEQ ID NO: 186660 - DNA, 120 bp, Artificial Sequence
  ENSG00000111877_47 (sequence is synthesized)
tttcactttaccaagtagatagatggtatagagcttaaggcattttcatgctcataaatctgataggcaacagtagctcctactgaaatttcttaggtagggaatgtttattaatatttg

SEQ ID NO: 186661 - DNA, 120 bp, Artificial Sequence
  ENSG00000111877_48 (sequence is synthesized)
gaaaatatacttccatcattgcaatgtggagcttcattcataagttgtaatgattctttagcaagtacacttaaaagcctttgcaggtagaatgtcaagatttgattataaataaagtga

SEQ ID NO: 186662 - DNA, 120 bp, Artificial Sequence
  ENSG00000111877_49 (sequence is synthesized)
cccagggaatttagaaaaaaattattttaaaaaatatgtttgatgctattttgtatttttacagttttgattgggtaatgtttctgttcttctgaaaacagacccttggcttcacacatt

SEQ ID NO: 186663 - DNA, 120 bp, Artificial Sequence
  ENSG00000111877_50 (sequence is synthesized)
ttaaaaatgtttgctacttgttaagggagtcagattaacttccattgggctaatgaatgctcaaatttctaatgagaaactaacactttaaaatttatcatacaacagaaaatggccaat

SEQ ID NO: 186664 - DNA, 120 bp, Artificial Sequence
  ENSG00000111877_51 (sequence is synthesized)
taatggtcctgtataagtggaaaactgttaaggaggtctcaggttttgaaatataactcaacagtatattaaccattgacaagaatggatttttggaattgagaagggtagacaaacttc

SEQ ID NO: 186665 - DNA, 120 bp, Artificial Sequence
  ENSG00000111877_52 (sequence is synthesized)
aggatactaggcaagaatatataaagaatatttcccatgcgttttaaatccgtatgacccagtgttctagagttctgtataaaatgataccaacaacaaataaagatgcttcccaagtaa

SEQ ID NO: 186666 - DNA, 120 bp, Artificial Sequence
  ENSG00000111877_53 (sequence is synthesized)
tagtcctaaagtattgattaggaaaagccactttttattttcccaagatcactggcaagggaaatgtagagctgtaattgctcaccttgagattagaaactggcaggtgggaagtgatag

SEQ ID NO: 186667 - DNA, 120 bp, Artificial Sequence
  ENSG00000111877_54 (sequence is synthesized)
caggaagagagctgggctagatctatacaacagcagctagtccaggtgcttgttttatgaatgaagaacctgacttgtctaaggtcacttagagagttaagtggcataactggaacatga

SEQ ID NO: 186668 - DNA, 120 bp, Artificial Sequence
  ENSG00000111877_55 (sequence is synthesized)
atccagaaccactgatgtctaatttaaggctcttttcagtgcactatagcttaacagcaggaactttaaaaaatgtagtgaatttaatgggtatttttataaaatgaattagagaatgtg

SEQ ID NO: 186669 - DNA, 120 bp, Artificial Sequence
  ENSG00000111877_56 (sequence is synthesized)
actctgttaaatgctgctgcgtgtcttattggtgcctagaagaaaggacatcattcctctctgctctgtgctggtgacaccgtgattggagtcactgattgtagtctgctgtcttctgag

SEQ ID NO: 186670 - DNA, 120 bp, Artificial Sequence
  ENSG00000111877_57 (sequence is synthesized)
ggtcctcaatgttttcattggccgatacctgaattgggagggtacttgaaacccatactcaatgaagaactatacatggttagcatggagaaccctgaggaaggacatgacagccaactt

SEQ ID NO: 186671 - DNA, 120 bp, Artificial Sequence
  ENSG00000111877_58 (sequence is synthesized)
tcaatagttagaagactgtcacatagaaatagaattgtaattacagaagttgctgttgggtttcagtggggtaagccacaaggaggtagattttgactcaatacctaataattagaggtg

SEQ ID NO: 186672 - DNA, 120 bp, Artificial Sequence
  ENSG00000111877_59 (sequence is synthesized)
tctaacatgggccttagatggtgatgagttctttttctcatagacaatcaagcacagcatatacagtacattgttagggatttaggccctacagtggcagttgatctggataataatctg

SEQ ID NO: 186673 - DNA, 120 bp, Artificial Sequence
  ENSG00000111877_60 (sequence is synthesized)
caatgttccaggcaatttaaagactttctgagcctcagaactgttctggaaatctgagagttccgaaagcctgattgttccagtgtcattctgagcttatgctttactctttaggctaac

SEQ ID NO: 186674 - DNA, 120 bp, Artificial Sequence
  ENSG00000111877_61 (sequence is synthesized)
cagactggtcctgagttctcctttgtccctgtcaactcatcatgttccctctcctcactggggagactaagaagaaatcaaacttaaaagtatttgtggaagggtgatgttttagtcatt

SEQ ID NO: 186675 - DNA, 89 bp, Artificial Sequence
  ENSG00000111877_62 (sequence is synthesized)
aacttaaaagtatttgtggaagggtgatgttttagtcattttgggctgttagtccattcttgcgttgctataaagaaatacctgggacg

SEQ ID NO: 186676 - DNA, 120 bp, Artificial Sequence
  ENSG00000111877_63 (sequence is synthesized)
cataggctcagcttcttctgaggcatcaggaagtttacaatcatggcagaagggagagggggagcaggcacatgacatggtaaaagcaggagcaagagtggggagggaggaggtgccaca

SEQ ID NO: 186677 - DNA, 120 bp, Artificial Sequence
  ENSG00000111877_64 (sequence is synthesized)
cacatttaaatgaacagagctcattcaaactcagagtgagagctcctttatcaccaaaagggtggcccaagccattcatgagggatccacctgcatgatccagacacctcctaccaggca

SEQ ID NO: 186678 - DNA, 120 bp, Artificial Sequence
  ENSG00000111877_65 (sequence is synthesized)
tctcctccaatactagggattatatctcaacatgagatttgaatggggacaattatccaaactatatcaggctgctctaacaaatcaccatagactaggtgggttcaacaacaaatattt

SEQ ID NO: 186679 - DNA, 120 bp, Artificial Sequence
  ENSG00000111877_66 (sequence is synthesized)
atttctcacagttttggaggctggaggttggagatcaggatgccagtgtcttcggattctggtgagggacctcttctaggtttcagatagccgacgtatattaacgtacagttgtgtaaa

SEQ ID NO: 186680 - DNA, 120 bp, Artificial Sequence
  ENSG00000111877_67 (sequence is synthesized)
tagtatactaatgagataacagctttgattatggattgcctgctaagcaaccccagaatatgtcaaaataccttgctcatataggactagattttaacctaaatctgtaatatctgtctc

SEQ ID NO: 186681 - DNA, 120 bp, Artificial Sequence
  ENSG00000111877_68 (sequence is synthesized)
agcaatgcagttcttatataagctcagcctgaacatgaaaatatccatcaattgagaataagatcttttcatgcagttcatctaaactgaattctttctgtactggaaataagtcttaag

SEQ ID NO: 186682 - DNA, 120 bp, Artificial Sequence
  ENSG00000111877_69 (sequence is synthesized)
ttgtttttctttcaaatgtcattaataatgaaggatggatagaagcaatctatcaacagctattttttcatgtatcattagctataaacctctgtgggaatcaaaagacaaatagtatat

SEQ ID NO: 186683 - DNA, 120 bp, Artificial Sequence
  ENSG00000111877_70 (sequence is synthesized)
aatccttgcccttcaggaatttacgatctagttaggaaccccactttggcacatgcagagtaatgaagttggagggtgtgtgctggtaaatgtcagtgccacaggagatccgagagatgg

SEQ ID NO: 186684 - DNA, 120 bp, Artificial Sequence
  ENSG00000111877_71 (sequence is synthesized)
gtctgactggcaatggctacagtagtaaagatgccgcagatgatataggggcacagagagactggattgtagaaaagtaagaattttagcttcctgaaaataacattgcttataacatta

SEQ ID NO: 186685 - DNA, 120 bp, Artificial Sequence
  ENSG00000111877_72 (sequence is synthesized)
gttttgaaaaatacagaagtttaaggtgaatatctgttgtcttggactatcatgtatacctcacaattgttctggtgattatatgaatctgccattcagtaattatttgagtaaagaaaa

SEQ ID NO: 186686 - DNA, 120 bp, Artificial Sequence
  ENSG00000111877_73 (sequence is synthesized)
cacgtatatattgaagggcttttaaaggtattaattactttacaaatgtaaggtaggtttagtataagaagagctaatatttactgagcacttgccgtcttctagatactgcattaagta

SEQ ID NO: 186687 - DNA, 120 bp, Artificial Sequence
  ENSG00000111877_74 (sequence is synthesized)
atttacgtacattatccgatctaattctcattatagtactgtgatgtaaatataatcattcacattttgtagttcaagaaacaggcttaggaaaggtaggtaatttgcccaaggtcacgt

SEQ ID NO: 186688 - DNA, 120 bp, Artificial Sequence
  ENSG00000111877_75 (sequence is synthesized)
agcctatgggcagtggagctgggatttaaatccaaatctgatgaggtcagtactcttggccatgcttcagtgctctgtattttccacataatcactgcttattgacattagattattact

SEQ ID NO: 186689 - DNA, 120 bp, Artificial Sequence
  ENSG00000111877_76 (sequence is synthesized)
tacgggtcatatatctaaacattaagttcctcatttaactagtttagaaacaacctaaacataatccattaaaatgaccataatagagaattgttccatgtccttatgtaaagttgcccc

SEQ ID NO: 186690 - DNA, 120 bp, Artificial Sequence
  ENSG00000111877_77 (sequence is synthesized)
caatcatttttacctagaaatttggggtcagacaatatagtaaatgatcatcattcctgattgggtttgaaaatcattaagtagtggcttaggaaagatcttggaaacttgtaaagcact

SEQ ID NO: 186691 - DNA, 120 bp, Artificial Sequence
  ENSG00000111877_78 (sequence is synthesized)
tacttaatgtgtttgtaactatgtagtatgaagttgccttaaactagaaatgtgccttctattctgtggattggcaccaccagttccatgaatttagcattttcctttaggaaatcaaaa

SEQ ID NO: 186692 - DNA, 120 bp, Artificial Sequence
  ENSG00000111877_79 (sequence is synthesized)
gctatgcagattactcattgaaatttagagagtgaaaggcatttttcatcagcacatatcatataattggcacaaaggcttggaaatgaagaattgcctgttagttctgagacagtgttt

SEQ ID NO: 186693 - DNA, 120 bp, Artificial Sequence
  ENSG00000111877_80 (sequence is synthesized)
attatgcaaaatataaataccagaattggggttggggcacatccaacaccctgtgttcaacaagattaaaatttggggggaccaggattatgatttttttcatgtttgtttttggcccac

SEQ ID NO: 186694 - DNA, 120 bp, Artificial Sequence
  ENSG00000111877_81 (sequence is synthesized)
atttgtatatacttgttaactgatgcattgcattgtatgtcgtaacaagtacagatggcagtgtttggcgagtgtgcctataaactacccagggcctcttaggaaaatctataaaagttg

SEQ ID NO: 186695 - DNA, 120 bp, Artificial Sequence
  ENSG00000111877_82 (sequence is synthesized)
cttctgcctaccaggaatggtgggagggtttcctcaggtaggagagaaccatcagcaaggaacaagcaggattgtatcttgtgcttttatattttgtgggaaggaactttgaagcataac

SEQ ID NO: 186696 - DNA, 120 bp, Artificial Sequence
  ENSG00000111877_83 (sequence is synthesized)
aggcatttattcatttcttagttcattgtttctttggttcactaaaaaagatgtgggggggcagtgagtaaaatattagcaaatgagttaagtaaaaatgaacatgtaagaaacccaaac

SEQ ID NO: 186697 - DNA, 120 bp, Artificial Sequence
  ENSG00000111877_84 (sequence is synthesized)
tacctgccagtcatcacaaggttatctcttttcctgactccaaattatagtttaaccttctggctgcagttcccacatctcttctctaaatgagagctaaatggttagagactcagagga

SEQ ID NO: 186698 - DNA, 120 bp, Artificial Sequence
  ENSG00000111877_85 (sequence is synthesized)
tgaacatttcatccaatgtaactgtgatgaatgaatcatccagtaaactattttcccagtgaaaagtaataattttgtaggattatcatgtagcaggttatgaaaaataggaaatactga

SEQ ID NO: 186699 - DNA, 120 bp, Artificial Sequence
  ENSG00000111877_86 (sequence is synthesized)
cttcagcttttcactttacagatacatgactgtgggggacaacagtcaagaatctggggtgctattctgcccctgaattgttttctggatgagtgtacatattgtaaactctagtaaggg

SEQ ID NO: 186700 - DNA, 120 bp, Artificial Sequence
  ENSG00000111877_87 (sequence is synthesized)
agtggtttatttctaatttctggtcctttgtcattttgagtctgtgctcagcatgcaggatgctactgctggactcacttgatgctttttcctaggtgatgacctcactatttacgggat

SEQ ID NO: 186701 - DNA, 120 bp, Artificial Sequence
  ENSG00000111877_88 (sequence is synthesized)
tttctttcccaaataaaaactgctcgttgggttttattttccaattgtaatcttataaaactgacagttgtctgaatatcttatacttagtctagcatctgtatatcagaagctactttc

SEQ ID NO: 186702 - DNA, 120 bp, Artificial Sequence
  ENSG00000111877_89 (sequence is synthesized)
tagagttccagaaagactgaaagaagttacatttttctatggcatatacttttgctatagcctataaggatgccacaaaataaaatctttgtttctattactgtgttttttgttggatcc

SEQ ID NO: 186703 - DNA, 120 bp, Artificial Sequence
  ENSG00000111877_90 (sequence is synthesized)
ccggtctgttttcaaaaggaaaaagattagaaatagtgtattttaatgtctccagtcagcgtctctccatctgtggctgtcactgtgtttctcttagactgctgctttcagtcatctgcc

SEQ ID NO: 186704 - DNA, 120 bp, Artificial Sequence
  ENSG00000111877_91 (sequence is synthesized)
tgctgattctccttctgctggtagatagcaaatgtgccatctgccatggggtgctgctgcaggtcacaccttcaagaaaagattactcttaagtgtataattatgtccagatggcagaaa

SEQ ID NO: 186705 - DNA, 120 bp, Artificial Sequence
  ENSG00000111877_92 (sequence is synthesized)
gctcttttgcagctaacacacttaaccagagtctggcatacgggttattacggccctgtacgtgggccataataaccaaaaattaaaccaaaagactaaaagggcattgttataaatcag

SEQ ID NO: 186706 - DNA, 120 bp, Artificial Sequence
  ENSG00000111877_93 (sequence is synthesized)
gctgttagtagggactcgaaaaccatatagtacagtatagaatagtaagtataaggcgtccttatatgttttgatcacctactgttttgcaaggcactctgccaaatgttgagcttaaat

SEQ ID NO: 186707 - DNA, 120 bp, Artificial Sequence
  ENSG00000111877_94 (sequence is synthesized)
aggggtttcctattaatgtatttaggaaacacttgagaattgctgaagaaacttggtcagtgaaatcatatgtaccataggatatgcacgttatttatgttacatttgcaaaatgagtac

SEQ ID NO: 186708 - DNA, 120 bp, Artificial Sequence
  ENSG00000111877_95 (sequence is synthesized)
tttaagatacatatttcactaagttactaaaattttcataaatgaaaaggtcttcacttaactgttagaatcataatttgatatttgtaaagtacttgtaaaatccctaatacttctaag

SEQ ID NO: 186709 - DNA, 120 bp, Artificial Sequence
  ENSG00000111877_96 (sequence is synthesized)
aatagaataaaatacttatatgacttgtatgcaaggatttaatcatagtagtttgatatttaaaaatagagtaaatcagaaactttataagccaaaaattttttgtttgtttttgtagac

SEQ ID NO: 186710 - DNA, 120 bp, Artificial Sequence
  ENSG00000111877_97 (sequence is synthesized)
aatagagtaaatcagaaactttataagccaaaaattttttgtttgtttttgtagacatggagtcttgcccaggctggtctcacatttccgggctcaagtgaccctcctgccttggcctcc

SEQ ID NO: 186711 - DNA, 120 bp, Artificial Sequence
  ENSG00000111877_98 (sequence is synthesized)
ccagatattttttaaaatgttaaacataggcctgaacatctggaaatagcacataatttattaatagaatttagattctatgtcacattgagtaatcaattaaggactgtttatgacagt

SEQ ID NO: 186712 - DNA, 120 bp, Artificial Sequence
  ENSG00000111877_99 (sequence is synthesized)
taactttctgaagattttctagttaaatcctttctcaaacgaccctatgtaaaagtacacagtaaaaacactatgtaatattttgttggcattccaaatggacccttttatagaaattta

SEQ ID NO: 186713 - DNA, 80 bp, Artificial Sequence
  ENSG00000111879_0 (sequence is synthesized)
agcctcgccgagtcctcggtgcgggctgcgagcgggacccgcggagctgcgctgtcctcgacgcctccgccaggcgcggg

SEQ ID NO: 186714 - DNA, 80 bp, Artificial Sequence
  ENSG00000111879_1 (sequence is synthesized)
ccaaccccgggcatctgccccgcgccgttgtccccgcggcttcgggccggcgggaccgccccgtcccttccaggggtgac

SEQ ID NO: 186715 - DNA, 120 bp, Artificial Sequence
  ENSG00000111879_2 (sequence is synthesized)
tctggggggcgccgggtgtcgggtcgggaagcggccgccgcgactcttgcctcccgggcgtcgttgctccacgggcctgcctccacccgcggggacaggtgccccggctggggtctgttg

SEQ ID NO: 186716 - DNA, 120 bp, Artificial Sequence
  ENSG00000111879_3 (sequence is synthesized)
ggaagatggcgaccccgggcatgagctggcagcagcactattacggcggctcggcggccaaattcgcgccctcgccggccaccgcacagctggctgggcacagcatggactacagccagg

SEQ ID NO: 186717 - DNA, 120 bp, Artificial Sequence
  ENSG00000111879_4 (sequence is synthesized)
agatgcacctgaaaatgagcaagaaaatcgcccagctcaccaaggtaatatatgctttaaacactaaaaatgatgagcatgaatctgcaattcaagccctcaaagatgctcatgaagaag

SEQ ID NO: 186718 - DNA, 120 bp, Artificial Sequence
  ENSG00000111879_5 (sequence is synthesized)
aaattcaacaaattcttgctgaaacaagagaaaaaatattgcagtataaaagcaaagtaacagaggagctagaccttagaagaaagattcaagttttagaatcatcattagaagatcaca

SEQ ID NO: 186719 - DNA, 120 bp, Artificial Sequence
  ENSG00000111879_6 (sequence is synthesized)
taaaaatgaagcagcaggctttgacagaatttgaagcttataagcacagagttgaggacatgcaactttgtgcagaagcccagcatgtccaacgcatagtgaccatgtctagagaagtcg

SEQ ID NO: 186720 - DNA, 120 bp, Artificial Sequence
  ENSG00000111879_7 (sequence is synthesized)
aagagattagaaggaaatttgaagaaaaattacggagctttggacaacttcaagtacagtttgaaaaagacaaacgattggcattggaagacttgcaagctgctcacagacgggagatac

SEQ ID NO: 186721 - DNA, 120 bp, Artificial Sequence
  ENSG00000111879_8 (sequence is synthesized)
aagagctattgaagtcacagcaggatcacagtgcctcagtaaataaaggccaggaaaaggcagaggaactacacagaatggaggtggagtccctaaacaaaatgcttgaggagctaagac

SEQ ID NO: 186722 - DNA, 120 bp, Artificial Sequence
  ENSG00000111879_9 (sequence is synthesized)
ttgaacggaagaaactaattgaggattatgaaggcaagttgaataaagctcagtccttttatgaacgtgagcttgatactttgaaaaggtcacagctttttacagcagaaagcctacagg

SEQ ID NO: 186723 - DNA, 120 bp, Artificial Sequence
  ENSG00000111879_10 (sequence is synthesized)
ccagcaaagaaaaggaagctgatcttagaaaagaatttcagggacaagaagcaattttacgaaaaactataggaaaattaaagacagagttacagatggtacaggatgaagctggaagtc

SEQ ID NO: 186724 - DNA, 120 bp, Artificial Sequence
  ENSG00000111879_11 (sequence is synthesized)
ttcttgacaaatgccaaaagcttcagacggcacttgccatagcagagaacaatgttcaggttcttcaaaaacagcttgatgatgccaaggagggagaaatggccctattaagcaagcaca

SEQ ID NO: 186725 - DNA, 120 bp, Artificial Sequence
  ENSG00000111879_12 (sequence is synthesized)
aagaagtggaaagtgagctagcagctgccagagaacgtttacaacagcaagcttcagatcttgtcctcaaagctagtcatattggaatgcttcaagcaactcaaatgacccaggaagtta

SEQ ID NO: 186726 - DNA, 120 bp, Artificial Sequence
  ENSG00000111879_13 (sequence is synthesized)
caattaaagatttagaatcagaaaaatcgagagtcaatgagagattatctcaacttgaagaggaaagagcttttttgcgaagcaaaacccaaagtctggatgaagagcagaagcaacaga

SEQ ID NO: 186727 - DNA, 120 bp, Artificial Sequence
  ENSG00000111879_14 (sequence is synthesized)
ttctagaactggagaagaaagtaaatgaagcaaagagaactcagcaagaatattatgaaagggaacttaaaaacctgcaaagtagattggaagaggaggtgactcaattaaacgaggccc

SEQ ID NO: 186728 - DNA, 120 bp, Artificial Sequence
  ENSG00000111879_15 (sequence is synthesized)
attctaagactttggaagaattagcttggaagcaccatatggcaattgaagctgtccacagtaatgcaattagggataagaaaaaactgcaaatggatttggaagaacaacataacaaag

SEQ ID NO: 186729 - DNA, 120 bp, Artificial Sequence
  ENSG00000111879_16 (sequence is synthesized)
ataaactaaacctggaagaggataaaaatcagcttcaacaagagctagaaaacctaaaggaagtactggaagacaagttgaatacagccaatcaagagattggccacctccaagatatgg

SEQ ID NO: 186730 - DNA, 120 bp, Artificial Sequence
  ENSG00000111879_17 (sequence is synthesized)
gtcttcaggactcccaggaaaggcttcagaatgagcttgacttgactaaagacagcctaaaggagaccaaggatgctctattaaatgtggagggtgagctagaacaagaaaggcaacagc

SEQ ID NO: 186731 - DNA, 120 bp, Artificial Sequence
  ENSG00000111879_18 (sequence is synthesized)
atgaagaaacaattgctgccatgaaagaagaagagaagctcaaagtggacaaaatggcccatgacttagaaattaagtggactgaaaatcttagacaagagtgttctaaacttcgtgaag

SEQ ID NO: 186732 - DNA, 120 bp, Artificial Sequence
  ENSG00000111879_19 (sequence is synthesized)
agttaaggcttcaacatgaagaggataagaagtcagcaatgtctcaacttttgcagttgaaagatcgagagaaaaatgcagcaagagattcatggcagaagaaagtagaagatctcttaa

SEQ ID NO: 186733 - DNA, 120 bp, Artificial Sequence
  ENSG00000111879_20 (sequence is synthesized)
accagatttccttgctgaaacagaatctggagatacagctttcccagtctcagacttctttgcaacaactgcaagcccagtttacgcaagaacgacagcggcttacgcaagagcttgaag

SEQ ID NO: 186734 - DNA, 120 bp, Artificial Sequence
  ENSG00000111879_21 (sequence is synthesized)
aattagaggagcaacatcagcaaagacacaaatcattaaaagaagcacatgtccttgcatttcaaactatggaagaggaaaaggaaaaggagcaaagagctcttgaaaatcatttacaac

SEQ ID NO: 186735 - DNA, 120 bp, Artificial Sequence
  ENSG00000111879_22 (sequence is synthesized)
agaagcattctgcagagcttcaatcactaaaagatgcacacagagagtcaatggagggcttccggatagaaatggaacaggaacttcagactcttcggtttgaattagaagatgaaggaa

SEQ ID NO: 186736 - DNA, 120 bp, Artificial Sequence
  ENSG00000111879_23 (sequence is synthesized)
aggctatgcttgcttccttgcgctcagaactcaaccatcaacatgcagctgcaattgatttgttacggcataatcatcatcaagaattggcagctgctaaaatggaattagagagaagca

SEQ ID NO: 186737 - DNA, 120 bp, Artificial Sequence
  ENSG00000111879_24 (sequence is synthesized)
tagacatcagcagaagacagagtaaggagcacatatgtagaattacagatctacaagaggaattaagacacagagagcatcacatctctgaattggataaggaggttcagcaccttcatg

SEQ ID NO: 186738 - DNA, 120 bp, Artificial Sequence
  ENSG00000111879_25 (sequence is synthesized)
agaatataagtgccctaaccaaagaactggaatttaaggggaaagaaattctcagaatacgaagtgaatctaaccaacagataaggttgcatgaacaagatttaaacaagagacttgaaa

SEQ ID NO: 186739 - DNA, 120 bp, Artificial Sequence
  ENSG00000111879_26 (sequence is synthesized)
aagagttggatgtcatgacagcagaccacctcagagagaaaaatatcatgcgggcagattttaataagactaacgagctactcaaggaaataaatgccgctttacaagtgtcattagaag

SEQ ID NO: 186740 - DNA, 120 bp, Artificial Sequence
  ENSG00000111879_27 (sequence is synthesized)
aaatggaagaaaaatatctaatgagagaatcaaaaccagaagatatacagatgattacagaattaaaagccatgcttacagaaagagaccagatcataaagaaactaattgaggataata

SEQ ID NO: 186741 - DNA, 120 bp, Artificial Sequence
  ENSG00000111879_28 (sequence is synthesized)
agttttatcagctggaattagtcaatcgagaaactaacttcaacaaagtgtttaactcaagtcctactgttggtgttattaatccattggctaagcaaaagaagaagaatgataaatcac

SEQ ID NO: 186742 - DNA, 120 bp, Artificial Sequence
  ENSG00000111879_29 (sequence is synthesized)
caacaaacaggtttgtgagtgttcccaatctaagtgctctggaatctggtggagtgggcaatggacatcctaaccgcctggatcccattcctaattctccagtccacgatattgagttca

SEQ ID NO: 186743 - DNA, 120 bp, Artificial Sequence
  ENSG00000111879_30 (sequence is synthesized)
acagcagcaaaccacttccacagccagtgccacctaaagggcccaagacatttttgagtcctgctcagagtgaagcttctccagtggcttctccagatccccagcgccaggagtggtttg

SEQ ID NO: 186744 - DNA, 120 bp, Artificial Sequence
  ENSG00000111879_31 (sequence is synthesized)
cccggtacttcacattctgaaagaattgtgttggcacagctctgtatagactgttactaagagcatgactttatacagattgttatgtaaataggctttcctatgtcaaacactgtgaat

SEQ ID NO: 186745 - DNA, 120 bp, Artificial Sequence
  ENSG00000111879_32 (sequence is synthesized)
gagaaagtatttgtctctccaacttgaaaatgcactgtatttcctgtgatatttattggaatcattctataaggtactatattatgtgtgtaattataactgttatttttatttgagatg

SEQ ID NO: 186746 - DNA, 120 bp, Artificial Sequence
  ENSG00000111879_33 (sequence is synthesized)
gaagagtctttaacctttgtaattactgcataataaattttgttagaatcaaacaatgctttttatttttttctacgtttgctttaatttttaaatattttttaattccaggtaagactt

SEQ ID NO: 186747 - DNA, 120 bp, Artificial Sequence
  ENSG00000111879_34 (sequence is synthesized)
aaatctcacagtgctcatttttaaaagggtacacaaaaaaatctcaattccaaagaatttggatcagccaagagaaggcatgggaaaatatcaaatgtttgtatgattacctgggcaacc

SEQ ID NO: 186748 - DNA, 120 bp, Artificial Sequence
  ENSG00000111879_35 (sequence is synthesized)
ttttctgtgctatgtaaatgtgtaatgactaatcaaccaggacggccaagggatttgtttctagagataggcaattttcatttgtgcctgtgattggctcagctctgcgtgtgaagaggg

SEQ ID NO: 186749 - DNA, 120 bp, Artificial Sequence
  ENSG00000111879_36 (sequence is synthesized)
gccacctaaagggcccaagacatttttgaggtatcagtaagatgcatgtgcatgagctcaaggaacatgactactggagtttccattacacattgttgcgtgccttgtaattttccccaa

SEQ ID NO: 186750 - DNA, 120 bp, Artificial Sequence
  ENSG00000111879_37 (sequence is synthesized)
tagacctgttgcctatgttatagattttaataataataacttattctggtgacattgtataggtaggtaagtctcagtaaaggtaacatatctagaataaaaataatttaaaaactttaa

SEQ ID NO: 186751 - DNA, 120 bp, Artificial Sequence
  ENSG00000111879_38 (sequence is synthesized)
acttgtgtgccattggaaggaaggtcagggcagggaatcctcgctacttcactactcatgtctctggattgggcttgcctctcttcttggggaagagccacttcttggggccctgcacac

SEQ ID NO: 186752 - DNA, 120 bp, Artificial Sequence
  ENSG00000111879_39 (sequence is synthesized)
ctgcctatcttcacatcttaaaaggataccaggcatattggaacaagggctcattctactccagtttgacatcatcttaacttaatacatctgtactgactgtatttccaaataaagtca

SEQ ID NO: 186753 - DNA, 120 bp, Artificial Sequence
  ENSG00000111879_40 (sequence is synthesized)
cattctgaggtattgggagggtaggacttcggtatatctttttggggacccagttcaaccgataacaattggaacgtgcaattcttttactagtaagaggtagaactctcatatacagca

SEQ ID NO: 186754 - DNA, 120 bp, Artificial Sequence
  ENSG00000111879_41 (sequence is synthesized)
actaagtgcttctctgtgtctgcagatttcagaaagactctgccttttttcttccactcttatgaagcacagcaaagatttagattgtcttagatagtagagaaaaagaatccataaaac

SEQ ID NO: 186755 - DNA, 120 bp, Artificial Sequence
  ENSG00000111879_42 (sequence is synthesized)
tgggtgtatagtacccaggaagttcttaatcttttccttcagagagatggtttagagtataggctctgaagtcaggttggttgtatgtaaattctgaatccaccacatagtgtgtagctt

SEQ ID NO: 186756 - DNA, 120 bp, Artificial Sequence
  ENSG00000111879_43 (sequence is synthesized)
tgtgcaaagcctcaccttccacatctgcacaatgaaggagaggtggggggtaataacactcttcacagcactgttgtaataattaaatgagatgaaccatttatagcacagtgcttagca

SEQ ID NO: 186757 - DNA, 120 bp, Artificial Sequence
  ENSG00000111879_44 (sequence is synthesized)
aaatagtaaacactcagtaaatactgccttttactaatattatttcagattttcttttttagttcagaattggtgacatttcaaaagcatataaacaaggacactttagtgaatttacct

SEQ ID NO: 186758 - DNA, 120 bp, Artificial Sequence
  ENSG00000111879_45 (sequence is synthesized)
tgtgtgtggggcatacataattctatttatattttatctatgatatattctgtgtgcattgaatatttaccttccattttgaattatgtgacaataaattacttcattttcctcgaatca

SEQ ID NO: 186759 - DNA, 120 bp, Artificial Sequence
  ENSG00000111879_46 (sequence is synthesized)
tcaatcgagaaactaacttcaacaaagtgtttaactcaagtcctactgttggtgttattaatccattggctaagggactatcctcacatgtattatttttaatgcagcaaaagaagaaga

SEQ ID NO: 186760 - DNA, 120 bp, Artificial Sequence
  ENSG00000111879_47 (sequence is synthesized)
cccatggctccaatcatgttttgggtatagtaggtattcagtaaatatttgttcagttgcaaaatttcatcacattccctataagccaccacaaattattctgtgaataaaggaagtcat

SEQ ID NO: 186761 - DNA, 120 bp, Artificial Sequence
  ENSG00000111879_48 (sequence is synthesized)
aaagaataaatgattatatatatacatatatatatatattggcttcataggaattatgaatcttatggcagaaatcagtagtagaataaataaaagtgatagttccaaagctgtttttca

SEQ ID NO: 186762 - DNA, 120 bp, Artificial Sequence
  ENSG00000111879_49 (sequence is synthesized)
aattcagattttattaagtttcacgtcatgcctaatttttattaggactttacccagaaattttcctttcctttcacagctcgtaaaacttctctattaagaacactgaatctatccttc

SEQ ID NO: 186763 - DNA, 120 bp, Artificial Sequence
  ENSG00000111879_50 (sequence is synthesized)
ctttacaagttaaagtgttccaaactttaaacttgaatgttttctaaaatagaatgactgtagtggcatgtagctgtatctcagagtctaaaatactgcctggcagatagaaagctctga

SEQ ID NO: 186764 - DNA, 120 bp, Artificial Sequence
  ENSG00000111879_51 (sequence is synthesized)
agctctgagtaaataattggtgaatgaataattataattagttttagttttttaattcataatttagggtgaaataagattttaattataaagcaagattatgaggtttgtggaaaaaaa

SEQ ID NO: 186765 - DNA, 120 bp, Artificial Sequence
  ENSG00000111879_52 (sequence is synthesized)
aaaaatactccttttcatttatttattttattggaattaaattttttagctgcaaaatgattactgtagaactttaccagtattcttttgatttcttaaaatagaaaccttaagtaggtt

SEQ ID NO: 186766 - DNA, 120 bp, Artificial Sequence
  ENSG00000111879_53 (sequence is synthesized)
taattatgccctctggtgactagaataagaaaatgcaaaagatacatctttgtaagaactttcaaactacttttgactcctaatagtgactttagttttcacaaatagttctgaggaagg

SEQ ID NO: 186767 - DNA, 120 bp, Artificial Sequence
  ENSG00000111879_54 (sequence is synthesized)
tattattattattttctttttctggttatgctaaaataggattttcatcagagactctacaagtcacagaatatgacagaggaaaatgtttagacaatgagataaataaaaataaaagtt

SEQ ID NO: 186768 - DNA, 120 bp, Artificial Sequence
  ENSG00000111879_55 (sequence is synthesized)
ccatcttgtatattaattgcattttttcccaaactcgagttatttccctaaaaagcttacaaatttaattggtatacatctaattagtaaaatatgagaatattctaaatatctagtaac

SEQ ID NO: 186769 - DNA, 120 bp, Artificial Sequence
  ENSG00000111879_56 (sequence is synthesized)
atgttaatttttatttctcatagcaagatgatgatcattgattctagagatgtgaataaaatactttgagactaaagttagtgaattgcaagctgatagattttgataatctgcagtgga

SEQ ID NO: 186770 - DNA, 120 bp, Artificial Sequence
  ENSG00000111879_57 (sequence is synthesized)
tatggaaattagacttaattatgcagatataactttctctcttcagaaagatagatgtcacagtgaatttaaaaccagattatttctcttaagtcagctttaggtctttagtagaaatgt

SEQ ID NO: 186771 - DNA, 120 bp, Artificial Sequence
  ENSG00000111879_58 (sequence is synthesized)
gcaatttgtttcaaactacattgccaagcattttctcattcctttttttttttccaggcaagaactgcctccctttgacagatggctaaatttcatggactctcttttaaaattatgttt

SEQ ID NO: 186772 - DNA, 120 bp, Artificial Sequence
  ENSG00000111879_59 (sequence is synthesized)
aactttaccccttctcctaattttagcctaaatccatttaaccttctatctgcaagacttgctctctcccctaatcctttttcccttttcttcccaaaagggtattctttaccccttggc

SEQ ID NO: 186773 - DNA, 120 bp, Artificial Sequence
  ENSG00000111879_60 (sequence is synthesized)
actctttttaccttctctctcattcctcgtgaatgactcctaaatgtttcttcctcattctttctgccctggtagcatgtctgtctttgaggattccatgtagataaaaaatacctccaa

SEQ ID NO: 186774 - DNA, 120 bp, Artificial Sequence
  ENSG00000111879_61 (sequence is synthesized)
ggattcccagaccacagtttgggtaacactggttaattaacattttaatttaacataaagcttccaaaattttcccatgccaaatttctatcttctaccattcctattttctcatttgtc

SEQ ID NO: 186775 - DNA, 120 bp, Artificial Sequence
  ENSG00000111880_0 (sequence is synthesized)
gcattgtgggttctcctggagctgtggagttgatcctgaatgaaagtggcgcgccgcccctgacgttacccggatcggagaggttggaattcagattacggctgcgattcgggtgtctcg

SEQ ID NO: 186776 - DNA, 120 bp, Artificial Sequence
  ENSG00000111880_1 (sequence is synthesized)
gaccccggtgtgcaccggaccacggggaggcggctccaaaggcgcggtgaacgttggtgagggagggcagctctgcgcagccccaagacatggctcacaacaagatcccgccgcggtggc

SEQ ID NO: 186777 - DNA, 120 bp, Artificial Sequence
  ENSG00000111880_2 (sequence is synthesized)
tgaactgtccccggcgcggccagccggtggcaggaagattcttacctctgaagacaatgttaggaccaagatatgatagtcaagttgctgaagaaaatcggttccatcccagcatgctct

SEQ ID NO: 186778 - DNA, 120 bp, Artificial Sequence
  ENSG00000111880_3 (sequence is synthesized)
caaattacctaaagagcctaaaggttaaaatgggcttgttggtggacctgacaaatacttcaaggttctatgaccgaaatgacatagaaaaagaaggaatcaaatatataaaacttcagt

SEQ ID NO: 186779 - DNA, 120 bp, Artificial Sequence
  ENSG00000111880_4 (sequence is synthesized)
gtaaaggacatggtgagtgccctaccactgagaatactgagacctttattcgtctgtgtgagcggtttaatgaaagaaatccacctgaacttataggtgttcattgtactcatggcttca

SEQ ID NO: 186780 - DNA, 120 bp, Artificial Sequence
  ENSG00000111880_5 (sequence is synthesized)
atcgcactggtttcctcatatgtgcctttttggtggagaaaatggattggagtatcgaagcagcagttgctacttttgcccaagccagaccaccaggaatctacaagggtgattatttga

SEQ ID NO: 186781 - DNA, 120 bp, Artificial Sequence
  ENSG00000111880_6 (sequence is synthesized)
aggaactttttcgtcggtatggtgacatagaggaagcaccacccccacctctattgccagattggtgttttgaggatgatgaagacgaagatgaggatgaggatggaaagaaggaatcag

SEQ ID NO: 186782 - DNA, 120 bp, Artificial Sequence
  ENSG00000111880_7 (sequence is synthesized)
aacccgggtcaagtgcttcttttggcaaaaggagaaaagaacggttaaaactgggcgctattttcttggaaggtgttactgttaaaggtgtaactcaagtaacaacacaaccaaagttag

SEQ ID NO: 186783 - DNA, 120 bp, Artificial Sequence
  ENSG00000111880_8 (sequence is synthesized)
gagaggtacagcagaagtgtcatcaattctgtggctgggaagggtctggattccctggagcacagcctgtttccatggacaagcaaaatattaaacttttagacctgaagccatacaaag

SEQ ID NO: 186784 - DNA, 120 bp, Artificial Sequence
  ENSG00000111880_9 (sequence is synthesized)
taagctggaaagcagatggtactcggtacatgatgttgattgatggcacaaatgaagtttttatgattgatagagacaattcagtatttcatgtttcaaatctggaatttccatttcgta

SEQ ID NO: 186785 - DNA, 120 bp, Artificial Sequence
  ENSG00000111880_10 (sequence is synthesized)
aagatcttcgtatgcatttatcaaatactctcttggatggcgagatgattattgacagagtaaatggacaggctgttcctagatatttgatatatgacataattaaattcaattcacagc

SEQ ID NO: 186786 - DNA, 120 bp, Artificial Sequence
  ENSG00000111880_11 (sequence is synthesized)
ccgttggagattgtgattttaatgttcgtctgcagtgtatagaacgagaaattataagtcctcgacacgaaaaaatgaagactgggctcattgacaaaacacaggaaccatttagcgtca

SEQ ID NO: 186787 - DNA, 120 bp, Artificial Sequence
  ENSG00000111880_12 (sequence is synthesized)
gaaataagccgttttttgacatctgtacttcaagaaagctacttgaaggaaattttgccaaagaagtgagccatgaaatggatggacttatttttcagcctactggaaaatacaaacctg

SEQ ID NO: 186788 - DNA, 120 bp, Artificial Sequence
  ENSG00000111880_13 (sequence is synthesized)
gtcgatgtgatgatattttgaaatggaagcctcccagtctgaattctgtggattttcgtctaaaaataacaagaatgggaggagaagggttacttcctcagaatgttggcctcctgtatg

SEQ ID NO: 186789 - DNA, 120 bp, Artificial Sequence
  ENSG00000111880_14 (sequence is synthesized)
ttggaggttatgaaagaccctttgcacaaatcaaggtgacaaaagagctgaaacagtatgacaacaaaattatagaatgcaaatttgagaacaacagctgggtcttcatgagacagagaa

SEQ ID NO: 186790 - DNA, 120 bp, Artificial Sequence
  ENSG00000111880_15 (sequence is synthesized)
cagacaaaagttttcctaatgcctacaacactgccatggctgtgtgtaacagcatctcaaaccctgtcaccaaggagatgctgtttgagttcatcgacagatgtactgcagcttctcaag

SEQ ID NO: 186791 - DNA, 120 bp, Artificial Sequence
  ENSG00000111880_16 (sequence is synthesized)
gacagaagcgaaaacatcatctggaccctgacacggagctcatgccaccaccacctcccaaaagaccacgccctttaacctaagacctgcctgtgacttgagggttaagaagaaagagga

SEQ ID NO: 186792 - DNA, 120 bp, Artificial Sequence
  ENSG00000111880_17 (sequence is synthesized)
atgaggaaaaaacgctgttgcccatttttgtagccagagaaattgaaaaacgactgtggcttgatgttgatacacatttgaattttttttaaaaaaagaaagttatcgtagccagcctgt

SEQ ID NO: 186793 - DNA, 120 bp, Artificial Sequence
  ENSG00000111880_18 (sequence is synthesized)
aaatacttgatgcattcgtttcctcagtgctgcaatacatcgtggacttaaacatcttatttatctgataaactcagccttaccttgtggaatctgaagattgaaatatccaaaggttta

SEQ ID NO: 186794 - DNA, 120 bp, Artificial Sequence
  ENSG00000111880_19 (sequence is synthesized)
aacaagatggaaatcaatgaaaaagaggccttgtttatatatgggtagcttcacatttaatttataaagttaacaatctggaaactgtgagcccataaaacagtattttttagaagttgt

SEQ ID NO: 186795 - DNA, 120 bp, Artificial Sequence
  ENSG00000111880_20 (sequence is synthesized)
ttaaaaaatccaggcaatggcattaaacattcttgctatcatttaccatggatttcctacatttctgagatccctgtattcaaaaacaaatgacagggttgttaagttgtactatattaa

SEQ ID NO: 186796 - DNA, 120 bp, Artificial Sequence
  ENSG00000111880_21 (sequence is synthesized)
acaacttggtctggtttatatcattttaacaagttttttggaaatgtaaaagaaaaaagtaaagctccatttttgtgaattgcattgtttctaaaggaagtattttgagtattttcatct

SEQ ID NO: 186797 - DNA, 120 bp, Artificial Sequence
  ENSG00000111880_22 (sequence is synthesized)
gtttgtattgtttcgactatgatatcagatatccagtgtgtccattctggcagtggttttgagttacttcatggaacttggacatacaccaccaggtcctttatgtgttgttctcctggg

SEQ ID NO: 186798 - DNA, 120 bp, Artificial Sequence
  ENSG00000111880_23 (sequence is synthesized)
agacttctttttttaaatgccagggctacttctgctttacctcagtggtatcagcacattgtaaattacgttaaaacacacaactcactgtgatctatgggagtgatatcaaatacaaac

SEQ ID NO: 186799 - DNA, 120 bp, Artificial Sequence
  ENSG00000111880_24 (sequence is synthesized)
gatgttgtgttccttctctcgaacaaaacagcaaagggaatgccagctaacttctttgattagaaggtaatgtcatggaatagaatgctgtcaccagaaaatgctctcccactgctagat

SEQ ID NO: 186800 - DNA, 120 bp, Artificial Sequence
  ENSG00000111880_25 (sequence is synthesized)
aaatgcagaggcaaagtgtagacatctgtaggaactaaatatcaaggaaatcaagacatttattttcaaagcgagaattctatctacattctattctgcggatgttatttctgttataca

SEQ ID NO: 186801 - DNA, 120 bp, Artificial Sequence
  ENSG00000111880_26 (sequence is synthesized)
tctgaattttaaaatgtttactgatagataatggatttaaagggcggctaattgattgtctgccattgttgataaactgttctaattggtttgtgaaagaactctgagaattagctaaat

SEQ ID NO: 186802 - DNA, 120 bp, Artificial Sequence
  ENSG00000111880_27 (sequence is synthesized)
ggaggctagtgtatttatttttagaggtacatgttttaagtaaatgtatttaaaacaaattttcatggtctgaattgtatatgtaaatgcatatctgtgtaagtatatgcaagtgtatat

SEQ ID NO: 186803 - DNA, 120 bp, Artificial Sequence
  ENSG00000111880_28 (sequence is synthesized)
tcttctactgattcagtcagacacgaaatccaactgaattacccggtagactgaatatctgacgggatttctatatggacatagcacagatgaaccaaaaatgtatttatattcacctga

SEQ ID NO: 186804 - DNA, 120 bp, Artificial Sequence
  ENSG00000111880_29 (sequence is synthesized)
gttttaatgtttttaaacaaagttttctcctgcagtgcttttctatatgaaatagttgagtcaagcttgggcttttttcttcgttgttcccaagtcatgtaatgtatagtgaatttatcc

SEQ ID NO: 186805 - DNA, 120 bp, Artificial Sequence
  ENSG00000111880_30 (sequence is synthesized)
aaaacgccattgtaacgttttttactagagtgtttttgcacatttgggcgctaaagggattaaaacaactgatgccacaatgactattgaaggagggaaaattctcaaggttccatagta

SEQ ID NO: 186806 - DNA, 120 bp, Artificial Sequence
  ENSG00000111880_31 (sequence is synthesized)
tcttttacaaaatggattaaaaaaaaaatgcctatgcaacttcaaatagtctgatgcctgcttccccaggacgagtgactcttccacggtgtgctgctttccctccgagcctgtggaaag

SEQ ID NO: 186807 - DNA, 120 bp, Artificial Sequence
  ENSG00000111880_32 (sequence is synthesized)
gcagagcccttttgcagatacgaaagcaagcttttgccaatgatctttaatggagttaaaatgtttatggtaattgtaacctttcaaatgagttacgtgaaaagagcatctcacttttaa

SEQ ID NO: 186808 - DNA, 120 bp, Artificial Sequence
  ENSG00000111880_33 (sequence is synthesized)
tacacccagatattttcttcaagtctttgtgcattttagcaggacttaattttcttaatttattctttcctttcaattatagtgacatagagtagttggccttataagtagatcccattt

SEQ ID NO: 186809 - DNA, 120 bp, Artificial Sequence
  ENSG00000111880_34 (sequence is synthesized)
agcccctgaacataataccatctgcagtattataaaagtcatttagaaggtcagggggataatctagaggcaggattttggacattgtgaaggaaatgtgctccttctcagctcacttca

SEQ ID NO: 186810 - DNA, 120 bp, Artificial Sequence
  ENSG00000111880_35 (sequence is synthesized)
ataactattttctgagactgaagttttttagacaagaataagaaaactttgctttcttcagttatcacatgtgaaagcttttgctttttgttaggaaaaggtgtggatgactctactgcg

SEQ ID NO: 186811 - DNA, 120 bp, Artificial Sequence
  ENSG00000111880_36 (sequence is synthesized)
tggatggttacatttgctttccgtgaaatgctcagaaaatgtcaggacattccttttccaattgtgtgtcagtgcgtattgtaataaaactactgatttaaattagcataagtgtatcta

SEQ ID NO: 186812 - DNA, 120 bp, Artificial Sequence
  ENSG00000111880_37 (sequence is synthesized)
ctttgttttactggtgatactcttgtgtcccttctattgctggcatcacatcctactgctgtcagccacacccagtgtaatccatctggctttgtagagattagcataaagacttggaaa

SEQ ID NO: 186813 - DNA, 120 bp, Artificial Sequence
  ENSG00000111880_38 (sequence is synthesized)
gcctctatttttctttctgagaaactgagaaatttgattgacacaggggggtgtagtttgaaccttttatttttgaagtggagaggaatgggagaaagcacatctttatatgatgtttat

SEQ ID NO: 186814 - DNA, 120 bp, Artificial Sequence
  ENSG00000111880_39 (sequence is synthesized)
attatttctcttcatctaatcttagcagtctactgtatgagtagatattctgttacattatttttaatgcatttaaattttttagaatactcagcaatagcaataaatattctgaaatga

SEQ ID NO: 186815 - DNA, 120 bp, Artificial Sequence
  ENSG00000111880_40 (sequence is synthesized)
ggtatgtttgttcattttcagtgtacttttcctggatgttctcttatctagaatccatcaaaaccttgctaataataatcaacatataaaaatatcgtgttccagcactttgggaggcta

SEQ ID NO: 186816 - DNA, 120 bp, Artificial Sequence
  ENSG00000111880_41 (sequence is synthesized)
agacaggtggatcacttgagcccaggaggttgagaccatgctgggaaccctgtctctacaaaaagaaaaattttttgtcattagccaagttcagtggcatgtgcctatagtcccagctac

SEQ ID NO: 186817 - DNA, 64 bp, Artificial Sequence
  ENSG00000111880_42 (sequence is synthesized)
gttcaagccccatgagtttgaggctgcagtgagccgtgatcacaccactgtactccagcctggg

SEQ ID NO: 186818 - DNA, 120 bp, Artificial Sequence
  ENSG00000111885_0 (sequence is synthesized)
agtgctcgcggggccgcggcggagtgtaccgtgctgctctactcgctgccattcgcccgcaggtcggcgcgctcgcccacctgagccgcgccggggctgcgggaccgtgggacagcgcgc

SEQ ID NO: 186819 - DNA, 120 bp, Artificial Sequence
  ENSG00000111885_1 (sequence is synthesized)
tcagcccagcctaggaaagaggcagcagtctcagcgcggagatggggagcgggcgaagttgacgagtctcccgcccacgctgcgcccctcctgcccagaggggctgcagccagcggtctg

SEQ ID NO: 186820 - DNA, 120 bp, Artificial Sequence
  ENSG00000111885_2 (sequence is synthesized)
tcgcgcgtgcctgtgtgcccgaggagccgccccggggagaagacccggcgcggagttgttcccccagggaggatccgcagcccagccgagggggtcgggcggcctggctacgcaggaccc

SEQ ID NO: 186821 - DNA, 120 bp, Artificial Sequence
  ENSG00000111885_3 (sequence is synthesized)
agccccgcagccgcggactcccagcggcggcgaagtttggctgctgagcggcgcggcgccggaccactggacagcgggagcgatgcccgtggggggcctgttgccgctcttcagcagccc

SEQ ID NO: 186822 - DNA, 120 bp, Artificial Sequence
  ENSG00000111885_4 (sequence is synthesized)
cgcgggcggcgtcctgggcggggggctcggcggcggcggtggcaggaaggggtcgggccccgccgccctccgcctgacggagaagttcgtgctgctgctggtattcagcgccttcatcac

SEQ ID NO: 186823 - DNA, 120 bp, Artificial Sequence
  ENSG00000111885_5 (sequence is synthesized)
gctctgcttcggggcgatcttcttcctgccagactcctccaagctgctcagcggggtcctgttccactccagccccgccttgcagccggccgccgaccacaagcccgggcccggggcgcg

SEQ ID NO: 186824 - DNA, 120 bp, Artificial Sequence
  ENSG00000111885_6 (sequence is synthesized)
cgccgaggacgcggccgaggggcgagcccggcgccgcgaggagggggcacccggggacccggaggccgccctggaggacaacttggccaggatccgcgaaaaccacgagcgggctctcag

SEQ ID NO: 186825 - DNA, 120 bp, Artificial Sequence
  ENSG00000111885_7 (sequence is synthesized)
ggaagccaaggagaccctgcagaagctgcccgaggagatccaaagagacatcctactggagaagaagaaggtggcccaggaccagctgcgtgacaaggcgccgttcagaggcctgccccc

SEQ ID NO: 186826 - DNA, 120 bp, Artificial Sequence
  ENSG00000111885_8 (sequence is synthesized)
ggtggacttcgtgcccccaatcggggtggagagccgggagcccgccgacgccgccatccgcgagaaaagggcaaagatcaaagagatgatgaaacatgcttggaataattataaaggtta

SEQ ID NO: 186827 - DNA, 120 bp, Artificial Sequence
  ENSG00000111885_9 (sequence is synthesized)
tgcctggggattaaatgaactcaaacctatatcaaaaggaggccattcaagcagtttgtttggtaacatcaaaggagcaactatagtagatgccctggatacactttttattatggaaat

SEQ ID NO: 186828 - DNA, 120 bp, Artificial Sequence
  ENSG00000111885_10 (sequence is synthesized)
gaaacatgaatttgaagaagcaaaatcatgggttgaagaaaatttagattttaatgtgaatgctgaaatttctgtctttgaagtaaatatacgctttgttggtggactactctcagccta

SEQ ID NO: 186829 - DNA, 120 bp, Artificial Sequence
  ENSG00000111885_11 (sequence is synthesized)
ctatctgtctggagaagagatttttcgaaagaaagcagtggaacttggggtaaaattgctacctgcatttcatactccctctggaataccttgggcattgctgaatatgaaaagtggtat

SEQ ID NO: 186830 - DNA, 120 bp, Artificial Sequence
  ENSG00000111885_12 (sequence is synthesized)
tggaaggaactggccctgggcctctggaggcagcagtattctggcagaatttggaaccctgcatttggagtttatgcacttgagccacttatcaggaaaccccatctttgctgaaaaggt

SEQ ID NO: 186831 - DNA, 120 bp, Artificial Sequence
  ENSG00000111885_13 (sequence is synthesized)
aatgaatattcgaacagtactgaacaaactggaaaaaccacaaggcctttatcctaactatctgaatcccagtagtggacagtggggtcaacatcatgtatcagttggaggacttggaga

SEQ ID NO: 186832 - DNA, 120 bp, Artificial Sequence
  ENSG00000111885_14 (sequence is synthesized)
cagcttctatgagtatttgctgaaggcctggttaatgtctgacaagacagatctggaagctaagaagatgtattttgatgctgttcaggctatcgagactcatttgatccgcaagtctag

SEQ ID NO: 186833 - DNA, 120 bp, Artificial Sequence
  ENSG00000111885_15 (sequence is synthesized)
cagcggactaacttatatcgcagagtggaaagggggcctcctggagcacaagatgggccacctgacctgcttcgcggggggcatgttcgcactcggggctgatgcagctcccgaaggcat

SEQ ID NO: 186834 - DNA, 120 bp, Artificial Sequence
  ENSG00000111885_16 (sequence is synthesized)
ggcccaacactaccttgaactcggggctgaaattgcccgtacttgtcatgaatcatataatcgaacatttatgaaactgggaccagaagctttcagatttgatggtggtgttgaagccat

SEQ ID NO: 186835 - DNA, 120 bp, Artificial Sequence
  ENSG00000111885_17 (sequence is synthesized)
cgctacaagacaaaatgaaaaatactacatcttacggccagaagttatggagacttacatgtatatgtggagactgactcatgatccaaagtacaggaaatgggcctgggaagccgtaga

SEQ ID NO: 186836 - DNA, 120 bp, Artificial Sequence
  ENSG00000111885_18 (sequence is synthesized)
ggccttggaaaaccattgcagagtgaatggaggctattcaggcctaagggatgtttaccttcttcatgagagttatgatgatgtgcagcagagtttcttcctggcagagacattgaaata

SEQ ID NO: 186837 - DNA, 120 bp, Artificial Sequence
  ENSG00000111885_19 (sequence is synthesized)
tttgtacctaatattttctgacgacgatcttcttccactggagcattggatcttcaatagcgaggcacatcttctccctatcctccctaaagataaaaaggaagttgaaatcagagagga

SEQ ID NO: 186838 - DNA, 120 bp, Artificial Sequence
  ENSG00000111885_20 (sequence is synthesized)
gtaggtctgtgattaagttcttaaattgttttgcagtcttttatgtttattatcataggtataggtggacctaaattccttatcatatcctttattaattcagccagtgtatccaccagt

SEQ ID NO: 186839 - DNA, 120 bp, Artificial Sequence
  ENSG00000111885_21 (sequence is synthesized)
tttttgtttatgtttttaagtaacctattatctctggatttcatgaaggtgtaatatcgtttttgttaaactgaatagaattgtatagcgatgacctcttaattataatttgatttgact

SEQ ID NO: 186840 - DNA, 120 bp, Artificial Sequence
  ENSG00000111885_22 (sequence is synthesized)
gcaaaactttttcctcctctaagaggagatgatgtctgctttaagctgtaatgttttgccatgttgcaaaaagccataataataagtataaaaaagctttttcctttacaatttcatgtt

SEQ ID NO: 186841 - DNA, 120 bp, Artificial Sequence
  ENSG00000111885_23 (sequence is synthesized)
aatctggtttgtctgtccaccagagacagatcttctgtgacagcctccttatgcaggtctatcattatttgatagaatgtcttctaaaatacttcactcacattgtaattcaaattagaa

SEQ ID NO: 186842 - DNA, 120 bp, Artificial Sequence
  ENSG00000111885_24 (sequence is synthesized)
agtcattccaaaaggatcatgtcatgttgacctcatttcatcggaactgcagtatatttttgttggttaattatattagtgttttctattttgtaaatgtgtcctttaattttactttaa

SEQ ID NO: 186843 - DNA, 120 bp, Artificial Sequence
  ENSG00000111885_25 (sequence is synthesized)
atgccctgtgtcatttctggattatatactagttaatttcttccattccccactacacagagaggtgagctttcaaattttgcagagctctgctatcactgaattacatttatctgaaga

SEQ ID NO: 186844 - DNA, 120 bp, Artificial Sequence
  ENSG00000111885_26 (sequence is synthesized)
aaatagtacaacttaatggattagcttttgggtttaactgaatatatgaagaaattgggtctgtctaaagagagggtatttcatatggcttttagttcacttgtttgtatttcatcttga

SEQ ID NO: 186845 - DNA, 120 bp, Artificial Sequence
  ENSG00000111885_27 (sequence is synthesized)
tttttttctttggaaaataaagcattctatttggttcagatttctcagatttgaaaaaggctctatctcagatgtagtaaattatttcctttcagtttgtgaaagcaggatttgactctg

SEQ ID NO: 186846 - DNA, 120 bp, Artificial Sequence
  ENSG00000111885_28 (sequence is synthesized)
aaagaagctttgccaattttacttattcgtgatcaatcaaggaaaatctaataaattttaggccaaataagaatatagcatatttagtatggttatagtcaacacagagatcacaactta

SEQ ID NO: 186847 - DNA, 120 bp, Artificial Sequence
  ENSG00000111885_29 (sequence is synthesized)
gaagaaatataaagaaatggccactccccatcccccacagtcctggagtaaatcaaaatcaatatatgattcttttaaacattaagtttgaaataggaatggttttctcaagaatagatt

SEQ ID NO: 186848 - DNA, 120 bp, Artificial Sequence
  ENSG00000111885_30 (sequence is synthesized)
tggtgtgataccttgtgtttgcttacattggcccactatatatacatatatatttatgtagatatacttccatgaaagggctaatacgatgcatatactgaagggcaaggactttgacca

SEQ ID NO: 186849 - DNA, 120 bp, Artificial Sequence
  ENSG00000111885_31 (sequence is synthesized)
tgtcaattttcagccgagaatggtcagaaagatcagtacaaccccatggattaggctgaaacatatgaaattgctgcatttgtagtttaaaaactgtcagcagtttcatatggttccacc

SEQ ID NO: 186850 - DNA, 120 bp, Artificial Sequence
  ENSG00000111885_32 (sequence is synthesized)
taatattattgaagacaattattttcttagctatcaataggcttaatagttttagttattttagcttttgaaagtgttttaaaagatttcctttatcggacaggaccatctttatgacct

SEQ ID NO: 186851 - DNA, 120 bp, Artificial Sequence
  ENSG00000111885_33 (sequence is synthesized)
gctttctgtttttcaatatcatacattggtgtatgtcaaagaataaattagtaaaattagtaaatgaaaaagactcttccgtacatcattatttccatgctaatgtgtgtctgtgatcca

SEQ ID NO: 186852 - DNA, 120 bp, Artificial Sequence
  ENSG00000111885_34 (sequence is synthesized)
gaataacttctcccactcatatcttcagttcacctaatgaaatgaatggatagcaagagccctttgttcccaggactttaaggcaaaatattaaaaattattgccaaaattaagaatata

SEQ ID NO: 186853 - DNA, 120 bp, Artificial Sequence
  ENSG00000111885_35 (sequence is synthesized)
atgtttgtataaatgtccttgaatttgccatttaaattaactcattttcttttcactttgatttgaaagctgataagtatttctgcagcagatagaatattaaaatcaggttgtgtgtac

SEQ ID NO: 186854 - DNA, 120 bp, Artificial Sequence
  ENSG00000111885_36 (sequence is synthesized)
acactgcactatgaggtaccttggtgtcctggtgtgaatagacaagaagctgtactatatgttgctctctcagtggcaacaatgaagtttttgcaattctagaacttggattttttttta

SEQ ID NO: 186855 - DNA, 120 bp, Artificial Sequence
  ENSG00000111885_37 (sequence is synthesized)
acaaaagtcccaaaacaccaaaaatgtaaacaagataagagattaatattgtagtgatgtaatttaattaaagttatattttgggttaattttaacaactgaagtcttattgttgaaact

SEQ ID NO: 186856 - DNA, 120 bp, Artificial Sequence
  ENSG00000111885_38 (sequence is synthesized)
tattttcaacaaaactgtgcagttaaatttgtatacgtattcacatactgaaagatgaaccgttaaaatagcacttaattttgtgtttcttcaatatgtcttgatatactttgtgcaatt

SEQ ID NO: 186857 - DNA, 120 bp, Artificial Sequence
  ENSG00000111885_39 (sequence is synthesized)
aatattacacatgtaagttgtatggcagtttacagaactcaatgacttgtcatgaggttttcatatgagctacacattgtgtacattgattgttttttatttttacataaatccattctg

SEQ ID NO: 186858 - DNA, 120 bp, Artificial Sequence
  ENSG00000111885_40 (sequence is synthesized)
ccattctgtcattttcaactttatatataaatctccaatgttatgggaaacaatagattgacacataatttttaaaaattatatttgtaaaatttctctattgtgaataaagtcttttaa

SEQ ID NO: 186859 - DNA, 120 bp, Artificial Sequence
  ENSG00000111886_0 (sequence is synthesized)
ggccagccttgccctcacagcccctcagagcagcccgtcaggaggcagcagatggatcaatggtcaagccaggggggatttgctctgccacaggctactggaaagcagctttttgcctca

SEQ ID NO: 186860 - DNA, 120 bp, Artificial Sequence
  ENSG00000111886_1 (sequence is synthesized)
cagatgtccacaaaatgccttattttacaagactcattttgttcttgttttgcttgatggttctcgtggagagcagaaaacccaagaggaagcgatggacagggcaggtggaaatgccca

SEQ ID NO: 186861 - DNA, 120 bp, Artificial Sequence
  ENSG00000111886_2 (sequence is synthesized)
agccaagtcacttatataagaagaaccttgatgtgaccaagatccggaagggaaagcctcagcagcttctcagagtggacgagcacgacttcagcatgagacccgccttcggaggccctg

SEQ ID NO: 186862 - DNA, 120 bp, Artificial Sequence
  ENSG00000111886_3 (sequence is synthesized)
ccatcccggtgggcgtggacgtacaggtggagagcctggacagcatctccgaggtggacatggacttcactatgaccctgtacctgcggcattactggaaggatgagaggctagctttct

SEQ ID NO: 186863 - DNA, 120 bp, Artificial Sequence
  ENSG00000111886_4 (sequence is synthesized)
ccagcgccagcaacaagagcatgaccttcgatggccggctggtgaagaagatctgggtccctgatgtcttctttgttcactccaaaagatcgttcactcatgacaccaccactgacaaca

SEQ ID NO: 186864 - DNA, 120 bp, Artificial Sequence
  ENSG00000111886_5 (sequence is synthesized)
tcatgctgagggtgttcccagatggacacgtgctgtacagcatgaggattacggtcactgccatgtgcaacatggacttcagccactttcccctggactcccagacctgttctttggagc

SEQ ID NO: 186865 - DNA, 120 bp, Artificial Sequence
  ENSG00000111886_6 (sequence is synthesized)
tggagagctatgcctatacagatgaagatctaatgctgtactggaagaatggggatgaatccctaaaaacagatgagaagatctccttgtctcagtttctgattcagaaatttcacacaa

SEQ ID NO: 186866 - DNA, 120 bp, Artificial Sequence
  ENSG00000111886_7 (sequence is synthesized)
cttccaggctggccttctacagcagcactggctggtacaaccgtctgtacattaacttcacgttgcgtcgccacatcttcttcttcttgctccaaacatatttccctgccactctgatgg

SEQ ID NO: 186867 - DNA, 120 bp, Artificial Sequence
  ENSG00000111886_8 (sequence is synthesized)
tcatgctgtcctgggtgtccttctggatcgaccgcagagctgtgcctgccagagtttcactgggtatcacgacggtgctgaccatgaccaccatcatcacgggcgtgaatgcctccatgc

SEQ ID NO: 186868 - DNA, 120 bp, Artificial Sequence
  ENSG00000111886_9 (sequence is synthesized)
cgcgcgtctcctacgtcaaggccgtggacatctacctctgggtcagctttgtgttcgtgttcctctcggtgctggagtatgcggctgtcaactacctgaccaccgtgcaggagcgcaagg

SEQ ID NO: 186869 - DNA, 120 bp, Artificial Sequence
  ENSG00000111886_10 (sequence is synthesized)
aacggaagctgcgggagaagttcccgtgcatgtgtggaatgcttcattcaaaaaccatgatgctggatggaagctacagtgagtctgaggccaacagcctggctgggtaccccagaagcc

SEQ ID NO: 186870 - DNA, 120 bp, Artificial Sequence
  ENSG00000111886_11 (sequence is synthesized)
atatcctgacagaagaagaaaggcaagacaaaatagtggtccacctgggcctgagtggtgaagccaacgctgccagaaagaaggggcttctgaagggccagacgggttttcgtatcttcc

SEQ ID NO: 186871 - DNA, 120 bp, Artificial Sequence
  ENSG00000111886_12 (sequence is synthesized)
agaatacccatgccattgacaaatactctaggttgatattccctgcctcctacatatttttcaacttaatttattggtcagtgttttcctaggggctccaaggctgttcctagaagaggg

SEQ ID NO: 186872 - DNA, 120 bp, Artificial Sequence
  ENSG00000111886_13 (sequence is synthesized)
catagacatcgagggggcctggccagtcattgacagacggacttgttgaccacacgcccctcaccaaacaatgcagcagctactggaccaccctgagcagcactcatctctcagagaagc

SEQ ID NO: 186873 - DNA, 120 bp, Artificial Sequence
  ENSG00000111886_14 (sequence is synthesized)
ccaggagccttccagctgccctgaccccagaccccgtggggctgctccatgttcatgctgtctcgcgtcacacttcacatctctctgggaccttctgttcttgtgtgtgaactaattcac

SEQ ID NO: 186874 - DNA, 120 bp, Artificial Sequence
  ENSG00000111886_15 (sequence is synthesized)
aagaactcccctcctataaacaaggattcaaatgcctcctagacattcttagaccctcagattgcctaggagtcagttgtggagggaaaaggaaaaactgaagtacaagcttaggggcat

SEQ ID NO: 186875 - DNA, 120 bp, Artificial Sequence
  ENSG00000111886_16 (sequence is synthesized)
tctggataggagataggaaattaagaacaaaaaacaccctgtaaacccattgaacttgattaagtgcctacctagaagggaaaagagctgagatcccagacaggaaatgatttggcctgt

SEQ ID NO: 186876 - DNA, 120 bp, Artificial Sequence
  ENSG00000111886_17 (sequence is synthesized)
gggagtatggcaacccacaggattctgcaatattagaggagattattcatttatccatccattcaaccattcattaaatattgaggtcccactctgtgccaggtacggtagaaatgagaa

SEQ ID NO: 186877 - DNA, 120 bp, Artificial Sequence
  ENSG00000111886_18 (sequence is synthesized)
aatagtctctttccttagagatcttctctaagttgtgctcattctacatatggcatgatgtacttctgctctttcccctccttcaaccccgcttaccccacagacccattctgtttgctg

SEQ ID NO: 186878 - DNA, 120 bp, Artificial Sequence
  ENSG00000111886_19 (sequence is synthesized)
caactatcctcctccagtgaagttacacagatagcactaattttgcccagcaatgacatgtagcaatgtgcatggagtattgccagccagagaaacttacccaggctcaccacggtgtac

SEQ ID NO: 186879 - DNA, 120 bp, Artificial Sequence
  ENSG00000111886_20 (sequence is synthesized)
agtttttttattggggtcggtcatggatttatagctgattgcccacatggctgactttagtcttttgcccctccagaggttaagctggtaccttgaggtccagggcacctatcataaatc

SEQ ID NO: 186880 - DNA, 120 bp, Artificial Sequence
  ENSG00000111886_21 (sequence is synthesized)
acattgttggcatagactatctggtgtggcccaaggccccagtagacaaagacccttctatctcacaggacattccaagggcatagaggttgcttcctagtaaaggttagtcctttacta

SEQ ID NO: 186881 - DNA, 120 bp, Artificial Sequence
  ENSG00000111886_22 (sequence is synthesized)
cacagcaactcttgtcaattccctattgttaatgttaattgcggtgttactattatatattcaggcaataaacattttaaagtatctctgcactaggtacattggggtccaaattaagaa

SEQ ID NO: 186882 - DNA, 120 bp, Artificial Sequence
  ENSG00000111886_23 (sequence is synthesized)
taagagtagtcgaagctctcagagaaggaactagtaaaggaaataccacacaaatatctataatataagattaagagtgtttagtgcctcagtaatagttcagtgtgagatgggaattcc

SEQ ID NO: 186883 - DNA, 120 bp, Artificial Sequence
  ENSG00000111886_24 (sequence is synthesized)
aagggaggaaaaacagtcccaccagggagacagacctcatggagaaagcagccctgagatgccccttgaaggtcaggattttaagaagaagaaatggagcagaatgcatcctagatctgg

SEQ ID NO: 186884 - DNA, 120 bp, Artificial Sequence
  ENSG00000111886_25 (sequence is synthesized)
gctgtctcatatggtagccactagccacatgtctatttaaatttaaattagtaaaaattaaaaatattagccaggtgtggtggtgtgtgcctggggttctagctactcaggaggctgagg

SEQ ID NO: 186885 - DNA, 120 bp, Artificial Sequence
  ENSG00000111886_26 (sequence is synthesized)
cgggaggattgcttgagcccaggaattccaggctgccgtgagctgtgatcaagccactgcagtccagcctgagtgacagagcgagaccctatctctaaaataataattattattatttaa

SEQ ID NO: 186886 - DNA, 120 bp, Artificial Sequence
  ENSG00000111886_27 (sequence is synthesized)
attagttgaagttaaataaaattgaaaactcagttccttggttacaccatccacactcaagtgggcttagtaagcacagttgctagtagctactgcactgggctgggcagcctaaagacc

SEQ ID NO: 186887 - DNA, 120 bp, Artificial Sequence
  ENSG00000111886_28 (sequence is synthesized)
aggaagctctaccagccaagagaccagcttgagcggacgcatggggagaatgggaaggtttgccattgcagagaacagggtttgtgggcaagtcattcattttggcaggatcctaggctg

SEQ ID NO: 186888 - DNA, 120 bp, Artificial Sequence
  ENSG00000111886_29 (sequence is synthesized)
tgataagaggaggtgagcgactagctttttccacaacactagggatcaaggcaggtccccaccatgccggtgcttatgaggacagcttccccactatggagttgctggacccaagactac

SEQ ID NO: 186889 - DNA, 120 bp, Artificial Sequence
  ENSG00000111886_30 (sequence is synthesized)
tagatttcccagtctcacagaccaatgaagaacaaaaatgcataaatatgggtaattgggtggtacagggcatctggacttgtttagaaacctttttttcttttctgagacagagtttca

SEQ ID NO: 186890 - DNA, 120 bp, Artificial Sequence
  ENSG00000111886_31 (sequence is synthesized)
caggcgtgagccaccacacccggccagaaaccttttatctatagagactctcccaggccacagtgctgctcgaagaatgataattctattgtcattaaatatatcatattgctttgcttg

SEQ ID NO: 186891 - DNA, 120 bp, Artificial Sequence
  ENSG00000111886_32 (sequence is synthesized)
cttgtaagtcttatttaattccaacccttctctgcttctgactgcattgttttcatgcattatggctcatataacatagttgcctgttcacaaattaaaacaaatatttatttttgctag

SEQ ID NO: 186892 - DNA, 120 bp, Artificial Sequence
  ENSG00000111886_33 (sequence is synthesized)
cttctatgttaaactggagttaattctatagcagacatatttagaatcataaacagtgttttatcatgcagggccatgatacaatgacaccattgtatttagcattgccttattacagta

SEQ ID NO: 186893 - DNA, 120 bp, Artificial Sequence
  ENSG00000111886_34 (sequence is synthesized)
tactagtctgacactacttgagaaaagtaggaaatttaaagaggtaaagtggagacaacattggtaggagtagaaaacaggaactaaggaaatagtgagaacatgggatgattcaccctg

SEQ ID NO: 186894 - DNA, 120 bp, Artificial Sequence
  ENSG00000111886_35 (sequence is synthesized)
gaggcaggaagacagagaagcaaacacaattgttatcaggaatgcatgaatgatactttacttcactgaatctaagacatggtgaaatgtaagatgcacccatattttatgtactgagaa

SEQ ID NO: 186895 - DNA, 120 bp, Artificial Sequence
  ENSG00000111886_36 (sequence is synthesized)
aaaatactaacaatcaaattctggaatgccaatgattataatatgaatcctgatttcaccaatatgaaactgtgaaaaaatgttaatgttacaataaaagaaatgggttttatacaaaaa

SEQ ID NO: 186896 - DNA, 120 bp, Artificial Sequence
  ENSG00000111886_37 (sequence is synthesized)
ttacctctgaatctggatgctgagcctgagatgttcaccacagtagtgaatggtgggttgattgtaaggaagaaaaccttctaagccatttttgtctggtctcaccccggctcccacagg

SEQ ID NO: 186897 - DNA, 120 bp, Artificial Sequence
  ENSG00000111886_38 (sequence is synthesized)
atgctgagcccagttccagaaccagctgtgtctagaacagcctggctgccctagactgaatcaacccagatgtctgtgctgagtgtgaagactttgtcctgtgtggctcaggatcacagg

SEQ ID NO: 186898 - DNA, 120 bp, Artificial Sequence
  ENSG00000111897_0 (sequence is synthesized)
aatctcggaaaggcgagaaagaagctgtctccatcttgtctgtatccgctgctcttgtgacgttgtggagatggggagcgtcctggggctgtgctccatggcgagctggataccatgttt

SEQ ID NO: 186899 - DNA, 120 bp, Artificial Sequence
  ENSG00000111897_1 (sequence is synthesized)
gtgtggaagtgccccgtgtttgctatgccgatgctgtcctagtggaaacaactccactgtaactagattgatctatgcacttttcttgcttgttggagtatgtgtagcttgtgtaatgtt

SEQ ID NO: 186900 - DNA, 120 bp, Artificial Sequence
  ENSG00000111897_2 (sequence is synthesized)
gataccaggaatggaagaacaactgaataagattcctggattttgtgagaatgagaaaggtgttgtcccttgtaacattttggttggctataaagctgtatatcgtttgtgctttggttt

SEQ ID NO: 186901 - DNA, 120 bp, Artificial Sequence
  ENSG00000111897_3 (sequence is synthesized)
ggctatgttctatcttcttctctctttactaatgatcaaagtgaagagtagcagtgatcctagagctgcagtgcacaatggattttggttctttaaatttgctgcagcaattgcaattat

SEQ ID NO: 186902 - DNA, 120 bp, Artificial Sequence
  ENSG00000111897_4 (sequence is synthesized)
tattggggcattcttcattccagaaggaacttttacaactgtgtggttttatgtaggcatggcaggtgccttttgtttcatcctcatacaactagtcttacttattgattttgcacattc

SEQ ID NO: 186903 - DNA, 120 bp, Artificial Sequence
  ENSG00000111897_5 (sequence is synthesized)
atggaatgaatcgtgggttgaaaaaatggaagaagggaactcgagatgttggtatgcagccttgttatcagctacagctctgaattatctgctgtctttagttgctatcgtcctgttctt

SEQ ID NO: 186904 - DNA, 120 bp, Artificial Sequence
  ENSG00000111897_6 (sequence is synthesized)
tgtctactacactcatccagccagttgttcagaaaacaaggcgttcatcagtgtcaacatgctcctctgcgttggtgcttctgtaatgtctatactgccaaaaatccaagaatcacaacc

SEQ ID NO: 186905 - DNA, 120 bp, Artificial Sequence
  ENSG00000111897_7 (sequence is synthesized)
aagatctggtttgttacagtcttcagtaattacagtctacacaatgtatttgacatggtcagctatgaccaatgaaccagaaacaaattgcaacccaagtctactaagcataattggcta

SEQ ID NO: 186906 - DNA, 120 bp, Artificial Sequence
  ENSG00000111897_8 (sequence is synthesized)
caatacaacaagcactgtcccaaaggaagggcagtcagtccagtggtggcatgctcaaggaattataggactaattctctttttgttgtgtgtattttattccagcatccgtacttcaaa

SEQ ID NO: 186907 - DNA, 120 bp, Artificial Sequence
  ENSG00000111897_9 (sequence is synthesized)
caatagtcaggttaataaactgactctaacaagtgatgaatctacattaatagaagatggtggagctagaagtgatggatcactggaggatggggacgatgttcaccgagctgtagataa

SEQ ID NO: 186908 - DNA, 120 bp, Artificial Sequence
  ENSG00000111897_10 (sequence is synthesized)
tgaaagggatggtgtcacttacagttattccttctttcacttcatgcttttcctggcttcactttatatcatgatgacccttaccaactggtacaggtatgaaccctctcgtgagatgaa

SEQ ID NO: 186909 - DNA, 120 bp, Artificial Sequence
  ENSG00000111897_11 (sequence is synthesized)
aagtcagtggacagctgtctgggtgaaaatctcttccagttggattggcatcgtgctgtatgtttggacactcgtggcaccacttgttcttacaaatcgtgattttgactgagtgagact

SEQ ID NO: 186910 - DNA, 120 bp, Artificial Sequence
  ENSG00000111897_12 (sequence is synthesized)
tctagcatgaaagtcccactttgattattgcttatttgaaaacagtattcccaacttttgtaaagttgtgtatgtttttgcttcccatgtaacttctccagtgttctggcatgaattaga

SEQ ID NO: 186911 - DNA, 120 bp, Artificial Sequence
  ENSG00000111897_13 (sequence is synthesized)
ctgcttgtcattttgttattttcttaccaagtgcattgatatgtgaagtagaatgaattgcagaggaaagttttatgaatatggtgatgagttagtaaaagtggccattattgggcttat

SEQ ID NO: 186912 - DNA, 120 bp, Artificial Sequence
  ENSG00000111897_14 (sequence is synthesized)
tctctgctctatagttgtgaaatgaagagtaaaaacaaatttgtttgactattttaaaattatattagaccttaagctgttttagcaagcattaaagcaaatgtatggctgccttttgaa

SEQ ID NO: 186913 - DNA, 120 bp, Artificial Sequence
  ENSG00000111897_15 (sequence is synthesized)
atatttgatgtgttgcctggcaggatactgcaaagaacatggtttattttaaaatttataaacaagtcacttaaatgccagttgtctgaaaaatcttataaggttttacccttgatacgg

SEQ ID NO: 186914 - DNA, 120 bp, Artificial Sequence
  ENSG00000111897_16 (sequence is synthesized)
aatttacacaggtagggagtgtttagtggacaatagtgtaggttatggatggaggtgtcggtactaaattgaataacgagtaaataatcttacttgggtagagatggcctttgccaacaa

SEQ ID NO: 186915 - DNA, 120 bp, Artificial Sequence
  ENSG00000111897_17 (sequence is synthesized)
agtgaactgttttggttgttttaaactcatgaagtatgggttcagtggaaatgtttggaactctgaaggatttagacaaggttttgaaaaggataatcatgggttagaaggaagtgtttg

SEQ ID NO: 186916 - DNA, 78 bp, Artificial Sequence
  ENSG00000111897_18 (sequence is synthesized)
gttttgaaaaggataatcatgggttagaaggaagtgtttgaaagtcactttgaaagttagttttgggccagcacggta

SEQ ID NO: 186917 - DNA, 120 bp, Artificial Sequence
  ENSG00000111897_19 (sequence is synthesized)
gtgagccaaggtcacgtcactgcactctagcctgggcaacagagtaagacaaaaaaatatatatatattgaaaatcaaaggaggcaaaattttgacagggaaggaagtaactgcaaaaca

SEQ ID NO: 186918 - DNA, 120 bp, Artificial Sequence
  ENSG00000111897_20 (sequence is synthesized)
ctaggctttagtaggtacttatataaaatctagtccagttctctcatttaaaaaaatgaagacactgaaatacagacttaaatagctcagatagctaattaggaaatttcaagttggcca

SEQ ID NO: 186919 - DNA, 120 bp, Artificial Sequence
  ENSG00000111897_21 (sequence is synthesized)
ataatagcattctctctgacatttaaaaataatttctattcaaaatacatgcataattgattttacacctcattactggtggataatttatgtgatgtggattgctggtgtccagcatga

SEQ ID NO: 186920 - DNA, 120 bp, Artificial Sequence
  ENSG00000111897_22 (sequence is synthesized)
cccataaacaggtcagaagaatgatggaatgttttagaataaactcctgcttatagtatactacacagttcaaaagatgtttaaaatgcttttgtatttactgccatgtaattgaaatat

SEQ ID NO: 186921 - DNA, 120 bp, Artificial Sequence
  ENSG00000111897_23 (sequence is synthesized)
atagattattgtaacctttcaacctgaaaatcaagcagtatgagagtttagttatttgtatgtgtcactagtgtctaatgaagcttttaaaatctacaatttcttctttaaaaatattta

SEQ ID NO: 186922 - DNA, 120 bp, Artificial Sequence
  ENSG00000111897_24 (sequence is synthesized)
ttaatgtgaatggaatataacaattcagcttaattccccaaccttattctgtgtgtagacattgtattccacaattttgaatggctgtgttttacctctaaataaatgaattcagagaaa

SEQ ID NO: 186923 - DNA, 120 bp, Artificial Sequence
  ENSG00000111906_0 (sequence is synthesized)
gcggcctgctccgcccagccggggtcggtggccgcatggcttcggtctcctctgcgaccttctcgggccacggggctcggtccctactgcagttcctgcggctggtagggcagctcaaga

SEQ ID NO: 186924 - DNA, 120 bp, Artificial Sequence
  ENSG00000111906_1 (sequence is synthesized)
gagtcccacgaactggctgggtatacagaaatgtccagaggccggagagcgtttcagatcacatgtaccggatggcagttatggctatggtgatcaaagatgaccgtcttaacaaagacc

SEQ ID NO: 186925 - DNA, 120 bp, Artificial Sequence
  ENSG00000111906_2 (sequence is synthesized)
gatgtgtacgcctagccctggttcatgatatggcagaatgcatcgttggggacatagcaccagcagataacatccccaaagaagaaaaacataggcgagaagaggaagctatgaagcaga

SEQ ID NO: 186926 - DNA, 120 bp, Artificial Sequence
  ENSG00000111906_3 (sequence is synthesized)
taacccagctcctaccagaggacctcagaaaggagctctatgaactttgggaagagtacgagacccaatctagtgcagaagccaaatttgtgaagcagctagaccaatgtgaaatgattc

SEQ ID NO: 186927 - DNA, 120 bp, Artificial Sequence
  ENSG00000111906_4 (sequence is synthesized)
ttcaagcatctgaatatgaagaccttgaacacaaacctgggagactgcaagacttctatgattccacagcaggaaaattcaatcaccctgagatagtccagcttgtttctgaacttgagg

SEQ ID NO: 186928 - DNA, 120 bp, Artificial Sequence
  ENSG00000111906_5 (sequence is synthesized)
cagaaagaagcactaacatagctgcagctgccagtgagccacactcctgagacactctctaaattgctgcactcctgtaacaaacattatttttccatttcattgtattgtgttttgcca

SEQ ID NO: 186929 - DNA, 120 bp, Artificial Sequence
  ENSG00000111906_6 (sequence is synthesized)
gtctgttgatttccctagatgtgagtctgtttgttttcaattgtctgaacttcagcaagaaatgtgatacaacttgggcactaaaagaagccacagaacaggaagcggtcatgaaagtgc

SEQ ID NO: 186930 - DNA, 120 bp, Artificial Sequence
  ENSG00000111906_7 (sequence is synthesized)
catggatgaacactggaggtggcagtgcctgtttatgaactaaataaataaatattaaacacctaaaatattagaatatttattggagatttaaaatcatcttattctgacttaattacc

SEQ ID NO: 186931 - DNA, 120 bp, Artificial Sequence
  ENSG00000111906_8 (sequence is synthesized)
gatatccccgaaggctaggttcattgaataatagaaaatttcattatgattgcttttaagaacagattcttcagctgatttagtgataagaatccagaaaagaaaatgtactagtgatgt

SEQ ID NO: 186932 - DNA, 120 bp, Artificial Sequence
  ENSG00000111906_9 (sequence is synthesized)
attctctccccagatgaaattgctgccttattcagatttactctcttgagccagattttgaatttcactgcagactgcttcagacttctaatcataggcttgtaaacctactaataggct

SEQ ID NO: 186933 - DNA, 120 bp, Artificial Sequence
  ENSG00000111906_10 (sequence is synthesized)
ctgcccctcttcccaatactttttgtcatttagagatataaaccggggcatataaaaatgcaacttgtattcctttgtatatttttccctgtctgacttataaatcttgagacctttatt

SEQ ID NO: 186934 - DNA, 120 bp, Artificial Sequence
  ENSG00000111906_11 (sequence is synthesized)
gtaaaagcatgtatcatcaggtgagaaatataaataggaactggggtcattgagcctcaggtagggaatatatcaacccgatttcttcctctcttttcccttttataggataaataatcc

SEQ ID NO: 186935 - DNA, 120 bp, Artificial Sequence
  ENSG00000111906_12 (sequence is synthesized)
cagcttgtttctgaacttgaggcagaaagaagcactaacatagctgcagctgccagacttgtgaaacactttaaactactgcttgtgaactgagcctcactagatgtaattgagaagctc

SEQ ID NO: 186936 - DNA, 120 bp, Artificial Sequence
  ENSG00000111906_13 (sequence is synthesized)
agcaatcagtcccatcaggatgatcttgcacacccatggtgagggaggaccaggcagctcttagtgatgctcctgaagctaagagtaggctcactgcctaaactagctacaggagcggaa

SEQ ID NO: 186937 - DNA, 120 bp, Artificial Sequence
  ENSG00000111906_14 (sequence is synthesized)
ctaactcaagagaacaactgaagctttcaggcctggggcagagagctgtgctcatgtgcccctggaagtcacgacgctacctttggcagcatgcggtacttcttcatctccgaagaaccc

SEQ ID NO: 186938 - DNA, 120 bp, Artificial Sequence
  ENSG00000111906_15 (sequence is synthesized)
agaaataagagccaggaagcatggaggctagtgcaaaacatgaatcctgagagcatgctagagaagtcagcactggctactgcatcttcgtctgttccttgcaacggttcagtctccaac

SEQ ID NO: 186939 - DNA, 120 bp, Artificial Sequence
  ENSG00000111906_16 (sequence is synthesized)
aaacctttaggcagaattgataaaacagaaggcaatttttaaagtgaatttaaaccaacttctgcttccatagtgtggaggactagatgcactgacagaccctcccaccaaaaaacaact

SEQ ID NO: 186940 - DNA, 120 bp, Artificial Sequence
  ENSG00000111906_17 (sequence is synthesized)
tgctcgtgagagattctggtctatgggtgtgcacccgtttttactactgagacccatgtcaaatccttgtaggttagtttataggtcaagaaaaattatttgaagcaaaccatacaaatt

SEQ ID NO: 186941 - DNA, 120 bp, Artificial Sequence
  ENSG00000111906_18 (sequence is synthesized)
taggatgtgggttatgttgcctcagttgttgtaaactgcaatctggggtttctgttggcaagtgatagagcctgcctagggtatcaggggaaacttaagtgtgatattggggccttgaag

SEQ ID NO: 186942 - DNA, 120 bp, Artificial Sequence
  ENSG00000111906_19 (sequence is synthesized)
tttcgttccccttccccatttttatctgggtcttttcttcatctgtgttatctgtatcccactcaattttgattttcttcccagcagtttctcctcatgtgggccctctcctggaaagca

SEQ ID NO: 186943 - DNA, 120 bp, Artificial Sequence
  ENSG00000111906_20 (sequence is synthesized)
gccccagcaggtcagattggaaaattcactagggctgggctgtctttgatgtaagctccttgtgctcatccactattggagtgggcaagatccctcccagtgtcaactactgttcttaaa

SEQ ID NO: 186944 - DNA, 120 bp, Artificial Sequence
  ENSG00000111906_21 (sequence is synthesized)
atgtgagatttctagagaatacctgttggcccttttgagattctcctattctcaggtccatcagacattaatcctctcttactcccatgctgatggcatgcagggcttatggctggaggt

SEQ ID NO: 186945 - DNA, 120 bp, Artificial Sequence
  ENSG00000111906_22 (sequence is synthesized)
ggtttgtctctacttgcacatatttggacttgatgggaatgtcatgtctcccagtttttgtttgggttttgctgtttctttgctgtgtcaggttttgtctgtttcttctcttttgctcac

SEQ ID NO: 186946 - DNA, 120 bp, Artificial Sequence
  ENSG00000111906_23 (sequence is synthesized)
tattttatcatgaacctagttactcaaaccagaaactaggcagtcattttcacttttccttctcatttacttttatattttagttcacttctttatccttaatatttcttaaatcctacc

SEQ ID NO: 186947 - DNA, 120 bp, Artificial Sequence
  ENSG00000111906_24 (sequence is synthesized)
acttctttccattttcactgctactgtcttagaccagattcctataacgtctctgctagtgctacaaagtcttagaatctgatttctctgcttccaatccagatattatccacctgtagt

SEQ ID NO: 186948 - DNA, 120 bp, Artificial Sequence
  ENSG00000111906_25 (sequence is synthesized)
tagagtgacctttctgaaatgcaaatctgaacctaactcttcctgacattaaaagctacttgcaataatttctccaaatgccatgcattcttctcacccctagagttctgtctgtagtat

SEQ ID NO: 186949 - DNA, 120 bp, Artificial Sequence
  ENSG00000111906_26 (sequence is synthesized)
tattttgtgtgctttgcctttttattgaagaatgcctatatcattaatttttgagggaaaatttcaataatttatatttcttttaaaagaaatctgtaagttcatgagaacttgtaataa

SEQ ID NO: 186950 - DNA, 120 bp, Artificial Sequence
  ENSG00000111906_27 (sequence is synthesized)
gatgtattgtatttcctaatggtctttaaatatttttctcactttcaacagaaaaaaaaatttctagactgctatgcttggagtattccatttccttttgtgaaatcatgaacttgaatt

SEQ ID NO: 186951 - DNA, 120 bp, Artificial Sequence
  ENSG00000111906_28 (sequence is synthesized)
tattaaacataaatatataactgtgaatgtgaataaacaaataaaatgaaattatttttaagtgcctttgagataaagcaaagtgtatttggttccatatttaaatgattcccccataca

SEQ ID NO: 186952 - DNA, 120 bp, Artificial Sequence
  ENSG00000111906_29 (sequence is synthesized)
gttctcagctttatcaaatccaagtagctgcctttataagaataagcgtgtaataaaaactaagaaacctttaattgattcatatcacatcaccctgccaagaaaccatgacaggtttgt

SEQ ID NO: 186953 - DNA, 120 bp, Artificial Sequence
  ENSG00000111906_30 (sequence is synthesized)
tatctgaacacatctggggtagaattacaaacaagaacttggcagggaaaccagttgggagcactttgttcttaataggagaatgaatctatatagtattaattgggacttgtggttggg

SEQ ID NO: 186954 - DNA, 120 bp, Artificial Sequence
  ENSG00000111906_31 (sequence is synthesized)
tggcatgcatcattctataagaagcagaactcctggagcttcttgttccaagtctgcactgcagagggagggaccagtgggaagggaaaggtaaaaaaactgctccccccaccacattca

SEQ ID NO: 186955 - DNA, 120 bp, Artificial Sequence
  ENSG00000111906_32 (sequence is synthesized)
ccacctcccacctgcaacacatgcacataccggtgcatgtaaaatcctcagatcttggctctatcctcaatagtcttaactcagagggacttaattaaatctaccctatgtggaaagtaa

SEQ ID NO: 186956 - DNA, 120 bp, Artificial Sequence
  ENSG00000111906_33 (sequence is synthesized)
agaaatacacttagaaatgacaaggaaacctgacatgaaatggagagggaaatacaggtttgagaggcataagacgaaatatcagcttgatgttaaaaatatctaaactacttaggtaga

SEQ ID NO: 186957 - DNA, 120 bp, Artificial Sequence
  ENSG00000111906_34 (sequence is synthesized)
ttaaagaacaatggtcttaaaatgaagacacggtattaaacaggaagaaaagatcttgaaagtacctaagatgaacatacaagatttccatggcttctggtagaatacttagaatggaga

SEQ ID NO: 186958 - DNA, 120 bp, Artificial Sequence
  ENSG00000111906_35 (sequence is synthesized)
gcacatctttcttgtatagagtcctggtgttaggctgtgaaattacagaagtgtctctgatggatttctaaacagtagagaaatggggccgatacagaatgtacttgtagctgtcactct

SEQ ID NO: 186959 - DNA, 120 bp, Artificial Sequence
  ENSG00000111906_36 (sequence is synthesized)
gatttcgggtaccagagtcagaattttcccaggataccctattatgcagcgctaatcatgctgctttaattgtccctttacttaggagtacgagacccaatctagtgcagaagccaaatt

SEQ ID NO: 186960 - DNA, 120 bp, Artificial Sequence
  ENSG00000111906_37 (sequence is synthesized)
tcaacaagagtccattttagtttggcttactcagtgtagtgactaatgttaatattagggaaacccactgttggtaccttcatctgaccctttcatgtggagcatctaaaaagaaaggga

SEQ ID NO: 186961 - DNA, 120 bp, Artificial Sequence
  ENSG00000111906_38 (sequence is synthesized)
aggaaacattcgggtaagaggctgaggataggaaataaatggaatagagtttaatgtggaatgaacagtaagcaacaacagacacaggcaagaaaagacggtgagagaagagatgttggg

SEQ ID NO: 186962 - DNA, 120 bp, Artificial Sequence
  ENSG00000111906_39 (sequence is synthesized)
ttgaacagtcccccatgctagccgtcatggacatacaatagcttagagcttggttgctaccaaagcagaaatctggggaggtctgaggagcagggatgacagcacagatcagccaattga

SEQ ID NO: 186963 - DNA, 120 bp, Artificial Sequence
  ENSG00000111906_40 (sequence is synthesized)
agtgtagaggtgtttacaagagagacacctgcatccttgtttacatcatgagccagcctagcccctctgatcttcctccttgtcttttcatatataggtgcttcattctccttacttaat

SEQ ID NO: 186964 - DNA, 120 bp, Artificial Sequence
  ENSG00000111906_41 (sequence is synthesized)
tgcaggtttggaatgggcagagattgtcttcagctttctgggctctcacacctgagttttcccatagttcctggtagaggcactgaggagcctggtgaagtttcccctacctctgcctaa

SEQ ID NO: 186965 - DNA, 120 bp, Artificial Sequence
  ENSG00000111906_42 (sequence is synthesized)
ttgatgattccttgcctgagtctcatccttattctcagttgcacctggggtgacagagcgtaaatgccaagtggtccccttcagccccttcccaggacctggaatctctttctgctttgg

SEQ ID NO: 186966 - DNA, 120 bp, Artificial Sequence
  ENSG00000111906_43 (sequence is synthesized)
aatgaagtgtgggtcagatcgtagactagagcccccagtgaaccctgggatcaagctggggaaatgaatatactctcttgtcaatatgggaatgtatttttccctgttcttttgctttgc

SEQ ID NO: 186967 - DNA, 120 bp, Artificial Sequence
  ENSG00000111906_44 (sequence is synthesized)
cacagatgtaaaatccttgaacacctctgatatttctgtaattgtctcatgacctcctcattgtccttttctatgtctgttgtgttgtagaccacaaaagaggtgctaagcgaagcccat

SEQ ID NO: 186968 - DNA, 120 bp, Artificial Sequence
  ENSG00000111906_45 (sequence is synthesized)
atgaatgattacacttatttatttaaggtatacaactgcctgccttcctcacaagctataaatattgtccagtataggccaatttactctgctgcccctgtgagagttgtttgtaagaat

SEQ ID NO: 186969 - DNA, 120 bp, Artificial Sequence
  ENSG00000111907_0 (sequence is synthesized)
agaagcggctagtggcggctgcctgcgtccccaaccccctccgcgcagcgctcgcgacacgcgtgccaggagtgggagcgagcggcggggccagctgcgttctgagcctgggcgcagctg

SEQ ID NO: 186970 - DNA, 120 bp, Artificial Sequence
  ENSG00000111907_1 (sequence is synthesized)
ccatctgctctgggaagcaccagggtgtccccgccgccctcagctcgaagtcagccaccatggaggcgcaggcacaaggtttgttggagactgaaccgttgcaaggaacagacgaagatg

SEQ ID NO: 186971 - DNA, 120 bp, Artificial Sequence
  ENSG00000111907_2 (sequence is synthesized)
cagtagccagtgctgacttctctagcatgctctctgaggaggaaaaggaagagttaaaagcagagttagttcagctagaagacgaaattacaacactacgacaagttttgtcagcgaaag

SEQ ID NO: 186972 - DNA, 120 bp, Artificial Sequence
  ENSG00000111907_3 (sequence is synthesized)
aaaggcatctagttgagataaaacaaaaactcggcatgaacctgatgaatgaattaaaacagaacttcagcaaaagctggcatgacatgcagactaccactgcctacaagaaaacacatg

SEQ ID NO: 186973 - DNA, 120 bp, Artificial Sequence
  ENSG00000111907_4 (sequence is synthesized)
aaaccctgagtcacgcagggcaaaaggcaactgcagctttcagcaacgttggaacggccatcagcaagaagttcggagacatgagttactccattcgccattccataagtatgcctgcta

SEQ ID NO: 186974 - DNA, 120 bp, Artificial Sequence
  ENSG00000111907_5 (sequence is synthesized)
tgaggaattctcctactttcaaatcatttgaggagagggttgagacaactgtcacaagcctcaagacgaaagtaggcggtacgaaccctaatggaggcagttttgaggaggtcctcagct

SEQ ID NO: 186975 - DNA, 120 bp, Artificial Sequence
  ENSG00000111907_6 (sequence is synthesized)
ccacggcccatgccagtgcccagagcttggcaggaggctcccggcggaccaaggaggaggagctgcagtgctaagtccagccagcgtgcagctgcatccagaaaccggccactacccagc

SEQ ID NO: 186976 - DNA, 120 bp, Artificial Sequence
  ENSG00000111907_7 (sequence is synthesized)
ccatctctgcctgtgcttatccagataagaagaccaaaatcccgctgggaaaaacccaggccttgacattgttattcaaatggcccctccagaaagtttaatgatttccatttgtatttg

SEQ ID NO: 186977 - DNA, 120 bp, Artificial Sequence
  ENSG00000111907_8 (sequence is synthesized)
tgttgatgatggaccacttgaccatcacatttcagtattcatagatgactgtcacattttaaaatgttcccacttgagcaggtacacaactggtcataattcctgtctgtgtaattcgat

SEQ ID NO: 186978 - DNA, 120 bp, Artificial Sequence
  ENSG00000111907_9 (sequence is synthesized)
ctgaatgaacagtccctttcagttcagcagatcaacaggatggagctcttcatgactgtctccagcaataggatgatttactataaatttcatccaactacttgtgatctctctcaccta

SEQ ID NO: 186979 - DNA, 120 bp, Artificial Sequence
  ENSG00000111907_10 (sequence is synthesized)
catcaattatgtatgttaatttcagcaattaaaagaattgattttaatgactttgaattcttaatttctttgtcttaaaagttgctagttatgattttacagatgcaattttaaatcaac

SEQ ID NO: 186980 - DNA, 89 bp, Artificial Sequence
  ENSG00000111907_11 (sequence is synthesized)
gttgctagttatgattttacagatgcaattttaaatcaacttttagccaggtgcggcggctcacacctgtaatcccaactattttggat

SEQ ID NO: 186981 - DNA, 80 bp, Artificial Sequence
  ENSG00000111907_12 (sequence is synthesized)
gttaaagatcagcctgggcaacacagaccctgtctctacaaaaaaagaaaaaaattagccagacatagtgttgcgattgc

SEQ ID NO: 186982 - DNA, 120 bp, Artificial Sequence
  ENSG00000111907_13 (sequence is synthesized)
accactgcactactccagcctgggtgacagagtgggacactgtctccaaaaatagtaataataagtagtcaacttttactgctaatttggtgaacatgagagaggatatgaaaataaata

SEQ ID NO: 186983 - DNA, 120 bp, Artificial Sequence
  ENSG00000111907_14 (sequence is synthesized)
ttacctcagctatcctaggatgttaaaataatctccaattttaaaattctctccaatctacatacagtagtagttagtcagataaaggatatccaaaaaagagatagctagaaaatggga

SEQ ID NO: 186984 - DNA, 120 bp, Artificial Sequence
  ENSG00000111907_15 (sequence is synthesized)
gaagcagagttctgcaacccctttcagtttgtaaattgttcacatgtatgaaaataactggtatttatcaatccactcagatttctgcactaacttttatcttatatatcatatgtatct

SEQ ID NO: 186985 - DNA, 120 bp, Artificial Sequence
  ENSG00000111907_16 (sequence is synthesized)
cttttctttttctaaatgggaacatatatttgttattaggtggcagagatatagccttaagatatatttgtaaaatgcacactgaatagacatccaacctaaaaaaaatcactatttaaa

SEQ ID NO: 186986 - DNA, 120 bp, Artificial Sequence
  ENSG00000111907_17 (sequence is synthesized)
aagcccatataatatatacatatttgttagcatgctaattgttcatgttttgtgtttattaaatagaagtgatatatatgacattttgaagtaaagcacatctgaaaaattctactcaaa

SEQ ID NO: 186987 - DNA, 120 bp, Artificial Sequence
  ENSG00000111907_18 (sequence is synthesized)
gcccttatagcgccgggagtgggtgccttccgccggctgtacagagcgccggcaggtggcgcccagcggcgagcttgttccagcttggtttgggccaggtggactggaaggggcggaggt

SEQ ID NO: 186988 - DNA, 120 bp, Artificial Sequence
  ENSG00000111907_19 (sequence is synthesized)
ttaggaatatctttgattccataccttctttgccaaattgatttcttacaaagccattccttctttattttactactctgtttagaggaaatcaagaaacaggagagaataatgaaacaa

SEQ ID NO: 186989 - DNA, 120 bp, Artificial Sequence
  ENSG00000111907_20 (sequence is synthesized)
agcacagaagaaaacgtcagtgatttgtattcactgaattcaatattgtgtgttacttctattgcaaaagagaatgtgaatggaagaaaaaagaggagagagggaactattaatagagta

SEQ ID NO: 186990 - DNA, 120 bp, Artificial Sequence
  ENSG00000111907_21 (sequence is synthesized)
ataagcatagtgaaaaatcacacaatggaaaccatcccttcccctgacctgttcccagtgttaagataacagagggaaggaagatcaatgctctgccagaggtccacaaactaagctgac

SEQ ID NO: 186991 - DNA, 120 bp, Artificial Sequence
  ENSG00000111907_22 (sequence is synthesized)
gcggcttgtggctcccaagttagggagtgagaggatcgcccgccgagggggtggctccgcagcccggctgcgcgagacgcttcccgctcggggacccgccttccgaggccaggtgaacgt

SEQ ID NO: 186992 - DNA, 120 bp, Artificial Sequence
  ENSG00000111907_23 (sequence is synthesized)
acatctctgccttctcattttctcttaatttttttctttttttggcttcttggtattctttgctttcttggagctcgtcacacatttaggaggatttttgtcttttctggaatttttagt

SEQ ID NO: 186993 - DNA, 120 bp, Artificial Sequence
  ENSG00000111907_24 (sequence is synthesized)
tgttttttggtgggagggtctgtcagtgcatctagtcctccacactatggaagcagaagttggtttaaattcactttaaaaattgccttctgttttatcaattctgcctaaaggtttgtt

SEQ ID NO: 186994 - DNA, 120 bp, Artificial Sequence
  ENSG00000111907_25 (sequence is synthesized)
ccatcagcaagaagttcggagacatgaggtactgtgggaaaataccatgggaacggcgctaagcccttggctttccgattgaagggagcactagctattagctgctcatctcaacatatg

SEQ ID NO: 186995 - DNA, 120 bp, Artificial Sequence
  ENSG00000111907_26 (sequence is synthesized)
ccttggtgtgtgcataaggccacatgacctcaggtcaggaataaaagcttagggctgagcagctcactctttggttgagaatccagttggctcccctggagtgaagttctacacagaccc

SEQ ID NO: 186996 - DNA, 80 bp, Artificial Sequence
  ENSG00000111907_27 (sequence is synthesized)
gcttttcttttattagatagcaatgaggatgggatccgaagtagagcttccaacgaccctcaggagcgctgagcgaccaa

SEQ ID NO: 186997 - DNA, 120 bp, Artificial Sequence
  ENSG00000111907_28 (sequence is synthesized)
ggagaggcccctcctcaggaaatgcgcccgtggaatgctctaccctcttccgcagccagtcgcccctggccttcccaacctcgcggctgcccgaaggacctgttgtgccgggtccggaaa

SEQ ID NO: 186998 - DNA, 120 bp, Artificial Sequence
  ENSG00000111907_29 (sequence is synthesized)
catcgggtaagcgccacagggctgcgtgtggggctttccccactcccttgctgcccctttgctttccagggctccctgtttctttcacactgtgcctgaaccaacaaaactacactctgt

SEQ ID NO: 186999 - DNA, 120 bp, Artificial Sequence
  ENSG00000111907_30 (sequence is synthesized)
tttccagacagttcccgtgaccaggaagatagtttatagggcacttaatacatttgaacttattgaagtacatctctatctcatttctgaatcatttacaccatttcacttgctgagctc

SEQ ID NO: 187000 - DNA, 120 bp, Artificial Sequence
  ENSG00000111907_31 (sequence is synthesized)
tctctcaggagtctctttctctgcaccatttcttccggtgttgacagagcttcttagaattgaaaagaagaagaaaaaaaaacaaagtggagattgaaagttatatatgttttctgaaac

SEQ ID NO: 187001 - DNA, 120 bp, Artificial Sequence
  ENSG00000111907_32 (sequence is synthesized)
ttctagaaagtaaagttgagaaacaaaaacagattttctctagattgtcatgtttctctgaatttcttgtacccataatttgtgttgatgtttcaccttcaactttctgtgccttctgaa

SEQ ID NO: 187002 - DNA, 120 bp, Artificial Sequence
  ENSG00000111907_33 (sequence is synthesized)
ttagccggaatcttattatatacttttatttttttaattttttcctaagaaagcggtctatatttacagagatacaccaattggtaatgcagatgaggctcttttagtgatgcttttgaa

SEQ ID NO: 187003 - DNA, 120 bp, Artificial Sequence
  ENSG00000111907_34 (sequence is synthesized)
gtgtaatttctgaggaaatatctgcctaatagtttctaaatcaagtgtctagggtaagaccgtaagtatcccatgaatttgtttgtccttttctttctgtgttctagcaaagtgctaccc

SEQ ID NO: 187004 - DNA, 120 bp, Artificial Sequence
  ENSG00000111907_35 (sequence is synthesized)
atactaatgccctcagtggatattatgagggaagggtgacagatttggtccctgaactattagctccttgagagaagagaaagcagggacgctgttgaaaagtgtgaggtgggagcaagc

SEQ ID NO: 187005 - DNA, 120 bp, Artificial Sequence
  ENSG00000111907_36 (sequence is synthesized)
actaggccaggaaaatggacccattgtgctcctccccatgcccagcctgatttctgagtggaactcaatagaaagtaacaggcaaccaaccagagggaagatgaatcagctactaggatt

SEQ ID NO: 187006 - DNA, 120 bp, Artificial Sequence
  ENSG00000111907_37 (sequence is synthesized)
aatgggatgagaagtttaaatctcttaaaattctcaggaatgtttgtgtttgtaccagatgttcttgacagtcatctagtacaaatcaatcatcttgacaatcaaaccagaatggatgca

SEQ ID NO: 187007 - DNA, 120 bp, Artificial Sequence
  ENSG00000111907_38 (sequence is synthesized)
gaagtccctatggcctatgagaactgtgtttgcctggcatgtgcttccttgaaagtcttatgttaacttcttgctttcctctggccagtttctctaccatggaatgattagcttctacct

SEQ ID NO: 187008 - DNA, 120 bp, Artificial Sequence
  ENSG00000111907_39 (sequence is synthesized)
gcctggctctatttcctggatactgccttttgctccttactgttttcctgagcagaagggagtagagacctaagttgggcctggagaagatgcccatgggctactgggctcacctgggag

SEQ ID NO: 187009 - DNA, 120 bp, Artificial Sequence
  ENSG00000111907_40 (sequence is synthesized)
aaaccagacattctcagatttcctggcaaaaggaggctgcagaaagtaaaataatatgcaaccacggatccaccatctacttttcatttatacccttgaaagctgactatacccattata

SEQ ID NO: 187010 - DNA, 120 bp, Artificial Sequence
  ENSG00000111907_41 (sequence is synthesized)
cccaacaaaaacaaatgtcatcttggttagatgggcagggaatatttcagatatttggaattgctgttttagaactacgaatagggagtttttcatgtacttatgtgtgctctcttcttt

SEQ ID NO: 187011 - DNA, 120 bp, Artificial Sequence
  ENSG00000111907_42 (sequence is synthesized)
tttcttttttcccctttaatctgcttttgctctgaagttactccattcgccattccataagtatgcctgctatgaggtaatgtgtgtaaaatattttatgtaatattaatatgaaatgtg

SEQ ID NO: 187012 - DNA, 120 bp, Artificial Sequence
  ENSG00000111907_43 (sequence is synthesized)
agaaagaaagaaagaaagaaagaaaaggggaaggggaaggggaagggaagccacgctcattcacttaggtattcgctgtggctacttcctacaagaactgatttgagtatctgtgagagc

SEQ ID NO: 187013 - DNA, 120 bp, Artificial Sequence
  ENSG00000111907_44 (sequence is synthesized)
gagtatctgtgagagcaacaatgtggttcccaagcctaaagtatttactgtctggccctttacaggtagagttttctgacaccaagcagagtacaaaaattcaatttaataaataaattt

SEQ ID NO: 187014 - DNA, 120 bp, Artificial Sequence
  ENSG00000111907_45 (sequence is synthesized)
aagaggcagagagagattttagtgacaattagagcgaagtgtgttttgtaatgatggaactgcttttgaaccctggttacatttttaaaaggtcaggccaggcagcacagacacaatccc

SEQ ID NO: 187015 - DNA, 120 bp, Artificial Sequence
  ENSG00000111907_46 (sequence is synthesized)
cagtgttgctgatgtctgtgagtgatcactttggtgacagtgaggcatcaacaatcagtttggcaatagcaacattatttattctatatcttctttttccttcaaagtgttttttctaca

SEQ ID NO: 187016 - DNA, 120 bp, Artificial Sequence
  ENSG00000111907_47 (sequence is synthesized)
ttatgaaaaacaatgggagggaaggccagtgtgactattaataagacttgcactaagcattttgcatcttgtcaagcagaccatatttttagtgcatctactttttgataaatacattac

SEQ ID NO: 187017 - DNA, 120 bp, Artificial Sequence
  ENSG00000111907_48 (sequence is synthesized)
atggcctggaccaaaaccttaaaaaaaaaaaaaaagggcaagttgcattacatgttttttttcctttttgtattatgagagattaggaagccagttttaataagggatttttagcagttt

SEQ ID NO: 187018 - DNA, 120 bp, Artificial Sequence
  ENSG00000111907_49 (sequence is synthesized)
taataaggaatttttcaaaatacttagccttatttttaaattgtaagttaattccttcatgtttctatgcttagtcaataacaaatacacaagaaaaaagcctcataaaccatcataact

SEQ ID NO: 187019 - DNA, 89 bp, Artificial Sequence
  ENSG00000111907_50 (sequence is synthesized)
acaaatacacaagaaaaaagcctcataaaccatcataactgcattgtaaggaatattcatactgtaagggtgtattaattccatttcac

SEQ ID NO: 187020 - DNA, 85 bp, Artificial Sequence
  ENSG00000111907_51 (sequence is synthesized)
aatcatggcagaaggggaagtaaatgctgaacaaaaggaggaaagccccttgtagaagcatcagatcttgtgagaactcactcac

SEQ ID NO: 187021 - DNA, 120 bp, Artificial Sequence
  ENSG00000111907_52 (sequence is synthesized)
gaactcactcactatcacgagaacagtatggaggtcaccgcccccatgattcaattacctcctaccaggttcctccttgctaggattatgaggactatgggaactaccattcaagatgag

SEQ ID NO: 187022 - DNA, 120 bp, Artificial Sequence
  ENSG00000111907_53 (sequence is synthesized)
taagacttgatccatcttcaattttcaaagcagaaaccagaaatcattttccattgagccactctgacttttcaaaagacatttgtcagaaatccagtttgccctgctaactcccaagta

SEQ ID NO: 187023 - DNA, 120 bp, Artificial Sequence
  ENSG00000111907_54 (sequence is synthesized)
gaaaaatctaagtttaggtcatgtaaggatgtttatacatttgtacaattggaggaattaataaaaaatctaattccattttgattagatcagttctctgggtgagtggagatagctgtt

SEQ ID NO: 187024 - DNA, 120 bp, Artificial Sequence
  ENSG00000111907_55 (sequence is synthesized)
ccaagtccatggatccgattatgctcctgaagggattaaaatcttagatacaggagagataaagagagggttgctaaaagtgtgcaaaattaaagtttggaatcctatccgagaacccaa

SEQ ID NO: 187025 - DNA, 120 bp, Artificial Sequence
  ENSG00000111907_56 (sequence is synthesized)
gtatgaataatattctagcactctactaaaggaaacaaacttctgtgcattcttttgtctctaaagatagaaagtatttctgaatttgaaagtaatccagcttttggtattcttataaaa

SEQ ID NO: 187026 - DNA, 120 bp, Artificial Sequence
  ENSG00000111911_0 (sequence is synthesized)
ctctagtggcagccggttttgaggccggcctccggctttgaagttcctcaccgcgtctccttccctctccccaaagcctggatcaccgcccagcgtcaggcgaggggcgacgtctcgagg

SEQ ID NO: 187027 - DNA, 120 bp, Artificial Sequence
  ENSG00000111911_1 (sequence is synthesized)
taaaacggaggaggtgcgggacgcggagactgcgcgggcccggtagccctggagaggccgaggctctaggccgcgaggggcgggtgcaatggcggaggaacaggtgaaccgcagcgccgg

SEQ ID NO: 187028 - DNA, 120 bp, Artificial Sequence
  ENSG00000111911_2 (sequence is synthesized)
cctggcccccgactgtgaggcctcggcgactgcagaaactacggtttcctcagtggggacctgtgaagccgctggcaagtcaccagagcccaaggactacgacagcacctgcgtgttctg

SEQ ID NO: 187029 - DNA, 120 bp, Artificial Sequence
  ENSG00000111911_3 (sequence is synthesized)
ccggatcgcggggcggcaggacccgggcaccgaactcctgcactgcgagaatgaggacctaatttgcttcaaagatatcaaaccagcagcaactcatcattatcttgtggtgccaaagaa

SEQ ID NO: 187030 - DNA, 120 bp, Artificial Sequence
  ENSG00000111911_4 (sequence is synthesized)
gcatattggaaactgcagaactctaaggaaagatcaagtagaactggttgagaacatggtaactgttggaaaaaccattcttgaaagaaataatttcactgacttcacgaatgtgaggat

SEQ ID NO: 187031 - DNA, 120 bp, Artificial Sequence
  ENSG00000111911_5 (sequence is synthesized)
gggttttcatatgccaccattctgttccatttcccacttgcaccttcatgttctggcaccagtggatcagcttggcttcttatccaagttggtttatagagtcaattcctattggtttat

SEQ ID NO: 187032 - DNA, 120 bp, Artificial Sequence
  ENSG00000111911_6 (sequence is synthesized)
cacagctgatcacttgattgaaaaactaagaacatgaaaatgtcaagagtggaagatttttctaatcttggttcagcatgaagtggtatttaggtcccttttaagtctaattgcaatttt

SEQ ID NO: 187033 - DNA, 120 bp, Artificial Sequence
  ENSG00000111911_7 (sequence is synthesized)
aagatttgttgggttttatgagaggctgttacttagtggccttaaatcttttctgaatgtctgtttcctaagatctgtgatacagttatgtgaatattttgttactgacttgtttcaatg

SEQ ID NO: 187034 - DNA, 120 bp, Artificial Sequence
  ENSG00000111911_8 (sequence is synthesized)
aggattttatatatatgatactatagataaaatcctatttaagacaaattctgttaatcaacaagggctctgtatttttttaagttaaaatattttcatttctcagtaagtagtcagtta

SEQ ID NO: 187035 - DNA, 120 bp, Artificial Sequence
  ENSG00000111911_9 (sequence is synthesized)
agtagtcagttataatagtgatttatttatgaagaataaactactatagaaagtactttgtgggaacctttattactgtgaaggagaaaaatagctatttcttgacagttctatagttat

SEQ ID NO: 187036 - DNA, 120 bp, Artificial Sequence
  ENSG00000111911_10 (sequence is synthesized)
acacataaattttcaaaataaagaataccatactacacaatgatctctgattttgctgagggaaggaattatatatgtgccactttttcctcaaatttcagatgccagttttcacttttt

SEQ ID NO: 187037 - DNA, 120 bp, Artificial Sequence
  ENSG00000111911_11 (sequence is synthesized)
gaagcattgcatctttttaataaatctatcctgaaagctatataatatatataatttatatcaatgaatttacaataactatcaaattggctatcagaattcactgtaatggaattttgc

SEQ ID NO: 187038 - DNA, 120 bp, Artificial Sequence
  ENSG00000111911_12 (sequence is synthesized)
ctctaataacataaagggggaagaaacataaagtggttctcttaataaaactagcagaaaatgttgctttatggcatgtttttgtatcaaagagaaatcagaggttaaactttgctttta

SEQ ID NO: 187039 - DNA, 120 bp, Artificial Sequence
  ENSG00000111911_13 (sequence is synthesized)
aggtatattttgttagaaattggttttttggtgctaatctataggcacaatagtgaatatgaatgaagagtaggtgctgcaagttaatcctacattgtgccagtgtatattagtaccatg

SEQ ID NO: 187040 - DNA, 120 bp, Artificial Sequence
  ENSG00000111911_14 (sequence is synthesized)
taaatgaatatgaataaatgaacatgaggattaacgaactgttgaaaataggctgagatactagttttctttcttttttagagggggcatgatattaaagatagttttaagtaacaaatt

SEQ ID NO: 187041 - DNA, 120 bp, Artificial Sequence
  ENSG00000111911_15 (sequence is synthesized)
acttattacaaagttacaacatgtggaatcaatagttttatttgttcattaatttattcattcagcaaacatttgttgaacatttaatgtgtaccagatattgccaggatcaggaaataa

SEQ ID NO: 187042 - DNA, 120 bp, Artificial Sequence
  ENSG00000111911_16 (sequence is synthesized)
agaactaaaaatggacattcagactgcaattgctagtacaggggtcaaacaaaatcagtgattagaatttagtgcgttaagttccctgatgccttcacagccagaagaggctgtgaaggg

SEQ ID NO: 187043 - DNA, 120 bp, Artificial Sequence
  ENSG00000111911_17 (sequence is synthesized)
ataaacacttctgagagtgggtggtagtagaactgagtattcaagactgaatgttaggcaggtagacagtgactggttaggctgagaaacttacaagtattttcgttgagttctgcttcc

SEQ ID NO: 187044 - DNA, 120 bp, Artificial Sequence
  ENSG00000111911_18 (sequence is synthesized)
actattatttactttacaatggatatgaagttcagatttcatcttatttactgaaggtggagaaaggatgtggaagtaggggttatgggctctcaaaagtagatttagagagattttttt

SEQ ID NO: 187045 - DNA, 120 bp, Artificial Sequence
  ENSG00000111911_19 (sequence is synthesized)
atcactgttttatgatatagttcactgagcacttacatagattaacagttacaagtttccataaatcagttagaatatgactagcttcagggaaggaattttcaacaactgcaatctttg

SEQ ID NO: 187046 - DNA, 120 bp, Artificial Sequence
  ENSG00000111911_20 (sequence is synthesized)
aaggaattttcaacaactgcaatctttgattgttttactgtgggaacttgcagtgatataattgacaacattatttaacaataataggtaaagtaggccgggtgtggtggctcacgcctg

SEQ ID NO: 187047 - DNA, 120 bp, Artificial Sequence
  ENSG00000111911_21 (sequence is synthesized)
aacaataataggtaaagtatttaaggaattctcagatgccttatggacctcttcaaaaatgtggttagccaattgattcaacttttataggtttatatgctctcatgtaaacctatttgt

SEQ ID NO: 187048 - DNA, 120 bp, Artificial Sequence
  ENSG00000111911_22 (sequence is synthesized)
gcgttcagggtggtatggccgtagacaacctatttgttaaaaacccttggaaacacatcttttagtagaggttcttatttacttataaagattaataatcaaattactacaattaatatc

SEQ ID NO: 187049 - DNA, 120 bp, Artificial Sequence
  ENSG00000111911_23 (sequence is synthesized)
aatcaaattactacaattaatatccatttagccttttcagtagtctaaatatttggtaactccctagccatctataacactagttcaaaacaaggctaattcataacctgtcttaaaaat

SEQ ID NO: 187050 - DNA, 120 bp, Artificial Sequence
  ENSG00000111911_24 (sequence is synthesized)
gtttgaagtggtatcaagagcattgtttatgcatgttgtgatactatttgtggaactgtttaatgagctatttcaaactgctagaagaaaatgaaataaaaatggaaaaatactgtcaaa

SEQ ID NO: 187051 - DNA, 120 bp, Artificial Sequence
  ENSG00000111912_0 (sequence is synthesized)
agaaaccctcataaagtagatgcagagggcagtaagatataactcaactttgaaaatgtcagccgttatagttgaagaaatctgacccaagagacttcgctccgctgcaagatggaagga

SEQ ID NO: 187052 - DNA, 120 bp, Artificial Sequence
  ENSG00000111912_1 (sequence is synthesized)
agcttaagtaagacataaatttgtaatgaacttgctcacaacatccgccgccactgtgacttgcagtcatcatccattaccacaaaattagttgcaggatggctactcgtatccctccac

SEQ ID NO: 187053 - DNA, 120 bp, Artificial Sequence
  ENSG00000111912_2 (sequence is synthesized)
acatgatcatcagtatttgcctcctgtgtcccaaccggcctgagtcaaggttacgactcactgattaaaaagagggactttttcaaatactttgcacttttgattgtgtattatggatac

SEQ ID NO: 187054 - DNA, 120 bp, Artificial Sequence
  ENSG00000111912_3 (sequence is synthesized)
caaggaagagaagaaggaacggaaacaaagttattttgctcgactgaaaaagaaaaaacaagccaaacaaaatgcagagacagcctcagctgtagctacaaggactcatactgggaagga

SEQ ID NO: 187055 - DNA, 120 bp, Artificial Sequence
  ENSG00000111912_4 (sequence is synthesized)
agataataatacagtagttttagagccagacaagtgcaacattgctgtggaagaggaatatatgactgatgagaaaaaaaagagaaaaagtaatcagttaaaggagatcaggcgtacaga

SEQ ID NO: 187056 - DNA, 120 bp, Artificial Sequence
  ENSG00000111912_5 (sequence is synthesized)
actaaagagatattatagtattgatgacaatcaaaacaaaacacatgataaaaaagagaagaagatggtggttcagaagccccatgggactatggaatacactgctggaaaccaggacac

SEQ ID NO: 187057 - DNA, 120 bp, Artificial Sequence
  ENSG00000111912_6 (sequence is synthesized)
cctaaactccatagcactgaaatttaacatcactcccaataaattggtggaactgaataaacttttcacacatactattgttccaggccaggtcctttttgtgccagatgccaactctcc

SEQ ID NO: 187058 - DNA, 120 bp, Artificial Sequence
  ENSG00000111912_7 (sequence is synthesized)
ttccagtaccttaaggctatcatcatccagtcctggtgctactgtctctccttcatcatcagatgcagaatatgataaattgcctgatgctgacttagcacgaaaggccttgaaacccat

SEQ ID NO: 187059 - DNA, 120 bp, Artificial Sequence
  ENSG00000111912_8 (sequence is synthesized)
tgaaagagtcttatcgtctacttctgaagaagatgagccaggtgtggtgaaatttttaaaaatgaattgtcgatacttcaccgatggaaagggtgtggttggcggtgttatgatagtgac

SEQ ID NO: 187060 - DNA, 120 bp, Artificial Sequence
  ENSG00000111912_9 (sequence is synthesized)
tcctaacaacatcatgtttgaccctcataaatctgatcctctggttattgaaaatgggtgtgaggagtatggtctcatctgccccatggaagaggttgtttccattgcgctctacaatga

SEQ ID NO: 187061 - DNA, 120 bp, Artificial Sequence
  ENSG00000111912_10 (sequence is synthesized)
catttctcacatgaagatcaaagatgccttgccatctgacctacctcaggatctttgtcctctgtacaggcctggagaatgggaagacctggcttcagaaaaggatatcaacccattcag

SEQ ID NO: 187062 - DNA, 120 bp, Artificial Sequence
  ENSG00000111912_11 (sequence is synthesized)
taagttcaaatctatcaacaaggaaaaacgacagcagaatggagagaaaattatgacttcggattccagaccaatagtacctttggagaagtccacaggacatacacctacaaagccctc

SEQ ID NO: 187063 - DNA, 120 bp, Artificial Sequence
  ENSG00000111912_12 (sequence is synthesized)
aggcagctctgtgtcagagaaattaaagaaactggactcctctagggagacatcccatggttctcccacagtgactaagctcagcaaggaaccttccgacacttcttctgcatttgaatc

SEQ ID NO: 187064 - DNA, 120 bp, Artificial Sequence
  ENSG00000111912_13 (sequence is synthesized)
tacagccaaagaaaactttctaggggaagatgatgattttgttgacttggaagaactttcttctcaaactggtggtggaatgcacaaaaaagacaccttgaaggagtgcctttctcttga

SEQ ID NO: 187065 - DNA, 120 bp, Artificial Sequence
  ENSG00000111912_14 (sequence is synthesized)
cccagaggaacgaaagaaagctgagtcacaaataaacaattctgccgtggaaatgcaggtgcagtcagccctagcctttttgggaacagagaatgatgttgaactgaagggggcgctaga

SEQ ID NO: 187066 - DNA, 120 bp, Artificial Sequence
  ENSG00000111912_15 (sequence is synthesized)
tttagaaacctgtgagaagcaagatataatgccagaagtggacaagcagtctggttcgccagaaagccgagtagaaaacacactgaacatacatgaagatttagataaagttaaactcat

SEQ ID NO: 187067 - DNA, 120 bp, Artificial Sequence
  ENSG00000111912_16 (sequence is synthesized)
tgaatattacctgactaagaacaaagaagggccacaggtatctgaaaatttgcagaaaacagaattaagtgatggaaaaagtattgaaccagggggaatagacattacccttagtagttc

SEQ ID NO: 187068 - DNA, 120 bp, Artificial Sequence
  ENSG00000111912_17 (sequence is synthesized)
tctttcccaggcgggtgatcccataactgagggcaataaagagccagataagacctgggtgaaaaagggagagcccctcccggtaaaactgaactcttctacagaagcaaatgtgattaa

SEQ ID NO: 187069 - DNA, 120 bp, Artificial Sequence
  ENSG00000111912_18 (sequence is synthesized)
agaggctctagactcctctttggaatctactctggacaacagctgtcaaggtgcacaaatggataataaatctgaagttcagttgtggctgttaaagagaattcaggtacccattgaaga

SEQ ID NO: 187070 - DNA, 120 bp, Artificial Sequence
  ENSG00000111912_19 (sequence is synthesized)
tatacttccttcaaaagaagaaaaaagcaagaccccacccatgttcctgtgcatcaaagtgggaaaaccaatgagaaaatcctttgccactcacactgcagccatggtccagcagtacgg

SEQ ID NO: 187071 - DNA, 120 bp, Artificial Sequence
  ENSG00000111912_20 (sequence is synthesized)
caaacggagaaagcagccagagtactggtttgctgttcctcgggagagggtggatcatttgtacacattctttgttcagtggtctcccgatgtctatggaaaagatgccaaagagcaagg

SEQ ID NO: 187072 - DNA, 120 bp, Artificial Sequence
  ENSG00000111912_21 (sequence is synthesized)
ctttgtggtggtggagaaggaagaactgaacatgattgacaacttcttcagtgagccaacaaccaagagctgggagatcatcactgttgaagaggcaaagcgcaggaagagcacatgcag

SEQ ID NO: 187073 - DNA, 120 bp, Artificial Sequence
  ENSG00000111912_22 (sequence is synthesized)
ctactatgaagacgaggacgaagaggtgctgcctgtcctacggccccacagcgcgctcctggagaatatgcacatcgagcagctggcccgacgccttcctgcaagggtgcaagggtatcc

SEQ ID NO: 187074 - DNA, 120 bp, Artificial Sequence
  ENSG00000111912_23 (sequence is synthesized)
tggagactggcctatagcacgttagagcacgggaccagcttaaagacgctctaccggaaatcggcatcactagacagtcctgtcctattggtcatcaaagatatggataatcagattttt

SEQ ID NO: 187075 - DNA, 120 bp, Artificial Sequence
  ENSG00000111912_24 (sequence is synthesized)
ggagcatatgcaactcatcctttcaagttcagtgaccactattatggcacaggcgaaacttttctctacacattcagccctcattttaaggtctttaagtggagtggagaaaattcatac

SEQ ID NO: 187076 - DNA, 120 bp, Artificial Sequence
  ENSG00000111912_25 (sequence is synthesized)
tttatcaatggagacataagttctttagaacttggtggtggagggggacgatttggtttatggctagatgctgatttataccacggacgaagcaactcttgcagcactttcaataatgat

SEQ ID NO: 187077 - DNA, 120 bp, Artificial Sequence
  ENSG00000111912_26 (sequence is synthesized)
attctttccaaaaaggaagacttcatagttcaggatctggaggtgtgggcatttgattgaaattcagactgccttaaaatataacattaaaaagactgggttcgatcagccctcctaaag

SEQ ID NO: 187078 - DNA, 120 bp, Artificial Sequence
  ENSG00000111912_27 (sequence is synthesized)
ctggctggaaaaagaagccccagcccagcctgcctcatcccaccccaatgcttcctttctgccatcatctcagagcatgatcacattgcagaaagattctggaaggtccatgtagagggc

SEQ ID NO: 187079 - DNA, 120 bp, Artificial Sequence
  ENSG00000111912_28 (sequence is synthesized)
agacattgaagaaagaaacttaaaatccaggttgttgaaaagactttgtactcccacttcctccaaatccatacagtgaggaatcagagtgtttatagatatatgagttgaatgcaattt

SEQ ID NO: 187080 - DNA, 120 bp, Artificial Sequence
  ENSG00000111912_29 (sequence is synthesized)
ttatttttggtaactgtgaaaaataagatactgtggatatatacatgccttgtgtatttatcagcataattttcattaccaaaatgtacagctattatttgccatggaaaaggttagtct

SEQ ID NO: 187081 - DNA, 120 bp, Artificial Sequence
  ENSG00000111912_30 (sequence is synthesized)
catttagaaaaatcgaaagtgcacagcacttaaagggaatatatgaggtttttttttttttaaaaaaaaacttttatttattatttgtagtatattgtctgaaatgtgtcggcagttttt

SEQ ID NO: 187082 - DNA, 120 bp, Artificial Sequence
  ENSG00000111912_31 (sequence is synthesized)
tttcttttaatgtgtcaaatcttgaaatattaaatgtatacattttgtgctatgttttgggaacaaatctgtttgatttatatagttttatattgaattttttttgccctgattgtttag

SEQ ID NO: 187083 - DNA, 120 bp, Artificial Sequence
  ENSG00000111912_32 (sequence is synthesized)
ggtgataggtcttaagcagcatatatctatatatctgtatgtgggtatatagagatatatgtgtgtgtgtatgtatatgtacatatacatatatatgagtgtataattctaaatttctaa

SEQ ID NO: 187084 - DNA, 120 bp, Artificial Sequence
  ENSG00000111912_33 (sequence is synthesized)
aaactcattatgaatgttcatcaatttgactattataggccagctttccatttagtcaataaaagcgtacatttttagttacttaccttgaacatattcgtgtgaaaaagaatacatcat

SEQ ID NO: 187085 - DNA, 120 bp, Artificial Sequence
  ENSG00000111912_34 (sequence is synthesized)
ttctcacagtcttaagttgatatttatagaaatgaatacctttgtgaacctagacttagaacaaatcctgcttttgaaaaaaaatgttttgcttcttacaaaatcatttgtgttaataac

SEQ ID NO: 187086 - DNA, 120 bp, Artificial Sequence
  ENSG00000111912_35 (sequence is synthesized)
aaaaactttattttcggagtgttctttgtataacttttccaagcttttacattaacgagcaggcctctgtcttaaaagggactcagtatattaatttctgcattttttaaatcaaatgaa

SEQ ID NO: 187087 - DNA, 120 bp, Artificial Sequence
  ENSG00000111912_36 (sequence is synthesized)
aaacgtcaaattggaccaattgtcttggtttcttgattcatttatttgagaaaaaaacaatacaaagaaatgcattcatatcaaaattggaatagaaaggaaaacctatttttaagatat

SEQ ID NO: 187088 - DNA, 120 bp, Artificial Sequence
  ENSG00000111912_37 (sequence is synthesized)
tcaaaattggaatagaaaggaaaacctatttttaagatatcaacctattttcacatcataaaacatctattacataaaataaaggtccaggcatagtggctcttgcctgtaatcccagca

SEQ ID NO: 187089 - DNA, 63 bp, Artificial Sequence
  ENSG00000111912_38 (sequence is synthesized)
caggtggatcactcaaggtcactattagccgactatgtggcgggcacctgtaatcccacctac

SEQ ID NO: 187090 - DNA, 120 bp, Artificial Sequence
  ENSG00000111912_39 (sequence is synthesized)
tgagccaagatcgtgccactgcactctatcctgggtaacagcgagactctgtcttaaaaataataacaataataataataataaagacttacttaaccaatattattgattaccagactt

SEQ ID NO: 187091 - DNA, 120 bp, Artificial Sequence
  ENSG00000111912_40 (sequence is synthesized)
ttaaccaatattattgattaccagacttttatgaaagccaaagactgcttgctagtaggaaaaaatttcaaataataaccaaagctgaaaaatggtctgtcataaattatttccccggta

SEQ ID NO: 187092 - DNA, 120 bp, Artificial Sequence
  ENSG00000111912_41 (sequence is synthesized)
atttttgaaaggaaaaatgtataacaagtactatttacatatctgcatttaaaaaagcaattcttagaatacttcctttacattattctcctattttagacattttgtgaaagagaacaa

SEQ ID NO: 187093 - DNA, 120 bp, Artificial Sequence
  ENSG00000111912_42 (sequence is synthesized)
attgtccagtggcctcctgtcagatcaacaattattatactccttaattccatgcaaatttaaatgaatgctataaaattttaaatctgtagcctgggtgtacgtttcactcaagttctc

SEQ ID NO: 187094 - DNA, 120 bp, Artificial Sequence
  ENSG00000111912_43 (sequence is synthesized)
ctactgaggactcttgactaacagcatactggcagtttcaccttaacctgctcgttaaataatgtgttggtgtgagatatcaggaatgtctcatgatatcacgtttaccatttacaccat

SEQ ID NO: 187095 - DNA, 120 bp, Artificial Sequence
  ENSG00000111912_44 (sequence is synthesized)
ctgcaaccatatgctattaataaaatggaaaaaaacaaaatggtcattttgcatatacttcactctgacctagtttagtccatgatactataattgtgagagcatatccagatgctgtgt

SEQ ID NO: 187096 - DNA, 120 bp, Artificial Sequence
  ENSG00000111912_45 (sequence is synthesized)
tctctatgtaaaacagtattgtccattcagaaatgtgtgacccttcatttatggatattgactatatgtaatgcagtgctatcccaatattttcaataaaggactttatgcattcagtga

SEQ ID NO: 187097 - DNA, 120 bp, Artificial Sequence
  ENSG00000111912_46 (sequence is synthesized)
gagaggatgcgctccccggcgcccagcagcagaggccaccgctcccagaaatgcatgcgaccgatccccttctcccggaccccaggagccggcgcccccgccctgtagggttacgactca

SEQ ID NO: 187098 - DNA, 120 bp, Artificial Sequence
  ENSG00000111912_47 (sequence is synthesized)
gactaaacaaggtccagagctcatgttttcactgctgccctggaaactccctcttcattccctgtagccaccctcctaattgtctcatcagttcacggaaactgctctcattatggttac

SEQ ID NO: 187099 - DNA, 120 bp, Artificial Sequence
  ENSG00000111912_48 (sequence is synthesized)
cagagacaactcttggctgtatctaccagtctcttctaatctttctagctgtgcaatgaatgacaacctcctcctcttaacatctgtcttaacctacttcataatttccgtaagggacac

SEQ ID NO: 187100 - DNA, 120 bp, Artificial Sequence
  ENSG00000111912_49 (sequence is synthesized)
tttactctctgataaattttctttggcatcctgacacctagcccctagatgttgggctagatgaagaccccaagcagtcttcattgcttcataattcctcagttcataagtccatatcaa

SEQ ID NO: 187101 - DNA, 120 bp, Artificial Sequence
  ENSG00000111912_50 (sequence is synthesized)
aggacttgggtgggaggaggcaaccaaatgtttcttcagactctactgaaaatgattagatgcatccccgtgctacaagccaccagagacatcctgcactattataagtatgtcttccct

SEQ ID NO: 187102 - DNA, 120 bp, Artificial Sequence
  ENSG00000111912_51 (sequence is synthesized)
taatttgatctccctctccttgatgccttttaaagttttagagacacattgatatggtttggctgtgtgtccccaccaacatctcattggaattataatccccacatgttgagggaggga

SEQ ID NO: 187103 - DNA, 82 bp, Artificial Sequence
  ENSG00000111912_52 (sequence is synthesized)
ggagttttcatgagatctgttttaaaatgtttggcagttccaccctcaccctctcttctgctgccatgtaagatgtgccttg

SEQ ID NO: 187104 - DNA, 120 bp, Artificial Sequence
  ENSG00000111912_53 (sequence is synthesized)
aatcatgcaggaaactagatactgagaaaacagttgtagctcagcgtggctacaagtaactgtggtgtggaagcagagtagagagaaaacttgttcctcattagagagagagccacactt

SEQ ID NO: 187105 - DNA, 120 bp, Artificial Sequence
  ENSG00000111912_54 (sequence is synthesized)
ctcactgctcacaatgagaggccaaagattacccttggacatccagattttctattgtgccagacctgacgaagagccttttgtgaagatcatcactgttgaagaggcaaagcgcaggaa

SEQ ID NO: 187106 - DNA, 120 bp, Artificial Sequence
  ENSG00000111912_55 (sequence is synthesized)
actccattttatttttcacattggccagtgtaaacttttaagtttacagttgctttgttatcttttcttacagggttacgactcactgattaaaaagagggactttttcaaatactttgc

SEQ ID NO: 187107 - DNA, 120 bp, Artificial Sequence
  ENSG00000111912_56 (sequence is synthesized)
tatagtattggtgagtattcatggcgttactgcagtattttcatttaaaaaatctataagaatttttaaaagactatcatttgtgattgatcataataatggtaacagtttatggagcag

SEQ ID NO: 187108 - DNA, 120 bp, Artificial Sequence
  ENSG00000111912_57 (sequence is synthesized)
ctgctatgtgcccctggcccttgctttacatacataatcttgtgtaaggggatcacactaaaataatgtctcatttaaatttgtgttcccagcatttagcacagtgcccagaatgtattg

SEQ ID NO: 187109 - DNA, 120 bp, Artificial Sequence
  ENSG00000111912_58 (sequence is synthesized)
tgtactactaaacgtttatctaatgaagagtcactttctctttatgagaaatatttttcttaatgtatgtagacatattcataaatatgctgatagaaatgcctgtactttttggcattt

SEQ ID NO: 187110 - DNA, 120 bp, Artificial Sequence
  ENSG00000111912_59 (sequence is synthesized)
agaatttgcaagttaagacacatgtacctagccactgggacagggaggtcattgaggacctccagctgtgtgacccacagctgtgtgggtcagtttggtgtagttaaggggtctctgctg

SEQ ID NO: 187111 - DNA, 120 bp, Artificial Sequence
  ENSG00000111912_60 (sequence is synthesized)
gttctgttcttttaaatggtgccatgtgtacaaacaaggaacacttttctgatgattcaaaaaatactttgtcttcatcacagctcttttgagggttacgactcactgattaaaaagagg

SEQ ID NO: 187112 - DNA, 120 bp, Artificial Sequence
  ENSG00000111912_61 (sequence is synthesized)
tgctttctggtggcggagcaagcttggagacaagtagctttggagaatagctgagggtccatttccactgcagactaatccctgccaatgggtgctgcacacagtgtttgggaggtggat

SEQ ID NO: 187113 - DNA, 120 bp, Artificial Sequence
  ENSG00000111913_0 (sequence is synthesized)
accccgcgcgccgcagctgctgcgagcggacgcggcagggcagccggcgctggggacagctcgcgtccacccgacttcctcccggggtccccttcacccaagtgagccagctcaggctgt

SEQ ID NO: 187114 - DNA, 120 bp, Artificial Sequence
  ENSG00000111913_1 (sequence is synthesized)
ctgcaaagccggaggtgcgggcagctccgggcattgcattggtgcggaggcttttatatgccagagaaccctgagtgtgcccctgacatgacaaggagccgtcgtcgttaggactaccga

SEQ ID NO: 187115 - DNA, 120 bp, Artificial Sequence
  ENSG00000111913_2 (sequence is synthesized)
ccagactcccggaaatcatgttggtaggatcccagtctttttcgcctggagggcccaatgggatcattagaagccagtcctttgcgggtttcagcggcctccaggaaaggcgatccaggt

SEQ ID NO: 187116 - DNA, 120 bp, Artificial Sequence
  ENSG00000111913_3 (sequence is synthesized)
gtaactccttcattgaaaattcctccgctctcaagaagcctcaggccaaactgaagaaaatgcacaatttaggccacaaaaacaacaatccccccaaagagcctcagcctaaaagggtgg

SEQ ID NO: 187117 - DNA, 120 bp, Artificial Sequence
  ENSG00000111913_4 (sequence is synthesized)
aagaagtctacagggccttgaaaaatggacttgatgaatatctggaggttcaccagacggagctggacaagttgacagctcagttaaaagatatgaaaagaaactctcgcctgggtgtac

SEQ ID NO: 187118 - DNA, 120 bp, Artificial Sequence
  ENSG00000111913_5 (sequence is synthesized)
tgtatgacctagacaagcaaattaaaacaattgaaagatacatgagacgcctggagtttcatataagtaaggtagatgaactctatgaagcttattgtatccagcgacgcctccaggatg

SEQ ID NO: 187119 - DNA, 120 bp, Artificial Sequence
  ENSG00000111913_6 (sequence is synthesized)
gtgccagcaaaatgaagcaagccttcgcaacatcccctgccagcaaagctgcccgggagagtctgacagagatcaatcggagcttcaaggagtacacagagaatatgtgcaccattgaag

SEQ ID NO: 187120 - DNA, 120 bp, Artificial Sequence
  ENSG00000111913_7 (sequence is synthesized)
tggagctagagaatctgctgggagaattctccatcaagatgaaaggtctggctggctttgcacgcctctgtcctggagatcaatatgaaattttcatgaagtatggccggcagcggtgga

SEQ ID NO: 187121 - DNA, 120 bp, Artificial Sequence
  ENSG00000111913_8 (sequence is synthesized)
aactgaaaggcaaaatagaagtaaatggcaagcagagctgggatggagaagaaacagtttttctgcccctgatagttgggttcatctccatcaaggtcacggagctcaaagggctagcaa

SEQ ID NO: 187122 - DNA, 120 bp, Artificial Sequence
  ENSG00000111913_9 (sequence is synthesized)
ctcacatcctggtaggtagcgtgacctgtgagaccaaagagctgtttgcagcccgacctcaggtagtggctgtcgacatcaatgaccttggtaccatcaaactgaacctggaaatcacct

SEQ ID NO: 187123 - DNA, 120 bp, Artificial Sequence
  ENSG00000111913_10 (sequence is synthesized)
ggtatccatttgacgtggaggacatgaccgcatcctcaggcgctgggaacaaggcagcagcccttcagaggagaatgtccatgtacagccagggtaccccggaaacgcccaccttcaaag

SEQ ID NO: 187124 - DNA, 120 bp, Artificial Sequence
  ENSG00000111913_11 (sequence is synthesized)
accactccttctttaggtggctgcatccttccccagacaagcccaggcggctgtctgtcttgagtgccttgcaagacactttctttgccaagctgcaccgcagccgctccttcagtgacc

SEQ ID NO: 187125 - DNA, 120 bp, Artificial Sequence
  ENSG00000111913_12 (sequence is synthesized)
tgccctccctcaggccgagtcccaaggccgtgctagagctctattcaaatctacctgatgacatctttgaaaatggaaaggcagccgaggagaaaatgccactgtcgctcagcttcagtg

SEQ ID NO: 187126 - DNA, 120 bp, Artificial Sequence
  ENSG00000111913_13 (sequence is synthesized)
acctgcccaacggggactgcgccctcacctcccactcaacaggctccccttccaactcaacaaatccagaaattaccatcacccctgcggagtttaacctcagcagcttggcctcccaga

SEQ ID NO: 187127 - DNA, 120 bp, Artificial Sequence
  ENSG00000111913_14 (sequence is synthesized)
atgagggtatggatgacaccagctcagcatcttccaggaactccctgggagaaggccaagagccaaagtcacacctgaaggaggaagacccagaggagcccagaaaacctgcctcggccc

SEQ ID NO: 187128 - DNA, 120 bp, Artificial Sequence
  ENSG00000111913_15 (sequence is synthesized)
catctgaggcttgccgccgacagtcctcaggtgctggggctgagcacctgttccttgagaatgatgttgcagaagcacttctgcaagagtctgaggaggcctctgagctcaagcctgtgg

SEQ ID NO: 187129 - DNA, 120 bp, Artificial Sequence
  ENSG00000111913_16 (sequence is synthesized)
aactggacacttcggaaggaaacatcacaaagcagctggtcaagaggctcacatctgcagaggtgccaatggccacagacaggctgctctctgagggttctgttggtggagaatctgaag

SEQ ID NO: 187130 - DNA, 120 bp, Artificial Sequence
  ENSG00000111913_17 (sequence is synthesized)
gctgcagatcctttctagatggaagcttagaggatgcttttaatgggcttttacttgcattagaaccacataaagagcagtataaagagtttcaggatctgaaccaagaagtcatgaatt

SEQ ID NO: 187131 - DNA, 120 bp, Artificial Sequence
  ENSG00000111913_18 (sequence is synthesized)
tggatgatattctaaaatgcaagccagcagtaagccgcagcaggtcttccagtttaagtctcacagttgaaagtgctttagaaagctttgatttcctgaacacctctgattttgacgagg

SEQ ID NO: 187132 - DNA, 120 bp, Artificial Sequence
  ENSG00000111913_19 (sequence is synthesized)
aggaggatggtgatgaggtttgtaatgttggcggaggtgctgactcagtattttcagacactgagactgagaaacacagttacaggtcggttcacccagaagccagggggcatctcagtg

SEQ ID NO: 187133 - DNA, 120 bp, Artificial Sequence
  ENSG00000111913_20 (sequence is synthesized)
aagcgctcactgaagacacaggagttgggaccagtgtggcaggaagtcctctcccactgaccacaggcaacgagagcctggacatcaccatcgtcaggcacctccagtactgcacccaac

SEQ ID NO: 187134 - DNA, 120 bp, Artificial Sequence
  ENSG00000111913_21 (sequence is synthesized)
tcgtgcagcaaattgttttctcaagcaaaaccccatttgtggcaagaagtctcttagagaagctttctaggcagatccaagtgatggagaaactcgcagctgtcagtgatgagaacatag

SEQ ID NO: 187135 - DNA, 120 bp, Artificial Sequence
  ENSG00000111913_22 (sequence is synthesized)
gaaatatcagttctgttgtggaagccataccagaatttcacaaaaagctgtctttgctgtcattctggaccaagtgctgcagccctgttggtgtctaccacagcccagcggacagagtga

SEQ ID NO: 187136 - DNA, 120 bp, Artificial Sequence
  ENSG00000111913_23 (sequence is synthesized)
tcaacaaagaatatccaggacttgcagacccagtgtttcgaaccctggtgtcccaaattctggaccgggctgagcctctgctttcctccagcctgtcctcggaagtcgtcactgttttcc

SEQ ID NO: 187137 - DNA, 120 bp, Artificial Sequence
  ENSG00000111913_24 (sequence is synthesized)
agtattacagttacttcaccagccacggcgtcagtgacctggagagttacctgagccagctggccaggcaagtttccatggttcagactctgcaatcactaagagatgaaaaactgctac

SEQ ID NO: 187138 - DNA, 120 bp, Artificial Sequence
  ENSG00000111913_25 (sequence is synthesized)
aaaccatgagtgaccttgctcccagcaacctcctggcccagcaggaagtactcaggactctggctctgctattaaccagagaggacaacgaagttagtgaggctgtgacgctttacttgg

SEQ ID NO: 187139 - DNA, 120 bp, Artificial Sequence
  ENSG00000111913_26 (sequence is synthesized)
cagcagcctccaaaaatcagcatttcagggaaaaggccttgctctattactgtgaagcactaacaaagacaaacctccagctccagaaagcagcttgcctggctctgaaaatccttgagg

SEQ ID NO: 187140 - DNA, 120 bp, Artificial Sequence
  ENSG00000111913_27 (sequence is synthesized)
ctactgaaagcattaaaatgctggtgacattgtgtcaatctgatactgaagaaatcagaaatgtggcctcagaaaccctcttgtctctgggagaagatgggcggctggcatatgaacaat

SEQ ID NO: 187141 - DNA, 120 bp, Artificial Sequence
  ENSG00000111913_28 (sequence is synthesized)
tggacaaatttcctcgagactgtgttaaagtcggaggtcgtcatggaactgaagttgccacagccttttaattacaggttaactgcctaacagctgtcttaatatctggcccttttcatc

SEQ ID NO: 187142 - DNA, 120 bp, Artificial Sequence
  ENSG00000111913_29 (sequence is synthesized)
tcttaatatctggcccttttcatcaggatggtgctgtggtttgggctggaaattgtttagagcctgagagacacgacaactgaaataaaaatgtaggccaggtgcagtggctcatgcctg

SEQ ID NO: 187143 - DNA, 90 bp, Artificial Sequence
  ENSG00000111913_30 (sequence is synthesized)
acgcaggagaattgcttaagcccaggaggccctgtctctacaaaaaaaatagtttaattagtcaggcgtggtggcatgcacctgtagtcc

SEQ ID NO: 187144 - DNA, 89 bp, Artificial Sequence
  ENSG00000111913_31 (sequence is synthesized)
taaggtgggaggattgcttgagcccagaagattcaggctgcagtgagccataattgccaaccctgtctcaaaaaacaaaacaacaacaa

SEQ ID NO: 187145 - DNA, 120 bp, Artificial Sequence
  ENSG00000111913_32 (sequence is synthesized)
aacaaaacaacaacaacaactaaaaaaacatgttatagaaagaattcagagtctcgtttcacagtacctatctacttttcctttggccaatatagaatagggctatggtataattcaaat

SEQ ID NO: 187146 - DNA, 120 bp, Artificial Sequence
  ENSG00000111913_33 (sequence is synthesized)
atattacatcgtcgattgtgtctaataatactcagtgaaagagtccatcttatcttaatatgtatgaaatttaaaaatagccatctttgtacttttttgcaagtttctctataagcttga

SEQ ID NO: 187147 - DNA, 120 bp, Artificial Sequence
  ENSG00000111913_34 (sequence is synthesized)
aatagtcatgtgatacttcgacaaacatcatatgccttgcagtttttctcggtcgtgttctcagggttgagtagtccccttagctacctaactttactttcaatacaaagcacaaaaaag

SEQ ID NO: 187148 - DNA, 120 bp, Artificial Sequence
  ENSG00000111913_35 (sequence is synthesized)
aatatcttcaaataaaagtttgcctgcagaacctggcaaaatgacccattaggagagtttagatgttttaattttatgtgctcccagctactctggagtctgaggtgggaggatcacttg

SEQ ID NO: 187149 - DNA, 120 bp, Artificial Sequence
  ENSG00000111913_36 (sequence is synthesized)
aggcagaggttgcagtaagctgagattacactactgcactccagcccatgtgacagaggaatgagagccagtctcaaaaaaaaaaacaaaaaactcccataatttattttgtttcttttc

SEQ ID NO: 187150 - DNA, 120 bp, Artificial Sequence
  ENSG00000111913_37 (sequence is synthesized)
cccatcctgaaaattcccaaatcatgtttccattatggaaaaatgataagtaaatgactaagaactacattaagattatgcctatacacttaaacaaaaaactcaaagcttatgcttttt

SEQ ID NO: 187151 - DNA, 120 bp, Artificial Sequence
  ENSG00000111913_38 (sequence is synthesized)
tttttttaattaatgagagctattttttatgatattcttaccataggggtgttttgctgctaagacaaatcaaaaccaaaagctgtagattcacaaacctgtgatgctctttgaggtgga

SEQ ID NO: 187152 - DNA, 120 bp, Artificial Sequence
  ENSG00000111913_39 (sequence is synthesized)
ggaacctagaagtcagagaaatcctaatggagtaggagtggaggaacatttaaagtggtccctccttctgtaaaaatgaccgtgggattagaaagaaggacatcctgaggggtggttact

SEQ ID NO: 187153 - DNA, 120 bp, Artificial Sequence
  ENSG00000111913_40 (sequence is synthesized)
gcccccagggaaatcactcactggtaggattccctggccaaatagttcaaacatcaggtcccattattgcttcagtatcagagatgcaagttcattaagcaaagtacaagaccattcagt

SEQ ID NO: 187154 - DNA, 120 bp, Artificial Sequence
  ENSG00000111913_41 (sequence is synthesized)
agctcttattaaaatatcttttcttcctctaaagagtgtacaaggtggggtatgccaaggtatcaaaacaatatatgtgagtgtaatttaaactgtggaatatcaactgtactatggacg

SEQ ID NO: 187155 - DNA, 120 bp, Artificial Sequence
  ENSG00000111913_42 (sequence is synthesized)
tgtttgtatcatttagatgtcattttaaatatttacattttagcaagacttttaaaaaggactcatttcatttcaaagtgcaaattgtttgccaggcttctggcaaatggttctttcaac

SEQ ID NO: 187156 - DNA, 120 bp, Artificial Sequence
  ENSG00000111913_43 (sequence is synthesized)
tgtgaacttatcgtgtacatatctgtatatttataaatattatatatattcatacatccttcactttaaaggtacattgtacagtctgtagttaggaggtatagcctatagcttatgtta

SEQ ID NO: 187157 - DNA, 120 bp, Artificial Sequence
  ENSG00000111913_44 (sequence is synthesized)
aatggttgaaatggttctttttatagaaagtcaaacacagatgttacaggattttgtgtttggtttgtcatttttttattttttattttgactattgcatgagtaattaattccagatct

SEQ ID NO: 187158 - DNA, 120 bp, Artificial Sequence
  ENSG00000111913_45 (sequence is synthesized)
tttgtattcacttctgtattttatgtttggttgaggggtgcttttagttgtgtggcatttgtattcattgatctttcagtcatgtaagttaaaataaaaattatttttgaattactagca

SEQ ID NO: 187159 - DNA, 120 bp, Artificial Sequence
  ENSG00000111913_46 (sequence is synthesized)
atatgaatgaaactgctttcttcagggcagatgcggaagctgccctccagagggcttgggcaacccaaggaaaggaaatcacctcggtcggcagtgtgactgctgagactgccggggctg

SEQ ID NO: 187160 - DNA, 120 bp, Artificial Sequence
  ENSG00000111913_47 (sequence is synthesized)
cgcaagaatgcatacaaactccagggctgctctctcctggagagggagggaggggatttaaaaacctgcagcaacatgggggaggaggctgtttgtccttctctctctggggaagtaact

SEQ ID NO: 187161 - DNA, 120 bp, Artificial Sequence
  ENSG00000111913_48 (sequence is synthesized)
cgctcaaactgccttccttgctgagctgcttcgcgtagctttgaggaaggtctagtgaaattggtctttccattacatctggatgtactaccagagagttctgctgctgttgtttttttt

SEQ ID NO: 187162 - DNA, 120 bp, Artificial Sequence
  ENSG00000111913_49 (sequence is synthesized)
agcttttctttctttgagtctttaaagggcaattgtcgacactctgcaaacataccgatttgttgtctgcccactttggagtcttcaatctgggcagtaactatttaccctttttcctgc

SEQ ID NO: 187163 - DNA, 120 bp, Artificial Sequence
  ENSG00000111913_50 (sequence is synthesized)
agtagagaagatcctctaatggatcccagtgtgcccatccctcaacctcctcagtgatcaactcatggccaatcttgtttcctattcttcaacctgctgacttccctctggattcttctg

SEQ ID NO: 187164 - DNA, 120 bp, Artificial Sequence
  ENSG00000111913_51 (sequence is synthesized)
caaccagtcccagatattgtgccattttatccatggttgtacttcttttttggatataaagatttttaaatgcattttttaaatgctaacaaaaaataaaaacttgaaacaaaaaaaaaa

SEQ ID NO: 187165 - DNA, 120 bp, Artificial Sequence
  ENSG00000111913_52 (sequence is synthesized)
atttttatacgtctggacttaacttccaggatagctgcaagacccttttgttcctttgccatgagcaggttttaggccgctctgttgggaccatggtgttaccttcgcgattacactgga

SEQ ID NO: 187166 - DNA, 120 bp, Artificial Sequence
  ENSG00000111913_53 (sequence is synthesized)
agacgttttcccatgtgcttttgtgccatcttgagtgtcagagacagatccctgcaaggcccttcctaccttgcgctaagaaatcagcaaggagtgtcacctaactggatggaggacatt

SEQ ID NO: 187167 - DNA, 120 bp, Artificial Sequence
  ENSG00000111913_54 (sequence is synthesized)
tagtgcttctaacttgcagaatttgtcccattcgacccaccccagcatcctcttgaatatttggaaatacttctctccaactctgtgcccatagcaactggcattgttttgcttgtaatg

SEQ ID NO: 187168 - DNA, 120 bp, Artificial Sequence
  ENSG00000111913_55 (sequence is synthesized)
tttctgcatgtggccagcattatagaatgctccaggccagagaatgggattgctcccatgatgccagggcctggtcagggaagtggtgggacttgttccctttgaggcagagctccagag

SEQ ID NO: 187169 - DNA, 120 bp, Artificial Sequence
  ENSG00000111913_56 (sequence is synthesized)
aggcagagctccagaggaagcagggctgcttcttgtcatgcccaaggcattcattctttcctcagtcctcagaggaaaaattatatgctgtgagcaggtgcggtggctcatgcctgtaat

SEQ ID NO: 187170 - DNA, 120 bp, Artificial Sequence
  ENSG00000111913_57 (sequence is synthesized)
cccaacactttgggaagcccaggattgctggagcccaagagttcaagaccggtatggtcaacatagggagaccctgtctctgcaataaaagaaaaaaattagcctggtgtggtggcacat

SEQ ID NO: 187171 - DNA, 72 bp, Artificial Sequence
  ENSG00000111913_58 (sequence is synthesized)
agcctggtgtggtggcacatgcctgtggtctcagctacctgggaggctaaggtgagaggattgcttaagccc

SEQ ID NO: 187172 - DNA, 120 bp, Artificial Sequence
  ENSG00000111913_59 (sequence is synthesized)
aaaaaaaaaaaaaaaaaaagatgcagggcttcttacctagggaacatgggctaggtgaatttgaaccacttcctgtttctgggatttgttttgttagtcctttagagcagatgccttaga

SEQ ID NO: 187173 - DNA, 120 bp, Artificial Sequence
  ENSG00000111913_60 (sequence is synthesized)
tagatagctagcgccttttgtaaaacaccgaagacattgccacttggaattagagattggtcagtattcagcattgactcactgacttaaaatttgtctgcttgtggtattttattttgg

SEQ ID NO: 187174 - DNA, 120 bp, Artificial Sequence
  ENSG00000111913_61 (sequence is synthesized)
acttaaaatttgtctgcttgtggtattttattttggggtgagcactaggcagagggatatagcagttctgtttcccaaggctttgtggttgacatggttttgttttttgttttttttgtt

SEQ ID NO: 187175 - DNA, 120 bp, Artificial Sequence
  ENSG00000111913_62 (sequence is synthesized)
aagcagccgttgaaactggagcgtcctcagcttccaccaccctggtgggttcgggcatctgaagcccacagggtacggtcgggaagttgctgagcgaaaggggcacgcgcactttttgca

SEQ ID NO: 187176 - DNA, 120 bp, Artificial Sequence
  ENSG00000111913_63 (sequence is synthesized)
aaaaaaggaaaaaagaagggccatgcacagtgtaggttcctatcctgctttcaagaacagaacagaattcacgtgtgggagcaaacggctcaccaggtggtggtcatatggtccaggctg

SEQ ID NO: 187177 - DNA, 120 bp, Artificial Sequence
  ENSG00000111913_64 (sequence is synthesized)
tgccaggtgctagtttctgggaccctgaaatgaggatgtgcttggctgactatgagggtgatgattccataacatctgcacaccctaggctgaagagggacgtgtcaagagcctgaactg

SEQ ID NO: 187178 - DNA, 120 bp, Artificial Sequence
  ENSG00000111913_65 (sequence is synthesized)
aatttcacaaagagaaaaaggaagatctctatttggctctcaattgcccttttttgagaaaaagtgatacaacttatctaaggcaactttacttgccataatcagattttgtctgcagaa

SEQ ID NO: 187179 - DNA, 120 bp, Artificial Sequence
  ENSG00000111913_66 (sequence is synthesized)
aatattagcagggactaccgaccagactcccggaaatcatgttggtaggatcccagtctttttcgcctggagggcccaatgggatcattagaagccagtcctttgcgggtttcagcggcc

SEQ ID NO: 187180 - DNA, 120 bp, Artificial Sequence
  ENSG00000111913_67 (sequence is synthesized)
ccagcacagcagctgccttcgggccagtcggaagttaagggaaggaaaggcaaggcaagttacaagataaaagaagtcaacggaagcctcaaatactcttttttttttttttaagaaaag

SEQ ID NO: 187181 - DNA, 120 bp, Artificial Sequence
  ENSG00000111913_68 (sequence is synthesized)
caatatatgagtattttctccacctccctctacaatattttttacagagtcaagaggatcctatgaatttcccactgggttaaaaatatgacacaatccaaggagacagcatacccagta

SEQ ID NO: 187182 - DNA, 120 bp, Artificial Sequence
  ENSG00000111913_69 (sequence is synthesized)
ccatcctgtcgaaaaggttttgttattttgtgctcatttcagaagctgatgtgtaaatggtgtgtatttctgttgccatgacaacccagcagcaattggcctgggcttcttaccagagta

SEQ ID NO: 187183 - DNA, 120 bp, Artificial Sequence
  ENSG00000111913_70 (sequence is synthesized)
caaatgtgctcttgacacgatgcttatcagactttgccagacaattttccctcctggattcacacaaaaggtttcgaagactcctaactgcatttagaggagagacaggctgaaatttcg

SEQ ID NO: 187184 - DNA, 120 bp, Artificial Sequence
  ENSG00000111913_71 (sequence is synthesized)
cacttggctcacatgaatgatgaagctctaaagctctgatcccctgctgaagtcatcgtgttctagtctatcatttcagtactctgggggcaactctgtataattaaagaggaccaagta

SEQ ID NO: 187185 - DNA, 120 bp, Artificial Sequence
  ENSG00000111913_72 (sequence is synthesized)
taaatgtggcaaaaaaatcttgctggctaccagaactgggcttttgttgatgtttcatgtgacacataactgtctctgcatttaataaaaggtcactgtgactgcctatgttcttattca

SEQ ID NO: 187186 - DNA, 120 bp, Artificial Sequence
  ENSG00000111913_73 (sequence is synthesized)
ggcaatttggtgaccaggctgaattaagtaattttttaaaggtgtctctatttttcaagataggcaagtgaaagactgttttcagtgggtgctgttggggcccgatgcaaaccatgtgga

SEQ ID NO: 187187 - DNA, 120 bp, Artificial Sequence
  ENSG00000111961_0 (sequence is synthesized)
gggaaagtttctggagttgtcagtcgcgcagcccgtggccacctagacccgaggtgcgggcgcctgcgaagggcccccgcggggtggccggggccgccggggcatgcagcgcgggggcgc

SEQ ID NO: 187188 - DNA, 80 bp, Artificial Sequence
  ENSG00000111961_1 (sequence is synthesized)
gtgcggggcgagggcgccgcggggactgggacgcacggcccgcgcgcgggacacggccatggaggacgcgggagcagctg

SEQ ID NO: 187189 - DNA, 120 bp, Artificial Sequence
  ENSG00000111961_2 (sequence is synthesized)
cgggagcagctggcccggggccggagcctgagcccgagcccgagccggagcccgagcccgcgccggagccggaaccggagcccaagccgggtgctggcacatccgaggcgttctcccgac

SEQ ID NO: 187190 - DNA, 120 bp, Artificial Sequence
  ENSG00000111961_3 (sequence is synthesized)
tctggaccgacgtgatgggtatcctggacggttcactgggaaacatcgatgacctggcgcagcagtatgcagattattacaacacctgtttctccgacgtgtgcgagaggatggaggagc

SEQ ID NO: 187191 - DNA, 120 bp, Artificial Sequence
  ENSG00000111961_4 (sequence is synthesized)
tgcggaaacggcgggtttcccaggacctggaagtggagaaacccgatgctagccccacgtcacttcagctgcggtcccagatcgaagagtcgcttggcttctgtagcgccgtgtcaaccc

SEQ ID NO: 187192 - DNA, 120 bp, Artificial Sequence
  ENSG00000111961_5 (sequence is synthesized)
cagaagtggaaagaaagaaccctcttcataaatcaaactcagaagacagctctgtaggaaaaggagactggaagaagaaaaataagtatttctggcagaacttccgaaagaaccagaaag

SEQ ID NO: 187193 - DNA, 120 bp, Artificial Sequence
  ENSG00000111961_6 (sequence is synthesized)
gaataatgagacagacttcaaaaggagaagacgttggttatgttgccagtgaaataacgatgagcgatgaggagcggattcagctaatgatgatggtcaaagaaaagatgatcacaattg

SEQ ID NO: 187194 - DNA, 120 bp, Artificial Sequence
  ENSG00000111961_7 (sequence is synthesized)
aggaagcacttgctaggctcaaggaatacgaggcccagcaccggcagtcggctgccctggaccctgctgactggccagatggttcttacccaacgtttgatggctcatcaaactgcaatt

SEQ ID NO: 187195 - DNA, 120 bp, Artificial Sequence
  ENSG00000111961_8 (sequence is synthesized)
caagagaacaatcggatgatgagactgaggagtcggtgaagtttaagaggttacacaagctggtaaactccactcgcagagtcagaaagaaactaattagggtggaagaaatgaaaaaac

SEQ ID NO: 187196 - DNA, 120 bp, Artificial Sequence
  ENSG00000111961_9 (sequence is synthesized)
ccagcactgaaggtggggaggagcacgtgtttgagaattcgccggtcctggatgaacggtccgccctctactctggcgtgcacaagaagccccttttctttgatggctctcctgagaaac

SEQ ID NO: 187197 - DNA, 120 bp, Artificial Sequence
  ENSG00000111961_10 (sequence is synthesized)
ctcccgaagatgactcagactctctcaccacgtctccatcctccagcagcctggacacctggggggctggccggaagttggtcaaaaccttcagcaaaggagagagccggggcctgatta

SEQ ID NO: 187198 - DNA, 120 bp, Artificial Sequence
  ENSG00000111961_11 (sequence is synthesized)
agccccccaagaagatggggacattcttctcctacccagaagaagaaaaggcccagaaagtgtcccgctccctcaccgagggggagatgaagaagggtctcgggtccctaagccacggga

SEQ ID NO: 187199 - DNA, 120 bp, Artificial Sequence
  ENSG00000111961_12 (sequence is synthesized)
gaacctgcagttttggaggatttgacttgacgaatcgctctctgcacgttggcagtaataattctgacccaatgggtaaagaaggagactttgtgtacaaagaagtcatcaaatcaccta

SEQ ID NO: 187200 - DNA, 120 bp, Artificial Sequence
  ENSG00000111961_13 (sequence is synthesized)
ctgcctctcgcatctctcttgggaaaaaggtgaaatcagtgaaagagacgatgagaaagagaatgtctaaaaaatacagcagctctgtctctgagcaggactcgggccttgatggaatgc

SEQ ID NO: 187201 - DNA, 120 bp, Artificial Sequence
  ENSG00000111961_14 (sequence is synthesized)
ctggctcccctccgccttcacagcccgaccccgaacacttggacaagcccaagctcaaggccgggggttctgtagaaagtcttcgcagttctctcagtgggcagagctccatgagcggtc

SEQ ID NO: 187202 - DNA, 120 bp, Artificial Sequence
  ENSG00000111961_15 (sequence is synthesized)
aaacagtgagcaccactgattcctcaaccagcaaccgggaaagcgtcaagtcggaagatggggatgacgaagagccgccttaccgaggcccgttctgcgggcgtgccagggtgcacaccg

SEQ ID NO: 187203 - DNA, 120 bp, Artificial Sequence
  ENSG00000111961_16 (sequence is synthesized)
acttcacccccagtccctatgacacagactcactcaagctcaagaaaggagatatcatcgatataatcagcaagccacccatggggacctggatgggcctgctgaacaacaaagtcggca

SEQ ID NO: 187204 - DNA, 120 bp, Artificial Sequence
  ENSG00000111961_17 (sequence is synthesized)
cgttcaagttcatctacgtggacgtgctcagtgaagacgaggagaaacccaaacgccccaccaggaggcgtcggaaaggacgaccaccccagcccaagtctgtggaggatctcctggatc

SEQ ID NO: 187205 - DNA, 120 bp, Artificial Sequence
  ENSG00000111961_18 (sequence is synthesized)
ggattaacctaaaagagcacatgcccactttcctgttcaatggatatgaagatttggacacctttaagctgctggaggaggaagacttggatgagttaaatatcagggacccggaacaca

SEQ ID NO: 187206 - DNA, 120 bp, Artificial Sequence
  ENSG00000111961_19 (sequence is synthesized)
gagctgttctcttgacagcagtggagctgttacaagagtatgacagtaacagcgaccagtcaggatcccaggagaagctgctcgttgacagccagggcctgagtggatgctcaccccgag

SEQ ID NO: 187207 - DNA, 120 bp, Artificial Sequence
  ENSG00000111961_20 (sequence is synthesized)
actcaggatgctacgaaagcagtgagaacctggaaaacggcaagactcggaaagctagcctcctatctgccaagtcatccaccgagcccagcttgaagtcttttagcagaaaccagttgg

SEQ ID NO: 187208 - DNA, 120 bp, Artificial Sequence
  ENSG00000111961_21 (sequence is synthesized)
gcaattacccaacattgcctttaatgaaatcaggggatgcactgaagcagggacaggaggagggcaggctgggtggtggccttgccccagacacgtccaagagctgtgacccacctggtg

SEQ ID NO: 187209 - DNA, 120 bp, Artificial Sequence
  ENSG00000111961_22 (sequence is synthesized)
tgactggtttgaataaaaaccgaagaagcctcccagtttccatctgccggagctgtgagaccctggagggcccccagactgtggacacttggccccgatcccattccctggatgaccttc

SEQ ID NO: 187210 - DNA, 120 bp, Artificial Sequence
  ENSG00000111961_23 (sequence is synthesized)
aagtggagcctggtgctgagcaagacgtgcctaccgaggtgacagaaccgccccctcagattgtacctgaagtgccacagaagacgaccgcctcttccacgaaggcccagcccctggagc

SEQ ID NO: 187211 - DNA, 120 bp, Artificial Sequence
  ENSG00000111961_24 (sequence is synthesized)
aagactctgctgtcgacaatgcattgctactgacccaaagcaagagattttctgaacctcagaaattgacaactaagaaactggagggctcaatcgcagcctctggtcgcggcctgtcac

SEQ ID NO: 187212 - DNA, 120 bp, Artificial Sequence
  ENSG00000111961_25 (sequence is synthesized)
cccctcagtgtttgcccagaaactatgatgctcagcctcctggagctaaacacggtttagcaaggacgcctctggagggccacagaaaaggacacgagtttgaaggaacacaccatcccc

SEQ ID NO: 187213 - DNA, 120 bp, Artificial Sequence
  ENSG00000111961_26 (sequence is synthesized)
tgggcaccaaagaaggggtagatgctgagcagagaatgcagcccaaaattccatcacagcctccacctgttcctgccaaaaagagcagagaacgccttgctaacggactccaccctgttc

SEQ ID NO: 187214 - DNA, 120 bp, Artificial Sequence
  ENSG00000111961_27 (sequence is synthesized)
ccatgggccccagtggggccctccccagtcccgatgcgccatgcctgccagtgaaaaggggcagccccgccagccccaccagccctagcgactgtcccccagcactggctcccaggcctc

SEQ ID NO: 187215 - DNA, 120 bp, Artificial Sequence
  ENSG00000111961_28 (sequence is synthesized)
tctcagggcaggcgcctggcagcccaccaagcacaaggccgcccccctggctctcagagctccccgagaacacaagcctccaggagcacggtgtgaagctgggcccggctttgaccagga

SEQ ID NO: 187216 - DNA, 120 bp, Artificial Sequence
  ENSG00000111961_29 (sequence is synthesized)
aggtctcctgtgcccggggagtggatctagaaacgctcactgaaaacaagctgcacgctgaaggcatcgatctcacggaggagccgtattctgataagcatggccgctgtgggattcctg

SEQ ID NO: 187217 - DNA, 120 bp, Artificial Sequence
  ENSG00000111961_30 (sequence is synthesized)
aagccctggtgcagagatacgcagaggacttggatcagcccgagcgggacgtcgccgccaacatggaccagatccgggtgaagcagcttcggaagcagcaccgcatggcgattccaagtg

SEQ ID NO: 187218 - DNA, 120 bp, Artificial Sequence
  ENSG00000111961_31 (sequence is synthesized)
cgaaagcccgtctctcctgggtgcatttcgtctgtgtcagattggctcatttccatcggtctgcccatgtacgccggcaccctctccaccgcgggcttcagcacactgagccaagtgcct

SEQ ID NO: 187219 - DNA, 120 bp, Artificial Sequence
  ENSG00000111961_32 (sequence is synthesized)
tctctgtctcacacttgccttcaggaggccggcatcacagaggagagacacataagaaagctcctatctgcagccagactcttcaaactgccgccaggccctgaggccatgtagccaggc

SEQ ID NO: 187220 - DNA, 120 bp, Artificial Sequence
  ENSG00000111961_33 (sequence is synthesized)
ccggaatgggcctctctggacaagagccaccctttcactgtgcatatgatgctgatgcaattcctccatcatctctggacgtgcagaccagatccagaagaaaggcctggcgtgtggcca

SEQ ID NO: 187221 - DNA, 120 bp, Artificial Sequence
  ENSG00000111961_34 (sequence is synthesized)
aacagcgtgaaaccttggcacaggactgaggatcctctcctccagaaaagccccctcgaggaaataaattagtgcggttctctttgacccccaaagacaagacaagcacttatttttatt

SEQ ID NO: 187222 - DNA, 120 bp, Artificial Sequence
  ENSG00000111961_35 (sequence is synthesized)
ttcagaagacaaaagaaccaagatgccaactggctgcgaatgctctatctccagtctgtctctgtgtactggtagaggctgggaggagtagggggcagcctgttccatttctgatagtgc

SEQ ID NO: 187223 - DNA, 120 bp, Artificial Sequence
  ENSG00000111961_36 (sequence is synthesized)
ccttgctcttctgtctgtcatcttgcaggatgcccgagggccagatgggcttagctaggccaaagtaacagactcaagagttattgtacattactgaccacgctcatttgttcaaaagtt

SEQ ID NO: 187224 - DNA, 120 bp, Artificial Sequence
  ENSG00000111961_37 (sequence is synthesized)
agaacatctggctgcaccaggaaaaaaaaaaaaaaaaagtcctgttcttctttagataaacaagagacattttcataattgctttctagcaatcagcttttatttgccttaatataagct

SEQ ID NO: 187225 - DNA, 120 bp, Artificial Sequence
  ENSG00000111961_38 (sequence is synthesized)
tttaagcagttatctaactagtgtccacaaccctgtaaccatacttccacatcttcagcttaggcagacatcgaacctctctgggatgtttccagcaaaagtgagcttttctaatcgtct

SEQ ID NO: 187226 - DNA, 120 bp, Artificial Sequence
  ENSG00000111961_39 (sequence is synthesized)
cattgtaacatggcttattttgtagaggtattcatcagccacacacttcatgttggtttttggtttttaagctaactacaaatctagtaaaaagctatctgaaattcacaaatatcatgt

SEQ ID NO: 187227 - DNA, 120 bp, Artificial Sequence
  ENSG00000111961_40 (sequence is synthesized)
gtgtgcgtgcgtgcgtgcgcgtgtgtgtctgtattcatagtgactgcttttggttttaaccagtttagtatcgttactgtgtggatcgtcgcgctgcagtattgacttggaatcctgacc

SEQ ID NO: 187228 - DNA, 120 bp, Artificial Sequence
  ENSG00000111961_41 (sequence is synthesized)
atgtccatcccaaaattcagtcctcagttaacggatcatgtttgcaaaaggtcactgtgaggctgcatatttcagaaagatgtccttaataagggaagtcatgtataagatgttttctaa

SEQ ID NO: 187229 - DNA, 120 bp, Artificial Sequence
  ENSG00000111961_42 (sequence is synthesized)
aagacttttcagtattacaactaatactattattatccttctttttttatttagataattcttttaatttaaacaaaggttcactatggaaccagacaaatctcattagccatgtgttaa

SEQ ID NO: 187230 - DNA, 90 bp, Artificial Sequence
  ENSG00000111961_43 (sequence is synthesized)
tcactatggaaccagacaaatctcattagccatgtgttaagtatttgctactttaaattgttttacaactgatttcagcacattctatcc

SEQ ID NO: 187231 - DNA, 120 bp, Artificial Sequence
  ENSG00000111961_44 (sequence is synthesized)
tttagtctagtgtctggttttctagcaaacagtaaatttaaacaagtaaactattatggtttccattgcttacaaaatgattttcctttacattcttatcatgaacactattttaagcat

SEQ ID NO: 187232 - DNA, 120 bp, Artificial Sequence
  ENSG00000111961_45 (sequence is synthesized)
caaatgcaatcatctaaaatataaaggtcaatcatttataatagaaacaccttgaccacaagcccttgattgaacattttataatatttcatctacttattaaaacaaataatttccctt

SEQ ID NO: 187233 - DNA, 120 bp, Artificial Sequence
  ENSG00000111961_46 (sequence is synthesized)
gggttggaggggaagtgatttcataaattaattagaaagccatctttagcatattgcttatgtctggatccatgtttctgaggaaaaagacattctcaggtgatgtatttttttcatgca

SEQ ID NO: 187234 - DNA, 120 bp, Artificial Sequence
  ENSG00000111961_47 (sequence is synthesized)
ttagtatgcatttttaaaaaataatgcatgtttctttaataattaattttcatcttctataagatgccatgtgaagaagttgtggaaatgtagaataaaaagctaaagctgccaaatttc

SEQ ID NO: 187235 - DNA, 120 bp, Artificial Sequence
  ENSG00000111961_48 (sequence is synthesized)
tgttgaactcttaaaaacagctcatgtttgtttgtcctctcgggttgtggcctagcctatttgcaatgtaatgaagctgcagggttcttgtatagctaaagcgttcaatgcatttcacgt

SEQ ID NO: 187236 - DNA, 120 bp, Artificial Sequence
  ENSG00000111961_49 (sequence is synthesized)
gctgtggtggatgtgggtgctgtagacaggcttcttctcttcctgctctcaaaatacctcggcttgacatttggacagatcctgtcattgtttaagctgagcaaaaaaccacacaaaagt

SEQ ID NO: 187237 - DNA, 120 bp, Artificial Sequence
  ENSG00000111961_50 (sequence is synthesized)
tgtgtaagagatgagataacaaaggagcgagagaaatctcatgtgaatttccaagttttaattcgttctccatgaaggattttcatttcagtgaaagtcgcagcagaagagggaactttc

SEQ ID NO: 187238 - DNA, 120 bp, Artificial Sequence
  ENSG00000111961_51 (sequence is synthesized)
tggagtttttgagaatgccaaaccacatttttatcacacttctttggaaatcaatgcctttgcatagaaaatcaaattcagggaccacaaagaattttcagtgggaatgtctagtctgag

SEQ ID NO: 187239 - DNA, 120 bp, Artificial Sequence
  ENSG00000111961_52 (sequence is synthesized)
gggtctgaggttgtttttactttattgtgttgtttaaatattttaaaaatatctttagcgtttggtcttttttttttctgtaaacatttaatttggtctgagaaaagctgaatgtttggg

SEQ ID NO: 187240 - DNA, 120 bp, Artificial Sequence
  ENSG00000111961_53 (sequence is synthesized)
tgtgacgtttgactgaggtggattggggctgcctgtggacattagtgaacaggtggtaggcttcaggaatatccagttttaatcagttgcatttggtacagaattttgagtaatggtgaa

SEQ ID NO: 187241 - DNA, 120 bp, Artificial Sequence
  ENSG00000111961_54 (sequence is synthesized)
aattgttgtctttggaaagcacaaaagaaacctggaaaggcagttcggctcaggtagctacacataacattgtgtatgattttcacttcaaagctgtctggaaggaaatgcagtcagctc

SEQ ID NO: 187242 - DNA, 120 bp, Artificial Sequence
  ENSG00000111961_55 (sequence is synthesized)
cagctagtactatttatgtacccagataactaagatattgtttcatggccttgccttagtcagaggcccttttctctgtcctgaacccccaggtatgggtgaaattggaaattactaatc

SEQ ID NO: 187243 - DNA, 120 bp, Artificial Sequence
  ENSG00000111961_56 (sequence is synthesized)
tattggaaatcagttcctgacatagtaaagtttgctttcataactgcagcaaaaaaggtcaacttgccaagtcactgctgccatgtgtgtactgtattattttcagaaaaaaatataata

SEQ ID NO: 187244 - DNA, 120 bp, Artificial Sequence
  ENSG00000111961_57 (sequence is synthesized)
gtctgagtccaagttatcttgatttaaaattgatagagaaaagaaactgtcgagcaagttatataacaactaacaacattgcactttctgtatatgaaatcaatatttaaataacttatt

SEQ ID NO: 187245 - DNA, 120 bp, Artificial Sequence
  ENSG00000111961_58 (sequence is synthesized)
tttctccattgctgttcttaaaaacattgtaagtagctgtaatataccagtaccaatatgttcttgcaattgcttcagcccaagaaagctgtgtattgttttaaaaattgtaaaaattat

SEQ ID NO: 187246 - DNA, 120 bp, Artificial Sequence
  ENSG00000111961_59 (sequence is synthesized)
tgtgatgattcatttagcataaagagaggtggacggaagggttttcctatgtatcaaaacttgtctataattatgtcatctatgtacctagaaaaaagtaaataaatttcttcagttgaa

SEQ ID NO: 187247 - DNA, 120 bp, Artificial Sequence
  ENSG00000111961_60 (sequence is synthesized)
agatacaacagaggaagctgcatattggatgttggagctgacttagaaatgaaaccctcattttgttcacaagggaaggattgtttttagcctgggtcactgctgcagagagagatattt

SEQ ID NO: 187248 - DNA, 120 bp, Artificial Sequence
  ENSG00000111961_61 (sequence is synthesized)
tttaggtccatgctgacggaaatcaaacaggcgatcatgtgcgtatgtactatggagttatgcgatgtcattttccttaacatgttgcatgcatgtgtgtgtatctaggtggctaagagt

SEQ ID NO: 187249 - DNA, 120 bp, Artificial Sequence
  ENSG00000111961_62 (sequence is synthesized)
gtgttttgtaatgcagttggtgatgtctgaggattttgtgaagagttactgattttacacttattgtgaataaaccctaaataaatctccggaaatagaaagggaaaggataggtgcatt

SEQ ID NO: 187250 - DNA, 120 bp, Artificial Sequence
  ENSG00000111961_63 (sequence is synthesized)
agcaggaggtcagggagccttcctcagtgaaaacagggattgttggccatgcacaacactcccttttttccttgtggtgaataggagatttgcttagagctgatgacttatgcctttctt

SEQ ID NO: 187251 - DNA, 120 bp, Artificial Sequence
  ENSG00000111961_64 (sequence is synthesized)
gcgagttatgcagttagcaagcgactggggaatcagtcagcaagcagaaagaagctaattgaatccagtgtcttcccctttctccttcggatactgagctgtgacggtggagcctgcctg

SEQ ID NO: 187252 - DNA, 120 bp, Artificial Sequence
  ENSG00000111961_65 (sequence is synthesized)
atcatgtaactccagagagacatgttccaggagtgcctaatcttaattttgagattgcggagtttgatgctacaagagtgaagacgctctccgagtggggaggggggtgggaggtacagg

SEQ ID NO: 187253 - DNA, 120 bp, Artificial Sequence
  ENSG00000111961_66 (sequence is synthesized)
aattattcctgttccagagcttttctctgccagcgtccctccagaaaaggcgtcaccagcaccacctgtgacctgcagctgctccggcagaaaggcaaagggggcgggagctgcggcttc

SEQ ID NO: 187254 - DNA, 120 bp, Artificial Sequence
  ENSG00000111961_67 (sequence is synthesized)
cccggcaggagggtgcgcgggcgcacctcggtcagcgagttcaatatcacctacgtggtggagcggagcctgtacagccacctgaacctgacccagctagtgcggcctgcctcagacagg

SEQ ID NO: 187255 - DNA, 120 bp, Artificial Sequence
  ENSG00000111961_68 (sequence is synthesized)
accctgagcaaggctgagagacaggacctgaggcggtgcctgctggaggaggatgaggaggcaaagaggaagtgggccgccacggtcgaccgctgtactaaaagggttctcttgagaatc

SEQ ID NO: 187256 - DNA, 120 bp, Artificial Sequence
  ENSG00000111961_69 (sequence is synthesized)
caccagaagtctagaacctgcagttttggaggatttgacttgacgaatcgctctctgcacgttggcagtaataattctgacccaatgggtaaagaaggagactttgtgtacaaagaagtc

SEQ ID NO: 187257 - DNA, 120 bp, Artificial Sequence
  ENSG00000111961_70 (sequence is synthesized)
aacagaattttggtttggagaagtagttgatgaccacgttaaacagcaagccctgatgggccagacagatgagagcctggcccaaaccacagcagtgaaactggaattacagggccagca

SEQ ID NO: 187258 - DNA, 120 bp, Artificial Sequence
  ENSG00000111961_71 (sequence is synthesized)
tcggagggagagtcctgctggagtcctcctaagagaggacaaggaagtagttgagacagatgcccccacaggccacttgcccccacttgcccttgagggcaaggatgtgtgtttccgtgc

SEQ ID NO: 187259 - DNA, 120 bp, Artificial Sequence
  ENSG00000111961_72 (sequence is synthesized)
gagtcgcttggcttctgtagcgccgtgtcaaccccagaagtggaaagaaagaaccctcttcataaatcaaactcagaagacagctctgtaggtcagtaccacttttcttggtttacctat

SEQ ID NO: 187260 - DNA, 120 bp, Artificial Sequence
  ENSG00000111961_73 (sequence is synthesized)
ttaattatttcaatactttatagaaaacacgaatatgtgaaaatacaaaacccacaagaatccttctactcagaaataaacactgttaagattttgatgtacatccttattctccttttt

SEQ ID NO: 187261 - DNA, 120 bp, Artificial Sequence
  ENSG00000111961_74 (sequence is synthesized)
aatataattgtgatcatattctgcatactgttttatagtttttaacttgaatatgttatgagcattttcccatgactgaatattctctacgttaatacagaaaaattagaagcaacctaa

SEQ ID NO: 187262 - DNA, 120 bp, Artificial Sequence
  ENSG00000111961_75 (sequence is synthesized)
atatccagcaaagaatgaattggttaattagcttatggcacatccaatatggtggaatattatgcagacttaaaaatttactgctgctataaaaatcctggggtctgtgtccctaataat

SEQ ID NO: 187263 - DNA, 120 bp, Artificial Sequence
  ENSG00000111961_76 (sequence is synthesized)
gtccttaggataaatccttcaatttggaattttttggatccaagattatgcataattaaggcattgtatgttttatatattcttgattataaaattcactcttggtttagtaacagctat

SEQ ID NO: 187264 - DNA, 120 bp, Artificial Sequence
  ENSG00000111961_77 (sequence is synthesized)
agtggcttttactagaaaaacaacagtgaatttgaatcaagttctgcaaatacagaaatcactaagatataagcagttccgtgaagtttgcaaccacctaaaaggataataaagttttca

SEQ ID NO: 187265 - DNA, 120 bp, Artificial Sequence
  ENSG00000111961_78 (sequence is synthesized)
ttctttataacatcagcattgttcctactgaaattaaaaagtgtggtcaaacacagtcactgaatcaaccgttttctttctgggcaaatgtggcatcttcattcactgagagaaaagggt

SEQ ID NO: 187266 - DNA, 120 bp, Artificial Sequence
  ENSG00000111961_79 (sequence is synthesized)
caccatgaattaacttgggcagttcgatgggaaagttaccagcgtttttggctaggatggggaagcggtgagtgagtaattctcttggcctgattggacaactgtaaacataaccttctc

SEQ ID NO: 187267 - DNA, 120 bp, Artificial Sequence
  ENSG00000111961_80 (sequence is synthesized)
cccccctcttctcagcgatttaaagctaaacaaaatgaaagtctgtttgaaaagcttgctgttggtgtcagagccgtgggatttcaaacctgggttttcaggatgcctgagtacatggat

SEQ ID NO: 187268 - DNA, 120 bp, Artificial Sequence
  ENSG00000111961_81 (sequence is synthesized)
cctctaacacatatcccttcattatctctactgaatgtagctgatgttaggggaagttctgtgctggagacagggaatctcacagcactggactcatggagggtttttcttttgtttttt

SEQ ID NO: 187269 - DNA, 120 bp, Artificial Sequence
  ENSG00000111961_82 (sequence is synthesized)
aggctttttaaaaaaaatggttggtttttgcatgttaaggggattctagacctctggggtaggcagagttccagtggcctgtgaaagggaaaaatgagtgaagtttccttacgacatgac

SEQ ID NO: 187270 - DNA, 120 bp, Artificial Sequence
  ENSG00000111961_83 (sequence is synthesized)
tcatgtgtttttttctcatcatttctcgttttctactttcatcctgtccacgtatttgtgattcagagatgtcctgcaaacggggactgctgggttggtgcactgccggctggcttaagc

SEQ ID NO: 187271 - DNA, 120 bp, Artificial Sequence
  ENSG00000111961_84 (sequence is synthesized)
aaaaatagtcaataagctttaatttttaatcaaagagataaataatagcactgagttaacacaagaaaaacgtcaagatccatgaggaatgtcaatatttctgagagctaggatgttaat

SEQ ID NO: 187272 - DNA, 120 bp, Artificial Sequence
  ENSG00000111962_0 (sequence is synthesized)
agagaagcctgaaccgggacaaaacacgccgagacctacagacacaaagccggggggtccacgctggcgctggaggcgagccccggcggccgcaagcgagcccgaggcgcggcggggcgc

SEQ ID NO: 187273 - DNA, 120 bp, Artificial Sequence
  ENSG00000111962_1 (sequence is synthesized)
ccggacgggcgcggcgccccgtcacgggcagcgccccgaaccggggccggacacctcggccgctcgggccgcggcggcggggaccatgccgaagaaagtctcctgagcccggcaacttcg

SEQ ID NO: 187274 - DNA, 120 bp, Artificial Sequence
  ENSG00000111962_2 (sequence is synthesized)
agtctcctgagcccggcaacttcggcccctccccgcccccacccggctgccctccgcgcggccctccccatgtgcagccggccagccgggctctcctcctcgcggcggatgggtgacctt

SEQ ID NO: 187275 - DNA, 120 bp, Artificial Sequence
  ENSG00000111962_3 (sequence is synthesized)
ttcctggcacgggcaggctgtgggaggcagcggagcaggcgatgaagaagaagcagcagcatcccggcggcggcgcggatccctggccccatggggcccctatggggggcgcccctccgg

SEQ ID NO: 187276 - DNA, 120 bp, Artificial Sequence
  ENSG00000111962_4 (sequence is synthesized)
gcctgggcagctggaagcgtcgggtgcccctgctgcctttcctgcgcttctccctccgggactacggcttctgcatggccaccctgctggtcttctgcctgggctccctcctctatcagc

SEQ ID NO: 187277 - DNA, 120 bp, Artificial Sequence
  ENSG00000111962_5 (sequence is synthesized)
tcagcgggggaccccctcgcttcctgctcgacctgcggcagtacttgggaaattccacttacttggatgaccatggaccacctcctagtaaggtactacctttcccaagccaggtggtgt

SEQ ID NO: 187278 - DNA, 120 bp, Artificial Sequence
  ENSG00000111962_6 (sequence is synthesized)
acaacagggtaggcaagtgtgggagccgtactgtggtcttgcttctgagaatcttgtcggagaagcacggatttaatttggtcacatcagacattcacaacaaaaccaggcttactaaaa

SEQ ID NO: 187279 - DNA, 120 bp, Artificial Sequence
  ENSG00000111962_7 (sequence is synthesized)
atgaacaaatggaactgattaaaaatataagtactgccgaacaaccctatttattcactcgacatgttcatttcctcaacttctcaaggtttggaggagaccagcctgtctacatcaaca

SEQ ID NO: 187280 - DNA, 120 bp, Artificial Sequence
  ENSG00000111962_8 (sequence is synthesized)
tcattagagaccccgtcaaccggttcttatccaactattttttccgtcgctttggagactggagaggggaacaaaatcacatgatccgcacccccagcatgaggcaggaggagcgctacc

SEQ ID NO: 187281 - DNA, 120 bp, Artificial Sequence
  ENSG00000111962_9 (sequence is synthesized)
tggatatcaatgagtgtattcttgaaaactatcccgagtgctccaaccccaggttattttacatcattccgtacttttgtggacagcatcccagatgcagggagcctggtgaatgggccc

SEQ ID NO: 187282 - DNA, 120 bp, Artificial Sequence
  ENSG00000111962_10 (sequence is synthesized)
ttgagagagcaaagctgaacgtgaatgaaaacttcctgctcgtggggattcttgaagagttggaagatgtgctgctgttactggaaagatttttacctcattacttcaagggcgtgctca

SEQ ID NO: 187283 - DNA, 120 bp, Artificial Sequence
  ENSG00000111962_11 (sequence is synthesized)
gtatctacaaagacccagagcacaggaagcttggaaacatgactgtgacggtgaagaagactgtcccctctcctgaggctgtgcagatcctctaccagcggatgagatacgagtacgagt

SEQ ID NO: 187284 - DNA, 120 bp, Artificial Sequence
  ENSG00000111962_12 (sequence is synthesized)
tttaccactacgtcaaagagcagttccacctgctgaagcgcaagtttggacttaagtctcacgtcagcaagccccccctgaggccacacttctttatcccaactccactggaaaccgagg

SEQ ID NO: 187285 - DNA, 120 bp, Artificial Sequence
  ENSG00000111962_13 (sequence is synthesized)
agccaatcgacgatgaagaacaggatgatgaaaagtggctggaagatatttataagaggtgatgtgactgtgttgcctctatggctttatctcccttttccagaaagttctttgtttggg

SEQ ID NO: 187286 - DNA, 120 bp, Artificial Sequence
  ENSG00000111962_14 (sequence is synthesized)
gaagtaaaatccttaagggactaaattaatgcttgggtgcattaaaaagaacaaaacattcccacatgttggggtcattgggagatgcccggttttgcgggttttatttgtttaatttta

SEQ ID NO: 187287 - DNA, 120 bp, Artificial Sequence
  ENSG00000111962_15 (sequence is synthesized)
ttctgtgttttctcttggctctttgggtctttcccgggtacactagatggctccatcccaaggcatcttgtcataaaacagctttcccccaccccatatcatgggaaaagggggagaaat

SEQ ID NO: 187288 - DNA, 120 bp, Artificial Sequence
  ENSG00000111962_16 (sequence is synthesized)
atagcccctagcctaataacttatcatttgtaaaatgacttataaaaatattacctcaatggtaggagacatccagacttgtatatttcagtggaaatacaaaaccacttcagagaccag

SEQ ID NO: 187289 - DNA, 120 bp, Artificial Sequence
  ENSG00000111962_17 (sequence is synthesized)
ggtatctcctctggaaggatctaagagaaggtaagacagattaggacatcgaaaaggaggatggagccaggtgccatggcttgagcctataatccgaggctgaggtgggaggatcacttg

SEQ ID NO: 187290 - DNA, 120 bp, Artificial Sequence
  ENSG00000111962_18 (sequence is synthesized)
acagagtgagactctgtctcaattaattttttttttttaaaggaggaggatctccatgggtaagtggtttctacccgcatgggtagagttctgcctctggtccttctcagggggcacttt

SEQ ID NO: 187291 - DNA, 120 bp, Artificial Sequence
  ENSG00000111962_19 (sequence is synthesized)
ctttcaccaagagcagtgtaattatctctgaaagagcaagtcagcttgtgccgcatccccaaccaatccacagcctggagtacctttcaaggtcaaagtgcatggccagctccattgaga

SEQ ID NO: 187292 - DNA, 120 bp, Artificial Sequence
  ENSG00000111962_20 (sequence is synthesized)
cattccatttcaaagcaccgtgctgacagatatcaaagtactctagcagggaaaataatttgtttgctgtgtaaggaagaatgtagacaagacagataaatctgaaggtcatgtggcatc

SEQ ID NO: 187293 - DNA, 120 bp, Artificial Sequence
  ENSG00000111962_21 (sequence is synthesized)
agggaaagggcatggctgtgtcttttgcacccaatatgaaacatcttctcccaacactgctttaatggaagttctaggaaccaatttagctcaggcatttgactcctacagcagaagttc

SEQ ID NO: 187294 - DNA, 120 bp, Artificial Sequence
  ENSG00000111962_22 (sequence is synthesized)
tgagcctgaccacagatggtgtgtaatctatcaaacacacccctggccaagttgggtcctataggacctggtactatgtactattgtaacttctagttccctaagaggtacctgttttca

SEQ ID NO: 187295 - DNA, 120 bp, Artificial Sequence
  ENSG00000111962_23 (sequence is synthesized)
gtaaaaaggggtcctgagttctgtgcaggtggaagagctacccgagaactacctgagttctgtgcaggtagagtcccatttcttatgggacctgtgtgctcctgagaactcttacttgag

SEQ ID NO: 187296 - DNA, 120 bp, Artificial Sequence
  ENSG00000111962_24 (sequence is synthesized)
acatcaaaaagaagcagcaagagcttctgggacagagactgcttggccagctttgtaagtaagtggctgcctccaatgtgatgtgagtacatgttgggcagtctcactgtcctaaggtat

SEQ ID NO: 187297 - DNA, 120 bp, Artificial Sequence
  ENSG00000111962_25 (sequence is synthesized)
gtcttctttccacctcccactgcccctcccctgccacctatcaatgatgccttggttcagtcattagaaatctgttgctttgagttctgaaatattttcaccttaaaaaaaatgctgaaa

SEQ ID NO: 187298 - DNA, 120 bp, Artificial Sequence
  ENSG00000111962_26 (sequence is synthesized)
atacacattctcctgggaagacgataaacagctagctaagaagccgaggttcagtggtggcagcaggaaggacactgccacaaattttgtctatttcatatttgtcccctagagccagcc

SEQ ID NO: 187299 - DNA, 120 bp, Artificial Sequence
  ENSG00000111962_27 (sequence is synthesized)
ctagcaaatgtgtgagttgggagtagttaatagtaaataagactctgactttacacaagctacacattttatacttttcataaaccacaaagtctctctagaattttttctgccttcact

SEQ ID NO: 187300 - DNA, 120 bp, Artificial Sequence
  ENSG00000111962_28 (sequence is synthesized)
aaaattggactgtagccaagatataaagcaagtcatttggaacctgccgagtgagcactgaagctactttatcatgagatgtgtgttaagaaggctgcagcccacaggagtccagggaag

SEQ ID NO: 187301 - DNA, 120 bp, Artificial Sequence
  ENSG00000111962_29 (sequence is synthesized)
gcggggaccacagaggcacagagtccagcacttggccgctcatgggccttctttctgcctcagaggacgggggcagagaagtgatgaagggaaatgttcttagaggaggaaatatccttt

SEQ ID NO: 187302 - DNA, 120 bp, Artificial Sequence
  ENSG00000111962_30 (sequence is synthesized)
gtcctgttcagagagaccagggccctaccattaggcatactttcagaagcaacctggagaacagctatcaatcatattcaaaaccagtacaagaactgctgcctggtaccctgtgagtca

SEQ ID NO: 187303 - DNA, 120 bp, Artificial Sequence
  ENSG00000111962_31 (sequence is synthesized)
tttctatgaaattccatataaagaatgatgataagtttacacactgtgcaatctcacaatctgaaaataaagttgagttggctgtgttttctctgctcttgtcagaacattgggacaatt

SEQ ID NO: 187304 - DNA, 120 bp, Artificial Sequence
  ENSG00000111962_32 (sequence is synthesized)
ggtcgttcaaaaacattcatcctcttactgcaagtttatctgggtacttttacctgtgtgttcaaaggcatttcttttcagcagtgatcattataacttcacaaaaaaagatgctgacgg

SEQ ID NO: 187305 - DNA, 120 bp, Artificial Sequence
  ENSG00000111962_33 (sequence is synthesized)
atttacttacagggccttaatgttattttgtcccagccaacaccctctaggtcctaaaagtcaaggtacttcagtttatttggcaaacatgacaacattttttttggccctgggcccaac

SEQ ID NO: 187306 - DNA, 120 bp, Artificial Sequence
  ENSG00000111962_34 (sequence is synthesized)
agtttgtacttcatgaaacatattgtacattttacatagtttaatttaaaaaataccttttaagctagttgatctttgactgtcttatttattataacctttcagcacattccaaggttt

SEQ ID NO: 187307 - DNA, 120 bp, Artificial Sequence
  ENSG00000111962_35 (sequence is synthesized)
tagttactcaggaaggagttaattaaaatgattttattttggtctgatggatgttttttaaaaggaaaattattattatgaaccttcagcctactttcttgagtgccgtaaaagtgcttg

SEQ ID NO: 187308 - DNA, 120 bp, Artificial Sequence
  ENSG00000111962_36 (sequence is synthesized)
taaatctttttttttttttaagaagaaagaaaaaaatggtgtttgacgttgatggaaattcaaaaatatatatggaactgaaacattaacttagctaaaataaaagcaatctgtgtttga

SEQ ID NO: 187309 - DNA, 120 bp, Artificial Sequence
  ENSG00000111962_37 (sequence is synthesized)
gaaagaagactccagaagctggagaagaattcgggatctgacaggaagttcaaggtgacctctgggagccttctgagaagaaaaagggcatgcaacctcagcagtgtctctctgcctctc

SEQ ID NO: 187310 - DNA, 120 bp, Artificial Sequence
  ENSG00000111962_38 (sequence is synthesized)
accaaattgacagtgggcccgaactttgctcatttaatgagatagaattagtaaagtctccagtgtacttttcattccttccacaagcttttaccgaataaaatgattggtactcagtaa

SEQ ID NO: 187311 - DNA, 120 bp, Artificial Sequence
  ENSG00000111981_0 (sequence is synthesized)
gtatccctgcgcgcggcgggccgggctgggcagctttataaacagccgtggtgtgagcctcgaagggaaccatcagcgcctcctgtccacggagctccaggtctacaatggcagcggccg

SEQ ID NO: 187312 - DNA, 120 bp, Artificial Sequence
  ENSG00000111981_1 (sequence is synthesized)
ccagccccgcgttccttctgtgcctcccgcttctgcacctgctgtctggctggtcccgggcaggatgggtcgacacacactgtctttgctatgacttcatcatcactcctaagtccagac

SEQ ID NO: 187313 - DNA, 120 bp, Artificial Sequence
  ENSG00000111981_2 (sequence is synthesized)
ctgaaccacagtggtgtgaagttcaaggcctggtggatgaaaggccttttcttcactatgactgtgttaaccacaaggccaaagcctttgcttctctggggaagaaagtcaatgtcacaa

SEQ ID NO: 187314 - DNA, 120 bp, Artificial Sequence
  ENSG00000111981_3 (sequence is synthesized)
aaacctgggaagaacaaactgaaacactaagagacgtggtggatttccttaaagggcaactgcttgacattcaagtggagaatttaatacccattgagcccctcaccctgcaggccagga

SEQ ID NO: 187315 - DNA, 120 bp, Artificial Sequence
  ENSG00000111981_4 (sequence is synthesized)
tgtcttgtgagcatgaagcccatggacacggcagaggatcttggcagttcctcttcaatggacagaagttcctcctctttgactcaaacaacagaaagtggacagcacttcatcctggag

SEQ ID NO: 187316 - DNA, 120 bp, Artificial Sequence
  ENSG00000111981_5 (sequence is synthesized)
ccaagaagatgacagagaagtgggagaagaacagggatgtgaccatgttcttccagaagatttcactgggggattgtaagatgtggcttgaagaatttttgatgtactgggaacaaatgc

SEQ ID NO: 187317 - DNA, 120 bp, Artificial Sequence
  ENSG00000111981_6 (sequence is synthesized)
tggatccaacaaaaccaccctctctggccccaggcacaacccaacccaaggccatggccaccaccctcagtccctggagccttctcatcatcttcctctgcttcattctagctggcagat

SEQ ID NO: 187318 - DNA, 120 bp, Artificial Sequence
  ENSG00000111981_7 (sequence is synthesized)
gaggagagttgtttagagtgacaggtggaaagtgatatcaagaagcctctgttagcctggtctgggtcctgctctcccttcagggaggccgcctgtctactcaccactgtgcctttctgg

SEQ ID NO: 187319 - DNA, 120 bp, Artificial Sequence
  ENSG00000111981_8 (sequence is synthesized)
aaagcaggagttcaagccttagcaagcccagaggcccccagcagacgatgaggacattgtcggctcaacatctcaggccactcattaccttcgctcatgatcccagcagccatttttctt

SEQ ID NO: 187320 - DNA, 120 bp, Artificial Sequence
  ENSG00000111981_9 (sequence is synthesized)
aacaccttctgccactttctgtcggtgctaatggatggaactcctgcacaagttttaactgaacaagaaatcccagcaaaaggcatttttttttctacttctttgattgtagaaaagcag

SEQ ID NO: 187321 - DNA, 120 bp, Artificial Sequence
  ENSG00000111981_10 (sequence is synthesized)
acacttctctgaaacatgaccttattcttccaaacagtatcgctagtaaaatagcatgctggacttcagacctcagggatccttttgatgcactgaccaggaattgtgataatccttttc

SEQ ID NO: 187322 - DNA, 120 bp, Artificial Sequence
  ENSG00000111981_11 (sequence is synthesized)
atttttatggctttttacagtttctcattctgtcaaccatattgaagtgaagtggcatagtcttcactcactgtaatctccagctcctgggctcaagtgatcctctagactcagcctcta

SEQ ID NO: 187323 - DNA, 120 bp, Artificial Sequence
  ENSG00000111981_12 (sequence is synthesized)
agctgggactacaggcacatgccaccaggactggcaaactgttttatttttaggtagaggtagggtcttcctatgttgcccaggatggtcttcaaatcttggtctcgagcaatgctacca

SEQ ID NO: 187324 - DNA, 120 bp, Artificial Sequence
  ENSG00000111981_13 (sequence is synthesized)
attcatgattattttatttagtaaataaaataatagagagcccagaaatcaacctgcacacctaccgccatctaatcttcaatagaaatgggcaatgtgggaaagactccctattcgaaa

SEQ ID NO: 187325 - DNA, 120 bp, Artificial Sequence
  ENSG00000111981_14 (sequence is synthesized)
attagtgctggaatatctggccaaccatatgcagaagaatgaaactgaacccctacttctccccatatatgtaaaataattcaatatggatgaaagatttaaatataagtactaaaactg

SEQ ID NO: 187326 - DNA, 120 bp, Artificial Sequence
  ENSG00000111981_15 (sequence is synthesized)
taaaaatcctggaatataacctaagaaataccaatgtggacatagggcctggcaaagatttcatgaagaagacactaaaaacaattgcaacaaaaacagaaattgacaaatggggcctca

SEQ ID NO: 187327 - DNA, 120 bp, Artificial Sequence
  ENSG00000111981_16 (sequence is synthesized)
ttaaactaaagagcttctgcacagaaaaagaaactagcaacacagtaaacagacagcctgtagaatggggaaaactatttgcaaactctgcatctgatgaaggtccaatatccagaatct

SEQ ID NO: 187328 - DNA, 120 bp, Artificial Sequence
  ENSG00000111981_17 (sequence is synthesized)
acaaggaacttaaacaattcaacaagcaagaagaaaaaacccaattaaaattgggcaaaggcatgaacagacacttttcaaaagaagacctacaattggccaacaaacatgaaaaaatgc

SEQ ID NO: 187329 - DNA, 120 bp, Artificial Sequence
  ENSG00000111981_18 (sequence is synthesized)
tcagtatcactaatcatcagataagtgcaaatcaaaactgcaatgagttaccatctcttaccagtcacaaagtcagagatggtggtgaggctgcagagcaaaagaaacagacactgttgg

SEQ ID NO: 187330 - DNA, 120 bp, Artificial Sequence
  ENSG00000111981_19 (sequence is synthesized)
tgggaaagcaaacttgttcagccactatggaaagcagtttggagatttctccaagaacttaaaatagaactaccattcaatcccgcaatcccactactcgggatatacccacaggaaaag

SEQ ID NO: 187331 - DNA, 120 bp, Artificial Sequence
  ENSG00000111981_20 (sequence is synthesized)
aattcattttatcaaaaagacacctgcaccaatatgttcattacagtgctattctcaccagcaaggacagagaatcaatctaagtgcccaacaacagtaaattcaatgaaaaaaaatgtg

SEQ ID NO: 187332 - DNA, 120 bp, Artificial Sequence
  ENSG00000111981_21 (sequence is synthesized)
gtacatagatacgatggaaaactatgcagccatgaaacacaagaaaatcatgtccttttcagcaacatggatgcaactagaggctattatcctaagcaacctaatgcaagaacagaaaac

SEQ ID NO: 187333 - DNA, 120 bp, Artificial Sequence
  ENSG00000111981_22 (sequence is synthesized)
cacatactgcatcttcccattggaaagtggcagctaaacattaaattcgcatgaaccacagatgctggagatcaccagaccggggagagaagaggggcacctgggctgaaaaacacacct

SEQ ID NO: 187334 - DNA, 120 bp, Artificial Sequence
  ENSG00000111981_23 (sequence is synthesized)
gttgggtatcatgcttactgtctgggcgatgggatcattgggacaccaagcctcagcttctcaaattctacccatgtaacaaacctgtatatgtaccttgtattatataggttgaaatta

SEQ ID NO: 187335 - DNA, 120 bp, Artificial Sequence
  ENSG00000111981_24 (sequence is synthesized)
aagatgaataaataaaataaaatgacacaaggccaaaaacaaatgggtttaactgaccagagcgagagaactctgcactatgaacccaaacccagctcaaaaagataaaatctagtcatt

SEQ ID NO: 187336 - DNA, 120 bp, Artificial Sequence
  ENSG00000111981_25 (sequence is synthesized)
taagataatcataagttgtatgatgataattgtataaaaatttgtatgatgataattgtataataattatacatgaaagtgccaaaaccctacaattaaacactgtataatggaattaca

SEQ ID NO: 187337 - DNA, 120 bp, Artificial Sequence
  ENSG00000112029_0 (sequence is synthesized)
atacaggtctgtgaagcaggcaggttgctcagctgcccccggagcggttcctccacctgaggcagactccacgtcggctggcatgagccggcgcccctgcagctgcgccctacggccacc

SEQ ID NO: 187338 - DNA, 120 bp, Artificial Sequence
  ENSG00000112029_1 (sequence is synthesized)
ccgctgctcctgcagcgccagccccagcgcagtgacagccgccgggcgccctcgaccctcggatagttgtaaagaagaaagttctaccctttctgtcaaaatgaagtgtgattttaattg

SEQ ID NO: 187339 - DNA, 120 bp, Artificial Sequence
  ENSG00000112029_2 (sequence is synthesized)
taaccatgttcattccggacttaaactggtaaaacctgatgacattggaagactagtttcctacacccctgcatatttggaaggttcctgtaaagactgcattaaagactatgaaaggct

SEQ ID NO: 187340 - DNA, 120 bp, Artificial Sequence
  ENSG00000112029_3 (sequence is synthesized)
gtcatgtattgggtcaccgattgtgagccctaggattgtacaacttgaaactgaaagcaagcgcttgcataacaaggaaaatcaacatgtgcaacagacacttaatagtacaaatgaaat

SEQ ID NO: 187341 - DNA, 120 bp, Artificial Sequence
  ENSG00000112029_4 (sequence is synthesized)
agaagcactagagaccagtagactttatgaagacagtggctattcctcattttctctacaaagtggcctcagtgaacatgaagaaggtagcctcctggaggagaatttcggtgacagtct

SEQ ID NO: 187342 - DNA, 120 bp, Artificial Sequence
  ENSG00000112029_5 (sequence is synthesized)
acaatcctgcctgctacaaatacaaagcccagaccaatatcccaacaaaaacttgctgccagttcttcattttgaaaaagtggtttgttcaacattaaaaaagaatgcaaaacgaaatcc

SEQ ID NO: 187343 - DNA, 120 bp, Artificial Sequence
  ENSG00000112029_6 (sequence is synthesized)
taaagtagatcgggagatgctgaaggaaattatagccagaggaaattttagactgcagaatataattggcagaaaaatgggcctagaatgtgtagatattctcagcgaactctttcgaag

SEQ ID NO: 187344 - DNA, 120 bp, Artificial Sequence
  ENSG00000112029_7 (sequence is synthesized)
gggactcagacatgtcttagcaactattttagcacaactcagtgacatggacttaatcaatgtgtctaaagtgagcacaacttggaagaagatcctagaagatgataagggggcattcca

SEQ ID NO: 187345 - DNA, 120 bp, Artificial Sequence
  ENSG00000112029_8 (sequence is synthesized)
caatacaaagagttaccgaaaacaacaataaattttcacctcatgcttcaaccagagaatatgttatgttcagaaccccactggcttctgttcagaaatcagcagcccagacttctctca

SEQ ID NO: 187346 - DNA, 120 bp, Artificial Sequence
  ENSG00000112029_9 (sequence is synthesized)
aaaaagatgctcaaaccaagttatccaatcaaggtgatcagaaaggttctacttatagtcgacacaatgaattctctgaggttgccaagacattgaaaaagaacgaaagcctcaaagcct

SEQ ID NO: 187347 - DNA, 120 bp, Artificial Sequence
  ENSG00000112029_10 (sequence is synthesized)
gtattcgctgtaattcacctgcaaaatatgattgctatttacaacgggcaacctgcaaacgagaaggctgtggatttgattattgtacgaagtgtctctgtaattatcatactactaaag

SEQ ID NO: 187348 - DNA, 120 bp, Artificial Sequence
  ENSG00000112029_11 (sequence is synthesized)
actgttcagatggcaagctcctcaaagccagttgtaaaataggtcccctgcctggtacaaagaaaagcaaaaagaatttacgaagattgtgatctcttattaaatcaattgttactgatc

SEQ ID NO: 187349 - DNA, 120 bp, Artificial Sequence
  ENSG00000112029_12 (sequence is synthesized)
atgaatgttagttagaaaatgttaggttttaacttaaaaaaaattgtattgtgattttcaattttatgttgaaatcggtgtagtatcctgaggtttttttccccccagaagataaagagg

SEQ ID NO: 187350 - DNA, 120 bp, Artificial Sequence
  ENSG00000112029_13 (sequence is synthesized)
atagacaacctcttaaaatatttttacaatttaatgagaaaaagtttaaaattctcaatacaaatcaaacaatttaaatattttaagaaaaaaggaaaagtagatagtgatactgagggt

SEQ ID NO: 187351 - DNA, 120 bp, Artificial Sequence
  ENSG00000112029_14 (sequence is synthesized)
aaaaaaaaattgattcaattttatggtaaaggaaacccatgcaattttacctagacagtcttaaatatgtctggttttccatctgttagcatttcagacattttatgttcctcttactca

SEQ ID NO: 187352 - DNA, 120 bp, Artificial Sequence
  ENSG00000112029_15 (sequence is synthesized)
attgataccaacagaaatatcaacttctggagtctattaaatgtgttgtcacctttctaaagctttttttcattgtgtgtatttcccaagaaagtatcctttgtaaaaacttgcttgttt

SEQ ID NO: 187353 - DNA, 120 bp, Artificial Sequence
  ENSG00000112029_16 (sequence is synthesized)
tcctttgtaaaaacttgcttgttttccttatttctgaaatctgttttaatatttttgtatacatgtaaatatttctgtattttttatatgtcaaagaatatgtctcttgtatgtacatat

SEQ ID NO: 187354 - DNA, 120 bp, Artificial Sequence
  ENSG00000112029_17 (sequence is synthesized)
gtaaatcctagagaggcgggctaagctggactggggggagggtccgtcttccggaaagtctggattcccggacgagccgagttgctgctcaccgaactcccgttcgagagatgatcgaag

SEQ ID NO: 187355 - DNA, 120 bp, Artificial Sequence
  ENSG00000112029_18 (sequence is synthesized)
aaagtcggctaccatttgtacccatcaaagatctccagatggaagccagcgctgaatttgggctgagattaggacttgcaggaggccggtccagaagacggcggaaggaatcttggcggg

SEQ ID NO: 187356 - DNA, 120 bp, Artificial Sequence
  ENSG00000112029_19 (sequence is synthesized)
cgcacgcatgcgtgatagaccctccacacgtgtggccgggccgcggcctccccgtgctcggaggtcccgcccccggccgtagcatctttccggacgtggggagccggttgtaaagaagaa

SEQ ID NO: 187357 - DNA, 120 bp, Artificial Sequence
  ENSG00000112029_20 (sequence is synthesized)
tttttttttttttggctttttgaaaaattatctagaggtactctttgcaagtgtgagtttacactggtctttatgaaacagagctaaagcaaaacagatataaacagcttcttttttttt

SEQ ID NO: 187358 - DNA, 72 bp, Artificial Sequence
  ENSG00000112029_21 (sequence is synthesized)
gagctaaagcaaaacagatataaacagcttctttttttttaattttttttggggacggagtctcgccctgtc

SEQ ID NO: 187359 - DNA, 120 bp, Artificial Sequence
  ENSG00000112029_22 (sequence is synthesized)
agtgctgggattacaggcatgagcctaaacagcttcttgagggacagtcaaatcagtaccacagattctactttttctgttaacatagtgagtttctaaagttgatttctaatagcagtg

SEQ ID NO: 187360 - DNA, 120 bp, Artificial Sequence
  ENSG00000112029_23 (sequence is synthesized)
tagcagtgtgcctagagtactttgaaatttgtctattacttttaccagatagctaacatggtatcatatatacagtgggggctactatttgatgtttgcagatattgtgaaaaaatactg

SEQ ID NO: 187361 - DNA, 120 bp, Artificial Sequence
  ENSG00000112029_24 (sequence is synthesized)
tacaaagcagtggttcttaagcctcaatgcactcagaattacttaatgaggagggagctttttaaaaatacagagccctgagcttcattttagaccagttaaaaccgccaggcaattgta

SEQ ID NO: 187362 - DNA, 120 bp, Artificial Sequence
  ENSG00000112029_25 (sequence is synthesized)
atgtggtcaggtttgagaagcactaataatataaaatatctttttgcactgctgatgtttttctactgtattcatcttagctctttgtgatgctttaattatttcatttatggtgattta

SEQ ID NO: 187363 - DNA, 120 bp, Artificial Sequence
  ENSG00000112029_26 (sequence is synthesized)
cttttccagtgtgtctaaagtgagcacaacttggaagaagatcctagaagatgataagggggcattccagttgtacagtaaagcaatacaaagagttaccgtaagtgtttgcagatgatg

SEQ ID NO: 187364 - DNA, 120 bp, Artificial Sequence
  ENSG00000112029_27 (sequence is synthesized)
tttttagttaaaaatgcactgttagtgctcttctagaaatagaaaagaaaagaggtaatctggaaacccttctttacagtcataaagtatttcagccttatactggaacttagaaaccac

SEQ ID NO: 187365 - DNA, 120 bp, Artificial Sequence
  ENSG00000112029_28 (sequence is synthesized)
attcaaaaataaagaaatctcaactcaacatttatttcttggattcttcctagaaatagaatgtctaaagtaacaaagggaaaattactcatttctcagatagagtcgaccatttagtca

SEQ ID NO: 187366 - DNA, 120 bp, Artificial Sequence
  ENSG00000112029_29 (sequence is synthesized)
agactgcatctaaagtgatttcccatagtatttggttcacagtttctgtctataagttaggcttgatatgtgtgagtatttaggttttgctttgtttaagtacgtgcaggtaaattgcat

SEQ ID NO: 187367 - DNA, 120 bp, Artificial Sequence
  ENSG00000112029_30 (sequence is synthesized)
gtagggataagtctcttacctaatcttgtttgtcatttcttatatgtacaaacataaaaatgtctcattgaggatacaggaaataatttctaaattctattaaaacttttttttaaatta

SEQ ID NO: 187368 - DNA, 120 bp, Artificial Sequence
  ENSG00000112031_0 (sequence is synthesized)
agggtccgcgatctcggactaaggatgcggtcccgggttctgtggggcgctgcccggtggctctggccccgccgggccgttggcccagcccgccggcccctgagctccggtagcccgccg

SEQ ID NO: 187369 - DNA, 120 bp, Artificial Sequence
  ENSG00000112031_1 (sequence is synthesized)
ctggaggagctgttcacccggggcgggcccttgcggaccttcctcgagcgccaggcggggtctgaagcccatttgaaggtcaggaggcccgagttgctggcggtgatcaaactgctgaac

SEQ ID NO: 187370 - DNA, 120 bp, Artificial Sequence
  ENSG00000112031_2 (sequence is synthesized)
gagaaggagcgggagctgcgggagactgagcacttgctgcacgatgagaatgaagatttaaggaaacttgcagagaatgaaatcactttgtgtcaaaaagaaataactcagctgaagcat

SEQ ID NO: 187371 - DNA, 120 bp, Artificial Sequence
  ENSG00000112031_3 (sequence is synthesized)
cagattatcttacttttggttccctcagaagaaacagatgaaaatgatttgatcctggaagtaactgcaggagttggaggtcaggaggcaatgttgtttacatcagagatatttgatatg

SEQ ID NO: 187372 - DNA, 120 bp, Artificial Sequence
  ENSG00000112031_4 (sequence is synthesized)
tatcagcaatatgctgcatttaaaagatggcattttgaaaccctggaatattttccaagtgaactaggtggccttagacatgcatctgccagcattgggggttcagaagcctataggcac

SEQ ID NO: 187373 - DNA, 120 bp, Artificial Sequence
  ENSG00000112031_5 (sequence is synthesized)
atgaaatttgaaggaggtgttcacagagtacaaagagtgccaaagacagaaaagcaaggccgcgtccatactagcaccatgactgtagcaatattaccccagcctactgagattaatctg

SEQ ID NO: 187374 - DNA, 120 bp, Artificial Sequence
  ENSG00000112031_6 (sequence is synthesized)
gtgattaatccgaaagatttgagaattgacactaagcgagccagtggagctggggggcagcatgtaaataccacggacagtgctgtccggatagttcatcttccaacaggtgttgtttct

SEQ ID NO: 187375 - DNA, 120 bp, Artificial Sequence
  ENSG00000112031_7 (sequence is synthesized)
gaatgtcaacaagagagatctcagctgaaaaataaagagctggctatgacaaagttacgtgcaaaactgtacagcatgcatctagaagaagaaataaataaaagacagaatgctagaaaa

SEQ ID NO: 187376 - DNA, 120 bp, Artificial Sequence
  ENSG00000112031_8 (sequence is synthesized)
attcagattggaagtaaaggaagatcagagaaaataagaacatataattttccacagaaccgggtcacagatcacagaataaacaagacgctgcatgatcttgaaacttttatgcaagga

SEQ ID NO: 187377 - DNA, 120 bp, Artificial Sequence
  ENSG00000112031_9 (sequence is synthesized)
gattatctactggatgaacttgtacagtcattgaaggaatacgccgattatgaatctttagtagaaattatttcccaaaaagtttaagttgatttgttatttatagactttcgtagctta

SEQ ID NO: 187378 - DNA, 120 bp, Artificial Sequence
  ENSG00000112031_10 (sequence is synthesized)
gaaaaattctacagtacatccacatagggtgaaagtacccttactctcttgaaaaacgttgagttaacacagttggaggtaatatgcatattctgaagtcatagataatttacacagatc

SEQ ID NO: 187379 - DNA, 120 bp, Artificial Sequence
  ENSG00000112031_11 (sequence is synthesized)
tctctcaatgcattagcaaaaatcatacaatatacagatggtcctcgatttacattgtggttaattcccaataaacccatcataagttaaaaatgcatataacgttagcaacacagcagt

SEQ ID NO: 187380 - DNA, 120 bp, Artificial Sequence
  ENSG00000112031_12 (sequence is synthesized)
ctcctaattaatgacagcttgacttaacaattttccaactttaccatggtgtgaaagaggtatgattcctaagccctaaggagctcctcagcttgaaatggggctgcatccctataaacc

SEQ ID NO: 187381 - DNA, 120 bp, Artificial Sequence
  ENSG00000112031_13 (sequence is synthesized)
catcataaagtcaaaaaatcctaaaacataagttggtgaccatctgtaatcatgatgtggtggtaaatcttggacgctaccttacaataactagacaaaggaaaatcatcctttgtcctg

SEQ ID NO: 187382 - DNA, 120 bp, Artificial Sequence
  ENSG00000112031_14 (sequence is synthesized)
ttctgtgtaaatatttaatgaatgatcaaaacttcagtttaaatattatgaaaaactttaaacataaagtagtagaaataagacagtaaatactgtatcctaatatccagtcaggataca

SEQ ID NO: 187383 - DNA, 120 bp, Artificial Sequence
  ENSG00000112031_15 (sequence is synthesized)
cctaggactgagagtaccccaggaaagaatacccttgaaagggtctccccttccccatggtgaagtcaggcctaatggagagagtggctacagcctactcagtgattgggaaattccctg

SEQ ID NO: 187384 - DNA, 120 bp, Artificial Sequence
  ENSG00000112031_16 (sequence is synthesized)
tcttgccctgggccagagctggtgtaccgctggtggatcaggtcttacaagcaaagaacctcacactcccaactggtaagccagaagcctcttgctagggtgtgagcaaaacttggacag

SEQ ID NO: 187385 - DNA, 120 bp, Artificial Sequence
  ENSG00000112031_17 (sequence is synthesized)
gaactctcagtagatgtttgtgtttgtcaagattctccagacaaacttccttaaaaggattggcttgtgttgttattattaagtctaacaagtccaaaagctggagtgtgaggcaggagg

SEQ ID NO: 187386 - DNA, 120 bp, Artificial Sequence
  ENSG00000112031_18 (sequence is synthesized)
ctggaaacccaggaaagctgatggtgcaaggtccagtccaaaggtatctgttggaggattctcttgttctgggaagaggacggtctttttttctcttcagaccttcacctgactggatca

SEQ ID NO: 187387 - DNA, 120 bp, Artificial Sequence
  ENSG00000112031_19 (sequence is synthesized)
agcccactaacatcgaggaggacagtctgcattactcagagttcactgattgatttaaatgtcaatctcatataaaacaccctcacagaaacacctagaataatgtttgaccttataatt

SEQ ID NO: 187388 - DNA, 120 bp, Artificial Sequence
  ENSG00000112031_20 (sequence is synthesized)
ggaaaatcagagcaaaagttaaatctcaaaaaaaaaaaaaaaaaaagtatgacccagtagctaggcacctgtggccccgccaagttgacacataaaattaactgtcacagtatcatctta

SEQ ID NO: 187389 - DNA, 120 bp, Artificial Sequence
  ENSG00000112031_21 (sequence is synthesized)
gaagtgaaagaagcccctttatcctgcagtgcccctctaccaccacctactgacaaagaacatggtgctatctggcatgggagaaatgttcagtttgctatggcttgtatgtgtcccctc

SEQ ID NO: 187390 - DNA, 120 bp, Artificial Sequence
  ENSG00000112031_22 (sequence is synthesized)
aaattcaagtgttgccaatgtgacagcatcaagaggtggggtctttaagagatcactaggccatgagggattctcttaggactgggatgaaggcccataataaaagaggtttcggggagc

SEQ ID NO: 187391 - DNA, 120 bp, Artificial Sequence
  ENSG00000112031_23 (sequence is synthesized)
atcctgctagcttgccttctgtatgtgagaacacagcaagaaagccctagtcaacaagtgccagctccttgatcttagacttcccatcctccagaactgtgagaaatacatttctgttcc

SEQ ID NO: 187392 - DNA, 120 bp, Artificial Sequence
  ENSG00000112031_24 (sequence is synthesized)
ttacaaattacccagtctcctgtattctgttatagcagcacaaaatgaagataccatacctgaacacctgaacattcttcacaaggtagtaaatgcactgctttattctggtctcagtat

SEQ ID NO: 187393 - DNA, 120 bp, Artificial Sequence
  ENSG00000112031_25 (sequence is synthesized)
tgtgtgcttaataaggaaatgagaaagggtggatcagggcataggatgaacaagttactgctagacctctcacaatgccactaatggataagattgtattttcatcattcttgtctcttc

SEQ ID NO: 187394 - DNA, 120 bp, Artificial Sequence
  ENSG00000112031_26 (sequence is synthesized)
ggaagctaacaccatgctataataggcactaaatagatgtctaaaaacaccttaagtatttgtctagaaatctggtgcattgttcagaaagaaccaaaattcaaaataatttcaaagggc

SEQ ID NO: 187395 - DNA, 120 bp, Artificial Sequence
  ENSG00000112031_27 (sequence is synthesized)
ctaaagcactagttaatcaaaattcattagtttttaatggtactaccactctcaaatttaaaatgtcatcttacgttcctcttcctcgcattggatttattgctaaaacctggtaaacac

SEQ ID NO: 187396 - DNA, 120 bp, Artificial Sequence
  ENSG00000112031_28 (sequence is synthesized)
ttttaatccttttcaattccattaccactgctcttgtccagaattacttcgcagactaatagtcacctgacttctcccctgcatccgatttgctgtctaattctggttacaaataagtaa

SEQ ID NO: 187397 - DNA, 120 bp, Artificial Sequence
  ENSG00000112031_29 (sequence is synthesized)
ctgccaaactaatctttctaaaaagcaagactgatctcgtcactcctttgctcaacaatgtaaaagctcccattgtctcccaaataaaaccagctttccactgtgtatacaatacatcca

SEQ ID NO: 187398 - DNA, 120 bp, Artificial Sequence
  ENSG00000112031_30 (sequence is synthesized)
tatgttttacagtctccatgttcatctccttttatgactttaaaaatatacctcaagatagtagatgtgatggtcaattatttataaatggcaggaataataaaaataattctatttccc

SEQ ID NO: 187399 - DNA, 120 bp, Artificial Sequence
  ENSG00000112031_31 (sequence is synthesized)
agaataaagcatttgtgctattcttaggcattaaagtttattaaaggtttataaaaacaagtgactagcttgttactgtttagaataaactgggttttttaaatttattttctagattta

SEQ ID NO: 187400 - DNA, 120 bp, Artificial Sequence
  ENSG00000112031_32 (sequence is synthesized)
ttgaggtataaattgacccccaaaattgcatatatttaaggtatatgatgtgatgttttgatatatgcatacattttgaaatgattatgactatcaataaactggtttttaaagaacaaa

SEQ ID NO: 187401 - DNA, 120 bp, Artificial Sequence
  ENSG00000112031_33 (sequence is synthesized)
atacattttatttttcccttcagctataataaccataaaactatttcctagaagtctgctagcaatttaacactaattaaggaaaaccttaacttctgccctttttttcctagatgagaa

SEQ ID NO: 187402 - DNA, 120 bp, Artificial Sequence
  ENSG00000112033_0 (sequence is synthesized)
ggcaggagcgggagaattctgcggagcctgcgggacggcggcggtggcgccgtaggcagccgggacagtgttgtacagtgttttgggcatgcacgtgatactcacacagtggcttctgct

SEQ ID NO: 187403 - DNA, 120 bp, Artificial Sequence
  ENSG00000112033_1 (sequence is synthesized)
caccaacagatgaagacagatgcaccaacgagggtctggaatggtctggagtggtctggaaagcagggtcagatacccctggaaaactgaagcccgtggagcagtgatctctacaggact

SEQ ID NO: 187404 - DNA, 120 bp, Artificial Sequence
  ENSG00000112033_2 (sequence is synthesized)
gcttcaaggctgatgggaaccaccctgtagaggtccatctgcgttcagacccagacgatgccagagctatgactgggcctgcaggtgtggcgccgaggggagatcagccatggagcagcc

SEQ ID NO: 187405 - DNA, 120 bp, Artificial Sequence
  ENSG00000112033_3 (sequence is synthesized)
acaggaggaagcccctgaggtccgggaagaggaggagaaagaggaagtggcagaggcagaaggagccccagagctcaatgggggaccacagcatgcacttccttccagcagctacacaga

SEQ ID NO: 187406 - DNA, 120 bp, Artificial Sequence
  ENSG00000112033_4 (sequence is synthesized)
cctctcccggagctcctcgccaccctcactgctggaccaactgcagatgggctgtgacggggcctcatgcggcagcctcaacatggagtgccgggtgtgcggggacaaggcatcgggctt

SEQ ID NO: 187407 - DNA, 120 bp, Artificial Sequence
  ENSG00000112033_5 (sequence is synthesized)
ccactacggtgttcatgcatgtgaggggtgcaagggcttcttccgtcgtacgatccgcatgaagctggagtacgagaagtgtgagcgcagctgcaagattcagaagaagaaccgcaacaa

SEQ ID NO: 187408 - DNA, 120 bp, Artificial Sequence
  ENSG00000112033_6 (sequence is synthesized)
gtgccagtactgccgcttccagaagtgcctggcactgggcatgtcacacaacgctatccgttttggtcggatgccggaggctgagaagaggaagctggtggcagggctgactgcaaacga

SEQ ID NO: 187409 - DNA, 120 bp, Artificial Sequence
  ENSG00000112033_7 (sequence is synthesized)
ggggagccagtacaacccacaggtggccgacctgaaggccttctccaagcacatctacaatgcctacctgaaaaacttcaacatgaccaaaaagaaggcccgcagcatcctcaccggcaa

SEQ ID NO: 187410 - DNA, 120 bp, Artificial Sequence
  ENSG00000112033_8 (sequence is synthesized)
agccagccacacggcgccctttgtgatccacgacatcgagacattgtggcaggcagagaaggggctggtgtggaagcagttggtgaatggcctgcctccctacaaggagatcagcgtgca

SEQ ID NO: 187411 - DNA, 120 bp, Artificial Sequence
  ENSG00000112033_9 (sequence is synthesized)
cgtcttctaccgctgccagtgcaccacagtggagaccgtgcgggagctcactgagttcgccaagagcatccccagcttcagcagcctcttcctcaacgaccaggttacccttctcaagta

SEQ ID NO: 187412 - DNA, 120 bp, Artificial Sequence
  ENSG00000112033_10 (sequence is synthesized)
tggcgtgcacgaggccatcttcgccatgctggcctctatcgtcaacaaggacgggctgctggtagccaacggcagtggctttgtcacccgtgagttcctgcgcagcctccgcaaaccctt

SEQ ID NO: 187413 - DNA, 120 bp, Artificial Sequence
  ENSG00000112033_11 (sequence is synthesized)
cagtgatatcattgagcctaagtttgaatttgctgtcaagttcaacgccctggaacttgatgacagtgacctggccctattcattgcggccatcattctgtgtggagaccggccaggcct

SEQ ID NO: 187414 - DNA, 120 bp, Artificial Sequence
  ENSG00000112033_12 (sequence is synthesized)
catgaacgttccacgggtggaggctatccaggacaccatcctgcgtgccctcgaattccacctgcaggccaaccaccctgatgcccagtacctcttccccaagctgctgcagaagatggc

SEQ ID NO: 187415 - DNA, 120 bp, Artificial Sequence
  ENSG00000112033_13 (sequence is synthesized)
tgacctgcggcaactggtcaccgagcacgcccagatgatgcagcggatcaagaagaccgaaaccgagacctcgctgcaccctctgctccaggagatctacaaggacatgtactaacggcg

SEQ ID NO: 187416 - DNA, 120 bp, Artificial Sequence
  ENSG00000112033_14 (sequence is synthesized)
gcacccaggcctccctgcagactccaatggggccagcactggaggggcccacccacatgacttttccattgaccagcccttgagcacccggcctggagcagcagagtcccacgatcgccc

SEQ ID NO: 187417 - DNA, 120 bp, Artificial Sequence
  ENSG00000112033_15 (sequence is synthesized)
tccagccagctctcttcctgtctttgttgtctccctctttctcagttcctctttcttttctaattcctgttgctctgtttcttcctttctgtaggtttctctcttcccttctcccttgcc

SEQ ID NO: 187418 - DNA, 120 bp, Artificial Sequence
  ENSG00000112033_16 (sequence is synthesized)
ctccctttctctctccaccccccacgtctgtcctcctttcttattctgtgagatgttttgtattatttcaccagcagcatagaacaggacctctgcttttgcacaccttttccccaggag

SEQ ID NO: 187419 - DNA, 120 bp, Artificial Sequence
  ENSG00000112033_17 (sequence is synthesized)
cagaagagagtggggcctgccctctgccccatcattgcacctgcaggcttaggtcctcacttctgtctcctgtcttcagagcaaaagacttgagccatccaaagaaacactaagctctct

SEQ ID NO: 187420 - DNA, 120 bp, Artificial Sequence
  ENSG00000112033_18 (sequence is synthesized)
gggcctgggttccagggaaggctaagcatggcctggactgactgcagccccctatagtcatggggtccctgctgcaaaggacagtgggcaggaggccccaggctgagagccagatgcctc

SEQ ID NO: 187421 - DNA, 120 bp, Artificial Sequence
  ENSG00000112033_19 (sequence is synthesized)
cccaagactgtcattgcccctccgatgctgaggccacccactgacccaactgatcctgctccagcagcacacctcagccccactgacacccagtgtccttccatcttcacactggtttgc

SEQ ID NO: 187422 - DNA, 120 bp, Artificial Sequence
  ENSG00000112033_20 (sequence is synthesized)
caggccaatgttgctgatggccccctgcactggccgctggacggcactctcccagcttggaagtaggcagggttccctccaggtgggcccccacctcactgaagaggagcaagtctcaag

SEQ ID NO: 187423 - DNA, 120 bp, Artificial Sequence
  ENSG00000112033_21 (sequence is synthesized)
agaaggaggggggattggtggttggaggaagcagcacacccaattctgcccctaggactcggggtctgagtcctggggtcaggccagggagagctcggggcaggccttccgccagcactc

SEQ ID NO: 187424 - DNA, 120 bp, Artificial Sequence
  ENSG00000112033_22 (sequence is synthesized)
ccactgcccccctgcccagtagcagccgcccacattgtgtcagcatccagggccagggcctggcctcacatccccctgctcctttctctagctggctccacgggagttcaggccccactc

SEQ ID NO: 187425 - DNA, 120 bp, Artificial Sequence
  ENSG00000112033_23 (sequence is synthesized)
cccctgaagctgcccctccagcacacacacataagcactgaaatcactttacctgcaggctccatgcacctcccttccctccctgaggcaggtgagaacccagagagaggggcctgcagg

SEQ ID NO: 187426 - DNA, 120 bp, Artificial Sequence
  ENSG00000112033_24 (sequence is synthesized)
tgagcaggcagggctgggccaggtctccggggaggcaggggtcctgcaggtcctggtgggtcagcccagcacctgctcccagtgggagcttcccgggataaactgagcctgttcattctg

SEQ ID NO: 187427 - DNA, 120 bp, Artificial Sequence
  ENSG00000112033_25 (sequence is synthesized)
atgtccatttgtcccaatagctctactgccctccccttcccctttactcagcccagctggccacctagaagtctccctgcacagcctctagtgtccggggaccttgtgggaccagtccca

SEQ ID NO: 187428 - DNA, 120 bp, Artificial Sequence
  ENSG00000112033_26 (sequence is synthesized)
caccgctggtccctgccctcccctgctcccaggttgaggtgcgctcacctcagagcagggccaaagcacagctgggcatgccatgtctgagcggcgcagagccctccaggcctgcagggg

SEQ ID NO: 187429 - DNA, 120 bp, Artificial Sequence
  ENSG00000112033_27 (sequence is synthesized)
caaggggctggctggagtctcagagcacagaggtaggagaactggggttcaagcccaggcttcctgggtcctgcctggtcctccctcccaaggagccattctgtgtgtgactctgggtgg

SEQ ID NO: 187430 - DNA, 120 bp, Artificial Sequence
  ENSG00000112033_28 (sequence is synthesized)
aagtgcccagcccctgcccctacgggcgctgcagcctcccttccatgccccaggatcactctctgctggcaggattcttcccgctccccacctacccagctgatgggggttggggtgctt

SEQ ID NO: 187431 - DNA, 120 bp, Artificial Sequence
  ENSG00000112033_29 (sequence is synthesized)
cctttcaggccaaggctatgaagggacagctgctgggacccacctccccctccccggccacatgccgcgtccctgccccgacccgggtctggtgctgaggatacagctcttctcagtgtc

SEQ ID NO: 187432 - DNA, 120 bp, Artificial Sequence
  ENSG00000112033_30 (sequence is synthesized)
tgaacaatctccaaaattgaaatgtatatttttgctaggagccccagcttcctgtgtttttaatataaatagtgtacacagactgacgaaactttaaataaatgggaattaaatatttaa

SEQ ID NO: 187433 - DNA, 120 bp, Artificial Sequence
  ENSG00000112033_31 (sequence is synthesized)
ggcaggtgggctggcctggcacacccagtcgtcctgggggttggccctcactgcagggcactgtgcctgagctctgacagtgtggggaagtgtccctgtgatcttggcagtggaacatgc

SEQ ID NO: 187434 - DNA, 120 bp, Artificial Sequence
  ENSG00000112033_32 (sequence is synthesized)
tggcagtggaacatgcaaggcactgactgagcatgcaggatcagctccatctcattatgtacgtagatagaggtggagacaggaaaaagactaagccagacgtggtggctcacacctgta

SEQ ID NO: 187435 - DNA, 120 bp, Artificial Sequence
  ENSG00000112033_33 (sequence is synthesized)
aaaaaaaaggaaaaggactaacaggcagtatgctgtcatgttaatgtggggtggaaaaattgtctgcattttttctgcatttttaaaattccaacacaataaatacaataataactatgc

SEQ ID NO: 187436 - DNA, 120 bp, Artificial Sequence
  ENSG00000112038_0 (sequence is synthesized)
gcagaggagaatgtcagatgctcagctcggtcccctccgcctgacgctcctctctgtctcagccaggactggtttctgtaagaaacagcaggagctgtggcagcggcgaaaggaagcggc

SEQ ID NO: 187437 - DNA, 120 bp, Artificial Sequence
  ENSG00000112038_1 (sequence is synthesized)
tgaggcgcttggaacccgaaaagtctcggtgctcctggctacctcgcacagcggtgcccgcccggccgtcagtaccatggacagcagcgctgcccccacgaacgccagcaattgcactga

SEQ ID NO: 187438 - DNA, 120 bp, Artificial Sequence
  ENSG00000112038_2 (sequence is synthesized)
tgccttggcgtactcaagttgctccccagcacccagccccggttcctgggtcaacttgtcccacttagatggcaacctgtccgacccatgcggtccgaaccgcaccgacctgggcgggag

SEQ ID NO: 187439 - DNA, 120 bp, Artificial Sequence
  ENSG00000112038_3 (sequence is synthesized)
agacagcctgtgccctccgaccggcagtccctccatgatcacggccatcacgatcatggccctctactccatcgtgtgcgtggtggggctcttcggaaacttcctggtcatgtatgtgat

SEQ ID NO: 187440 - DNA, 120 bp, Artificial Sequence
  ENSG00000112038_4 (sequence is synthesized)
tgtcagatacaccaagatgaagactgccaccaacatctacattttcaaccttgctctggcagatgccttagccaccagtaccctgcccttccagagtgtgaattacctaatgggaacatg

SEQ ID NO: 187441 - DNA, 120 bp, Artificial Sequence
  ENSG00000112038_5 (sequence is synthesized)
gccatttggaaccatcctttgcaagatagtgatctccatagattactataacatgttcaccagcatattcaccctctgcaccatgagtgttgatcgatacattgcagtctgccaccctgt

SEQ ID NO: 187442 - DNA, 120 bp, Artificial Sequence
  ENSG00000112038_6 (sequence is synthesized)
tcaatgtctgcaactggatcctctcttcagccattggtcttcctgtaatgttcatggctacaacaaaatacaggcaaggttccatagattgtacactaacattctctcatccaacctggt

SEQ ID NO: 187443 - DNA, 120 bp, Artificial Sequence
  ENSG00000112038_7 (sequence is synthesized)
actgggaaaacctgctgaagatctgtgttttcatcttcgccttcattatgccagtgctcatcattaccgtgtgctatggactgatgatcttgcgcctcaagagtgtccgcatgctctctg

SEQ ID NO: 187444 - DNA, 120 bp, Artificial Sequence
  ENSG00000112038_8 (sequence is synthesized)
gctccaaagaaaaggacaggaatcttcgaaggatcaccaggatggtgctggtggtggtggctgtgttcatcgtctgctggactcccattcacatttacgtcatcattaaagccttggtta

SEQ ID NO: 187445 - DNA, 120 bp, Artificial Sequence
  ENSG00000112038_9 (sequence is synthesized)
caatcccagaaactacgttccagactgtttcttggcacttctgcattgctctaggttacacaaacagctgcctcaacccagtcctttatgcatttctggatgaaaacttcaaacgatgct

SEQ ID NO: 187446 - DNA, 120 bp, Artificial Sequence
  ENSG00000112038_10 (sequence is synthesized)
tcagagagttctgtatcccaacctcttccaacattgagcaacaaaactccactcgaattcgtcagaacactagagaccacccctccacggccaatacagtggatagaactaatcatcagg

SEQ ID NO: 187447 - DNA, 120 bp, Artificial Sequence
  ENSG00000112038_11 (sequence is synthesized)
tacgcagtctctagaattaggtatatctactggggatgacataaaaattataaggctttgtgctaaactaggagtttaatccattatagaggatgagaatggagggaagaggggaagcaa

SEQ ID NO: 187448 - DNA, 120 bp, Artificial Sequence
  ENSG00000112038_12 (sequence is synthesized)
tggaagcaggttgcttcaagaatgtgtaggaggctctaattctctaggaaagtgcctgcttttaggtcatccaacctctttcctctctggccactctgctctgcacattagagggacagc

SEQ ID NO: 187449 - DNA, 120 bp, Artificial Sequence
  ENSG00000112038_13 (sequence is synthesized)
caaaagtaagtggagcatttggaaggaaaggaatataccacaccgaggagtccagtttgtgcaagacacccagtggaaccaaaacccatcgtggtatgtgaattgaagtcatcataaaag

SEQ ID NO: 187450 - DNA, 120 bp, Artificial Sequence
  ENSG00000112038_14 (sequence is synthesized)
gtgacccttctgtctgtaagattttattttcaagcaaatatttatgacctcaacaaagaagaaccatcttttgttaagttcaccgtagtaacacataaagtaaatgctacctctgatcaa

SEQ ID NO: 187451 - DNA, 120 bp, Artificial Sequence
  ENSG00000112038_15 (sequence is synthesized)
agcaccttgaatggaaggtccgagtctttttagtgttttgcaagggaatgaatccattattctattttagacttttaacttcaccttaaaattagcatctggctaaggcatcattttcac

SEQ ID NO: 187452 - DNA, 120 bp, Artificial Sequence
  ENSG00000112038_16 (sequence is synthesized)
ctccatttcttggttttgtattgtttaaaaaaataacatctctttcatctagctccataattgcaagggaagagattagcatgaaaggtaatctgaaacacagtcatgtgtcagctgtag

SEQ ID NO: 187453 - DNA, 120 bp, Artificial Sequence
  ENSG00000112038_17 (sequence is synthesized)
aaaggttgattctcatgcactgcaaatacttccaaagagtcatcatgggggatttttcattcttaggctttcagtggtttgttcctcagttttaaatgtgcaattttcttgctcctattt

SEQ ID NO: 187454 - DNA, 120 bp, Artificial Sequence
  ENSG00000112038_18 (sequence is synthesized)
aagtgttcacaaaaggtaatagtcaatgagctcatcacttcatccatgcaggaagtcaagcattaaaatgtactctttatttctcactggtttctccatactgcaggctccccacatatt

SEQ ID NO: 187455 - DNA, 120 bp, Artificial Sequence
  ENSG00000112038_19 (sequence is synthesized)
attttctttttttaactcagctcagaatccttatgccttttgaatcagtgtgataaaatgacagatgtttttgttgattgccagaacagtttaaactttttttaaacaataaatccaata

SEQ ID NO: 187456 - DNA, 120 bp, Artificial Sequence
  ENSG00000112038_20 (sequence is synthesized)
aacataatctcaagacagactcatatgaccatacagaaaagtgtgtcatctatttttcaatcctgtgtagttacttggatgtgaaatattaacaatggcccaaaaatattttcctgaaga

SEQ ID NO: 187457 - DNA, 120 bp, Artificial Sequence
  ENSG00000112038_21 (sequence is synthesized)
ttgtgtttatataatgtcatcaccaatattttggtctttttgatctctgctaaatgtcaagatttcctttgtaaagtgtcgatcttctaagtagtttctttaagacaattctccgcttta

SEQ ID NO: 187458 - DNA, 120 bp, Artificial Sequence
  ENSG00000112038_22 (sequence is synthesized)
actgattttctttgttgtgaaacacagtagagatttggcaatcaaccattttacttgatctaggtagacagccaagtcagatggcccatgcctagaagctctccattttgaacttttgtc

SEQ ID NO: 187459 - DNA, 120 bp, Artificial Sequence
  ENSG00000112038_23 (sequence is synthesized)
agcattgattaaaagaatcaaataccttgtagttatctatgatgatacaagtaaaaaactaggctgctgacttctgagtattcctgagcctacaattgtaaaattgtagactccattgta

SEQ ID NO: 187460 - DNA, 120 bp, Artificial Sequence
  ENSG00000112038_24 (sequence is synthesized)
aaatttgtattttttcatcaatctgacaaggcacaaatatgtgccagatatacaaaagcaatgtttctagaaaacagctatcatggatcagaataactgaatttactctcagatctattg

SEQ ID NO: 187461 - DNA, 120 bp, Artificial Sequence
  ENSG00000112038_25 (sequence is synthesized)
gctatagttatgtggactcaacccacgtatccagtagatgggaaaaaacaaaagccaaaataagttttttagtgtttccttctgatgaagtttcatgtttgcttgtaataatctccattt

SEQ ID NO: 187462 - DNA, 120 bp, Artificial Sequence
  ENSG00000112038_26 (sequence is synthesized)
ctcaaatattatgttccataatagacatacattatgtttaattttttatattttctgacaaaagtaactaaaactaggaccttaaaaagatttagaatgttaaataagtgtactagggtg

SEQ ID NO: 187463 - DNA, 120 bp, Artificial Sequence
  ENSG00000112038_27 (sequence is synthesized)
tatatatttacatatatacactactagagcttccaaaagtaaaatggataattcaaacagaacacaatgtaatatttgtatgtaaataactgaggaggaaaatccatgcttttcatgggc

SEQ ID NO: 187464 - DNA, 120 bp, Artificial Sequence
  ENSG00000112038_28 (sequence is synthesized)
taggatggtttctcccaagagatgacatagtattgcttttgctcatcaggctgtttctcagcaatcattgtttctgcttaataccagctcctagtacgaattatctggcatgttgagagc

SEQ ID NO: 187465 - DNA, 120 bp, Artificial Sequence
  ENSG00000112038_29 (sequence is synthesized)
aactttgtcttcaagtaggacctgatctatctttttccacaaatgtcatgtgtgtgaacaagtttcttccatgtcatctttgagactctacacagaatacacaataaagggagttatttt

SEQ ID NO: 187466 - DNA, 120 bp, Artificial Sequence
  ENSG00000112038_30 (sequence is synthesized)
taaaataagacattctaaagtaaataataaataaggtcattgtcaacgtttttcattcaaaaccattttttaacgtaaatttgctagaaccaccttccaattccaaggcaaggagagaca

SEQ ID NO: 187467 - DNA, 120 bp, Artificial Sequence
  ENSG00000112038_31 (sequence is synthesized)
ttacaaccctgactcaactggatgggctaaggtttctgataaaatctgaagataaagaaaatggaatattctgcttttttcttccttctaatttcacccttgcctaaggatgagatttct

SEQ ID NO: 187468 - DNA, 120 bp, Artificial Sequence
  ENSG00000112038_32 (sequence is synthesized)
tcccaggttggtatcccagaaatgcagactgtagctatggggcggaagctttgtttctttacctgatcacttgctgtggaaattctagcttattgtgttccaagtagttagtggtttttc

SEQ ID NO: 187469 - DNA, 120 bp, Artificial Sequence
  ENSG00000112038_33 (sequence is synthesized)
tccttcagtctccactgttattttgctccttcatccctctttccttgccaatcattagaaaggaaagaagaggaaagagactcgctggagcactggtgagtctctaggaccctgctatcc

SEQ ID NO: 187470 - DNA, 120 bp, Artificial Sequence
  ENSG00000112038_34 (sequence is synthesized)
tatcccaacagggctgtcagacggagaactcctaatgtggccatttgaaacacttctcaacattgaaatagacagttgaagttttaaaataacctcttctaagacacggctatgagtagg

SEQ ID NO: 187471 - DNA, 120 bp, Artificial Sequence
  ENSG00000112038_35 (sequence is synthesized)
taagagagcattcattcccttcaataatatgactgtgttgataaaactgataaccattcacttgcaaatgttattattgaataagtctcacttagctcatttaatattacccaaaagatg

SEQ ID NO: 187472 - DNA, 120 bp, Artificial Sequence
  ENSG00000112038_36 (sequence is synthesized)
ctaacaaattctgtttcccacattgtcacagcatgccctttacatctcaggatccaggcaaaagttgaaattcagaaacatagatatgaaatgtaagatacaaagaaaacacctctgcaa

SEQ ID NO: 187473 - DNA, 120 bp, Artificial Sequence
  ENSG00000112038_37 (sequence is synthesized)
agattccgaccacatttatcaaaaagtccccaaagcattcaaaatctttacttaagtcaagtctatttatacgtttaaaagctaaaaacaagatctttttggtaatgcttcaattaaatg

SEQ ID NO: 187474 - DNA, 120 bp, Artificial Sequence
  ENSG00000112038_38 (sequence is synthesized)
ttttatctaaatatgtggaaatgataagatgcgtactgcatctctcatataataaagataatcagttttatacagacatattctccatctactggcaattaccaagataagatggcacta

SEQ ID NO: 187475 - DNA, 120 bp, Artificial Sequence
  ENSG00000112038_39 (sequence is synthesized)
gaaatttctccagcttacgccatgaatactgcagaagctgatactatccgttgtggttttacaaattctagagggttctagccaaagcaacctaagaataggacatggtagcttaagttt

SEQ ID NO: 187476 - DNA, 120 bp, Artificial Sequence
  ENSG00000112038_40 (sequence is synthesized)
ttcagcttcttaactggccacacacacacaagttgtgtttgtacaattcttgaggtcaatcagaaccaaaaaatctgttgctggaagaaatattatcctcttcatagaaatatccaccag

SEQ ID NO: 187477 - DNA, 120 bp, Artificial Sequence
  ENSG00000112038_41 (sequence is synthesized)
cagaaaattggtttctcaaggaatccctactgcccttgtagaaacatcaagattcttgcctggattctcaacataagtctttactcacaggcctattgcttggtttcagaagagtgagaa

SEQ ID NO: 187478 - DNA, 120 bp, Artificial Sequence
  ENSG00000112038_42 (sequence is synthesized)
catgaaagttcataaatgcctgggccactgcaactctaaccactgtgtttcccccagtttgatatggttcaggatacatagtcatagaacagggcatgcagattgtatttaagaccactg

SEQ ID NO: 187479 - DNA, 120 bp, Artificial Sequence
  ENSG00000112038_43 (sequence is synthesized)
caagtaaggtctaaggcaaaagtaaattaatgagtccaactctggggcatccatttaagagccatttaatccatttaattacaaataatttcaacccatagtcagtgttcttcactgtct

SEQ ID NO: 187480 - DNA, 120 bp, Artificial Sequence
  ENSG00000112038_44 (sequence is synthesized)
tcaaaaatataaaaagtacaaggaattgtgtacattacaaactgctccagaaacaaaaccaaatgtggatagctttgtgagctgcagtgtgtggcaaatgttcaaccttttgttatgcaa

SEQ ID NO: 187481 - DNA, 120 bp, Artificial Sequence
  ENSG00000112038_45 (sequence is synthesized)
tatcacccatatcaaataccattcttaaagcagtagacagatgagtcaagttcaatttaatgcaaacaatattactgtgttctaagcgcttctgttactcgaaaggggtctgatccagac

SEQ ID NO: 187482 - DNA, 120 bp, Artificial Sequence
  ENSG00000112038_46 (sequence is synthesized)
cccaaaagagggttcttggacctcatgcaagaaagaattcaggagtaaagtgaaagtgaaatgggtcaggatcaatggtctcattgtctaaggtgttatccgagctcgttgtctcacaac

SEQ ID NO: 187483 - DNA, 120 bp, Artificial Sequence
  ENSG00000112038_47 (sequence is synthesized)
caagaaaattaaggagcatggacacaaagggtgaggttggagcaaaagtttaataagcaaaagaggaaagctctctgcagcagagacgggagcccaagtgggttgctgtttttacagctg

SEQ ID NO: 187484 - DNA, 120 bp, Artificial Sequence
  ENSG00000112038_48 (sequence is synthesized)
aatccaaaagcttttataagaaactcctctcatctctgcagctatttgagtaacttctcttatctgaaaagctgtctgtacaactgcctctatctatgcagctatggggtgtctctaggc

SEQ ID NO: 187485 - DNA, 120 bp, Artificial Sequence
  ENSG00000112038_49 (sequence is synthesized)
gagcacaaagcatagcttctcttgttgtataattgtgggtttgttttaagtaagccactttcctccctgcaagttcccacggagcagaaaaaaggaggaaactttttcctgggagcccac

SEQ ID NO: 187486 - DNA, 120 bp, Artificial Sequence
  ENSG00000112038_50 (sequence is synthesized)
taatcacacagtgaacaaaaggcttctatgctgggccttactttctaacagtgcagcagttatagtctgagttttctccaggctgctccatttttgcctgtagctatgatttttcaggca

SEQ ID NO: 187487 - DNA, 120 bp, Artificial Sequence
  ENSG00000112038_51 (sequence is synthesized)
ggcagcctgcttctccgaggactagtcttagctgtttacctaactgattggtccttttcttctccctgaaaagcaagtttattaagaaagcaaaggaataaagaatggctactccatagg

SEQ ID NO: 187488 - DNA, 81 bp, Artificial Sequence
  ENSG00000112038_52 (sequence is synthesized)
ggttttctgggaaaggagtgggcaattcccagaactgagggttcttccccttttaagaccgcatagggcaacttcctgaca

SEQ ID NO: 187489 - DNA, 120 bp, Artificial Sequence
  ENSG00000112038_53 (sequence is synthesized)
gacattgccatggcatttgtaaactgtcgtggtactggtgggaatgttttttagcatgctaatgcaatataattagtgtataatgagtagtgaggacaaccagaggtaactttcattgcc

SEQ ID NO: 187490 - DNA, 120 bp, Artificial Sequence
  ENSG00000112038_54 (sequence is synthesized)
gagtagtgaggacaaccagaggtaactttcattgccatcttggttttagtggggtttggccggcttctttaccacatccttttatcagtaagatcttcgtgacctgtaccttgtgccaac

SEQ ID NO: 187491 - DNA, 79 bp, Artificial Sequence
  ENSG00000112038_55 (sequence is synthesized)
tctattcaagatggagtcgctctggttcaaacacctctgacacttgaattacaaatataaggaccattgacactgagat

SEQ ID NO: 187492 - DNA, 120 bp, Artificial Sequence
  ENSG00000112038_56 (sequence is synthesized)
acacttgaattacaaatataaggaccattgacactgagattttaagggaggaaaaacagattgacagtggactaaaggtacttttgtagcaaggtactttccacacaatattgaataaat

SEQ ID NO: 187493 - DNA, 120 bp, Artificial Sequence
  ENSG00000112038_57 (sequence is synthesized)
gcagtgtatacatttttaaaggaattttaagagctcggaaatcattaaaattaagtttatcaatttttgaaagcatcttctgactcaaatatatgaaaagattattctagaccttaggca

SEQ ID NO: 187494 - DNA, 120 bp, Artificial Sequence
  ENSG00000112038_58 (sequence is synthesized)
gatattcagagaaagatcagttttctatgggttttttccatcatgcattttatacaaatttaatatactttttcaactcactttgcatttcctgttaccttgtactgagaacttcattaa

SEQ ID NO: 187495 - DNA, 120 bp, Artificial Sequence
  ENSG00000112038_59 (sequence is synthesized)
aacctgcacttgaaattgcacttaaactttacaaaatcacagaagaagttgttttccataggtgtggggtgggatgttagagctctagacattaattcctaggaatcgcatacctacgga

SEQ ID NO: 187496 - DNA, 120 bp, Artificial Sequence
  ENSG00000112038_60 (sequence is synthesized)
aaacagtcctctgacctcctgtgacacatggggtgagcccttcctttttgtctcaatctcaaaaaacagtaagtctttaatccatttgcatcaaaaagtacttcatatgctcgaaactaa

SEQ ID NO: 187497 - DNA, 120 bp, Artificial Sequence
  ENSG00000112038_61 (sequence is synthesized)
agtaaaactttattgaaatacattaatatgctcctggaacatactactgggtctcagacagtgcagaagctttattgtttatttgggaagagcaaggtaagaatcaagtagaaatgataa

SEQ ID NO: 187498 - DNA, 120 bp, Artificial Sequence
  ENSG00000112038_62 (sequence is synthesized)
cttactcatattaaccattctaccattggaattatttgccaacacaccttgctgctacttagagaaagtagttcacctcactaccttttatccaaagaaattatctctaaaagcactcag

SEQ ID NO: 187499 - DNA, 120 bp, Artificial Sequence
  ENSG00000112038_63 (sequence is synthesized)
acattttgtagagcaagtagcaatctattcaaagttgtaaaggttctgtagaatctctcagaccaggtacaggacctaccaaaggccacagccaagcacaagcagctacattagacagtt

SEQ ID NO: 187500 - DNA, 120 bp, Artificial Sequence
  ENSG00000112038_64 (sequence is synthesized)
ttacagctctgtatttcaggaaaacttctgtcctgtgggagcaatacaaaactataccagttttttgttagtgtaaaaattgcccaatattaaccagagcagcccaaaatatttcagggt

SEQ ID NO: 187501 - DNA, 120 bp, Artificial Sequence
  ENSG00000112038_65 (sequence is synthesized)
aagaatagatatatttatatttttcagatgatatatcttcattttcgattttgaaagaacagtaatactaattatatcccatgtaaggggctactgacaattttgatggtacctgaattt

SEQ ID NO: 187502 - DNA, 120 bp, Artificial Sequence
  ENSG00000112038_66 (sequence is synthesized)
gcctctatcatgcatctcaatgatttgttgtcatccaaagctatttcatgaatcaaatatcgttttctacctgccccacaactgtgtacataaaacctaaacctctgaagcaataaacct

SEQ ID NO: 187503 - DNA, 120 bp, Artificial Sequence
  ENSG00000112038_67 (sequence is synthesized)
cttccattacacaggtttagattcagagttttcttgcttaagttccaactaaaagtattacattcttagcataagtatactcataaagaaaaataagtatttgttttaggttttagagag

SEQ ID NO: 187504 - DNA, 120 bp, Artificial Sequence
  ENSG00000112038_68 (sequence is synthesized)
agagcacagagtccctttgagacagtggggaaaattcatcttcatattgtcacatgcactgtaataggaatgtttagcaaaaaaaaccttccagagaaaggtggtttccaatattaccta

SEQ ID NO: 187505 - DNA, 120 bp, Artificial Sequence
  ENSG00000112038_69 (sequence is synthesized)
caacttcctttgcaatttgatttttgaaaggacctaaaagttgaaaacaggctatcacatcccatttgctttaaagtctcttaaacttacgctctttcgcttcaaatgcataaatgtttt

SEQ ID NO: 187506 - DNA, 67 bp, Artificial Sequence
  ENSG00000112038_70 (sequence is synthesized)
ttaaacttacgctctttcgcttcaaatgcataaatgttttatttaagtttgcattgcccactaaggc

SEQ ID NO: 187507 - DNA, 120 bp, Artificial Sequence
  ENSG00000112038_71 (sequence is synthesized)
tgataaattcacagggttacaaaataccaaacggaaatgagataagtggtataaaccacagaagatataggagaagagaaaaaaaaaagaggaaataaagaagacaactcttttcctaag

SEQ ID NO: 187508 - DNA, 120 bp, Artificial Sequence
  ENSG00000112038_72 (sequence is synthesized)
agtctgggtaaaattgaacatagccatattcactgaacaacatgagtgagcttcattaatttaagcacagcaaaactgctttaattaacaagaccagagagaagggagaggagactacat

SEQ ID NO: 187509 - DNA, 120 bp, Artificial Sequence
  ENSG00000112038_73 (sequence is synthesized)
ttgtgtgacctaatggttgtgatttcactgtccaagaggacaaagacaaagaaattctgggaaggagaacaacaattatattcccccatttcaagaagggcagaagtgtcccaacactac

SEQ ID NO: 187510 - DNA, 120 bp, Artificial Sequence
  ENSG00000112038_74 (sequence is synthesized)
ccaatatttgcaaaattcaaatgtctcataggctcttcttccctggttccctcaggagctgggtttctgggttgcagaagtgcttttcatattctgtatctggttgtggtggcaatgtca

SEQ ID NO: 187511 - DNA, 120 bp, Artificial Sequence
  ENSG00000112038_75 (sequence is synthesized)
ccaccctacactgctgtgacaccgaaacaaccaagcctagaatcagctggtgcctcttttcatctgcagggtagatttggcttccatggttgttcactgctctgtgttaggaaggctcag

SEQ ID NO: 187512 - DNA, 120 bp, Artificial Sequence
  ENSG00000112038_76 (sequence is synthesized)
tgacaggtgtacagccttcagtaatgcctcaaaggttctccaagcagaggtaaacatgtgggtcctgctggtgacatattagacttcttactttccccaaataaaaaagtgcctgctggg

SEQ ID NO: 187513 - DNA, 60 bp, Artificial Sequence
  ENSG00000112038_77 (sequence is synthesized)
agacttcttactttccccaaataaaaaagtgccacacaaggtcaggagatcaagaccatc

SEQ ID NO: 187514 - DNA, 120 bp, Artificial Sequence
  ENSG00000112038_78 (sequence is synthesized)
ccagcctgggcaacagaatgagattgtctcaaaaaaaaaaaaaagtgccacatgccatgctatgtgcccaaagtttccttcacacaacacagccttgagatgcagtattaaattctacac

SEQ ID NO: 187515 - DNA, 120 bp, Artificial Sequence
  ENSG00000112038_79 (sequence is synthesized)
ttttcctaccatagtgatacatgtggcttttctttgctgtgttctgagatgtcatgctttgaaatcagtggccattatcatctaaggattccgccagagacttccaaaagaagaggtctc

SEQ ID NO: 187516 - DNA, 120 bp, Artificial Sequence
  ENSG00000112038_80 (sequence is synthesized)
atttataaagtgaatttgaataaaatgaccagttaggtgttttcagaaacacctatgccctacttgcctactcttcaagggtttaggggcttagggggaggttttgtttgggttttttgt

SEQ ID NO: 187517 - DNA, 120 bp, Artificial Sequence
  ENSG00000112038_81 (sequence is synthesized)
tgctgttgcttgtttatttgtttgttgtgtttaagacgttttacttgtccctgaaatgtttgtcatcacacagatacacgctcaggataagaactaccagactagattaggaggtccaca

SEQ ID NO: 187518 - DNA, 120 bp, Artificial Sequence
  ENSG00000112038_82 (sequence is synthesized)
ccaccaattgagatgtacctgtgctcatgacttgacattgtggtgggccggctacaaccctccccacccctcgctttcactaaataacaactctcttctctccatcattttgacttagag

SEQ ID NO: 187519 - DNA, 120 bp, Artificial Sequence
  ENSG00000112038_83 (sequence is synthesized)
ccagtcagaattcaatctccaatatcctgactagcacaagaaatccataggttgattcttgttctcctgcatctctgcaggtggcaaacctgattcctaatgcctgttcctgcctctgca

SEQ ID NO: 187520 - DNA, 120 bp, Artificial Sequence
  ENSG00000112038_84 (sequence is synthesized)
ggggttcattcagaaaacaggaaaataacaaaggcttcctgtaattctctttggctgtaatacaatttgttcccgtctgcccccaggctcacccagtgctctgtctcagtggtaagctgt

SEQ ID NO: 187521 - DNA, 120 bp, Artificial Sequence
  ENSG00000112038_85 (sequence is synthesized)
aactgatcactgctgtattaactcaaaactcatttgctttatggaaattcatggcccttatttctcaagggaccagagaaaaccaataggcctactccccagctgagtactttccatgca

SEQ ID NO: 187522 - DNA, 120 bp, Artificial Sequence
  ENSG00000112038_86 (sequence is synthesized)
agctaccgcatctgtataaattaggttcaaataacagagtatttccaggatttataaattcagtattacaaatagtaatctggcaagtgttctcaggatccccttgctacctgtaattca

SEQ ID NO: 187523 - DNA, 120 bp, Artificial Sequence
  ENSG00000112038_87 (sequence is synthesized)
atcatataacttctgaatgggctgggggaaaataacaataagaaaaactggtgtttacctgaagatctgcccagtgatttgtgtgttttcttaataaactttacccacttattaaaagaa

SEQ ID NO: 187524 - DNA, 120 bp, Artificial Sequence
  ENSG00000112038_88 (sequence is synthesized)
taaaatgaaggtggagttaattctgactacgggattcctttttcacttttataatgaactccttccttctaactaaatcttatcataagcaaatctatgcaccaaattatttagtacaat

SEQ ID NO: 187525 - DNA, 120 bp, Artificial Sequence
  ENSG00000112038_89 (sequence is synthesized)
tcctaataacagctgaaggaccatttatttgaagcaatgttcaccatagcaaaattccagtgaagtctaagaactgggacagtccgttgaggatccttgtgccaggatgtatgttgcccc

SEQ ID NO: 187526 - DNA, 120 bp, Artificial Sequence
  ENSG00000112038_90 (sequence is synthesized)
atgaatgtgcacatgcatattaaaatatgggcacctcttttaattcttttttttctcataataagtttgaaactcacagtaggaaattgagagatcaatttggttactgttttatcattg

SEQ ID NO: 187527 - DNA, 120 bp, Artificial Sequence
  ENSG00000112038_91 (sequence is synthesized)
atcctgaagacagttgaagcaatcatactggttgttctcgaactagctggtttcccagagacagctggagactgagcacataaagacatcattgaggaaaaaggctaccttgtacctcat

SEQ ID NO: 187528 - DNA, 120 bp, Artificial Sequence
  ENSG00000112038_92 (sequence is synthesized)
ggagagctgaaggtctgataaatgggaactgccaggtaatagctatgctatttctgacataaatttaaaaactagtattgtttcttctagctctgtttttgcatagtgcacagagatctt

SEQ ID NO: 187529 - DNA, 120 bp, Artificial Sequence
  ENSG00000112038_93 (sequence is synthesized)
tgtaaaaaacaggaaattaatgttaaattggatctataaacataagtcaatttggctctattatgtcaaaagagaataggagttttaacttatatctgtgttttattaatattttgaagt

SEQ ID NO: 187530 - DNA, 66 bp, Artificial Sequence
  ENSG00000112038_94 (sequence is synthesized)
agttttaacttatatctgtgttttattaatattttgaagtataggaacctcatggtgtagcaggat

SEQ ID NO: 187531 - DNA, 71 bp, Artificial Sequence
  ENSG00000112038_95 (sequence is synthesized)
acacgtgacaggggctgcatgcaccggtggtctgggaggaacagaacaggacagggagttcttctatacaa

SEQ ID NO: 187532 - DNA, 120 bp, Artificial Sequence
  ENSG00000112038_96 (sequence is synthesized)
ctgggaggaacagaacaggacagggagttcttctatacaatagagaacagaacaatgttcttctatacaatgtaaggaatctatgaataacatcggcttctaaatcataagttgattttt

SEQ ID NO: 187533 - DNA, 120 bp, Artificial Sequence
  ENSG00000112038_97 (sequence is synthesized)
aactactgggtttaggccaggcgggcccaggcctggtttcgggcctggcgctgagctgcctgtatttggttttacttccttgttgtttttactgaatatgaaacaatataaaacaatgtg

SEQ ID NO: 187534 - DNA, 120 bp, Artificial Sequence
  ENSG00000112038_98 (sequence is synthesized)
agagggtctttctctcctctcaatgtcaacatcatatatgattggagacttccacataattgagttttagtgcccactgttacagaaaatcataatggaaaaactaaaatgtcaataata

SEQ ID NO: 187535 - DNA, 120 bp, Artificial Sequence
  ENSG00000112038_99 (sequence is synthesized)
atttcagatgtgtattttagttctcataagaacatctacattcatttgaaaaatagttctatatctattcttgaaacatatttctttagttcaaggtctgatgagctcccagactgttgg

SEQ ID NO: 187536 - DNA, 120 bp, Artificial Sequence
  ENSG00000112038_100 (sequence is synthesized)
ggattgctctacagctgctcaagcttttgaagactcctgtgatttttttaaatggctggtttggttgaagtttctcttatcagtcaggcactttgcattttaagcgtactttaccaccga

SEQ ID NO: 187537 - DNA, 120 bp, Artificial Sequence
  ENSG00000112038_101 (sequence is synthesized)
cacacacacacacacacacacaacatagtgaaatggacccgtgggaattatatgatagttgtaatcaaaataaaatgcaatcaatactaaaatacaatttaccaaaggcttacctcctta

SEQ ID NO: 187538 - DNA, 120 bp, Artificial Sequence
  ENSG00000112038_102 (sequence is synthesized)
tacaatttaccaaaggcttacctccttatttgaaactccagcatcaataatttacttgcactcttgttatttacatttgtactctggaagtaaacttaaaatgaaaattagaatttgctt

SEQ ID NO: 187539 - DNA, 120 bp, Artificial Sequence
  ENSG00000112038_103 (sequence is synthesized)
tagaatttgctttcaattatactatctctatctaaatcttaatttgaaatttaaattattttgtctctacccaaaccatcgatttcatggaaatgtttaaattttctttttttttttttt

SEQ ID NO: 187540 - DNA, 120 bp, Artificial Sequence
  ENSG00000112038_104 (sequence is synthesized)
tacaggtgtgagccactgcgcctggccagaaatgtttaaaatttcataaatcttgaatccataaaattcaatgctaccatttataatttaatactcctaccataaaaatttctgtgttag

SEQ ID NO: 187541 - DNA, 120 bp, Artificial Sequence
  ENSG00000112038_105 (sequence is synthesized)
ttaggcatagctatatgaatatttgcctataaatccccatcaatttaataggaattaagttagaaatactagtatatatattccctttatatactaattgtatatccatataaaagcatt

SEQ ID NO: 187542 - DNA, 120 bp, Artificial Sequence
  ENSG00000112038_106 (sequence is synthesized)
tatatctaccaatataaatagaatatataaagggaatatatatataccaatataaatgggaatttatattggcacatacatttccattattttaatgggaattaaagaaaaaatgcctgt

SEQ ID NO: 187543 - DNA, 120 bp, Artificial Sequence
  ENSG00000112038_107 (sequence is synthesized)
tttccattattttaatgggaattaaagaaaaaatgcctgttttcactaagtcatccttcccctggcaatacatttcctgaacttttacatacttaaatagccagttatgaaaatgtaaaa

SEQ ID NO: 187544 - DNA, 120 bp, Artificial Sequence
  ENSG00000112038_108 (sequence is synthesized)
caatgagtgatcttgttgttttcattttattatgttatatgaaaaaaagaaaccttgtaagtgcagatttattttaaaaaattgaaaaactactctgtcaaacatagcaaataggaaagt

SEQ ID NO: 187545 - DNA, 120 bp, Artificial Sequence
  ENSG00000112038_109 (sequence is synthesized)
taaaaaaaagtaagtctaaagattaggtgctctgtcacttgtcattacatttttttataacattaatgacacattttttgctatccaaatataatttccactagaaaagaaaagatgtcc

SEQ ID NO: 187546 - DNA, 120 bp, Artificial Sequence
  ENSG00000112038_110 (sequence is synthesized)
tccatgttttaaattgcatttgaaattcaggtaactaataacccttggttttaaaagatacatataatgtttccgtaggaaaaaaatcaaaatattgtaaagaatctgagtaaatgagag

SEQ ID NO: 187547 - DNA, 120 bp, Artificial Sequence
  ENSG00000112038_111 (sequence is synthesized)
cctctcatggttgattaagttcagacattttaaacagactcctgcccacaaactatttttcctctccaggaataagaatggcaactgaattgttccttctttattctatagctttaagtc

SEQ ID NO: 187548 - DNA, 120 bp, Artificial Sequence
  ENSG00000112038_112 (sequence is synthesized)
aaacctaacataagcaatcaacccttccacccattgtcctctttctagctgcttatattcctgagtctgaaagaagggcagaattaattcgtttccttgacagtgttgggggtgaaataa

SEQ ID NO: 187549 - DNA, 120 bp, Artificial Sequence
  ENSG00000112038_113 (sequence is synthesized)
aagatagacccctgctgctctgcacgtagattcagtttgtatgccagggtgacattttaatttacagtagtccagacacctaaacaggacatagaaatgtcaactggtcatattaaaata

SEQ ID NO: 187550 - DNA, 120 bp, Artificial Sequence
  ENSG00000112038_114 (sequence is synthesized)
aaaaagtatagaatagtttctgttttacggattttgtatccaagtaaatgaaaacacaatcacctttcaaaacatggtatgaaatccacagttgtaacagtgagcacaacatgctttctg

SEQ ID NO: 187551 - DNA, 120 bp, Artificial Sequence
  ENSG00000112038_115 (sequence is synthesized)
tgtgtgtttttaagctctttccccacatctgcttttcaaaaatatttgcctggaaacctgtatttcgcctatagagacaaatacatatattgtttgttgtgataatgcacaaaaaggaat

SEQ ID NO: 187552 - DNA, 120 bp, Artificial Sequence
  ENSG00000112038_116 (sequence is synthesized)
gttaaaaaaaaacacacaacattgttttccttttgatggtctgggagtttttctataagtttttggtttttttttttttttctcttcattagtgtgttagttccatcatcatgtctgttt

SEQ ID NO: 187553 - DNA, 120 bp, Artificial Sequence
  ENSG00000112038_117 (sequence is synthesized)
actattgaaaaataaatatcttcatttaaagtagagacaaagctactatttcacatttccaggtaggacaggatgatcagatgcagctttcaaaagaactacctgctaaatcataatggt

SEQ ID NO: 187554 - DNA, 120 bp, Artificial Sequence
  ENSG00000112038_118 (sequence is synthesized)
ctcatgtgcagatcaaaatgtcaactagtatatcaaacagtgagcaattcactaaattatttttacattactcctatttgactgtttcagatagttgtatataaaaaatataaatttttg

SEQ ID NO: 187555 - DNA, 120 bp, Artificial Sequence
  ENSG00000112038_119 (sequence is synthesized)
cattgtattgttcttgatgtaccagcatacataaacatattaggctgtattgtaagtttcctgcatgtaatatgtaatgtgtaattatatgtgataaataaaacctaaaactgatacaaa

SEQ ID NO: 187556 - DNA, 120 bp, Artificial Sequence
  ENSG00000112038_120 (sequence is synthesized)
atcgtgagaaaacctgcaatgattacatgaagaggtagataatgtattaccctgatttggtaggtaaagtattatcctgatttatgtgacagagtgaaaggcaacttttaattgttaacc

SEQ ID NO: 187557 - DNA, 120 bp, Artificial Sequence
  ENSG00000112038_121 (sequence is synthesized)
accttccctgtcttgctgggctctagagcaaggctgcttggttgtgtaccctggaccactgcaaggacctcttgtcagatatgacctcccagctatccttcactcgtcctgccttcgtgg

SEQ ID NO: 187558 - DNA, 120 bp, Artificial Sequence
  ENSG00000112038_122 (sequence is synthesized)
aaatactgctcccagcccgtctggtggagcatttctcctgagttaagcatgattattcttcagttgcccgacactgcccttgactcccttccaaattcggcattttcacatcagtatggc

SEQ ID NO: 187559 - DNA, 120 bp, Artificial Sequence
  ENSG00000112038_123 (sequence is synthesized)
ggctagcatgctaattaactatgcataaccacgtttcctttcaccatgttgaaccctgacataatttttttttccacaaacacctcactctggagaaggaaatgattttttttaattaaa

SEQ ID NO: 187560 - DNA, 120 bp, Artificial Sequence
  ENSG00000112038_124 (sequence is synthesized)
ataaacatacattggaaatacttagtgctaaaataagcctgaaggaaaggttggaagtatgatgagtcagaaaactgactgtaaagaaaccaattacttaacataaaacaccattaaaga

SEQ ID NO: 187561 - DNA, 120 bp, Artificial Sequence
  ENSG00000112038_125 (sequence is synthesized)
taagccacgaaatgtaaggtctgctgggtaggaaagtggcaaatgcaatgaagcatgtctttagatcatgcaggtctataaccaacggtgaatctagcaaaagttattttctcttttggg

SEQ ID NO: 187562 - DNA, 120 bp, Artificial Sequence
  ENSG00000112038_126 (sequence is synthesized)
gagaaacttcttcttattaaaaaaataaaaaatgtttcaacttcttgagcaccaaggtcaattattctaaatcttaaaaccacagttttaattttgcttttttgttggtttttgtacttt

SEQ ID NO: 187563 - DNA, 120 bp, Artificial Sequence
  ENSG00000112038_127 (sequence is synthesized)
ggagtatttgtctacattatcctttttatatttgccatatttaaagtccaaactaaaagcaaattattttctctcctcaagttaaatggctctatctttttctttaaaatccattaagaa

SEQ ID NO: 187564 - DNA, 120 bp, Artificial Sequence
  ENSG00000112038_128 (sequence is synthesized)
agtgaaactcccaaagtaagtccaaaaaaaagcccccaagtctgaaaatgtggagcttttctggcagtaatgcagcttctgcaagtattgcagaccagatcaggtatcagaattttaaag

SEQ ID NO: 187565 - DNA, 120 bp, Artificial Sequence
  ENSG00000112038_129 (sequence is synthesized)
cttcagtaacaaagctgtcctattgaccctgaggagatttatgaaatcactttcctgatgttattgaaaccaaaacactttcctggacactgaattcagtcctaaacaaagggcctccaa

SEQ ID NO: 187566 - DNA, 120 bp, Artificial Sequence
  ENSG00000112038_130 (sequence is synthesized)
ccaacagctgtcttgggctgaatgagttagactcaacctcgtgtgacggaaaaacagtaaacacaagctaacatttaaaaggaattgatggcaccgtgtaaatcagaagcccaaggaggg

SEQ ID NO: 187567 - DNA, 120 bp, Artificial Sequence
  ENSG00000112038_131 (sequence is synthesized)
cctggcttcaggtgtggggttctctctcacgctctcaaatccacatcctccggattaggtccattttcagacaagctcctccagcaactacataccatgcgtcttctcaggtgtgggtcc

SEQ ID NO: 187568 - DNA, 120 bp, Artificial Sequence
  ENSG00000112038_132 (sequence is synthesized)
tgcaggaaaactaatacactctttgtccataagtctcaaaataaactctcactggctctggttggaacatgagagcatccttgccattcaccatggccccggtcactaaacgtcttcacg

SEQ ID NO: 187569 - DNA, 120 bp, Artificial Sequence
  ENSG00000112038_133 (sequence is synthesized)
agttcatcatggttctgagaaagcaacttccccttgctctgtctgaaagatactcatggtttgtcatcgggggacccgaaggaagaagaaagcagagaagattgggagaggacaaaagag

SEQ ID NO: 187570 - DNA, 120 bp, Artificial Sequence
  ENSG00000112038_134 (sequence is synthesized)
ttttgccagcatgccaggcttctgggttccctttccctgagcggccctagtgatccggcttgcggcaccatcgcctacgggccaagctgcatcataaaggaaatttttttttttcattct

SEQ ID NO: 187571 - DNA, 120 bp, Artificial Sequence
  ENSG00000112038_135 (sequence is synthesized)
ggccagagcaaaacacatgtgataaaacataggcattagctactctgcttagcaccaaatatcagactagcttaaatttgcccccagatgggttccatcatctttaatccgacctctgac

SEQ ID NO: 187572 - DNA, 120 bp, Artificial Sequence
  ENSG00000112038_136 (sequence is synthesized)
ttgcagtttcaacacgtgctctctgggcaaaacagttgccctgagtaacagaaaagataggaaaggaaaaggagagagagaaaaacgtgccagtggaagggtggggaaggtgaaatgatc

SEQ ID NO: 187573 - DNA, 120 bp, Artificial Sequence
  ENSG00000112038_137 (sequence is synthesized)
aaggaggccagagaaagactcacctattgcagcaacactgtagaagttcaggcagctgcttctcggtagcaaaaggatcttttccagcaatcctattagctctcaagtttccccttttag

SEQ ID NO: 187574 - DNA, 120 bp, Artificial Sequence
  ENSG00000112038_138 (sequence is synthesized)
ggaggaaaaagctccccatgtcccgcgatcctgtacatgtccaaccctgccatccacagccatcagcaaagagtgcaagacagattaatccaaagagaatagcaattaatatcccatagc

SEQ ID NO: 187575 - DNA, 120 bp, Artificial Sequence
  ENSG00000112038_139 (sequence is synthesized)
atcaaagctgttcttagccaagagggactttaacgagaggggtctctaacaccctaaatcttagaagagactctaaccatcctaagtagggcctctaaccccgctttataaacttttaat

SEQ ID NO: 187576 - DNA, 120 bp, Artificial Sequence
  ENSG00000112038_140 (sequence is synthesized)
tgactcccatcttaacagttgcaatccatggaggaatgcttgataacctcggtgataagataaaaaaccaagcatactagaagtgttctctaaaattaaaaatacagtagttactagaga

SEQ ID NO: 187577 - DNA, 120 bp, Artificial Sequence
  ENSG00000112038_141 (sequence is synthesized)
aaaattttagtccaaaaatccaactatagaaacatagaatgtgagaggtagcacataagaaataagtcatggggattttatttcatggaccagcaatatgatgataaaagccatctaacc

SEQ ID NO: 187578 - DNA, 120 bp, Artificial Sequence
  ENSG00000112038_142 (sequence is synthesized)
gtcttcctgtaaagaaaatgatgagggctaaatccatcagcaccaaagctgggaagccctccaggttcatttggaagaaaatactcctctgagctcaaaggaagtgtgatctgtcacaat

SEQ ID NO: 187579 - DNA, 120 bp, Artificial Sequence
  ENSG00000112038_143 (sequence is synthesized)
attgtatgcctgcactaagtttgcatcctgaaaactcactggaagataggaaagcaagcatgaaaaagcagccgggtcagacaggcttctggattcagtgtgtggacatgactttgcctg

SEQ ID NO: 187580 - DNA, 120 bp, Artificial Sequence
  ENSG00000112038_144 (sequence is synthesized)
catgaattgcccctttctcctacaaacaagagaattcggtcaagtggatgtggcagaactgggctgctctgagatgatagaaaagggctcctgcttttcctgtaattgcagccccttgtt

SEQ ID NO: 187581 - DNA, 120 bp, Artificial Sequence
  ENSG00000112038_145 (sequence is synthesized)
cttgtggttgctacatgcaataaatgtaattctatgagaaggaccagcccttacatcccatcaaaatgtttcctggaaacctggagcacagaactctgatatcctctcacactgtggcag

SEQ ID NO: 187582 - DNA, 120 bp, Artificial Sequence
  ENSG00000112038_146 (sequence is synthesized)
gtctccatttcccttcccaggaagagtctagagcattaattttgagtttgcaaaggcttgtaactatttcatatgatttttagagctgactatgacatgaaccctaaaattcctgttccc

SEQ ID NO: 187583 - DNA, 120 bp, Artificial Sequence
  ENSG00000112038_147 (sequence is synthesized)
gcaatttccatacagcgcaaagtggagtggcgatttggcagttatcaagggacctccagccaagtttgttgctgaccaacttgccgggtcgtcttgaaaagggggcttacaggtgttcca

SEQ ID NO: 187584 - DNA, 120 bp, Artificial Sequence
  ENSG00000112038_148 (sequence is synthesized)
agcccgtgttttatcctgaagtatccctcaacacagaaaaacgacctcataacacaaaatacaccagcttaaaaatagcctttgaattatttttcacattaatcaaaactttacagagga

SEQ ID NO: 187585 - DNA, 120 bp, Artificial Sequence
  ENSG00000112038_149 (sequence is synthesized)
attttattttattttattttattttattgccattcattcaaccgtttgcacagagagaaagaagacagaaatctgactggtaagaaattgttacccttttgccagcatgccaggcttctg

SEQ ID NO: 187586 - DNA, 120 bp, Artificial Sequence
  ENSG00000112038_150 (sequence is synthesized)
gcagcacaaggcacaatgctgaaatagcatggtccaggatgtgtttgcacagaagagtgcccagtgaagagacctactccttggatcgctttgcgcaaaatccaccccttttccctcctc

SEQ ID NO: 187587 - DNA, 120 bp, Artificial Sequence
  ENSG00000112038_151 (sequence is synthesized)
tgaaactattcaaaataactatttttatggcctttacttctatgcaaaatttatgactttagcacattatagaaataattctgatctagaatccttttcattttccccagaattattata

SEQ ID NO: 187588 - DNA, 120 bp, Artificial Sequence
  ENSG00000112038_152 (sequence is synthesized)
taattcatagatgttgctgcaatacccctcttatttctcaaaagccagtcttgctctggttctgtgattaaagagagagggtgagtgccttgcccactgtggtcatggatgcaagatatt

SEQ ID NO: 187589 - DNA, 120 bp, Artificial Sequence
  ENSG00000112038_153 (sequence is synthesized)
tagaaaggaagaacagcaaggaagagaaaccttgccctggctcagggccccaagtgtcagttgtggctcgacttcaaggcactctgcgcctcactctccttatctgtaaaaagccaggct

SEQ ID NO: 187590 - DNA, 120 bp, Artificial Sequence
  ENSG00000112038_154 (sequence is synthesized)
gcacaagcagaagcagtgaacagtctaccagggaatattaacttcaaggatcatctcaaagccaataatcatcacactgttgaagagtgactgcaccaggaaagagacagggcagcagtg

SEQ ID NO: 187591 - DNA, 72 bp, Artificial Sequence
  ENSG00000112038_155 (sequence is synthesized)
gccccactgcactccagcctggccaacagagcaagaccctgtctcagaaaaacgaatgataataagtcatat

SEQ ID NO: 187592 - DNA, 120 bp, Artificial Sequence
  ENSG00000112038_156 (sequence is synthesized)
aagaccctgtctcagaaaaacgaatgataataagtcatattttacatcttcagatagataaaagagagaattttttctatgaaataggaggaagcaattcaaaaataataagagatggtt

SEQ ID NO: 187593 - DNA, 120 bp, Artificial Sequence
  ENSG00000112038_157 (sequence is synthesized)
attaacaagcaaagcatagcaaccaaattcccagacaacctgggtttcaatcctggctctgacaacaatcactagttggatgtctccagggcaaattacttaaccaatctgtgtcttcat

SEQ ID NO: 187594 - DNA, 120 bp, Artificial Sequence
  ENSG00000112038_158 (sequence is synthesized)
tttttcatctgtaaaatgaagatagtcatagtatataccttatatatgtggtatgaggattaaataatttagcattagtaaagcactctgaacagtatctgacacataagtgtttgttaa

SEQ ID NO: 187595 - DNA, 120 bp, Artificial Sequence
  ENSG00000112038_159 (sequence is synthesized)
ataaacgaacaaattggaaattctaaaaataacaactttaatttttggcgttcaggattttatgggtgagccgaaaagcagaaagagagaaggcgaagagcatgttaatgagctggaaga

SEQ ID NO: 187596 - DNA, 120 bp, Artificial Sequence
  ENSG00000112039_0 (sequence is synthesized)
aacggctgcggcttcgggcggccgggtttctccggtctcccaacgccgaggagagcttgtaacaggcgctggagctggcccgccaccgccgcgtcagggacggcgctggagtcctccgtt

SEQ ID NO: 187597 - DNA, 120 bp, Artificial Sequence
  ENSG00000112039_1 (sequence is synthesized)
cgttcccctcagcctctgagctgaggccccacaccagagtagggggcggcgcggcacccgtgccccggcatggcgacaccggacgcggggctccctggggctgagggcgtggagccggcg

SEQ ID NO: 187598 - DNA, 80 bp, Artificial Sequence
  ENSG00000112039_2 (sequence is synthesized)
gagggggcgcggcgcggcctgggggtgctccgggcgctgggcagccgcggctgggagcccttcgactggggtcgcttgct

SEQ ID NO: 187599 - DNA, 120 bp, Artificial Sequence
  ENSG00000112039_3 (sequence is synthesized)
actggggtcgcttgctcgaggccctgtgccgggaggagccggtcgtgcaggggcctgacggccgtctggagctgaaaccactgttgctgcgattgccccggatatgccagaggaacctga

SEQ ID NO: 187600 - DNA, 120 bp, Artificial Sequence
  ENSG00000112039_4 (sequence is synthesized)
tgtccctgctgatggccgttcggccatcgctgccggaaagtgggctcctctctgtgctgcagattgcccagcaggacctagcccctgacccagatgcctggctccgtgccctgggggaat

SEQ ID NO: 187601 - DNA, 120 bp, Artificial Sequence
  ENSG00000112039_5 (sequence is synthesized)
tgctgcgaagggatttgggggtggggacctccatggagggagcttctccactgtctgaaagatgccagagacagctccaaagtctatgtagggggctgggcctggggggcaggaggttga

SEQ ID NO: 187602 - DNA, 120 bp, Artificial Sequence
  ENSG00000112039_6 (sequence is synthesized)
aatccccccaggctccagaccctgaagaagaggagaacagggactcccagcagcctgggaaacgcagaaaggactcagaggaagaggctgccagtcctgaggggaagagggtccccaaaa

SEQ ID NO: 187603 - DNA, 120 bp, Artificial Sequence
  ENSG00000112039_7 (sequence is synthesized)
gattacggtgttgggaagaggaagaagatcatgagaaggagagacccgaacataagtcactggaatccctggcagatggaggaagtgcatctcctattaaggaccagcctgtcatggcag

SEQ ID NO: 187604 - DNA, 120 bp, Artificial Sequence
  ENSG00000112039_8 (sequence is synthesized)
ttaagactggcgaggacggttcgaatctggatgatgctaaaggtctggctgagagtttggagttgcccaaagctatccaggaccagcttcccaggctgcagcagctgctgaagaccttgg

SEQ ID NO: 187605 - DNA, 120 bp, Artificial Sequence
  ENSG00000112039_9 (sequence is synthesized)
aggaggggttagagggattggaggatgcccccccagttgagctacagcttcttcacgaatgtagtcccagccagatggacttgctgtgtgcccagctgcagctccctcagctctcagacc

SEQ ID NO: 187606 - DNA, 120 bp, Artificial Sequence
  ENSG00000112039_10 (sequence is synthesized)
cctttcacctgatctcagcctcagcaatgctactgtgctgaccagaagcctctttcttggacggatcctctccttgacttcctcagcctcccgcctgcttacaactgccctgacctcctt

SEQ ID NO: 187607 - DNA, 120 bp, Artificial Sequence
  ENSG00000112039_11 (sequence is synthesized)
ctgtgccaaatatacataccctgtctgcagcgccctccttgaccctgtgctccaggccccaggcacaggtcctgctcaaacagagttactgtgttgccttgtgaagatggagtccctgga

SEQ ID NO: 187608 - DNA, 120 bp, Artificial Sequence
  ENSG00000112039_12 (sequence is synthesized)
gccagatgcacaggttctaatgctgggacagatcttggagctgccctggaaggaggaaactttcttggtgttgcagtcactcctagagcggcaggtggagatgacccctgagaagttcag

SEQ ID NO: 187609 - DNA, 120 bp, Artificial Sequence
  ENSG00000112039_13 (sequence is synthesized)
tgtcttaatggagaagctctgtaaaaaggggctggcagccaccacctccatggcctatgccaagctcatgctgacagtgatgaccaagtatcaggctaacatcactgagacccagaggct

SEQ ID NO: 187610 - DNA, 120 bp, Artificial Sequence
  ENSG00000112039_14 (sequence is synthesized)
gggcctggctatggccctagaacctaacaccaccttcctgaggaagtccctgaaggccgccttgaaacatttgggcccctgaccatccaccaagggaccaccctcttggtgctccatcac

SEQ ID NO: 187611 - DNA, 120 bp, Artificial Sequence
  ENSG00000112039_15 (sequence is synthesized)
cagcttcctgaagggcatttctttcttcaccaccttgtcttgagccctagcctgaggataaaggctgagcctggccatcccagattgcaactgcctccctgttacaggctgcatagggaa

SEQ ID NO: 187612 - DNA, 120 bp, Artificial Sequence
  ENSG00000112039_16 (sequence is synthesized)
ggaatattggcttcccagccagcagggaggctcctgggctaagggagctcagctatattttctttttcatttcttttgtttttgagagaaggtattgctctgtcatccaggctggagtgc

SEQ ID NO: 187613 - DNA, 90 bp, Artificial Sequence
  ENSG00000112039_17 (sequence is synthesized)
gctctgtcatccaggctggagtgcagtgatgcgattgatcatggctcactgtaacctctgcctcccaggctcgatcctcccatgacatga

SEQ ID NO: 187614 - DNA, 120 bp, Artificial Sequence
  ENSG00000112039_18 (sequence is synthesized)
gtcttgaactcctgagctcaagtgatcttcctgccttggcacccaaagtgttgagatttacaggtgtgagccaccacaccaggccagagctatatttccaaaggctgctggccccaggca

SEQ ID NO: 187615 - DNA, 120 bp, Artificial Sequence
  ENSG00000112039_19 (sequence is synthesized)
tccaaaggctgctggccccaggcacactcctcatcaattctcaggctgcagggacaaactttccgatagggctcagtaggatcaagccgacccagagtgggcatgggatgctccaggagg

SEQ ID NO: 187616 - DNA, 120 bp, Artificial Sequence
  ENSG00000112039_20 (sequence is synthesized)
tctggggtaccagtgggctcagatgaagctcttgtgctcatgtatattatgaccttctgtgtttttgtttctgacttgaataatttatcaatggtgttgaataaaagcaagttcaataat

SEQ ID NO: 187617 - DNA, 76 bp, Artificial Sequence
  ENSG00000112039_21 (sequence is synthesized)
tgtgatctgtcgtgcccagacttcctgactcttaaaagatcactgagacccagaggctgggcctggctatggccct

SEQ ID NO: 187618 - DNA, 120 bp, Artificial Sequence
  ENSG00000112041_0 (sequence is synthesized)
agacctgcagagaaaggggtgcgataggcaaaggcaccatgcctctgcgggatgaaaccctccgagaggtgtgggcctctgacagtgggcatgaagaagaaagcctgagcccggaggccc

SEQ ID NO: 187619 - DNA, 120 bp, Artificial Sequence
  ENSG00000112041_1 (sequence is synthesized)
cgcggcgccccaaacagcgacccgccccggcacagaggctaaggaagaagaggacggaggcccccgaatccccctgccccacgggatccaagccccggaagcccggagctgggcggacgg

SEQ ID NO: 187620 - DNA, 120 bp, Artificial Sequence
  ENSG00000112041_2 (sequence is synthesized)
ggaggccgcgggaggagccttccccagacccagcccaggcccgggcgccgcagacggtctacgccaggttcctcagggaccccgaggccaagaagcgcgacccccgggaaacctttctgg

SEQ ID NO: 187621 - DNA, 120 bp, Artificial Sequence
  ENSG00000112041_3 (sequence is synthesized)
tagcccgtgccccagacgcggaggacgaggaggaggaggaagaggaggacgaggaggacgaggaagaggaggcagaggaaaagaaagagaaaatccttctgcctcccaagaagcccctga

SEQ ID NO: 187622 - DNA, 120 bp, Artificial Sequence
  ENSG00000112041_4 (sequence is synthesized)
gagagaagagctccgcagacctgaaggagaggagggccaaggcccagggcccaaggggagacctgggaagccctgaccccccaccgaaacctctgcgtgttaggaataaggaagctccag

SEQ ID NO: 187623 - DNA, 120 bp, Artificial Sequence
  ENSG00000112041_5 (sequence is synthesized)
caggggaggggaccaagatgagaaagaccaagaagaaagggtctggggaggccgacaaggacccctcagggagcccagccagtgcgaggaagagcccagcagccatgtttctggttgggg

SEQ ID NO: 187624 - DNA, 120 bp, Artificial Sequence
  ENSG00000112041_6 (sequence is synthesized)
aaggcagtcctgacaagaaagccctgaagaagaaaggcactcccaaaggcgcgaggaaggaggaagaagaggaggaggaggcagctacggtgataaagaagagcaatcaaaagggcaaag

SEQ ID NO: 187625 - DNA, 120 bp, Artificial Sequence
  ENSG00000112041_7 (sequence is synthesized)
ccaaaggaaaaggcaaaaagaaagcgaaggaggagagggccccgtctccccccgtggaggtggacgaaccccgggagtttgtgctccggcctgccccccagggccgcacggtgcgctgcc

SEQ ID NO: 187626 - DNA, 120 bp, Artificial Sequence
  ENSG00000112041_8 (sequence is synthesized)
ttcctcttggctggcaggaaacgaaaacggagcaagacagccaattacctcatctccatcgaccctaccaatctgtcccgaggaggggagaatttcatcgggaagctgaggtccaacctc

SEQ ID NO: 187627 - DNA, 120 bp, Artificial Sequence
  ENSG00000112041_9 (sequence is synthesized)
ctggggaaccgcttcacggtctttgacaacgggcagaacccacagcgtgggtacagcactaatgtggcaagccttcggcaggagctggcagctgtgatctatgaaaccaacgtgctgggc

SEQ ID NO: 187628 - DNA, 120 bp, Artificial Sequence
  ENSG00000112041_10 (sequence is synthesized)
ttccgtggcccccggcgcatgaccgtcatcattcctggcatgagtgcggagaacgagagggtccccatccggccccgaaatgctagtgacggcctgctggtgcgctggcagaacaagacg

SEQ ID NO: 187629 - DNA, 120 bp, Artificial Sequence
  ENSG00000112041_11 (sequence is synthesized)
ctggagagcctcatagaactgcacaacaagccacctgtctggaacgatgacagtggctcctacaccctcaacttccaaggccgggtcacccaggcctcagtcaagaacttccagattgtc

SEQ ID NO: 187630 - DNA, 120 bp, Artificial Sequence
  ENSG00000112041_12 (sequence is synthesized)
cacgctgatgaccccgactatatcgtgctgcagttcggccgcgtggcggaggacgccttcaccctagactaccggtacccgctgtgcgccctgcaggccttcgccatcgccctctccagt

SEQ ID NO: 187631 - DNA, 120 bp, Artificial Sequence
  ENSG00000112041_13 (sequence is synthesized)
ttcgacgggaagctggcctgcgagtgaccccagcagcccctcagcgcccccagagcccgtcagcgtgggggaaaggattcagtggaggctggcagggtccctccagcaaagctcccgcgg

SEQ ID NO: 187632 - DNA, 120 bp, Artificial Sequence
  ENSG00000112041_14 (sequence is synthesized)
aaaactgctcctgtgtcggggctgacctctcactgcctctcggtgacctccgtcctctccccagcctggcacaggccgaggcaggaggagcccggacggcgggtaggacggagatgaaga

SEQ ID NO: 187633 - DNA, 120 bp, Artificial Sequence
  ENSG00000112041_15 (sequence is synthesized)
acatctggagttggagccgcacatctggtctcggagctcgcctgcgccgctgtgcccccctcctccccgcgccccagtcacttcctgtccgggagcagtagtcattgttgttttaacctc

SEQ ID NO: 187634 - DNA, 120 bp, Artificial Sequence
  ENSG00000112041_16 (sequence is synthesized)
ccctctccccgggaccgcgctagggctccgaggagctggggcgggctaggaggagggggtaggtgatgggggacgagggccaggcacccacatccccaataaagccgcgtccttggccaa

SEQ ID NO: 187635 - DNA, 78 bp, Artificial Sequence
  ENSG00000112041_17 (sequence is synthesized)
cgatcctccctcctctgtgggttgggccagcatttaaaaagacctctgcatagggggaagcctggggcaggggacatg

SEQ ID NO: 187636 - DNA, 120 bp, Artificial Sequence
  ENSG00000112041_18 (sequence is synthesized)
aagacctctgcatagggggaagcctggggcaggggacatgaattgctcagtcctaactcacccccacccttgtaggaagctctctaaactgcttggctgtgtggaaggggcctggggcag

SEQ ID NO: 187637 - DNA, 120 bp, Artificial Sequence
  ENSG00000112041_19 (sequence is synthesized)
agcagaacagccctgtccttggagggcttggcgtctcactgagacacagcgattgaggcctcaaaatgaacccagtgctgtgaccggagggtttttcctctgataatttctccccacgat

SEQ ID NO: 187638 - DNA, 120 bp, Artificial Sequence
  ENSG00000112041_20 (sequence is synthesized)
gggctcagcttaggaaatagccaactccctgagcacatccatcaccctccaacacaaattcattctggccacctagggaatggacttgggctttttgtaattgaattcactgaaaaacca

SEQ ID NO: 187639 - DNA, 120 bp, Artificial Sequence
  ENSG00000112041_21 (sequence is synthesized)
ggaagccggggagaagtgttgaaagtggaaacccaagcccaggggagatccctagggtgaggagcccgagggggtgcgcccaggcttgggggtagcgggtagaggcgctgcctcgcggac

SEQ ID NO: 187640 - DNA, 120 bp, Artificial Sequence
  ENSG00000112053_0 (sequence is synthesized)
ggtatccgcgtccgcagcgccgccagccaggcgagagccgtgtgggatcccagcgcccgcactcccgcccccgccaaggagccaggtgagccgctgctgggagacgcctgggcgccgggg

SEQ ID NO: 187641 - DNA, 120 bp, Artificial Sequence
  ENSG00000112053_1 (sequence is synthesized)
gctgcaggtcccagggcgggggctgcgtccgtcaccggcaggtacccaggaatggcacaactagagaggagcgccatctctggcttcagctctaagtccaggcgaaactcattcgcatat

SEQ ID NO: 187642 - DNA, 120 bp, Artificial Sequence
  ENSG00000112053_2 (sequence is synthesized)
gatgttaagcgtgaagtatacaatgaggagacctttcaacaggaacacaaaaggaaggcctcctcttctgggaacatgaacatcaacatcaccaccttcagacaccacgtccagtgccgc

SEQ ID NO: 187643 - DNA, 120 bp, Artificial Sequence
  ENSG00000112053_3 (sequence is synthesized)
tgctcatggcacaggttcctacgatgcgtgcttacaatctttcccttcctagaatggatgtgtatgtatcgattaaaggattggcttctgggagacttacttgctggtataagtgttggc

SEQ ID NO: 187644 - DNA, 120 bp, Artificial Sequence
  ENSG00000112053_4 (sequence is synthesized)
cttgtgcaagttccccaaggcctgacacttagtttgctggcaaggcaactgattcctcctctcaacatcgcttatgcagctttctgttcttcggtaatctatgtaatttttggatcgtgt

SEQ ID NO: 187645 - DNA, 120 bp, Artificial Sequence
  ENSG00000112053_5 (sequence is synthesized)
catcaaatgtccattggttccttcttcctggtgagtgctctgctgatcaacgttctgaaagtgagcccattcaacaacggtcaactggtcatgggatctttcgtcaagaatgagttttcg

SEQ ID NO: 187646 - DNA, 120 bp, Artificial Sequence
  ENSG00000112053_6 (sequence is synthesized)
gccccctcctaccttatgggctataataaatccttgagtgtggtggcaaccacaacttttctgactgggattattcagctaataatgggcgtattgggtttgggcttcattgccacttac

SEQ ID NO: 187647 - DNA, 120 bp, Artificial Sequence
  ENSG00000112053_7 (sequence is synthesized)
cttccggagtctgcaatgagtgcttacctggctgctgtggcacttcatatcatgctgtcccagctgactttcatctttgggattatgattagtttccatgccggtcccatctccttcttc

SEQ ID NO: 187648 - DNA, 120 bp, Artificial Sequence
  ENSG00000112053_8 (sequence is synthesized)
tatgacataattaattactgtgtagctctcccaaaagcgaattccaccagcattctagtatttctaactgttgttgttgctctgcgaatcaacaaatgtatcagaatttctttcaatcag

SEQ ID NO: 187649 - DNA, 120 bp, Artificial Sequence
  ENSG00000112053_9 (sequence is synthesized)
tatcccattgagtttcccatggaattatttctgattattggcttcactgtgattgcaaacaagataagcatggccacagaaaccagccagacgcttattgacatgattccttatagcttt

SEQ ID NO: 187650 - DNA, 120 bp, Artificial Sequence
  ENSG00000112053_10 (sequence is synthesized)
ctgcttcctgtaacaccagatttcagccttcttcccaagataattttacaagccttctccttatctttggtgagctcctttctgctcatatttctgggcaagaagattgccagtcttcac

SEQ ID NO: 187651 - DNA, 120 bp, Artificial Sequence
  ENSG00000112053_11 (sequence is synthesized)
aattacagtgtcaattccaaccaggatttaatagccatcggcctttgcaatgtcgtcagttcatttttcagatcttgtgtgtttactggtgctattgctaggactattatccaggataaa

SEQ ID NO: 187652 - DNA, 120 bp, Artificial Sequence
  ENSG00000112053_12 (sequence is synthesized)
tctggaggaagacaacagtttgcatctctggtaggcgcaggtgtgatgctgctcctgatggtgaagatgggacactttttctacacactgccaaatgctgtgctggctggtattattctg

SEQ ID NO: 187653 - DNA, 120 bp, Artificial Sequence
  ENSG00000112053_13 (sequence is synthesized)
agcaacgtcattccctaccttgaaaccatttctaacctacccagcctgtggaggcaggaccaatatgactgtgctctttggatgatgacattctcatcttcaattttcctgggactggac

SEQ ID NO: 187654 - DNA, 120 bp, Artificial Sequence
  ENSG00000112053_14 (sequence is synthesized)
atagaagcatcaatgattatcgggagatcatcaccattcctggggtgaaaatcttccagtgctgcagctcaattacatttgtaaatgtttactacctaaagcataagctgttaaaagagg

SEQ ID NO: 187655 - DNA, 120 bp, Artificial Sequence
  ENSG00000112053_15 (sequence is synthesized)
ttgatatggtaaaggtgcctcttaaagaagaagaaattttcagcttgtttaattcaagtgacaccaatctacaaggaggaaagatttgcaggtgtttctgcaactgtgatgatctggagc

SEQ ID NO: 187656 - DNA, 120 bp, Artificial Sequence
  ENSG00000112053_16 (sequence is synthesized)
cgctgcccaggattctttacacagagcgatttgaaaataaactggatcccgaagcatcctccattaacctgattcactgctcacattttgagagcatgaacacaagccaaactgcatccg

SEQ ID NO: 187657 - DNA, 120 bp, Artificial Sequence
  ENSG00000112053_17 (sequence is synthesized)
aagaccaagtgccatacacagtatcgtccgtgtctcagaaaaatcaagggcaacagtatgaggaggtggaggaagtttggcttcctaataactcatcaagaaacagctcaccaggactgc

SEQ ID NO: 187658 - DNA, 120 bp, Artificial Sequence
  ENSG00000112053_18 (sequence is synthesized)
ctgatgtggcggaaagccaggggaggagatcactcatcccttactcagatgcgtctctactgcccagtgtccacaccatcatcctggatttctccatggtacactacgtggattcacggg

SEQ ID NO: 187659 - DNA, 120 bp, Artificial Sequence
  ENSG00000112053_19 (sequence is synthesized)
ggttagtcgtattaagacagatatgcaatgcctttcaaaacgccaacattttgatactcattgcagggtgtcactcttccatagtcagggcatttgagaggaatgatttctttgacgctg

SEQ ID NO: 187660 - DNA, 120 bp, Artificial Sequence
  ENSG00000112053_20 (sequence is synthesized)
gcatcaccaagacccagctgttcctcagcgttcacgacgccgtgctgtttgccttgtcaaggaaggtcataggctcctctgagttaagcatcgatgaatccgagacagtgatacgggaaa

SEQ ID NO: 187661 - DNA, 120 bp, Artificial Sequence
  ENSG00000112053_21 (sequence is synthesized)
cctactcagaaacagacaagaatgacaattcaagatataaaatgagcagcagttttctaggaagccaaaaaaatgtaagtccaggcttcatcaagatccaacagcctgtagaagaggagt

SEQ ID NO: 187662 - DNA, 120 bp, Artificial Sequence
  ENSG00000112053_22 (sequence is synthesized)
cggagttggatttggagctggaatcagaacaagaggctgggctgggtctggacctagacctggatcgggagctggagcctgaaatggagcccaaggctgagaccgagaccaagacccaga

SEQ ID NO: 187663 - DNA, 120 bp, Artificial Sequence
  ENSG00000112053_23 (sequence is synthesized)
ccgagatggagccccagcctgagactgagcctgagatggagcccaaccccaaatctaggccaagagctcacacttttcctcagcagcgttactggcctatgtatcatccgtctatggctt

SEQ ID NO: 187664 - DNA, 120 bp, Artificial Sequence
  ENSG00000112053_24 (sequence is synthesized)
ccacccagtctcagactcagactcggacatggtcagtggagaggagacgccatcctatggattcatactcaccagagggcaacagcaatgaagatgtctaggagatgaactagaaataag

SEQ ID NO: 187665 - DNA, 120 bp, Artificial Sequence
  ENSG00000112053_25 (sequence is synthesized)
gggtcagataatgctggcaaatcctcctacccaaaaaggggtcaattgtccagagacctagactggatacgaactagcagtacttccttcctgactgtgactcctactacctgccagcct

SEQ ID NO: 187666 - DNA, 120 bp, Artificial Sequence
  ENSG00000112053_26 (sequence is synthesized)
tcttccttgctctgcgctgggatcatactcccaaatcacattactaaatgccaacaattatctctgaattccctatccaggctcccctcatttcaccttcagcatatattctagtcatga

SEQ ID NO: 187667 - DNA, 120 bp, Artificial Sequence
  ENSG00000112053_27 (sequence is synthesized)
atttccttcttcacacaccccacatctctgggctttgtgccagaccatctctaacttaatcctctcatccctgttcccctttctccaaagagatgaagctcaaataaaatgtataactct

SEQ ID NO: 187668 - DNA, 120 bp, Artificial Sequence
  ENSG00000112053_28 (sequence is synthesized)
actgctaggccaccagagccttggacaccaaaggcagtacaatataaggtcaatcaaaataaaaagagaatgaaccaattcttttttcttttttcttttttgagatggagcctcactctg

SEQ ID NO: 187669 - DNA, 120 bp, Artificial Sequence
  ENSG00000112053_29 (sequence is synthesized)
atgttcaggacacgaggcctggcaccaaataggccctcgatcaagaatagcaaaacctcggagagagaaggagccttggtatacaggtttaccaaataccaaggggatcccacgactcag

SEQ ID NO: 187670 - DNA, 120 bp, Artificial Sequence
  ENSG00000112053_30 (sequence is synthesized)
gtatgaggagggcgacccaggtaccactttcctggctccctagcccagctgctcatgctcctcttcctcgtcccctcccccactctcatctcctcagcccgcccggaacgcccgcgggct

SEQ ID NO: 187671 - DNA, 120 bp, Artificial Sequence
  ENSG00000112053_31 (sequence is synthesized)
gttcgttcacacaggtactttgtctcaggtaataggaggttaacaaggcaaggtaagccaactctgacctaaaggcaagtgcatttcctttcagagctaagattcttctcctgggtcaaa

SEQ ID NO: 187672 - DNA, 120 bp, Artificial Sequence
  ENSG00000112053_32 (sequence is synthesized)
tccctaacaccaacatttatagaagcatcaatgattatcgggaggtaagaatccaaatgggtcccatttctctgcctaagggatagagtgggccccacctcatgcttagtttttctacaa

SEQ ID NO: 187673 - DNA, 120 bp, Artificial Sequence
  ENSG00000112053_33 (sequence is synthesized)
aatcccttgccattgtttcctgcactgcagatacacatttacaaaggagggggatgtgatgtacactggtagagatgggttctttgtttttatttttttttttggagacagagtcttgct

SEQ ID NO: 187674 - DNA, 86 bp, Artificial Sequence
  ENSG00000112053_34 (sequence is synthesized)
gactcctgagctcagtcaatctgcttgcctcagccttctagagtgctaggattacaggcatgactcaacacacccagccaagacgg

SEQ ID NO: 187675 - DNA, 120 bp, Artificial Sequence
  ENSG00000112053_35 (sequence is synthesized)
taggattacaggcatgactcaacacacccagccaagacgggttcttaagtagctaaattcttatagtattgcagccagttaaagatcatttgtaaatgtactttaaggagagtttggcca

SEQ ID NO: 187676 - DNA, 120 bp, Artificial Sequence
  ENSG00000112053_36 (sequence is synthesized)
agaaaaaggaaatgaagggagaaagaagacagcaggaaaagcagagggtgaaaatgggaggaaataattttctagttcttgtctctaataaagaagaatacaggctgggtgtgttggctc

SEQ ID NO: 187677 - DNA, 120 bp, Artificial Sequence
  ENSG00000112053_37 (sequence is synthesized)
ctttctttctttttgatggcactggagcagagagaaactaaagcaggaaaatgggaagtgattatctttgtgttttttaagatgaagctccactgaagctgctagatgggcagttaccca

SEQ ID NO: 187678 - DNA, 120 bp, Artificial Sequence
  ENSG00000112053_38 (sequence is synthesized)
agcagcaaacaggagagtgaggggtgggaaatttacttacatgggaagtagggctgacactgaggagctactagggcttttctttccttatatttattttttttttgagatggagtctca

SEQ ID NO: 187679 - DNA, 120 bp, Artificial Sequence
  ENSG00000112053_39 (sequence is synthesized)
caggtgtgagccaccgcacccggccaactacggcttttctaaattgtgcaaggagaggttaaacttaggaggagatgcaaatcagattttaggagaattcagattcatagcacagagcag

SEQ ID NO: 187680 - DNA, 120 bp, Artificial Sequence
  ENSG00000112053_40 (sequence is synthesized)
tggcagtaaagattcaaatgcccaggacaacgtggagcttttcagggagcatctttccattcatttagggagtatttattgagtacctagtatgtgtttagcactttgataagacttgaa

SEQ ID NO: 187681 - DNA, 120 bp, Artificial Sequence
  ENSG00000112053_41 (sequence is synthesized)
aatgtcagttcaacaaaaatacacttggactgaactcaactccttttaagaaaaattgacatgcttctcaccaagcagaaggcctcagttgcagacagggaccaatacgttcctgatggt

SEQ ID NO: 187682 - DNA, 120 bp, Artificial Sequence
  ENSG00000112053_42 (sequence is synthesized)
gctgggagacgcctgggcgccgggggctgcaggtcccagggcgggggctgcgtccgtcaccggcaggtacccaggtatgccgcagagccaggcacgccgtgggcactcagtcagtatctg

SEQ ID NO: 187683 - DNA, 120 bp, Artificial Sequence
  ENSG00000112062_0 (sequence is synthesized)
cgggaggctcccgtttgctggctcttggaaccgcgaccactggagccttagcgggcgcagcagctggaacgggagtactgcgacgcagcccggagtcggccttgtaggggcgaaggtgca

SEQ ID NO: 187684 - DNA, 120 bp, Artificial Sequence
  ENSG00000112062_1 (sequence is synthesized)
gggagatcgcggcgggcgcagtcttgagcgccggagcgcgtccctgcccttagcggggcttgccccagtcgcaggggcacatccagccgctgcggctgacagcagccgcgcgcgcgggag

SEQ ID NO: 187685 - DNA, 120 bp, Artificial Sequence
  ENSG00000112062_2 (sequence is synthesized)
ccagcgcaaggtccccgcccggctgggcgggcagcaagggccggggagagggtgcgggtgcaggcgggggccccacagggccaccttcttgcccggcggctgccgctggaaaatgtctca

SEQ ID NO: 187686 - DNA, 120 bp, Artificial Sequence
  ENSG00000112062_3 (sequence is synthesized)
cttcttgcccggcggctgccgctggaaaatgtctcaggagaggcccacgttctaccggcaggagctgaacaagacaatctgggaggtgcccgagcgttaccagaacctgtctccagtggg

SEQ ID NO: 187687 - DNA, 120 bp, Artificial Sequence
  ENSG00000112062_4 (sequence is synthesized)
ctctggcgcctatggctctgtgtgtgctgcttttgacacaaaaacggggttacgtgtggcagtgaagaagctctccagaccatttcagtccatcattcatgcgaaaagaacctacagaga

SEQ ID NO: 187688 - DNA, 120 bp, Artificial Sequence
  ENSG00000112062_5 (sequence is synthesized)
actgcggttacttaaacatatgaaacatgaaaatgtgattggtctgttggacgtttttacacctgcaaggtctctggaggaattcaatgatgtgtatctggtgacccatctcatgggggc

SEQ ID NO: 187689 - DNA, 120 bp, Artificial Sequence
  ENSG00000112062_6 (sequence is synthesized)
agatctgaacaacattgtgaaatgtcagaagcttacagatgaccatgttcagttccttatctaccaaattctccgaggtctaaagtatatacattcagctgacataattcacagggacct

SEQ ID NO: 187690 - DNA, 120 bp, Artificial Sequence
  ENSG00000112062_7 (sequence is synthesized)
aaaacctagtaatctagctgtgaatgaagactgtgagctgaagattctggattttggactggctcggcacacagatgatgaaatgacaggctacgtggccactaggtggtacagggctcc

SEQ ID NO: 187691 - DNA, 120 bp, Artificial Sequence
  ENSG00000112062_8 (sequence is synthesized)
tgagatcatgctgaactggatgcattacaaccagacagttgatatttggtcagtgggatgcataatggccgagctgttgactggaagaacattgtttcctggtacagaccatattgatca

SEQ ID NO: 187692 - DNA, 120 bp, Artificial Sequence
  ENSG00000112062_9 (sequence is synthesized)
gttgaagctcattttaagactcgttggaaccccaggggctgagcttttgaagaaaatctcctcagagtctgcaagaaactatattcagtctttgactcagatgccgaagatgaactttgc

SEQ ID NO: 187693 - DNA, 120 bp, Artificial Sequence
  ENSG00000112062_10 (sequence is synthesized)
gaatgtatttattggtgccaatcccctggctgtcgacttgctggagaagatgcttgtattggactcagataagagaattacagcggcccaagcccttgcacatgcctactttgctcagta

SEQ ID NO: 187694 - DNA, 120 bp, Artificial Sequence
  ENSG00000112062_11 (sequence is synthesized)
ccacgatcctgatgatgaaccagtggccgatccttatgatcagtcctttgaaagcagggacctccttatagatgagtggaaaagcctgacctatgatgaagtcatcagctttgtgccacc

SEQ ID NO: 187695 - DNA, 120 bp, Artificial Sequence
  ENSG00000112062_12 (sequence is synthesized)
accccttgaccaagaagagatggagtcctgagcacctggtttctgttctgttgatcccacttcactgtgaggggaaggccttttcacgggaactctccaaatattattcaagtgcctctt

SEQ ID NO: 187696 - DNA, 120 bp, Artificial Sequence
  ENSG00000112062_13 (sequence is synthesized)
gttgcagagatttcctccatggtggaagggggtgtgcgtgcgtgtgcgtgcgtgttagtgtgtgtgcatgtgtgtgtctgtctttgtgggagggtaagacaatatgaacaaactatgatc

SEQ ID NO: 187697 - DNA, 120 bp, Artificial Sequence
  ENSG00000112062_14 (sequence is synthesized)
acagtgactttacaggaggttgtggatgctccagggcagcctccaccttgctcttctttctgagagttggctcaggcagacaagagctgctgtccttttaggaatatgttcaatgcaaag

SEQ ID NO: 187698 - DNA, 120 bp, Artificial Sequence
  ENSG00000112062_15 (sequence is synthesized)
tgaccccaccttgacggtggggcgtagacttgacaacatcccacagtggcacggagagaaggcccataccttctggttgcttcagacctgacaccgtccctcagtgatacgtacagccaa

SEQ ID NO: 187699 - DNA, 120 bp, Artificial Sequence
  ENSG00000112062_16 (sequence is synthesized)
aaaggaccaactggcttctgtgcactagcctgtgattaacttgcttagtatggttctcagatcttgacagtatatttgaaactgtaaatatgtttgtgccttaaaaggagagaagaaagt

SEQ ID NO: 187700 - DNA, 120 bp, Artificial Sequence
  ENSG00000112062_17 (sequence is synthesized)
gtagatagttaaaagactgcagctgctgaagttctgagccgggcaagtcgagagggctgttggacagctgcttgtgggcccggagtaatcaggcagccttcataggcggtcatgtgtgca

SEQ ID NO: 187701 - DNA, 120 bp, Artificial Sequence
  ENSG00000112062_18 (sequence is synthesized)
tgtgagcacatgcgtatatgtgcgtctctctttctccctcacccccaggtgttgccatttctctgcttacccttcacctttggtgcagaggtttcttgaatatctgccccagtagtcaga

SEQ ID NO: 187702 - DNA, 120 bp, Artificial Sequence
  ENSG00000112062_19 (sequence is synthesized)
agcaggttcttgatgtcatgtacttcctgtgtactctttatttctagcagagtgaggatgtgttttgcacgtcttgctatttgagcatgcacagctgcttgtcctgctctcttcaggagg

SEQ ID NO: 187703 - DNA, 120 bp, Artificial Sequence
  ENSG00000112062_20 (sequence is synthesized)
ccctggtgtcaggcaggtttgccagtgaagacttcttgggtagtttagatcccatgtcacctcagctgatattatggcaagtgatatcacctctcttcagcccctagtgctattctgtgt

SEQ ID NO: 187704 - DNA, 120 bp, Artificial Sequence
  ENSG00000112062_21 (sequence is synthesized)
tgaacacaattgatacttcaggtgcttttgatgtgaaaatcatgaaaagaggaacaggtggatgtatagcatttttattcatgccatctgttttcaaccaactatttttgaggaattatc

SEQ ID NO: 187705 - DNA, 120 bp, Artificial Sequence
  ENSG00000112062_22 (sequence is synthesized)
atgggaaaagaccagggcttttcccaggaatatcccaaacttcggaaacaagttattctcttcactcccaataactaatgctaagaaatgctgaaaatcaaagtaaaaaattaaagccca

SEQ ID NO: 187706 - DNA, 120 bp, Artificial Sequence
  ENSG00000112062_23 (sequence is synthesized)
taaggccagaaactccttttgctgtctttctctaaatatgattactttaaaataaaaaagtaacaaggtgtcttttccactcctatggaaaagggtcttcttggcagcttaacattgact

SEQ ID NO: 187707 - DNA, 120 bp, Artificial Sequence
  ENSG00000112062_24 (sequence is synthesized)
tcttggtttggggagaaataaattttgtttcagaattttgtatattgtaggaatcctttgagaatgtgattccttttgatggggagaaagggcaaattattttaatattttgtattttca

SEQ ID NO: 187708 - DNA, 120 bp, Artificial Sequence
  ENSG00000112062_25 (sequence is synthesized)
actttataaagataaaatatcctcaggggtggagaagtgtcgttttcataacttgctgaatttcaggcattttgttctacatgaggactcatatatttaagccttttgtgtaataagaaa

SEQ ID NO: 187709 - DNA, 120 bp, Artificial Sequence
  ENSG00000112062_26 (sequence is synthesized)
gtataaagtcacttccagtgttggctgtgtgacagaatcttgtatttgggccaaggtgtttccatttctcaatcagtgcagtgatacatgtactccagagggacagggtggaccccctga

SEQ ID NO: 187710 - DNA, 120 bp, Artificial Sequence
  ENSG00000112062_27 (sequence is synthesized)
gtcaactggagcaagaaggaaggaggcagactgatggcgattccctctcacccgggactctccccctttcaaggaaagtgaacctttaaagtaaaggcctcatctcctttattgcagttc

SEQ ID NO: 187711 - DNA, 120 bp, Artificial Sequence
  ENSG00000112062_28 (sequence is synthesized)
aaatcctcaccatccacagcaagatgaattttatcagccatgtttggttgtaaatgctcgtgtgatttcctacagaaatactgctctgaatattttgtaataaaggtctttgcacatgtg

SEQ ID NO: 187712 - DNA, 120 bp, Artificial Sequence
  ENSG00000112062_29 (sequence is synthesized)
accacatacgtgttaggaggctgcatgctctggaagcctggactctaagctggagctcttggaagagctcttcggtttctgagcataatgctcccatctcctgatttctctgaacagaaa

SEQ ID NO: 187713 - DNA, 120 bp, Artificial Sequence
  ENSG00000112062_30 (sequence is synthesized)
acaaaagagagaatgagggaaattgctattttatttgtattcatgaacttggctgtaatcagttatgccgtataggatgtcagacaataccactggttaaaataaagcctatttttcaaa

SEQ ID NO: 187714 - DNA, 120 bp, Artificial Sequence
  ENSG00000112062_31 (sequence is synthesized)
ttagtgagtttctcaagtttattatatttttctcttgtttttatttaatgcacaatatggcattatatcaatatcctttaaactgtgacctggcatacttgtctgacagatcttaatact

SEQ ID NO: 187715 - DNA, 120 bp, Artificial Sequence
  ENSG00000112062_32 (sequence is synthesized)
actcctaacatttagaaaatgttgataaagcttcttagttgtacattttttggtgaagagtatccaggtctttgctgtggatgggtaaagcaaagagcaaatgaacgaagtattaagcat

SEQ ID NO: 187716 - DNA, 120 bp, Artificial Sequence
  ENSG00000112062_33 (sequence is synthesized)
tggggcctgtcttatctacactcgagtgtaagagtggccgaaatgacagggctcagcagactgtggcctgagggccaaatctggcccaccacctgtttggtgtagcctgctaagaatggc

SEQ ID NO: 187717 - DNA, 120 bp, Artificial Sequence
  ENSG00000112062_34 (sequence is synthesized)
ttttacatttttaaatggttgggaaagaaaaaaaaagaagtagtagattttgtagcatgtgatgtaagtaatgtaaaacttaaattccagtatccataaataaagttttatgagaacaga

SEQ ID NO: 187718 - DNA, 120 bp, Artificial Sequence
  ENSG00000112062_35 (sequence is synthesized)
attccagtgtccatgggtgtatactccttttacttatctctagggaagactctcagtattttgcttttatagtctagataatgcattatgaggtctttcttcaaactgagtagcttgcct

SEQ ID NO: 187719 - DNA, 120 bp, Artificial Sequence
  ENSG00000112062_36 (sequence is synthesized)
tgccaagaaagaggcttcagtttacttttgtgagttggaaaaattcctcataagttgaaaaacccatcaagtctgtcttctttttgcaacagtcccttattaatcatcccacagcagttc

SEQ ID NO: 187720 - DNA, 120 bp, Artificial Sequence
  ENSG00000112062_37 (sequence is synthesized)
ccttctaccaatctgtactttgacctgggtgtgtttgtaagcacacatgccctttgtgtgctgacttcccggatgagtgaggtataagacagtgtgagtgtgtgtgtgcgtgcacgcatg

SEQ ID NO: 187721 - DNA, 120 bp, Artificial Sequence
  ENSG00000112062_38 (sequence is synthesized)
tgtgcctgcttgcatgcacaagtgtgttttattctctatctgggtacacactaagatcacgggagcctccattagacaatagtatcccagtaaagcaatgagatttgagattctaattca

SEQ ID NO: 187722 - DNA, 120 bp, Artificial Sequence
  ENSG00000112062_39 (sequence is synthesized)
ttccaagagattaatgtaaactttgtgtctctgtcctcaagacctgactttcttctttctcagaagtttcacgtatgctctagagctcttttcactgtttctagtgtttgttctcagagc

SEQ ID NO: 187723 - DNA, 120 bp, Artificial Sequence
  ENSG00000112062_40 (sequence is synthesized)
atgagcttcaccatgtatttagtttaacttaatcactaaaagaataaaatgtacattgtctgcacactgttgccccttcccagaagttattttttattgttttagaatagatactcacat

SEQ ID NO: 187724 - DNA, 120 bp, Artificial Sequence
  ENSG00000112062_41 (sequence is synthesized)
tgttcccaacagagggacctttctacccagtccctagaccccactcagaagaaacagcttcactcctgatacctcagatacacaggaatgtggttataaattttcctcctattgccttgt

SEQ ID NO: 187725 - DNA, 120 bp, Artificial Sequence
  ENSG00000112062_42 (sequence is synthesized)
aattataagttagataacctgagacagagtttggaactagtgctttcttgcttctaagcagggacttagacagaagccatgggaatgtgagtctggcttacttttgctatgatttcctgc

SEQ ID NO: 187726 - DNA, 120 bp, Artificial Sequence
  ENSG00000112062_43 (sequence is synthesized)
tcttggtcattttcttgggccagaggcatgagagaagccatgaaagcccagcttttctttttccctcgatctgctgccaggcagttgaacaaaagaaaaaaagagctatggagccaagct

SEQ ID NO: 187727 - DNA, 120 bp, Artificial Sequence
  ENSG00000112062_44 (sequence is synthesized)
ccagttatgccttcctggattctcctcccaacatttatgactgaaggggccctttgcctagttgggaagatggctgggtagcttgaggcaagcataagcaggtgagttggaaccgttcat

SEQ ID NO: 187728 - DNA, 120 bp, Artificial Sequence
  ENSG00000112062_45 (sequence is synthesized)
catcttcctgacaaaataaagaataccgtcatctggtatgtatccggtacatttcttgaaaggatcccaaagcccagtgtatttctgaacctccactctgaatttgtttcatttacttat

SEQ ID NO: 187729 - DNA, 120 bp, Artificial Sequence
  ENSG00000112062_46 (sequence is synthesized)
ttaagataaagaagcaaaagcccagaagggcagtgacttttccatgtcatgcactgaatcacgtggcagagctgagtatagatcccagatgttctgataacatgatccaaactataatcc

SEQ ID NO: 187730 - DNA, 120 bp, Artificial Sequence
  ENSG00000112062_47 (sequence is synthesized)
catgtgattacacactattttgaaagtcattgtcagtgttaccacaatgtcaacctaaagaggtatttttttctcctttatgatatgtagaagctgaattagagtgaatcaaagatatca

SEQ ID NO: 187731 - DNA, 120 bp, Artificial Sequence
  ENSG00000112062_48 (sequence is synthesized)
gatgatgcttagaaagagcagtactttttttttaatgtttttgcttagaaacactgtcttacagtaagaggacctaagggcagagggaggagctcaattaataaatagtgctaatgagac

SEQ ID NO: 187732 - DNA, 120 bp, Artificial Sequence
  ENSG00000112062_49 (sequence is synthesized)
caagcaaattcatttccttcctgagagtgtctcctagcagccctttcttagtcttctcttccatcccaaccatctgccctatagatacgtgctattagtcatttggaattggattaggaa

SEQ ID NO: 187733 - DNA, 120 bp, Artificial Sequence
  ENSG00000112062_50 (sequence is synthesized)
ttcaaaccaaagtctaggtaaaatagtcaatagtatttatctgtcattaatccatcacttatttttaagaaagaaacaatgagtgcacagcctaataatggaggtctctctgtgaaatga

SEQ ID NO: 187734 - DNA, 120 bp, Artificial Sequence
  ENSG00000112062_51 (sequence is synthesized)
ggcacattatacatttcaacagctctactgaaattgagtaccagaatacagaacttaactcaaataatattatattgagtataagaataagaaaggtttttttttttggtttgtttccta

SEQ ID NO: 187735 - DNA, 120 bp, Artificial Sequence
  ENSG00000112062_52 (sequence is synthesized)
cataattggggtgagtggataaaagtagtttaaacatcctaaggggtagacaagattaatttgatgttcgtgacacggcccaagtacctgtttatcttaaaagcgcatgatgtatgggaa

SEQ ID NO: 187736 - DNA, 120 bp, Artificial Sequence
  ENSG00000112062_53 (sequence is synthesized)
gtttgctggctcttggaaccgcgaccactggagccttagcgggcgcagcagctggaacgggagtactgcgacgcagcccggagtcggccttgtaggggcgaaggagctgaacaagacaat

SEQ ID NO: 187737 - DNA, 120 bp, Artificial Sequence
  ENSG00000112077_0 (sequence is synthesized)
gcagtcctttgttcttatcaacatctcacagcctgtgaagctctcagtgtgcctctgtcctttgccacaaacatgaggttcacattccctctcatggctatagtcctggaaattgccatg

SEQ ID NO: 187738 - DNA, 120 bp, Artificial Sequence
  ENSG00000112077_1 (sequence is synthesized)
attgttttatttggattatttgttgagtatgaaacggaccagactgttctcgagcagctcaacatcaccaagccaacagacatgggcatattctttgagttatatcctctgttccaagat

SEQ ID NO: 187739 - DNA, 120 bp, Artificial Sequence
  ENSG00000112077_2 (sequence is synthesized)
gtacatgttatgatatttgttgggtttggcttcctcatgaccttcctgaagaaatatggcttcagcagtgtgggtatcaacctactcgttgctgctttgggcctccagtggggcactatt

SEQ ID NO: 187740 - DNA, 120 bp, Artificial Sequence
  ENSG00000112077_3 (sequence is synthesized)
gtacagggaatcctgcaaagccagggacagaaatttaacattggaatcaaaaacatgataaatgcagacttcagtgcagccacagttctgatatcttttggagctgtcctgggaaaaacg

SEQ ID NO: 187741 - DNA, 120 bp, Artificial Sequence
  ENSG00000112077_4 (sequence is synthesized)
agccccacccaaatgctgatcatgacaattttagaaattgttttctttgcccacaatgaatacctggttagtgaaatatttaaggcctctgacattggagcatcaatgacgatccatgcc

SEQ ID NO: 187742 - DNA, 120 bp, Artificial Sequence
  ENSG00000112077_5 (sequence is synthesized)
tttggggcctactttggcttggctgtagcaggcatcttgtatcgatctggactgagaaaggggcatgaaaatgaagagtccgcatactactcagacttgtttgcaatgattgggactctc

SEQ ID NO: 187743 - DNA, 120 bp, Artificial Sequence
  ENSG00000112077_6 (sequence is synthesized)
tttctgtggatgttttggcccagctttaactcggccattgctgaacctggagacaaacagtgcagggccattgtaaacacgtacttctctctcgctgcctgtgtgctcacagcctttgcc

SEQ ID NO: 187744 - DNA, 120 bp, Artificial Sequence
  ENSG00000112077_7 (sequence is synthesized)
ttctccagcctagtggagcaccgaggcaagctcaacatggttcacattcagaatgccacccttgctggaggagttgctgtgggcacttgtgcggatatggcaattcacccatttggttct

SEQ ID NO: 187745 - DNA, 120 bp, Artificial Sequence
  ENSG00000112077_8 (sequence is synthesized)
ttggatacaagttcctgactccactttttactactaaactgaggatccatgatacatgtggggtccataacctccacggcttacctggtgtagtgggaggccttgcaggcattgtggcag

SEQ ID NO: 187746 - DNA, 120 bp, Artificial Sequence
  ENSG00000112077_9 (sequence is synthesized)
tagcaatgggcgcctccaacacgtctatggccatgcaggcagctgcactgggttcctctatcggaacagcagttgttggaggtctgatgacaggtttaattctaaagttgcctctctggg

SEQ ID NO: 187747 - DNA, 120 bp, Artificial Sequence
  ENSG00000112077_10 (sequence is synthesized)
gacagccatctgaccagaactgctatgatgattctgtttattggaaggtccctaagacgagataacttgacaatcagttccatggacatggtgaccacagccagctggaacctgaagtct

SEQ ID NO: 187748 - DNA, 120 bp, Artificial Sequence
  ENSG00000112077_11 (sequence is synthesized)
aaacaccattcctgctctccagcttcctttcccattatccagaatcaagtccaaataaacaaaaagggagtaaccaaagagagtatggaccagagtgaatagatcctaagtcccaaatgg

SEQ ID NO: 187749 - DNA, 120 bp, Artificial Sequence
  ENSG00000112077_12 (sequence is synthesized)
ccagtgtaaaaatgtccttatgtctgatgctgtctcttgctcttcaatgattaattgaggggatgttactcataaaacagataatcaaatagatcttctccaggattcccaaaaagcttt

SEQ ID NO: 187750 - DNA, 120 bp, Artificial Sequence
  ENSG00000112077_13 (sequence is synthesized)
tggcagtgagtaaatacagagtaaacatgtcagtttcttaatgtagacactatgtcttcaatcccaaaaattataaaactgaaacccatgaagcaagaatagatgtgagaaatctatgta

SEQ ID NO: 187751 - DNA, 120 bp, Artificial Sequence
  ENSG00000112077_14 (sequence is synthesized)
aaaaaataattaaagaaatgcatgtgtgtaaagtagtaatatgatgattttaggtagtgctttttattttaaaaatagtctagttagtaatgttgtatccttgcatgaatattattctta

SEQ ID NO: 187752 - DNA, 120 bp, Artificial Sequence
  ENSG00000112077_15 (sequence is synthesized)
attccttttgcatgttgactatttgcaacgagctcaaatgctatctgatcaaagtctattttgcataaaatgtccaataattaaatattgttataaaataaaacatcagtctttgactct

SEQ ID NO: 187753 - DNA, 64 bp, Artificial Sequence
  ENSG00000112077_16 (sequence is synthesized)
gacatggtagccagaggtggaagttgcagttagcagagatcaagccactgcactccagcctggg

SEQ ID NO: 187754 - DNA, 120 bp, Artificial Sequence
  ENSG00000112077_17 (sequence is synthesized)
gaattgtcatgaaaatagttttaacttctcagactccctgaaagtcagtctgcaggacacccagatatctgtggatcacagtttgggaaccactgaagatagaggtgaactggcaaagga

SEQ ID NO: 187755 - DNA, 120 bp, Artificial Sequence
  ENSG00000112078_0 (sequence is synthesized)
gccgctgcggcacagccggtcccggctgcggcttctggctgcgcggcctgcgcgcgcctcccgggcggattccagccccgagcgggacagcgcggcggggagcgacgagatttctctctg

SEQ ID NO: 187756 - DNA, 120 bp, Artificial Sequence
  ENSG00000112078_1 (sequence is synthesized)
tctgatcaaacggacagttcaggactcagaatctaaggatgaatgttcaccgtggcagtgacagtgacaggttattgcggcaggaggccagctgcttagtggatgatactttagctgtag

SEQ ID NO: 187757 - DNA, 120 bp, Artificial Sequence
  ENSG00000112078_2 (sequence is synthesized)
cccaagaaaaagaagcaaacagcctggcttcatctggtcctcataatcttacttatcctctaggtcccaggaatgaagacctctcacttgactatgcctctcagccagcaaatcttcagt

SEQ ID NO: 187758 - DNA, 120 bp, Artificial Sequence
  ENSG00000112078_3 (sequence is synthesized)
tccctcacataatgccccttgctgaagacatcaaaggttcttgcttccaaagtgggaataaacggaaccatgaaccttttattgctccagaaagatttggaaacagtagtgtgggctttg

SEQ ID NO: 187759 - DNA, 120 bp, Artificial Sequence
  ENSG00000112078_4 (sequence is synthesized)
gcagtaattcccattcccaagcaccagagaaagtgacgcttcttgtagatggcacacgttttgttgtgaatccacagattttcactgctcatccggataccatgctgggaaggatgtttg

SEQ ID NO: 187760 - DNA, 120 bp, Artificial Sequence
  ENSG00000112078_5 (sequence is synthesized)
gaccaggaagagagtacaacttcactcggcccaatgagaagggagagtatgagattgctgaaggcatcagtgcaactgtatttcgcacagtgctggattattacaaaaccggtatcatca

SEQ ID NO: 187761 - DNA, 120 bp, Artificial Sequence
  ENSG00000112078_6 (sequence is synthesized)
attgtcctgatggcatctctatcccagatcttagagatacttgtgattatctctgcattaattttgacttcaacactatccgatgtcaagatctgagtgctttactccatgaactgtcta

SEQ ID NO: 187762 - DNA, 120 bp, Artificial Sequence
  ENSG00000112078_7 (sequence is synthesized)
atgacggtgctcataagcagtttgatcactacctcgaagagctcatcttgcccatcatggtgggctgtgccaagaaaggagaacgagagtgccacattgttgtgctgacggatgaggatt

SEQ ID NO: 187763 - DNA, 120 bp, Artificial Sequence
  ENSG00000112078_8 (sequence is synthesized)
ctgtggactgggatgaagaccaccctccaccaatgggggaggaatattcccaaattctttatagctccaagctctacagattcttcaaatatattgagaatagggatgttgcaaaaacag

SEQ ID NO: 187764 - DNA, 120 bp, Artificial Sequence
  ENSG00000112078_9 (sequence is synthesized)
tgttaaaggaacggggcctaaaaaacattcgcattggaattgaaggttaccctacctgtaaagaaaaaattaagagaaggcctggcggccggtctgaagtcatctataattatgtacaac

SEQ ID NO: 187765 - DNA, 120 bp, Artificial Sequence
  ENSG00000112078_10 (sequence is synthesized)
gccccttcatccagatgtcatgggaaaaggaagaagggaagagtcgccatgtggatttccagtgtgttcgaagcaaatccctcacgaatctggtagctgctggagatgatgtcttggagg

SEQ ID NO: 187766 - DNA, 120 bp, Artificial Sequence
  ENSG00000112078_11 (sequence is synthesized)
accaggagatattaatgcatcacccaccccaagtggatgaacttgaccggctaaatgccccactttctcagatggcttctaacgactttcaggattagggccagctgtgggtctactcct

SEQ ID NO: 187767 - DNA, 120 bp, Artificial Sequence
  ENSG00000112078_12 (sequence is synthesized)
tgttggagcccatctcacctgggatgcctgcagccagccctccctcgtgatttgtctcaccttgagtaggagacatgcttctcccctaaccttttcctttctgccataattaacatatgt

SEQ ID NO: 187768 - DNA, 120 bp, Artificial Sequence
  ENSG00000112078_13 (sequence is synthesized)
ccttttcagtaagtccatgcctctggcaggggatgaagaagtactcactggtaattagctaccatctttgcagcagccctggtaacttgaaaaatttgggtctggtgctgttcattgagt

SEQ ID NO: 187769 - DNA, 120 bp, Artificial Sequence
  ENSG00000112078_14 (sequence is synthesized)
ctttgtgtaactgcaaaagcaggaaaggaagtcaagactcctgttgcctcgtgcttagcaaagcagtccttatcctttatactctgttcttgggttttgtttttgtcttgttttatacca

SEQ ID NO: 187770 - DNA, 120 bp, Artificial Sequence
  ENSG00000112078_15 (sequence is synthesized)
ggcaaattgcttagtagcaaagggaccaaactgaaaaggtgacaatctctaacttctaaaagcagacaccaatcggatgctcattagaggttaatgaagatgccattcttggtggcctct

SEQ ID NO: 187771 - DNA, 120 bp, Artificial Sequence
  ENSG00000112078_16 (sequence is synthesized)
gcacccaaattgcatctggaaagaactagggtctcattcagaatgtccaaaaggaaattcttaagagcttaaattcagatttgtgtctcattaatgcagtgaacaattcaaaaccacaca

SEQ ID NO: 187772 - DNA, 120 bp, Artificial Sequence
  ENSG00000112078_17 (sequence is synthesized)
gattccttggcaggaaggataatggaataacagtgttgatgagacctttttagcttcaaggtttcggagtctaaacaaatggatgattcatttggaatgaaactcacaatgcaagtagaa

SEQ ID NO: 187773 - DNA, 120 bp, Artificial Sequence
  ENSG00000112078_18 (sequence is synthesized)
ggacctctccaaatcaggccagttgggttatcctggcttggaatctggtgtgaaaccataggtcttaacactctggagcagcacattgctgtggatatgtccaggagaccttagatatgg

SEQ ID NO: 187774 - DNA, 120 bp, Artificial Sequence
  ENSG00000112078_19 (sequence is synthesized)
cttaaaggctttcaagatgaggacagaaattgcttacaattgctcagtttctcaacagaaagactcataagagtgccagcatggggtacatggagtgaagctgggtgggaagcatcatct

SEQ ID NO: 187775 - DNA, 120 bp, Artificial Sequence
  ENSG00000112078_20 (sequence is synthesized)
gcacagtccctgtcctagtgcaggacttttctctgtatgttttcataccatgggatttttggatatcagtgtattttggttcttgaaatagcctaatagctgctcacacattgggtagga

SEQ ID NO: 187776 - DNA, 120 bp, Artificial Sequence
  ENSG00000112078_21 (sequence is synthesized)
atattataccaatgtcatccccaaaggaagggtgagctgaatggaaattaagcccagtcattttatttgatctattagctctgttatcagtgcatgatcacccagatcaccctcctcagc

SEQ ID NO: 187777 - DNA, 120 bp, Artificial Sequence
  ENSG00000112078_22 (sequence is synthesized)
agtttgtggtagaagctgactggaatacaggttgagtatctcttatccaaaatgctagggaccagaaaggtttcagattttttcagattttggaatacttaacagttgagcaccccaaat

SEQ ID NO: 187778 - DNA, 120 bp, Artificial Sequence
  ENSG00000112078_23 (sequence is synthesized)
ctgaaaggcttctgaacgtcatgtcagcactcaaaaaagtggattttggagcacttcaaatttcggatttttggatttgggatgctcatcctgtgtaggagaggctactcgattccattt

SEQ ID NO: 187779 - DNA, 120 bp, Artificial Sequence
  ENSG00000112078_24 (sequence is synthesized)
aatgactgtcctagtcataatcatccaaagataaaagccaggtagatgttgaaagctctttccagggctgaaaaagtgttcttacgttctctgcatgtgactagcatcactgtggaaatt

SEQ ID NO: 187780 - DNA, 120 bp, Artificial Sequence
  ENSG00000112078_25 (sequence is synthesized)
aatgctctgttcttcactagaatgtagtaagtggttaaactgagctatcccccacctgatgactattggcatccatttgcaaggccaatggcctggattaagggttaggattatttgtag

SEQ ID NO: 187781 - DNA, 120 bp, Artificial Sequence
  ENSG00000112078_26 (sequence is synthesized)
ctagaaggtaattttatttctgtgaaactaattggctcatatttgaggttaggtgtggccttgaccttaccagtacatttatacccactaccagttgactagcccagataattgttaaat

SEQ ID NO: 187782 - DNA, 120 bp, Artificial Sequence
  ENSG00000112078_27 (sequence is synthesized)
ggtgcttcttttctgcttctcagtagacttccatgccattacaaaggaaatttgaattacctagtgtttgtatattccatgataactatgtataacttctgttacacagcttatgtattg

SEQ ID NO: 187783 - DNA, 120 bp, Artificial Sequence
  ENSG00000112078_28 (sequence is synthesized)
ttaacatttaagtgtaaaccatgccacagctaacacttaaaaatgaaaactaattagttcttgcttagggaaaatgccaggtatgaagtatggcatatacttgacactgtcctgtgtaac

SEQ ID NO: 187784 - DNA, 120 bp, Artificial Sequence
  ENSG00000112078_29 (sequence is synthesized)
cctttactttgctcaggctttcaagattgagtcttttttcccccaaattaggttaacatgcatttgaccccaacctgtggggtttgagtaagctggaaatctgtgacggtaggctttcta

SEQ ID NO: 187785 - DNA, 120 bp, Artificial Sequence
  ENSG00000112078_30 (sequence is synthesized)
gtgtcacgaggtggtggtgactgaaggaaaagctgggatcacaggttccttctgatggagaggaaggtttatttctatgcccctcccaccaccctccacctagagctcacccaagcctgc

SEQ ID NO: 187786 - DNA, 120 bp, Artificial Sequence
  ENSG00000112078_31 (sequence is synthesized)
tccagtcccaggggcaggccattctgcaaaagcaggacctcacagaaacaagggctgggttgaggtcacccccttcagagttggttcctggccagatgggtaagaggcatttgtaatttt

SEQ ID NO: 187787 - DNA, 120 bp, Artificial Sequence
  ENSG00000112078_32 (sequence is synthesized)
aaaaatgtgaaacttgggtttggtgttttcttctaagtgcctaaataagcaagccaggctgttgatattttagccagagaaatcggcaagccaagattaacccgaatctgaagtttagaa

SEQ ID NO: 187788 - DNA, 120 bp, Artificial Sequence
  ENSG00000112078_33 (sequence is synthesized)
tcttgagtttgcatctgcatcatatcatgctgttttgatgaggaaacatttgccactgaggagttggagggagggcaagacgacagtgttaagtcagatcatttaatggtttcccctaag

SEQ ID NO: 187789 - DNA, 120 bp, Artificial Sequence
  ENSG00000112078_34 (sequence is synthesized)
ccctggaaaaatatttgaaagaatggcagcaaaaaggttaagaaagcaagccagatttactgcacaatatgcagtacccagtactactttaaatcccaagagaacagtgtgatgtctaat

SEQ ID NO: 187790 - DNA, 120 bp, Artificial Sequence
  ENSG00000112078_35 (sequence is synthesized)
atatacaggtctatgaaaatactgtggaataagcccaggaaggttagatgtgtttgcaaataagttgcccaaagggtccccctctaagtaaaacaaatattcagaccacaggctttaatg

SEQ ID NO: 187791 - DNA, 120 bp, Artificial Sequence
  ENSG00000112078_36 (sequence is synthesized)
acaaatattcagaccacaggctttaatgtaaactgtcaaaaagtgggatgtggaggatttttgttaagtgtcaatcgaagttaaaaagcaagggtttttggccaggcgtggtggctcacg

SEQ ID NO: 187792 - DNA, 120 bp, Artificial Sequence
  ENSG00000112078_37 (sequence is synthesized)
acgtaaaaaattaaaaaaatagccaggcatggacatggtagtgcatacctgtggtcccagccactcaagaggctgagacaggatgattgcttgagcccaggaggatgaggctgcagtgag

SEQ ID NO: 187793 - DNA, 120 bp, Artificial Sequence
  ENSG00000112078_38 (sequence is synthesized)
ccatgatgacgctactgcactccagcctggatgacagggcaagaccctgtctcaatattttaagtcaagggtttgtagtaatgtattcagtgccacttcttgccatcactttgcaattat

SEQ ID NO: 187794 - DNA, 120 bp, Artificial Sequence
  ENSG00000112078_39 (sequence is synthesized)
tgaaatgggaatactgagctcagaaagcaaatatgatgctttcatgggagatggagccacatttgtgttctgggtgggatcactagtgcaggagaacattacattttcttctgaaggcaa

SEQ ID NO: 187795 - DNA, 120 bp, Artificial Sequence
  ENSG00000112078_40 (sequence is synthesized)
aatgcttgtaggttttgcctctactttgtatttacttttaaaattgcacttgttcacctaccagtgtttacgaaatcctgtatttgggatgctttttctataataaaatattataatttg

SEQ ID NO: 187796 - DNA, 120 bp, Artificial Sequence
  ENSG00000112078_41 (sequence is synthesized)
ctggctgcgcggcctgcgcgcgcctcccgggcggattccagccccgagcgggacagcgcggcggggagcgacgagatgaggtgtagtggcaagatttcagctcactgcagctttgacctc

SEQ ID NO: 187797 - DNA, 120 bp, Artificial Sequence
  ENSG00000112078_42 (sequence is synthesized)
cgggcttaagcagtcctcccacgtcagccttgcccaagtagttgggactacagatgaagtctcactctgttgcccaagctgcagtgcaatgtcgctatcttggcttactgcaacctccgc

SEQ ID NO: 187798 - DNA, 120 bp, Artificial Sequence
  ENSG00000112078_43 (sequence is synthesized)
taacttttccgtctgcaacctttaataattgagagggtatgcgcaactcagaaaagtgcgcccgctgaggttgggtgcagagtggactggaggaaaggcgacacccatttacggtgcggc

SEQ ID NO: 187799 - DNA, 120 bp, Artificial Sequence
  ENSG00000112078_44 (sequence is synthesized)
gctgcggcacagccggtcccggctgcggcttctggctgcgcggcctgcgcgcgcctcccgggcggattccagccccgagcgggacagcgcggcggggagcgacgagtgcaaggaatatgt

SEQ ID NO: 187800 - DNA, 120 bp, Artificial Sequence
  ENSG00000112078_45 (sequence is synthesized)
cggtcccggctgcggcttctggctgcgcggcctgcgcgcgcctcccgggcggattccagccccgagcgggacagcgcggcggggagcgacgagcctcgggtggttcatcccgccggagag

SEQ ID NO: 187801 - DNA, 120 bp, Artificial Sequence
  ENSG00000112078_46 (sequence is synthesized)
tgcagacgcggtttttctggcaattaattggctccattaaaaattaggtagttggtggggacttcctcctgaactctggagccgagcgcattttgctcggtcttttcagccctgtttccg

SEQ ID NO: 187802 - DNA, 120 bp, Artificial Sequence
  ENSG00000112078_47 (sequence is synthesized)
cgtcttccttccctgccacccgcaaattgccagctttcatccgtggctctgagtgcaaaagagctggggaaagccttaaccagcaattttcttttaaataaaactttgctttttatagca

SEQ ID NO: 187803 - DNA, 120 bp, Artificial Sequence
  ENSG00000112079_0 (sequence is synthesized)
atgcgtagtctcggccccgggctgccgcgccagcccgtctccgcggcgggggaccgggctgccttggcccctcagcgctcgcgtcttttccggcagttggaacgcttcctgttgtcctca

SEQ ID NO: 187804 - DNA, 120 bp, Artificial Sequence
  ENSG00000112079_1 (sequence is synthesized)
cccgtaaccgcctgttgccccctgtctcagagtccctcacgcgtcccctcccgtctttggctcgttggctgccgccgccggggcttcgccagccttcaagtcgagactactggccgaagg

SEQ ID NO: 187805 - DNA, 120 bp, Artificial Sequence
  ENSG00000112079_2 (sequence is synthesized)
ggcgtctgcggctctccgccgtccccagccctgcctctccctgggctctgcagccatggcaatgacaggctcaacaccttgctcatccatgagtaaccacacaaaggaaagggtgacaat

SEQ ID NO: 187806 - DNA, 120 bp, Artificial Sequence
  ENSG00000112079_3 (sequence is synthesized)
gaccaaagtgacactggagaatttttatagcaaccttatcgctcaacatgaagaacgagaaatgagacaaaagaagttagaaaaggtgatggaagaagaaggcctaaaagatgaggagaa

SEQ ID NO: 187807 - DNA, 120 bp, Artificial Sequence
  ENSG00000112079_4 (sequence is synthesized)
acgactccggagatcagcacatgctcggaaggaaacagagtttcttcgtttgaagagaacaagacttggattggaagattttgagtccttaaaagtaataggcagaggagcatttggtga

SEQ ID NO: 187808 - DNA, 120 bp, Artificial Sequence
  ENSG00000112079_5 (sequence is synthesized)
ggtacggcttgttcagaagaaagatacgggacatgtgtatgcaatgaaaatactccgtaaagcagatatgcttgaaaaagagcaggttggccacattcgtgcggagcgtgacattctagt

SEQ ID NO: 187809 - DNA, 120 bp, Artificial Sequence
  ENSG00000112079_6 (sequence is synthesized)
ggaggcagacagtttgtgggttgtgaaaatgttctatagttttcaggataagctaaacctctacctaatcatggagttcctgcctggaggggacatgatgaccttgttgatgaaaaaaga

SEQ ID NO: 187810 - DNA, 120 bp, Artificial Sequence
  ENSG00000112079_7 (sequence is synthesized)
cactctgacagaagaggagactcagttttatatagcagaaacagtattagccatagactctattcaccaacttggattcatccacagagacatcaaaccagacaaccttcttttggacag

SEQ ID NO: 187811 - DNA, 120 bp, Artificial Sequence
  ENSG00000112079_8 (sequence is synthesized)
caagggccatgtgaaactttctgactttggtctttgcacaggactgaaaaaagcacataggacagaattttataggaatctgaaccacagcctccccagtgatttcactttccagaacat

SEQ ID NO: 187812 - DNA, 120 bp, Artificial Sequence
  ENSG00000112079_9 (sequence is synthesized)
gaattccaaaaggaaagcagaaacctggaaaagaaatagacgtcagctagccttctccacagtaggcactcctgactacattgctcctgaggtgttcatgcagaccgggtacaacaagct

SEQ ID NO: 187813 - DNA, 120 bp, Artificial Sequence
  ENSG00000112079_10 (sequence is synthesized)
ctgtgattggtggtcgcttggggtgatcatgtatgagatgctcatcggctacccacctttctgttctgagacccctcaagagacatataagaaggtgatgaactggaaagaaactttgac

SEQ ID NO: 187814 - DNA, 120 bp, Artificial Sequence
  ENSG00000112079_11 (sequence is synthesized)
ttttcctccagaagttcccatctctgagaaagccaaggatctaattttgaggttctgctgtgaatgggaacatagaattggagctcctggagttgaggaaataaaaagtaactctttttt

SEQ ID NO: 187815 - DNA, 120 bp, Artificial Sequence
  ENSG00000112079_12 (sequence is synthesized)
tgaaggcgttgactgggaacatatcagagagagacctgctgcaatatctattgaaatcaaaagcattgatgatacctcaaacttcgatgagtttccagaatctgatattcttaagccaac

SEQ ID NO: 187816 - DNA, 120 bp, Artificial Sequence
  ENSG00000112079_13 (sequence is synthesized)
agtggccacaagtaatcatcctgagactgactacaagaacaaagactgggtcttcatcaattacacgtacaagcgctttgagggcctgactgcaaggggggcaataccttcctacatgaa

SEQ ID NO: 187817 - DNA, 120 bp, Artificial Sequence
  ENSG00000112079_14 (sequence is synthesized)
tggaacccaccaatatgtcatagtaaagtctcctgaaatgtggtagtaagaggattttcttccataatgcatctgaaaaactgtaaacaaagacaaccatttctactacgtcggccataa

SEQ ID NO: 187818 - DNA, 120 bp, Artificial Sequence
  ENSG00000112079_15 (sequence is synthesized)
acagctatcctgctttggaagagaagcatcatgagccaatttgataggtgttttaaaaataacttgagttttcctaagttcatcagaatgaaggggaaaaacagccatcatccaacatta

SEQ ID NO: 187819 - DNA, 120 bp, Artificial Sequence
  ENSG00000112079_16 (sequence is synthesized)
ttgagattgtcgtgtatagtcatcgaatatcagccagttcctgtaattttgtgacacgctctctgccaagcccaccaagtatttcctttatagctaaaagttccatagtactaaggaaat

SEQ ID NO: 187820 - DNA, 120 bp, Artificial Sequence
  ENSG00000112079_17 (sequence is synthesized)
aaagcaataaagacagtctcagcagccaggattctggctgaaggaaatgatccgccaccctgagggtggtgatggtagtttctacccatacctcagcctcaggcgagtggcttatagcct

SEQ ID NO: 187821 - DNA, 120 bp, Artificial Sequence
  ENSG00000112079_18 (sequence is synthesized)
ccattcatggtgcactttatttatggtactaagataaagactgtcaatccattgatttatctcctcctgtcccccatctaaaatacccatgctgcttttctgagtgttgatgggggttac

SEQ ID NO: 187822 - DNA, 120 bp, Artificial Sequence
  ENSG00000112079_19 (sequence is synthesized)
cagcttgatccactgttgctcttagaaggcccagaaagtctttgggcattgccaagaaatcccggattatgtggaaaaccctcactttctcttcacggctgtaccagaaaatccctaaga

SEQ ID NO: 187823 - DNA, 120 bp, Artificial Sequence
  ENSG00000112079_20 (sequence is synthesized)
cagatcttgccgtggactagcaatacctgcaagtgctgccaatgggaactcaatttattcctgggaacctaacgaggagagcccaggcctaggcaggaggcctggaaccctcttggctaa

SEQ ID NO: 187824 - DNA, 120 bp, Artificial Sequence
  ENSG00000112079_21 (sequence is synthesized)
ggtgctgttcctgttcctgcaaggtctccagaacccctttggaaatggtgaaggaaccagcccaatagaagtacagagccagctgacaagtccttgtaaagctcactcctcagtccttgg

SEQ ID NO: 187825 - DNA, 120 bp, Artificial Sequence
  ENSG00000112079_22 (sequence is synthesized)
cacagccatgttttgtcttctctcttggtatttcttctctcccaactttagccattttgccttggaatcatgattacaattttttcctttgcagatgccttcctgggggatactcctccc

SEQ ID NO: 187826 - DNA, 120 bp, Artificial Sequence
  ENSG00000112079_23 (sequence is synthesized)
caccctaaagggtcgcctgcaacttaggcggattgggtctctctgctgtggcgttctctcttgagagaccctctgaattttagcacaaagtgccttctgtttcacagctgccaccacctt

SEQ ID NO: 187827 - DNA, 120 bp, Artificial Sequence
  ENSG00000112079_24 (sequence is synthesized)
tagaggaatttcgtcagaaaaatgtggaggctccatattaatgcattattttttaaaaagttttgataactcttaaagcatcatttgcacctatgtgggaactttgcctgttgcaaagta

SEQ ID NO: 187828 - DNA, 120 bp, Artificial Sequence
  ENSG00000112079_25 (sequence is synthesized)
ttgtggccgagctgcagctgggagcctgctttctgccagtcttgaggttctgaagatcagctttgaaaggaaagtatgtcctagcttagccattcagaagagaaaaatggaatatcagag

SEQ ID NO: 187829 - DNA, 120 bp, Artificial Sequence
  ENSG00000112079_26 (sequence is synthesized)
ttacagttgtcagtgaaactactttggattttaacctcttagaggaagaaaaaaggttagggaagtgtcaactctggatgaaggtgatgtgtttgcctctcagtctttcattcatagcct

SEQ ID NO: 187830 - DNA, 120 bp, Artificial Sequence
  ENSG00000112079_27 (sequence is synthesized)
gctagtgaaaaggaagtaaatgagattcttttgtgtgactttgtagtctctttgtattaccaaatagttggggtgttgactcctgtgtgttttgcaagaatgtgtggtaagcctgggtaa

SEQ ID NO: 187831 - DNA, 120 bp, Artificial Sequence
  ENSG00000112079_28 (sequence is synthesized)
agagaaggaactgcggtgttgggagagtctttgtgttggggagtggcaggggatgatttgtttcaggggaaaatgcccacattttaacttttaaacttctgaataaactgtgtaaaaaca

SEQ ID NO: 187832 - DNA, 120 bp, Artificial Sequence
  ENSG00000112081_0 (sequence is synthesized)
ccgccatttcgtggacgccgggtgagtgagagagttggttggtgttgggccggaggaaagcgggaagactcatcggagcgtgtggatttgagccgccgcattttttaaccctagatctcg

SEQ ID NO: 187833 - DNA, 120 bp, Artificial Sequence
  ENSG00000112081_1 (sequence is synthesized)
aaatgcatcgtgattcctgtccattggactgtaaggtttatgtaggcaatcttggaaacaatggcaacaagacggaattggaacgggcttttggctactatggaccactccgaagtgtgt

SEQ ID NO: 187834 - DNA, 120 bp, Artificial Sequence
  ENSG00000112081_2 (sequence is synthesized)
gggttgctagaaacccacccggctttgcttttgttgaatttgaagatccccgagatgcagctgatgcagtccgagagctagatggaagaacactatgtggctgccgtgtaagagtggaac

SEQ ID NO: 187835 - DNA, 120 bp, Artificial Sequence
  ENSG00000112081_3 (sequence is synthesized)
tgtcgaatggtgaaaaaagaagtagaaatcgtggcccacctccctcttggggtcgtcgccctcgagatgattatcgtaggaggagtcctccacctcgtcgcagatctccaagaaggagaa

SEQ ID NO: 187836 - DNA, 120 bp, Artificial Sequence
  ENSG00000112081_4 (sequence is synthesized)
gcttctctcgcagccggagcaggtccctttctagagataggagaagagagagatcgctgtctcgggagagaaatcacaagccgtcccgatccttctctaggtctcgtagtcgatctaggt

SEQ ID NO: 187837 - DNA, 120 bp, Artificial Sequence
  ENSG00000112081_5 (sequence is synthesized)
caaatgaaaggaaatagaagacagtttgcaagagaagtggtgtacaggaaattacttcatttgacaggagtatgtacagaaaattcaagttttgtttgagacttcataagcttggtgcat

SEQ ID NO: 187838 - DNA, 120 bp, Artificial Sequence
  ENSG00000112081_6 (sequence is synthesized)
ttttaagatgttttagctgttcaaatctgtttgtctcttgaaacagtgacacaaaggtgtaattctctatggtttgaaatggatcatacgaggcatgtaataccaagaattgttacttta

SEQ ID NO: 187839 - DNA, 120 bp, Artificial Sequence
  ENSG00000112081_7 (sequence is synthesized)
caatgttcccttaagcaaaattgaatttgctttgaacttttagttatgcacagactgataataaacctctaaacctgcccagcggaagtgtgtttttttttaaatttaaatacagaaaca

SEQ ID NO: 187840 - DNA, 120 bp, Artificial Sequence
  ENSG00000112081_8 (sequence is synthesized)
actggcaaaaattgaactaagatttacttttttttccatagctgggatataggctgcagctatagttgaacaagcagtctttaaaaactgctgtgaaacacaggccatcagggaaaacga

SEQ ID NO: 187841 - DNA, 120 bp, Artificial Sequence
  ENSG00000112081_9 (sequence is synthesized)
aatgctgcactattaaattagaggtttttgaaaaatccaactctcatcctgggcagaggttgcctagttggtatagaatgttaagtttcaagaaagtttacctttgctttaggtcataag

SEQ ID NO: 187842 - DNA, 120 bp, Artificial Sequence
  ENSG00000112081_10 (sequence is synthesized)
ttccttatttgattgctgtatatggatacatggctgttcgtgacattctttatgtgcaaatttgtgatttcaaaaatgtcctgccagtttaagggtacattgtagagccgaactttgagt

SEQ ID NO: 187843 - DNA, 120 bp, Artificial Sequence
  ENSG00000112081_11 (sequence is synthesized)
tactgtgcaagatttttttttcatgctgtcatttgtaatatgttttgtgagaatccttgggattaaagttttggttacaaattgttctttaacttgaaagcctgtttttccttgcaaact

SEQ ID NO: 187844 - DNA, 120 bp, Artificial Sequence
  ENSG00000112081_12 (sequence is synthesized)
caaatctgtgagcttggtaccaagtccaggtataacattcctattggaagccatacttatattttcttgtaaagtgcttttgaattaataaaatattagcataattgtgtatagtcagtt

SEQ ID NO: 187845 - DNA, 120 bp, Artificial Sequence
  ENSG00000112081_13 (sequence is synthesized)
gaacccactgttaccattgttcttatcccatgggaagcagttggttacacgattcttattttataagaaacagctgagaggcactatggattagtcttctgaagtgaaggaaatatagat

SEQ ID NO: 187846 - DNA, 120 bp, Artificial Sequence
  ENSG00000112081_14 (sequence is synthesized)
gtcacctaagtgatagttaacccattttttttttttttaggcatagaagccagttcagggtccataatatttagtgaccaacattttaaagtatagcagcaacctggttcttaaacacaa

SEQ ID NO: 187847 - DNA, 120 bp, Artificial Sequence
  ENSG00000112081_15 (sequence is synthesized)
agtaagttgcccattaacaaatggcttttatctttagcatgaaaactttccacaggtctaaaaattgcttccattttataatttgaggtgttgcatgggaattctaagctgatccatcat

SEQ ID NO: 187848 - DNA, 120 bp, Artificial Sequence
  ENSG00000112081_16 (sequence is synthesized)
gatgtaaaagttcacaatatggttcaaatgtaacagtgcagaattgaatatggaggcatgcataaccttcctcttagaaaatggcaggtgttgtaatttcaaatttttgtgcaattagat

SEQ ID NO: 187849 - DNA, 120 bp, Artificial Sequence
  ENSG00000112081_17 (sequence is synthesized)
tagtttccttaaatatgctcttaagatagttttggattatgcggtattgactgtcttaaatatgaaagataagtcattgcattaagagttcaagctaaatggatacattaagatacagtt

SEQ ID NO: 187850 - DNA, 120 bp, Artificial Sequence
  ENSG00000112081_18 (sequence is synthesized)
cctaaacaaattatttatttccaccttttacacaaatcttgggagaattggtgtcaggaaggttcagccttaaagttaagcatgttcaagaaagacacttttcagacagcctgtttattt

SEQ ID NO: 187851 - DNA, 120 bp, Artificial Sequence
  ENSG00000112081_19 (sequence is synthesized)
actgagagctctggcattgggcattttgtctttagtattctcacatagcctacaacctgttcctgttaggaacaagccaagatagctaagaagttacggaagccatgcaatatgtcaatt

SEQ ID NO: 187852 - DNA, 120 bp, Artificial Sequence
  ENSG00000112081_20 (sequence is synthesized)
acattgctttttataaatggacaacttatgtgggcatttttgggcagtatatgacttccttgcaggctcttaagttggaagggtttctgtaaaaaggacagttacgggtataatatggct

SEQ ID NO: 187853 - DNA, 120 bp, Artificial Sequence
  ENSG00000112081_21 (sequence is synthesized)
aagagaaataatacagaacctgaaataaaagtaacttcaccagggagttatcctgacttaggtgacatacagtcccagttggcagttactttaaccaggagccctagcataacctcaaga

SEQ ID NO: 187854 - DNA, 120 bp, Artificial Sequence
  ENSG00000112081_22 (sequence is synthesized)
ctcttagaaactttagaacatggaaattgttaaaagctttgaattgcacatttagattgtggctattaggaatttttaaagttgtaattcctaaaataacaggtcacactaaccggtctt

SEQ ID NO: 187855 - DNA, 120 bp, Artificial Sequence
  ENSG00000112081_23 (sequence is synthesized)
gtccatattcagggttgagtgtaaaaatgaaaggaatcacaaaactgaacttagacctgtggtttaaggatcaaggtgttcactagaagtcactgttactaatacttgatgacaatgtaa

SEQ ID NO: 187856 - DNA, 120 bp, Artificial Sequence
  ENSG00000112081_24 (sequence is synthesized)
agaaacattaaggattatatttgattgttttcaaagacactggctggatgtggtggctcacacttgtaattcctagcactttgggaggctagggcgggtgggaggatctcttgaagccag

SEQ ID NO: 187857 - DNA, 120 bp, Artificial Sequence
  ENSG00000112081_25 (sequence is synthesized)
gagttggagaccagtctgcccaacatggcaagattcacatttctattaaaaggaatatttagtttgatctctggttcacagttcattgtgggttgcttctgacctccatgtcttaagcag

SEQ ID NO: 187858 - DNA, 120 bp, Artificial Sequence
  ENSG00000112081_26 (sequence is synthesized)
aaagtagggaagttgtagttttaccaagcacaggtaccctgtgtctaccatttgagtatcttagagatccttacaaacgtgatcccgtcagcgtccatgacactcccaccctgttagact

SEQ ID NO: 187859 - DNA, 120 bp, Artificial Sequence
  ENSG00000112081_27 (sequence is synthesized)
gctgtcagtggctttcacacaaacccatatgtggatggaaaatccaggttattactacattcattttagtacagtgctgcctaattagaaattttgttgaagaggtatttcagaatagat

SEQ ID NO: 187860 - DNA, 120 bp, Artificial Sequence
  ENSG00000112081_28 (sequence is synthesized)
acagccagactccaggctcattgacttagtttttcagggtgacctaaccctgtgtaattttgaggagttctacatgataaatacccttggtgatgtgagaaccactagtttagtattttg

SEQ ID NO: 187861 - DNA, 120 bp, Artificial Sequence
  ENSG00000112081_29 (sequence is synthesized)
tccaagtatgctttttttcagagttctgaatgagatttagttgtcatacctagttggtggtaatttcttagttgtatatttttgtactaccagattgttgccttctggttttccatcttt

SEQ ID NO: 187862 - DNA, 120 bp, Artificial Sequence
  ENSG00000112081_30 (sequence is synthesized)
tcgagaaagatttctagttaaagttactgaagaaaaactgggttggaagtacatttttctctaaataatccagtagtgttgaatttgattttatgtccactctaatttttttcatcctgt

SEQ ID NO: 187863 - DNA, 120 bp, Artificial Sequence
  ENSG00000112081_31 (sequence is synthesized)
ctgttttattagggggattcatcgggtacctgaagataattcagctgtagaccccttaaggttctgagacaaggtcattgaaatttgttttggctgggtgtgatggctcatgcctgtaat

SEQ ID NO: 187864 - DNA, 76 bp, Artificial Sequence
  ENSG00000112081_32 (sequence is synthesized)
ggtgtgatggctcatgcctgtaatcccggtgcattgggaggttgaggcaggtggatcacttgtggtcaggagttgg

SEQ ID NO: 187865 - DNA, 120 bp, Artificial Sequence
  ENSG00000112081_33 (sequence is synthesized)
ttgggaggctgaggcaggagaagtgcttaaacctggtgggtggaggttgccatgagccgagatgtagccacttcactccagcctgagtgaaagcaaaacttcgtctccaaaaaaaaaaaa

SEQ ID NO: 187866 - DNA, 120 bp, Artificial Sequence
  ENSG00000112081_34 (sequence is synthesized)
tcgtctccaaaaaaaaaaaaaaagtttgttttggtaagcctagtataattgattagttttgtccatgcaactttccccttgttggactctgtacttaataatacagtatttagattctca

SEQ ID NO: 187867 - DNA, 120 bp, Artificial Sequence
  ENSG00000112081_35 (sequence is synthesized)
gtgacgttcagcacggggcggtggcgggggctcccggcccatcggagggtttcctagtcttggagtggaagtctttatattcctcattggggcatgagccaggatgggggttacctggga

SEQ ID NO: 187868 - DNA, 120 bp, Artificial Sequence
  ENSG00000112081_36 (sequence is synthesized)
gaccaataaagggggctaaaaaagaagtaatcccagtcatctgttcttcaatcccaaataggagaaaattcagtttttttataattgaaaatggcatcattcttggaccaggcagtattg

SEQ ID NO: 187869 - DNA, 120 bp, Artificial Sequence
  ENSG00000112081_37 (sequence is synthesized)
tctgggtgctaactccacatctcctcagacctccaaaatagtttctataggactaaatttacctcttacaggtgagtggagtccttctaggagacaggagttcaaaatcttgcccctttt

SEQ ID NO: 187870 - DNA, 120 bp, Artificial Sequence
  ENSG00000112081_38 (sequence is synthesized)
gctattttgaaaaacaacagcacactgttgcccatcataataaagagtatttgttagctaatagatggttgtactgatggcttgtttttcattttttttgtgctttttggtccatctatt

SEQ ID NO: 187871 - DNA, 120 bp, Artificial Sequence
  ENSG00000112081_39 (sequence is synthesized)
aataaaaatgaaccccgttacagagtcaccatcatgtctcttctcaccaccctctgaatctgcattagccagtcaactagccctttcagcgtcatgtgaccagcgcgccccattcagctt

SEQ ID NO: 187872 - DNA, 120 bp, Artificial Sequence
  ENSG00000112081_40 (sequence is synthesized)
ggctggtgtcgtttcacatgacccaggctggccagtcgtcaggttgcaccgccctttggttcccgagcatgctgttttctctcagccttctctccaaccttaaccaaatcggcagcagcc

SEQ ID NO: 187873 - DNA, 120 bp, Artificial Sequence
  ENSG00000112081_41 (sequence is synthesized)
acctcgaccgcccacacattcctggccaatcagctcagctgtttatttaccaaatgtcttcacaacaactacagcagcagccttcggctaacaaaaaagcaggaaaaatccacaacaccc

SEQ ID NO: 187874 - DNA, 120 bp, Artificial Sequence
  ENSG00000112081_42 (sequence is synthesized)
ccttcgccaaccaactaaatccaacgcaacatctggcaaaaccttttcagcaaattcttcctggccgtcagtccggcagcctcacctcaccatttctagcttgttgaaacccaaaactag

SEQ ID NO: 187875 - DNA, 120 bp, Artificial Sequence
  ENSG00000112081_43 (sequence is synthesized)
taagtttttcctgcttatacagtttactgctggttaaaataaggagtaagcggcttaaagtaattcttttttctggatcaaaggctggctgtgcataattgaatggtaacgtacatatat

SEQ ID NO: 187876 - DNA, 120 bp, Artificial Sequence
  ENSG00000112081_44 (sequence is synthesized)
attgcttgaaaaacttttaagggtgatagggaactcgtaatgtaactaggccttcaagtgaaacttatttgcatgtgcaagatgccaaactaaaaattttaatatctctaacagattagc

SEQ ID NO: 187877 - DNA, 120 bp, Artificial Sequence
  ENSG00000112081_45 (sequence is synthesized)
ttttctggcaaaaatttgttgaatcctatcacctttaaatggttttactaacagtttcaaaatttaaaattttggggttgaagtgtgggccaagctaaggtaattttggtaagcctaaac

SEQ ID NO: 187878 - DNA, 120 bp, Artificial Sequence
  ENSG00000112081_46 (sequence is synthesized)
acactcttaaatgtgacgatcacaaatgcagttctaatgtagcacttaatggcatcaatatttacacctaccgcgttttcacaaaattacactatccacctggtacctaagtcttgtcat

SEQ ID NO: 187879 - DNA, 120 bp, Artificial Sequence
  ENSG00000112081_47 (sequence is synthesized)
catgggttccaaatactggtttatggtactgtttttggaactacttgtgggactatattttggtgtggtgtttgggtagtgaagttagtttgacatgaagttttgcattggacagatctg

SEQ ID NO: 187880 - DNA, 120 bp, Artificial Sequence
  ENSG00000112081_48 (sequence is synthesized)
cagatctgctgtgaagcattctttgttaaagtgaatccatggttggaatacctgcttttcacttgagctttttgtttcttaatccttctgtgccttttttttcttttcttttttttcttt

SEQ ID NO: 187881 - DNA, 120 bp, Artificial Sequence
  ENSG00000112081_49 (sequence is synthesized)
ttttttttttttttggacgatgggtgccagttcttcggcacattcactgggcccaacagtgagattgaaaagttgggaaatgcctcacgccataaatactaattgatgatgagcctaatt

SEQ ID NO: 187882 - DNA, 120 bp, Artificial Sequence
  ENSG00000112081_50 (sequence is synthesized)
attcctaaacttttccaggtggcttagttaatgggaataaaccttggctttaatagtgaatcaagttgtaaggatgagtcagctttctttgagttttcaaaggctttttagaaagtattt

SEQ ID NO: 187883 - DNA, 120 bp, Artificial Sequence
  ENSG00000112081_51 (sequence is synthesized)
tgcagtggtgtgattatagctcactgtagcctttaactcctggccttggagtgatcctccctcttcagcctcctgagtagcttggactacaggcaagtactgccatacctggctaattta

SEQ ID NO: 187884 - DNA, 120 bp, Artificial Sequence
  ENSG00000112081_52 (sequence is synthesized)
agtgagcctcctgcctctgcctcccaaaatattggaattattggcatgagtcaccatgccagatcaagaaaatatttatgtataattttatcatacctcattggtcctaatgtttttttg

SEQ ID NO: 187885 - DNA, 120 bp, Artificial Sequence
  ENSG00000112081_53 (sequence is synthesized)
cttgtttaggtccctttctagagataggagaagagagagatcgctgtctcgggagagaaatcacaagccgtcccgatccttctctaggtctcgtaggtaagatctttgataacttgtatt

SEQ ID NO: 187886 - DNA, 120 bp, Artificial Sequence
  ENSG00000112081_54 (sequence is synthesized)
taagactttgcatacatagtatgctaaggcctgtcttctaagccataaattttttaccttaaagttctatttcgatatgtcactaaagtgtcaccaagttacagatgtaatgttttgttt

SEQ ID NO: 187887 - DNA, 120 bp, Artificial Sequence
  ENSG00000112081_55 (sequence is synthesized)
tccgagagctagatggaaggtgatttaatgattacgctgataaaaatgtgttgcttgtgtttttcatatttaaaatctacaggatatgtggctcttagatggctttcccaatcactggcc

SEQ ID NO: 187888 - DNA, 120 bp, Artificial Sequence
  ENSG00000112081_56 (sequence is synthesized)
aattgtatctttagatacaattgggatctttttttttttttttttttttggtggggagacgagtcttgcactgtcactgggctggagtgcagtggtacagtctcccgctccccgcaacct

SEQ ID NO: 187889 - DNA, 120 bp, Artificial Sequence
  ENSG00000112096_0 (sequence is synthesized)
gctgtggtggcttcggcagcggcttcagcagatcggcggcatcagcggtagcaccagcactagcagcatgttgagccgggcagtgtgcggcaccagcaggcagctggctccggttttggg

SEQ ID NO: 187890 - DNA, 120 bp, Artificial Sequence
  ENSG00000112096_1 (sequence is synthesized)
gtatctgggctccaggcagaagcacagcctccccgacctgccctacgactacggcgccctggaacctcacatcaacgcgcagatcatgcagctgcaccacagcaagcaccacgcggccta

SEQ ID NO: 187891 - DNA, 120 bp, Artificial Sequence
  ENSG00000112096_2 (sequence is synthesized)
cgtgaacaacctgaacgtcaccgaggagaagtaccaggaggcgttggccaagggagatgttacagcccagatagctcttcagcctgcactgaagttcaatggtggtggtcatatcaatca

SEQ ID NO: 187892 - DNA, 120 bp, Artificial Sequence
  ENSG00000112096_3 (sequence is synthesized)
tagcattttctggacaaacctcagccctaacggtggtggagaacccaaaggggagttgctggaagccatcaaacgtgactttggttcctttgacaagtttaaggagaagctgacggctgc

SEQ ID NO: 187893 - DNA, 120 bp, Artificial Sequence
  ENSG00000112096_4 (sequence is synthesized)
ttggcttggtttcaataaggaacggggacacttacaaattgctgcttgtccaaatcaggatccactgcaaggaacaacaggccttattccactgctggggattgatgtgtgggagcacgc

SEQ ID NO: 187894 - DNA, 120 bp, Artificial Sequence
  ENSG00000112096_5 (sequence is synthesized)
ttactaccttcagtataaaaatgtcaggcctgattatctaaaagctatttggaatgtaatcaactgggagaatgtaactgaaagatacatggcttgcaaaaagtaaaccacgatcgttat

SEQ ID NO: 187895 - DNA, 120 bp, Artificial Sequence
  ENSG00000112096_6 (sequence is synthesized)
gctgatcataccctaatgatcccagcaagataatgtcctgtcttctaagatgtgcatcaagcctggtacatactgaaaaccctataaggtcctggataatttttgtttgattattcattg

SEQ ID NO: 187896 - DNA, 120 bp, Artificial Sequence
  ENSG00000112096_7 (sequence is synthesized)
aagaaacatttattttccaattgtgtgaagtttttgactgttaataaaagaatctgtcaaccatcaaagaggtctgcattatgcttgcatgtcaaaaactttaaaaatcctataatcttc

SEQ ID NO: 187897 - DNA, 120 bp, Artificial Sequence
  ENSG00000112096_8 (sequence is synthesized)
ttcttgatgttgcttagtcacttatttcataaacaacttaatgttctgaataatttcttactaaacattttgttattgggcaagtgattgaaaatagtaaatgctttgtgtgattgaatc

SEQ ID NO: 187898 - DNA, 120 bp, Artificial Sequence
  ENSG00000112096_9 (sequence is synthesized)
tgattggacattttcttcagagagctaaattacaattgtcatttataaaaccatcaaaaatattccatccatatactttggggacttgtagggatgcctttctagtcctattctattgca

SEQ ID NO: 187899 - DNA, 120 bp, Artificial Sequence
  ENSG00000112096_10 (sequence is synthesized)
gttatagaaaatctagtcttttgccccagttacttaaaaataaaatattaacactttcccaagggaaacactcggctttctatagaaaattgcactttttgtcgagtaatcctctgcagt

SEQ ID NO: 187900 - DNA, 120 bp, Artificial Sequence
  ENSG00000112096_11 (sequence is synthesized)
gatacttctggtagatgtcacccagtggtttttgttaggtcaaatgttcctgtatagtttttgcaaatagagctgtatactgtttaaatgtagcaggtgaactgaactggggtttgctca

SEQ ID NO: 187901 - DNA, 120 bp, Artificial Sequence
  ENSG00000112096_12 (sequence is synthesized)
cctgcacagtaaaggcaaacttcaacagcaaaactgcaaaaaggtggtttttgcagtaggagaaaggaggatgtttatttgcagggcgccaagcaaggagaattgggcagctcatgcttg

SEQ ID NO: 187902 - DNA, 120 bp, Artificial Sequence
  ENSG00000112096_13 (sequence is synthesized)
agacccaatctccatgatgacctacaagctagagtatttaaaggcagtggtaaatttcaggaaagcagaagttaaaggcaaaattgtaaatcagtcgagatcgggtgccttcagggtggt

SEQ ID NO: 187903 - DNA, 120 bp, Artificial Sequence
  ENSG00000112096_14 (sequence is synthesized)
atggctgtataccaaaattgtaaatcactacatgaagcttatatattggtttggcctgaaaggtgaagtggggtaggcagggggcgggcttacaggttatggtggattcaaagactccct

SEQ ID NO: 187904 - DNA, 120 bp, Artificial Sequence
  ENSG00000112096_15 (sequence is synthesized)
gatttgtgattggttaaggaagcaaagctttgtctaaaaacttggggtccgcagaaaggaacattaaggtctggccaggcccctcaggaagaaactgagagcaaagaatggaggtcagag

SEQ ID NO: 187905 - DNA, 120 bp, Artificial Sequence
  ENSG00000112096_16 (sequence is synthesized)
tttagtccctggtgttcccccttatctgacgtctgtgtgaatccatttggtgggggtctgggtttctgaaaagtagctcaggggcacgtgttaaggatgtctctaggtgactctaacttc

SEQ ID NO: 187906 - DNA, 120 bp, Artificial Sequence
  ENSG00000112096_17 (sequence is synthesized)
cctggctattgtttgaaactgttatgaccttcttgcttatcagcttgctggtttccttctcggggcgagctgggtgcctggagttttcggtgaaggaaactcaagattctcctttatttc

SEQ ID NO: 187907 - DNA, 120 bp, Artificial Sequence
  ENSG00000112096_18 (sequence is synthesized)
tgtgcttgtgggaatccccctggcacaccccaaagaggggtccctgctccgtctcacagggatctttttgtatatttggcttagcatcatacatttgccatgttgtttcatcatctgcct

SEQ ID NO: 187908 - DNA, 120 bp, Artificial Sequence
  ENSG00000112096_19 (sequence is synthesized)
aatttactgtttttgaatatttcatttgtttctaattgttactacagataatgctggggtgagcaactctgtgtacataggtttatctcctattggaatattttctttatataggcgttt

SEQ ID NO: 187909 - DNA, 60 bp, Artificial Sequence
  ENSG00000112096_20 (sequence is synthesized)
gtttatctcctattggaatattttctttatataggcgttttttttttttggagctcactg

SEQ ID NO: 187910 - DNA, 120 bp, Artificial Sequence
  ENSG00000112096_21 (sequence is synthesized)
gtgtgagccactgcacctggcctatataggcttttttcttaaacctatttagtaatgttttcccaagtttattttttatttttaattttttccccaagtttatttttctatttttttttc

SEQ ID NO: 187911 - DNA, 120 bp, Artificial Sequence
  ENSG00000112096_22 (sequence is synthesized)
tttaattttttccccaagtttatttttctatttttttttcatggaaaaatggggtaacttagcagtttcaatattgaagactgaagtttaaaaaaaatttaaattcaaggtacttttaaa

SEQ ID NO: 187912 - DNA, 120 bp, Artificial Sequence
  ENSG00000112096_23 (sequence is synthesized)
attcagttagaaaagtaggctttaaaaattattagagacaagagtaccaaagcggtgtgtgtatgtgtgtgtgtgtatgcatgcttgtggattggaaaaactttggagactgattacttt

SEQ ID NO: 187913 - DNA, 120 bp, Artificial Sequence
  ENSG00000112096_24 (sequence is synthesized)
tcattatatatgtgtcacagtgaaacagcttttatgtgtcatgtaagattactgcttgcctctctaaggaaggtcgtgactgtttaaatagacgggcaaggtggaaccttttgaaagatg

SEQ ID NO: 187914 - DNA, 120 bp, Artificial Sequence
  ENSG00000112096_25 (sequence is synthesized)
agcttttgaatataagttgtctgctagatcatggtttgtattgaactaacaaggtttgcagatctgctgacttatataaagctttttgattcctactaagctttaagatttaaaaaatgt

SEQ ID NO: 187915 - DNA, 120 bp, Artificial Sequence
  ENSG00000112096_26 (sequence is synthesized)
tcaatgttgaaatttctgtggggctctatttttgctttggctttctggtgagagagtgaggaagcattctttccttcactaagtttgtctttcttgtcttctggatagattgattttaag

SEQ ID NO: 187916 - DNA, 120 bp, Artificial Sequence
  ENSG00000112096_27 (sequence is synthesized)
atagattgattttaagagactaagggaatttacaaactaaagattttagtcatctggtggaaaaggagactttaagattgtttagggctgggcggggtgactcacatctgtaatcccagc

SEQ ID NO: 187917 - DNA, 79 bp, Artificial Sequence
  ENSG00000112096_28 (sequence is synthesized)
tttagctctgtttttcataatagaaatagaaaaggtaaaattgcttttcttctgaaaagaacaagtattgttcatccaa

SEQ ID NO: 187918 - DNA, 120 bp, Artificial Sequence
  ENSG00000112096_29 (sequence is synthesized)
attgcttttcttctgaaaagaacaagtattgttcatccaagaagggtttttgtgactgaatcagcagtgcctgccctagtcatagctgtgcttcaaaaacctcagcatgattagtgttgg

SEQ ID NO: 187919 - DNA, 120 bp, Artificial Sequence
  ENSG00000112096_30 (sequence is synthesized)
agcaaaacaaggaagcaaagcaaatactgtttttgaaattctatctgttgcttgaactattttgtaataattaaactttgatgttgagaaatcacaactttattgtacacttcattgcaa

SEQ ID NO: 187920 - DNA, 120 bp, Artificial Sequence
  ENSG00000112096_31 (sequence is synthesized)
cttgaaattcatggtcttaaagtgagatttgaatttctattgagcgcctttaaaaaagtaataccaaaccataaagttaaaatctatgtatattgagtcatatctaaaaccacgtataaa

SEQ ID NO: 187921 - DNA, 120 bp, Artificial Sequence
  ENSG00000112096_32 (sequence is synthesized)
aggaatagtaaataatgggtagttgaaatattactcttaagaccaagacctgtatctccagtcatatctgtaataacatcatctgataacctaaaagcatagtattagggatatacgaca

SEQ ID NO: 187922 - DNA, 120 bp, Artificial Sequence
  ENSG00000112096_33 (sequence is synthesized)
aaaccaaagtgtttttgctgttgtcacataccactcaatacttttacaccaggttgtccagtggacaccagctggatgtcctataattcaattctgacactgtctacctggaattggagt

SEQ ID NO: 187923 - DNA, 120 bp, Artificial Sequence
  ENSG00000112096_34 (sequence is synthesized)
cagatcccacaggtggagggctcagcccacaagactgcccccactccagataccaatcgcaagtccctatacttctgactggctataaagtggggttcccgtgaccctttccttggtttt

SEQ ID NO: 187924 - DNA, 120 bp, Artificial Sequence
  ENSG00000112096_35 (sequence is synthesized)
gatttatttgctagagcagctcccagaacacagagaaacactctacttatgtttacccatttttaattttattactttattaaaactacatattggttacaatactaatttattgtaaag

SEQ ID NO: 187925 - DNA, 83 bp, Artificial Sequence
  ENSG00000112096_36 (sequence is synthesized)
catattggttacaatactaatttattgtaaaggatatttcatttatttatttttttatttaggtggcacagtctcaactcact

SEQ ID NO: 187926 - DNA, 120 bp, Artificial Sequence
  ENSG00000112096_37 (sequence is synthesized)
gctgagattacaggtgtgagccattgcctctggcttgtaaaggatatttcaaagaatacagatgaacagccagatggaagagatgcacagggcaaggcatgtgggaaggggtatggagct

SEQ ID NO: 187927 - DNA, 120 bp, Artificial Sequence
  ENSG00000112096_38 (sequence is synthesized)
gcacagggcaaggcatgtgggaaggggtatggagctttcatgctctctccacgtcatcagctacccagaagctcatctggaccccgaccctttggggttttacggaggcttcattatgtc

SEQ ID NO: 187928 - DNA, 120 bp, Artificial Sequence
  ENSG00000112096_39 (sequence is synthesized)
agcattaccattggcaattggcgattaactcaaccttcagcctctctcccctttctggaggttgggggttgaggctgggagtccaaaccctccaatcttgccttggtctttctggtaagc

SEQ ID NO: 187929 - DNA, 120 bp, Artificial Sequence
  ENSG00000112096_40 (sequence is synthesized)
agccccccgtcctgaagctacctagaggctcccagccaccaatcatttcattggcaaaccaaagatacttcaaggggtttaggagccaagagaccaagcaaggattgagacaatatatat

SEQ ID NO: 187930 - DNA, 120 bp, Artificial Sequence
  ENSG00000112096_41 (sequence is synthesized)
atttcttataaataacatgatcacaaatagtattttatatatttctcataatagctggttgtggttactcacacctatcatcccagctactaagaagctaaggcaggaggatcacaggcc

SEQ ID NO: 187931 - DNA, 84 bp, Artificial Sequence
  ENSG00000112096_42 (sequence is synthesized)
ttaaagttcttgtaacatcttagaacattaaccaaccacagattattgccttaactctgaaaaataaagtaatcatacttttac

SEQ ID NO: 187932 - DNA, 120 bp, Artificial Sequence
  ENSG00000112096_43 (sequence is synthesized)
attgccttaactctgaaaaataaagtaatcatacttttacaagatgtattttacataaagttctggtgatattttactctggtcattggaatataggagcttaccacctggtaccactct

SEQ ID NO: 187933 - DNA, 120 bp, Artificial Sequence
  ENSG00000112096_44 (sequence is synthesized)
tcctaaagtggtatactatttggtatagtactggcatactatttggaaagggatgtgaagttggcatgacctgtctagggtgaagtcatgctgtctgctattcattgtgggctttacagt

SEQ ID NO: 187934 - DNA, 120 bp, Artificial Sequence
  ENSG00000112096_45 (sequence is synthesized)
aatgagagtgcttctgttgtcaagatgcttctgggacacgttaaaaaaaatttaagatttctcagtttgtgaaaaggaaggagcacgaatgctttcaagttcctatgacatgctagtcat

SEQ ID NO: 187935 - DNA, 120 bp, Artificial Sequence
  ENSG00000112096_46 (sequence is synthesized)
ctttcagtgtgtcccattgttgcacccagtagtctcgatgcccagcgtcacggtgattccaagtttgcctctctgcccactataatttgtgctccatgaagtcccaggacatgaggttct

SEQ ID NO: 187936 - DNA, 120 bp, Artificial Sequence
  ENSG00000112096_47 (sequence is synthesized)
tgttcatttgtgcgtctgggcccatatccaaatattaaacaatgtgacttaatgtatttatcatattgtaaatatgggtatccccaaggctcagaagttaacacagcatatccacagaga

SEQ ID NO: 187937 - DNA, 120 bp, Artificial Sequence
  ENSG00000112096_48 (sequence is synthesized)
ggtttgacagcatggctgtggtgactgggaaggccttatgcttgctcctccttctgctgcttgcctttgtgtgggcatggaaagaacattgaattaggtactggaagacctgggtcctgg

SEQ ID NO: 187938 - DNA, 120 bp, Artificial Sequence
  ENSG00000112096_49 (sequence is synthesized)
tcttggagattttaccagagcacctgtgggatattggtcaagatgcctggttttagtcctgctcctttgctgtgaaagaggatcttaaggtgccaactctggcattttattttttactta

SEQ ID NO: 187939 - DNA, 80 bp, Artificial Sequence
  ENSG00000112096_50 (sequence is synthesized)
ttttgatttgcatttctctgatggcccatgatgatgagcatttttttcatgtgtctgttggatgcatgtactttttgatg

SEQ ID NO: 187940 - DNA, 120 bp, Artificial Sequence
  ENSG00000112096_51 (sequence is synthesized)
atttcttggaagctttgttcgtttctttttactcttttttctcttaacttctcttctcacttcatttcattcatctgatcttcaatcactgataacctttcttccagttgatcgaattgg

SEQ ID NO: 187941 - DNA, 70 bp, Artificial Sequence
  ENSG00000112096_52 (sequence is synthesized)
ccatcaggtcatttaaggacttctctatgttctttgtgatgggttcgaacttcctcttttagcttggaga

SEQ ID NO: 187942 - DNA, 120 bp, Artificial Sequence
  ENSG00000112096_53 (sequence is synthesized)
agttttccttctaacagtcaggaccgccagctgcaggtctgttggagtttgctggacgtccacgccagaccctgtttgcctgggtatcacagtggaggctgtagaacagcgaatattgct

SEQ ID NO: 187943 - DNA, 120 bp, Artificial Sequence
  ENSG00000112096_54 (sequence is synthesized)
tccttgagctgcagtgggctccacctagttcgagcttcccggctgctttatttacctactgaagcctcagcaatggtgggctcccctcccctagcctcactgccaccttgcagttcgatc

SEQ ID NO: 187944 - DNA, 68 bp, Artificial Sequence
  ENSG00000112096_55 (sequence is synthesized)
gctagcaatgagcaaggctccatgggcgtgggaccctccgagcacgcagtattagggtgggagtgacc

SEQ ID NO: 187945 - DNA, 120 bp, Artificial Sequence
  ENSG00000112096_56 (sequence is synthesized)
ggaaagggaattccctgaccccttgccttcccgggtgaggccatgccttgccctgcttcagctcatgctcagtgggctgcacccaccgtcctacacccactgtccaacaagccccagtga

SEQ ID NO: 187946 - DNA, 67 bp, Artificial Sequence
  ENSG00000112096_57 (sequence is synthesized)
tgccctgcttcagctcatgctcagtgggctgcacccaccgtcctgtgcagaaatcacctgtcttctg

SEQ ID NO: 187947 - DNA, 120 bp, Artificial Sequence
  ENSG00000112096_58 (sequence is synthesized)
ttcggccatcttggaacccaacccaagtctggcattttttggttttctctgtgtattgactatgattatagaggataaatggatattgatattattaaatcgtcatttacagaaggcaca

SEQ ID NO: 187948 - DNA, 120 bp, Artificial Sequence
  ENSG00000112096_59 (sequence is synthesized)
caacttatatcctttaaacaaagttctccaaccagtagggtatacttgctggtagtgcttacagctgccaccattcttcactggggctcagagtggatgcctggaggaaaaaaacaaatg

SEQ ID NO: 187949 - DNA, 120 bp, Artificial Sequence
  ENSG00000112096_60 (sequence is synthesized)
aatcttttagctcctagttactgttagcatttttaccagaaaacaatttaaaaaatgacacaagtaagtcttcacctatcaaggctgagtgtggtggcctatacttgtaatctctgtgct

SEQ ID NO: 187950 - DNA, 78 bp, Artificial Sequence
  ENSG00000112096_61 (sequence is synthesized)
gaaagttaaaatttagctgggcatgctggcacatccctatagtcccagctacttgagaggctgagttgggaggatccc

SEQ ID NO: 187951 - DNA, 120 bp, Artificial Sequence
  ENSG00000112096_62 (sequence is synthesized)
atagtcccagctacttgagaggctgagttgggaggatcccttgaggtcatgagttggagtctacagtgagctgtgattacagtgtgagtctacactgcactccagtctgggtgaaagaga

SEQ ID NO: 187952 - DNA, 120 bp, Artificial Sequence
  ENSG00000112096_63 (sequence is synthesized)
tcctgtctctcaaaaaacaagtgattctcctgggaagagatttgtttaaaaagtctgcacctctattgatgataactttgaatgtaaatggattaaattctcccacttaaaagatataga

SEQ ID NO: 187953 - DNA, 120 bp, Artificial Sequence
  ENSG00000112096_64 (sequence is synthesized)
ttgactgaatggattaaaaaccaccatcatgactcgactgtatgctgcctacaagaaacctcacctgtaaagacaggccaaaagtgaaggtatggagaaagatattgcatacaaatggaa

SEQ ID NO: 187954 - DNA, 120 bp, Artificial Sequence
  ENSG00000112096_65 (sequence is synthesized)
gccaaaaaagagcagaaataactatacttacatgagataaaatagactttaagtcaaaaactgtaaaaagaaaagtcattatgtaatgaaacaaggatcaattcatgcaagatataatca

SEQ ID NO: 187955 - DNA, 120 bp, Artificial Sequence
  ENSG00000112096_66 (sequence is synthesized)
tatttttttattaagaaaatttttttgtagagatggggttatgctatgttgcctggctagtctcaaactctgggtctcaaagcagtcctcctgctttggcctcctaaggtgctgggatta

SEQ ID NO: 187956 - DNA, 120 bp, Artificial Sequence
  ENSG00000112096_67 (sequence is synthesized)
taggcatgagccactgtgccaggcctgaggatattatcattataaatatatatgtaccccacactggatgacccagatataaagcaaatattattagatttaaagggagaaatagactct

SEQ ID NO: 187957 - DNA, 120 bp, Artificial Sequence
  ENSG00000112096_68 (sequence is synthesized)
aatacaatagtagttgaggacttcactctactctcagcattggacagattttctagacataaaaccaataaatattggatttaaattgcactttacaccaaatggacctgacatttacag

SEQ ID NO: 187958 - DNA, 120 bp, Artificial Sequence
  ENSG00000112096_69 (sequence is synthesized)
aacattctaataggtgcagaacactctaatagctgcagaacacacgttcttttcatcagcacatggaacattcaccagactagttctggaacccacttcctgccttagtgttctttccac

SEQ ID NO: 187959 - DNA, 120 bp, Artificial Sequence
  ENSG00000112096_70 (sequence is synthesized)
cacagtgcatgataattccgacagaacgccttttatttgtaccttattagttgtagggggaaagctttttcatgtacaaaaatgctgtaattttctgatttaataaagtaattccactga

SEQ ID NO: 187960 - DNA, 120 bp, Artificial Sequence
  ENSG00000112096_71 (sequence is synthesized)
atgttcgccttctggcccactcacaggagagtcgcctttcaggcgtggccgcagtcactcgcccgccgccgaaccccgccaggagaggaaagcaccagcaggcagctggctccggttttg

SEQ ID NO: 187961 - DNA, 120 bp, Artificial Sequence
  ENSG00000112096_72 (sequence is synthesized)
ggctgagcggcgggaggcagtccccggcagaggcgaccccagggagccaggccccatacggacgggcctctccgtggaggagaactcgcttcgtatttgtaccggttccgagttttccag

SEQ ID NO: 187962 - DNA, 120 bp, Artificial Sequence
  ENSG00000112096_73 (sequence is synthesized)
tcgccttctggcccactcacaggagagtcgcctttcaggcgtggccgcagtcactcgcccgccgccgaaccccgccaggagaggaaaggtgaagggagggaggccgtcggcctagcccga

SEQ ID NO: 187963 - DNA, 120 bp, Artificial Sequence
  ENSG00000112096_74 (sequence is synthesized)
tcggggcctcgaggcacaatggagcagctgctccccggtaacactccccgtcctttcccaggagcctggcgcgagctccgcgggccccggagctcagcaagctcacaccagcaggcagct

SEQ ID NO: 187964 - DNA, 120 bp, Artificial Sequence
  ENSG00000112096_75 (sequence is synthesized)
gatgcttccgcgtgtcggaggaccaggtgccacctcaagagagaggccgtgggcggcgagccgcgggcgtttactcttagcagaagctcacctcaccagcaggcagctggctccggtttt

SEQ ID NO: 187965 - DNA, 120 bp, Artificial Sequence
  ENSG00000112096_76 (sequence is synthesized)
atggtccttgtcatcttcctgagagcaaacggggtcgggactccagcctaggacttggagactccctgcatccccagctaccctgcaggtgaaacttcactgagcccacttgacttcagg

SEQ ID NO: 187966 - DNA, 120 bp, Artificial Sequence
  ENSG00000112096_77 (sequence is synthesized)
gagtgcctcgatgggtttgaacacacttctgtcatctcagggaacttggggtcctgcgaaggagcttgccttactgttgtgagccacattccgttacacatattgccagcactggtgaat

SEQ ID NO: 187967 - DNA, 120 bp, Artificial Sequence
  ENSG00000112096_78 (sequence is synthesized)
tgtagggcctgaaaagaaagctctactgtgtcactcgttttttttgcaaattgaaattgttcttgttgtataatgtgctttggggaaatgtttggtctctcaggtaggtgtgccagccgt

SEQ ID NO: 187968 - DNA, 120 bp, Artificial Sequence
  ENSG00000112096_79 (sequence is synthesized)
ttgcaggagggctgagagcgcctgtccactggtggccagacatcatcgggtccgcaggtgtctctgagtgtcagggtcacctcctgatagaagtgggagtggtgtcttactgccaggtca

SEQ ID NO: 187969 - DNA, 120 bp, Artificial Sequence
  ENSG00000112096_80 (sequence is synthesized)
agacttgatacttttcttgatttcccttaggggtcaaagttcacaaggaaaatagccctttagtgggaaactgaaacaggcttgtttttatttactatttactcatatttgtaatgcaat

SEQ ID NO: 187970 - DNA, 120 bp, Artificial Sequence
  ENSG00000112096_81 (sequence is synthesized)
taaaatatatgttgttaactttttttttttttctcaagagctcggttgataaaaccaggggtatgtggactttttgagtctgtgccttttgggggtgtgtatgggaatgttatgttttaa

SEQ ID NO: 187971 - DNA, 120 bp, Artificial Sequence
  ENSG00000112096_82 (sequence is synthesized)
cgttttttacaaaatagtattgtctttttaatttattcgttagtggtttgcacaaggaagataatcgatagtcatgttttttagactctctgtattgcttggtaagctacgtagtaaaaa

SEQ ID NO: 187972 - DNA, 120 bp, Artificial Sequence
  ENSG00000112096_83 (sequence is synthesized)
atgtttacttttccttaaatgttttgaatttcggggttatgaaatttgttgagtaatttttagacagtcacatcttgttgactggaggcatctagtggaaaaatgcagtatttcagcctg

SEQ ID NO: 187973 - DNA, 120 bp, Artificial Sequence
  ENSG00000112096_84 (sequence is synthesized)
attgtgtttgaagtaaatgattaaaagaggaggaagttaccacattctggaagatttacttgagacagacgaaccttgaattacgggaaaaggccccgtgatttaggaaataacaaattt

SEQ ID NO: 187974 - DNA, 120 bp, Artificial Sequence
  ENSG00000112096_85 (sequence is synthesized)
gggaaacatgtaatggggagagactggggaataccccagttgtgaaagtacttcctgtaaggcaacatctgacaccaggaacctttctcttcagtattttaaaaacaacttaatttcagt

SEQ ID NO: 187975 - DNA, 120 bp, Artificial Sequence
  ENSG00000112096_86 (sequence is synthesized)
cctttacttgtggaatcagagccttacttatgtaatacaacccactggaaaaaagctttttattgtattgtactatattgtttataagtgattgagtacctgcagagctttcttttactt

SEQ ID NO: 187976 - DNA, 120 bp, Artificial Sequence
  ENSG00000112096_87 (sequence is synthesized)
aaacatattttaaaaattattaaaaagattttcatgtttgaaaacttggggaaaaaagataaaacaatgtcataatctcatcacatttaactgactaatatgaatatttttcaacaaaaa

SEQ ID NO: 187977 - DNA, 120 bp, Artificial Sequence
  ENSG00000112096_88 (sequence is synthesized)
aagctggtcccattatctaatagcttacaaagaaaaaaatataatgtatacagtggttgaaaaagtaggagttacaaaaaaatgtgtttgcattttaacttttcaggagatgttacagcc

SEQ ID NO: 187978 - DNA, 120 bp, Artificial Sequence
  ENSG00000112110_0 (sequence is synthesized)
gagagtttggggatctacagcagccaaaggcttgtccctgactttatatggctgctcctggcgagcgactgagtcgtccgtgaggaaaaagaggcgaggcttttccgagatcgtctcagc

SEQ ID NO: 187979 - DNA, 120 bp, Artificial Sequence
  ENSG00000112110_1 (sequence is synthesized)
gatggcgcttcggtcgcggttttgggggttgttctcggtttgcaggaaccctgggtgcaggttcgcagccctgtcaaccagctccgagccggcagcgaaacctgaagtggaccctgtgga

SEQ ID NO: 187980 - DNA, 120 bp, Artificial Sequence
  ENSG00000112110_2 (sequence is synthesized)
aaatgaagctgtcgccccagaattcaccaaccggaacccccggaacctggagcttttatctgtagccaggaaagagcggggctggcggacggtgtttccctcccgtgagttctggcacag

SEQ ID NO: 187981 - DNA, 120 bp, Artificial Sequence
  ENSG00000112110_3 (sequence is synthesized)
gttgcgagttataaggactcagcatcatgtagaagcacttgtggagcatcagaatggcaaggttgtggtttcggcctccactcgtgagtgggctattaaaaagcacctttatagtaccag

SEQ ID NO: 187982 - DNA, 120 bp, Artificial Sequence
  ENSG00000112110_4 (sequence is synthesized)
gcttgtgagagtataggacgagtgctggcacagagatgcttagaggcgggaatcaacttcatggtctaccaaccaaccccgtgggaggcagcctcagactcgatgaaacgactacaaagt

SEQ ID NO: 187983 - DNA, 120 bp, Artificial Sequence
  ENSG00000112110_5 (sequence is synthesized)
gccatgacagaaggtggtgtggttctacgggaacctcagagaatctatgaataaatggaagcattaattgttttgaacatgtaaatataaatctgtcagccactacagccatcaaaagag

SEQ ID NO: 187984 - DNA, 120 bp, Artificial Sequence
  ENSG00000112110_6 (sequence is synthesized)
agcatctggaagaacagccagcttggaagttttacagcaataatgttgcagtggaatattatttgtagttaaggtcatcctcctcccctttctgtttttttaaatcaagaactacgttct

SEQ ID NO: 187985 - DNA, 120 bp, Artificial Sequence
  ENSG00000112110_7 (sequence is synthesized)
gcccctctcttgggcttcagaagcatctaagaaaagcagtcatcaattataattaactttcaaagggcaagtcagaagttgtttataaattacaaaataaaggcatattatgaactctta

SEQ ID NO: 187986 - DNA, 120 bp, Artificial Sequence
  ENSG00000112110_8 (sequence is synthesized)
aaggttgtaagaagggtggagcttggagctggggtgtaactggaggggcgggcccttctccaagttagagttggggttctgagcgagtcgtgcgttttaggtttagtgtcttttccttgt

SEQ ID NO: 187987 - DNA, 120 bp, Artificial Sequence
  ENSG00000112110_9 (sequence is synthesized)
ccctgctcggggagcgtgaggcagatcggccggctttgctccaggcctcaggagtctcactcgcctgggcttgcacagtacattggaacgtgcgggttctattttgtattcgacgtgccg

SEQ ID NO: 187988 - DNA, 120 bp, Artificial Sequence
  ENSG00000112110_10 (sequence is synthesized)
gctgggaagaggttgaaccttcgcctcaaacgatgttgcgcagacgcagtgggccattctagtgccttctagaaaagggtgcaggttcgcagccctgtcaaccagctccgagccggcagc

SEQ ID NO: 187989 - DNA, 120 bp, Artificial Sequence
  ENSG00000112115_0 (sequence is synthesized)
gtccatctcatagcaggcacaaactcatccatccccagttgattggaagaaacaacgatgactcctgggaagacctcattggtgtcactgctactgctgctgagcctggaggccatagtg

SEQ ID NO: 187990 - DNA, 120 bp, Artificial Sequence
  ENSG00000112115_1 (sequence is synthesized)
aaggcaggaatcacaatcccacgaaatccaggatgcccaaattctgaggacaagaacttcccccggactgtgatggtcaacctgaacatccataaccggaataccaataccaatcccaaa

SEQ ID NO: 187991 - DNA, 120 bp, Artificial Sequence
  ENSG00000112115_2 (sequence is synthesized)
aggtcctcagattactacaaccgatccacctcaccttggaatctccaccgcaatgaggaccctgagagatatccctctgtgatctgggaggcaaagtgccgccacttgggctgcatcaac

SEQ ID NO: 187992 - DNA, 120 bp, Artificial Sequence
  ENSG00000112115_3 (sequence is synthesized)
gctgatgggaacgtggactaccacatgaactctgtccccatccagcaagagatcctggtcctgcgcagggagcctccacactgccccaactccttccggctggagaagatactggtgtcc

SEQ ID NO: 187993 - DNA, 120 bp, Artificial Sequence
  ENSG00000112115_4 (sequence is synthesized)
gtgggctgcacctgtgtcaccccgattgtccaccatgtggcctaagagctctggggagcccacactccccaaagcagttagactatggagagccgacccagcccctcaggaaccctcatc

SEQ ID NO: 187994 - DNA, 120 bp, Artificial Sequence
  ENSG00000112115_5 (sequence is synthesized)
cttcaaagacagcctcatttcggactaaactcattagagttcttaaggcagtttgtccaattaaagcttcagaggtaacacttggccaagatatgagatctgaattacctttccctcttt

SEQ ID NO: 187995 - DNA, 120 bp, Artificial Sequence
  ENSG00000112115_6 (sequence is synthesized)
ccaagaaggaaggtttgactgagtaccaatttgcttcttgtttacttttttaagggctttaagttatttatgtatttaatatgccctgagataactttggggtataagattccattttaa

SEQ ID NO: 187996 - DNA, 120 bp, Artificial Sequence
  ENSG00000112115_7 (sequence is synthesized)
aaaaggtaaaacctgtatttatttgagctatttaaggatctatttatgtttaagtatttagaaaaaggtgaaaaagcactattatcagttctgcctaggtaaatgtaagatagaattaaa

SEQ ID NO: 187997 - DNA, 120 bp, Artificial Sequence
  ENSG00000112115_8 (sequence is synthesized)
tggcagtgcaaaatttctgagtctttacaacatacggatatagtatttcctcctctttgtttttaaaagttataacatggctgaaaagaaagattaaacctactttcatatgtattaatt

SEQ ID NO: 187998 - DNA, 120 bp, Artificial Sequence
  ENSG00000112115_9 (sequence is synthesized)
taaattttgcaatttgttgaggttttacaagagatacagcaagtctaactctctgttccattaaacccttataataaaatccttctgtaataataaagtttcaaaagaaaatgtttattt

SEQ ID NO: 187999 - DNA, 120 bp, Artificial Sequence
  ENSG00000112115_10 (sequence is synthesized)
gttctcattaaatgtattttagcaaactcagctcttccctattgggaagagttatgcaaattctcctataagcaaaacaaagcatgtctttgagtaacaatgacctggaaatacccaaaa

SEQ ID NO: 188000 - DNA, 120 bp, Artificial Sequence
  ENSG00000112115_11 (sequence is synthesized)
ttccaagttctcgatttcacatgccttcaagactgaacaccgactaaggttttcatactattagccaatgctgtagacagaagcattttgataggaatagagcaaataagataatggccc

SEQ ID NO: 188001 - DNA, 120 bp, Artificial Sequence
  ENSG00000112115_12 (sequence is synthesized)
tgaggaatggcatgtcattattaaagatcatatggggaaaatgaaaccctccccaaaatacaagaagttctgggaggagacattgtcttcagactacaatgtccagtttctcccctagac

SEQ ID NO: 188002 - DNA, 120 bp, Artificial Sequence
  ENSG00000112115_13 (sequence is synthesized)
tcaggcttcctttggagattaaggcccctcagagatcaacagaccaacatttttctcttcctcaagcaacactcctagggcctggcttctgtctgatcaaggcaccacacaacccagaaa

SEQ ID NO: 188003 - DNA, 120 bp, Artificial Sequence
  ENSG00000112115_14 (sequence is synthesized)
ggagctgatggggcagaacgaactttaagtatgagaaaagttcagcccaagtaaaataaaaactcaatcacattcaattccagagtagtttcaagtttcacatcgtaaccattttcgccc

SEQ ID NO: 188004 - DNA, 120 bp, Artificial Sequence
  ENSG00000112116_0 (sequence is synthesized)
atgattgctataaaactaacaggtactctcattgatagaacacaggcatacacaggaagatacattcacagaaagagcttcctgcacaaagtaagccaccagcgcaacatgacagtgaag

SEQ ID NO: 188005 - DNA, 120 bp, Artificial Sequence
  ENSG00000112116_1 (sequence is synthesized)
accctgcatggcccagccatggtcaagtacttgctgctgtcgatattggggcttgcctttctgagtgaggcggcagctcggaaaatccccaaagtaggacatacttttttccaaaagcct

SEQ ID NO: 188006 - DNA, 120 bp, Artificial Sequence
  ENSG00000112116_2 (sequence is synthesized)
gagagttgcccgcctgtgccaggaggtagtatgaagcttgacattggcatcatcaatgaaaaccagcgcgtttccatgtcacgtaacatcgagagccgctccacctccccctggaattac

SEQ ID NO: 188007 - DNA, 120 bp, Artificial Sequence
  ENSG00000112116_3 (sequence is synthesized)
gggaccccaaccggtacccctcggaagttgtacaggcccagtgtaggaacttgggctgcatcaatgctcaaggaaaggaagacatctccatgaattccgttcccatccagcaagagaccc

SEQ ID NO: 188008 - DNA, 120 bp, Artificial Sequence
  ENSG00000112116_4 (sequence is synthesized)
tggtcgtccggaggaagcaccaaggctgctctgtttctttccagttggagaaggtgctggtgactgttggctgcacctgcgtcacccctgtcatccaccatgtgcagtaagaggtgcata

SEQ ID NO: 188009 - DNA, 120 bp, Artificial Sequence
  ENSG00000112116_5 (sequence is synthesized)
tccactcagctgaagaagctgtagaaatgccactccttacccagtgctctgcaacaagtcctgtctgacccccaattccctccacttcacaggactcttaataagacctgcacggatgga

SEQ ID NO: 188010 - DNA, 120 bp, Artificial Sequence
  ENSG00000112116_6 (sequence is synthesized)
cggatggaaacagaaaatattcacaatgtatgtgtgtatgtactacactttatatttgatatctaaaatgttaggagaaaaattaatatattcagtgctaatataataaagtattaataa

SEQ ID NO: 188011 - DNA, 120 bp, Artificial Sequence
  ENSG00000112116_7 (sequence is synthesized)
ggcttcagttactagctaggctactgagtttagttctcagtttggcaccttgatacctttaggtgtgagtgttcccatttccaggtgaggaactgaggtgcaaagagaagccctgatccc

SEQ ID NO: 188012 - DNA, 120 bp, Artificial Sequence
  ENSG00000112118_0 (sequence is synthesized)
gaagaagaagaagcttttgattggacagtcgctagtccgacctcagagaactcagccaatcataatgcttatatgctcccaaggtccccgcctcttcctcgaggtaacctttggtggcgg

SEQ ID NO: 188013 - DNA, 120 bp, Artificial Sequence
  ENSG00000112118_1 (sequence is synthesized)
gaagagttcggaagttttcgcgccggggtggagtcatcctgggaacctccacgcgactttggtggaggtagttctttggcagcgggcatggcgggtaccgtggtgctggacgatgtggag

SEQ ID NO: 188014 - DNA, 120 bp, Artificial Sequence
  ENSG00000112118_2 (sequence is synthesized)
ctgcgggaggctcagagagattacctggacttcctggacgacgaggaagaccagggaatttatcagagcaaagttcgggagctgatcagtgacaaccaataccggctgattgtcaatgtg

SEQ ID NO: 188015 - DNA, 120 bp, Artificial Sequence
  ENSG00000112118_3 (sequence is synthesized)
aatgacctgcgcaggaaaaacgagaagagggctaaccggcttctgaacaatgcctttgaggagctggttgccttccagcgggccttaaaggattttgtggcctccattgatgctacctat

SEQ ID NO: 188016 - DNA, 120 bp, Artificial Sequence
  ENSG00000112118_4 (sequence is synthesized)
gccaagcagtatgaggagttctacgtaggactggaaggcagctttggctccaagcacgtctccccgcggactcttacctcctgcttcctcagctgtgtggtctgtgtggagggcattgtc

SEQ ID NO: 188017 - DNA, 120 bp, Artificial Sequence
  ENSG00000112118_5 (sequence is synthesized)
actaaatgttctctagttcgtcccaaagtcgtccgcagtgtccactactgtcctgctactaagaagaccatagagcgacgttattctgatctcaccaccctggtggcctttccctccagc

SEQ ID NO: 188018 - DNA, 120 bp, Artificial Sequence
  ENSG00000112118_6 (sequence is synthesized)
tctgtctatcctaccaaggatgaggagaacaatccccttgagacagaatatggcctttctgtctacaaggatcaccagaccatcaccatccaggagatgccggagaaggccccagccggc

SEQ ID NO: 188019 - DNA, 120 bp, Artificial Sequence
  ENSG00000112118_7 (sequence is synthesized)
cagctcccccgctctgtggacgtcattctggatgatgacttggtggataaagcgaagcctggtgaccgggttcaggtggtgggaacctaccgttgccttcctggaaagaagggaggctac

SEQ ID NO: 188020 - DNA, 120 bp, Artificial Sequence
  ENSG00000112118_8 (sequence is synthesized)
acctctgggaccttcaggactgtcctgattgcctgtaatgttaagcagatgagcaaggatgctcagccctctttctctgctgaggatatagccaagatcaagaagttcagtaaaacccga

SEQ ID NO: 188021 - DNA, 120 bp, Artificial Sequence
  ENSG00000112118_9 (sequence is synthesized)
tccaaggatatctttgaccagctggccaagtcattggccccaagtatccatgggcatgactatgtcaagaaagcaatcctctgcttgctcttgggaggggtggaacgagacctagaaaat

SEQ ID NO: 188022 - DNA, 120 bp, Artificial Sequence
  ENSG00000112118_10 (sequence is synthesized)
ggcagccacatccgtggggacatcaatattcttctaataggagacccatccgttgccaagtctcagcttctgcggtatgtgctttgcactgcaccccgagctatccccaccactggccgg

SEQ ID NO: 188023 - DNA, 120 bp, Artificial Sequence
  ENSG00000112118_11 (sequence is synthesized)
ggctcctctggagtgggtctgacggctgctgtcaccacagaccaggaaacaggagagcgccgtctggaagcaggggccatggtcctggctgaccgaggcgtggtttgcattgatgaattt

SEQ ID NO: 188024 - DNA, 120 bp, Artificial Sequence
  ENSG00000112118_12 (sequence is synthesized)
gacaaaatgtctgacatggatcgcacagccatccatgaagtgatggagcagggtcgagtgaccattgccaaggctggcatccatgctcggctgaatgcccgctgcagtgttttggcagct

SEQ ID NO: 188025 - DNA, 120 bp, Artificial Sequence
  ENSG00000112118_13 (sequence is synthesized)
tgctcttcatcatgctggatcagatggatcctgagcaggatcgggagatctcagaccatgtccttcggatgcaccgttacagagcacctggggagcaggatggcgatgctatgcccttgg

SEQ ID NO: 188026 - DNA, 120 bp, Artificial Sequence
  ENSG00000112118_14 (sequence is synthesized)
gtagtgctgtggatatcctggccacagatgatcccaactttagccaggaagatcagcaggacacccagatttatgagaagcatgacaaccttctacatgggaccaagaagaaaaaggaga

SEQ ID NO: 188027 - DNA, 120 bp, Artificial Sequence
  ENSG00000112118_15 (sequence is synthesized)
agatggtgagtgcagcattcatgaagaagtacatccatgtggccaaaatcatcaagcctgtcctgacacaggagtcggccacctacattgcagaagagtattcacgcctgcgcagccagg

SEQ ID NO: 188028 - DNA, 120 bp, Artificial Sequence
  ENSG00000112118_16 (sequence is synthesized)
atagcatgagctcagacaccgccaggacatctccagttacagcccgaacactggaaactctgattcgactggccacagcccatgcgaaggcccgcatgagcaagactgtggacctgcagg

SEQ ID NO: 188029 - DNA, 120 bp, Artificial Sequence
  ENSG00000112118_17 (sequence is synthesized)
atgcagaggaagctgtggagttggtccagtatgcttactttaagaaggttctggagaaggagaagaaacgtaagaagcgaagtgaggatgaatcagagacagaagatgaagaggagaaaa

SEQ ID NO: 188030 - DNA, 120 bp, Artificial Sequence
  ENSG00000112118_18 (sequence is synthesized)
gccaagaggaccaggagcagaagaggaagagaaggaagactcgccagccagatgccaaagatggggattcatacgacccctatgacttcagtgacacagaggaggaaatgcctcaagtac

SEQ ID NO: 188031 - DNA, 120 bp, Artificial Sequence
  ENSG00000112118_19 (sequence is synthesized)
acactccaaagacggcagactcacaggagaccaaggaatcccagaaagtggagttgagtgaatccaggttgaaggcattcaaggtggccctcttggatgtgttccgggaagctcatgcgc

SEQ ID NO: 188032 - DNA, 120 bp, Artificial Sequence
  ENSG00000112118_20 (sequence is synthesized)
agtcaatcggcatgaatcgcctcacagaatccatcaaccgggacagcgaagagcccttctcttcagttgagatccaggctgctctgagcaagatgcaggatgacaatcaggtcatggtgt

SEQ ID NO: 188033 - DNA, 120 bp, Artificial Sequence
  ENSG00000112118_21 (sequence is synthesized)
ctgagggcatcatcttcctcatctgaggaggcctcgtctctgaacttgggttgtgccgagagagtttgttctgtgtttcccaccctctccctgacccaagtctttgcctctactccctta

SEQ ID NO: 188034 - DNA, 120 bp, Artificial Sequence
  ENSG00000112118_22 (sequence is synthesized)
acagtgttgaattcaactgaaggcgaggaatgttggtgatgaagctgagttcaggactcggtggaccctttgggaatgggtcatgaaagctgccatggggtgaggaaagaggagacagtg

SEQ ID NO: 188035 - DNA, 120 bp, Artificial Sequence
  ENSG00000112118_23 (sequence is synthesized)
ggagaggacaatgactattgcatcttcattgcaaaagcactggctcatccgccctacttcccatcccacacaaacccaattgtaaataacatatgacttctgagtacttttgggggcaca

SEQ ID NO: 188036 - DNA, 120 bp, Artificial Sequence
  ENSG00000112118_24 (sequence is synthesized)
actgttttctgtttgctgtttttttgttttgttttttttctccagagcactttggtctagactaggctttgggtggttccaattggtggagagaagctctgaggcacgtcatgcaggtca

SEQ ID NO: 188037 - DNA, 120 bp, Artificial Sequence
  ENSG00000112118_25 (sequence is synthesized)
agaaagctttctttgcagtagcaccagttaaggtgaatatgtattgtatcacaaaacaaacccaatatccagatgaatatccgagatgttgaataaacttagccatttcgtacacatggt

SEQ ID NO: 188038 - DNA, 120 bp, Artificial Sequence
  ENSG00000112118_26 (sequence is synthesized)
tgcctcaagtacacactccaaagacggcagactcacaggagaccaaggaatcccagaaagtggagttgagtgaatccagagacgggatctcaccatgttgcccaggctggtcttggactc

SEQ ID NO: 188039 - DNA, 120 bp, Artificial Sequence
  ENSG00000112118_27 (sequence is synthesized)
aaggctgggattacaggcataagccactgtgcttgtttgatctcattctttttaatgactgcagggtttccatggttgaaggcattcaaggtggccctcttggatgtgttccgggaagct

SEQ ID NO: 188040 - DNA, 120 bp, Artificial Sequence
  ENSG00000112118_28 (sequence is synthesized)
ttgctgactaactgggctgagaagtgtattctaggtgacccaggggaataataggccaaagactaaaagtaaggccattttcttgttattgtcctttgtttagagcagtgttcctcaccc

SEQ ID NO: 188041 - DNA, 120 bp, Artificial Sequence
  ENSG00000112118_29 (sequence is synthesized)
attcctgcacagcagaatcccctggaaagttccttatttaaaagtaactttttaacagtacagttaaacagtccatttaacatatttaaccgtccattaaataaaaggactacatgcatg

SEQ ID NO: 188042 - DNA, 120 bp, Artificial Sequence
  ENSG00000112130_0 (sequence is synthesized)
gtagtgctcctgcttcctggccgagggcgggcgagcggagcctgctttcgcagcgatcgcgagcgtgtggcgattgcttctgtctgttatttagatatggaagctgaggggatgcacaga

SEQ ID NO: 188043 - DNA, 120 bp, Artificial Sequence
  ENSG00000112130_1 (sequence is synthesized)
ggcagccagaacctaggtcagggtctcgctcggtgctgaccgcccccggggtcgagtaggcgatgggggagcccggcttcttcgtcacaggagaccgcgccggtggccggagctggtgcc

SEQ ID NO: 188044 - DNA, 120 bp, Artificial Sequence
  ENSG00000112130_2 (sequence is synthesized)
tgcggcgggtggggatgagcgccgggtggctgctgctggaagatgggtgcgaggtgactgtaggacgaggatttggtgtcacataccaactggtatcaaaaatctgccccctgatgattt

SEQ ID NO: 188045 - DNA, 120 bp, Artificial Sequence
  ENSG00000112130_3 (sequence is synthesized)
ctcgaaaccactgtgttttgaagcagaatcctgagggccaatggacaattatggacaacaagagtctaaatggtgtttggctgaacagagcgcgtctggaacctttaagggtctattcca

SEQ ID NO: 188046 - DNA, 120 bp, Artificial Sequence
  ENSG00000112130_4 (sequence is synthesized)
ttcatcagggagactacatccaacttggagtgcctctggaaaataaggagaatgcggagtatgaatatgaagttactgaagaagactgggagacaatatatccttgtctttccccaaaga

SEQ ID NO: 188047 - DNA, 120 bp, Artificial Sequence
  ENSG00000112130_5 (sequence is synthesized)
atgaccaaatgatagaaaaaaataaggaattgagaactaaaaggaaattcagtttggatgaattagcaggtcctggagctgaaggcccctcaaatttgaaatccaaaataaataaagtgt

SEQ ID NO: 188048 - DNA, 120 bp, Artificial Sequence
  ENSG00000112130_6 (sequence is synthesized)
cttgtgaatctggtcagccagtgaaatcacaggggaaaggtgaagtggccagtacaccctctgacaatttggatcctaagttgactgcccttgagccaagtaagaccacaggggctccca

SEQ ID NO: 188049 - DNA, 120 bp, Artificial Sequence
  ENSG00000112130_7 (sequence is synthesized)
tttaccctggcttccccaaagtcacagaggttcatcatgagcagaaagcctcaaactcttcagcatctcagagaagcttacagatgtttaaggtgaccatgtccaggattctgaggctca

SEQ ID NO: 188050 - DNA, 120 bp, Artificial Sequence
  ENSG00000112130_8 (sequence is synthesized)
aaatacagatgcaggaaaaacatgaagccgttatgaatgtgaaaaagcagacccaaaaggggaactcaaagaaagttgtgcaaatggagcaggaacttcaggacttacagtcccagctgt

SEQ ID NO: 188051 - DNA, 120 bp, Artificial Sequence
  ENSG00000112130_9 (sequence is synthesized)
gtgcagagcaggctcagcagcaggcaagagtggagcaactagagaagactttccaggaagaggaacagcatcttcagggtttggagatagcccaaggagaaaaggacctgaagcaacagc

SEQ ID NO: 188052 - DNA, 120 bp, Artificial Sequence
  ENSG00000112130_10 (sequence is synthesized)
tggcccaggctctgcaggagcattgggctctaatggaagagctaaatcgcagcaagaaggactttgaagcaatcattcaagccaagaacaaagaattagagcagaccaaggaagagaagg

SEQ ID NO: 188053 - DNA, 120 bp, Artificial Sequence
  ENSG00000112130_11 (sequence is synthesized)
agaagatgcaagcacagaaggaagaagttcttagccacatgaatgatgtgctagagaatgagctccaatgtattatttgttcagaatacttcattgaggctgtcaccttgaactgtgccc

SEQ ID NO: 188054 - DNA, 120 bp, Artificial Sequence
  ENSG00000112130_12 (sequence is synthesized)
acagtttctgctcctactgtatcaatgaatggatgaagcggaagatagaatgccccatttgtcggaaggacattaagtccaaaacgtactctttggttctggacaattgcattaataaga

SEQ ID NO: 188055 - DNA, 120 bp, Artificial Sequence
  ENSG00000112130_13 (sequence is synthesized)
tggtaaataatctgagctcagaagtgaaagaacgacgaattgttctcattagggaacgaaaagcaaagagattgttctgaagaccgtgctctaagggcatttgaaagactgccaggtagt

SEQ ID NO: 188056 - DNA, 120 bp, Artificial Sequence
  ENSG00000112130_14 (sequence is synthesized)
gcgagcctgagatggtctggaggattctctctagccgtgactccgctgctctgaaggtcaactgagaagtcttgtgggacagagacttgagttaggaagccctcagtcacttgccttcca

SEQ ID NO: 188057 - DNA, 120 bp, Artificial Sequence
  ENSG00000112130_15 (sequence is synthesized)
cggtggccagccctgctgccatcattggctgaagcaccaccaggattcacggcacccaactgcttcagggtacttcgtagactctgcctcactacatgtcgaaagagttatttgagttct

SEQ ID NO: 188058 - DNA, 120 bp, Artificial Sequence
  ENSG00000112130_16 (sequence is synthesized)
cttctgtttttttttaatttgttgttgttgttactgttttgatacctcggaaacacctccgttgacagttgttttggataggttgggtgtaccccatggctgcctctgaaggcagtgtct

SEQ ID NO: 188059 - DNA, 120 bp, Artificial Sequence
  ENSG00000112130_17 (sequence is synthesized)
attttgagaggatggcttacctcttctttgtgaaaatactatctcatttcctggaaataaaatgtaaaacctgtcagttgctcagctgggctttggtgtatttaccttccttcccttcct

SEQ ID NO: 188060 - DNA, 120 bp, Artificial Sequence
  ENSG00000112130_18 (sequence is synthesized)
gctcccagacagtctcacaagtaaacaccagcagctcatagattacaaccaagaaagtgactgtatcagatgatagacttcaagtgaatgtcagcctaagaggccaagctgcagatcgtg

SEQ ID NO: 188061 - DNA, 120 bp, Artificial Sequence
  ENSG00000112130_19 (sequence is synthesized)
gcaacagatgagctctgttaacctcctgactgtcgtgtttcctttttattacagaggtgggtcactgtttaccttgtttcaggggtgggagaaactcctttccttcagctggcatttgaa

SEQ ID NO: 188062 - DNA, 120 bp, Artificial Sequence
  ENSG00000112130_20 (sequence is synthesized)
tgtttccaaatctattttatctgacgtcatgaacacacaggcaatgattttatgacaacttgatgtgcttttttctttatttttcttttacattagaagttttctctcttttctccacct

SEQ ID NO: 188063 - DNA, 120 bp, Artificial Sequence
  ENSG00000112130_21 (sequence is synthesized)
aagttttctctcttttctccacctctcctttatttttaattttaattttaatttttgaaacaagatctgactctgttgcccaagctggagtacagtagtgcaatctcagctcactgcaac

SEQ ID NO: 188064 - DNA, 69 bp, Artificial Sequence
  ENSG00000112130_22 (sequence is synthesized)
ctccacctcccagaatgccatcacacccagctaatttttgtttttctgtagagacagggtttcaccatg

SEQ ID NO: 188065 - DNA, 120 bp, Artificial Sequence
  ENSG00000112130_23 (sequence is synthesized)
ggttggaaactattgattgccaactttttaaggatggtagggattttttctttgttgaatatactgtgaattttgggattctggagtccttagtcttcatttccattcttctgcccatga

SEQ ID NO: 188066 - DNA, 120 bp, Artificial Sequence
  ENSG00000112130_24 (sequence is synthesized)
ttactgatcaaaatactggtagagtcatggaggaagtaagttaaatgtggaaaaaatgctttaaaagtacttactataaccacatcataagaattctggaaaaatagagaacaaaaggaa

SEQ ID NO: 188067 - DNA, 120 bp, Artificial Sequence
  ENSG00000112130_25 (sequence is synthesized)
aagattgttaccaccttgatttaataacttcttgtttccccatacatgtgttttgtttatagattgcatgggtatatgtcaatttttatatgttctgtgtttagtttacatattgtaatt

SEQ ID NO: 188068 - DNA, 120 bp, Artificial Sequence
  ENSG00000112130_26 (sequence is synthesized)
catttttaagagagtacagacatacactttttgagtaggcaatatgttcacatagtttgaaattaaaggtacaaaatggcgtagaatgaaatgcctctcaccctttccccacagcgacta

SEQ ID NO: 188069 - DNA, 120 bp, Artificial Sequence
  ENSG00000112130_27 (sequence is synthesized)
cttcccactcagaggcaacaagtattacagttgcttgtatattcttccagagatctctgtctatacaagcaaaaacacatgtggtctttttccttgctttgcacaaatggtaaactgtac

SEQ ID NO: 188070 - DNA, 120 bp, Artificial Sequence
  ENSG00000112130_28 (sequence is synthesized)
gctattctgaaccttgcttttttcagatatatgttggcaacagttccatgtcagtacatagtttcctttctttattacagctgcctgttttttcattgtgtatttgcaccatcatttact

SEQ ID NO: 188071 - DNA, 120 bp, Artificial Sequence
  ENSG00000112130_29 (sequence is synthesized)
tttctggcttacttttgatagaaatctaggttggttcaaacctttttactcttaaaacaatgctgcagttaacacccttgtacatatatctttagagagaagatattttaaaaagaaata

SEQ ID NO: 188072 - DNA, 120 bp, Artificial Sequence
  ENSG00000112130_30 (sequence is synthesized)
aagaaatacctttttaaaaattattttattattttttaatagagactatgttgcctaggctggtcttgaaattctgggctaaagcaatcctaccaccttggcctcccaaagtgctgagat

SEQ ID NO: 188073 - DNA, 120 bp, Artificial Sequence
  ENSG00000112130_31 (sequence is synthesized)
tgagccattgcacctggccaagaagagacatcttgacttgagcctgaagactatgtacagagactgacctcacagactgaccattccatcccacagctgctggacatagagtgatttgca

SEQ ID NO: 188074 - DNA, 120 bp, Artificial Sequence
  ENSG00000112130_32 (sequence is synthesized)
gcccctcctttcagagtaccacatccctctcaagtgttccacaacatctaggaaagtgagctcttaaagacagactaaaaagagtaataaatcaatacaacaacattaaaagccagacta

SEQ ID NO: 188075 - DNA, 120 bp, Artificial Sequence
  ENSG00000112130_33 (sequence is synthesized)
gcggagtttgaatcttggccctgctgttagtaactgtgtgagccttgggcaagttactcagcctccttgtgtcttggttttggtttcttcatctctaagtaattatatctgtcattattg

SEQ ID NO: 188076 - DNA, 120 bp, Artificial Sequence
  ENSG00000112130_34 (sequence is synthesized)
ccctgatcacaaacaaaagcctgaatgtactatgtttaaaagacaaaccaaaaattaacccaaacttgcattatttgtctgagctacagaatgttctttccttggagagatatctgatat

SEQ ID NO: 188077 - DNA, 120 bp, Artificial Sequence
  ENSG00000112130_35 (sequence is synthesized)
taaacatcatctgcattttacttgcctagaaaatacacggtaacttttctgccttgcagcatcaaactatagtacagctgagccccagtgctgtgcagtctgactctaattaaaggcacc

SEQ ID NO: 188078 - DNA, 120 bp, Artificial Sequence
  ENSG00000112130_36 (sequence is synthesized)
ttctttacagcagggctctggggaactggaaaagggggtttgtttcattatctggttttattaagcagatgaatgcagccagctatatgaagcactttgcagtgaatggcaggtgtccca

SEQ ID NO: 188079 - DNA, 120 bp, Artificial Sequence
  ENSG00000112130_37 (sequence is synthesized)
tatctggttatgttaacctagaaagggctcactctacctctaggcatgtttcatcccaacaatcagactgtgccaaagcaggggactttgtcctttgtggattgcatagctggataccca

SEQ ID NO: 188080 - DNA, 120 bp, Artificial Sequence
  ENSG00000112130_38 (sequence is synthesized)
tcatctgtttctctgattggaagctgctgttgtacagaaagacctgcatttcccccttgtctccagttctctcactactttttcctcctctgtgagtgaccatccaggcagtcaccataa

SEQ ID NO: 188081 - DNA, 120 bp, Artificial Sequence
  ENSG00000112130_39 (sequence is synthesized)
ctgctggagtgtctgggattggtagctctctccaactgcctgcttgctctttacagcctctctctgtgactggaatctctccacctcatcgtatctaaggataacccagaaacatggggt

SEQ ID NO: 188082 - DNA, 120 bp, Artificial Sequence
  ENSG00000112130_40 (sequence is synthesized)
gtcctaggtatgtttatctcgacactgaaccccctaggcttctgatgaatccagtgattagctaaatttgacatagaaagtaagaaggaatgtctactttgtattgtggtcctaatctaa

SEQ ID NO: 188083 - DNA, 120 bp, Artificial Sequence
  ENSG00000112130_41 (sequence is synthesized)
gatcaggagaatcctggaattgttatctgtctcttgctctgagatacagacttgttcataggtgtggggcctgattggaacaggatctgccattggtcacaataggtcaagggcttgttc

SEQ ID NO: 188084 - DNA, 120 bp, Artificial Sequence
  ENSG00000112130_42 (sequence is synthesized)
tgaaccctagttagcttcattcagagaaagaaacttcctacctggtcagctttttcagcttctccaacaaatgggagttgaggcagtaggagtgtggggttcttgggaagacgatggggc

SEQ ID NO: 188085 - DNA, 120 bp, Artificial Sequence
  ENSG00000112130_43 (sequence is synthesized)
cttgtattaaggagaaataatgaactatcttcttgattcttccattgagaaaagcatatgaatcctaggaaagggctcagcctgtgataggcattcaataaatactccaatgctgtcatt

SEQ ID NO: 188086 - DNA, 120 bp, Artificial Sequence
  ENSG00000112130_44 (sequence is synthesized)
cctttgtctacagcatccccaaacaatgtaccagtgatgggctacctgagctcatctagtcgccaagcagtatctcctgcttgctgctgctttactacattccagatgcccacctcatcc

SEQ ID NO: 188087 - DNA, 120 bp, Artificial Sequence
  ENSG00000112130_45 (sequence is synthesized)
aatttccagagccactatctctgctgtccactttccttcaggctctgtgaatacttcaacctgctgtgatttggggccgtttgtactctgcatgtattcaataaattcaattcagcaata

SEQ ID NO: 188088 - DNA, 120 bp, Artificial Sequence
  ENSG00000112130_46 (sequence is synthesized)
aggaagaggaacagcatcttcagccagcatgtgatgggacagatgcaccatgactgcattgttgggttgaatgataaaccaccttccacagtgcctatagtaggaaggtaaaataatgac

SEQ ID NO: 188089 - DNA, 120 bp, Artificial Sequence
  ENSG00000112130_47 (sequence is synthesized)
tgtcttagctgtataaaggtaagaccaaatgtatttccatccctcagtcatttgcttagatgacaagctcttgcacaaagctttaggctagagcagatcctgtccctgctcaaaatgtca

SEQ ID NO: 188090 - DNA, 120 bp, Artificial Sequence
  ENSG00000112130_48 (sequence is synthesized)
tttcctatctggcaggaaccacatattttgctcccacccagttgctcagataatattgaatgtcaagaattccccattgttgacttagaactcagacggaccagtcacaactaaagtgaa

SEQ ID NO: 188091 - DNA, 120 bp, Artificial Sequence
  ENSG00000112130_49 (sequence is synthesized)
taagctttttgtttgggttgctcagggtaaggaacagccaggggtagtgttggcttatttctgagcaatttataaatttcattctgatctctgccatccccttgaactgacagtattagc

SEQ ID NO: 188092 - DNA, 120 bp, Artificial Sequence
  ENSG00000112130_50 (sequence is synthesized)
caaccttttccggaagctctcaagctgttcttgtggataagacagagaatatgtactccaatgcaaagacttttggttgaattataactggctgaaggtgactgtaggacgaggatttgg

SEQ ID NO: 188093 - DNA, 120 bp, Artificial Sequence
  ENSG00000112130_51 (sequence is synthesized)
gagggccaatggacaattatggacaacaagagttttccttctgaaaaggcagaagattttacagcagcaggagagagattcctttaagaagacgaaaatcatgaagcttatttcttcttt

SEQ ID NO: 188094 - DNA, 120 bp, Artificial Sequence
  ENSG00000112130_52 (sequence is synthesized)
ccaggttggaaggagggcaggtcaaaactgctgtgctcatcaacaaagggattgcacctgtgaatagccactgcactccagtgtggctgacatagtgaagccctgtcgctatcaaaaaga

SEQ ID NO: 188095 - DNA, 120 bp, Artificial Sequence
  ENSG00000112130_53 (sequence is synthesized)
aaagaagatacctaaagtgcagatatacaagcaccgaggaatgtgatgaaaatacagactatgagagtctaaatggtgtttggctgaacagagcgcgtctggaacctttaagggtctatt

SEQ ID NO: 188096 - DNA, 120 bp, Artificial Sequence
  ENSG00000112137_0 (sequence is synthesized)
aagctgttcatttgtgcttgcgggctcagaagcgtcgcactgctttgttttgtactctaccgtgtcctgttgaaaggggtcaacaagtgccggggagggtgcagaggctgaggctggcgt

SEQ ID NO: 188097 - DNA, 120 bp, Artificial Sequence
  ENSG00000112137_1 (sequence is synthesized)
caccttccgttgctaaggtgttccagtgttttctctcaaaactctgtgtttggaacatcaaggatggattatcccaaaatggattattttctggatgtagagtctgctcacagactcttg

SEQ ID NO: 188098 - DNA, 120 bp, Artificial Sequence
  ENSG00000112137_2 (sequence is synthesized)
gatgttgagtcagctcaaagattcttctacagtcaaggagctcaagctcgccgggcgaccctgctcctgcctcccacattaatggcggcatcctcggaggatgatatagaccggcggccc

SEQ ID NO: 188099 - DNA, 120 bp, Artificial Sequence
  ENSG00000112137_3 (sequence is synthesized)
atccggagagtgcgctccaagagcgacacgccgtacctcgcagaggccaggatctcctttaacctgggggcagctgaggaagtggagaggctggcggcgatgcgttctgactccctcgtc

SEQ ID NO: 188100 - DNA, 120 bp, Artificial Sequence
  ENSG00000112137_4 (sequence is synthesized)
ccaggcacccacaccccacccatccgcaggagaagtaagtttgccaacctgggaaggattttcaagccttggaaatggaggaagaagaaaagcgaaaagttcaaacacacgtcagcagcc

SEQ ID NO: 188101 - DNA, 120 bp, Artificial Sequence
  ENSG00000112137_5 (sequence is synthesized)
ctggaaaggaaaatatctatgaggcaaagcagagaagagctgataaagcgaggagtcctgaaggaaatctatgataaagatggggaactctctatatccaatgaagaggactccctagaa

SEQ ID NO: 188102 - DNA, 120 bp, Artificial Sequence
  ENSG00000112137_6 (sequence is synthesized)
aatgggcagtccctgagctccagccagctgtctctgcctgccctgtccgaaatggagccagtcccaatgcccagggatccctgctcatatgaggtgctccaaccgtcagacatcatggat

SEQ ID NO: 188103 - DNA, 120 bp, Artificial Sequence
  ENSG00000112137_7 (sequence is synthesized)
gggccagatcctggcgcccctgtgaaattgccttgtctgccagtgaaactgtcgcctccgctacctccaaagaaagtcatgatctgtatgcccgtgggggggccagacctctcactggtg

SEQ ID NO: 188104 - DNA, 120 bp, Artificial Sequence
  ENSG00000112137_8 (sequence is synthesized)
tcctacacagcccagaagagtggccagcagggtgtggcccagcaccaccacactgtcctgccctcccagatccagcaccagctgcagtacggcagccacggccagcacctcccctccacc

SEQ ID NO: 188105 - DNA, 120 bp, Artificial Sequence
  ENSG00000112137_9 (sequence is synthesized)
accggctccctccccatgcacccctcgggctgcagaatgatagacgagctcaacaaaacgctggccatgaccatgcagaggctggaaagctctgagcagcgggtcccctgttccacttct

SEQ ID NO: 188106 - DNA, 120 bp, Artificial Sequence
  ENSG00000112137_10 (sequence is synthesized)
taccacagctctgggttgcactcgggtgatggggtcaccaaagcaggacctatgggccttccagaaataagacaagtgccaactgttgtgattgaatgtgatgacaataaagaaaatgtg

SEQ ID NO: 188107 - DNA, 120 bp, Artificial Sequence
  ENSG00000112137_11 (sequence is synthesized)
cctcatgagtcagactacgaagactcttcttgcctgtatacaagagaagaggaggaagaggaggaggacgaagacgacgacagctcattatacaccagctccctggccatgaaggtctgc

SEQ ID NO: 188108 - DNA, 120 bp, Artificial Sequence
  ENSG00000112137_12 (sequence is synthesized)
aggaaggactccttagccatcaaactcagcaacaggccctccaagcgagagctggaagaaaagaacatccttcccaggcagacggatgaggagcggctggagctgaggcaacagattggc

SEQ ID NO: 188109 - DNA, 120 bp, Artificial Sequence
  ENSG00000112137_13 (sequence is synthesized)
accaagctcaccaggcggctgagccagaggccaactgcagaggaactggaacagaggaacattttgaaacctcggaatgaacaagaggaacaggaggagaagagagagatcaagaggagg

SEQ ID NO: 188110 - DNA, 120 bp, Artificial Sequence
  ENSG00000112137_14 (sequence is synthesized)
ctaacccgaaagctcagtcaaaggcccacggtggaagagcttcgggaaagaaagatcctcatccgcttcagtgactacgtggaggtggctgacgctcaggactatgaccgcagggcagat

SEQ ID NO: 188111 - DNA, 120 bp, Artificial Sequence
  ENSG00000112137_15 (sequence is synthesized)
aagccgtggacccgcctcaccgctgcagacaaagctgccatccgaaaggagctcaatgaattcaaaagcactgagatggaagttcatgaattgagtagacacttaacaaggtttcaccga

SEQ ID NO: 188112 - DNA, 120 bp, Artificial Sequence
  ENSG00000112137_16 (sequence is synthesized)
ccttaacagtcgaattcctcttgagtgctatgctgtcttcaaaacataaatttataagaaccataagtgctggtatttattcacttccccattacgatgtaaatcttctgaactgccttt

SEQ ID NO: 188113 - DNA, 120 bp, Artificial Sequence
  ENSG00000112137_17 (sequence is synthesized)
tttttaaaaagaagaaaaatcaaggaaacacaatcaggattttatgtgtgaaaacgcaaaagtgatggctcggcggtccgagctgctggtcccacttctgacaccaaaatgcatcccaac

SEQ ID NO: 188114 - DNA, 120 bp, Artificial Sequence
  ENSG00000112137_18 (sequence is synthesized)
ccccggcagtgccaagggcaccagcagggccctgactgaagactgtctggcaggtggaacggtccttgtcctctccagccaggcccagcaggcactaccttcatgaagtctccagcaaac

SEQ ID NO: 188115 - DNA, 120 bp, Artificial Sequence
  ENSG00000112137_19 (sequence is synthesized)
ctcttcctcacaagtgtctgtcatctgagtccaaagaaagctgaaggggtgggtttgttttgggggtactgtgcaaagctaatgatctggttggacttctacacttggccaaatgtactg

SEQ ID NO: 188116 - DNA, 120 bp, Artificial Sequence
  ENSG00000112137_20 (sequence is synthesized)
gctccagacatgacatttggtttgggggccctttgaagttgatgccaagaaggagtgaacacttctcagttgcccctggcttttccctcctttcagccaccacccacacaatgaacaaaa

SEQ ID NO: 188117 - DNA, 120 bp, Artificial Sequence
  ENSG00000112137_21 (sequence is synthesized)
gggaagggcccatttctgggggagtctggctgcctcttggctacgaaggctggcactgagcacccatcctgctccctctgcctgagctgagctgcctttcaggaagctctggtttagaag

SEQ ID NO: 188118 - DNA, 120 bp, Artificial Sequence
  ENSG00000112137_22 (sequence is synthesized)
tgtccagtgtcatgagtgacccacgcacacacacagccattgctaaggtactcctgtgctgtttataagtctgagtgggaggaccctattgaatcctgtggggtcagaaactgcttggct

SEQ ID NO: 188119 - DNA, 120 bp, Artificial Sequence
  ENSG00000112137_23 (sequence is synthesized)
gacatttattttctctgtgcgccttgaagctgattatatggcttgggagttcttagcttctgtgtataggaccagtgcatgcaggccagaaaccactcctgtaggactggctttccagcc

SEQ ID NO: 188120 - DNA, 84 bp, Artificial Sequence
  ENSG00000112137_24 (sequence is synthesized)
aagagtttctgtgaaggagccccagagttgggcatgtgccagaatcaggccaacaccagccacacctgtccacagtgccccttc

SEQ ID NO: 188121 - DNA, 120 bp, Artificial Sequence
  ENSG00000112137_25 (sequence is synthesized)
tcaggccaacaccagccacacctgtccacagtgccccttcctgctccagttgatccagagagctcctccctctaccctcatgatgccagggagcgtgactgtgggtgtgtctctgactgg

SEQ ID NO: 188122 - DNA, 120 bp, Artificial Sequence
  ENSG00000112137_26 (sequence is synthesized)
gacacccaggatagggtgtgcgatgaggccaggaccctcctaaaccctaacagcatcctaacgaggcccattgcagctttcgatttccttcataacagagctcgcaggccctcagttgca

SEQ ID NO: 188123 - DNA, 120 bp, Artificial Sequence
  ENSG00000112137_27 (sequence is synthesized)
gagctctctcaccttctggagtgactccatcgttactccagtctttctaggtggtggaactctccaccacacatgccatttagaaagacgccagcttggcctttccaaaaagttaaccag

SEQ ID NO: 188124 - DNA, 120 bp, Artificial Sequence
  ENSG00000112137_28 (sequence is synthesized)
tcgtctccccaccacaaaccctgtgggagcaggttactcttaggatgcacacccgtcaacgaggccattgcatttttttgcaggcatgaacggctcccatctaggcactaacccaggagc

SEQ ID NO: 188125 - DNA, 120 bp, Artificial Sequence
  ENSG00000112137_29 (sequence is synthesized)
caaacaactgctggggagagttcagggcagctctttgggcggtgcctccagctgcagctttgccttgccacctggagccagcacgcctctgcccgacccaaggaggatgccatcactaga

SEQ ID NO: 188126 - DNA, 120 bp, Artificial Sequence
  ENSG00000112137_30 (sequence is synthesized)
tcctattttttttttttttttttaactcttgaatctgaatagttcctgccgtggggagaggtattgttcagggaaaatgtgatcgggattttagtgtggctgtaaacacagtcttcccga

SEQ ID NO: 188127 - DNA, 120 bp, Artificial Sequence
  ENSG00000112137_31 (sequence is synthesized)
aaggcttactgacgtttgaatgtgcaaatggtatgacgaaagatgtagggctctttcgttgaacttctctacggcgggcgggcggacacgtgttccaggtggacttgcctgccggccagg

SEQ ID NO: 188128 - DNA, 120 bp, Artificial Sequence
  ENSG00000112137_32 (sequence is synthesized)
ctttgagtctgaacttcctctaactgcagctgggctcctggcacacgcggtgccctggcatgatggtcctccctggccaggagcgagtcctaaggaaattcattccattgaccggactcc

SEQ ID NO: 188129 - DNA, 120 bp, Artificial Sequence
  ENSG00000112137_33 (sequence is synthesized)
tcccatgataggcccatggcttctctgctggccttagttcttggcccttcagattccctggggatataaggcccaagcggatctccctgcagccagccagcagacagcccagggtttccg

SEQ ID NO: 188130 - DNA, 120 bp, Artificial Sequence
  ENSG00000112137_34 (sequence is synthesized)
cccaaagtgccctcatgttgcagtccactttgtgcatggaagatattgaacacaatttccactgctcttcctgcagggcctcctttccagcagtcacttgctcagactgaggggtgcacc

SEQ ID NO: 188131 - DNA, 120 bp, Artificial Sequence
  ENSG00000112137_35 (sequence is synthesized)
tcccctgccattgacaggtcctgcgccttcaggatgggctatttcaagcccgttttaagtggctcttacacaggctcagcaacctctgtggcctgcaggatgggccttctgctgtctctt

SEQ ID NO: 188132 - DNA, 120 bp, Artificial Sequence
  ENSG00000112137_36 (sequence is synthesized)
tcctttcttaaaaccttaaggtctttctagagacctattcaattttctttttttttttttttcactacaatgtcatgacaactgcagcaatttgtgttactttccaagatgacaatttga

SEQ ID NO: 188133 - DNA, 120 bp, Artificial Sequence
  ENSG00000112137_37 (sequence is synthesized)
cattaattaagggaaaaaataaaaaggtgagctagatgacttaaaatgcatctcttttttgaaaaagctgtagctggcaagtcaaagtttattttatgtgtgtaaattcccagttgagca

SEQ ID NO: 188134 - DNA, 120 bp, Artificial Sequence
  ENSG00000112137_38 (sequence is synthesized)
tttttttcatttggattagcgtgagaggaaaaatgtgaaatgtctcaaatcaaatgcttccttctaaagattagacattgcccaaccctgcccccgcccccaatcaatcagtgacagaag

SEQ ID NO: 188135 - DNA, 120 bp, Artificial Sequence
  ENSG00000112137_39 (sequence is synthesized)
agaccgccatcagccaactagctttttttaaatggctgatatattcatctctaaaggccctcaaagcactgtaaaacttttaaaactttagcctttatgtcagattagagaaaccaaaca

SEQ ID NO: 188136 - DNA, 120 bp, Artificial Sequence
  ENSG00000112137_40 (sequence is synthesized)
atgtgacggtacatgtgatgaaaagctctgggtttatttttctcccgcttatgaacatgtatttttatttgccgaatgaaaatcgtggtgtgttgctttgatgaatggaatttcaggctc

SEQ ID NO: 188137 - DNA, 120 bp, Artificial Sequence
  ENSG00000112137_41 (sequence is synthesized)
tccctgtgcacagccggtgggcaaaggtcaccttaaatgactttttctccctatctgtctgttaatccccagaccggttgcattttccagttgcttcctgggtgtctgtacatagtttgt

SEQ ID NO: 188138 - DNA, 120 bp, Artificial Sequence
  ENSG00000112137_42 (sequence is synthesized)
ctttgtataggagtgagtgtggtgaccgtcaatcccctaatctcccaggttctaatttaacagatgatggctgtatgaggaaaacgatgtaaatagagaatacaaattaaactggatctc

SEQ ID NO: 188139 - DNA, 120 bp, Artificial Sequence
  ENSG00000112137_43 (sequence is synthesized)
aaactggatctctgtggcctaggttttgtacatacagaaactgcatggtatttaaattattgtttgtctctgatgatgtatgcagtttctttaaaaacaaaccaaaaaaaagtaaaaaaa

SEQ ID NO: 188140 - DNA, 120 bp, Artificial Sequence
  ENSG00000112137_44 (sequence is synthesized)
aggaacattttgaaacgtaagtgactaagcccatggcaatccctgatgttttgtggcggcttttgttattatttaatggtaggccacaaggtttctaccttgcgcctctgcggaaagcat

SEQ ID NO: 188141 - DNA, 120 bp, Artificial Sequence
  ENSG00000112137_45 (sequence is synthesized)
tgaaaacctttctaacggttgaagcttcatgtgtgcatgttagaacaccaaagacgacctccccaaagagaaggcaaattttattccactttattctttagaagctcacgggcggcaggc

SEQ ID NO: 188142 - DNA, 120 bp, Artificial Sequence
  ENSG00000112137_46 (sequence is synthesized)
agaaccttccttttagtgagttgtaaagtcagagagaagctgaaaaattagagtgagaccacttattatttaatgatttttaagagcagggtcacctttaaaccagaattggcttgaaaa

SEQ ID NO: 188143 - DNA, 120 bp, Artificial Sequence
  ENSG00000112137_47 (sequence is synthesized)
tggagactgtgatatgcacggctaaaataagggaaatgtccatttgaactgagactagaaagcatgactttgcattgcagctggctgctgttgataaaaatccctcatccctttgaatgt

SEQ ID NO: 188144 - DNA, 120 bp, Artificial Sequence
  ENSG00000112137_48 (sequence is synthesized)
taaattgaaagactaagaaagcatttccaagtgaagtgcttcatgtctgtctctcaggattcccacagctggtcccgggcatgcctgtctgatgctctcattcgaggaaaactgcctttc

SEQ ID NO: 188145 - DNA, 120 bp, Artificial Sequence
  ENSG00000112137_49 (sequence is synthesized)
accattgctgcagacagaaaaaaataaatgagccccttgtttggtttaggacacagagacatttgaatatgtacagaggatccacttggtgctttaaaaaaaaaaagagaaaacaggata

SEQ ID NO: 188146 - DNA, 120 bp, Artificial Sequence
  ENSG00000112137_50 (sequence is synthesized)
taccattctcgccaacactggcctcaagatagtgaacaaatatttctggcttaattcatgaccctgttccccctaccccacaacacacttctaatttctctccagaagagaaagatatat

SEQ ID NO: 188147 - DNA, 120 bp, Artificial Sequence
  ENSG00000112137_51 (sequence is synthesized)
actatgcagagttttctagaaatgctatgttgtacagactgactccttgcctcccccggcccccccgccccgccccgccccgtgcccagtaaatcacatgcaaccgcagtgtgagtttgc

SEQ ID NO: 188148 - DNA, 120 bp, Artificial Sequence
  ENSG00000112137_52 (sequence is synthesized)
cgggaatttccactgaaaccacactaagatattcttgactttacctttctaccgtgctcactgtggccttgtgacttggtcggcatttcgtagtctgctgaaggtgggtgctgggttccg

SEQ ID NO: 188149 - DNA, 120 bp, Artificial Sequence
  ENSG00000112137_53 (sequence is synthesized)
ctttggtggggagacctgttgcctacagcacccacccccgcccgacgcccccgcatgtccgtttatgtcaactctgcctttatcaatgtcttgcctcccgtccccacgccagccgccact

SEQ ID NO: 188150 - DNA, 120 bp, Artificial Sequence
  ENSG00000112137_54 (sequence is synthesized)
tcctcaactctcagtagaagttattttcaggattagccttcctcagtcgtgggggaaccctacgctttgcctaggtctctaggaatgtgtgtttacttttttctgcccaaggggtaccct

SEQ ID NO: 188151 - DNA, 120 bp, Artificial Sequence
  ENSG00000112137_55 (sequence is synthesized)
ttaaagtttccaagcttaatattctatataatgaattcagagctttttcaaagcatttccaaggtcagggaagcatttggcttgtaggatgtcttcctttcggccccaatctggtacctg

SEQ ID NO: 188152 - DNA, 120 bp, Artificial Sequence
  ENSG00000112137_56 (sequence is synthesized)
agccattataaacttcccattgttggagagaaagataaacagccaggtgaacctgtacaacttactcacagcccgctgctgtacttgtggcctctgacctgagacctaaactcaaagaag

SEQ ID NO: 188153 - DNA, 120 bp, Artificial Sequence
  ENSG00000112137_57 (sequence is synthesized)
ctaaaagcctccgggggattatttaggtttcagaaaatagtgcttatcacaccaggagtacggtttctggagagatctaaaatcccctagctcagctctgggctctctcaaagatatcag

SEQ ID NO: 188154 - DNA, 120 bp, Artificial Sequence
  ENSG00000112137_58 (sequence is synthesized)
atccccgctgtggcttgtccagatccctgggagactacaggtcctttgagcttgggtttttaccgccatcaaccagggaacttagattcaggggaccaaaaaggagttgtgaaagattgt

SEQ ID NO: 188155 - DNA, 120 bp, Artificial Sequence
  ENSG00000112137_59 (sequence is synthesized)
tcccatggttctcttttattctcttccctaatccctcttgtcctggccacatagttgcaaattaaagaactacttgaccaattctaacaggttggtcatttcatagttttgaaacttttc

SEQ ID NO: 188156 - DNA, 120 bp, Artificial Sequence
  ENSG00000112137_60 (sequence is synthesized)
agaaatcaacttgttttcccataggttcttatttttccctgtattctggaactatgttctcctaaatatttttttaaatttaatctattgcgattgttaaacaaaaaaaatgtctagtgg

SEQ ID NO: 188157 - DNA, 120 bp, Artificial Sequence
  ENSG00000112137_61 (sequence is synthesized)
tataagaaaacatcctccaatagtttgttttaaaactgattttctgagctttcagccatttgaggaactgctcggtgttgggtggtggggaacagggcacagagatgccatggctcagcc

SEQ ID NO: 188158 - DNA, 120 bp, Artificial Sequence
  ENSG00000112137_62 (sequence is synthesized)
ctggagctttgagagccttgggttggtttccagccccaccctgcctggtcctgggagcagcccctgttctgtccagcagccagtgaggccctgtgcacctctgagcacataatgaaccct

SEQ ID NO: 188159 - DNA, 120 bp, Artificial Sequence
  ENSG00000112137_63 (sequence is synthesized)
ctgacggtggcagctgtaatgacgacatcgtaggcctttcctggcctgtcttcctagttgcctaatggggttgtcttggtaccttctgcctgaaaattcatgaacctgggttggtcaatg

SEQ ID NO: 188160 - DNA, 120 bp, Artificial Sequence
  ENSG00000112137_64 (sequence is synthesized)
gctttgaactaaaggtatcaattctgtaggtggtagcttgtggccccacccctcagagtgacctaagaaacgcacataggagatgaaggctccatgctgtgtcagctgtgtcacaggatg

SEQ ID NO: 188161 - DNA, 120 bp, Artificial Sequence
  ENSG00000112137_65 (sequence is synthesized)
cccgccttcacggctctgaagggacctgtaggatcagaagtctgaggctagtaatgaggaggagagccggccccacacaaaacatgaccacaggaaaaaacctatctgtgtaaccactga

SEQ ID NO: 188162 - DNA, 120 bp, Artificial Sequence
  ENSG00000112137_66 (sequence is synthesized)
gccaggtagggtgtgactggccacttaacacccctgaggcttcagatcctcagttataaaccaggagtggtagacgaggtggtcactaggtcccctcatggccctagtattctgtgcttc

SEQ ID NO: 188163 - DNA, 120 bp, Artificial Sequence
  ENSG00000112137_67 (sequence is synthesized)
tgtaaattttcaccgtgtgccctctagctgtccctggtgacccaacatccagaccaccttttcttccatccgttttcccacctgagacatcgcaaaatgggagttccctccttctggttc

SEQ ID NO: 188164 - DNA, 120 bp, Artificial Sequence
  ENSG00000112137_68 (sequence is synthesized)
ttgctgtctgcctccccatttaactctgctagattaattcatactaagatattaatggctgactagtttaataggttttatcccactgaaatttgcatttgtacaaatgtcactgtctgg

SEQ ID NO: 188165 - DNA, 120 bp, Artificial Sequence
  ENSG00000112137_69 (sequence is synthesized)
gggctccctacttccgggtgttgctgtctgccccccagtttatctctactagattaattcatactgagctattaatggctgactagtttaatgggcttttattcaagagaaatttgcatt

SEQ ID NO: 188166 - DNA, 120 bp, Artificial Sequence
  ENSG00000112137_70 (sequence is synthesized)
ccacccattgcgtcattgcaggctcatgccctggctatgatgtttcatgtacggtggctaaatttcacgcctggccacagaagtatcatttctgtgcctttgccactcatgtcttctaag

SEQ ID NO: 188167 - DNA, 120 bp, Artificial Sequence
  ENSG00000112137_71 (sequence is synthesized)
cctccgaaataagaggagcaggaccagaagaagagcagccattgttctctgcagacagacacattctctcacatgtccccggggccacagacctctttatgttctaactgggtctgcaca

SEQ ID NO: 188168 - DNA, 120 bp, Artificial Sequence
  ENSG00000112137_72 (sequence is synthesized)
tcagaagactcccagagattggggacggccgaggcaggtcgggggtctggtttggatccccgggttactttctgtttcattttgaaatgttccctgtttctgcaaccggttgcctccaat

SEQ ID NO: 188169 - DNA, 120 bp, Artificial Sequence
  ENSG00000112137_73 (sequence is synthesized)
gtcaagtaaaacgcaggactccttggagacgccagctgggcttctaaggactggggctctgtgaaggtaagaggcagtctgtgccccaccggctggaggctgccactttagagacgtctg

SEQ ID NO: 188170 - DNA, 120 bp, Artificial Sequence
  ENSG00000112137_74 (sequence is synthesized)
gatgagctgaggatcaacactcacaacggctgacacttaatgacgctatttatcaaatagaccttttgaaaactgatagcatgtgaatttaacagtatatgttccagagaatataaagca

SEQ ID NO: 188171 - DNA, 120 bp, Artificial Sequence
  ENSG00000112137_75 (sequence is synthesized)
ctttttggggatatggatgaagcaagaatgggaccagcagtgccaactcttgggcgtcctcttgggctcgaactgtgttccctggaaaaccacggcctcctgaagacagcccctacatac

SEQ ID NO: 188172 - DNA, 120 bp, Artificial Sequence
  ENSG00000112137_76 (sequence is synthesized)
actacatcagcccacatctgctcaggccccagtacaggtggacaattctctactcagggtatgagccctgttcaaggagctaagagaaggagggtggtttggctgcctttagagggggaa

SEQ ID NO: 188173 - DNA, 120 bp, Artificial Sequence
  ENSG00000112137_77 (sequence is synthesized)
gagtttggctgagaggacatttactctttggtccatatgggaagggaaaatgcgggttggcgtgtgtattcatttcctagagttgctgtaacaaagtaccacaaactacatgacataaaa

SEQ ID NO: 188174 - DNA, 120 bp, Artificial Sequence
  ENSG00000112137_78 (sequence is synthesized)
gtgcctctcctgggcttgaaattgaggaactgaggaggcggtggtggcgagagtcagtctttcagagcacaggatggaacaagaactccagccactgactgtctcatgtatctgcaaggg

SEQ ID NO: 188175 - DNA, 120 bp, Artificial Sequence
  ENSG00000112137_79 (sequence is synthesized)
catctctgcctggagacctgaaaccccatgtgatgtaaagaaggcaaaatgacaaggtcagcctgctcagtagcaatttgaaacaacgcaggtagtttggaaagcaatccccataaggag

SEQ ID NO: 188176 - DNA, 120 bp, Artificial Sequence
  ENSG00000112137_80 (sequence is synthesized)
ctctcccttcacccctttctctcctttgctctctttctttctctctcccttttttttcctttttccctctctttcccactccctccccaccccttcccttcctctcccctcccccttccc

SEQ ID NO: 188177 - DNA, 120 bp, Artificial Sequence
  ENSG00000112137_81 (sequence is synthesized)
ctccccctcccccgtgcgcgagcctcttcctctcccctcctcccccttccgcctctctccctctccctccgtctccttctccctctcagctcgccgggcgaccctgctcctgcctcccac

SEQ ID NO: 188178 - DNA, 120 bp, Artificial Sequence
  ENSG00000112137_82 (sequence is synthesized)
accgctgcagacaaagtaagcagaggggagtgctggagagtgggaggcaggaccgtctgctgggtctcgctgggctcaccgctggggagcgtgtagggagacctgcagccaggcctcagc

SEQ ID NO: 188179 - DNA, 120 bp, Artificial Sequence
  ENSG00000112137_83 (sequence is synthesized)
cgcagtccccataatggagtgttgagaccccaacacctttccccaggggccacagataatctgcggaaaggctgctgaatcggagaaaacacaaggcacataatactgtgcccattttac

SEQ ID NO: 188180 - DNA, 120 bp, Artificial Sequence
  ENSG00000112137_84 (sequence is synthesized)
aggaggaggagcagcagcctgggaggctgtgcccagagaaagagaatagcactggataggtgtagacaggtgaaggcaagaggctccaggctcatcacagcccttccgtataggggatgg

SEQ ID NO: 188181 - DNA, 120 bp, Artificial Sequence
  ENSG00000112137_85 (sequence is synthesized)
tgccccccaaaaaacctgctgctttccctggagaccatgaagagaccccagtgaagcagctgccccttctcaagcagcccccggccctgcctcccaaacccactaccaggattgccaacc

SEQ ID NO: 188182 - DNA, 120 bp, Artificial Sequence
  ENSG00000112137_86 (sequence is synthesized)
acttaacagattggcaccaagctcaccaggtaggacagcggcaccctctgcctccctggcagtgggcctttagctctccaggttctagcaaaagaattcagtctcggccgggcgcagtag

SEQ ID NO: 188183 - DNA, 80 bp, Artificial Sequence
  ENSG00000112139_0 (sequence is synthesized)
acagcaaagcccaagttgctgagcgagcggagcgctcccgcggcccggagccgagcggccgccgcgccccggagcccggc

SEQ ID NO: 188184 - DNA, 120 bp, Artificial Sequence
  ENSG00000112139_1 (sequence is synthesized)
ggcggggacgaccaacttggggcgcggcgtagccccgctctcccgagagctcggagcccgggagggctacggccgcggccagacggcgggagaggagcgcggcgagcggaggcggcgagc

SEQ ID NO: 188185 - DNA, 120 bp, Artificial Sequence
  ENSG00000112139_2 (sequence is synthesized)
cggcgagcggcgcccgcgccgcagccccggcctgggcgagagcgcgaatatttttcaaaagactcaaactttcctcctttccccgttttctggggcccttcttgcctggaattgctctcc

SEQ ID NO: 188186 - DNA, 120 bp, Artificial Sequence
  ENSG00000112139_3 (sequence is synthesized)
agattcccgcggggcgccgggctgctattcttcccccgggtttatcggcggctcggctaacttcacggacccggggacccgcggcgctcgtccctcggccgaacccagcccgcgctgctc

SEQ ID NO: 188187 - DNA, 120 bp, Artificial Sequence
  ENSG00000112139_4 (sequence is synthesized)
cccggatcaggagggccgggcccggggctgcttcgccgccgcgagtgctttcagcccggccccctggagtcgggccgctgagcccacggcagcggccgcaggactggaaacagcagattg

SEQ ID NO: 188188 - DNA, 120 bp, Artificial Sequence
  ENSG00000112139_5 (sequence is synthesized)
attaactcgagcggagccccggcctccccgactccgctccgctgaggggcggccccagtgcggggaaacgacaagtttgtcagtcgtccgtggcctgttggatcgaagcgccgcctccgc

SEQ ID NO: 188189 - DNA, 120 bp, Artificial Sequence
  ENSG00000112139_6 (sequence is synthesized)
cgtccgtggcctgttggatcgaagcgccgcctccgccgccgagaggtccccggcgcctagcatcccgcgcggacggccctgggtacccggggcggctcggcggccgggctcctcgggtcg

SEQ ID NO: 188190 - DNA, 120 bp, Artificial Sequence
  ENSG00000112139_7 (sequence is synthesized)
cggggctgggccagcgccccctgcgtccccacgcgggcagcggccccgccggaggagaaacacgggtcgccgccacctccgcctcttcagtctcctggtcttcgtcgccgctctctctct

SEQ ID NO: 188191 - DNA, 120 bp, Artificial Sequence
  ENSG00000112139_8 (sequence is synthesized)
cacctctcagggaaagggggggacataggggcgtcgcggggccccggcgaatgcgccccccgccgcctctcgggctgcgccgcctcgcggggatgaagcaccggccgtgaagatggaggt

SEQ ID NO: 188192 - DNA, 120 bp, Artificial Sequence
  ENSG00000112139_9 (sequence is synthesized)
gacctgccttctacttctggcgctgatccccttccactgccggggacaaggagtctacgctccagcccaggcgcagatcgtgcatgcgggccaggcatgtgtggtgaaagaggacaatat

SEQ ID NO: 188193 - DNA, 120 bp, Artificial Sequence
  ENSG00000112139_10 (sequence is synthesized)
cagcgagcgtgtctacaccatccgggagggggacaccctcatgctgcagtgccttgtaacagggcaccctcgaccccaggtacggtggaccaagacggcaggtagcgcctcggacaagtt

SEQ ID NO: 188194 - DNA, 120 bp, Artificial Sequence
  ENSG00000112139_11 (sequence is synthesized)
ccaggagacatcggtgttcaacgagacgctgcgcatcgagcgtattgcacgcacgcagggcggccgctactactgcaaggctgagaacggcgtgggggtgccggccatcaagtccatccg

SEQ ID NO: 188195 - DNA, 120 bp, Artificial Sequence
  ENSG00000112139_12 (sequence is synthesized)
cgtggacgtgcagtacctggatgagccaatgctgacggtgcaccagacggtgagcgatgtgcgaggcaacttctaccaggagaagacggtgttcctgcgctgtactgtcaactccaaccc

SEQ ID NO: 188196 - DNA, 120 bp, Artificial Sequence
  ENSG00000112139_13 (sequence is synthesized)
gcctgcccgcttcatctggaagcggggttccgataccctatcccacagccaggacaatggggttgacatctatgagcccctctacactcagggggagaccaaggtcctgaagctgaagaa

SEQ ID NO: 188197 - DNA, 120 bp, Artificial Sequence
  ENSG00000112139_14 (sequence is synthesized)
cctgcggccccaggactatgccagctacacctgccaggtgtctgtgcgtaacgtgtgcggcatcccagacaaggccatcaccttccggctcaccaacaccacggcaccaccagccctgaa

SEQ ID NO: 188198 - DNA, 120 bp, Artificial Sequence
  ENSG00000112139_15 (sequence is synthesized)
gctgtctgtgaacgaaactctggtggtgaaccctggggagaatgtgacggtgcagtgtctgctgacaggcggtgatcccctcccccagctgcagtggtcccatgggcctggcccactgcc

SEQ ID NO: 188199 - DNA, 120 bp, Artificial Sequence
  ENSG00000112139_16 (sequence is synthesized)
cctgggtgctctggcccagggtggcaccctcagcatcccttcagtgcaggcccgggactctggctactacaactgcacagccaccaacaatgtgggcaaccctgccaagaagactgtcaa

SEQ ID NO: 188200 - DNA, 120 bp, Artificial Sequence
  ENSG00000112139_17 (sequence is synthesized)
cctgctggtgcgatccatgaagaacgctacattccagatcactcctgacgtgatcaaagagagtgagaacatccagctgggccaggacctgaagctatcgtgccacgtggatgcagtgcc

SEQ ID NO: 188201 - DNA, 120 bp, Artificial Sequence
  ENSG00000112139_18 (sequence is synthesized)
ccaggagaaggtgacctaccagtggttcaagaatggcaagccggcacgcatgtccaagcggctgctggtgacccgcaatgatcctgagctgcccgcagtcaccagcagcctagagctcat

SEQ ID NO: 188202 - DNA, 120 bp, Artificial Sequence
  ENSG00000112139_19 (sequence is synthesized)
tgacctgcacttcagtgactatggcacctacctgtgcatggcttctttcccaggggcacccgtgcccgacctcagcgtcgaggtcaacatctcctctgagacagtgccgcccaccatcag

SEQ ID NO: 188203 - DNA, 120 bp, Artificial Sequence
  ENSG00000112139_20 (sequence is synthesized)
tgtgcccaagggtagggccgtggtgaccgtgcgcgagggatcgcctgccgagctgcaatgcgaggtgcggggcaagccgcggccgccagtgctctggtcccgcgtggacaaggaggctgc

SEQ ID NO: 188204 - DNA, 120 bp, Artificial Sequence
  ENSG00000112139_21 (sequence is synthesized)
actgctgccctcggggctgcccctggaggagactccggacgggaagctgcggctggagcgagtgagccgagacatgagcgggacctaccgctgccagacggcccgctataatggcttcaa

SEQ ID NO: 188205 - DNA, 120 bp, Artificial Sequence
  ENSG00000112139_22 (sequence is synthesized)
cgtgcgcccccgtgaggcccaggtgcagctgaacgtgcagttcccgccggaggtggagcccagttcccaggacgtgcgccaggcgctgggccggcccgtgctcctgcgctgctcgctgct

SEQ ID NO: 188206 - DNA, 120 bp, Artificial Sequence
  ENSG00000112139_23 (sequence is synthesized)
gcgaggcagcccccagcgcatcgcctcggctgtgtggcgtttcaaagggcagctgctgccgccgccgcctgttgttcccgccgccgccgaggcgccggatcacgcggagctgcgcctcga

SEQ ID NO: 188207 - DNA, 120 bp, Artificial Sequence
  ENSG00000112139_24 (sequence is synthesized)
cgccgtaactcgcgacagcagcggcagctacgagtgcagcgtctccaacgatgtgggctcggctgcctgcctcttccaggtctccgccaaagcctacagcccggagttttacttcgacac

SEQ ID NO: 188208 - DNA, 120 bp, Artificial Sequence
  ENSG00000112139_25 (sequence is synthesized)
ccccaaccccacccgcagccacaagctgtccaagaactactcctacgtgctgcagtggactcagagggagcccgacgctgtcgaccctgtgctcaactacagactcagcatccgccagtt

SEQ ID NO: 188209 - DNA, 120 bp, Artificial Sequence
  ENSG00000112139_26 (sequence is synthesized)
gaaccagcacaatgcggtggtcaaggccatcccggtccggcgtgtggagaaggggcagctgctggagtacatcctgaccgatctccgtgtgccccacagctatgaggtccgcctcacacc

SEQ ID NO: 188210 - DNA, 120 bp, Artificial Sequence
  ENSG00000112139_27 (sequence is synthesized)
ctataccaccttcggggctggtgacatggcctcccgcatcatccactacacagagcccatcaactctccgaacctttcagacaacacctgccactttgaggatgagaagatctgtggcta

SEQ ID NO: 188211 - DNA, 120 bp, Artificial Sequence
  ENSG00000112139_28 (sequence is synthesized)
tacccaggacctgacagacaactttgactggacgcggcagaatgccctcacccagaaccccaaacgctcccccaacactggtccccccaccgacataagtggcacccctgagggctacta

SEQ ID NO: 188212 - DNA, 120 bp, Artificial Sequence
  ENSG00000112139_29 (sequence is synthesized)
catgttcatcgagacatcgaggcctcgggagctgggggaccgtgcaaggttagtgagtcccctctacaatgccagcgccaagttctactgtgtctccttcttctaccacatgtacgggaa

SEQ ID NO: 188213 - DNA, 120 bp, Artificial Sequence
  ENSG00000112139_30 (sequence is synthesized)
acacatcggctccctcaacctcctggtgcggtcccggaacaaaggggctctggacacgcacgcctggtctctcagtggcaataagggcaatgtgtggcagcaggcccatgtgcccatcag

SEQ ID NO: 188214 - DNA, 120 bp, Artificial Sequence
  ENSG00000112139_31 (sequence is synthesized)
ccccagtgggcccttccagattatttttgagggggttcgaggcccgggctacctgggggatattgccatagatgacgtcacactgaagaagggggagtgtccccggaagcagacggatcc

SEQ ID NO: 188215 - DNA, 120 bp, Artificial Sequence
  ENSG00000112139_32 (sequence is synthesized)
caataaagtggtggtgatgccgggcagtggagccccctgccagtccagcccacagctgtgggggcccatggccatcttcctcttggcgttgcagagatgatgagagctgtgtggccaccc

SEQ ID NO: 188216 - DNA, 120 bp, Artificial Sequence
  ENSG00000112139_33 (sequence is synthesized)
ccccaaccttgcccccggcacaccaaagtgtccacattgtaccaaagactgacccccgccagctggggtgcccaggggcagggccggcccgccagggagggggcctgcattggctgcaag

SEQ ID NO: 188217 - DNA, 120 bp, Artificial Sequence
  ENSG00000112139_34 (sequence is synthesized)
gatgagcagagaacaaggacagaggccaggcactgaggccctggagacagctgttccacttgcacacacgcacacactcatgctcacacacacagagatatattaaagcacaagtttcta

SEQ ID NO: 188218 - DNA, 120 bp, Artificial Sequence
  ENSG00000112139_35 (sequence is synthesized)
tctgacctgccagcaccttctttactgcaaagacaggggacttgcctgaatggcatccgccaacccagggacctcggcgcaacataggccttgtccttgctgcactcgtggtgtgcttct

SEQ ID NO: 188219 - DNA, 120 bp, Artificial Sequence
  ENSG00000112139_36 (sequence is synthesized)
gactttaccctgtcccctaagtcaaggccgaactccagcctggtggctttgccagaagggagccagaagtggggcagacatggagcccctcccttggtcagactctgggactcctgagat

SEQ ID NO: 188220 - DNA, 120 bp, Artificial Sequence
  ENSG00000112139_37 (sequence is synthesized)
gggagaggcagggatcagaggacgaacaggtgggactttgcgagctctgtgactgtcccacgtccaggagacaaggaaggtagggcacctgctgcacacgattctgtccagagtgagcac

SEQ ID NO: 188221 - DNA, 120 bp, Artificial Sequence
  ENSG00000112139_38 (sequence is synthesized)
tggatggtggagaccataggtcaccccagattccttgacctatttctgggacaccatatttccctcctcagtgtgcaccctttgaagggacccagcacagggtcttgggcctgggcagtc

SEQ ID NO: 188222 - DNA, 120 bp, Artificial Sequence
  ENSG00000112139_39 (sequence is synthesized)
tgaagactgataacttccccactccaccctacaagcagtgggactcctgagaacacggttctctcctagcctcagcccccagctgggtctcagaggagctgggggagcggtggccagccc

SEQ ID NO: 188223 - DNA, 120 bp, Artificial Sequence
  ENSG00000112139_40 (sequence is synthesized)
attttctggggtgaggcttgacttggagaaaggcagaagagacgtcccgcttctgtgatttggtgcccccatatcagacaatgaatttggaagtggagaggggccttcatttcttatcta

SEQ ID NO: 188224 - DNA, 120 bp, Artificial Sequence
  ENSG00000112139_41 (sequence is synthesized)
cttggcatgaaagggtgccctggataggagggtgtgtacagggcaaaatgccaaaaagcactgtctagttgaaagttcccttctccacccaggggcagtgaaggaggaggggcttataga

SEQ ID NO: 188225 - DNA, 120 bp, Artificial Sequence
  ENSG00000112139_42 (sequence is synthesized)
gctgggattggtggagggagcaggtgccagtcccctcactctctgggagctgtgaaagggatccctgtccttgggtcctgggttaggcacctgagattgacatgatgggatctagatctt

SEQ ID NO: 188226 - DNA, 120 bp, Artificial Sequence
  ENSG00000112139_43 (sequence is synthesized)
tcctccttgacatcacctgagcccccacctagccatccatgggagagagaaggcccagccccttctagaatgactctttaggcatgcgtgcatatgtgtgtatgtgtttgtgcccgtctg

SEQ ID NO: 188227 - DNA, 120 bp, Artificial Sequence
  ENSG00000112139_44 (sequence is synthesized)
tcacatatctgcctgtgagactggattgagacccattcgtttctatgaatgtccgtgtacgtcagcgtgtgtgtccaccttcctgagtgatgtgttcgcttgtagggtgctggctgaata

SEQ ID NO: 188228 - DNA, 120 bp, Artificial Sequence
  ENSG00000112139_45 (sequence is synthesized)
gactctgtccagccctgttctgtagtctcaagctgcctgcgatggcctgaaattccacctttcatcccctatggatgacggagagcttacagatgaccctattgaatgcaagcacctttg

SEQ ID NO: 188229 - DNA, 120 bp, Artificial Sequence
  ENSG00000112139_46 (sequence is synthesized)
gtgaggagcatcacagggctccttctggagcatttggtggggacagctgcagagaagaggcctggaactcgggcagcactgcagtgccaggaggcaggcggggaaccgaggcaaaggctg

SEQ ID NO: 188230 - DNA, 120 bp, Artificial Sequence
  ENSG00000112139_47 (sequence is synthesized)
cccatctccccctgccaggcctgtgtgatcattatcaccaacagctggtgggtggccgggccaggatgcagcggggccttctgatgcccaatcagcacggctgccttcctgacccagtca

SEQ ID NO: 188231 - DNA, 120 bp, Artificial Sequence
  ENSG00000112139_48 (sequence is synthesized)
aggcctctgtctgaaatgagtcgctccaggttctcagcatacacttccatcgcgtctgtcgggtattgttccttaactgtcccatctgtgcagagtccattgccccaactagactgtgag

SEQ ID NO: 188232 - DNA, 120 bp, Artificial Sequence
  ENSG00000112139_49 (sequence is synthesized)
ctcctcctctgagccttccaagtcccccctccaccttcgccacctcccgctcgtgcccagcacaagtgagcctggtgtggaaaccactccattgcccggtggaatggattctgtaatcag

SEQ ID NO: 188233 - DNA, 120 bp, Artificial Sequence
  ENSG00000112139_50 (sequence is synthesized)
tggttcctggccttgcctgcagaatagaaccaccagagtcctttaaaaagtattgctgcttggttcccacctcagaggttctgagttaattggactggagcgcagtcggacatcaagaaa

SEQ ID NO: 188234 - DNA, 120 bp, Artificial Sequence
  ENSG00000112139_51 (sequence is synthesized)
tgttgaaaagctccttgggttctcctgacagcaggaaccactggcctggcaccacctgggtgcttcctctgtgccctcgctggggtaggcattggagcaccagagatgaatagccccaag

SEQ ID NO: 188235 - DNA, 120 bp, Artificial Sequence
  ENSG00000112139_52 (sequence is synthesized)
tgctccctctttggggttcccaaggcaccctgtgcctgcttccctcagaggaccttccaatccatttgccccgcaaccctggctgctccgacaggggagacttgtctcccttgttcccct

SEQ ID NO: 188236 - DNA, 120 bp, Artificial Sequence
  ENSG00000112139_53 (sequence is synthesized)
caggatccatagagtggacagtaaaggtgctcagtacatgttggctgagctgaactgcatacatgtggcccccaggttcctggtctttatggacgaagggcacaaggtggaggggggatg

SEQ ID NO: 188237 - DNA, 120 bp, Artificial Sequence
  ENSG00000112139_54 (sequence is synthesized)
gggggatgctgctggaggtctcagtgggtgcagacagccctgccttgaggatggcttgacctgggattgacaaaatgtgtctgctgaaatgctgaggtccccacgtgtgaatgggtgagg

SEQ ID NO: 188238 - DNA, 120 bp, Artificial Sequence
  ENSG00000112139_55 (sequence is synthesized)
ctgatgtggatgtctgtgtgtgccagcaggtgggtgggggatgtgggtgtcagtgtatgccagtgggcactgtaaatgtctaggcatgtgctggtctctgtgtgtttgtgtgttcctcag

SEQ ID NO: 188239 - DNA, 120 bp, Artificial Sequence
  ENSG00000112139_56 (sequence is synthesized)
caggaatgagtgtctttgtgtatcacctggtgacttgtcagtgtctgtgtctgtgtgtgcctgtgagccagcatctctgtatcagtgttgctcatgctgtgtctttgtgcgccatggtgt

SEQ ID NO: 188240 - DNA, 120 bp, Artificial Sequence
  ENSG00000112139_57 (sequence is synthesized)
gtcagtgtctgtgtgttgatgggtggcccatgagtgacccccgccaggggagaccaggctggctggatccagcacatctccccagtggcagcctcgccctctgggtcagggtgactgagg

SEQ ID NO: 188241 - DNA, 120 bp, Artificial Sequence
  ENSG00000112139_58 (sequence is synthesized)
cattttgtggccttaaaacggggtgttcagggtcagccctcagggtgctggggcccttccatcccttgtccccttcaggttggtgaaaaggactccgggggccaggtgctgtatagcagc

SEQ ID NO: 188242 - DNA, 120 bp, Artificial Sequence
  ENSG00000112139_59 (sequence is synthesized)
ttatggaagtctcagctgggctatcctgcccttgggagcacagacaggctcctagggtgctgagtgaagcctgaagaccaagccccctcctcctggaatgctccttccacccctacctct

SEQ ID NO: 188243 - DNA, 120 bp, Artificial Sequence
  ENSG00000112139_60 (sequence is synthesized)
cagagatgggcctgacacctctttctcattcattctccttttccctgtgctctgggaaagcccctggctcaggctgtcagagtgaggatggacctcaaaagtttgatcccctcgtgcaga

SEQ ID NO: 188244 - DNA, 120 bp, Artificial Sequence
  ENSG00000112139_61 (sequence is synthesized)
tgaagaagctgaagcccagagtggggaaggggagtggcccaaggtcacacagctagtttgagtagagccagtcttgggagagccaagtactacagccctgggggtgtcacaccgcttgtc

SEQ ID NO: 188245 - DNA, 120 bp, Artificial Sequence
  ENSG00000112139_62 (sequence is synthesized)
actgcccctgaggtctcctgccaaacaactgcagggagtttggctaacagtcctgtgtccagggtgccggtggggatgttatagatgttgctgggatcctgccctcggctccaaattctg

SEQ ID NO: 188246 - DNA, 120 bp, Artificial Sequence
  ENSG00000112139_63 (sequence is synthesized)
gcctctcatcccaggctgcagacccttctgccccatgacaggcctgggtgccacacagaggtggccaccctcccaccacagtgtctgcagctgctgcccttctcccaggcccccagacag

SEQ ID NO: 188247 - DNA, 120 bp, Artificial Sequence
  ENSG00000112139_64 (sequence is synthesized)
aagagaccctgtttcccctcctctcccctgtgacttcacaagagcttgggctaggagtgaaggtcagcatgttctcatgtgctcatcctcttggtttccccaaagaccgggagggtcacg

SEQ ID NO: 188248 - DNA, 120 bp, Artificial Sequence
  ENSG00000112139_65 (sequence is synthesized)
gatggggcgtgcagaatccttgtgttttttctcgctgggcagcttgaggggctggggagtattcccagggtctttgctctggagagtccctgcagagccactggctgaggttgggttcag

SEQ ID NO: 188249 - DNA, 120 bp, Artificial Sequence
  ENSG00000112139_66 (sequence is synthesized)
ggttcagcggagtcctccatgcttccaaaggccgggaagcacccgcctctctatcgagtcagtgctgtgcgtgtgtgtctgagaatgtgtgtgatgtgtggagtgtgcgtgtgtttgtgt

SEQ ID NO: 188250 - DNA, 120 bp, Artificial Sequence
  ENSG00000112139_67 (sequence is synthesized)
gtgtgtgtgtgtgtgttggggcagaaggaccactctttcctggggatcccttgacccttataactagaagggaccttagggagcatctaagctggtgcccccattgtacaggcgaggtcc

SEQ ID NO: 188251 - DNA, 120 bp, Artificial Sequence
  ENSG00000112139_68 (sequence is synthesized)
agagggatggcatctgcccaccccaccccttgccctcttgttgcctgcactcatttcccagggaccctcctaggataggactgccctccttcctggccccctcccgccatcctcccagcc

SEQ ID NO: 188252 - DNA, 120 bp, Artificial Sequence
  ENSG00000112139_69 (sequence is synthesized)
acccacataatcaccatctcagcccaactctggtggccctctaggtctccatgcattcttcctgccctagagtagccagctcaccaaggcctttatccccagcccaggagaagggtcagg

SEQ ID NO: 188253 - DNA, 120 bp, Artificial Sequence
  ENSG00000112139_70 (sequence is synthesized)
gagggaaggggctgcaccagccctgagacctcaaagacttgggagaaaagccaaaactcctcatgcccaggcccacatgtctgaccaccccagcccaccccgccaccaaggtaaaagcac

SEQ ID NO: 188254 - DNA, 120 bp, Artificial Sequence
  ENSG00000112139_71 (sequence is synthesized)
aacaggagacccccttattaatgggtgaaatgattggggttgtttttttagtcacacagccccatcctcacccctttgccttgctgtctgtctccaccccagcctctgttccccatttgc

SEQ ID NO: 188255 - DNA, 120 bp, Artificial Sequence
  ENSG00000112139_72 (sequence is synthesized)
ctctctttcacctccaagcccccaaatgtaacctctagttgcggacgcggttgttctatcaataaagctgcagtgttctagcgctcagcgtcagccgtgtgtgttggcagggcagagtgg

SEQ ID NO: 188256 - DNA, 120 bp, Artificial Sequence
  ENSG00000112139_73 (sequence is synthesized)
gccagggtcggggccggggcactggagggctcctctcagctccctgggggcagcctttcttctctttggcacctgtcgacagggatcctgctctgtggcctggacagtgaggacctgcat

SEQ ID NO: 188257 - DNA, 120 bp, Artificial Sequence
  ENSG00000112139_74 (sequence is synthesized)
cctggtctgctcccagtgaacttgtgtgcatttgttcattcagcaaataccaaccaaacactgcctttgtggaagcccctgtttaatgggagagatggacagtaagctaataatgacacc

SEQ ID NO: 188258 - DNA, 120 bp, Artificial Sequence
  ENSG00000112139_75 (sequence is synthesized)
aagacatatataatgatgtgtacagtgagggctgggaagggaaattggtgctatgaaagaaggtatgaagagggttcttatttgggttggggcttcggggaagacttctctaagagacat

SEQ ID NO: 188259 - DNA, 120 bp, Artificial Sequence
  ENSG00000112139_76 (sequence is synthesized)
ttaggagagacagaatgattggagttagcctgttgggattgggagaggcttctgagcagagggaacagaatatgcaaaggccaacagggcccaaaaacttagaaggctcaaggaagggga

SEQ ID NO: 188260 - DNA, 120 bp, Artificial Sequence
  ENSG00000112139_77 (sequence is synthesized)
gtaagggcaaaggaggaggactaaagttggtatggtggttgaaatgccattttcccttctcggcacccaaccctaccatccctcctacacgcttggagtcccttccctcttaatctctat

SEQ ID NO: 188261 - DNA, 120 bp, Artificial Sequence
  ENSG00000112139_78 (sequence is synthesized)
tctggccctacagaccccaccctgcaccctacttggggctgcctcccttattcaccaccagctagctgcatccttgccctaagatcaagttatgccaacctttccctttaccccagacct

SEQ ID NO: 188262 - DNA, 120 bp, Artificial Sequence
  ENSG00000112139_79 (sequence is synthesized)
ctcagaattctagaatttcagagctaggaggtccttaaaggtcacttatttcaaacatctactcatatattgtaggtgagatgggcttgccaaggtcatggggataggcagtgatgagca

SEQ ID NO: 188263 - DNA, 120 bp, Artificial Sequence
  ENSG00000112139_80 (sequence is synthesized)
tttgcaaagtgaccccaaatcaagggtgtggatgtcatgatatggactacatcatatcaggcaaatgacaggaagtgtctttcaggttacttggttacaatgattcaggtaggtcgattg

SEQ ID NO: 188264 - DNA, 120 bp, Artificial Sequence
  ENSG00000112139_81 (sequence is synthesized)
ggcagtttcacttccatgttccagatggggaaactgaagctcagattacaagaccaagggctccctctccctaccacctaagttttattggctctcatgttgggtaacttcttgctggca

SEQ ID NO: 188265 - DNA, 120 bp, Artificial Sequence
  ENSG00000112139_82 (sequence is synthesized)
cacctggcctttcttttctaatggaagaggaagggtctaagggactcaccactgctgtaggttggctccctgagcacaggaagagaaatccgctcaagctcactcaagtacaggtgcatt

SEQ ID NO: 188266 - DNA, 120 bp, Artificial Sequence
  ENSG00000112139_83 (sequence is synthesized)
attgtgaggacaaacacagtgagggggatgggcactcagaaatccaaacaggagttgcaacagggatggttttcctgaaccagatgggcattttggattcaaggtagctctaggatcatc

SEQ ID NO: 188267 - DNA, 120 bp, Artificial Sequence
  ENSG00000112139_84 (sequence is synthesized)
atctacagaagtttctggtgcttctgtattcttctggtgcttctgtattctacctgtggtagaataaagatggctgcaaatcccatgttatccttcctgtagagaggcagagtctaattc

SEQ ID NO: 188268 - DNA, 120 bp, Artificial Sequence
  ENSG00000112139_85 (sequence is synthesized)
ccttcctcttgaatctgggttgctcttagtgccttgtttgtgcaatagaatgtgacatgctgagttgaagatgccttggagcttcagctcaggcctcttggaacgttctctctggaagcc

SEQ ID NO: 188269 - DNA, 120 bp, Artificial Sequence
  ENSG00000112139_86 (sequence is synthesized)
ctgaactgccacctaggatgtcctctgagttgctctgagaccgtcatgctggaggggctctggctgaccatcccagctgagtccagccttccagccatctccaccaaagcaccagaagat

SEQ ID NO: 188270 - DNA, 120 bp, Artificial Sequence
  ENSG00000112139_87 (sequence is synthesized)
atgggagtgcagctgcctcagaccttccagaccagcctaactgccacctgaattgctcggccaagctctgtccaaattcctgacccatcgtcatgggatataataaaatagttgttttaa

SEQ ID NO: 188271 - DNA, 120 bp, Artificial Sequence
  ENSG00000112139_88 (sequence is synthesized)
gacaaccgcgccgctttcaaacatagccttcccacaggcctaggcttcgcctctctaccagcacccaaaccaggcctagaccccttcgaaacccatccaagccacgtctgggctccgcct

SEQ ID NO: 188272 - DNA, 120 bp, Artificial Sequence
  ENSG00000112139_89 (sequence is synthesized)
gcgtaaggcgtaggctccacccctttcagctcggtccaatcccagcttccagccgttccagcagcaggcagcatcccttccagccccgcttccaccagcgttagagcccctcaagcccag

SEQ ID NO: 188273 - DNA, 120 bp, Artificial Sequence
  ENSG00000112139_90 (sequence is synthesized)
tggggaacccttcgggagcctgaggtgtagtttaggggagagaagacgcccctcagcagcttctctggaacgttgttgcggggcactgggccagacagcacacgtttcgtgagctggcac

SEQ ID NO: 188274 - DNA, 120 bp, Artificial Sequence
  ENSG00000112139_91 (sequence is synthesized)
actgtccctttcctgagttcctggcccgcctggttctgtcctagaggtcctgggaggattctttcctgggctcagtggggtcaggcctctgaggaatggcctggggagatctgggctgac

SEQ ID NO: 188275 - DNA, 120 bp, Artificial Sequence
  ENSG00000112139_92 (sequence is synthesized)
ccctcccagatacactcaggagggagccccagacttcttctggccttggcacctcttctctaaacctcctcctccatcctctcctgccagctccagcccaggcgcagatcgtgcatgcgg

SEQ ID NO: 188276 - DNA, 120 bp, Artificial Sequence
  ENSG00000112139_93 (sequence is synthesized)
ccttgacttcaacaattctattcttactttggaaacacacattctgattggagttcagacagcctggggcagaaaaatcagatggaaaggtcagggagcagcaatgagggcaggagtgtc

SEQ ID NO: 188277 - DNA, 120 bp, Artificial Sequence
  ENSG00000112139_94 (sequence is synthesized)
cccgaggcaacatgtcctccaggaacattgctagttaggaaaaggcacccctaggggcagacaggtcatcccagtctgctgctgggtggcagagtattgggaacctgtggccaggcacag

SEQ ID NO: 188278 - DNA, 120 bp, Artificial Sequence
  ENSG00000112139_95 (sequence is synthesized)
caggatctgggggcgaggagatgactcctcttcccatgggccctgatagtcccaggagatggtggtgatgccattctgccaaggagggctttcagcggtggctgcaggccagccccatgt

SEQ ID NO: 188279 - DNA, 120 bp, Artificial Sequence
  ENSG00000112139_96 (sequence is synthesized)
ttgtgtgggttgtacgagtaagttcccttcttacccctccgtttcccagactggagaaaccaaggcctggtacttgccagtgtgcacaagggcaacctcagacccagagaatcccatgat

SEQ ID NO: 188280 - DNA, 120 bp, Artificial Sequence
  ENSG00000112139_97 (sequence is synthesized)
gaggcactgccaaggctatggagagtgtagcatccaccccaggctcaggacccctggggctaaatggtgagggtggggttggggatggaaagagaggaattagacaggcatttgtggtag

SEQ ID NO: 188281 - DNA, 120 bp, Artificial Sequence
  ENSG00000112139_98 (sequence is synthesized)
gtgtgagtccaccacgccacccggactaccttcccagctttccttctggctcccagccggcctgtcccctcttcatcctctcacccaccccagtccaaccaaaccccaccagctactcct

SEQ ID NO: 188282 - DNA, 120 bp, Artificial Sequence
  ENSG00000112139_99 (sequence is synthesized)
gatacccctaatgctccttgacagccccatgctgtaggacacggaggtctgtgttctttgctccatttcatcaagtatctcccatcttcattttcagggacccggtgaacaaaaaaaaaa

SEQ ID NO: 188283 - DNA, 120 bp, Artificial Sequence
  ENSG00000112139_100 (sequence is synthesized)
aattgagcaccattatatgccaggcactgttctaggacactagaacaagacaaaggcccctgtccttgaagagcttacagtctactggtgccaagccttataaagaaaataatgcagaaa

SEQ ID NO: 188284 - DNA, 120 bp, Artificial Sequence
  ENSG00000112139_101 (sequence is synthesized)
aaagaacagagagctattttacatggggtggtcagggacttccttgagggagggaagaatgttccaggcaggggcaacatcacaagcaaaggccctaaggcaggaactggccctcaagtg

SEQ ID NO: 188285 - DNA, 120 bp, Artificial Sequence
  ENSG00000112139_102 (sequence is synthesized)
ttgaaagaaaagcaaggataccagtttgctagacccgagtggcagcaaatgagatcagagaagctgacagcgcccagatcaggtgtggaaggccaggagaaggacagcgatgggaagcct

SEQ ID NO: 188286 - DNA, 120 bp, Artificial Sequence
  ENSG00000112139_103 (sequence is synthesized)
caaaggagactgagcagagggggtaacatgattggagacaggggtcccctccgcagcagccctgctggatagtcctgtccagggacaggatgctcccccaagacagcccactcttttgct

SEQ ID NO: 188287 - DNA, 120 bp, Artificial Sequence
  ENSG00000112139_104 (sequence is synthesized)
gggcaaatccgatacatccagggtcttccttagatgcagttcaaatctgcctcctgcaagctttcacttgctggtgtttattccaccccatggggaatgcagagcacggacagtcacaca

SEQ ID NO: 188288 - DNA, 120 bp, Artificial Sequence
  ENSG00000112139_105 (sequence is synthesized)
gactgtcctctctggccttctggacccaacatactcctcttgccaactgggtattactggaccttactgggccttactggacccaacatactcctcttgccaactgggtattaaacattt

SEQ ID NO: 188289 - DNA, 120 bp, Artificial Sequence
  ENSG00000112139_106 (sequence is synthesized)
taaaagcccttcatctccctccacaagtcatgtactgccaacagggacacactgttttctttggaaaccctgctgcgtgcccagacagaggtcccactgccctgggacagctcccttgcc

SEQ ID NO: 188290 - DNA, 120 bp, Artificial Sequence
  ENSG00000112139_107 (sequence is synthesized)
tagaggggaagggtagggtgtgtgtgcatgtgtgtgtttggggttggggagattagctgattagcagggcaggaaagaaatgaaagaaaatttgcaagtcatcctgatgaaatgaaatcc

SEQ ID NO: 188291 - DNA, 120 bp, Artificial Sequence
  ENSG00000112139_108 (sequence is synthesized)
tgctgaagtcttctctttcccacactgagggtgtccctgcaggaatgggacattgcacccagctgggcatggggaggaggtcctgtcaacagggacagggctgcaggctatggtgggaga

SEQ ID NO: 188292 - DNA, 120 bp, Artificial Sequence
  ENSG00000112139_109 (sequence is synthesized)
agtctccccgcttgttagctgctgcgattgtctgcgctcccacgggccgacctaaaacaattcttgcgcacacgctgagataaataacggcgacaggtggagcagctccagcccaggcgc

SEQ ID NO: 188293 - DNA, 120 bp, Artificial Sequence
  ENSG00000112139_110 (sequence is synthesized)
ttcttctggggtaggtgagagtggatgaccaggactccaccaccctgccgagtcctctcatttccatttggcttccccaggctccctcaacctcctggtgcggtcccggaacaaaggggc

SEQ ID NO: 188294 - DNA, 120 bp, Artificial Sequence
  ENSG00000112139_111 (sequence is synthesized)
agacgggaaggaggtgggggagctgaatctggagggagctgtgcgtggcgggggttcctgtctgttgagggagggtgtttgggtctgaataggggttcagaatgtctgagtgatgggaat

SEQ ID NO: 188295 - DNA, 120 bp, Artificial Sequence
  ENSG00000112139_112 (sequence is synthesized)
catgtggctctgactgtgtgaaggtgtgccccacactcactcaggctgtgtacttgtgtaaacaatgagaagcctggcccccaccctcgtgatgagcatactgacctgttcacggtatca

SEQ ID NO: 188296 - DNA, 120 bp, Artificial Sequence
  ENSG00000112144_0 (sequence is synthesized)
gcgccgtgcggcccgtgcgactcgccggacctcgcgggcgtccctgtacggagccctcggccggtcctagcagggattgtccccatttccagctccggagcgggcggctgcgccccgctc

SEQ ID NO: 188297 - DNA, 120 bp, Artificial Sequence
  ENSG00000112144_1 (sequence is synthesized)
gtcgaggagctgcgctcacctcaggggcgggcccccgcctgcgttcgcggcgccagcagaagactgatttttggaaatatgtatttgggagacagtcacgtcctattgaataccttgtgc

SEQ ID NO: 188298 - DNA, 120 bp, Artificial Sequence
  ENSG00000112144_2 (sequence is synthesized)
tggtgctgccatcgaaaaatctggttacactctggggaggactgctaccactgcagaactgaaccacttcggccgtgagatgagtgtccggcctgagcaggcacaccatgaatagataca

SEQ ID NO: 188299 - DNA, 120 bp, Artificial Sequence
  ENSG00000112144_3 (sequence is synthesized)
caacaatcaggcagctcggggatggaacctacggttccgtcctgctgggaagaagcattgagtctggggagctgatcgctattaaaaaaatgaaaagaaaattttattcctgggaggaat

SEQ ID NO: 188300 - DNA, 120 bp, Artificial Sequence
  ENSG00000112144_4 (sequence is synthesized)
gcatgaaccttcgggaggttaagtctttaaagaagctcaaccatgccaatgtagtcaaattaaaagaagttatcagggaaaatgatcatctttattttatcttcgagtacatgaaggaaa

SEQ ID NO: 188301 - DNA, 120 bp, Artificial Sequence
  ENSG00000112144_5 (sequence is synthesized)
atctttaccagctcattaaagagagaaataagttgtttcctgagtctgctataaggaatatcatgtatcagatattacaaggactcgcatttattcacaaacacggcttctttcatcgag

SEQ ID NO: 188302 - DNA, 120 bp, Artificial Sequence
  ENSG00000112144_6 (sequence is synthesized)
acttaaagcctgagaacctcctctgcatgggaccagaacttgtgaaaattgcagactttggtttggcccgagaaatacgatcaaaacctccatatacagattatgtatctaccagatggt

SEQ ID NO: 188303 - DNA, 120 bp, Artificial Sequence
  ENSG00000112144_7 (sequence is synthesized)
acagggctccagaagtactcctgaggtctaccaactacagctcccccattgacgtctgggcggtgggctgcatcatggcagaagtttacaccctcaggccactcttccctggagccagtg

SEQ ID NO: 188304 - DNA, 120 bp, Artificial Sequence
  ENSG00000112144_8 (sequence is synthesized)
aaattgacacaatattcaaaatttgccaagtgctggggacaccaaaaaagactgactggcctgaaggctatcaactttcaagtgcaatgaacttccgttggccacagtgtgtacccaata

SEQ ID NO: 188305 - DNA, 120 bp, Artificial Sequence
  ENSG00000112144_9 (sequence is synthesized)
acttaaagaccttgattcccaatgctagcagtgaagcagtccagctcctgagagacatgcttcagtgggatcccaagaaacgaccaacagctagtcaggcacttcgatatccttacttcc

SEQ ID NO: 188306 - DNA, 120 bp, Artificial Sequence
  ENSG00000112144_10 (sequence is synthesized)
aagttggacacccactaggcagcaccacacaaaaccttcaggattcagaaaaaccacagaaaggcatcctggaaaaggcaggcccacctccttatattaagccagtcccacctgcccagc

SEQ ID NO: 188307 - DNA, 120 bp, Artificial Sequence
  ENSG00000112144_11 (sequence is synthesized)
caccagccaagccacacacacgaatttcttcacgacagcatcaagccagccagccccctctgcatctcacgtacccctacaaagcagaggtctccaggacagatcacccaagccatctcc

SEQ ID NO: 188308 - DNA, 120 bp, Artificial Sequence
  ENSG00000112144_12 (sequence is synthesized)
aggaggacaagccaagcccgttgcttttcccatccctccacaacaagcatccacagtcgaaaatcacagctggcctggagcacaaaaatggtgagataaagccaaagagtaggagaaggt

SEQ ID NO: 188309 - DNA, 120 bp, Artificial Sequence
  ENSG00000112144_13 (sequence is synthesized)
ggggtcttatttccaggtcaacaaaggattcagatgattgggctgacttggatgacttggatttcagtccatccctcagcaggattgacctgaaaaacaagaaaagacagagtgatgaca

SEQ ID NO: 188310 - DNA, 120 bp, Artificial Sequence
  ENSG00000112144_14 (sequence is synthesized)
ctctctgcaggtttgagagtgttttggacctgaagccctctgagcctgtgggcacaggaaacagtgcccccacccagacgtcatatcagcggcgagacacgcccaccctgagatctgcag

SEQ ID NO: 188311 - DNA, 120 bp, Artificial Sequence
  ENSG00000112144_15 (sequence is synthesized)
ccaagcagcactatttgaagcactctcgatacttgcctgggatcagtataagaaatggcatactctcgaatccaggcaaggaatttattccacctaatccatggtctagttctggcttgt

SEQ ID NO: 188312 - DNA, 120 bp, Artificial Sequence
  ENSG00000112144_16 (sequence is synthesized)
ctggaaaatcttcagggacaatgtcagtaatcagcaaagtaaattcagttggttccagctctacaagttctagtggactgactggaaactatgtcccttcctttctgaaaaaagaaatcg

SEQ ID NO: 188313 - DNA, 120 bp, Artificial Sequence
  ENSG00000112144_17 (sequence is synthesized)
gttctgctatgcagagggtacacctagcacctattccagacccttcccctggttattcctccctgaaggccatgagacctcatcctgggcgaccattcttccacacccagcctagaagca

SEQ ID NO: 188314 - DNA, 120 bp, Artificial Sequence
  ENSG00000112144_18 (sequence is synthesized)
ctcctgggttgataccacggcctccagccgcccagccagtgcatggccggacagactgggcttccaagtacgcatctcggcgatgactgtctgccttggtgatgaatctcttcctaggga

SEQ ID NO: 188315 - DNA, 120 bp, Artificial Sequence
  ENSG00000112144_19 (sequence is synthesized)
gaagcaggatactttccctcagctgactggtgttctacctgcaagatgtgcagagggcataaaagcaaatcaacactttatagttattcttctgaactaagacatgtcaatattcttttt

SEQ ID NO: 188316 - DNA, 120 bp, Artificial Sequence
  ENSG00000112144_20 (sequence is synthesized)
taaagtttttttttaaaatattgatttgaatgcagtaggcttttttgtataaaattattttattctaaaactgggtcccattattttcttaaacaacagcattttgtatatatggattat

SEQ ID NO: 188317 - DNA, 120 bp, Artificial Sequence
  ENSG00000112144_21 (sequence is synthesized)
gttttagcattttatacagtcaactttgtaatgaactttttaaaaattaattgattttcctttggggttccagataatattttctacagattttgaaaaatgtaataatattaatgcagt

SEQ ID NO: 188318 - DNA, 120 bp, Artificial Sequence
  ENSG00000112144_22 (sequence is synthesized)
attgcaacaggggtgcaatttaaggctatgtgatagagggttatttactcagtgtgtgcagatatttatgaagtggtgaaatttcaagtgtggctcactaggtacttcaggccttcttgg

SEQ ID NO: 188319 - DNA, 120 bp, Artificial Sequence
  ENSG00000112144_23 (sequence is synthesized)
actgttgttagaaaagtgatcctctgcttttcttagtaggtcattggtttgatttttggataccactctgctgttctaaaaggactattatattatataattcactttgttttacttttg

SEQ ID NO: 188320 - DNA, 120 bp, Artificial Sequence
  ENSG00000112144_24 (sequence is synthesized)
ttccccagatgaaagaactctaagtaaatacattttaaaaaatttttctgacaccctttaatgtggttgcagatctcagatgaaaccaagcttaattatactatgccattatattctaat

SEQ ID NO: 188321 - DNA, 120 bp, Artificial Sequence
  ENSG00000112144_25 (sequence is synthesized)
atggccaaaaaactaagtatcaaagcagcagaaggtttttgattatagtaactgagatggaattttgtgcctagctcagttctccagatctggctaggagcagtcaatgactaatgttct

SEQ ID NO: 188322 - DNA, 120 bp, Artificial Sequence
  ENSG00000112144_26 (sequence is synthesized)
gtcctagccaaattctcaggacaatttggggagcagaaagagttatggcagaggttccactcatctacaaagtcacagtcacatgccacatttgatctcctaaccctggtgtagtttctt

SEQ ID NO: 188323 - DNA, 120 bp, Artificial Sequence
  ENSG00000112144_27 (sequence is synthesized)
tcaagagtgagaactttatttgttgggcagaggctgttccattgagaggaatgtttacagcagtttcaaaaatgacaaagtcagtttggagacagaaaaagacaaaaggtccagtctcat

SEQ ID NO: 188324 - DNA, 120 bp, Artificial Sequence
  ENSG00000112144_28 (sequence is synthesized)
ccatctctatatggtacatttgcctcacttatggttgccttaaaggcaagagggaaggtcaccatcagtgaacgcaatgcaatctcaacagtgtattgattcatattctcctagggctca

SEQ ID NO: 188325 - DNA, 120 bp, Artificial Sequence
  ENSG00000112144_29 (sequence is synthesized)
cagtgtattgattcatattctcctagggctcaaactactctctattggttccaggataatgacaaattgaaccatatgtaagtaatcttttattttttattttttttttgagacagagtc

SEQ ID NO: 188326 - DNA, 70 bp, Artificial Sequence
  ENSG00000112144_30 (sequence is synthesized)
atccaccctcctcctgatcatttttataggttaaaatgataggtgaaatgaatatagacactttcatatg

SEQ ID NO: 188327 - DNA, 120 bp, Artificial Sequence
  ENSG00000112144_31 (sequence is synthesized)
ttaaaatgataggtgaaatgaatatagacactttcatatggttcaacctaatgacttggtaaattattgccttggtgtattaataatatgttgcattctgaacaaataaccatggcttcc

SEQ ID NO: 188328 - DNA, 120 bp, Artificial Sequence
  ENSG00000112144_32 (sequence is synthesized)
aaagggccctaacctaaaatcggagagtaatttatgctttggagaatttgactcaaatatatacttgaccaagcaccatgatccctaggggcatgagaaaagcacataatggatgtggat

SEQ ID NO: 188329 - DNA, 120 bp, Artificial Sequence
  ENSG00000112144_33 (sequence is synthesized)
gtgataggtggtcttttcctgttaacaagctggcagcaaagcttcagaaaatatatatgcaagcacaacttgaagctgaattcatttctgtattatattctcaactcgttatctaaagca

SEQ ID NO: 188330 - DNA, 120 bp, Artificial Sequence
  ENSG00000112144_34 (sequence is synthesized)
tcagaacatgtgttttcagagatgagtcctttactataaggttaatatttattttcattttctgtattatatatgaaaagtaaattaatgtgaaacctggcccagcttgctggaaagcag

SEQ ID NO: 188331 - DNA, 120 bp, Artificial Sequence
  ENSG00000112144_35 (sequence is synthesized)
gttttaaattgtaaatattccttagaggagcaaatggattgtttaataccatagtctcagtaatctagcttatataaggtcattacattttttaactgaaaaacctagttacctgattat

SEQ ID NO: 188332 - DNA, 120 bp, Artificial Sequence
  ENSG00000112144_36 (sequence is synthesized)
tgcacattataaaattgtttttctaatactttatagggcccaacttcagaaaatacttcgcttttttctttttatgctttcgtttgtttaccagcaagcaacttccctggggaagccaaa

SEQ ID NO: 188333 - DNA, 120 bp, Artificial Sequence
  ENSG00000112144_37 (sequence is synthesized)
cacatattcataaaaaaaatcaagtagctgatgtgcagttgagaaaactagaggactgaaaaaacaaattttaactagcaaatgctgtgaattactcttcctccccttctctgaaatggg

SEQ ID NO: 188334 - DNA, 120 bp, Artificial Sequence
  ENSG00000112144_38 (sequence is synthesized)
taaaggacaaattgtgtaaaaaaacctatgcactatagaagggaatagtaaccatttcttttgtctctctgtttctgttctgactgagaacctgcagccatttcttgttacatgaaaaca

SEQ ID NO: 188335 - DNA, 120 bp, Artificial Sequence
  ENSG00000112144_39 (sequence is synthesized)
aaatgctacttgttacctctattttttgttactatacaattatgaaatgtaatgtaagacaccaacagaaatgatatacctgtaactgtacctatcaggactatacctcatttacagtca

SEQ ID NO: 188336 - DNA, 120 bp, Artificial Sequence
  ENSG00000112144_40 (sequence is synthesized)
gaaagcttactgggatgtcaggaaatgatacagggttggttctcatttcgtgccgaaatgagacagaaattcagtgacgaaggtgcgttgtaggggtattgatgtgccccaggtagtgcc

SEQ ID NO: 188337 - DNA, 120 bp, Artificial Sequence
  ENSG00000112144_41 (sequence is synthesized)
agcagagtagggaaaactgcatttgcataaaaactactcttgacatgattgttcattttacaaaaaaattccattaattaccaagccctcacccagcccatgtgtgataggatttatgta

SEQ ID NO: 188338 - DNA, 120 bp, Artificial Sequence
  ENSG00000112144_42 (sequence is synthesized)
ggaagaaacttgattttcaaataattttttaaatgtatctcttgcctaaaggactatatacatctaataaagtaacactgtgtcatcttctggagttatcaaaaattgtatacaatcaag

SEQ ID NO: 188339 - DNA, 120 bp, Artificial Sequence
  ENSG00000112144_43 (sequence is synthesized)
acaacacaagaattattttatttttgagtgcaaatacaggtactgttggagttgatgggcaccatgctttctcatgaagtagcatttccctaccatcaagccattgttttgtgccattca

SEQ ID NO: 188340 - DNA, 120 bp, Artificial Sequence
  ENSG00000112144_44 (sequence is synthesized)
ggagaggaaaaaaaggaatttatgctgtacatttcagttcagtgtatgaccaaaagcaatatgtttataagaagatgtttgacatactaattattttatatcatttaaaccatactgtag

SEQ ID NO: 188341 - DNA, 120 bp, Artificial Sequence
  ENSG00000112144_45 (sequence is synthesized)
caacataatatatggagctaatttgtagaattatttttacgatttccaaacaaatgtactgtactgttatataatttattgtgaggaccttctcatggaagccattaggaaaacaaacta

SEQ ID NO: 188342 - DNA, 120 bp, Artificial Sequence
  ENSG00000112144_46 (sequence is synthesized)
gaggtaaatatcacattaatctgtattatcaatttctcatagacactgtgctaatgtgaattttaaatgacctgcatcaagtcttctgatctcagataactcagtacagatagcaattag

SEQ ID NO: 188343 - DNA, 120 bp, Artificial Sequence
  ENSG00000112144_47 (sequence is synthesized)
tcagctgatttgattacaatggagtaaccgacaatatatttatttataaagcacatattcataataacgagaagaattcagaaaaccacttaagcaagacccttctgaaataaaaaatgt

SEQ ID NO: 188344 - DNA, 120 bp, Artificial Sequence
  ENSG00000112144_48 (sequence is synthesized)
tgctttttaaatagtttgtcctaaggtgtttaaaacatgtcaaccttatgtaaggaaaaatttcctggtccaaataaagttgaagtttaagaaaaattgatttgagtgttctgtttttgt

SEQ ID NO: 188345 - DNA, 120 bp, Artificial Sequence
  ENSG00000112144_49 (sequence is synthesized)
agacctgcttttgctggagctgtgctaggctgagggaattccacactgaattttacaagcgggatggatttctctaaggcagaagactgatttttggaaatatgtatttgggagacagtc

SEQ ID NO: 188346 - DNA, 120 bp, Artificial Sequence
  ENSG00000112146_0 (sequence is synthesized)
gtccggggtctccagtagggctgacgctccggtgctcgcacaatcccccgcctcggctggcaacgggcgtccctccactccccgagtccccggcagccgccgccaccccagcgcgccccg

SEQ ID NO: 188347 - DNA, 120 bp, Artificial Sequence
  ENSG00000112146_1 (sequence is synthesized)
atctggccccctgccccgcgaagatggctgccgtacgccgggcccgcagttattgccgctgcctggtgcgcttctccgaccgagaactctgctaagctccgctgcagagacaggcaggag

SEQ ID NO: 188348 - DNA, 120 bp, Artificial Sequence
  ENSG00000112146_2 (sequence is synthesized)
tagacacccggacacccagcacccctcctccggggggcggtgcagagggggcacggagagcccctcgagcgcagcaggccgccccgccagcatggcagaagctgaggaagattgtcattc

SEQ ID NO: 188349 - DNA, 120 bp, Artificial Sequence
  ENSG00000112146_3 (sequence is synthesized)
tgatactgtcagagcagatgatgatgaagaaaatgaaagtcctgctgaaacagatctgcaggcacaactccagatgttccgagctcagtggatgtttgaacttgctccaggtgtaagctc

SEQ ID NO: 188350 - DNA, 120 bp, Artificial Sequence
  ENSG00000112146_4 (sequence is synthesized)
tagcaatttagaaaatcgaccttgcagagcagcaagaggctctctccagaaaacatcggcagataccaaaggaaaacaagaacaggcaaaagaagaaaaggctcgagaactcttcctaaa

SEQ ID NO: 188351 - DNA, 120 bp, Artificial Sequence
  ENSG00000112146_5 (sequence is synthesized)
agcagtagaagaagaacaaaatggagctctctatgaagccatcaagttttatcgtagggctatgcaacttgtacctgatatagagttcaagattacttatacccggtctccagatggtga

SEQ ID NO: 188352 - DNA, 120 bp, Artificial Sequence
  ENSG00000112146_6 (sequence is synthesized)
tggcgttggaaacagctacattgaagataatgatgatgacagcaaaatggcagatctcttgtcctacttccagcagcaactcacatttcaggagtctgtgcttaaactgtgtcagcctga

SEQ ID NO: 188353 - DNA, 120 bp, Artificial Sequence
  ENSG00000112146_7 (sequence is synthesized)
gcttgagagcagtcagattcacatatcagtgctgccaatggaggtcctgatgtacatcttccgatgggtggtgtctagtgacttggacctcagatcattggagcagttgtcgctggtgtg

SEQ ID NO: 188354 - DNA, 120 bp, Artificial Sequence
  ENSG00000112146_8 (sequence is synthesized)
cagaggattctacatctgtgccagagaccctgaaatatggcgtctggcctgcttgaaagtttggggcagaagctgtattaaacttgttccgtacacgtcctggagagagatgtttttaga

SEQ ID NO: 188355 - DNA, 120 bp, Artificial Sequence
  ENSG00000112146_9 (sequence is synthesized)
acggcctcgtgttcggtttgatggcgtgtatatcagtaaaaccacatatattcgtcaaggggaacagtctcttgatggtttctatagagcctggcaccaagtggaatattacaggtacat

SEQ ID NO: 188356 - DNA, 120 bp, Artificial Sequence
  ENSG00000112146_10 (sequence is synthesized)
aagattctttcctgatggccatgtgatgatgttgacaacccctgaagagcctcagtccattgttccacgtttaagaactaggaataccaggactgatgcaattctactgggtcactatcg

SEQ ID NO: 188357 - DNA, 120 bp, Artificial Sequence
  ENSG00000112146_11 (sequence is synthesized)
cttgtcacaagacacagacaatcagaccaaagtatttgctgtaataactaagaaaaaagaagaaaaaccacttgactataaatacagatattttcgtcgtgtccctgtacaagaagcaga

SEQ ID NO: 188358 - DNA, 120 bp, Artificial Sequence
  ENSG00000112146_12 (sequence is synthesized)
tcagagttttcatgtggggctacagctatgttccagtggtcaccagaggttcaacaaactcatctggatacatcattcttgtcacattacttacaaatcaactggtgagactgcagtcag

SEQ ID NO: 188359 - DNA, 120 bp, Artificial Sequence
  ENSG00000112146_13 (sequence is synthesized)
tgcttttgagattgacaagatgtacacccccttgttcttcgccagagtaaggagctacacagctttctcagaaaggcctctgtagagcctcaagtccagtcctctatcacttttgcatga

SEQ ID NO: 188360 - DNA, 120 bp, Artificial Sequence
  ENSG00000112146_14 (sequence is synthesized)
atatatatatatatatggaattggaacttattttaaattgttggagttcttttaagaagaatataaattgattattttttttatttaaagggatagttgattcctggggtgttttgaaat

SEQ ID NO: 188361 - DNA, 120 bp, Artificial Sequence
  ENSG00000112146_15 (sequence is synthesized)
ttaaagggatagttgattcctggggtgttttgaaattaagttggaattaagttgcttaagcatatttatgttgtgagaaaccttaatatgaggtttatcatgccctttttcaagcagatt

SEQ ID NO: 188362 - DNA, 120 bp, Artificial Sequence
  ENSG00000112146_16 (sequence is synthesized)
tatgagcagatttctgtcacataagtcgtcttctgcttgagtatcctaatatttcaatgcatcaggggagcgctccactggataagcattttatttcccgcatggcataatgtttttgca

SEQ ID NO: 188363 - DNA, 120 bp, Artificial Sequence
  ENSG00000112146_17 (sequence is synthesized)
ctaaaggctcaaagtgtgagaacctgttctggatttgtttgaaattatttcaccaataaagatcataaataaatgtttctttcaagaaaatatatttggatggcctttttaaagtaacag

SEQ ID NO: 188364 - DNA, 120 bp, Artificial Sequence
  ENSG00000112146_18 (sequence is synthesized)
ttcaagaaaatatatttggatggcctttttaaagtaacaggatatttaataagagtcctagatagccagcggagactttaagaatcattgcctctagctgggtgtggtggcatgcacctg

SEQ ID NO: 188365 - DNA, 120 bp, Artificial Sequence
  ENSG00000112146_19 (sequence is synthesized)
taagcccaggaatttgagtctgggagtttgagtccagcatgggcaacataacaagaccccatcccttattaaaagaaaaaaaaataattcctcatttcatcattggtctttatatgtagc

SEQ ID NO: 188366 - DNA, 120 bp, Artificial Sequence
  ENSG00000112146_20 (sequence is synthesized)
cacaaacactgacctcatgtaggcaccttaccaatatatgacattaagtgagagtgaatcccttaggactggaacacttcaagctcaaccaactgactcagttgtcattcttcacaaaag

SEQ ID NO: 188367 - DNA, 120 bp, Artificial Sequence
  ENSG00000112146_21 (sequence is synthesized)
aatagtagaggatcatgtaaacctgagcctaactcttgttccagtatgaaagttgggggagagcaccagccacctaggaaaactgtatgttacctttttactcaaaggagtcccccctgc

SEQ ID NO: 188368 - DNA, 120 bp, Artificial Sequence
  ENSG00000112146_22 (sequence is synthesized)
ccagtaacagtcctattagtgtttaatttcagagtttgtgtctggtagacctctacctgattcagatttggttttgttgtttcaaccatagttagagacaaattctcatgtactttcaga

SEQ ID NO: 188369 - DNA, 120 bp, Artificial Sequence
  ENSG00000112146_23 (sequence is synthesized)
aatcaatatctgcagccactgttacttttaattgacattaagagacacttcataggttcccacaattcagtatgggataggctttttaaaaagcacatacagaccaggcgtggtggctca

SEQ ID NO: 188370 - DNA, 90 bp, Artificial Sequence
  ENSG00000112146_24 (sequence is synthesized)
tataatcccagcactttgggaggctaagacaggcagatcacctgagctcaggagtccaagaccagcctgggcaacatggcaaaacattag

SEQ ID NO: 188371 - DNA, 89 bp, Artificial Sequence
  ENSG00000112146_25 (sequence is synthesized)
aaaaaaaaaaaaaaaaaaaattagccaagtacagtggggcacacctatagtcggcctgagcctgggaagtggaagttgcagtgagccaa

SEQ ID NO: 188372 - DNA, 120 bp, Artificial Sequence
  ENSG00000112146_26 (sequence is synthesized)
gcctgagcaacacagtgagaccctatctcaaaaaaataatgatgatagtacacgttatgttaaaggtgaaatgtgcatacagaaggaagagagttggccaggtgtggtgactcacaccta

SEQ ID NO: 188373 - DNA, 61 bp, Artificial Sequence
  ENSG00000112146_27 (sequence is synthesized)
agaaggaagagagttggccaggtgtggtgactcacacctataatcccaaacaacatagcaa

SEQ ID NO: 188374 - DNA, 120 bp, Artificial Sequence
  ENSG00000112146_28 (sequence is synthesized)
agtgaataccacagaatagctggggcaggcaggcagcctgggccctcccacaacaatgccaagatgactgagtctcagaggatcacagaaagtccccctccatgcggtcagatcaggcct

SEQ ID NO: 188375 - DNA, 120 bp, Artificial Sequence
  ENSG00000112146_29 (sequence is synthesized)
gcagaaatactgatctataatgctgatttttataaatacgccgtttaaattttctgtgatgaatgtgagtactgtaagcatgtttaaaggaaaccacagtaaatataatgctgggaatat

SEQ ID NO: 188376 - DNA, 120 bp, Artificial Sequence
  ENSG00000112146_30 (sequence is synthesized)
atacgtatgccatggaggtttgctgcacctattgacccgtcctatgagatccaactaagaagaacagaatacttgctatcttcagagtagaatattttgaaatgtatgtgtgctttacag

SEQ ID NO: 188377 - DNA, 120 bp, Artificial Sequence
  ENSG00000112146_31 (sequence is synthesized)
ctccagtctgtctgtgctctcaaaaactttagtcgttataacaactgtgactgttgagaaatttcactgttttcctgcattcctggcgcgggactctagccagaggctccgaggactttg

SEQ ID NO: 188378 - DNA, 120 bp, Artificial Sequence
  ENSG00000112146_32 (sequence is synthesized)
gaggagggtttgcaggacagccggggaaaatgtcccttctcggctcactgagtatattgaaccagtctcggtcctctcaagggattttatcagaagcattgagcatagattgaggcagaa

SEQ ID NO: 188379 - DNA, 120 bp, Artificial Sequence
  ENSG00000112146_33 (sequence is synthesized)
tttttttaagagacagggtcttgctatattgcccaggctagtttttacatctttaaaactgaatacttagctgggtgtggtggtgcacatgcctgtagtcctagctgttcaaaaggttaa

SEQ ID NO: 188380 - DNA, 120 bp, Artificial Sequence
  ENSG00000112146_34 (sequence is synthesized)
ggcaggaagattatttgagcctaggagttctgggctctagtgcactatgctgactgggtgtccacattaagttcagcatcagtgtagtaaactccaaggagctgggagccaccaggttac

SEQ ID NO: 188381 - DNA, 120 bp, Artificial Sequence
  ENSG00000112146_35 (sequence is synthesized)
ccagggaggggtgaactagcccaggttagaaatggagcaggtcaaaactcccatgctgatcagtagtgggatcatacctgtgaatagtctctgcactccagcgtggacaacatagtgaga

SEQ ID NO: 188382 - DNA, 120 bp, Artificial Sequence
  ENSG00000112146_36 (sequence is synthesized)
cctcatcactttaagaaaaacaaaccctgaatattttaagttagagatggagttagaaatacttttagttatagcagaatcatgtcaatttttagtacatcttttacttagctttttgca

SEQ ID NO: 188383 - DNA, 120 bp, Artificial Sequence
  ENSG00000112146_37 (sequence is synthesized)
ggcgtgagccaccatgcccagcccctgcactaattttttaaacaaagtcctgttggtgctcccttcaaaatttatctccagtctgaccattttaccacttctgcaacaacccttctgact

SEQ ID NO: 188384 - DNA, 120 bp, Artificial Sequence
  ENSG00000112146_38 (sequence is synthesized)
attttaccacttctgcaacaacccttctgactcagccactgttctgtttggtttgggttacatagtggcatcctacctggtcttcctgtttccactcttataccactagaccatattctc

SEQ ID NO: 188385 - DNA, 120 bp, Artificial Sequence
  ENSG00000112146_39 (sequence is synthesized)
cataaaccaccagagtgatcttttaaaataaaagcataaattatgttcaaaaccctccagtggcatccatctcatgtaaataaccactccttcctacaagatgccacctcacctgccccg

SEQ ID NO: 188386 - DNA, 120 bp, Artificial Sequence
  ENSG00000112146_40 (sequence is synthesized)
actgcctcatcatagtttcctctgcacaatgcccactttgccacagctgtgtgctcctgctggctcttggatgagcccaccagtcacacttctgcctgagggccttgcacatgctctggt

SEQ ID NO: 188387 - DNA, 120 bp, Artificial Sequence
  ENSG00000112146_41 (sequence is synthesized)
tgctgcctgagatacttatccccatcactatgatcaccttcccagagaggcatttcctggcctccctatttcctcaccaccatcatttctgtctgctgactctactttgtctgttggttg

SEQ ID NO: 188388 - DNA, 120 bp, Artificial Sequence
  ENSG00000112146_42 (sequence is synthesized)
atttttgcactaagcgtactaccagaagctttcctctcaatttgctttcccacagtaaaagagcagggcctttgccttgtccattagtttctcctcagaacagtgcctcccaggtgttca

SEQ ID NO: 188389 - DNA, 120 bp, Artificial Sequence
  ENSG00000112146_43 (sequence is synthesized)
tgacccgcaaaatggccctcagtatttttatctagtactcaatgtaggaattgcactaaaaaaaaaaataggctaatataaattacagaatttcttctggcctcttttagatttcttctt

SEQ ID NO: 188390 - DNA, 120 bp, Artificial Sequence
  ENSG00000112146_44 (sequence is synthesized)
gtcttttgccctgggtgtatttacttgccttttcaaatagcttgtgcttttattccaccttattgcttgccaaatattattgtcatttagaaaaaaatagacatgttaaccgttgtgtgt

SEQ ID NO: 188391 - DNA, 120 bp, Artificial Sequence
  ENSG00000112146_45 (sequence is synthesized)
ggctctcactttgtttgaaattgttgctttgggaaaaacacagaactttaataaaacaatatttgacttttattcagtgagtaaaacttaaaagttcaacagtttcccctgaggaagata

SEQ ID NO: 188392 - DNA, 120 bp, Artificial Sequence
  ENSG00000112146_46 (sequence is synthesized)
aaatatctttggttctttgttgctggactaacaggtagtcagtaatatttgttttaatgttttagcagttctttagcccgtggtatttcagtgttggtttcatagctatgaataggcata

SEQ ID NO: 188393 - DNA, 120 bp, Artificial Sequence
  ENSG00000112146_47 (sequence is synthesized)
agagaatatgcttttcagactcattttcctttggaaattaatagtaaggtctcaagtgccccctacagccttgctactcaaagtgggttccacaaagtgttgacagtatggtactaaata

SEQ ID NO: 188394 - DNA, 120 bp, Artificial Sequence
  ENSG00000112146_48 (sequence is synthesized)
gctacagtgagccaagattgcaccactgtgctccagcctgggtgagaaagcgagaccctgtctcaaaaaagaaaaaaaagagaggttggccttttgtagcaatctgagaagtgtgttttt

SEQ ID NO: 188395 - DNA, 120 bp, Artificial Sequence
  ENSG00000112146_49 (sequence is synthesized)
ttttcaagttggaaaggaaggagaaaagcaacttgcctaagataaggtagctcttcatgatatgactgttatttctgatatacaaataaatagaacatgattaggacatagtcaaatata

SEQ ID NO: 188396 - DNA, 120 bp, Artificial Sequence
  ENSG00000112146_50 (sequence is synthesized)
gctagaaaaatatattcctaaggaaagtgagatttgaggagtccctgttgttctgcaacatccctagattgaatgatctgttgcagatggtggataccaagttcaaatttaaagatttct

SEQ ID NO: 188397 - DNA, 120 bp, Artificial Sequence
  ENSG00000112146_51 (sequence is synthesized)
ttgtaagcagtaaagtgactttcacttatttaacttagaactggaaaaagtaacttttttccagattacattttctgtatatttgtaaaatgcaaaagcaatatatatttgttgtgagaa

SEQ ID NO: 188398 - DNA, 120 bp, Artificial Sequence
  ENSG00000112146_52 (sequence is synthesized)
aattagaatatacagataaaataaaatttaaaaaaacacccaaagataaccagaagaaaatttttgctatgtaacctttttcttctggtctttgcaaatcctgccgtagaaactttttaa

SEQ ID NO: 188399 - DNA, 120 bp, Artificial Sequence
  ENSG00000112146_53 (sequence is synthesized)
cttcaggagtgtccttcctttgctctattaggacattacagaaaccaatactatgaaaagctgacagcagtatctggattaactttttaaaaacaatgaaagcattttacagaaattaca

SEQ ID NO: 188400 - DNA, 120 bp, Artificial Sequence
  ENSG00000112146_54 (sequence is synthesized)
tttcagatcgtgctggaactgtgttcagaagatatcctcagagggaatctggcctgagcaccatcatgtttaattgcctcctcctgtcttgcattttcctcccagcccccttcctacccc

SEQ ID NO: 188401 - DNA, 120 bp, Artificial Sequence
  ENSG00000112146_55 (sequence is synthesized)
ttagcagagggccaggtgagggtgcttggggcccatgggggctgggagtgtagacttcagttacacccccagcccccaggggaaagcattagccttgaatcctcaatcccaggccctcta

SEQ ID NO: 188402 - DNA, 120 bp, Artificial Sequence
  ENSG00000112146_56 (sequence is synthesized)
ctaaccactctcaacctatggtatttatcttttgattattctgtgcatctataaaaatgggattatattgtacagaatgctttgtaagctttctctccccacataagaatgccctgtaag

SEQ ID NO: 188403 - DNA, 120 bp, Artificial Sequence
  ENSG00000112146_57 (sequence is synthesized)
cattttgttaaatatttttaatgactttagagtccaactttatactcctctttacgcattttggttttctaatttaatggtagtgtaaacgtttttggaataaacattcctgtggctaaa

SEQ ID NO: 188404 - DNA, 120 bp, Artificial Sequence
  ENSG00000112146_58 (sequence is synthesized)
tattatagatattgtaacaaattacatttttttttttttggcacatggaaattttcactgacacagtaagtaggcattataaccagactttcgggacataaacacatatcttgtaaaata

SEQ ID NO: 188405 - DNA, 120 bp, Artificial Sequence
  ENSG00000112149_0 (sequence is synthesized)
acagctctgcagctcgtggcagcggcgcagcgctccagccatgtcgcgcggcctccagcttctgctcctgagctgcgcctacagcctggctcccgcgacgccggaggtgaaggtggcttg

SEQ ID NO: 188406 - DNA, 120 bp, Artificial Sequence
  ENSG00000112149_1 (sequence is synthesized)
ctccgaagatgtggacttgccctgcaccgccccctgggatccgcaggttccctacacggtctcctgggtcaagttattggagggtggtgaagagaggatggagacaccccaggaagacca

SEQ ID NO: 188407 - DNA, 120 bp, Artificial Sequence
  ENSG00000112149_2 (sequence is synthesized)
cctcaggggacagcactatcatcagaaggggcaaaatggttctttcgacgcccccaatgaaaggccctattccctgaagatccgaaacactaccagctgcaactcggggacatacaggtg

SEQ ID NO: 188408 - DNA, 120 bp, Artificial Sequence
  ENSG00000112149_3 (sequence is synthesized)
cactctgcaggacccggatgggcagagaaacctaagtggcaaggtgatcttgagagtgacaggatgccctgcacagcgtaaagaagagacttttaagaaatacagagcggagattgtcct

SEQ ID NO: 188409 - DNA, 120 bp, Artificial Sequence
  ENSG00000112149_4 (sequence is synthesized)
gctgctggctctggttattttctacttaacactcatcattttcacttgtaagtttgcacggctacagagtatcttcccagatttttctaaagctggcatggaacgagcttttctcccagt

SEQ ID NO: 188410 - DNA, 120 bp, Artificial Sequence
  ENSG00000112149_5 (sequence is synthesized)
tacctccccaaataagcatttagggctagtgactcctcacaagacagaactggtatgagcaggatttctgcaggttcttcttcctgaagctgaggctcaggggtgtgcctgtctgttaca

SEQ ID NO: 188411 - DNA, 120 bp, Artificial Sequence
  ENSG00000112149_6 (sequence is synthesized)
ctggaggagagaagaatgagcctacgctgaagatggcatcctgtgaagtccttcacctcactgaaaacatctggaaggggatcccaccccattttctgtgggcaggcctcgaaaaccatc

SEQ ID NO: 188412 - DNA, 120 bp, Artificial Sequence
  ENSG00000112149_7 (sequence is synthesized)
acatgaccacatagcatgaggccactgctgcttctccatggccaccttttcagcgatgtatgcagctatctggtcaacctcctggacattttttcagtcatataaaagctatggtgagat

SEQ ID NO: 188413 - DNA, 120 bp, Artificial Sequence
  ENSG00000112149_8 (sequence is synthesized)
gcagctggaaaagggtcttgggaaatatgaatgcccccagctggcccgtgacagactcctgaggacagctgtcctcttctgcatcttggggacatctctttgaattttctgtgttttgct

SEQ ID NO: 188414 - DNA, 120 bp, Artificial Sequence
  ENSG00000112149_9 (sequence is synthesized)
gtgagacagtgggaaatatttagcaaataatttcctggtgtgaaggtcctgctattactaaggagtaatctgtgtacaaagaaataacaagtcgatgaactattccccagcagggtcttt

SEQ ID NO: 188415 - DNA, 120 bp, Artificial Sequence
  ENSG00000112149_10 (sequence is synthesized)
tcatctgggaaagacatccataaagaagcaataaagaagagtgccacatttatttttatatctatatgtacttgtcaaagaaggtttgtgtttttctgcttttgaaatctgtatctgtag

SEQ ID NO: 188416 - DNA, 120 bp, Artificial Sequence
  ENSG00000112149_11 (sequence is synthesized)
tgagatagcattgtgaactgacaggcagcctggacatagagagggagaagaagtcagagagggtgacaagatagagagctatttaatggccggctggaaatgctgggctgacggtgcagt

SEQ ID NO: 188417 - DNA, 120 bp, Artificial Sequence
  ENSG00000112149_12 (sequence is synthesized)
ctgggtgctcgcccacttgtcccactatctgggtgcatgatcttgagcaagttccttctggtgtctgctttctccattgtaaaccacaaggctgttgcatgggctaatgaagatcatata

SEQ ID NO: 188418 - DNA, 120 bp, Artificial Sequence
  ENSG00000112149_13 (sequence is synthesized)
cgtgaaaattatttgaaaacatataaagcactatacagattcgaaactccattgagtcattatccttgctatgatgatggtgttttggggatgagagggtgctatccatttctcatgttt

SEQ ID NO: 188419 - DNA, 120 bp, Artificial Sequence
  ENSG00000112149_14 (sequence is synthesized)
tccattgtttgaaacaaagaaggttaccaagaagcctttcctgtagccttctgtaggaattcttttggggaagtgaggaagccaggtccacggtctgttcttgaagcagtagcctaacac

SEQ ID NO: 188420 - DNA, 120 bp, Artificial Sequence
  ENSG00000112149_15 (sequence is synthesized)
actccaagatatggacacacgggagccgctggcagaagggacttcacgaagtgttgcatggatgttttagccattgttggctttcccttatcaaacttgggcccttcccttcttggtttc

SEQ ID NO: 188421 - DNA, 120 bp, Artificial Sequence
  ENSG00000112149_16 (sequence is synthesized)
caaaggcattttattgcttgagttatatgttcactgtccccctaatattagggagtaaaacggataccaagttgatttagtgtttttacctctgtcttggctttcatgttattaaacgta

SEQ ID NO: 188422 - DNA, 120 bp, Artificial Sequence
  ENSG00000112149_17 (sequence is synthesized)
tgcatgtgaagaaagggtgtttttctgttttatattcaactcataagactttgggataggaaaaatgagtaatggttactaggcttaatacctgggtgattacataatctgtacaatgaa

SEQ ID NO: 188423 - DNA, 120 bp, Artificial Sequence
  ENSG00000112149_18 (sequence is synthesized)
cccccatgatgtaagtttacctatgtaacaaacctgcacttatacccatgaacttaaaatgaaagttaaaaataaaaaacatatacaaataaaaaaatcccgactttgggatgagtgcta

SEQ ID NO: 188424 - DNA, 120 bp, Artificial Sequence
  ENSG00000112159_0 (sequence is synthesized)
gatgacgtcaaacgccgtgtgctcacccacgtgtggtgcccctctcccggtgtaggcgctggagctgaggacgcctttcctgcgggcgtagttgctggctgctcgggcactgggacctcg

SEQ ID NO: 188425 - DNA, 120 bp, Artificial Sequence
  ENSG00000112159_1 (sequence is synthesized)
gcggcttggggacgctggccgcgaagtagggagcgcaggtggccgctcggggtgagggccctgggtcatggagcacttcttgctggaggtggcagccgcgccgctgcggttaatcgcagc

SEQ ID NO: 188426 - DNA, 120 bp, Artificial Sequence
  ENSG00000112159_2 (sequence is synthesized)
caagaacgagaagagccgcagtgagttgggcaggttcttggccaagcaggtgtggacacctcaagatcgccagtgtgtcctgagtaccttagcacagttgcttttggataaggactgtac

SEQ ID NO: 188427 - DNA, 120 bp, Artificial Sequence
  ENSG00000112159_3 (sequence is synthesized)
tgtgctggttggtcgccagcttcgccctctccttttggatttgctggaaaggaatgccgaagccattaaagctggaggccaaatcaaccatgatctgcatgaacggctatgtgtgtcgat

SEQ ID NO: 188428 - DNA, 120 bp, Artificial Sequence
  ENSG00000112159_4 (sequence is synthesized)
gagcaaactcattggtaaccatcctgatgtcctcccgtttgccctgagatatttcaaggacacatccccagtctttcaaagacttttcctagagagttcagatgctaatccagtacgcta

SEQ ID NO: 188429 - DNA, 120 bp, Artificial Sequence
  ENSG00000112159_5 (sequence is synthesized)
tggacgtaggaggatgaagctccgggacctaatggaagcagccttcaagtttctgcagcaggagcagtctgtgttccgggagctctgggactggagtgtgtgtgtccctctcctcagaag

SEQ ID NO: 188430 - DNA, 120 bp, Artificial Sequence
  ENSG00000112159_6 (sequence is synthesized)
ccatgacaccttggttcgctggtatacagccaattgtcttgctttggttacctgtatgaatgaagagcacaagttatcatttcttaagaagatatttaatagtgatgaattgatccattt

SEQ ID NO: 188431 - DNA, 120 bp, Artificial Sequence
  ENSG00000112159_7 (sequence is synthesized)
caggttgaggttattagaagaggcccagttgcaggacttggagaaggccttggttttggccaatccagaagtctccctttggcgtaagcagaaggagctgcagtacttacagggacatct

SEQ ID NO: 188432 - DNA, 120 bp, Artificial Sequence
  ENSG00000112159_8 (sequence is synthesized)
tgtttcgtctgacctctcccctagggtgacagctgtttgtggtgtggtgctgcctgggcagctgccagcccctggagagctgggtggtaataggagttcttcacgtgaacaggagctggc

SEQ ID NO: 188433 - DNA, 120 bp, Artificial Sequence
  ENSG00000112159_9 (sequence is synthesized)
ccttaggtcttatgtgctggttgagtctgtctgcaaaagtcttcagaccctggctatggcggttgcttctcagaatgctgtgttgttggaaggaccaataggatgtggcaaaacttcctt

SEQ ID NO: 188434 - DNA, 120 bp, Artificial Sequence
  ENSG00000112159_10 (sequence is synthesized)
agttgaatatttagctgcagtgacaggtagaacaaagcctcctcagcttctcaaagtccagcttggagatcagactgacagtaagatgcttttggggatgtatcgctgcacagatgttcc

SEQ ID NO: 188435 - DNA, 120 bp, Artificial Sequence
  ENSG00000112159_11 (sequence is synthesized)
tggagagtttgtgtggcagcctggcaccctgacacaggcagccacaatgggccactggatccttctggaggatattgactatgcccccttagacgtggtttctgtgctgatccctctctt

SEQ ID NO: 188436 - DNA, 120 bp, Artificial Sequence
  ENSG00000112159_12 (sequence is synthesized)
ggagaatggagagctcttgattcctggccgaggtgactgtctgaaagtggcacctggatttcagttttttgcaaccaggagactcttgagctgtggaggaaattggtatcgaccgctaaa

SEQ ID NO: 188437 - DNA, 120 bp, Artificial Sequence
  ENSG00000112159_13 (sequence is synthesized)
cagtcatgctactttgctagacaaatattggaccaaaattcacctggataacctggataagagagaactgaatgaggttcttcagagcagatatcctagcctattggcagtggttgatca

SEQ ID NO: 188438 - DNA, 120 bp, Artificial Sequence
  ENSG00000112159_14 (sequence is synthesized)
cctgcttgacatttatatccaacttactggagagaaacatcactcttggagtgatagttctgttggatgtgaacaggcacctgaagaagtttcagaagccagaagagaaaacaaaagacc

SEQ ID NO: 188439 - DNA, 120 bp, Artificial Sequence
  ENSG00000112159_15 (sequence is synthesized)
aacccttgagggaagagaattatctctaagggatctgctgaattggtgtaataggattgcccatagctttgacagttcatctttatcagcatcattaaatatttttcaagaggctctaga

SEQ ID NO: 188440 - DNA, 120 bp, Artificial Sequence
  ENSG00000112159_16 (sequence is synthesized)
ctgtttcacagcaatgctttctgagcatacaagcaaactgaaaatggcagaagttattggaagcaaattgaacatttctagaaaaaaggctgaattcttttgtcaactttataaaccaga

SEQ ID NO: 188441 - DNA, 120 bp, Artificial Sequence
  ENSG00000112159_17 (sequence is synthesized)
aattgtgatcaatgagctagatttgcaagtgggtcgagtgcggcttctacggaaacaaagtgaggctgttcacctacagagggagaagttcactttcgctgctacacggccgtcctctgt

SEQ ID NO: 188442 - DNA, 120 bp, Artificial Sequence
  ENSG00000112159_18 (sequence is synthesized)
tctcatcgagcagcttgcagtgtgtgtcagcaaaggggagcctgtgttgctggtgggagagaccgggactggcaaaacctctaccatccaatacttggctcacattacaggccaccgttt

SEQ ID NO: 188443 - DNA, 120 bp, Artificial Sequence
  ENSG00000112159_19 (sequence is synthesized)
gagggttgtcaatatgaatcaacaaagtgatactgcagacttgcttggaggttataaaccggtggaccataagcttatttggctacccttacgggaggcatttgaggaactctttgctca

SEQ ID NO: 188444 - DNA, 120 bp, Artificial Sequence
  ENSG00000112159_20 (sequence is synthesized)
gacattttccaagaaacaaaactttacgttcttggggcacattcagacctgttacagacagaaacggtggcatgatctcctgagactaatgcagcatgtacacaagtctgctgttaacaa

SEQ ID NO: 188445 - DNA, 120 bp, Artificial Sequence
  ENSG00000112159_21 (sequence is synthesized)
ggatggaaaagacagtgaaactgggttactcataaaagagaaatgggaagcatttggtcttagactcaaccatgcccaacaacagatgaaaatgactgaaaataccttattgttcgcatt

SEQ ID NO: 188446 - DNA, 120 bp, Artificial Sequence
  ENSG00000112159_22 (sequence is synthesized)
tgtagagggtacattagctcaggctgtaaagaaaggagagtggatcttgttggatgagattaacttggctgctccagaaatactagaatgtctgagtggtttgcttgaaggatcttctgg

SEQ ID NO: 188447 - DNA, 120 bp, Artificial Sequence
  ENSG00000112159_23 (sequence is synthesized)
atccctggtgttgctggatcgaggagacacagagccactggttcggcatcctgacttccgtttatttgcctgtatgaatccagcaactgatgtaggcaaaagaaatctcccaccaggaat

SEQ ID NO: 188448 - DNA, 120 bp, Artificial Sequence
  ENSG00000112159_24 (sequence is synthesized)
aagaaacaggttcacagaactttatgtagaagaattagaaagcaaagaagacttacaggttcttattgtagattatctgaaaggattgagtgtgaacaagaatacagtgcaaggaatcat

SEQ ID NO: 188449 - DNA, 120 bp, Artificial Sequence
  ENSG00000112159_25 (sequence is synthesized)
aaacttctacacagctttgcggaaagagtctgggaccaaactggtggatggcactggccatagacctcactacagccttcggactctgtgccgggccctgcgatttgcagcctccaatcc

SEQ ID NO: 188450 - DNA, 120 bp, Artificial Sequence
  ENSG00000112159_26 (sequence is synthesized)
atgtggcaacattcagcgctcactctatgagggtttttgtttgggtttcttaacacagcttgacagggcatcacacccaatagttcagaagctcatctgtcaacacattgtccctggcaa

SEQ ID NO: 188451 - DNA, 120 bp, Artificial Sequence
  ENSG00000112159_27 (sequence is synthesized)
tgtcaagagtctgctgaagcagcctattccagagccaaaaggaggtcggcttatccaggttgaaggctactggattgcggtgggagacaaggagcctacaatagatgagacgtacattct

SEQ ID NO: 188452 - DNA, 120 bp, Artificial Sequence
  ENSG00000112159_28 (sequence is synthesized)
gacatcttctgtgaagctgaacctgagagatatagtccgagttgtctctgcaggaacctatccagtgctgattcagggagagacatcagttggtaaaacaagcctgatccagtggctggc

SEQ ID NO: 188453 - DNA, 120 bp, Artificial Sequence
  ENSG00000112159_29 (sequence is synthesized)
tgcagctactggcaaccactgtgtgcgtattaataatcacgaacacacggatattcaggagtacattggttgttacacgtctgactcctcagggaagcttgtctttaaggaaggtgttct

SEQ ID NO: 188454 - DNA, 120 bp, Artificial Sequence
  ENSG00000112159_30 (sequence is synthesized)
tattgatgccatgagaaaaggctattggattattttagatgaattaaatttggcccctactgatgtgttagaggcgctgaataggctgttggatgataaccgtgaattgctagtaacaga

SEQ ID NO: 188455 - DNA, 120 bp, Artificial Sequence
  ENSG00000112159_31 (sequence is synthesized)
aacacaggaagttgttaaagcacaccctcggtttatgctttttgccacccaaaatcccccaggactttatggaggcagaaaggtcctttctagagccttcaggaatcggtttgtggaatt

SEQ ID NO: 188456 - DNA, 120 bp, Artificial Sequence
  ENSG00000112159_32 (sequence is synthesized)
gcactttgatgagttacctagctccgagttggaaacaatcttgcacaagcggtgtagtttgccaccctcctattgcagcaagttggttaaagtcatgctggatcttcagtcctatcgcag

SEQ ID NO: 188457 - DNA, 120 bp, Artificial Sequence
  ENSG00000112159_33 (sequence is synthesized)
aagttcttcagtgtttgctggaaagcagggcttcatcacccttcgtgatctgttccgatgggctgaaagatacagattggctgagccgaccgagaaggagtatgactggctacagcattt

SEQ ID NO: 188458 - DNA, 120 bp, Artificial Sequence
  ENSG00000112159_34 (sequence is synthesized)
agccaatgatggttatatgcttctggcaggtcgagtcaggaagcaggaggaaattgatgtgattcaagaagtccttgagaaacatttcaagaaaaaattgtgtcctcaatctcttttctc

SEQ ID NO: 188459 - DNA, 120 bp, Artificial Sequence
  ENSG00000112159_35 (sequence is synthesized)
caaagaaaatgttctaaaattgctgggtaaattgtctactcagatatccacattggagtgtaactttggccatatcgtgtggactgagggcatgcggagactcgcgatgctagtgggaag

SEQ ID NO: 188460 - DNA, 120 bp, Artificial Sequence
  ENSG00000112159_36 (sequence is synthesized)
ggcattggaatttggtgaacctgtgctgctggttggagacactgggtgtgggaaaactactatctgtcaggtatttgcagccttggcaaatcagaaattatactctgtcagctgccactt

SEQ ID NO: 188461 - DNA, 120 bp, Artificial Sequence
  ENSG00000112159_37 (sequence is synthesized)
acacatggagacatcagacttcctgggtggcctgcggccagtgagacaaaagccaaacgacaaggaagaaattgacacatcaagactctttgagtggcatgatgggcctctggttcaggc

SEQ ID NO: 188462 - DNA, 120 bp, Artificial Sequence
  ENSG00000112159_38 (sequence is synthesized)
catgaaggaggacggctttttcctcttggatgagatctcattggccgatgactctgtcttggaaagactcaacagtgtccttgaagtagaaaagtctctggtattagctgaaaaaggcag

SEQ ID NO: 188463 - DNA, 120 bp, Artificial Sequence
  ENSG00000112159_39 (sequence is synthesized)
tccagaggacaaggatagtgaaatagagctgttgactgctgggaaaaaatttcgtattctagcaaccatgaaccctgggggtgactttggaaaaaaggagctgtctcctgccttaagaaa

SEQ ID NO: 188464 - DNA, 120 bp, Artificial Sequence
  ENSG00000112159_40 (sequence is synthesized)
ccggtttacagaaatatggtgccctcaaagcacaagccgtgaagatttaattcagatcatcagtcataatcttcgtccaggattgtgtctgggcagaatagatcctaaagggtctgacat

SEQ ID NO: 188465 - DNA, 120 bp, Artificial Sequence
  ENSG00000112159_41 (sequence is synthesized)
acctgaagtgatgctggatttcattgactggctgacccaccaagagtttggcagaaagtgtgtggtcagtatcagagatatcctgtcctgggttaacttcatgaacaaaatgggggagga

SEQ ID NO: 188466 - DNA, 120 bp, Artificial Sequence
  ENSG00000112159_42 (sequence is synthesized)
agctgctttgaaaaggccagagatcatctccactgtgacatcttttgtccatgctgcatgcctggtgtacatagatggaataggttcaggggtaacttcctctgggtttggtacagccct

SEQ ID NO: 188467 - DNA, 120 bp, Artificial Sequence
  ENSG00000112159_43 (sequence is synthesized)
tttggcacgaaaagaatgtctgaaatttctaatcaagaggcttgccaagatagtacgacttacagaatatcagaaaaatgagttgaagatttatgacagaatgaaggccaaagaattcac

SEQ ID NO: 188468 - DNA, 120 bp, Artificial Sequence
  ENSG00000112159_44 (sequence is synthesized)
tggaatagataacctttggggaattcatccattttttataccaaggggacctgtcctacacaggaataatattgcagactatgcactcagtgcagggaccactgctatgaatgcacagag

SEQ ID NO: 188469 - DNA, 120 bp, Artificial Sequence
  ENSG00000112159_45 (sequence is synthesized)
gctcttaagagctaccaaactgaagaagcccattctcctggagggttcccctggtgttggcaagacaagtttggtgggagcattagcaaaggcttcaggaaatacccttgttagaatcaa

SEQ ID NO: 188470 - DNA, 120 bp, Artificial Sequence
  ENSG00000112159_46 (sequence is synthesized)
cttatcagagcaaacggacatcacagacctgtttggagcagatctacctgttgaaggtggcaagggaggagagtttgcctggcgtgatggccccttactggcagctttgaaggcaggcca

SEQ ID NO: 188471 - DNA, 120 bp, Artificial Sequence
  ENSG00000112159_47 (sequence is synthesized)
ttgggtggtgttggatgagcttaacctggcttctcagtctgtattggaaggactcaatgcttgttttgaccaccgaggagaaatctatgtgcctgagttaggaatgagctttcaagtgca

SEQ ID NO: 188472 - DNA, 120 bp, Artificial Sequence
  ENSG00000112159_48 (sequence is synthesized)
gcatgaaaagacgaagatttttgggtgtcagaatccctttagacaaggaggtgggaggaaaggcttgcccaggtctttccttaacagattcactcaggtcttcgttgatccccttacagt

SEQ ID NO: 188473 - DNA, 120 bp, Artificial Sequence
  ENSG00000112159_49 (sequence is synthesized)
aattgacatggagttcattgccagtactttgtttccagccattgagaaaaatattgttaagaaaatggttgctttcaataaccaaattgatcatgaagtgactgttgagaagaaatgggg

SEQ ID NO: 188474 - DNA, 120 bp, Artificial Sequence
  ENSG00000112159_50 (sequence is synthesized)
gcaaaaaggaggaccctgggaattcaacctccgggaccttttccgctggtgtcagttgatgctggttgaccagtcccctgggtgttatgatcctggtcagcatgtgtttttggtctatgg

SEQ ID NO: 188475 - DNA, 120 bp, Artificial Sequence
  ENSG00000112159_51 (sequence is synthesized)
tgaaagaatgagaaccgaagaggacaaaaaaaaggtcattgctgtattcaaggatgtgtttggttcaaattccaacccatacatgggaaccagactatttcgtatcactccctatgatgt

SEQ ID NO: 188476 - DNA, 120 bp, Artificial Sequence
  ENSG00000112159_52 (sequence is synthesized)
tcagttgggctactcagtcctttcccgtgggagctgtgttcctcacccgtcccgccatcccctgttgctcctgcaccagtcattccaacccctggagtcaatcatgaagtgtgtgcagat

SEQ ID NO: 188477 - DNA, 120 bp, Artificial Sequence
  ENSG00000112159_53 (sequence is synthesized)
gagctggatggtcatcctggtcgggccagcctctgtgggcaagaccagcctggtccagcttctggcacaccttactggccacacattaaagatcatggctatgaacagtgcaatggatac

SEQ ID NO: 188478 - DNA, 120 bp, Artificial Sequence
  ENSG00000112159_54 (sequence is synthesized)
tactgagctgctgggtggatttgagcaggttgatcttatacgaccttggaggaggctgctagagaaggtggagggaactgtaagggcactgttaagggatagcctccttatcagtgctga

SEQ ID NO: 188479 - DNA, 120 bp, Artificial Sequence
  ENSG00000112159_55 (sequence is synthesized)
tgatgcagaagtagtgctgcgagcctggagtcattttcttctgacatataagcctaagtgtcttggagaaggtggtaaagctatcacgatggagattgtcaacaaactagaagcagtgtt

SEQ ID NO: 188480 - DNA, 120 bp, Artificial Sequence
  ENSG00000112159_56 (sequence is synthesized)
attgcttatgcagcgactcaacaataaaatcaactcatactgcaaggcagagtttgccaaacttgttgaagagttccgaagctttggtgtgaagcttacgcagttggccagtggccatag

SEQ ID NO: 188481 - DNA, 120 bp, Artificial Sequence
  ENSG00000112159_57 (sequence is synthesized)
ccatggcacatttgaatgggttgacagcatgttggttcaggccctgaagtctggagactggcttctgatggacaatgttaacttctgcaacccatcagtgttggatcgtttgaatgcttt

SEQ ID NO: 188482 - DNA, 120 bp, Artificial Sequence
  ENSG00000112159_58 (sequence is synthesized)
gcttgaacccggaggtgtcctcactattagtgagagaggaatgatagatggatccactcccacgataacaccaaatcccaatttcagacttttcctctcgatggatcctgttcatggaga

SEQ ID NO: 188483 - DNA, 120 bp, Artificial Sequence
  ENSG00000112159_59 (sequence is synthesized)
tatatcccgagctatgaggaatcgtggacttgaaatctacatttcaggggaaggggatgcaagcaccccagacaacctggatttgaaagttctgctgcacagccttggattggtggggaa

SEQ ID NO: 188484 - DNA, 120 bp, Artificial Sequence
  ENSG00000112159_60 (sequence is synthesized)
cagtgtatgtgacatcctcttggctttacacacagagacccggagcactgttgtaggttctccaacatcttctgtatcaactctaatccagacagccatactaattgtccagtacctgca

SEQ ID NO: 188485 - DNA, 120 bp, Artificial Sequence
  ENSG00000112159_61 (sequence is synthesized)
gcgagggctgagtttagacagagccttttctgaagcatgctgggaagtatatgtctgttcccagcattcaccagcaaaccggaagcttgtacaggctttactggagaaacatgtttcttc

SEQ ID NO: 188486 - DNA, 120 bp, Artificial Sequence
  ENSG00000112159_62 (sequence is synthesized)
tttgcgagcacatgaaacctggggagactccattcttggcatgggactgtggccagattctgtgccctcagctctctttgctactgaagattcacacctgtctacagtccgaagagatgg

SEQ ID NO: 188487 - DNA, 120 bp, Artificial Sequence
  ENSG00000112159_63 (sequence is synthesized)
acagatcttagtatattgtctcaacaggatgagcatgaaaaccagcagctggacaaggagtcagccttttaccttgcaagacttagagaaaattatgcagtcccccagccctgagaacct

SEQ ID NO: 188488 - DNA, 120 bp, Artificial Sequence
  ENSG00000112159_64 (sequence is synthesized)
gaaattcaatgcagtcgaagtgaatacttactggatcgatgaaccagatgttttggtcatggctgttaaattgctcatagaaagagcaaccaatcaggattggatgctcagagttaaatg

SEQ ID NO: 188489 - DNA, 120 bp, Artificial Sequence
  ENSG00000112159_65 (sequence is synthesized)
gctttatcatttagccaagaatataccgcaggggcttgagtccatacaaattcatttggaagccagtgctgcatctctcaggaatttttactcacattccctctcaggtgcagtcagtaa

SEQ ID NO: 188490 - DNA, 120 bp, Artificial Sequence
  ENSG00000112159_66 (sequence is synthesized)
tgttttcaaaatattacaaccaaatacaacagatgaatttgtgatccctctggatccccgatggaatatgcaggctctggacatgattagaaatttgatggactttgacccacaaacgga

SEQ ID NO: 188491 - DNA, 120 bp, Artificial Sequence
  ENSG00000112159_67 (sequence is synthesized)
ccagcctgaccagctctttgcccttttagaatcagctgcaaacaagacaatcatatatcttgaccgggaaaaacgggtttttactgaagcaaatttggtttctgttggtagcaaaaagct

SEQ ID NO: 188492 - DNA, 120 bp, Artificial Sequence
  ENSG00000112159_68 (sequence is synthesized)
aagagagagtgttttgagaatgtcctttgaattccatcaagatccagaaagctatcacactctgccccatgaaattgtggtcaatcttgctgctttttttgaactttgtgatgcactagt

SEQ ID NO: 188493 - DNA, 120 bp, Artificial Sequence
  ENSG00000112159_69 (sequence is synthesized)
cctgctctgggtacagtcctcccagggaatggtgtctgatgccagtgccaatgagatcttaggttctctgcggtggcgggaccggttctggactgtggccgacacagtaaaagtagatgc

SEQ ID NO: 188494 - DNA, 120 bp, Artificial Sequence
  ENSG00000112159_70 (sequence is synthesized)
cccaggtctggcccttcttgccctccattggcactgggttttaaaacatctggtccaccagatcccccgacttctgatgaattatgaagacaaatattacaaagaagttcagactgtctc

SEQ ID NO: 188495 - DNA, 120 bp, Artificial Sequence
  ENSG00000112159_71 (sequence is synthesized)
agaacatattcagaattgtctggggagccagactggtggcttcgctggtataaagaagttgcagaagttcctgggacgaccgtttccttttaaggacaagctggtggtggagtgtttttc

SEQ ID NO: 188496 - DNA, 120 bp, Artificial Sequence
  ENSG00000112159_72 (sequence is synthesized)
acaactgaaggtccttaacaaagtccttgccatcagggagcagatgtctgcccttggggagagtggatggcaggaagacattaaccgtctccaagtggttgcttctcagtggacattaaa

SEQ ID NO: 188497 - DNA, 120 bp, Artificial Sequence
  ENSG00000112159_73 (sequence is synthesized)
gaaaagtctcctgcaagcctggggactgatcctcagagcaaatattttggaagatgtcagcctagatgaattgaagaattttgtgcatgctcagtgtttagaactgaaagccaaaggact

SEQ ID NO: 188498 - DNA, 120 bp, Artificial Sequence
  ENSG00000112159_74 (sequence is synthesized)
ctcacttggttttctggagaaaaagcatgatgaagcttcctccctgtcccatccagacttgacctccgtaatccacctcaccaggagtgttcagttgtggcctgcaatggagtacctggc

SEQ ID NO: 188499 - DNA, 120 bp, Artificial Sequence
  ENSG00000112159_75 (sequence is synthesized)
tatgctttggcggtacaaagtgacagctgattttatggcacaagcttgtctcagaagatgcagcaaaaatcaacaaccccagataaatgaggagataagtcacctcatctcattttgtct

SEQ ID NO: 188500 - DNA, 120 bp, Artificial Sequence
  ENSG00000112159_76 (sequence is synthesized)
ttatcacacacctgttacacctcaagagcttcgagatctgtggtccttgctgcatcatcagaaggtgtctcctgaagaaattacatctttgtggtccgagttatttaattccatgtttat

SEQ ID NO: 188501 - DNA, 120 bp, Artificial Sequence
  ENSG00000112159_77 (sequence is synthesized)
tctggagcagtactgtgaccacaaatccagagtactggctaatgtggaaccctttgcctggtatgcagcagagggaggcacccaagtctgttttggactccacattgaagggccccggca

SEQ ID NO: 188502 - DNA, 120 bp, Artificial Sequence
  ENSG00000112159_78 (sequence is synthesized)
atctcaatagacccatattctctaagtgctgctttgaagtcttaaccagcagctggagagcaagtccctgggatgtgagtggcctccccattctttcctcctctcacgtgaccctaggag

SEQ ID NO: 188503 - DNA, 120 bp, Artificial Sequence
  ENSG00000112159_79 (sequence is synthesized)
agtgggttgagagaactcagcagctccaggacatcagttcgatgctttggactaacatggctatctcttcagtagcagaattcagacgcacggattcccaactccaggggcaggtgctgt

SEQ ID NO: 188504 - DNA, 120 bp, Artificial Sequence
  ENSG00000112159_80 (sequence is synthesized)
tccggcacctggcaggcctagcagagctgctcccagagtcccggcggcaggagtacatgcagaactgtgagcagctgctgcttgggagcagccaggccttccagcatgtgggccagacac

SEQ ID NO: 188505 - DNA, 120 bp, Artificial Sequence
  ENSG00000112159_81 (sequence is synthesized)
ttggggacatggctggtcaggaggtgctgcccaaggaactgctctgccagttgctcacctccctgcaccactttgttggtgaaggggagagtaagaggagcctgcctgagccagcccagc

SEQ ID NO: 188506 - DNA, 120 bp, Artificial Sequence
  ENSG00000112159_82 (sequence is synthesized)
gtgggagcctctgggtgagcctcggcttgctccagattcagacatggcttccccaggcacgctttgaccctgcggtgaagagggagtacaagctcaattacgtcaaggaagagttacacc

SEQ ID NO: 188507 - DNA, 120 bp, Artificial Sequence
  ENSG00000112159_83 (sequence is synthesized)
aactgcagtgtgaatggaagacccggaacctgtcatcccagctgcagactggaagagacctggaagatgaagtcgttgtcagctactctcatcctcacgtcaggctgcttcgccaaagga

SEQ ID NO: 188508 - DNA, 120 bp, Artificial Sequence
  ENSG00000112159_84 (sequence is synthesized)
tggatcggctggataatttaacctgtcacctgttgaagaaacaggcctttagaccccagctgcctgcctacgagtccctggttcaggagatccaccactacgtcaccagcatcgccaagg

SEQ ID NO: 188509 - DNA, 120 bp, Artificial Sequence
  ENSG00000112159_85 (sequence is synthesized)
cccctgctgttcaggatctgctcacacggcttctgcaggccctccacatagatgggccacggtctgcccaagtagcccagagccttctaaaggaggaggcctcttggcagcagtcacacc

SEQ ID NO: 188510 - DNA, 120 bp, Artificial Sequence
  ENSG00000112159_86 (sequence is synthesized)
accagttccggaagcggctgtcagaggagtacaccttctatccagatgccgtgagcccactgcaggcatccatattgcagttacaacatggcatgaggctggtggcctctgagctccaca

SEQ ID NO: 188511 - DNA, 120 bp, Artificial Sequence
  ENSG00000112159_87 (sequence is synthesized)
cctcactccacagcagtatggttggtgcagacaggctggggaccctggccacagccttgctggctttcccatcggtgggccccaccttcccgacttactatgctcatgcagacactttgt

SEQ ID NO: 188512 - DNA, 120 bp, Artificial Sequence
  ENSG00000112159_88 (sequence is synthesized)
gctcggtgaagtctgaggaggttctacgaggccttgggaagctaatcctcaagcgctcaggaggaaaggagctggaaggcaagggccagaaagcctgtcccactcgggagcagctgctga

SEQ ID NO: 188513 - DNA, 120 bp, Artificial Sequence
  ENSG00000112159_89 (sequence is synthesized)
tgaatgctctcctttacctgcgctcccacgtgttatgcaagggagagttggaccagagggccctgcagctcttcagacatgtgtgtcaggaaatcatcagtgagtgggatgagcaggaac

SEQ ID NO: 188514 - DNA, 120 bp, Artificial Sequence
  ENSG00000112159_90 (sequence is synthesized)
gcatagcccaagagaaggctgagcaggaaagcggcctgtatagatacaggagcaggaactctaggacagccctgagtgaagaggaggaggaagaacgggagttcagaaaacagttccccc

SEQ ID NO: 188515 - DNA, 120 bp, Artificial Sequence
  ENSG00000112159_91 (sequence is synthesized)
tgcatgaaaaggactttgcagatattttggtgcagccaacgttggaggagaacaaaggaacttcagatgggcaagaagaggaagcaggcacaaacccagctctcctctcccagaattcaa

SEQ ID NO: 188516 - DNA, 120 bp, Artificial Sequence
  ENSG00000112159_92 (sequence is synthesized)
tgcaggcagtaatgctgatacaccagcaattgtgtctcaactttgctcgatccctctggtatcaacagactctgccgccacatgaagcaaagcattacctcagcctgtttctgtcttgct

SEQ ID NO: 188517 - DNA, 120 bp, Artificial Sequence
  ENSG00000112159_93 (sequence is synthesized)
atcagactggggcatcgcttgtgacacacttctaccccctgatgggagttgaactgaatgaccgactcttgggcagccaacttttggcctgtaccctctcccataacactctttttgggg

SEQ ID NO: 188518 - DNA, 120 bp, Artificial Sequence
  ENSG00000112159_94 (sequence is synthesized)
aggcaccctcagacctgatggtgaaacctgatgggccctatgacttctaccagcatcccaatgttccagaagcacggcagtgtcaacctgtgcttcaaggtttctcagaggctgtcagtc

SEQ ID NO: 188519 - DNA, 120 bp, Artificial Sequence
  ENSG00000112159_95 (sequence is synthesized)
acttgctacaggactggccagaacacccagcgcttgaacagctcctggttgtaatggacagaattcgtagtttcccactttccagtcccatctcaaagttcctgaatggcttagagatcc

SEQ ID NO: 188520 - DNA, 120 bp, Artificial Sequence
  ENSG00000112159_96 (sequence is synthesized)
ttctggcaaaggcacaggattgggaggaaaatgcaagtcgagctttgtctttgcggaaacatcttgatttgatcagtcagatgatcattcggtggcgtaaactggagctgaactgctggt

SEQ ID NO: 188521 - DNA, 120 bp, Artificial Sequence
  ENSG00000112159_97 (sequence is synthesized)
ccatgagtttggataatactatgaagcgccacaccgagaaatccaccaagcactggttctccatctatcagatgcttgagaagcacatgcaggaacaaacagaagaacaggaagatgaca

SEQ ID NO: 188522 - DNA, 120 bp, Artificial Sequence
  ENSG00000112159_98 (sequence is synthesized)
aacagatgaccttgatgttgctggtcagcacattacaagcatttattgaaggatcctcgctgggagagttccatgtgcgacttcagatgttactggttttccattgtcatgtcttgctga

SEQ ID NO: 188523 - DNA, 120 bp, Artificial Sequence
  ENSG00000112159_99 (sequence is synthesized)
tgccacaggttgaaggaaaggattcactttgcagtgttctatggaatttgtaccattattacaagcaattctttgaccgggtccaggccaaaattgtggaacttcgttcccccctagaaa

SEQ ID NO: 188524 - DNA, 120 bp, Artificial Sequence
  ENSG00000112159_100 (sequence is synthesized)
aagaacttaaagaatttgttaagatttccaagtggaatgatgtcagcttctggtccattaagcaatctgtagaaaagacacacaggacactctttaaattcatgaagaaatttgaagcag

SEQ ID NO: 188525 - DNA, 120 bp, Artificial Sequence
  ENSG00000112159_101 (sequence is synthesized)
tcctgagtgaaccctgccggtcatccctggtggagagtgacaaggaagaacagcctgactttttgcccaggccaacagatggagctgcaagtgaactgtcttccattcagaatctgaaca

SEQ ID NO: 188526 - DNA, 120 bp, Artificial Sequence
  ENSG00000112159_102 (sequence is synthesized)
gggcactgagggagaccctgttagcccaaccagcagctgggcaggccacaattccagagtggtgtcagggcgctgctccttccggcttggaaggggagcttctgcgtcgcttgccaaagc

SEQ ID NO: 188527 - DNA, 120 bp, Artificial Sequence
  ENSG00000112159_103 (sequence is synthesized)
tcaggaaacgcatgaggaagatgtgcctgacgttcatgaaggagagccccctgcctcgccttgtggagggccttgatcagttcacaggtgaagtgatttcctctgtgagtgagctgcaga

SEQ ID NO: 188528 - DNA, 120 bp, Artificial Sequence
  ENSG00000112159_104 (sequence is synthesized)
gcttaaaggtggaaccctctgcagagaaggagaagcagcggtcagaagccaagcacattctcatgcaaaaacagcgagctttgtcagacctctttaaacaccttgcaaaaattggtttgt

SEQ ID NO: 188529 - DNA, 120 bp, Artificial Sequence
  ENSG00000112159_105 (sequence is synthesized)
cgtatcgcaaaggtcttgcttgggcccgttcaaaaaaccctcaagagatgcttcatcttcacccattagatctccagagcgcattgtccatcgtcagcagcactcaggaggctgattcta

SEQ ID NO: 188530 - DNA, 120 bp, Artificial Sequence
  ENSG00000112159_106 (sequence is synthesized)
ggctgcttacagaaatctcgtcttcatgggatggatgccagaagtatttttatcgctctcttgcacggcatgccaggcttaacgcagcactagcaactcctgccaaggaaatgggcatgg

SEQ ID NO: 188531 - DNA, 120 bp, Artificial Sequence
  ENSG00000112159_107 (sequence is synthesized)
gcaacgtggagaggtgcagagggttctcagcacatttgatgaagatgctcgtccgacagcggcgctccctgaccacgctcagtgagcagtggatcatcctcaggaacctcctcagctgtg

SEQ ID NO: 188532 - DNA, 120 bp, Artificial Sequence
  ENSG00000112159_108 (sequence is synthesized)
tgcaagagattcacagcaggctgatggggccccaggcctaccccgtggccttcccccctcaggatggcgtgcagcagtggacagagcgcctgcagcacctggccatgcagtgccagatcc

SEQ ID NO: 188533 - DNA, 120 bp, Artificial Sequence
  ENSG00000112159_109 (sequence is synthesized)
tgcttgagcagctctcctggctcctccagtgctgccccagtgtagggccagctccaggccatggcaatgtccaggtactggggcagcctcctggcccctgcctggaaggaccagaactta

SEQ ID NO: 188534 - DNA, 120 bp, Artificial Sequence
  ENSG00000112159_110 (sequence is synthesized)
gcaagggacaactttgtggagtagtgctggacctaattccttccaatctgagctacccatctccaatacctggaagtcagctgccctctggttgccggatgcggaaacaggatcaccttt

SEQ ID NO: 188535 - DNA, 120 bp, Artificial Sequence
  ENSG00000112159_111 (sequence is synthesized)
ggcaacagtcaactacgagattaacagagatgctaaaaaccattaaaacagtgaaagctgacgtcgacaaaattagacagcagtcttgtgagactctctttcattcttggaaagattttg

SEQ ID NO: 188536 - DNA, 120 bp, Artificial Sequence
  ENSG00000112159_112 (sequence is synthesized)
aagtttgctcttctgcgctgagttgcttgtcccaggtgtcagttcatttgcagggcctagagtccttgttcattcttccagggatggaggttgagcaaagagactcacaaatggcactag

SEQ ID NO: 188537 - DNA, 120 bp, Artificial Sequence
  ENSG00000112159_113 (sequence is synthesized)
ttgaaagtctggaatatgtaagaggagaaattagtaaagccatggctgactttactacctggaagacccatctgcttacttcagatagccaaggaggaaatcaaatgttggacgaaggat

SEQ ID NO: 188538 - DNA, 120 bp, Artificial Sequence
  ENSG00000112159_114 (sequence is synthesized)
ttgtggaagatttttcagagcaaatggaaattgccatccgagccatcctctgtgccatccagaacttagaagaaagaaagaatgaaaaagcagaggagaacactgaccaagcaagcccac

SEQ ID NO: 188539 - DNA, 120 bp, Artificial Sequence
  ENSG00000112159_115 (sequence is synthesized)
aagaagattatgcaggctttgagagactgcaatcaggacatctaacaaaactcttagaggatgacttctgggccgatgtgagcactttgcacgtgcagaaaataatttctgccatctccg

SEQ ID NO: 188540 - DNA, 120 bp, Artificial Sequence
  ENSG00000112159_116 (sequence is synthesized)
agctgttggagaggctgaaatcgtacggtgaggatggcacagcagcaaagcacctgttcttcagccaatcctgttccttgctggtgcgcctggtgccggtcctctccagctactcagacc

SEQ ID NO: 188541 - DNA, 120 bp, Artificial Sequence
  ENSG00000112159_117 (sequence is synthesized)
tcgtcctcttcttcctgaccatgtctttagcaactcaccgtagtactgcaaagctgctctctgtgcttgcccaggtctttacagagcttgcccagaagggattttgcttgcccaaagaat

SEQ ID NO: 188542 - DNA, 120 bp, Artificial Sequence
  ENSG00000112159_118 (sequence is synthesized)
ttatggaagattcagctggagagggagcaactgagttccatgactatgagggaggtggaattggagaaggcgagggcatgaaggatgtgagtgaccagatcggaaatgaagaacaggtgg

SEQ ID NO: 188543 - DNA, 120 bp, Artificial Sequence
  ENSG00000112159_119 (sequence is synthesized)
aagatacatttcagaagggtcaagaaaaagacaaagaggatcctgattcaaaatctgatattaagggcgaggataatgccattgagatgtcggaagattttgatgggaaaatgcatgatg

SEQ ID NO: 188544 - DNA, 120 bp, Artificial Sequence
  ENSG00000112159_120 (sequence is synthesized)
gggagcttgaagaacaagaagaggatgatgagaaatcagatagtgagggcggagacctggataaacacatgggcgatctcaatggtgaggaagctgacaaactagatgagaggctttggg

SEQ ID NO: 188545 - DNA, 120 bp, Artificial Sequence
  ENSG00000112159_121 (sequence is synthesized)
gtgatgatgatgaggaggaagatgaggaggaagaagacaataaaactgaagaaacaggaccaggaatggatgaggaagattctgaacttgttgctaaagatgacaacttggatagtggca

SEQ ID NO: 188546 - DNA, 120 bp, Artificial Sequence
  ENSG00000112159_122 (sequence is synthesized)
attcaaacaaagataaaagccagcaagataagaaggaagaaaaggaagaagcagaagctgatgatggtggacaaggtgaagacaaaattaatgaacaaatagatgagagggactatgatg

SEQ ID NO: 188547 - DNA, 120 bp, Artificial Sequence
  ENSG00000112159_123 (sequence is synthesized)
aaaatgaggtggacccttaccatggcaatcaggaaaaggtgccagaacccgaggctttggaccttccagatgacttgaacctcgacagtgaagacaagaatggtggtgaggacaccgaca

SEQ ID NO: 188548 - DNA, 120 bp, Artificial Sequence
  ENSG00000112159_124 (sequence is synthesized)
atgaagaaggagaagaagagaatcctttggagataaaagaaaaaccagaagaagcaggtcatgaagctgaggaaagaggagagaccgagaccgaccagaacgaaagtcagagtccacagg

SEQ ID NO: 188549 - DNA, 120 bp, Artificial Sequence
  ENSG00000112159_125 (sequence is synthesized)
agcctgaggaaggccccagtgaagatgacaaggcagaaggggaagaggaaatggacacaggagctgatgaccaagatggagatgctgctcagcatcctgaagaacactctgaggagcagc

SEQ ID NO: 188550 - DNA, 120 bp, Artificial Sequence
  ENSG00000112159_126 (sequence is synthesized)
agcagtctgtggaggaaaaagacaaggaagccgatgaagaaggtggagagaatggccctgctgaccaaggtttccagccccaggaggaagaagaacgggaggactctgatacagaggagc

SEQ ID NO: 188551 - DNA, 120 bp, Artificial Sequence
  ENSG00000112159_127 (sequence is synthesized)
aggtgccagaggctttggagaggaaggagcatgcctcctgtgggcagactggtgtggagaacatgcagaacacacaggccatggagctggctggggccgcacctgagaaggagcagggga

SEQ ID NO: 188552 - DNA, 120 bp, Artificial Sequence
  ENSG00000112159_128 (sequence is synthesized)
aagaggaacacggaagtggagctgcagatgcaaaccaggcagaaggccatgaatcgaatttcattgcccagttggcctcccagaagcacaccaggaaaaacacacagagttttaagagga

SEQ ID NO: 188553 - DNA, 120 bp, Artificial Sequence
  ENSG00000112159_129 (sequence is synthesized)
aacctgggcaggctgacaatgaacgttccatgggtgatcacaatgagcgtgtgcacaagaggctgaggactgtggatacggacagccatgccgagcaggggccagctcagcagccccagg

SEQ ID NO: 188554 - DNA, 120 bp, Artificial Sequence
  ENSG00000112159_130 (sequence is synthesized)
cccaggtggaggatgcagatgcattcgagcacattaaacaaggcagtgacgcatacgatgcacagacctatgatgtggccagcaaagaacagcaacagtctgcaaaagactctggcaaag

SEQ ID NO: 188555 - DNA, 120 bp, Artificial Sequence
  ENSG00000112159_131 (sequence is synthesized)
atcaggaagaggaggagatagaggacacccttatggacacagaggagcaggaggagttcaaagcagcagacgtggagcagctgaagccagaggaaatcaagtcgggcaccacagcaccct

SEQ ID NO: 188556 - DNA, 120 bp, Artificial Sequence
  ENSG00000112159_132 (sequence is synthesized)
tgggctttgatgagatggaagtggagatccaaactgttaaaacagaggaagaccaagaccccagaacagacaaagcccataaggagacagaaaatgagaaaccagaaagaagccgagagt

SEQ ID NO: 188557 - DNA, 120 bp, Artificial Sequence
  ENSG00000112159_133 (sequence is synthesized)
ctaccattcatacagctcatcaattcctcatggacacgatcttccagccctttttaaaagatgtcaatgagctaagacaggagctggagagacagctggaaatgtggcagccacgtgaat

SEQ ID NO: 188558 - DNA, 120 bp, Artificial Sequence
  ENSG00000112159_134 (sequence is synthesized)
ctggaaacccagaggaggagaaggttgcagctgagatgtggcagagttacctgatcttaacagcgcctctttcacaacggttatgtgaagagcttcgtctcatattagagcctacccagg

SEQ ID NO: 188559 - DNA, 120 bp, Artificial Sequence
  ENSG00000112159_135 (sequence is synthesized)
cagccaagctgaaaggagactatcgaactgggaaacgactaaacatacggaaagtcattccatacattgctagtcaatttcggaaagacaagatttggcttcgaaggaccaagcccagta

SEQ ID NO: 188560 - DNA, 120 bp, Artificial Sequence
  ENSG00000112159_136 (sequence is synthesized)
aacgccagtatcagatttgtttggctatcgatgactcttctagtatggtagacaatcataccaagcagcttgcatttgaatctttggctgtgattggaaatgctctaaccctcctggaag

SEQ ID NO: 188561 - DNA, 120 bp, Artificial Sequence
  ENSG00000112159_137 (sequence is synthesized)
tgggtcagattgcagtgtgtagttttggagaatctgtaaagctgttacacccatttcatgagcagttcagtgattactctgggtcccagattctacgtctctgcaaattccaacaaaaga

SEQ ID NO: 188562 - DNA, 120 bp, Artificial Sequence
  ENSG00000112159_138 (sequence is synthesized)
aaaccaagattgctcagtttctagagtctgttgccaacatgtttgcagctgctcagcagctctcgcagaacatcagttcagaaactgcacaactcctcctggtagtctctgatgggcgag

SEQ ID NO: 188563 - DNA, 120 bp, Artificial Sequence
  ENSG00000112159_139 (sequence is synthesized)
gccttttccttgagggcaaagaaagagtcctggcagcagttcaggctgcccggaatgcaaatatctttgtcatctttgttgtattggacaatcccagttcacgggattctatcttggaca

SEQ ID NO: 188564 - DNA, 120 bp, Artificial Sequence
  ENSG00000112159_140 (sequence is synthesized)
ttaaagtaccgatatttaaaggacctggagagatgcctgaaatccgatcctacatggaagagttcccattcccatactatatcattcttcgagatgtaaacgcacttcctgagacactca

SEQ ID NO: 188565 - DNA, 120 bp, Artificial Sequence
  ENSG00000112159_141 (sequence is synthesized)
gcgatgccctcagacagtggtttgagttggtgacagcctctgaccacccatagaacagaaagaagagtccaaagtgagacttaactgtggtcagaaggtcacattgcttacccaggtgct

SEQ ID NO: 188566 - DNA, 120 bp, Artificial Sequence
  ENSG00000112159_142 (sequence is synthesized)
cccttttggacaactacaaaaaattttattgtaatatttttattttacaacgtgatcttacagcctacagaatgctctctggctcccggctttgcctgggctgaggtttttataccaaac

SEQ ID NO: 188567 - DNA, 120 bp, Artificial Sequence
  ENSG00000112159_143 (sequence is synthesized)
ctggaagcagcagcaggtgcctgaactcgtaactagagaagagttatccttcttccctgccttggaagccctggcctgggaggaggtcataccccaccgttggagcccagctgcctgttt

SEQ ID NO: 188568 - DNA, 120 bp, Artificial Sequence
  ENSG00000112159_144 (sequence is synthesized)
tcttttgcaggggatctgggcacctgtgccttgaggagatgctgccaggagcatgggactctgacagtcctttgtataaaggactaaagggagctgcccttttgaccctgttctaagctc

SEQ ID NO: 188569 - DNA, 120 bp, Artificial Sequence
  ENSG00000112159_145 (sequence is synthesized)
tgccttgccaagcccatagtgtgtgcccaaaagctgtcaagtggccaagacagctcgtttctggagagtatgagggtgtgttttcttattgtgaaaggaactaccttctcttagagggta

SEQ ID NO: 188570 - DNA, 120 bp, Artificial Sequence
  ENSG00000112159_146 (sequence is synthesized)
ggaagaatgtggtgtgtgtgtgttctcataaagcaactggacattataggtgcccaggtcatctataaaaacgatccttgggctgtgtaaaaatgaagtggcttttcagtatcctctttc

SEQ ID NO: 188571 - DNA, 120 bp, Artificial Sequence
  ENSG00000112159_147 (sequence is synthesized)
acacttgctgcttcgggagactatgcaatgatgggaaggtgattgcccctttatttcattcagtgccatggtccctgttgttgtagtaatttatttgtttagttcatttttttttttctt

SEQ ID NO: 188572 - DNA, 120 bp, Artificial Sequence
  ENSG00000112159_148 (sequence is synthesized)
aacagtcaaggggaagagtgattcctcacactgctttcaagctggactgagccagtctcattctgggaaagaaacgctgtgtccagaactcagcagctccatctattttttccagtcgaa

SEQ ID NO: 188573 - DNA, 120 bp, Artificial Sequence
  ENSG00000112159_149 (sequence is synthesized)
agaaactgatctttaggcagtttttacttggccagaaagcagtgctgaatacttgaaactgtgtgctctgttctacttaatgttctgtcagaatgttcttttgtaggcagtatgtcatga

SEQ ID NO: 188574 - DNA, 120 bp, Artificial Sequence
  ENSG00000112159_150 (sequence is synthesized)
tgtaatcatctatctccttgtctgtttccaagttacactgtgaagtctgcgacccttttgaggtggtcatcaaagacacagattccttgtttaaccaagtgtcccaaagcatgtacctga

SEQ ID NO: 188575 - DNA, 120 bp, Artificial Sequence
  ENSG00000112159_151 (sequence is synthesized)
agttatatcattttttattctaaaaagctatgcagcttatattctgaaaactattaaaacatataccactgttgttgatgtaatttgtgactcttcttaatggaagatgacaggattgta

SEQ ID NO: 188576 - DNA, 120 bp, Artificial Sequence
  ENSG00000112159_152 (sequence is synthesized)
aaaggtatgctaggggactgatcttctctgctggatcagtcagtcagctgttactagttgatgctgtgctaacatgatcccctcctacttccatgttgctcttactacaaaggttatcat

SEQ ID NO: 188577 - DNA, 120 bp, Artificial Sequence
  ENSG00000112159_153 (sequence is synthesized)
ttgcatttatgtccatggtaggctgagctataatatgctggctttgcagcagaatgaaaaggatgagttggtgtagccttataaggaggcttataaaaattaattatcctccataaatga

SEQ ID NO: 188578 - DNA, 120 bp, Artificial Sequence
  ENSG00000112159_154 (sequence is synthesized)
gaccaagcaagcccacaagaagattatggtatgtctgaaatcaggcagaaattagtttcatgcctgatttaatttttgtatttgatgatttatttctgtggctaaatagttaaggatgga

SEQ ID NO: 188579 - DNA, 120 bp, Artificial Sequence
  ENSG00000112164_0 (sequence is synthesized)
atcagtctccgcacgcggttccgcaggtggcagcgatggcccagtcctgaactccccgccatggccggcgcccccggcccgctgcgccttgcgctgctgctgctcgggatggtgggcagg

SEQ ID NO: 188580 - DNA, 120 bp, Artificial Sequence
  ENSG00000112164_1 (sequence is synthesized)
gccggcccccgcccccagggtgccactgtgtccctctgggagacggtgcagaaatggcgagaataccgacgccagtgccagcgctccctgactgaggatccacctcctgccacagacttg

SEQ ID NO: 188581 - DNA, 120 bp, Artificial Sequence
  ENSG00000112164_2 (sequence is synthesized)
ttctgcaaccggaccttcgatgaatacgcctgctggccagatggggagccaggctcgttcgtgaatgtcagctgcccctggtacctgccctgggccagcagtgtgccgcagggccacgtg

SEQ ID NO: 188582 - DNA, 120 bp, Artificial Sequence
  ENSG00000112164_3 (sequence is synthesized)
taccggttctgcacagctgaaggcctctggctgcagaaggacaactccagcctgccctggagggacttgtcggagtgcgaggagtccaagcgaggggaaagaagctccccggaggagcag

SEQ ID NO: 188583 - DNA, 120 bp, Artificial Sequence
  ENSG00000112164_4 (sequence is synthesized)
ctcctgttcctctacatcatctacacggtgggctacgcactctccttctctgctctggttatcgcctctgcgatcctcctcggcttcagacacctgcactgcaccaggaactacatccac

SEQ ID NO: 188584 - DNA, 120 bp, Artificial Sequence
  ENSG00000112164_5 (sequence is synthesized)
ctgaacctgtttgcatccttcatcctgcgagcattgtccgtcttcatcaaggacgcagccctgaagtggatgtatagcacagccgcccagcagcaccagtgggatgggctcctctcctac

SEQ ID NO: 188585 - DNA, 120 bp, Artificial Sequence
  ENSG00000112164_6 (sequence is synthesized)
caggactctctgagctgccgcctggtgtttctgctcatgcagtactgtgtggcggccaattactactggctcttggtggagggcgtgtacctgtacacactgctggccttctcggtctta

SEQ ID NO: 188586 - DNA, 120 bp, Artificial Sequence
  ENSG00000112164_7 (sequence is synthesized)
tctgagcaatggatcttcaggctctacgtgagcataggctggggtgttcccctgctgtttgttgtcccctggggcattgtcaagtacctctatgaggacgagggctgctggaccaggaac

SEQ ID NO: 188587 - DNA, 120 bp, Artificial Sequence
  ENSG00000112164_8 (sequence is synthesized)
tccaacatgaactactggctcattatccggctgcccattctctttgccattggggtgaacttcctcatctttgttcgggtcatctgcatcgtggtatccaaactgaaggccaatctcatg

SEQ ID NO: 188588 - DNA, 120 bp, Artificial Sequence
  ENSG00000112164_9 (sequence is synthesized)
tgcaagacagacatcaaatgcagacttgccaagtccacgctgacactcatccccctgctggggactcatgaggtcatctttgcctttgtgatggacgagcacgcccgggggaccctgcgc

SEQ ID NO: 188589 - DNA, 120 bp, Artificial Sequence
  ENSG00000112164_10 (sequence is synthesized)
ttcatcaagctgtttacagagctctccttcacctccttccaggggctgatggtggccatattatactgctttgtcaacaatgaggtccagctggaatttcggaagagctgggagcgctgg

SEQ ID NO: 188590 - DNA, 120 bp, Artificial Sequence
  ENSG00000112164_11 (sequence is synthesized)
cggcttgagcacttgcacatccagagggacagcagcatgaagcccctcaagtgtcccaccagcagcctgagcagtggagccacggcgggcagcagcatgtacacagccacttgccaggcc

SEQ ID NO: 188591 - DNA, 120 bp, Artificial Sequence
  ENSG00000112164_12 (sequence is synthesized)
tcctgcagctgagactccagcgcctgccctccctggggtccttgctgcaggccgggtggccaatccaggtgggagagacactcccagggacaagggaaggaagggacacacacacacaca

SEQ ID NO: 188592 - DNA, 120 bp, Artificial Sequence
  ENSG00000112164_13 (sequence is synthesized)
cacacacacacacacacacatacatcctgctttccctccccaaacccatcagacaggtaaatgggcagtgcctcctgggaccatggacacattttctcctaggagaagcagcctcctaat

SEQ ID NO: 188593 - DNA, 120 bp, Artificial Sequence
  ENSG00000112164_14 (sequence is synthesized)
taatttgatcacagtggcgagaggagaggaaaaacgatcgctgtgaaaatgaggaggattgcttcttgtgaaaccacaggcccttggggttcccccagacagagccgcaaatcaacccca

SEQ ID NO: 188594 - DNA, 120 bp, Artificial Sequence
  ENSG00000112164_15 (sequence is synthesized)
gactcaaactcaaggtcaacggcttattagtgaaactggggcttgcaagaggaggtggttctgaaagtggctcttctaacctcagccaaacacagagcgggagtgacgggagcctcctct

SEQ ID NO: 188595 - DNA, 120 bp, Artificial Sequence
  ENSG00000112164_16 (sequence is synthesized)
gcttgcatcacttggggtcaccaccctcccctgtcttctctcaaagggaagctgtttgtgtgtctgggttgcttatttccctcatcttgccccctcatctcactgcccagtttctttttg

SEQ ID NO: 188596 - DNA, 120 bp, Artificial Sequence
  ENSG00000112164_17 (sequence is synthesized)
aggggctttgtttgggccactgccagcagctgtttctggaaatggctgtaggtggtgttgagaaagaatgagcattgagacggtgctcgcttctcctccaggtatttgagttgttttggt

SEQ ID NO: 188597 - DNA, 120 bp, Artificial Sequence
  ENSG00000112164_18 (sequence is synthesized)
gcctgcctctgccatgcccagagaatcagggcaggcttgccaccggggaacccagccctggggtatgagctgccaagtctattttaaagacgctcaagaatcctctggggttcatctagg

SEQ ID NO: 188598 - DNA, 120 bp, Artificial Sequence
  ENSG00000112164_19 (sequence is synthesized)
gacacgttaggaatgtccagactgtgggtgtagattacctgccacttccaggagcccagagggccaagagagacattgcctccacctctccttggaaatactttatctgtgaccacacgc

SEQ ID NO: 188599 - DNA, 120 bp, Artificial Sequence
  ENSG00000112164_20 (sequence is synthesized)
tgtctcttgagaatttggatacactctctagctttaggggaccatgaagagactctcttagggaaaccaatagtccccatcagcaccatggaggcaggctccccctgcctttgaaattcc

SEQ ID NO: 188600 - DNA, 120 bp, Artificial Sequence
  ENSG00000112164_21 (sequence is synthesized)
cccacttgggagcttgtatatacttcactcacttttctttattgctgtgaatagtctgtgtgcacaatgggcaattctgacttctcccatctagtggaaatgagcgaaatcatggttgta

SEQ ID NO: 188601 - DNA, 120 bp, Artificial Sequence
  ENSG00000112164_22 (sequence is synthesized)
gtgatgttgtttgggagagtgcagtagtaattgatttgacccactcacacttggagctaattaaggtttgccctgcctgcagcctcccccacaaataatgaacagcagaaagactggacg

SEQ ID NO: 188602 - DNA, 120 bp, Artificial Sequence
  ENSG00000112164_23 (sequence is synthesized)
gggaaacctatcaatcctgcccccagccatggtgaggaagccccaagccatggtgacacacagcagcactgcagatagccagacacatggctatcctagagaggctggcaaggagttcgt

SEQ ID NO: 188603 - DNA, 120 bp, Artificial Sequence
  ENSG00000112164_24 (sequence is synthesized)
ggctgcaaaagaagtttctggagcaagagagagctcgctcttgggagtcaggacctccggggagagcagagggttccgacggattcctttatgagtcagtctctctctcccttttaaatg

SEQ ID NO: 188604 - DNA, 120 bp, Artificial Sequence
  ENSG00000112164_25 (sequence is synthesized)
gtgggaaccctccccaaaacctttccccagacacattctcctgtgcccctcagagaggcatgtgatgtgcaaggaaaataataggatataaaacacatcaagtagaaaatttcttatact

SEQ ID NO: 188605 - DNA, 120 bp, Artificial Sequence
  ENSG00000112164_26 (sequence is synthesized)
tcagcttcagtgaagtgttgtctatgttaataggcaagttgaacctcgggctaaagaaaggaattgtgtggatggctgccttgactgagacaatatgggcaggggggcgttcctgcttcc

SEQ ID NO: 188606 - DNA, 120 bp, Artificial Sequence
  ENSG00000112164_27 (sequence is synthesized)
aacagtgctggtgcaagtgtttaagttttggataaactgaggattttgagaatcattattacattacatagcaacaaagaaacagattgatataatctgtgtgaaataaattgctgagga

SEQ ID NO: 188607 - DNA, 120 bp, Artificial Sequence
  ENSG00000112164_28 (sequence is synthesized)
gagggattgtagggaagaagttgcttagttaggcacctgggaagctcaaatcatttagtttaaactgtaagtagagttgtcttcccaacgagaactggtgattcctgatttcagaaggct

SEQ ID NO: 188608 - DNA, 120 bp, Artificial Sequence
  ENSG00000112164_29 (sequence is synthesized)
catcagacccctacacccaagtcttttaacacggaggaagtttttccttcatgaatacatacaagataccgaactgaagaaatcttttctttgctccaacccccgctcccccggcccccc

SEQ ID NO: 188609 - DNA, 120 bp, Artificial Sequence
  ENSG00000112164_30 (sequence is synthesized)
gaagctattaatagtcattcaaatggcactgcactctttccaagctttcctaagctaaatatggctccaacaggtctgggaactattgaatgcaatgtactctgaaattccagcagctgt

SEQ ID NO: 188610 - DNA, 120 bp, Artificial Sequence
  ENSG00000112164_31 (sequence is synthesized)
ttacatgcctgatgcctaatgccatacgcctggaacttgctgagaactctcggctgcctctgtcctggggtactattgctgaccagcagggtgtaggcgctgcttttgtttgagctttgt

SEQ ID NO: 188611 - DNA, 120 bp, Artificial Sequence
  ENSG00000112164_32 (sequence is synthesized)
agccacaaggtctgatgtctgttgtgaacagcagctgacttcagcactctggccagcttcctcaaacttgttagtggcttgcattttgtcaatttttctttgccatttcagtctttcaag

SEQ ID NO: 188612 - DNA, 120 bp, Artificial Sequence
  ENSG00000112164_33 (sequence is synthesized)
cagctgaatcgcagaactgaaacaaaacacttatattgcaaagttccttccctttaaaatgagcttctggattgcagagatgattttttatggtcttagcgtgcctcatgctgtagacca

SEQ ID NO: 188613 - DNA, 120 bp, Artificial Sequence
  ENSG00000112164_34 (sequence is synthesized)
catcgttggagctctgggagagctctgagcagagaaagaccttggtgatcccccctggcccgatctataggattgaggaatgaggcttgtagaggtggcttgcccaaggtcacaacacta

SEQ ID NO: 188614 - DNA, 120 bp, Artificial Sequence
  ENSG00000112164_35 (sequence is synthesized)
gagggtggttgagctgggccaggacccagacaagcccttttctctcagtctagtgaggcctctgggaaggataggtgaaaactataaatagctgttcaagatactctgagtaaaagtcag

SEQ ID NO: 188615 - DNA, 120 bp, Artificial Sequence
  ENSG00000112164_36 (sequence is synthesized)
tggtgttatctggaatttctactgaagaggaaatacagcagcaaaggtagactcatcagatggtgaaagtgtcatctcctttgtaatttatactggtgagaggaggggaaggatgtgctt

SEQ ID NO: 188616 - DNA, 120 bp, Artificial Sequence
  ENSG00000112164_37 (sequence is synthesized)
tcctatttttacactggtacttcattcatccttgtcttaaacttaagaaatgaaatgcatcagggcacacatatacatagaaacagcacataagccattttggatggcaattccagcact

SEQ ID NO: 188617 - DNA, 120 bp, Artificial Sequence
  ENSG00000112164_38 (sequence is synthesized)
cttttaatggattggcttaatttttttttctgatgcctctctatgtgtttgaaaagttgtattgatagtcacacagagtgtactaaaataacctaaaaggtcttgaacctcccctttacc

SEQ ID NO: 188618 - DNA, 120 bp, Artificial Sequence
  ENSG00000112164_39 (sequence is synthesized)
tctttagaacctctgaatttggagacagctagcaaacggcaactgtagcctagcaaagatggcacagcaccacaaagggcaaatggagtcaactcccttccatgctctgaaggtcttggc

SEQ ID NO: 188619 - DNA, 120 bp, Artificial Sequence
  ENSG00000112164_40 (sequence is synthesized)
cactctcatcagggttggctgtgtactatccagcagctcacagtcaggagacctcccctcctcagtccctcccatttctttcttccgcaaggaaagaacattgcatgtgggcgtgtgtgt

SEQ ID NO: 188620 - DNA, 120 bp, Artificial Sequence
  ENSG00000112164_41 (sequence is synthesized)
gtgtatgtgtgtgcatgtgtgtgtgcatgtttcttctgtgcatagcagcataaagttaggagatgatgactccagaatcatcacacccgctgtgcaggtcataggaccgcacacccgagg

SEQ ID NO: 188621 - DNA, 120 bp, Artificial Sequence
  ENSG00000112164_42 (sequence is synthesized)
ctgggagtctaagtggtagatgcttcctctccatgcgcagacagggctcccattatttgctaatgcctgcgacgtgctcagggaaggcaaaatctattccaaaggtttattttccctctg

SEQ ID NO: 188622 - DNA, 120 bp, Artificial Sequence
  ENSG00000112164_43 (sequence is synthesized)
ttgaattgattctaatctacagtgcttaccctgcttttggctcctacgaggcaaactataaaaattctcaaataaaatacagaggcttactctgcaaagacacctgtgtgaatgacgtgc

SEQ ID NO: 188623 - DNA, 120 bp, Artificial Sequence
  ENSG00000112164_44 (sequence is synthesized)
taaacattcagcagaaaccaaattaggatcaactcttaacattttttccctcttttgtggctggaatgagttcccctgggaaagaaaatcgcccaagtgagaaacttatgccaaccacat

SEQ ID NO: 188624 - DNA, 120 bp, Artificial Sequence
  ENSG00000112164_45 (sequence is synthesized)
tcccatgcccctacagttacctgctggcccagatcagctctctgggtctgcagagggccgagacaggaagcattattaagcagtataatttcaaacactttacttagtgccacagtgtgt

SEQ ID NO: 188625 - DNA, 120 bp, Artificial Sequence
  ENSG00000112164_46 (sequence is synthesized)
ctgcagtatctataagtacttccgctctgtcaaggaatacagactggcaggaagcagataagcataattgttttccaataactccccaagtctcttggaatatatatgtatctgaatctc

SEQ ID NO: 188626 - DNA, 120 bp, Artificial Sequence
  ENSG00000112164_47 (sequence is synthesized)
tcagaggagagagttttctctcttctttggccattttagcctattttccaggaccttgtctagcagtggctccatttttccccgatgcatccaacttccctccctgcactcctcctcccc

SEQ ID NO: 188627 - DNA, 120 bp, Artificial Sequence
  ENSG00000112164_48 (sequence is synthesized)
gacagctgcctcaggaataggtgaccctgctggccatactgtgaatgctgttctttcagctgtgaccaatttgggggtgcagctgagagtgaggtgctgtcagggctgaaaaggacgcac

SEQ ID NO: 188628 - DNA, 120 bp, Artificial Sequence
  ENSG00000112164_49 (sequence is synthesized)
ctcattctacatttggatgtgatgaggagcagggcagccaccagcttggatcctaacttacattgggtggtgcaacctttctgacggggcctgccaaactatcagtaattagccagccta

SEQ ID NO: 188629 - DNA, 120 bp, Artificial Sequence
  ENSG00000112164_50 (sequence is synthesized)
gacaatgtagcatgactaattattgctgtgtcaaagcaattcaggacaagaaaaacatatctaaatgagaatgtttagatgtggtgagaaaagagctctcaccacaatttgaaacatata

SEQ ID NO: 188630 - DNA, 120 bp, Artificial Sequence
  ENSG00000112164_51 (sequence is synthesized)
aaaagttgagttctttgcaggggagccaacgggggcattgagggaagggcaaaattcaccccagacagccagtgcttgatcttgccaaacagtttacactttacctccaaacctgcagtt

SEQ ID NO: 188631 - DNA, 120 bp, Artificial Sequence
  ENSG00000112164_52 (sequence is synthesized)
ctaagctactccactaaaataatcatcccatcctcaaagcagaccaactccagcatcccatcggttctggagggatttgatgcaaacctttaaatgcaccaacagagaggtaagccaagc

SEQ ID NO: 188632 - DNA, 120 bp, Artificial Sequence
  ENSG00000112164_53 (sequence is synthesized)
tctcaggagggacaaagatagatttctatcttcagtgctcttgggggatgtttgctcctcatgagtgtttaaacaagatcatttccaggtgatttcttaacatataaattcctgcaaaat

SEQ ID NO: 188633 - DNA, 120 bp, Artificial Sequence
  ENSG00000112164_54 (sequence is synthesized)
aggaccagcttctataggtagcgaatgtgtaggtcatataattccttgtacagatgtgaatggatgcagactctttcctaatttgccttgtaagccaaataaaagtctgtctctactgtc

SEQ ID NO: 188634 - DNA, 120 bp, Artificial Sequence
  ENSG00000112167_0 (sequence is synthesized)
aggcgcacggcggccggcgcgggccgagcggaggcaactgctgtgcggcctgcgggcgcgcgctcccttatcggccaacggacgcgaggcgcgcgccatggaacagcggttagctgagtt

SEQ ID NO: 188635 - DNA, 120 bp, Artificial Sequence
  ENSG00000112167_1 (sequence is synthesized)
tcgggcggcgcggaaacgggcgggtctggcggcccaaccccctgctgccagtcagggcgcacaaaccccaggagagaaggcggaagcagcagcgactctaaaggcagccccaggctggct

SEQ ID NO: 188636 - DNA, 120 bp, Artificial Sequence
  ENSG00000112167_2 (sequence is synthesized)
aaagcggttcctggtatggaaacctaggcccgcgagtgcccgggcccagcccggcctagttcaggaagcggctcagccccagggcagcacatcagagacaccatggaacacagccattcc

SEQ ID NO: 188637 - DNA, 120 bp, Artificial Sequence
  ENSG00000112167_3 (sequence is synthesized)
tctgccgtcgtgctgggaccagtctttcctgaccaatatcaccttcttgaaggttcttctctggttggtcctgctgggactgtttgtggaactggaatttggcctggcatattttgtcct

SEQ ID NO: 188638 - DNA, 120 bp, Artificial Sequence
  ENSG00000112167_4 (sequence is synthesized)
gtccttgttctattggatgtacgtcgggacacgaggccctgaagagaagaaagagggagagaagagcgcctactctgtgttcaatccaggctgtgaagccatccagggcaccctgactgc

SEQ ID NO: 188639 - DNA, 120 bp, Artificial Sequence
  ENSG00000112167_5 (sequence is synthesized)
agagcagttggagcgcgagttacagttgagacccctggcagggagataggacccagctgtgctgtcatgcagctaacctctgatgtggtcttcctcaccattggctatggatttgatttc

SEQ ID NO: 188640 - DNA, 120 bp, Artificial Sequence
  ENSG00000112167_6 (sequence is synthesized)
aggtgtataggactaagggcagcttgcgggttagctctgtgactgcatagtttttctaccttctttccctgatcttttgctgccatttgatctttgatagttttggtgaaactctctaaa

SEQ ID NO: 188641 - DNA, 120 bp, Artificial Sequence
  ENSG00000112167_7 (sequence is synthesized)
atacattcactgtgggtccgacgcaatttataaaaattatgtactcaagaagggagacctgtttgtttcatttctcatctgtttgggagatgattttagagcactagaaaggcactgggg

SEQ ID NO: 188642 - DNA, 120 bp, Artificial Sequence
  ENSG00000112167_8 (sequence is synthesized)
attttttttttcccggagagtttaggttgcaagttttgggtttcttgtttgtttttgttttgcttcctgctttaattctttaattttcagtcattactggtattgaaaaataaaatatct

SEQ ID NO: 188643 - DNA, 120 bp, Artificial Sequence
  ENSG00000112167_9 (sequence is synthesized)
ttaaaacatctcctcttcagaaataggtccctcttcattgcccatcaccatcttccactctcctattattttgccactactcagtaaaggaaggtaggaagagacaaacgcctaagtgca

SEQ ID NO: 188644 - DNA, 120 bp, Artificial Sequence
  ENSG00000112167_10 (sequence is synthesized)
ggtgtggggagggatttcacaagtggttattaacggccagttcagcaagaagtgttgagtgtgtacaaaggggagggctggaagtgttaactccagacccgttggctgcttgagttgttt

SEQ ID NO: 188645 - DNA, 88 bp, Artificial Sequence
  ENSG00000112167_11 (sequence is synthesized)
ctaaagcagcagtccctaacacagtttttccatggacggggtggtggtggaggatgaaacttccacctcagatcatcaggcattagag

SEQ ID NO: 188646 - DNA, 120 bp, Artificial Sequence
  ENSG00000112167_12 (sequence is synthesized)
atccctcgcatgcgcagttcacaatacggttctaagggctttagagtaagcagctttttcacctgtgggcctctggtgagaaattctgtaaattgtgataatcaggctggattttaatgc

SEQ ID NO: 188647 - DNA, 120 bp, Artificial Sequence
  ENSG00000112167_13 (sequence is synthesized)
taaattgtgataatcaggctggattttaatgctgcttttccagtacaatgttagagtttgggttcattaaaattaggcaaactcccattgggttagggcttctctcattccattttgtgg

SEQ ID NO: 188648 - DNA, 120 bp, Artificial Sequence
  ENSG00000112167_14 (sequence is synthesized)
ctaaccttactgtgtttcagcccttgctgaaaattcttctgatatgtgttgcccttcctcacagccctttggccattgggagtttggctgtccctcagagccatccggtcaagcagatgg

SEQ ID NO: 188649 - DNA, 120 bp, Artificial Sequence
  ENSG00000112167_15 (sequence is synthesized)
tctgttctatctcacagaaaagtcttttcttccatgagttctgtctgaactgaacatgtaaaaagtatgggaaacagatgaatccctattaaacatgaagttttgattgtatttaagata

SEQ ID NO: 188650 - DNA, 120 bp, Artificial Sequence
  ENSG00000112167_16 (sequence is synthesized)
ggccatcaaaataactaaaccatgtcatttggagcaacaaagccactgcggcctccatttgggccaagctctgactgcaatgatgcctctgccccgacccgggcctcgctgtgactgaca

SEQ ID NO: 188651 - DNA, 120 bp, Artificial Sequence
  ENSG00000112167_17 (sequence is synthesized)
atgccgctgcatcttttcagcagtcattgatgaggaagtatctacatcctccttcccactaccagattttgcttggagaaaagcagtttcctgaaataattctgtgacgagcttcttcca

SEQ ID NO: 188652 - DNA, 120 bp, Artificial Sequence
  ENSG00000112167_18 (sequence is synthesized)
ttccaaaggaatgagatcattgaggtggacccagagaaactgaattcagagaaaaacttccattattgagaacccaaacgctgattgccagacaaaaggatgagaggaaatgctggacct

SEQ ID NO: 188653 - DNA, 120 bp, Artificial Sequence
  ENSG00000112167_19 (sequence is synthesized)
tcttcagattctgcctctagtttagaaaagaaaaagtctaatttacaattcatgtcagacaattttgatggcacactgtggcctgtcagagatttctttagcattctatttttttaaatt

SEQ ID NO: 188654 - DNA, 120 bp, Artificial Sequence
  ENSG00000112167_20 (sequence is synthesized)
atttttaatttttgtttttttaattgaaacagctttattgaaataaggtttacatactacagaatttatctcttttaacatacagttcaaagatttttagtaaatttattgagtcatgca

SEQ ID NO: 188655 - DNA, 120 bp, Artificial Sequence
  ENSG00000112167_21 (sequence is synthesized)
accatcactgcaactttagaacgtctctatcactccaagaagacccctcttgcacattagcagttactacccatttccaaccccagccccgcacaaatgtcagtctgctttctatctata

SEQ ID NO: 188656 - DNA, 120 bp, Artificial Sequence
  ENSG00000112175_0 (sequence is synthesized)
actctttagatctctcttgaagagggctggtatatttgtgcctgctggaggtggaattaacagtaagaaggagaaagggattgaatggacttacaggaaggatttcaagtaaattcaggg

SEQ ID NO: 188657 - DNA, 120 bp, Artificial Sequence
  ENSG00000112175_1 (sequence is synthesized)
aaacacatttacttgaatagtacaacctagagtattattttacactaagacgacacaaaagatgttaaagttatcaccaagctgccggacagatatatattccaacaccaaggtgcagat

SEQ ID NO: 188658 - DNA, 120 bp, Artificial Sequence
  ENSG00000112175_2 (sequence is synthesized)
cagcatagatctgtgattcagaaatcaggatttgttttggaaagagctcaagggttgagaagaactcaaaagcaagtgaagattactttgggaactacagtttatcagaagatcaacttt

SEQ ID NO: 188659 - DNA, 120 bp, Artificial Sequence
  ENSG00000112175_3 (sequence is synthesized)
tgctaattcaaataccaaaggcctgattatcataaattcatataggaatgcataggtcatctgatcaaataatattagccgtcttctgctacatcaatgcagcaaaaactcttaacaact

SEQ ID NO: 188660 - DNA, 120 bp, Artificial Sequence
  ENSG00000112175_4 (sequence is synthesized)
gtggataattggaaatctgagtttcagctttcttagaaataactactcttgacatattccaaaatatttaaaataggacaggaaaatcggtgaggatgttgtgctcagaaatgtcactgt

SEQ ID NO: 188661 - DNA, 120 bp, Artificial Sequence
  ENSG00000112175_5 (sequence is synthesized)
catgaaaaataggtaaatttgttttttcagctactgggaaactgtacctcctagaaccttaggttttttttttttttaagaggacaagaaggactaaaaatatcaacttttgcttttgga

SEQ ID NO: 188662 - DNA, 120 bp, Artificial Sequence
  ENSG00000112175_6 (sequence is synthesized)
caaaaatgcatctgactgtatttttacttaagggtattgtgggtttcctctggagctgctgggttctagtgggttatgcaaaaggaggtttgggagacaatcatgttcactccagtttta

SEQ ID NO: 188663 - DNA, 120 bp, Artificial Sequence
  ENSG00000112175_7 (sequence is synthesized)
tttatagaagactacggaaccacgaaagacgggaaatacaaagggaaattctctctatcttgggtttgcctcacagacccagaccattttcacctggaaaacaagcgtcctctgcacctc

SEQ ID NO: 188664 - DNA, 120 bp, Artificial Sequence
  ENSG00000112175_8 (sequence is synthesized)
tctttatgctggatctctacaatgccatgaccaatgaagaaaatcctgaagagtcggagtactcagtaagggcatccttggcagaagagaccagaggggcaagaaagggatacccagcct

SEQ ID NO: 188665 - DNA, 120 bp, Artificial Sequence
  ENSG00000112175_9 (sequence is synthesized)
ctcccaatgggtatcctcgtcgcatacagttatctcggacgactcctctgaccacccagagtcctcctctagccagcctccatgataccaactttctgaatgatgctgacatggtcatga

SEQ ID NO: 188666 - DNA, 120 bp, Artificial Sequence
  ENSG00000112175_10 (sequence is synthesized)
gctttgtcaacttagttgaaagagacaaggatttttctcaccagcgaaggcattacaaagaatttcgatttgatcttacccaaattcctcatggagaggcagtgacagcagctgaattcc

SEQ ID NO: 188667 - DNA, 120 bp, Artificial Sequence
  ENSG00000112175_11 (sequence is synthesized)
ggatatacaaggaccggagcaacaaccgatttgaaaatgaaacaattaagattagcatatatcaaatcatcaaggaatacacaaatagggatgcagatctgttcttgttagacacaagaa

SEQ ID NO: 188668 - DNA, 120 bp, Artificial Sequence
  ENSG00000112175_12 (sequence is synthesized)
aggcccaagctttagatgtgggttggcttgtctttgatatcactgtgaccagcaatcattgggtgattaatccccagaataatttgggcttacagctctgtgcagaaacaggggatggac

SEQ ID NO: 188669 - DNA, 120 bp, Artificial Sequence
  ENSG00000112175_13 (sequence is synthesized)
gcagtatcaacgtaaaatctgctggtcttgtgggaagacagggacctcagtcaaaacaaccattcatggtggccttcttcaaggcgagtgaggtacttcttcgatccgtgagagcagcca

SEQ ID NO: 188670 - DNA, 120 bp, Artificial Sequence
  ENSG00000112175_14 (sequence is synthesized)
acaaacgaaaaaatcaaaaccgcaataaatccagctctcatcaggactcctccagaatgtccagtgttggagattataacacaagtgagcaaaaacaagcctgtaagaagcacgaactct

SEQ ID NO: 188671 - DNA, 120 bp, Artificial Sequence
  ENSG00000112175_15 (sequence is synthesized)
atgtgagcttccgggatctgggatggcaggactggattatagcaccagaaggatacgctgcattttattgtgatggagaatgttcttttccacttaacgcccatatgaatgccaccaacc

SEQ ID NO: 188672 - DNA, 120 bp, Artificial Sequence
  ENSG00000112175_16 (sequence is synthesized)
tcagactctggttcatctgatgtttcctgaccacgtaccaaagccttgttgtgctccaaccaaattaaatgccatctctgttctgtactttgatgacagctccaatgtcattttgaaaaa

SEQ ID NO: 188673 - DNA, 120 bp, Artificial Sequence
  ENSG00000112175_17 (sequence is synthesized)
atatagaaatatggtagtacgctcatgtggctgccactaatattaaataatattgataataacaaaaagatctgtattaaggtttatggctgcaataaaaagcatactttcagacaaacg

SEQ ID NO: 188674 - DNA, 120 bp, Artificial Sequence
  ENSG00000112175_18 (sequence is synthesized)
gggaatttcctaaaattagtctggctcattttgactcttttcctatgtacaatatcatgtatatagtcatttttatttatttaaacgtatatattctcttctgtggaggctttatcaata

SEQ ID NO: 188675 - DNA, 120 bp, Artificial Sequence
  ENSG00000112175_19 (sequence is synthesized)
aaatctatttcataggccactacattatacaatagatcatctagtataattttcaatgggttatgctgagtccattcaattccatttcaacatttttttctaatacaattttacataatt

SEQ ID NO: 188676 - DNA, 120 bp, Artificial Sequence
  ENSG00000112175_20 (sequence is synthesized)
ttctgagattagacagaactcctttgactgtttaatattgtggaaggaaattgaataatttagttatattgtgccaatgaaaaccatgatagaatatttatttagaaataagacttaaaa

SEQ ID NO: 188677 - DNA, 120 bp, Artificial Sequence
  ENSG00000112175_21 (sequence is synthesized)
aaataacaacccaaacaaaaattcttggataaacacaatttctcttttagagttcctgcttcattagataaagtgaaatgttgaactggatttgaataaataaacggtaggcagaacata

SEQ ID NO: 188678 - DNA, 120 bp, Artificial Sequence
  ENSG00000112175_22 (sequence is synthesized)
gaagctgaaagattgcacagaattgttttaactgtttgctttaacagaagtggtgtaactgtaggagcatgttcctttttggcttgtggattgtagattttgcaaagagctcaaagcttc

SEQ ID NO: 188679 - DNA, 120 bp, Artificial Sequence
  ENSG00000112175_23 (sequence is synthesized)
aggagacaggcttgagcctgtgtccatagctttccaagttaacactaattgtagtacaaccttcttacctcaaataaatcatgtctgcctattatctagaacactactgctgcagaattt

SEQ ID NO: 188680 - DNA, 120 bp, Artificial Sequence
  ENSG00000112175_24 (sequence is synthesized)
ttttttcagatttaaaaacctagtccaaaataaagaaacatttacatgtgctccactttcctccccacaggcaagagtcactgcatgcgtaaaatgtacaagagcagaagatgccgaaag

SEQ ID NO: 188681 - DNA, 120 bp, Artificial Sequence
  ENSG00000112175_25 (sequence is synthesized)
aaccattttctttagctctcctttataactgagtttgctgattgatgtgatgcaagggattttatttagaagtaaaagcactgaaactaaactggaggaaattaccaaaagtcccagaat

SEQ ID NO: 188682 - DNA, 120 bp, Artificial Sequence
  ENSG00000112175_26 (sequence is synthesized)
ggctttgacagaattgccatttctaaagaacagctgaaattcatttttcatatctttgagagtgagctcaatgaaaaccttattttgtaaaggcattttgtaaaccttcttccaagcaca

SEQ ID NO: 188683 - DNA, 120 bp, Artificial Sequence
  ENSG00000112175_27 (sequence is synthesized)
tgtgtgtgtgtgtgtgtctgtgtgtgcatgtgtgttcttccctctaaaattaatttattttctctatctattagaatgccctctaaggcctttctttaacacacactgactttttgaaga

SEQ ID NO: 188684 - DNA, 120 bp, Artificial Sequence
  ENSG00000112175_28 (sequence is synthesized)
cctttctttaacacacactgactttttgaagaatgatctttagattgataacttgctatttatggtgactctgtggttaggcttatttaccgttaatctaaagtattcataaagcaccat

SEQ ID NO: 188685 - DNA, 120 bp, Artificial Sequence
  ENSG00000112175_29 (sequence is synthesized)
ttattaatcatccttttggatctttcaaaccaaacgtataccaaaaatgtcttcaaaaatgttatggctttgtttgtaattcgggtatattaaaatgttgttttgaaatacagtttatct

SEQ ID NO: 188686 - DNA, 120 bp, Artificial Sequence
  ENSG00000112175_30 (sequence is synthesized)
taaagaaaatttgacagtaactatattaaggggtacattaagtaatatatttttaattaatggtgtaccattgagagaataagaaatggaagtctattgttttattctttaaatgtgctg

SEQ ID NO: 188687 - DNA, 120 bp, Artificial Sequence
  ENSG00000112175_31 (sequence is synthesized)
gctgtttaaatatatttccatattttaaaatatattaaacagatgctaatttctgctgttcttgatttggttctttatttaaaaggaatacaaaatgtaagtatatcataaattgagaca

SEQ ID NO: 188688 - DNA, 120 bp, Artificial Sequence
  ENSG00000112175_32 (sequence is synthesized)
gaatatttatcaaatgtaaactgtttgtggatcacatgattctttatgttgttcttaattgccaaaattgttttttgtgttgttaataattatctcactattaaatgtgcaaagcaacaa

SEQ ID NO: 188689 - DNA, 120 bp, Artificial Sequence
  ENSG00000112182_0 (sequence is synthesized)
aaacagcgccgagccgccgccgcctcagcagcagcagcagcagcagcagcggcagcagcggccgtgcacgcccgggctgcggtcgcacagcgctaacgtgagcggccgccgccctcgcca

SEQ ID NO: 188690 - DNA, 120 bp, Artificial Sequence
  ENSG00000112182_1 (sequence is synthesized)
ccccgcctgcccactcccgccgccgccccgctctcgctttccccccggcctcccctcgccccttcccctcccccttcccggcgcactcggggggctgggaacgagctgccatgtgatgcg

SEQ ID NO: 188691 - DNA, 120 bp, Artificial Sequence
  ENSG00000112182_2 (sequence is synthesized)
cgtcccctccgcgagctttcggtgacccacgaactgcccacctcgccggctgccgggagggggctgcgagccgggaagacgcggggaagaggaggcggaaaaggacgcaaagttctccgg

SEQ ID NO: 188692 - DNA, 120 bp, Artificial Sequence
  ENSG00000112182_3 (sequence is synthesized)
cgagcgcgttcgttcacatagctcccagttttaacatttcgccacctactgaagacatcatttgggaccaagctgatgagcccttgaagcacagcagataagagtgttgctgttgatcat

SEQ ID NO: 188693 - DNA, 120 bp, Artificial Sequence
  ENSG00000112182_4 (sequence is synthesized)
ctttgcctgggaagttgaatgataaagccagaagaaagcatgctttctgatcatttgcagctgtctgcttcagaaagtgagggctccaggaatgaggagaatcttcaagaacttcctcgc

SEQ ID NO: 188694 - DNA, 120 bp, Artificial Sequence
  ENSG00000112182_5 (sequence is synthesized)
actgtgacatgtctgatcccttgctcccatccctgcagcatgaacaaggtggacactcactgacctgtcacaaggttgccccacaaaactttggggtccatgtctgaatggattgccaga

SEQ ID NO: 188695 - DNA, 120 bp, Artificial Sequence
  ENSG00000112182_6 (sequence is synthesized)
gccttctcatctctcccttcgcccagttccctgcatcctaagactcgaaggcagcacaggacctggaaaaattacatggtgtgaacggcatgtctgtggatgagaagcctgactccccca

SEQ ID NO: 188696 - DNA, 120 bp, Artificial Sequence
  ENSG00000112182_7 (sequence is synthesized)
tgtatgtgtatgagtccacagtccactgcaccaacatcctcctgggcctcaatgaccagcggaaaaaggatattctctgtgacgtgactttgatcgtggagaggaaggagttccgggccc

SEQ ID NO: 188697 - DNA, 120 bp, Artificial Sequence
  ENSG00000112182_8 (sequence is synthesized)
accgggctgtgctggccgcatgcagtgaatatttttggcaggcgctggttggacagacaaaaaatgatttggtggtcagcttgcctgaggaggtcacagccaggggctttgggccgctgt

SEQ ID NO: 188698 - DNA, 120 bp, Artificial Sequence
  ENSG00000112182_9 (sequence is synthesized)
tacagtttgcctacactgccaagctgttactcagcagagaaaacatccgcgaggtcatccgctgtgctgagttcctgcgcatgcacaacctggaggactcctgcttcagcttcctgcaga

SEQ ID NO: 188699 - DNA, 120 bp, Artificial Sequence
  ENSG00000112182_10 (sequence is synthesized)
cccagctcctgaacagtgaggatggcctgtttgtgtgccggaaggatgctgcgtgccagcgcccacacgaggactgcgagaactctgcaggagaggaggaggatgaagaggaggagacga

SEQ ID NO: 188700 - DNA, 120 bp, Artificial Sequence
  ENSG00000112182_11 (sequence is synthesized)
tggattcagagacggccaagatggcttgccccagggaccagatgcttccagagcccatcagctttgaggccgccgccatccccgtagcagagaaggaagaagccctgctgcccgagcctg

SEQ ID NO: 188701 - DNA, 120 bp, Artificial Sequence
  ENSG00000112182_12 (sequence is synthesized)
acgtgcccacagacaccaaggagagctcagaaaaggacgcgttaacgcagtaccccagatacaagaaataccagcttgcatgtaccaagaatgtctataatgcatcatcacacagtacct

SEQ ID NO: 188702 - DNA, 120 bp, Artificial Sequence
  ENSG00000112182_13 (sequence is synthesized)
caggttttgcaagcacattccgggaagataactctagcaacagcctcaagccggggcttgccagggggcagattaaaagtgagccgcccagtgaagagaatgaggaagagagcatcacgc

SEQ ID NO: 188703 - DNA, 120 bp, Artificial Sequence
  ENSG00000112182_14 (sequence is synthesized)
tctgcctgtctggagatgagcctgacgccaaggacagagcgggggatgtcgagatggaccggaaacagcccagccctgcccctacccccacggccccagctggggccgcctgcctggaga

SEQ ID NO: 188704 - DNA, 120 bp, Artificial Sequence
  ENSG00000112182_15 (sequence is synthesized)
gatccaggagcgtggcctcgccctcctgcttaaggtctctgttcagcataacgaaaagtgtggagctgtctggcctgcccagtacatctcagcagcactttgccaggagtccagcctgcc

SEQ ID NO: 188705 - DNA, 120 bp, Artificial Sequence
  ENSG00000112182_16 (sequence is synthesized)
cttttgacaaggggatcactcagggtgaccttaaaactgactacacccctttcacagggaattatggacagccccacgtgggccagaaggaggtgtccaacttcaccatggggtcgcccc

SEQ ID NO: 188706 - DNA, 120 bp, Artificial Sequence
  ENSG00000112182_17 (sequence is synthesized)
tcagggggcctgggttggaggctctctgtaaacaggagggagagctggaccggaggagcgtgatcttctcctccagcgcttgtgaccaagtgagcacctcggtgcattcttattctgggg

SEQ ID NO: 188707 - DNA, 120 bp, Artificial Sequence
  ENSG00000112182_18 (sequence is synthesized)
tgagcagtttggacaaagacctctctgagccggtgccaaagggtctgtgggtgggagccggccagtccctccccagctcgcaggcctactcccacggtgggctgatggccgaccacttgc

SEQ ID NO: 188708 - DNA, 120 bp, Artificial Sequence
  ENSG00000112182_19 (sequence is synthesized)
caggaaggatgcggcccaacaccagctgcccggtaccaatcaaagtctgccctcgctcaccccccttggagaccaggaccaggacttccagctcctgctcttcctattcctacgcggagg

SEQ ID NO: 188709 - DNA, 120 bp, Artificial Sequence
  ENSG00000112182_20 (sequence is synthesized)
acgggagcgggggctcaccctgcagcctccctctctgtgagttctcctcctcgccctgttcccagggagccagattccttgccacagaacatcaggaaccaggcctgatgggagatggaa

SEQ ID NO: 188710 - DNA, 120 bp, Artificial Sequence
  ENSG00000112182_21 (sequence is synthesized)
tgtacaaccaagtgcggccccaaattaaatgtgagcagtcttatggaaccaactccagtgacgaatccggatcgttctcggaagcagacagtgagtcgtgtcctgtgcaggacaggggcc
